United States Patent Application Publication US 2014/0004565 A1 - sequence listing, part 29

SEQ ID NO: 620474 - RNA, 19 nt, Artificial Sequence
  Description of Artificial Sequence: Synthetic oligonucleotide
agccgcagagccucuaguc

SEQ ID NO: 620475 - RNA, 19 nt, Artificial Sequence
  Description of Artificial Sequence: Synthetic oligonucleotide
ugcguccauucauuuaggc

SEQ ID NO: 620476 - RNA, 19 nt, Artificial Sequence
  Description of Artificial Sequence: Synthetic oligonucleotide
guuguuccgggauuggguc

SEQ ID NO: 620477 - RNA, 19 nt, Artificial Sequence
  Description of Artificial Sequence: Synthetic oligonucleotide
ucuucccacaugccuaggu

SEQ ID NO: 620478 - RNA, 19 nt, Artificial Sequence
  Description of Artificial Sequence: Synthetic oligonucleotide
ucgggugaacuacccuugg

SEQ ID NO: 620479 - RNA, 19 nt, Artificial Sequence
  Description of Artificial Sequence: Synthetic oligonucleotide
aaccuccuugcuaaggaug

SEQ ID NO: 620480 - RNA, 19 nt, Artificial Sequence
  Description of Artificial Sequence: Synthetic oligonucleotide
ugaccuucgggugaacuac

SEQ ID NO: 620481 - RNA, 19 nt, Artificial Sequence
  Description of Artificial Sequence: Synthetic oligonucleotide
agucuuagcuuuucucgga

SEQ ID NO: 620482 - RNA, 19 nt, Artificial Sequence
  Description of Artificial Sequence: Synthetic oligonucleotide
cuagguuguuccacucuag

SEQ ID NO: 620483 - RNA, 19 nt, Artificial Sequence
  Description of Artificial Sequence: Synthetic oligonucleotide
cuucgucucgccuauauua

SEQ ID NO: 620484 - RNA, 19 nt, Artificial Sequence
  Description of Artificial Sequence: Synthetic oligonucleotide
ucuggcuauuucuucucgu

SEQ ID NO: 620485 - RNA, 19 nt, Artificial Sequence
  Description of Artificial Sequence: Synthetic oligonucleotide
uggaugggcaggugugccg

SEQ ID NO: 620486 - RNA, 19 nt, Artificial Sequence
  Description of Artificial Sequence: Synthetic oligonucleotide
ucggagagaagcguucuca

SEQ ID NO: 620487 - RNA, 19 nt, Artificial Sequence
  Description of Artificial Sequence: Synthetic oligonucleotide
ucucaggaugucgccaggg

SEQ ID NO: 620488 - RNA, 19 nt, Artificial Sequence
  Description of Artificial Sequence: Synthetic oligonucleotide
ucggagguccagcuggcgc

SEQ ID NO: 620489 - RNA, 19 nt, Artificial Sequence
  Description of Artificial Sequence: Synthetic oligonucleotide
ucccacaugccuagguugu

SEQ ID NO: 620490 - RNA, 19 nt, Artificial Sequence
  Description of Artificial Sequence: Synthetic oligonucleotide
uuccuagagccucggcucc

SEQ ID NO: 620491 - RNA, 19 nt, Artificial Sequence
  Description of Artificial Sequence: Synthetic oligonucleotide
ccugcguccauucauuuag

SEQ ID NO: 620492 - RNA, 19 nt, Artificial Sequence
  Description of Artificial Sequence: Synthetic oligonucleotide
agaggagaccccugaacgu

SEQ ID NO: 620493 - RNA, 19 nt, Artificial Sequence
  Description of Artificial Sequence: Synthetic oligonucleotide
ugugcacuucgucucgccu

SEQ ID NO: 620494 - RNA, 19 nt, Artificial Sequence
  Description of Artificial Sequence: Synthetic oligonucleotide
ggauugggucuucugacag

SEQ ID NO: 620495 - RNA, 19 nt, Artificial Sequence
  Description of Artificial Sequence: Synthetic oligonucleotide
uggcgcagggugcuauugg

SEQ ID NO: 620496 - RNA, 19 nt, Artificial Sequence
  Description of Artificial Sequence: Synthetic oligonucleotide
gcguccauucauuuaggcg

SEQ ID NO: 620497 - RNA, 19 nt, Artificial Sequence
  Description of Artificial Sequence: Synthetic oligonucleotide
aacagccgaaucuucucuu

SEQ ID NO: 620498 - RNA, 19 nt, Artificial Sequence
  Description of Artificial Sequence: Synthetic oligonucleotide
gcauuuugcaggaagcuug

SEQ ID NO: 620499 - RNA, 19 nt, Artificial Sequence
  Description of Artificial Sequence: Synthetic oligonucleotide
cauccaagcgcuccucagc

SEQ ID NO: 620500 - RNA, 19 nt, Artificial Sequence
  Description of Artificial Sequence: Synthetic oligonucleotide
auguuauuccagcgcaggu

SEQ ID NO: 620501 - RNA, 19 nt, Artificial Sequence
  Description of Artificial Sequence: Synthetic oligonucleotide
ucgcucacugagcagugcu

SEQ ID NO: 620502 - RNA, 19 nt, Artificial Sequence
  Description of Artificial Sequence: Synthetic oligonucleotide
uuguuucggagguccagcu

SEQ ID NO: 620503 - RNA, 19 nt, Artificial Sequence
  Description of Artificial Sequence: Synthetic oligonucleotide
cucgccuauauuaguggug

SEQ ID NO: 620504 - RNA, 19 nt, Artificial Sequence
  Description of Artificial Sequence: Synthetic oligonucleotide
ugguguugcccuucagggc

SEQ ID NO: 620505 - RNA, 19 nt, Artificial Sequence
  Description of Artificial Sequence: Synthetic oligonucleotide
uucucggagagaagcguuc

SEQ ID NO: 620506 - RNA, 19 nt, Artificial Sequence
  Description of Artificial Sequence: Synthetic oligonucleotide
guguugcuccuccaagcgg

SEQ ID NO: 620507 - RNA, 19 nt, Artificial Sequence
  Description of Artificial Sequence: Synthetic oligonucleotide
uaguggugaccuucgggug

SEQ ID NO: 620508 - RNA, 19 nt, Artificial Sequence
  Description of Artificial Sequence: Synthetic oligonucleotide
gugacgggucaugugaucc

SEQ ID NO: 620509 - RNA, 19 nt, Artificial Sequence
  Description of Artificial Sequence: Synthetic oligonucleotide
uguuccgcuguggucagca

SEQ ID NO: 620510 - RNA, 19 nt, Artificial Sequence
  Description of Artificial Sequence: Synthetic oligonucleotide
auucauuuaggcggacuca

SEQ ID NO: 620511 - RNA, 19 nt, Artificial Sequence
  Description of Artificial Sequence: Synthetic oligonucleotide
uauuccagcgcagguccag

SEQ ID NO: 620512 - RNA, 19 nt, Artificial Sequence
  Description of Artificial Sequence: Synthetic oligonucleotide
guugcuuaucaauggucuc

SEQ ID NO: 620513 - RNA, 19 nt, Artificial Sequence
  Description of Artificial Sequence: Synthetic oligonucleotide
uuucggagguccagcuggc

SEQ ID NO: 620514 - RNA, 19 nt, Artificial Sequence
  Description of Artificial Sequence: Synthetic oligonucleotide
aguccuguauuuccacccu

SEQ ID NO: 620515 - RNA, 19 nt, Artificial Sequence
  Description of Artificial Sequence: Synthetic oligonucleotide
gagcuuagauucccgaucu

SEQ ID NO: 620516 - RNA, 19 nt, Artificial Sequence
  Description of Artificial Sequence: Synthetic oligonucleotide
agccugaauagcacggauc

SEQ ID NO: 620517 - RNA, 19 nt, Artificial Sequence
  Description of Artificial Sequence: Synthetic oligonucleotide
uguuccacucuagggugag

SEQ ID NO: 620518 - RNA, 19 nt, Artificial Sequence
  Description of Artificial Sequence: Synthetic oligonucleotide
ggaugcgugagaucucugc

SEQ ID NO: 620519 - RNA, 19 nt, Artificial Sequence
  Description of Artificial Sequence: Synthetic oligonucleotide
aaaacgcagugagccgguc

SEQ ID NO: 620520 - RNA, 19 nt, Artificial Sequence
  Description of Artificial Sequence: Synthetic oligonucleotide
guuccuggcuuugaugagc

SEQ ID NO: 620521 - RNA, 19 nt, Artificial Sequence
  Description of Artificial Sequence: Synthetic oligonucleotide
ugcacuucgucucgccuau

SEQ ID NO: 620522 - RNA, 19 nt, Artificial Sequence
  Description of Artificial Sequence: Synthetic oligonucleotide
ucugucgaaggagcuuucc

SEQ ID NO: 620523 - RNA, 19 nt, Artificial Sequence
  Description of Artificial Sequence: Synthetic oligonucleotide
ugacgcuuuugaaccccag

SEQ ID NO: 620524 - RNA, 19 nt, Artificial Sequence
  Description of Artificial Sequence: Synthetic oligonucleotide
ucgaaggagcuuuccuaga

SEQ ID NO: 620525 - RNA, 19 nt, Artificial Sequence
  Description of Artificial Sequence: Synthetic oligonucleotide
uccaagcgggccugguucc

SEQ ID NO: 620526 - RNA, 19 nt, Artificial Sequence
  Description of Artificial Sequence: Synthetic oligonucleotide
aggagcuuagauucccgau

SEQ ID NO: 620527 - RNA, 19 nt, Artificial Sequence
  Description of Artificial Sequence: Synthetic oligonucleotide
cuccaagcgggccugguuc

SEQ ID NO: 620528 - RNA, 19 nt, Artificial Sequence
  Description of Artificial Sequence: Synthetic oligonucleotide
cuacccuuggaugggcagg

SEQ ID NO: 620529 - RNA, 19 nt, Artificial Sequence
  Description of Artificial Sequence: Synthetic oligonucleotide
ugccuuugaaaaugagaua

SEQ ID NO: 620530 - RNA, 19 nt, Artificial Sequence
  Description of Artificial Sequence: Synthetic oligonucleotide
gaggagcuuagauucccga

SEQ ID NO: 620531 - RNA, 19 nt, Artificial Sequence
  Description of Artificial Sequence: Synthetic oligonucleotide
cucccaaaacgcagugagc

SEQ ID NO: 620532 - RNA, 19 nt, Artificial Sequence
  Description of Artificial Sequence: Synthetic oligonucleotide
caggugacgggucauguga

SEQ ID NO: 620533 - RNA, 19 nt, Artificial Sequence
  Description of Artificial Sequence: Synthetic oligonucleotide
gaugcgugagaucucugcu

SEQ ID NO: 620534 - RNA, 19 nt, Artificial Sequence
  Description of Artificial Sequence: Synthetic oligonucleotide
ugacgggucaugugaucca

SEQ ID NO: 620535 - RNA, 19 nt, Artificial Sequence
  Description of Artificial Sequence: Synthetic oligonucleotide
uuauuccagcgcaggucca

SEQ ID NO: 620536 - RNA, 19 nt, Artificial Sequence
  Description of Artificial Sequence: Synthetic oligonucleotide
acccuggucaccucagcca

SEQ ID NO: 620537 - RNA, 19 nt, Artificial Sequence
  Description of Artificial Sequence: Synthetic oligonucleotide
gcuuagauucccgaucugc

SEQ ID NO: 620538 - RNA, 19 nt, Artificial Sequence
  Description of Artificial Sequence: Synthetic oligonucleotide
ugccguuucuggcuauuuc

SEQ ID NO: 620539 - RNA, 19 nt, Artificial Sequence
  Description of Artificial Sequence: Synthetic oligonucleotide
uaggcggacucaaggcucu

SEQ ID NO: 620540 - RNA, 19 nt, Artificial Sequence
  Description of Artificial Sequence: Synthetic oligonucleotide
augccuagguuguuccacu

SEQ ID NO: 620541 - RNA, 19 nt, Artificial Sequence
  Description of Artificial Sequence: Synthetic oligonucleotide
cagcucaacucucacccug

SEQ ID NO: 620542 - RNA, 19 nt, Artificial Sequence
  Description of Artificial Sequence: Synthetic oligonucleotide
cacagcucucaggaugucg

SEQ ID NO: 620543 - RNA, 19 nt, Artificial Sequence
  Description of Artificial Sequence: Synthetic oligonucleotide
cuccugccuggucagaaac

SEQ ID NO: 620544 - RNA, 19 nt, Artificial Sequence
  Description of Artificial Sequence: Synthetic oligonucleotide
ugcagcugacgcuuuugaa

SEQ ID NO: 620545 - RNA, 19 nt, Artificial Sequence
  Description of Artificial Sequence: Synthetic oligonucleotide
ucaacucggcagauguguu

SEQ ID NO: 620546 - RNA, 19 nt, Artificial Sequence
  Description of Artificial Sequence: Synthetic oligonucleotide
cuucaacucggcagaugug

SEQ ID NO: 620547 - RNA, 19 nt, Artificial Sequence
  Description of Artificial Sequence: Synthetic oligonucleotide
uuguuccgggauugggucu

SEQ ID NO: 620548 - RNA, 19 nt, Artificial Sequence
  Description of Artificial Sequence: Synthetic oligonucleotide
cugcguccauucauuuagg

SEQ ID NO: 620549 - RNA, 19 nt, Artificial Sequence
  Description of Artificial Sequence: Synthetic oligonucleotide
ccaaaacgcagugagccgg

SEQ ID NO: 620550 - RNA, 19 nt, Artificial Sequence
  Description of Artificial Sequence: Synthetic oligonucleotide
ccaauguuggcagaacccc

SEQ ID NO: 620551 - RNA, 19 nt, Artificial Sequence
  Description of Artificial Sequence: Synthetic oligonucleotide
ugcaggcaaguacccugag

SEQ ID NO: 620552 - RNA, 19 nt, Artificial Sequence
  Description of Artificial Sequence: Synthetic oligonucleotide
acagccgcagagccucuag

SEQ ID NO: 620553 - RNA, 19 nt, Artificial Sequence
  Description of Artificial Sequence: Synthetic oligonucleotide
uucaucccggaugcgugag

SEQ ID NO: 620554 - RNA, 19 nt, Artificial Sequence
  Description of Artificial Sequence: Synthetic oligonucleotide
accuucgggugaacuaccc

SEQ ID NO: 620555 - RNA, 19 nt, Artificial Sequence
  Description of Artificial Sequence: Synthetic oligonucleotide
ucgucucgccuauauuagu

SEQ ID NO: 620556 - RNA, 19 nt, Artificial Sequence
  Description of Artificial Sequence: Synthetic oligonucleotide
agcucaacucucacccugg

SEQ ID NO: 620557 - RNA, 19 nt, Artificial Sequence
  Description of Artificial Sequence: Synthetic oligonucleotide
caauguuggcagaacccca

SEQ ID NO: 620558 - RNA, 19 nt, Artificial Sequence
  Description of Artificial Sequence: Synthetic oligonucleotide
accaaguauaaaaguccug

SEQ ID NO: 620559 - RNA, 19 nt, Artificial Sequence
  Description of Artificial Sequence: Synthetic oligonucleotide
uagcacggaucuucaacuc

SEQ ID NO: 620560 - RNA, 19 nt, Artificial Sequence
  Description of Artificial Sequence: Synthetic oligonucleotide
gaacguaagccaggacagc

SEQ ID NO: 620561 - RNA, 19 nt, Artificial Sequence
  Description of Artificial Sequence: Synthetic oligonucleotide
uguuggugcgggcuugguu

SEQ ID NO: 620562 - RNA, 19 nt, Artificial Sequence
  Description of Artificial Sequence: Synthetic oligonucleotide
ucucggagagaagcguucu

SEQ ID NO: 620563 - RNA, 19 nt, Artificial Sequence
  Description of Artificial Sequence: Synthetic oligonucleotide
cacggaucuucaacucggc

SEQ ID NO: 620564 - RNA, 19 nt, Artificial Sequence
  Description of Artificial Sequence: Synthetic oligonucleotide
gccuauauuaguggugacc

SEQ ID NO: 620565 - RNA, 19 nt, Artificial Sequence
  Description of Artificial Sequence: Synthetic oligonucleotide
gcacggaucuucaacucgg

SEQ ID NO: 620566 - RNA, 19 nt, Artificial Sequence
  Description of Artificial Sequence: Synthetic oligonucleotide
acggcccaucuguuccugc

SEQ ID NO: 620567 - RNA, 19 nt, Artificial Sequence
  Description of Artificial Sequence: Synthetic oligonucleotide
cauucccgaucacuuucag

SEQ ID NO: 620568 - RNA, 19 nt, Artificial Sequence
  Description of Artificial Sequence: Synthetic oligonucleotide
aucccuugccugugccaac

SEQ ID NO: 620569 - RNA, 19 nt, Artificial Sequence
  Description of Artificial Sequence: Synthetic oligonucleotide
aggaugucgccagggaugu

SEQ ID NO: 620570 - RNA, 19 nt, Artificial Sequence
  Description of Artificial Sequence: Synthetic oligonucleotide
auuccagcgcagguccagg

SEQ ID NO: 620571 - RNA, 19 nt, Artificial Sequence
  Description of Artificial Sequence: Synthetic oligonucleotide
gaacuacccuuggaugggc

SEQ ID NO: 620572 - RNA, 19 nt, Artificial Sequence
  Description of Artificial Sequence: Synthetic oligonucleotide
gagaagcguucucacucuc

SEQ ID NO: 620573 - RNA, 19 nt, Artificial Sequence
  Description of Artificial Sequence: Synthetic oligonucleotide
gugccggugagcaccaaug

SEQ ID NO: 620574 - RNA, 19 nt, Artificial Sequence
  Description of Artificial Sequence: Synthetic oligonucleotide
agcaccaauguuggcagaa

SEQ ID NO: 620575 - RNA, 19 nt, Artificial Sequence
  Description of Artificial Sequence: Synthetic oligonucleotide
auggacuugcucugucgaa

SEQ ID NO: 620576 - RNA, 19 nt, Artificial Sequence
  Description of Artificial Sequence: Synthetic oligonucleotide
gccuuugaaaaugagauau

SEQ ID NO: 620577 - RNA, 19 nt, Artificial Sequence
  Description of Artificial Sequence: Synthetic oligonucleotide
agccucuagucucuguauu

SEQ ID NO: 620578 - RNA, 19 nt, Artificial Sequence
  Description of Artificial Sequence: Synthetic oligonucleotide
ggucagccugcauacggcc

SEQ ID NO: 620579 - RNA, 19 nt, Artificial Sequence
  Description of Artificial Sequence: Synthetic oligonucleotide
gacuugcucugucgaagga

SEQ ID NO: 620580 - RNA, 19 nt, Artificial Sequence
  Description of Artificial Sequence: Synthetic oligonucleotide
gagccucggcuccuguagc

SEQ ID NO: 620581 - RNA, 19 nt, Artificial Sequence
  Description of Artificial Sequence: Synthetic oligonucleotide
cugcauacggcccaucugu

SEQ ID NO: 620582 - RNA, 19 nt, Artificial Sequence
  Description of Artificial Sequence: Synthetic oligonucleotide
cucaacucucacccugguc

SEQ ID NO: 620583 - RNA, 19 nt, Artificial Sequence
  Description of Artificial Sequence: Synthetic oligonucleotide
guuccccuagguccugggc

SEQ ID NO: 620584 - RNA, 19 nt, Artificial Sequence
  Description of Artificial Sequence: Synthetic oligonucleotide
aacuacccuuggaugggca

SEQ ID NO: 620585 - RNA, 19 nt, Artificial Sequence
  Description of Artificial Sequence: Synthetic oligonucleotide
gcuuuugaaccccaggccu

SEQ ID NO: 620586 - RNA, 19 nt, Artificial Sequence
  Description of Artificial Sequence: Synthetic oligonucleotide
acgggucaugugauccacc

SEQ ID NO: 620587 - RNA, 19 nt, Artificial Sequence
  Description of Artificial Sequence: Synthetic oligonucleotide
cagggauguuguucccagc

SEQ ID NO: 620588 - RNA, 19 nt, Artificial Sequence
  Description of Artificial Sequence: Synthetic oligonucleotide
acuucgucucgccuauauu

SEQ ID NO: 620589 - RNA, 19 nt, Artificial Sequence
  Description of Artificial Sequence: Synthetic oligonucleotide
ugccggagggugguguugc

SEQ ID NO: 620590 - RNA, 19 nt, Artificial Sequence
  Description of Artificial Sequence: Synthetic oligonucleotide
cccaaaacgcagugagccg

SEQ ID NO: 620591 - RNA, 19 nt, Artificial Sequence
  Description of Artificial Sequence: Synthetic oligonucleotide
acagcguuucugugcacuu

SEQ ID NO: 620592 - RNA, 19 nt, Artificial Sequence
  Description of Artificial Sequence: Synthetic oligonucleotide
gaccuucgggugaacuacc

SEQ ID NO: 620593 - RNA, 19 nt, Artificial Sequence
  Description of Artificial Sequence: Synthetic oligonucleotide
ugcauacggcccaucuguu

SEQ ID NO: 620594 - RNA, 19 nt, Artificial Sequence
  Description of Artificial Sequence: Synthetic oligonucleotide
augagauauggcauuucua

SEQ ID NO: 620595 - RNA, 19 nt, Artificial Sequence
  Description of Artificial Sequence: Synthetic oligonucleotide
gccugaauagcacggaucu

SEQ ID NO: 620596 - RNA, 19 nt, Artificial Sequence
  Description of Artificial Sequence: Synthetic oligonucleotide
uuccuaagucuuccauauu

SEQ ID NO: 620597 - RNA, 19 nt, Artificial Sequence
  Description of Artificial Sequence: Synthetic oligonucleotide
guuggcagaaccccacccu

SEQ ID NO: 620598 - RNA, 19 nt, Artificial Sequence
  Description of Artificial Sequence: Synthetic oligonucleotide
ccagggauguuguucccag

SEQ ID NO: 620599 - RNA, 19 nt, Artificial Sequence
  Description of Artificial Sequence: Synthetic oligonucleotide
gcuaaggauguuggugcgg

SEQ ID NO: 620600 - RNA, 19 nt, Artificial Sequence
  Description of Artificial Sequence: Synthetic oligonucleotide
uccccuagguccugggcuu

SEQ ID NO: 620601 - RNA, 19 nt, Artificial Sequence
  Description of Artificial Sequence: Synthetic oligonucleotide
cuucaucccggaugcguga

SEQ ID NO: 620602 - RNA, 19 nt, Artificial Sequence
  Description of Artificial Sequence: Synthetic oligonucleotide
gaggagaccccugaacgua

SEQ ID NO: 620603 - RNA, 19 nt, Artificial Sequence
  Description of Artificial Sequence: Synthetic oligonucleotide
uguuccgggauugggucuu

SEQ ID NO: 620604 - RNA, 19 nt, Artificial Sequence
  Description of Artificial Sequence: Synthetic oligonucleotide
gacacugcagcugacgcuu

SEQ ID NO: 620605 - RNA, 19 nt, Artificial Sequence
  Description of Artificial Sequence: Synthetic oligonucleotide
ccuauauuaguggugaccu

SEQ ID NO: 620606 - RNA, 19 nt, Artificial Sequence
  Description of Artificial Sequence: Synthetic oligonucleotide
caguucaccagggcccggc

SEQ ID NO: 620607 - RNA, 19 nt, Artificial Sequence
  Description of Artificial Sequence: Synthetic oligonucleotide
cugcaggcaaguacccuga

SEQ ID NO: 620608 - RNA, 19 nt, Artificial Sequence
  Description of Artificial Sequence: Synthetic oligonucleotide
ggcaaguacccugagccuc

SEQ ID NO: 620609 - RNA, 19 nt, Artificial Sequence
  Description of Artificial Sequence: Synthetic oligonucleotide
cuuuuccuaagucuuccau

SEQ ID NO: 620610 - RNA, 19 nt, Artificial Sequence
  Description of Artificial Sequence: Synthetic oligonucleotide
caccaggucagccugcaua

SEQ ID NO: 620611 - RNA, 19 nt, Artificial Sequence
  Description of Artificial Sequence: Synthetic oligonucleotide
gggauugggucuucugaca

SEQ ID NO: 620612 - RNA, 19 nt, Artificial Sequence
  Description of Artificial Sequence: Synthetic oligonucleotide
cucggagagaagcguucuc

SEQ ID NO: 620613 - RNA, 19 nt, Artificial Sequence
  Description of Artificial Sequence: Synthetic oligonucleotide
cuucgggugaacuacccuu

SEQ ID NO: 620614 - RNA, 19 nt, Artificial Sequence
  Description of Artificial Sequence: Synthetic oligonucleotide
cagauguguuagucagcuc

SEQ ID NO: 620615 - RNA, 19 nt, Artificial Sequence
  Description of Artificial Sequence: Synthetic oligonucleotide
guccauucauuuaggcgga

SEQ ID NO: 620616 - RNA, 19 nt, Artificial Sequence
  Description of Artificial Sequence: Synthetic oligonucleotide
guggucagcaguuccccua

SEQ ID NO: 620617 - RNA, 19 nt, Artificial Sequence
  Description of Artificial Sequence: Synthetic oligonucleotide
uagagccucggcuccugua

SEQ ID NO: 620618 - RNA, 19 nt, Artificial Sequence
  Description of Artificial Sequence: Synthetic oligonucleotide
cgucucgccuauauuagug

SEQ ID NO: 620619 - RNA, 19 nt, Artificial Sequence
  Description of Artificial Sequence: Synthetic oligonucleotide
cgcuuuugaaccccaggcc

SEQ ID NO: 620620 - RNA, 19 nt, Artificial Sequence
  Description of Artificial Sequence: Synthetic oligonucleotide
gugcacuucgucucgccua

SEQ ID NO: 620621 - RNA, 19 nt, Artificial Sequence
  Description of Artificial Sequence: Synthetic oligonucleotide
gaaccuccuugcuaaggau

SEQ ID NO: 620622 - RNA, 19 nt, Artificial Sequence
  Description of Artificial Sequence: Synthetic oligonucleotide
gcaggugugccggugagca

SEQ ID NO: 620623 - RNA, 19 nt, Artificial Sequence
  Description of Artificial Sequence: Synthetic oligonucleotide
cagcuuggcuuugagggca

SEQ ID NO: 620624 - RNA, 19 nt, Artificial Sequence
  Description of Artificial Sequence: Synthetic oligonucleotide
cucguugcuuaucaauggu

SEQ ID NO: 620625 - RNA, 19 nt, Artificial Sequence
  Description of Artificial Sequence: Synthetic oligonucleotide
aggagcuuuccuagagccu

SEQ ID NO: 620626 - RNA, 19 nt, Artificial Sequence
  Description of Artificial Sequence: Synthetic oligonucleotide
guuccacucuagggugagg

SEQ ID NO: 620627 - RNA, 19 nt, Artificial Sequence
  Description of Artificial Sequence: Synthetic oligonucleotide
cugacgcuuuugaacccca

SEQ ID NO: 620628 - RNA, 19 nt, Artificial Sequence
  Description of Artificial Sequence: Synthetic oligonucleotide
gcagauguguuagucagcu

SEQ ID NO: 620629 - RNA, 19 nt, Artificial Sequence
  Description of Artificial Sequence: Synthetic oligonucleotide
gcugacgcuuuugaacccc

SEQ ID NO: 620630 - RNA, 19 nt, Artificial Sequence
  Description of Artificial Sequence: Synthetic oligonucleotide
uccauucauuuaggcggac

SEQ ID NO: 620631 - RNA, 19 nt, Artificial Sequence
  Description of Artificial Sequence: Synthetic oligonucleotide
ucgugcugcugacgcccug

SEQ ID NO: 620632 - RNA, 19 nt, Artificial Sequence
  Description of Artificial Sequence: Synthetic oligonucleotide
gugcugaaccuccuugcua

SEQ ID NO: 620633 - RNA, 19 nt, Artificial Sequence
  Description of Artificial Sequence: Synthetic oligonucleotide
caacagccgaaucuucucu

SEQ ID NO: 620634 - RNA, 19 nt, Artificial Sequence
  Description of Artificial Sequence: Synthetic oligonucleotide
cucgcucacugagcagugc

SEQ ID NO: 620635 - RNA, 19 nt, Artificial Sequence
  Description of Artificial Sequence: Synthetic oligonucleotide
ucccugcguccauucauuu

SEQ ID NO: 620636 - RNA, 19 nt, Artificial Sequence
  Description of Artificial Sequence: Synthetic oligonucleotide
gggugaacuacccuuggau

SEQ ID NO: 620637 - RNA, 19 nt, Artificial Sequence
  Description of Artificial Sequence: Synthetic oligonucleotide
caucccuugccugugccaa

SEQ ID NO: 620638 - RNA, 19 nt, Artificial Sequence
  Description of Artificial Sequence: Synthetic oligonucleotide
ccuucaugcggcucagcuc

SEQ ID NO: 620639 - RNA, 19 nt, Artificial Sequence
  Description of Artificial Sequence: Synthetic oligonucleotide
caacucggcagauguguua

SEQ ID NO: 620640 - RNA, 19 nt, Artificial Sequence
  Description of Artificial Sequence: Synthetic oligonucleotide
cauugaugauggacugucu

SEQ ID NO: 620641 - RNA, 19 nt, Artificial Sequence
  Description of Artificial Sequence: Synthetic oligonucleotide
ugacagcguuucugugcac

SEQ ID NO: 620642 - RNA, 19 nt, Artificial Sequence
  Description of Artificial Sequence: Synthetic oligonucleotide
cugaagcugcccaacucgu

SEQ ID NO: 620643 - RNA, 19 nt, Artificial Sequence
  Description of Artificial Sequence: Synthetic oligonucleotide
gcugcugacgcccugccgu

SEQ ID NO: 620644 - RNA, 19 nt, Artificial Sequence
  Description of Artificial Sequence: Synthetic oligonucleotide
cgggauugggucuucugac

SEQ ID NO: 620645 - RNA, 19 nt, Artificial Sequence
  Description of Artificial Sequence: Synthetic oligonucleotide
cuggcgcagggugcuauug

SEQ ID NO: 620646 - RNA, 19 nt, Artificial Sequence
  Description of Artificial Sequence: Synthetic oligonucleotide
ccgguguucauucccgauc

SEQ ID NO: 620647 - RNA, 19 nt, Artificial Sequence
  Description of Artificial Sequence: Synthetic oligonucleotide
acguaagccaggacagcau

SEQ ID NO: 620648 - RNA, 19 nt, Artificial Sequence
  Description of Artificial Sequence: Synthetic oligonucleotide
guucauucccgaucacuuu

SEQ ID NO: 620649 - RNA, 19 nt, Artificial Sequence
  Description of Artificial Sequence: Synthetic oligonucleotide
acacucgcagggagcuccg

SEQ ID NO: 620650 - RNA, 19 nt, Artificial Sequence
  Description of Artificial Sequence: Synthetic oligonucleotide
cugucgaaggagcuuuccu

SEQ ID NO: 620651 - RNA, 19 nt, Artificial Sequence
  Description of Artificial Sequence: Synthetic oligonucleotide
gggccaguuccucggcucc

SEQ ID NO: 620652 - RNA, 19 nt, Artificial Sequence
  Description of Artificial Sequence: Synthetic oligonucleotide
ggugacgggucaugugauc

SEQ ID NO: 620653 - RNA, 19 nt, Artificial Sequence
  Description of Artificial Sequence: Synthetic oligonucleotide
cguuucuggcuauuucuuc

SEQ ID NO: 620654 - RNA, 19 nt, Artificial Sequence
  Description of Artificial Sequence: Synthetic oligonucleotide
cuggcuauuucuucucguu

SEQ ID NO: 620655 - RNA, 19 nt, Artificial Sequence
  Description of Artificial Sequence: Synthetic oligonucleotide
cagcguuucugugcacuuc

SEQ ID NO: 620656 - RNA, 19 nt, Artificial Sequence
  Description of Artificial Sequence: Synthetic oligonucleotide
ccccugaacguaagccagg

SEQ ID NO: 620657 - RNA, 19 nt, Artificial Sequence
  Description of Artificial Sequence: Synthetic oligonucleotide
ccgcagagccucuagucuc

SEQ ID NO: 620658 - RNA, 19 nt, Artificial Sequence
  Description of Artificial Sequence: Synthetic oligonucleotide
aggagaccccugaacguaa

SEQ ID NO: 620659 - RNA, 19 nt, Artificial Sequence
  Description of Artificial Sequence: Synthetic oligonucleotide
gcucccuugugacugauuu

SEQ ID NO: 620660 - RNA, 19 nt, Artificial Sequence
  Description of Artificial Sequence: Synthetic oligonucleotide
gugcgggcuugguucuccc

SEQ ID NO: 620661 - RNA, 19 nt, Artificial Sequence
  Description of Artificial Sequence: Synthetic oligonucleotide
caaaacgcagugagccggu

SEQ ID NO: 620662 - RNA, 19 nt, Artificial Sequence
  Description of Artificial Sequence: Synthetic oligonucleotide
cguugcuuaucaauggucu

SEQ ID NO: 620663 - RNA, 19 nt, Artificial Sequence
  Description of Artificial Sequence: Synthetic oligonucleotide
aggugacgggucaugugau

SEQ ID NO: 620664 - RNA, 19 nt, Artificial Sequence
  Description of Artificial Sequence: Synthetic oligonucleotide
caggugugccggugagcac

SEQ ID NO: 620665 - RNA, 19 nt, Artificial Sequence
  Description of Artificial Sequence: Synthetic oligonucleotide
ccaggugacgggucaugug

SEQ ID NO: 620666 - RNA, 19 nt, Artificial Sequence
  Description of Artificial Sequence: Synthetic oligonucleotide
ccaacucgugcugcugacg

SEQ ID NO: 620667 - RNA, 19 nt, Artificial Sequence
  Description of Artificial Sequence: Synthetic oligonucleotide
ccuagguuguuccacucua

SEQ ID NO: 620668 - RNA, 19 nt, Artificial Sequence
  Description of Artificial Sequence: Synthetic oligonucleotide
ccgggauugggucuucuga

SEQ ID NO: 620669 - RNA, 19 nt, Artificial Sequence
  Description of Artificial Sequence: Synthetic oligonucleotide
caagcgggccugguuccug

SEQ ID NO: 620670 - RNA, 19 nt, Artificial Sequence
  Description of Artificial Sequence: Synthetic oligonucleotide
ggugcgggcuugguucucc

SEQ ID NO: 620671 - RNA, 19 nt, Artificial Sequence
  Description of Artificial Sequence: Synthetic oligonucleotide
gcaaguacccugagccuca

SEQ ID NO: 620672 - RNA, 19 nt, Artificial Sequence
  Description of Artificial Sequence: Synthetic oligonucleotide
cuauauuaguggugaccuu

SEQ ID NO: 620673 - RNA, 19 nt, Artificial Sequence
  Description of Artificial Sequence: Synthetic oligonucleotide
gcggcagacaggucucuga

SEQ ID NO: 620674 - RNA, 19 nt, Artificial Sequence
  Description of Artificial Sequence: Synthetic oligonucleotide
cuagggugaggcucugaau

SEQ ID NO: 620675 - RNA, 19 nt, Artificial Sequence
  Description of Artificial Sequence: Synthetic oligonucleotide
cauuggcggcagacagguc

SEQ ID NO: 620676 - RNA, 19 nt, Artificial Sequence
  Description of Artificial Sequence: Synthetic oligonucleotide
ccuggcuucuaagcagcag

SEQ ID NO: 620677 - RNA, 19 nt, Artificial Sequence
  Description of Artificial Sequence: Synthetic oligonucleotide
ugucgccagggauguuguu

SEQ ID NO: 620678 - RNA, 19 nt, Artificial Sequence
  Description of Artificial Sequence: Synthetic oligonucleotide
cucucacccuggucaccuc

SEQ ID NO: 620679 - RNA, 19 nt, Artificial Sequence
  Description of Artificial Sequence: Synthetic oligonucleotide
gcccaacucgugcugcuga

SEQ ID NO: 620680 - RNA, 19 nt, Artificial Sequence
  Description of Artificial Sequence: Synthetic oligonucleotide
ccugaacguaagccaggac

SEQ ID NO: 620681 - RNA, 19 nt, Artificial Sequence
  Description of Artificial Sequence: Synthetic oligonucleotide
cacuucgucucgccuauau

SEQ ID NO: 620682 - RNA, 19 nt, Artificial Sequence
  Description of Artificial Sequence: Synthetic oligonucleotide
gcaccaauguuggcagaac

SEQ ID NO: 620683 - RNA, 19 nt, Artificial Sequence
  Description of Artificial Sequence: Synthetic oligonucleotide
aggcgguguugcuccucca

SEQ ID NO: 620684 - RNA, 19 nt, Artificial Sequence
  Description of Artificial Sequence: Synthetic oligonucleotide
gcugacgcccugccguuuc

SEQ ID NO: 620685 - RNA, 19 nt, Artificial Sequence
  Description of Artificial Sequence: Synthetic oligonucleotide
gugccggagggugguguug

SEQ ID NO: 620686 - RNA, 19 nt, Artificial Sequence
  Description of Artificial Sequence: Synthetic oligonucleotide
caaggcgguguugcuccuc

SEQ ID NO: 620687 - RNA, 19 nt, Artificial Sequence
  Description of Artificial Sequence: Synthetic oligonucleotide
agcgccucccgguguucau

SEQ ID NO: 620688 - RNA, 19 nt, Artificial Sequence
  Description of Artificial Sequence: Synthetic oligonucleotide
cuacacucgcagggagcuc

SEQ ID NO: 620689 - RNA, 19 nt, Artificial Sequence
  Description of Artificial Sequence: Synthetic oligonucleotide
gccgcagagccucuagucu

SEQ ID NO: 620690 - RNA, 19 nt, Artificial Sequence
  Description of Artificial Sequence: Synthetic oligonucleotide
ccucgcucacugagcagug

SEQ ID NO: 620691 - RNA, 19 nt, Artificial Sequence
  Description of Artificial Sequence: Synthetic oligonucleotide
aggcggacucaaggcucuc

SEQ ID NO: 620692 - RNA, 19 nt, Artificial Sequence
  Description of Artificial Sequence: Synthetic oligonucleotide
agccugcauacggcccauc

SEQ ID NO: 620693 - RNA, 19 nt, Artificial Sequence
  Description of Artificial Sequence: Synthetic oligonucleotide
acgcagugagccgguccug

SEQ ID NO: 620694 - RNA, 19 nt, Artificial Sequence
  Description of Artificial Sequence: Synthetic oligonucleotide
gugacugauuugguuguuu

SEQ ID NO: 620695 - RNA, 19 nt, Artificial Sequence
  Description of Artificial Sequence: Synthetic oligonucleotide
caucccggaugcgugagau

SEQ ID NO: 620696 - RNA, 19 nt, Artificial Sequence
  Description of Artificial Sequence: Synthetic oligonucleotide
acccuuggaugggcaggug

SEQ ID NO: 620697 - RNA, 19 nt, Artificial Sequence
  Description of Artificial Sequence: Synthetic oligonucleotide
cagccugaauagcacggau

SEQ ID NO: 620698 - RNA, 19 nt, Artificial Sequence
  Description of Artificial Sequence: Synthetic oligonucleotide
cucccugcguccauucauu

SEQ ID NO: 620699 - RNA, 19 nt, Artificial Sequence
  Description of Artificial Sequence: Synthetic oligonucleotide
gccucaucccuugccugug

SEQ ID NO: 620700 - RNA, 19 nt, Artificial Sequence
  Description of Artificial Sequence: Synthetic oligonucleotide
gccugcauacggcccaucu

SEQ ID NO: 620701 - RNA, 19 nt, Artificial Sequence
  Description of Artificial Sequence: Synthetic oligonucleotide
gccuagguuguuccacucu

SEQ ID NO: 620702 - RNA, 19 nt, Artificial Sequence
  Description of Artificial Sequence: Synthetic oligonucleotide
cgcagugagccgguccugg

SEQ ID NO: 620703 - RNA, 19 nt, Artificial Sequence
  Description of Artificial Sequence: Synthetic oligonucleotide
ggcggcagacaggucucug

SEQ ID NO: 620704 - RNA, 19 nt, Artificial Sequence
  Description of Artificial Sequence: Synthetic oligonucleotide
ggugugccggugagcacca

SEQ ID NO: 620705 - RNA, 19 nt, Artificial Sequence
  Description of Artificial Sequence: Synthetic oligonucleotide
ugcugacgcccugccguuu

SEQ ID NO: 620706 - RNA, 19 nt, Artificial Sequence
  Description of Artificial Sequence: Synthetic oligonucleotide
ccuugugacugauuugguu

SEQ ID NO: 620707 - RNA, 19 nt, Artificial Sequence
  Description of Artificial Sequence: Synthetic oligonucleotide
gucucucguugagggcuuc

SEQ ID NO: 620708 - RNA, 19 nt, Artificial Sequence
  Description of Artificial Sequence: Synthetic oligonucleotide
accuuccguuccaacucuu

SEQ ID NO: 620709 - RNA, 19 nt, Artificial Sequence
  Description of Artificial Sequence: Synthetic oligonucleotide
cccugaacguaagccagga

SEQ ID NO: 620710 - RNA, 19 nt, Artificial Sequence
  Description of Artificial Sequence: Synthetic oligonucleotide
uggugcgggcuugguucuc

SEQ ID NO: 620711 - RNA, 19 nt, Artificial Sequence
  Description of Artificial Sequence: Synthetic oligonucleotide
ggcggacucaaggcucuca

SEQ ID NO: 620712 - RNA, 19 nt, Artificial Sequence
  Description of Artificial Sequence: Synthetic oligonucleotide
gccugugccaacagccgaa

SEQ ID NO: 620713 - RNA, 19 nt, Artificial Sequence
  Description of Artificial Sequence: Synthetic oligonucleotide
cagcaguacuguucugguu

SEQ ID NO: 620714 - RNA, 19 nt, Artificial Sequence
  Description of Artificial Sequence: Synthetic oligonucleotide
guuccgggauugggucuuc

SEQ ID NO: 620715 - RNA, 19 nt, Artificial Sequence
  Description of Artificial Sequence: Synthetic oligonucleotide
cgccuauauuaguggugac

SEQ ID NO: 620716 - RNA, 19 nt, Artificial Sequence
  Description of Artificial Sequence: Synthetic oligonucleotide
cuagagccucggcuccugu

SEQ ID NO: 620717 - RNA, 19 nt, Artificial Sequence
  Description of Artificial Sequence: Synthetic oligonucleotide
cagccgcagagccucuagu

SEQ ID NO: 620718 - RNA, 19 nt, Artificial Sequence
  Description of Artificial Sequence: Synthetic oligonucleotide
ccuugcuaaggauguuggu

SEQ ID NO: 620719 - RNA, 19 nt, Artificial Sequence
  Description of Artificial Sequence: Synthetic oligonucleotide
cccggaugcgugagaucuc

SEQ ID NO: 620720 - RNA, 19 nt, Artificial Sequence
  Description of Artificial Sequence: Synthetic oligonucleotide
cgccucccgguguucauuc

SEQ ID NO: 620721 - RNA, 19 nt, Artificial Sequence
  Description of Artificial Sequence: Synthetic oligonucleotide
cucgugcugcugacgcccu

SEQ ID NO: 620722 - RNA, 19 nt, Artificial Sequence
  Description of Artificial Sequence: Synthetic oligonucleotide
gcaguuccccuagguccug

SEQ ID NO: 620723 - RNA, 19 nt, Artificial Sequence
  Description of Artificial Sequence: Synthetic oligonucleotide
cagugagccgguccugguu

SEQ ID NO: 620724 - RNA, 19 nt, Artificial Sequence
  Description of Artificial Sequence: Synthetic oligonucleotide
gauucccgaucugcagcuu

SEQ ID NO: 620725 - RNA, 19 nt, Artificial Sequence
  Description of Artificial Sequence: Synthetic oligonucleotide
caguacuguucugguuugu

SEQ ID NO: 620726 - RNA, 19 nt, Artificial Sequence
  Description of Artificial Sequence: Synthetic oligonucleotide
gcagugagccgguccuggu

SEQ ID NO: 620727 - RNA, 19 nt, Artificial Sequence
  Description of Artificial Sequence: Synthetic oligonucleotide
ccauucauuuaggcggacu

SEQ ID NO: 620728 - RNA, 19 nt, Artificial Sequence
  Description of Artificial Sequence: Synthetic oligonucleotide
cugacgcccugccguuucu

SEQ ID NO: 620729 - RNA, 19 nt, Artificial Sequence
  Description of Artificial Sequence: Synthetic oligonucleotide
gcgugagaucucugcuucu

SEQ ID NO: 620730 - RNA, 19 nt, Artificial Sequence
  Description of Artificial Sequence: Synthetic oligonucleotide
cggaugcgugagaucucug

SEQ ID NO: 620731 - RNA, 19 nt, Artificial Sequence
  Description of Artificial Sequence: Synthetic oligonucleotide
ccuucgggugaacuacccu

SEQ ID NO: 620732 - RNA, 19 nt, Artificial Sequence
  Description of Artificial Sequence: Synthetic oligonucleotide
cgggugaacuacccuugga

SEQ ID NO: 620733 - RNA, 19 nt, Artificial Sequence
  Description of Artificial Sequence: Synthetic oligonucleotide
cugcugacgcccugccguu

SEQ ID NO: 620734 - RNA, 19 nt, Artificial Sequence
  Description of Artificial Sequence: Synthetic oligonucleotide
ccucccugcguccauucau

SEQ ID NO: 620735 - RNA, 19 nt, Artificial Sequence
  Description of Artificial Sequence: Synthetic oligonucleotide
ggugccggagggugguguu

SEQ ID NO: 620736 - RNA, 19 nt, Artificial Sequence
  Description of Artificial Sequence: Synthetic oligonucleotide
gcgcagggugcuauuggcu

SEQ ID NO: 620737 - RNA, 19 nt, Artificial Sequence
  Description of Artificial Sequence: Synthetic oligonucleotide
ccggaugcgugagaucucu

SEQ ID NO: 620738 - RNA, 19 nt, Artificial Sequence
  Description of Artificial Sequence: Synthetic oligonucleotide
ccgcuguggucagcaguuc

SEQ ID NO: 620739 - RNA, 19 nt, Artificial Sequence
  Description of Artificial Sequence: Synthetic oligonucleotide
gcguuucugugcacuucgu

SEQ ID NO: 620740 - RNA, 19 nt, Artificial Sequence
  Description of Artificial Sequence: Synthetic oligonucleotide
ccugaauagcacggaucuu

SEQ ID NO: 620741 - RNA, 19 nt, Artificial Sequence
  Description of Artificial Sequence: Synthetic oligonucleotide
cuugcccucugggccucuu

SEQ ID NO: 620742 - RNA, 19 nt, Artificial Sequence
  Description of Artificial Sequence: Synthetic oligonucleotide
gcacuucgucucgccuaua

SEQ ID NO: 620743 - RNA, 19 nt, Artificial Sequence
  Description of Artificial Sequence: Synthetic oligonucleotide
ccaagcgggccugguuccu

SEQ ID NO: 620744 - RNA, 19 nt, Artificial Sequence
  Description of Artificial Sequence: Synthetic oligonucleotide
gcgccucccgguguucauu

SEQ ID NO: 620745 - RNA, 19 nt, Artificial Sequence
  Description of Artificial Sequence: Synthetic oligonucleotide
ccugccguuucuggcuauu

SEQ ID NO: 620746 - RNA, 19 nt, Artificial Sequence
  Description of Artificial Sequence: Synthetic oligonucleotide
cccacaugccuagguuguu

SEQ ID NO: 620747 - RNA, 19 nt, Artificial Sequence
  Description of Artificial Sequence: Synthetic oligonucleotide
ggaugucgccagggauguu

SEQ ID NO: 620748 - RNA, 19 nt, Artificial Sequence
  Description of Artificial Sequence: Synthetic oligonucleotide
aacuuuaucaucuugacgg

SEQ ID NO: 620749 - RNA, 19 nt, Artificial Sequence
  Description of Artificial Sequence: Synthetic oligonucleotide
uguuguaguagccacagcg

SEQ ID NO: 620750 - RNA, 19 nt, Artificial Sequence
  Description of Artificial Sequence: Synthetic oligonucleotide
gaaauggagaaacacaggg

SEQ ID NO: 620751 - RNA, 19 nt, Artificial Sequence
  Description of Artificial Sequence: Synthetic oligonucleotide
gaaggugaaauauugaacc

SEQ ID NO: 620752 - RNA, 19 nt, Artificial Sequence
  Description of Artificial Sequence: Synthetic oligonucleotide
uuguaugugaauuacaaug

SEQ ID NO: 620753 - RNA, 19 nt, Artificial Sequence
  Description of Artificial Sequence: Synthetic oligonucleotide
aaauauugaaccugugcac

SEQ ID NO: 620754 - RNA, 19 nt, Artificial Sequence
  Description of Artificial Sequence: Synthetic oligonucleotide
uguaugugaauuacaaugg

SEQ ID NO: 620755 - RNA, 19 nt, Artificial Sequence
  Description of Artificial Sequence: Synthetic oligonucleotide
uuuggcagcagcuagacag

SEQ ID NO: 620756 - RNA, 19 nt, Artificial Sequence
  Description of Artificial Sequence: Synthetic oligonucleotide
auaagcgcuagauacaaac

SEQ ID NO: 620757 - RNA, 19 nt, Artificial Sequence
  Description of Artificial Sequence: Synthetic oligonucleotide
gaaauauugaaccugugca

SEQ ID NO: 620758 - RNA, 19 nt, Artificial Sequence
  Description of Artificial Sequence: Synthetic oligonucleotide
aaauccuaccaaucaaacg

SEQ ID NO: 620759 - RNA, 19 nt, Artificial Sequence
  Description of Artificial Sequence: Synthetic oligonucleotide
ugggcaaacaacuuuauca

SEQ ID NO: 620760 - RNA, 19 nt, Artificial Sequence
  Description of Artificial Sequence: Synthetic oligonucleotide
agauguucuaccaucaugc

SEQ ID NO: 620761 - RNA, 19 nt, Artificial Sequence
  Description of Artificial Sequence: Synthetic oligonucleotide
uuauguuacaaaauccuac

SEQ ID NO: 620762 - RNA, 19 nt, Artificial Sequence
  Description of Artificial Sequence: Synthetic oligonucleotide
cucgauauucacaaggucc

SEQ ID NO: 620763 - RNA, 19 nt, Artificial Sequence
  Description of Artificial Sequence: Synthetic oligonucleotide
aacaucucgauauucacaa

SEQ ID NO: 620764 - RNA, 19 nt, Artificial Sequence
  Description of Artificial Sequence: Synthetic oligonucleotide
aguuuguucagagagcggc

SEQ ID NO: 620765 - RNA, 19 nt, Artificial Sequence
  Description of Artificial Sequence: Synthetic oligonucleotide
agggaaauaacugaugaac

SEQ ID NO: 620766 - RNA, 19 nt, Artificial Sequence
  Description of Artificial Sequence: Synthetic oligonucleotide
auagacguagccauuaggc

SEQ ID NO: 620767 - RNA, 19 nt, Artificial Sequence
  Description of Artificial Sequence: Synthetic oligonucleotide
caucuugacggauagaaag

SEQ ID NO: 620768 - RNA, 19 nt, Artificial Sequence
  Description of Artificial Sequence: Synthetic oligonucleotide
gaaagcagagaauuguagc

SEQ ID NO: 620769 - RNA, 19 nt, Artificial Sequence
  Description of Artificial Sequence: Synthetic oligonucleotide
auuaacacgcuuuacauuu

SEQ ID NO: 620770 - RNA, 19 nt, Artificial Sequence
  Description of Artificial Sequence: Synthetic oligonucleotide
agaauuguagccauagacg

SEQ ID NO: 620771 - RNA, 19 nt, Artificial Sequence
  Description of Artificial Sequence: Synthetic oligonucleotide
agauguguguaucuggcgg

SEQ ID NO: 620772 - RNA, 19 nt, Artificial Sequence
  Description of Artificial Sequence: Synthetic oligonucleotide
augugaauuacaaugguuc

SEQ ID NO: 620773 - RNA, 19 nt, Artificial Sequence
  Description of Artificial Sequence: Synthetic oligonucleotide
uauuaaaucucacuuccuc

SEQ ID NO: 620774 - RNA, 19 nt, Artificial Sequence
  Description of Artificial Sequence: Synthetic oligonucleotide
aauuacaaugguucaucug

SEQ ID NO: 620775 - RNA, 19 nt, Artificial Sequence
  Description of Artificial Sequence: Synthetic oligonucleotide
caucucgauauucacaagg

SEQ ID NO: 620776 - RNA, 19 nt, Artificial Sequence
  Description of Artificial Sequence: Synthetic oligonucleotide
gaagcguuuauucaguguc

SEQ ID NO: 620777 - RNA, 19 nt, Artificial Sequence
  Description of Artificial Sequence: Synthetic oligonucleotide
gucauaucggaacugcugg

SEQ ID NO: 620778 - RNA, 19 nt, Artificial Sequence
  Description of Artificial Sequence: Synthetic oligonucleotide
uuugagaggugcaagaauu

SEQ ID NO: 620779 - RNA, 19 nt, Artificial Sequence
  Description of Artificial Sequence: Synthetic oligonucleotide
uguagagugagggugaaga

SEQ ID NO: 620780 - RNA, 19 nt, Artificial Sequence
  Description of Artificial Sequence: Synthetic oligonucleotide
aagcgcuagauacaaaccu

SEQ ID NO: 620781 - RNA, 19 nt, Artificial Sequence
  Description of Artificial Sequence: Synthetic oligonucleotide
uuagcuaaucaacaucaac

SEQ ID NO: 620782 - RNA, 19 nt, Artificial Sequence
  Description of Artificial Sequence: Synthetic oligonucleotide
gucgguaguugucauaucg

SEQ ID NO: 620783 - RNA, 19 nt, Artificial Sequence
  Description of Artificial Sequence: Synthetic oligonucleotide
ugaaccaauuccuacuucu

SEQ ID NO: 620784 - RNA, 19 nt, Artificial Sequence
  Description of Artificial Sequence: Synthetic oligonucleotide
uuacacucuaggacuacgg

SEQ ID NO: 620785 - RNA, 19 nt, Artificial Sequence
  Description of Artificial Sequence: Synthetic oligonucleotide
gauaaggcggugcuggaag

SEQ ID NO: 620786 - RNA, 19 nt, Artificial Sequence
  Description of Artificial Sequence: Synthetic oligonucleotide
acggauagaaagcagagaa

SEQ ID NO: 620787 - RNA, 19 nt, Artificial Sequence
  Description of Artificial Sequence: Synthetic oligonucleotide
auuguagccauagacguag

SEQ ID NO: 620788 - RNA, 19 nt, Artificial Sequence
  Description of Artificial Sequence: Synthetic oligonucleotide
agacguagccauuaggcag

SEQ ID NO: 620789 - RNA, 19 nt, Artificial Sequence
  Description of Artificial Sequence: Synthetic oligonucleotide
ucgcacagcauccagacgu

SEQ ID NO: 620790 - RNA, 19 nt, Artificial Sequence
  Description of Artificial Sequence: Synthetic oligonucleotide
ugugaauuacaaugguuca

SEQ ID NO: 620791 - RNA, 19 nt, Artificial Sequence
  Description of Artificial Sequence: Synthetic oligonucleotide
ugucauaucggaacugcug

SEQ ID NO: 620792 - RNA, 19 nt, Artificial Sequence
  Description of Artificial Sequence: Synthetic oligonucleotide
uuauucagugucucauagg

SEQ ID NO: 620793 - RNA, 19 nt, Artificial Sequence
  Description of Artificial Sequence: Synthetic oligonucleotide
aaugccaagacaggcuggg

SEQ ID NO: 620794 - RNA, 19 nt, Artificial Sequence
  Description of Artificial Sequence: Synthetic oligonucleotide
ucgguaguugucauaucgg

SEQ ID NO: 620795 - RNA, 19 nt, Artificial Sequence
  Description of Artificial Sequence: Synthetic oligonucleotide
aaguucaaugaacucuuga

SEQ ID NO: 620796 - RNA, 19 nt, Artificial Sequence
  Description of Artificial Sequence: Synthetic oligonucleotide
aguucaaugaacucuugaa

SEQ ID NO: 620797 - RNA, 19 nt, Artificial Sequence
  Description of Artificial Sequence: Synthetic oligonucleotide
accaauuccuacuucugag

SEQ ID NO: 620798 - RNA, 19 nt, Artificial Sequence
  Description of Artificial Sequence: Synthetic oligonucleotide
uaagcgcuagauacaaacc

SEQ ID NO: 620799 - RNA, 19 nt, Artificial Sequence
  Description of Artificial Sequence: Synthetic oligonucleotide
aucaccagagaucuugcag

SEQ ID NO: 620800 - RNA, 19 nt, Artificial Sequence
  Description of Artificial Sequence: Synthetic oligonucleotide
ggucgcaagaaacaaaugc

SEQ ID NO: 620801 - RNA, 19 nt, Artificial Sequence
  Description of Artificial Sequence: Synthetic oligonucleotide
uaaucaacaucaacaugca

SEQ ID NO: 620802 - RNA, 19 nt, Artificial Sequence
  Description of Artificial Sequence: Synthetic oligonucleotide
auguucuaccaucaugcgg

SEQ ID NO: 620803 - RNA, 19 nt, Artificial Sequence
  Description of Artificial Sequence: Synthetic oligonucleotide
agacuuauuaaaucucacu

SEQ ID NO: 620804 - RNA, 19 nt, Artificial Sequence
  Description of Artificial Sequence: Synthetic oligonucleotide
uguucugccggacaaguuc

SEQ ID NO: 620805 - RNA, 19 nt, Artificial Sequence
  Description of Artificial Sequence: Synthetic oligonucleotide
ucagcauucgccaccgggc

SEQ ID NO: 620806 - RNA, 19 nt, Artificial Sequence
  Description of Artificial Sequence: Synthetic oligonucleotide
ugucucauagggcaccuug

SEQ ID NO: 620807 - RNA, 19 nt, Artificial Sequence
  Description of Artificial Sequence: Synthetic oligonucleotide
gauguucuaccaucaugcg

SEQ ID NO: 620808 - RNA, 19 nt, Artificial Sequence
  Description of Artificial Sequence: Synthetic oligonucleotide
uuggucgcaagaaacaaau

SEQ ID NO: 620809 - RNA, 19 nt, Artificial Sequence
  Description of Artificial Sequence: Synthetic oligonucleotide
caucacuagcaaaaggaag

SEQ ID NO: 620810 - RNA, 19 nt, Artificial Sequence
  Description of Artificial Sequence: Synthetic oligonucleotide
aaccaauuccuacuucuga

SEQ ID NO: 620811 - RNA, 19 nt, Artificial Sequence
  Description of Artificial Sequence: Synthetic oligonucleotide
aggugcaagaauuugcaga

SEQ ID NO: 620812 - RNA, 19 nt, Artificial Sequence
  Description of Artificial Sequence: Synthetic oligonucleotide
uuuauugccgagagcccag

SEQ ID NO: 620813 - RNA, 19 nt, Artificial Sequence
  Description of Artificial Sequence: Synthetic oligonucleotide
aguauuugccguugcucac

SEQ ID NO: 620814 - RNA, 19 nt, Artificial Sequence
  Description of Artificial Sequence: Synthetic oligonucleotide
aaauaagcgcuagauacaa

SEQ ID NO: 620815 - RNA, 19 nt, Artificial Sequence
  Description of Artificial Sequence: Synthetic oligonucleotide
acgcuuuacauuuacaguu

SEQ ID NO: 620816 - RNA, 19 nt, Artificial Sequence
  Description of Artificial Sequence: Synthetic oligonucleotide
gaauuguagccauagacgu

SEQ ID NO: 620817 - RNA, 19 nt, Artificial Sequence
  Description of Artificial Sequence: Synthetic oligonucleotide
ugaauuacaaugguucauc

SEQ ID NO: 620818 - RNA, 19 nt, Artificial Sequence
  Description of Artificial Sequence: Synthetic oligonucleotide
caucuguucugaaaacccg

SEQ ID NO: 620819 - RNA, 19 nt, Artificial Sequence
  Description of Artificial Sequence: Synthetic oligonucleotide
aaccucuacauaugguugu

SEQ ID NO: 620820 - RNA, 19 nt, Artificial Sequence
  Description of Artificial Sequence: Synthetic oligonucleotide
uaucggaacugcuggauca

SEQ ID NO: 620821 - RNA, 19 nt, Artificial Sequence
  Description of Artificial Sequence: Synthetic oligonucleotide
uuucccgugaauacauucu

SEQ ID NO: 620822 - RNA, 19 nt, Artificial Sequence
  Description of Artificial Sequence: Synthetic oligonucleotide
uuuacacucuaggacuacg

SEQ ID NO: 620823 - RNA, 19 nt, Artificial Sequence
  Description of Artificial Sequence: Synthetic oligonucleotide
caccaugcaaggcaggugg

SEQ ID NO: 620824 - RNA, 19 nt, Artificial Sequence
  Description of Artificial Sequence: Synthetic oligonucleotide
caacacuuagcccaggcug

SEQ ID NO: 620825 - RNA, 19 nt, Artificial Sequence
  Description of Artificial Sequence: Synthetic oligonucleotide
ucugagaugcucuggauuu

SEQ ID NO: 620826 - RNA, 19 nt, Artificial Sequence
  Description of Artificial Sequence: Synthetic oligonucleotide
cacucuaggacuacggaac

SEQ ID NO: 620827 - RNA, 19 nt, Artificial Sequence
  Description of Artificial Sequence: Synthetic oligonucleotide
uuauuaaaucucacuuccu

SEQ ID NO: 620828 - RNA, 19 nt, Artificial Sequence
  Description of Artificial Sequence: Synthetic oligonucleotide
auauugaaccugugcacag

SEQ ID NO: 620829 - RNA, 19 nt, Artificial Sequence
  Description of Artificial Sequence: Synthetic oligonucleotide
aaaccucuacauaugguug

SEQ ID NO: 620830 - RNA, 19 nt, Artificial Sequence
  Description of Artificial Sequence: Synthetic oligonucleotide
uuaucauggcaccaugcaa

SEQ ID NO: 620831 - RNA, 19 nt, Artificial Sequence
  Description of Artificial Sequence: Synthetic oligonucleotide
cugaccacagagucgacag

SEQ ID NO: 620832 - RNA, 19 nt, Artificial Sequence
  Description of Artificial Sequence: Synthetic oligonucleotide
aagaauuugcagaggcauc

SEQ ID NO: 620833 - RNA, 19 nt, Artificial Sequence
  Description of Artificial Sequence: Synthetic oligonucleotide
ugcacauggcaacgcaggg

SEQ ID NO: 620834 - RNA, 19 nt, Artificial Sequence
  Description of Artificial Sequence: Synthetic oligonucleotide
ucgacuuauguuacaaaau

SEQ ID NO: 620835 - RNA, 19 nt, Artificial Sequence
  Description of Artificial Sequence: Synthetic oligonucleotide
gguguggcaacacuuagcc

SEQ ID NO: 620836 - RNA, 19 nt, Artificial Sequence
  Description of Artificial Sequence: Synthetic oligonucleotide
auaucggaacugcuggauc

SEQ ID NO: 620837 - RNA, 19 nt, Artificial Sequence
  Description of Artificial Sequence: Synthetic oligonucleotide
uuugccguugcucacugau

SEQ ID NO: 620838 - RNA, 19 nt, Artificial Sequence
  Description of Artificial Sequence: Synthetic oligonucleotide
gagauguguguaucuggcg

SEQ ID NO: 620839 - RNA, 19 nt, Artificial Sequence
  Description of Artificial Sequence: Synthetic oligonucleotide
cauagacguagccauuagg

SEQ ID NO: 620840 - RNA, 19 nt, Artificial Sequence
  Description of Artificial Sequence: Synthetic oligonucleotide
uagccauuaggcagcauca

SEQ ID NO: 620841 - RNA, 19 nt, Artificial Sequence
  Description of Artificial Sequence: Synthetic oligonucleotide
ucggguuaacuccugcacc

SEQ ID NO: 620842 - RNA, 19 nt, Artificial Sequence
  Description of Artificial Sequence: Synthetic oligonucleotide
gugucuuuauugccgagag

SEQ ID NO: 620843 - RNA, 19 nt, Artificial Sequence
  Description of Artificial Sequence: Synthetic oligonucleotide
ugcaugucgcacagcaucc

SEQ ID NO: 620844 - RNA, 19 nt, Artificial Sequence
  Description of Artificial Sequence: Synthetic oligonucleotide
aucaucuugacggauagaa

SEQ ID NO: 620845 - RNA, 19 nt, Artificial Sequence
  Description of Artificial Sequence: Synthetic oligonucleotide
uagacguagccauuaggca

SEQ ID NO: 620846 - RNA, 19 nt, Artificial Sequence
  Description of Artificial Sequence: Synthetic oligonucleotide
gacuuauuaaaucucacuu

SEQ ID NO: 620847 - RNA, 19 nt, Artificial Sequence
  Description of Artificial Sequence: Synthetic oligonucleotide
ucuugacggauagaaagca

SEQ ID NO: 620848 - RNA, 19 nt, Artificial Sequence
  Description of Artificial Sequence: Synthetic oligonucleotide
caguacuuauuuuagcuca

SEQ ID NO: 620849 - RNA, 19 nt, Artificial Sequence
  Description of Artificial Sequence: Synthetic oligonucleotide
ugccggacaaguucaauga

SEQ ID NO: 620850 - RNA, 19 nt, Artificial Sequence
  Description of Artificial Sequence: Synthetic oligonucleotide
uaugguuguaugugaauua

SEQ ID NO: 620851 - RNA, 19 nt, Artificial Sequence
  Description of Artificial Sequence: Synthetic oligonucleotide
uaguugucauaucggaacu

SEQ ID NO: 620852 - RNA, 19 nt, Artificial Sequence
  Description of Artificial Sequence: Synthetic oligonucleotide
uccguuuccacaugcuggc

SEQ ID NO: 620853 - RNA, 19 nt, Artificial Sequence
  Description of Artificial Sequence: Synthetic oligonucleotide
uccaguaggcugaccacag

SEQ ID NO: 620854 - RNA, 19 nt, Artificial Sequence
  Description of Artificial Sequence: Synthetic oligonucleotide
uacacucuaggacuacgga

SEQ ID NO: 620855 - RNA, 19 nt, Artificial Sequence
  Description of Artificial Sequence: Synthetic oligonucleotide
ucaagcuccccugaguccc

SEQ ID NO: 620856 - RNA, 19 nt, Artificial Sequence
  Description of Artificial Sequence: Synthetic oligonucleotide
acuagcaaaaggaaggaaa

SEQ ID NO: 620857 - RNA, 19 nt, Artificial Sequence
  Description of Artificial Sequence: Synthetic oligonucleotide
aacccgucaguacuuauuu

SEQ ID NO: 620858 - RNA, 19 nt, Artificial Sequence
  Description of Artificial Sequence: Synthetic oligonucleotide
uguauggggagaugugugu

SEQ ID NO: 620859 - RNA, 19 nt, Artificial Sequence
  Description of Artificial Sequence: Synthetic oligonucleotide
aggcgugugaggugcaugg

SEQ ID NO: 620860 - RNA, 19 nt, Artificial Sequence
  Description of Artificial Sequence: Synthetic oligonucleotide
ugaucuuuggucgcaagaa

SEQ ID NO: 620861 - RNA, 19 nt, Artificial Sequence
  Description of Artificial Sequence: Synthetic oligonucleotide
uuuggucgcaagaaacaaa

SEQ ID NO: 620862 - RNA, 19 nt, Artificial Sequence
  Description of Artificial Sequence: Synthetic oligonucleotide
guuaucauggcaccaugca

SEQ ID NO: 620863 - RNA, 19 nt, Artificial Sequence
  Description of Artificial Sequence: Synthetic oligonucleotide
ugucgcacagcauccagac

SEQ ID NO: 620864 - RNA, 19 nt, Artificial Sequence
  Description of Artificial Sequence: Synthetic oligonucleotide
uacguuugcagaguuuggc

SEQ ID NO: 620865 - RNA, 19 nt, Artificial Sequence
  Description of Artificial Sequence: Synthetic oligonucleotide
gucgacuuauguuacaaaa

SEQ ID NO: 620866 - RNA, 19 nt, Artificial Sequence
  Description of Artificial Sequence: Synthetic oligonucleotide
ggagauaaggcggugcugg

SEQ ID NO: 620867 - RNA, 19 nt, Artificial Sequence
  Description of Artificial Sequence: Synthetic oligonucleotide
agaguuuggcacucucauc

SEQ ID NO: 620868 - RNA, 19 nt, Artificial Sequence
  Description of Artificial Sequence: Synthetic oligonucleotide
uaggacuacggaaccaccu

SEQ ID NO: 620869 - RNA, 19 nt, Artificial Sequence
  Description of Artificial Sequence: Synthetic oligonucleotide
uauuaacacgcuuuacauu

SEQ ID NO: 620870 - RNA, 19 nt, Artificial Sequence
  Description of Artificial Sequence: Synthetic oligonucleotide
cuugacggauagaaagcag

SEQ ID NO: 620871 - RNA, 19 nt, Artificial Sequence
  Description of Artificial Sequence: Synthetic oligonucleotide
guugucauaucggaacugc

SEQ ID NO: 620872 - RNA, 19 nt, Artificial Sequence
  Description of Artificial Sequence: Synthetic oligonucleotide
ggaaauaacugaugaacca

SEQ ID NO: 620873 - RNA, 19 nt, Artificial Sequence
  Description of Artificial Sequence: Synthetic oligonucleotide
auaaggcggugcuggaagg

SEQ ID NO: 620874 - RNA, 19 nt, Artificial Sequence
  Description of Artificial Sequence: Synthetic oligonucleotide
uaacacgcuuuacauuuac

SEQ ID NO: 620875 - RNA, 19 nt, Artificial Sequence
  Description of Artificial Sequence: Synthetic oligonucleotide
aguccaguggcuuucccgu

SEQ ID NO: 620876 - RNA, 19 nt, Artificial Sequence
  Description of Artificial Sequence: Synthetic oligonucleotide
ucuaggacuacggaaccac

SEQ ID NO: 620877 - RNA, 19 nt, Artificial Sequence
  Description of Artificial Sequence: Synthetic oligonucleotide
aaaucucacuuccucuuuu

SEQ ID NO: 620878 - RNA, 19 nt, Artificial Sequence
  Description of Artificial Sequence: Synthetic oligonucleotide
ucucgauauucacaagguc

SEQ ID NO: 620879 - RNA, 19 nt, Artificial Sequence
  Description of Artificial Sequence: Synthetic oligonucleotide
uauuugccguugcucacug

SEQ ID NO: 620880 - RNA, 19 nt, Artificial Sequence
  Description of Artificial Sequence: Synthetic oligonucleotide
cagacuuauuaaaucucac

SEQ ID NO: 620881 - RNA, 19 nt, Artificial Sequence
  Description of Artificial Sequence: Synthetic oligonucleotide
aggugaaauauugaaccug

SEQ ID NO: 620882 - RNA, 19 nt, Artificial Sequence
  Description of Artificial Sequence: Synthetic oligonucleotide
aucaguuuucuguaaugaa

SEQ ID NO: 620883 - RNA, 19 nt, Artificial Sequence
  Description of Artificial Sequence: Synthetic oligonucleotide
aacuaucaguuuucuguaa

SEQ ID NO: 620884 - RNA, 19 nt, Artificial Sequence
  Description of Artificial Sequence: Synthetic oligonucleotide
auauauacuuucucagcuu

SEQ ID NO: 620885 - RNA, 19 nt, Artificial Sequence
  Description of Artificial Sequence: Synthetic oligonucleotide
caucagucgacuuauguua

SEQ ID NO: 620886 - RNA, 19 nt, Artificial Sequence
  Description of Artificial Sequence: Synthetic oligonucleotide
uuccuagcugguguagucg

SEQ ID NO: 620887 - RNA, 19 nt, Artificial Sequence
  Description of Artificial Sequence: Synthetic oligonucleotide
gauauucacaagguccuca

SEQ ID NO: 620888 - RNA, 19 nt, Artificial Sequence
  Description of Artificial Sequence: Synthetic oligonucleotide
caaucaaacgcuguuguca

SEQ ID NO: 620889 - RNA, 19 nt, Artificial Sequence
  Description of Artificial Sequence: Synthetic oligonucleotide
ucucacgccucuccaaaga

SEQ ID NO: 620890 - RNA, 19 nt, Artificial Sequence
  Description of Artificial Sequence: Synthetic oligonucleotide
ucaucuugacggauagaaa

SEQ ID NO: 620891 - RNA, 19 nt, Artificial Sequence
  Description of Artificial Sequence: Synthetic oligonucleotide
auuaggcagcaucaugggu

SEQ ID NO: 620892 - RNA, 19 nt, Artificial Sequence
  Description of Artificial Sequence: Synthetic oligonucleotide
ugucuuuauugccgagagc

SEQ ID NO: 620893 - RNA, 19 nt, Artificial Sequence
  Description of Artificial Sequence: Synthetic oligonucleotide
gcggaccucaucuagcugg

SEQ ID NO: 620894 - RNA, 19 nt, Artificial Sequence
  Description of Artificial Sequence: Synthetic oligonucleotide
ugguguagucgguaguugu

SEQ ID NO: 620895 - RNA, 19 nt, Artificial Sequence
  Description of Artificial Sequence: Synthetic oligonucleotide
acacucuaggacuacggaa

SEQ ID NO: 620896 - RNA, 19 nt, Artificial Sequence
  Description of Artificial Sequence: Synthetic oligonucleotide
uucccgugaauacauucuc

SEQ ID NO: 620897 - RNA, 19 nt, Artificial Sequence
  Description of Artificial Sequence: Synthetic oligonucleotide
ugcauggugcuuuggcagc

SEQ ID NO: 620898 - RNA, 19 nt, Artificial Sequence
  Description of Artificial Sequence: Synthetic oligonucleotide
uugucauaucggaacugcu

SEQ ID NO: 620899 - RNA, 19 nt, Artificial Sequence
  Description of Artificial Sequence: Synthetic oligonucleotide
aggacuacggaaccaccug

SEQ ID NO: 620900 - RNA, 19 nt, Artificial Sequence
  Description of Artificial Sequence: Synthetic oligonucleotide
cacgccucuccaaagacuc

SEQ ID NO: 620901 - RNA, 19 nt, Artificial Sequence
  Description of Artificial Sequence: Synthetic oligonucleotide
uccuaccaaucaaacgcug

SEQ ID NO: 620902 - RNA, 19 nt, Artificial Sequence
  Description of Artificial Sequence: Synthetic oligonucleotide
uucugaaaacccgucagua

SEQ ID NO: 620903 - RNA, 19 nt, Artificial Sequence
  Description of Artificial Sequence: Synthetic oligonucleotide
cuacguuugcagaguuugg

SEQ ID NO: 620904 - RNA, 19 nt, Artificial Sequence
  Description of Artificial Sequence: Synthetic oligonucleotide
gggccuacaugauauauac

SEQ ID NO: 620905 - RNA, 19 nt, Artificial Sequence
  Description of Artificial Sequence: Synthetic oligonucleotide
agcgcuagauacaaaccuc

SEQ ID NO: 620906 - RNA, 19 nt, Artificial Sequence
  Description of Artificial Sequence: Synthetic oligonucleotide
uacaaugguucaucuguuc

SEQ ID NO: 620907 - RNA, 19 nt, Artificial Sequence
  Description of Artificial Sequence: Synthetic oligonucleotide
augcccaugaccuggcgga

SEQ ID NO: 620908 - RNA, 19 nt, Artificial Sequence
  Description of Artificial Sequence: Synthetic oligonucleotide
auuuacacucuaggacuac

SEQ ID NO: 620909 - RNA, 19 nt, Artificial Sequence
  Description of Artificial Sequence: Synthetic oligonucleotide
agcgcagcagauguucuac

SEQ ID NO: 620910 - RNA, 19 nt, Artificial Sequence
  Description of Artificial Sequence: Synthetic oligonucleotide
agcucaacuaucaguuuuc

SEQ ID NO: 620911 - RNA, 19 nt, Artificial Sequence
  Description of Artificial Sequence: Synthetic oligonucleotide
caugcccaugaccuggcgg

SEQ ID NO: 620912 - RNA, 19 nt, Artificial Sequence
  Description of Artificial Sequence: Synthetic oligonucleotide
cacugcggugucuuuauug

SEQ ID NO: 620913 - RNA, 19 nt, Artificial Sequence
  Description of Artificial Sequence: Synthetic oligonucleotide
ucgauccuacguuugcaga

SEQ ID NO: 620914 - RNA, 19 nt, Artificial Sequence
  Description of Artificial Sequence: Synthetic oligonucleotide
ugucucacgccucuccaaa

SEQ ID NO: 620915 - RNA, 19 nt, Artificial Sequence
  Description of Artificial Sequence: Synthetic oligonucleotide
acaaaugccaagacaggcu

SEQ ID NO: 620916 - RNA, 19 nt, Artificial Sequence
  Description of Artificial Sequence: Synthetic oligonucleotide
gaaccaauuccuacuucug

SEQ ID NO: 620917 - RNA, 19 nt, Artificial Sequence
  Description of Artificial Sequence: Synthetic oligonucleotide
aaaacccgucaguacuuau

SEQ ID NO: 620918 - RNA, 19 nt, Artificial Sequence
  Description of Artificial Sequence: Synthetic oligonucleotide
uucgccaccgggcuggguc

SEQ ID NO: 620919 - RNA, 19 nt, Artificial Sequence
  Description of Artificial Sequence: Synthetic oligonucleotide
gaacaucucgauauucaca

SEQ ID NO: 620920 - RNA, 19 nt, Artificial Sequence
  Description of Artificial Sequence: Synthetic oligonucleotide
cacgucacaagucacugca

SEQ ID NO: 620921 - RNA, 19 nt, Artificial Sequence
  Description of Artificial Sequence: Synthetic oligonucleotide
agucccaucacuagcaaaa

SEQ ID NO: 620922 - RNA, 19 nt, Artificial Sequence
  Description of Artificial Sequence: Synthetic oligonucleotide
agagaauuguagccauaga

SEQ ID NO: 620923 - RNA, 19 nt, Artificial Sequence
  Description of Artificial Sequence: Synthetic oligonucleotide
uuccuuugagaggugcaag

SEQ ID NO: 620924 - RNA, 19 nt, Artificial Sequence
  Description of Artificial Sequence: Synthetic oligonucleotide
cuaagaguauuugccguug

SEQ ID NO: 620925 - RNA, 19 nt, Artificial Sequence
  Description of Artificial Sequence: Synthetic oligonucleotide
cuaggacuacggaaccacc

SEQ ID NO: 620926 - RNA, 19 nt, Artificial Sequence
  Description of Artificial Sequence: Synthetic oligonucleotide
agagucgacagcugggcaa

SEQ ID NO: 620927 - RNA, 19 nt, Artificial Sequence
  Description of Artificial Sequence: Synthetic oligonucleotide
uuuccuuugagaggugcaa

SEQ ID NO: 620928 - RNA, 19 nt, Artificial Sequence
  Description of Artificial Sequence: Synthetic oligonucleotide
cagcagauguucuaccauc

SEQ ID NO: 620929 - RNA, 19 nt, Artificial Sequence
  Description of Artificial Sequence: Synthetic oligonucleotide
acugaucuuuggucgcaag

SEQ ID NO: 620930 - RNA, 19 nt, Artificial Sequence
  Description of Artificial Sequence: Synthetic oligonucleotide
ugcagaaacucaguccagu

SEQ ID NO: 620931 - RNA, 19 nt, Artificial Sequence
  Description of Artificial Sequence: Synthetic oligonucleotide
uggucgcaagaaacaaaug

SEQ ID NO: 620932 - RNA, 19 nt, Artificial Sequence
  Description of Artificial Sequence: Synthetic oligonucleotide
gcuagauacaaaccucuac

SEQ ID NO: 620933 - RNA, 19 nt, Artificial Sequence
  Description of Artificial Sequence: Synthetic oligonucleotide
aaccugguguggcaacacu

SEQ ID NO: 620934 - RNA, 19 nt, Artificial Sequence
  Description of Artificial Sequence: Synthetic oligonucleotide
ucacgccucuccaaagacu

SEQ ID NO: 620935 - RNA, 19 nt, Artificial Sequence
  Description of Artificial Sequence: Synthetic oligonucleotide
gaggcgugcacauggcaac

SEQ ID NO: 620936 - RNA, 19 nt, Artificial Sequence
  Description of Artificial Sequence: Synthetic oligonucleotide
ucggcaccacgucacaagu

SEQ ID NO: 620937 - RNA, 19 nt, Artificial Sequence
  Description of Artificial Sequence: Synthetic oligonucleotide
uauugaaccugugcacaga

SEQ ID NO: 620938 - RNA, 19 nt, Artificial Sequence
  Description of Artificial Sequence: Synthetic oligonucleotide
ggaaccaccuggcaaggcc

SEQ ID NO: 620939 - RNA, 19 nt, Artificial Sequence
  Description of Artificial Sequence: Synthetic oligonucleotide
auacaaaccucuacauaug

SEQ ID NO: 620940 - RNA, 19 nt, Artificial Sequence
  Description of Artificial Sequence: Synthetic oligonucleotide
gaucuuuggucgcaagaaa

SEQ ID NO: 620941 - RNA, 19 nt, Artificial Sequence
  Description of Artificial Sequence: Synthetic oligonucleotide
gucggguuaacuccugcac

SEQ ID NO: 620942 - RNA, 19 nt, Artificial Sequence
  Description of Artificial Sequence: Synthetic oligonucleotide
aucucgauauucacaaggu

SEQ ID NO: 620943 - RNA, 19 nt, Artificial Sequence
  Description of Artificial Sequence: Synthetic oligonucleotide
aggaggguauggcucccac

SEQ ID NO: 620944 - RNA, 19 nt, Artificial Sequence
  Description of Artificial Sequence: Synthetic oligonucleotide
aacucaguccaguggcuuu

SEQ ID NO: 620945 - RNA, 19 nt, Artificial Sequence
  Description of Artificial Sequence: Synthetic oligonucleotide
ggacuacggaaccaccugg

SEQ ID NO: 620946 - RNA, 19 nt, Artificial Sequence
  Description of Artificial Sequence: Synthetic oligonucleotide
uuugguucuugggcaaaca

SEQ ID NO: 620947 - RNA, 19 nt, Artificial Sequence
  Description of Artificial Sequence: Synthetic oligonucleotide
cucggcaccacgucacaag

SEQ ID NO: 620948 - RNA, 19 nt, Artificial Sequence
  Description of Artificial Sequence: Synthetic oligonucleotide
ucaaugccgcucuggcgag

SEQ ID NO: 620949 - RNA, 19 nt, Artificial Sequence
  Description of Artificial Sequence: Synthetic oligonucleotide
cuacuucugagaugcucug

SEQ ID NO: 620950 - RNA, 19 nt, Artificial Sequence
  Description of Artificial Sequence: Synthetic oligonucleotide
acuacggaaccaccuggca

SEQ ID NO: 620951 - RNA, 19 nt, Artificial Sequence
  Description of Artificial Sequence: Synthetic oligonucleotide
aagcguuuauucagugucu

SEQ ID NO: 620952 - RNA, 19 nt, Artificial Sequence
  Description of Artificial Sequence: Synthetic oligonucleotide
gguuguaugugaauuacaa

SEQ ID NO: 620953 - RNA, 19 nt, Artificial Sequence
  Description of Artificial Sequence: Synthetic oligonucleotide
uguagucgguaguugucau

SEQ ID NO: 620954 - RNA, 19 nt, Artificial Sequence
  Description of Artificial Sequence: Synthetic oligonucleotide
caugucgcacagcauccag

SEQ ID NO: 620955 - RNA, 19 nt, Artificial Sequence
  Description of Artificial Sequence: Synthetic oligonucleotide
cuuuauugccgagagccca

SEQ ID NO: 620956 - RNA, 19 nt, Artificial Sequence
  Description of Artificial Sequence: Synthetic oligonucleotide
gacuacggaaccaccuggc

SEQ ID NO: 620957 - RNA, 19 nt, Artificial Sequence
  Description of Artificial Sequence: Synthetic oligonucleotide
ugguuucccgaucaauguu

SEQ ID NO: 620958 - RNA, 19 nt, Artificial Sequence
  Description of Artificial Sequence: Synthetic oligonucleotide
cauccaguaggcugaccac

SEQ ID NO: 620959 - RNA, 19 nt, Artificial Sequence
  Description of Artificial Sequence: Synthetic oligonucleotide
uggcggaccucaucuagcu

SEQ ID NO: 620960 - RNA, 19 nt, Artificial Sequence
  Description of Artificial Sequence: Synthetic oligonucleotide
aguggcuuucccgugaaua

SEQ ID NO: 620961 - RNA, 19 nt, Artificial Sequence
  Description of Artificial Sequence: Synthetic oligonucleotide
cucacgccucuccaaagac

SEQ ID NO: 620962 - RNA, 19 nt, Artificial Sequence
  Description of Artificial Sequence: Synthetic oligonucleotide
uuagcucaacuaucaguuu

SEQ ID NO: 620963 - RNA, 19 nt, Artificial Sequence
  Description of Artificial Sequence: Synthetic oligonucleotide
agucgguaguugucauauc

SEQ ID NO: 620964 - RNA, 19 nt, Artificial Sequence
  Description of Artificial Sequence: Synthetic oligonucleotide
guaugugaauuacaauggu

SEQ ID NO: 620965 - RNA, 19 nt, Artificial Sequence
  Description of Artificial Sequence: Synthetic oligonucleotide
agucgacuuauguuacaaa

SEQ ID NO: 620966 - RNA, 19 nt, Artificial Sequence
  Description of Artificial Sequence: Synthetic oligonucleotide
ccuacguuugcagaguuug

SEQ ID NO: 620967 - RNA, 19 nt, Artificial Sequence
  Description of Artificial Sequence: Synthetic oligonucleotide
acuuguuaucauggcacca

SEQ ID NO: 620968 - RNA, 19 nt, Artificial Sequence
  Description of Artificial Sequence: Synthetic oligonucleotide
cugaucuuuggucgcaaga

SEQ ID NO: 620969 - RNA, 19 nt, Artificial Sequence
  Description of Artificial Sequence: Synthetic oligonucleotide
aaacccgucaguacuuauu

SEQ ID NO: 620970 - RNA, 19 nt, Artificial Sequence
  Description of Artificial Sequence: Synthetic oligonucleotide
agcagauguucuaccauca

SEQ ID NO: 620971 - RNA, 19 nt, Artificial Sequence
  Description of Artificial Sequence: Synthetic oligonucleotide
ggcaccacgucacaaguca

SEQ ID NO: 620972 - RNA, 19 nt, Artificial Sequence
  Description of Artificial Sequence: Synthetic oligonucleotide
uggcuuucccgugaauaca

SEQ ID NO: 620973 - RNA, 19 nt, Artificial Sequence
  Description of Artificial Sequence: Synthetic oligonucleotide
gccggaggcgugcacaugg

SEQ ID NO: 620974 - RNA, 19 nt, Artificial Sequence
  Description of Artificial Sequence: Synthetic oligonucleotide
auauacuuucucagcuuga

SEQ ID NO: 620975 - RNA, 19 nt, Artificial Sequence
  Description of Artificial Sequence: Synthetic oligonucleotide
ggaucagcauucgccaccg

SEQ ID NO: 620976 - RNA, 19 nt, Artificial Sequence
  Description of Artificial Sequence: Synthetic oligonucleotide
acguuuguucugccggaca

SEQ ID NO: 620977 - RNA, 19 nt, Artificial Sequence
  Description of Artificial Sequence: Synthetic oligonucleotide
gucucacgccucuccaaag

SEQ ID NO: 620978 - RNA, 19 nt, Artificial Sequence
  Description of Artificial Sequence: Synthetic oligonucleotide
gugaagucaggaaaggccu

SEQ ID NO: 620979 - RNA, 19 nt, Artificial Sequence
  Description of Artificial Sequence: Synthetic oligonucleotide
gggacuuguuaucauggca

SEQ ID NO: 620980 - RNA, 19 nt, Artificial Sequence
  Description of Artificial Sequence: Synthetic oligonucleotide
aauaagcgcuagauacaaa

SEQ ID NO: 620981 - RNA, 19 nt, Artificial Sequence
  Description of Artificial Sequence: Synthetic oligonucleotide
cuuugguucuugggcaaac

SEQ ID NO: 620982 - RNA, 19 nt, Artificial Sequence
  Description of Artificial Sequence: Synthetic oligonucleotide
aggugcucgauccuacguu

SEQ ID NO: 620983 - RNA, 19 nt, Artificial Sequence
  Description of Artificial Sequence: Synthetic oligonucleotide
cacagcgcagcagauguuc

SEQ ID NO: 620984 - RNA, 19 nt, Artificial Sequence
  Description of Artificial Sequence: Synthetic oligonucleotide
cugcagaaacucaguccag

SEQ ID NO: 620985 - RNA, 19 nt, Artificial Sequence
  Description of Artificial Sequence: Synthetic oligonucleotide
guuguaugugaauuacaau

SEQ ID NO: 620986 - RNA, 19 nt, Artificial Sequence
  Description of Artificial Sequence: Synthetic oligonucleotide
gucgcacagcauccagacg

SEQ ID NO: 620987 - RNA, 19 nt, Artificial Sequence
  Description of Artificial Sequence: Synthetic oligonucleotide
aguuggcacagugagccau

SEQ ID NO: 620988 - RNA, 19 nt, Artificial Sequence
  Description of Artificial Sequence: Synthetic oligonucleotide
gagucgacagcugggcaac

SEQ ID NO: 620989 - RNA, 19 nt, Artificial Sequence
  Description of Artificial Sequence: Synthetic oligonucleotide
ggguggguuguucucauuc

SEQ ID NO: 620990 - RNA, 19 nt, Artificial Sequence
  Description of Artificial Sequence: Synthetic oligonucleotide
guguggcaacacuuagccc

SEQ ID NO: 620991 - RNA, 19 nt, Artificial Sequence
  Description of Artificial Sequence: Synthetic oligonucleotide
agguggcugucucacgccu

SEQ ID NO: 620992 - RNA, 19 nt, Artificial Sequence
  Description of Artificial Sequence: Synthetic oligonucleotide
uaucaucuugacggauaga

SEQ ID NO: 620993 - RNA, 19 nt, Artificial Sequence
  Description of Artificial Sequence: Synthetic oligonucleotide
ucauggcaccaugcaaggc

SEQ ID NO: 620994 - RNA, 19 nt, Artificial Sequence
  Description of Artificial Sequence: Synthetic oligonucleotide
cuuuggucgcaagaaacaa

SEQ ID NO: 620995 - RNA, 19 nt, Artificial Sequence
  Description of Artificial Sequence: Synthetic oligonucleotide
gccauuaggcagcaucaug

SEQ ID NO: 620996 - RNA, 19 nt, Artificial Sequence
  Description of Artificial Sequence: Synthetic oligonucleotide
caggaacaucucgauauuc

SEQ ID NO: 620997 - RNA, 19 nt, Artificial Sequence
  Description of Artificial Sequence: Synthetic oligonucleotide
auuagcuaaucaacaucaa

SEQ ID NO: 620998 - RNA, 19 nt, Artificial Sequence
  Description of Artificial Sequence: Synthetic oligonucleotide
guucugccggacaaguuca

SEQ ID NO: 620999 - RNA, 19 nt, Artificial Sequence
  Description of Artificial Sequence: Synthetic oligonucleotide
ggauagaaagcagagaauu

SEQ ID NO: 621000 - RNA, 19 nt, Artificial Sequence
  Description of Artificial Sequence: Synthetic oligonucleotide
cagggaaauaacugaugaa

SEQ ID NO: 621001 - RNA, 19 nt, Artificial Sequence
  Description of Artificial Sequence: Synthetic oligonucleotide
cuacggaaccaccuggcaa

SEQ ID NO: 621002 - RNA, 19 nt, Artificial Sequence
  Description of Artificial Sequence: Synthetic oligonucleotide
agcauucgccaccgggcug

SEQ ID NO: 621003 - RNA, 19 nt, Artificial Sequence
  Description of Artificial Sequence: Synthetic oligonucleotide
ccagacguuuguucugccg

SEQ ID NO: 621004 - RNA, 19 nt, Artificial Sequence
  Description of Artificial Sequence: Synthetic oligonucleotide
caugcgcuuccguuuccac

SEQ ID NO: 621005 - RNA, 19 nt, Artificial Sequence
  Description of Artificial Sequence: Synthetic oligonucleotide
gaucagcauucgccaccgg

SEQ ID NO: 621006 - RNA, 19 nt, Artificial Sequence
  Description of Artificial Sequence: Synthetic oligonucleotide
cgauccuacguuugcagag

SEQ ID NO: 621007 - RNA, 19 nt, Artificial Sequence
  Description of Artificial Sequence: Synthetic oligonucleotide
uuguucugccggacaaguu

SEQ ID NO: 621008 - RNA, 19 nt, Artificial Sequence
  Description of Artificial Sequence: Synthetic oligonucleotide
gguuaacuccugcaccuuc

SEQ ID NO: 621009 - RNA, 19 nt, Artificial Sequence
  Description of Artificial Sequence: Synthetic oligonucleotide
uccuacguuugcagaguuu

SEQ ID NO: 621010 - RNA, 19 nt, Artificial Sequence
  Description of Artificial Sequence: Synthetic oligonucleotide
aggcgugcacauggcaacg

SEQ ID NO: 621011 - RNA, 19 nt, Artificial Sequence
  Description of Artificial Sequence: Synthetic oligonucleotide
aggagauaaggcggugcug

SEQ ID NO: 621012 - RNA, 19 nt, Artificial Sequence
  Description of Artificial Sequence: Synthetic oligonucleotide
gaaccugugcacagacaca

SEQ ID NO: 621013 - RNA, 19 nt, Artificial Sequence
  Description of Artificial Sequence: Synthetic oligonucleotide
gacguuuguucugccggac

SEQ ID NO: 621014 - RNA, 19 nt, Artificial Sequence
  Description of Artificial Sequence: Synthetic oligonucleotide
cuuguauggggagaugugu

SEQ ID NO: 621015 - RNA, 19 nt, Artificial Sequence
  Description of Artificial Sequence: Synthetic oligonucleotide
cugguguagucgguaguug

SEQ ID NO: 621016 - RNA, 19 nt, Artificial Sequence
  Description of Artificial Sequence: Synthetic oligonucleotide
guauggcucccacccacca

SEQ ID NO: 621017 - RNA, 19 nt, Artificial Sequence
  Description of Artificial Sequence: Synthetic oligonucleotide
guuggcacagugagccaug

SEQ ID NO: 621018 - RNA, 19 nt, Artificial Sequence
  Description of Artificial Sequence: Synthetic oligonucleotide
auccuacguuugcagaguu

SEQ ID NO: 621019 - RNA, 19 nt, Artificial Sequence
  Description of Artificial Sequence: Synthetic oligonucleotide
agauaaggcggugcuggaa

SEQ ID NO: 621020 - RNA, 19 nt, Artificial Sequence
  Description of Artificial Sequence: Synthetic oligonucleotide
cauggguggguuguucuca

SEQ ID NO: 621021 - RNA, 19 nt, Artificial Sequence
  Description of Artificial Sequence: Synthetic oligonucleotide
uguguguaucuggcgggaa

SEQ ID NO: 621022 - RNA, 19 nt, Artificial Sequence
  Description of Artificial Sequence: Synthetic oligonucleotide
ggguauggcucccacccac

SEQ ID NO: 621023 - RNA, 19 nt, Artificial Sequence
  Description of Artificial Sequence: Synthetic oligonucleotide
cucuggcgagccaacuuca

SEQ ID NO: 621024 - RNA, 19 nt, Artificial Sequence
  Description of Artificial Sequence: Synthetic oligonucleotide
gguaguugucauaucggaa

SEQ ID NO: 621025 - RNA, 19 nt, Artificial Sequence
  Description of Artificial Sequence: Synthetic oligonucleotide
aggccucggcaccacguca

SEQ ID NO: 621026 - RNA, 19 nt, Artificial Sequence
  Description of Artificial Sequence: Synthetic oligonucleotide
gaaaacccgucaguacuua

SEQ ID NO: 621027 - RNA, 19 nt, Artificial Sequence
  Description of Artificial Sequence: Synthetic oligonucleotide
gauccuacguuugcagagu

SEQ ID NO: 621028 - RNA, 19 nt, Artificial Sequence
  Description of Artificial Sequence: Synthetic oligonucleotide
cauaugguuguaugugaau

SEQ ID NO: 621029 - RNA, 19 nt, Artificial Sequence
  Description of Artificial Sequence: Synthetic oligonucleotide
auuugccguugcucacuga

SEQ ID NO: 621030 - RNA, 19 nt, Artificial Sequence
  Description of Artificial Sequence: Synthetic oligonucleotide
aaguuuccuuugagaggug

SEQ ID NO: 621031 - RNA, 19 nt, Artificial Sequence
  Description of Artificial Sequence: Synthetic oligonucleotide
uccggagucgggacuuguu

SEQ ID NO: 621032 - RNA, 19 nt, Artificial Sequence
  Description of Artificial Sequence: Synthetic oligonucleotide
cagucgacuuauguuacaa

SEQ ID NO: 621033 - RNA, 19 nt, Artificial Sequence
  Description of Artificial Sequence: Synthetic oligonucleotide
cuuguuaucauggcaccau

SEQ ID NO: 621034 - RNA, 19 nt, Artificial Sequence
  Description of Artificial Sequence: Synthetic oligonucleotide
ggucggguuaacuccugca

SEQ ID NO: 621035 - RNA, 19 nt, Artificial Sequence
  Description of Artificial Sequence: Synthetic oligonucleotide
acgucacaagucacugcag

SEQ ID NO: 621036 - RNA, 19 nt, Artificial Sequence
  Description of Artificial Sequence: Synthetic oligonucleotide
ggcaucagucgacuuaugu

SEQ ID NO: 621037 - RNA, 19 nt, Artificial Sequence
  Description of Artificial Sequence: Synthetic oligonucleotide
agggccuacaugauauaua

SEQ ID NO: 621038 - RNA, 19 nt, Artificial Sequence
  Description of Artificial Sequence: Synthetic oligonucleotide
agcuaccaccauggugacg

SEQ ID NO: 621039 - RNA, 19 nt, Artificial Sequence
  Description of Artificial Sequence: Synthetic oligonucleotide
ccuggcggaccucaucuag

SEQ ID NO: 621040 - RNA, 19 nt, Artificial Sequence
  Description of Artificial Sequence: Synthetic oligonucleotide
cuguagagugagggugaag

SEQ ID NO: 621041 - RNA, 19 nt, Artificial Sequence
  Description of Artificial Sequence: Synthetic oligonucleotide
caaccugguguggcaacac

SEQ ID NO: 621042 - RNA, 19 nt, Artificial Sequence
  Description of Artificial Sequence: Synthetic oligonucleotide
guauggggagaugugugua

SEQ ID NO: 621043 - RNA, 19 nt, Artificial Sequence
  Description of Artificial Sequence: Synthetic oligonucleotide
ugcgguccaugcgcuuccg

SEQ ID NO: 621044 - RNA, 19 nt, Artificial Sequence
  Description of Artificial Sequence: Synthetic oligonucleotide
gcaacgcagggccuacaug

SEQ ID NO: 621045 - RNA, 19 nt, Artificial Sequence
  Description of Artificial Sequence: Synthetic oligonucleotide
gcacagugagccaugggca

SEQ ID NO: 621046 - RNA, 19 nt, Artificial Sequence
  Description of Artificial Sequence: Synthetic oligonucleotide
acccgucaguacuuauuuu

SEQ ID NO: 621047 - RNA, 19 nt, Artificial Sequence
  Description of Artificial Sequence: Synthetic oligonucleotide
gcuuuggcagcagcuagac

SEQ ID NO: 621048 - RNA, 19 nt, Artificial Sequence
  Description of Artificial Sequence: Synthetic oligonucleotide
ggaagcguuuauucagugu

SEQ ID NO: 621049 - RNA, 19 nt, Artificial Sequence
  Description of Artificial Sequence: Synthetic oligonucleotide
uggugacguggcugguuuc

SEQ ID NO: 621050 - RNA, 19 nt, Artificial Sequence
  Description of Artificial Sequence: Synthetic oligonucleotide
cccgucaguacuuauuuua

SEQ ID NO: 621051 - RNA, 19 nt, Artificial Sequence
  Description of Artificial Sequence: Synthetic oligonucleotide
cagcuaccaccauggugac

SEQ ID NO: 621052 - RNA, 19 nt, Artificial Sequence
  Description of Artificial Sequence: Synthetic oligonucleotide
ugccgcucuggcgagccaa

SEQ ID NO: 621053 - RNA, 19 nt, Artificial Sequence
  Description of Artificial Sequence: Synthetic oligonucleotide
cuccccugagucccaucac

SEQ ID NO: 621054 - RNA, 19 nt, Artificial Sequence
  Description of Artificial Sequence: Synthetic oligonucleotide
cagagucgacagcugggca

SEQ ID NO: 621055 - RNA, 19 nt, Artificial Sequence
  Description of Artificial Sequence: Synthetic oligonucleotide
agccauuaggcagcaucau

SEQ ID NO: 621056 - RNA, 19 nt, Artificial Sequence
  Description of Artificial Sequence: Synthetic oligonucleotide
cuguuuccuagcuggugua

SEQ ID NO: 621057 - RNA, 19 nt, Artificial Sequence
  Description of Artificial Sequence: Synthetic oligonucleotide
gguauggcucccacccacc

SEQ ID NO: 621058 - RNA, 19 nt, Artificial Sequence
  Description of Artificial Sequence: Synthetic oligonucleotide
cucuaggacuacggaacca

SEQ ID NO: 621059 - RNA, 19 nt, Artificial Sequence
  Description of Artificial Sequence: Synthetic oligonucleotide
ccacgucacaagucacugc

SEQ ID NO: 621060 - RNA, 19 nt, Artificial Sequence
  Description of Artificial Sequence: Synthetic oligonucleotide
cccgugaauacauucucaa

SEQ ID NO: 621061 - RNA, 19 nt, Artificial Sequence
  Description of Artificial Sequence: Synthetic oligonucleotide
accucuacauaugguugua

SEQ ID NO: 621062 - RNA, 19 nt, Artificial Sequence
  Description of Artificial Sequence: Synthetic oligonucleotide
gcaucagucgacuuauguu

SEQ ID NO: 621063 - RNA, 19 nt, Artificial Sequence
  Description of Artificial Sequence: Synthetic oligonucleotide
cuagcugguguagucggua

SEQ ID NO: 621064 - RNA, 19 nt, Artificial Sequence
  Description of Artificial Sequence: Synthetic oligonucleotide
cacuagcaaaaggaaggaa

SEQ ID NO: 621065 - RNA, 19 nt, Artificial Sequence
  Description of Artificial Sequence: Synthetic oligonucleotide
gggucggguuaacuccugc

SEQ ID NO: 621066 - RNA, 19 nt, Artificial Sequence
  Description of Artificial Sequence: Synthetic oligonucleotide
cugucucacgccucuccaa

SEQ ID NO: 621067 - RNA, 19 nt, Artificial Sequence
  Description of Artificial Sequence: Synthetic oligonucleotide
cugucaggaacaucucgau

SEQ ID NO: 621068 - RNA, 19 nt, Artificial Sequence
  Description of Artificial Sequence: Synthetic oligonucleotide
cuugaauccugaggcugaa

SEQ ID NO: 621069 - RNA, 19 nt, Artificial Sequence
  Description of Artificial Sequence: Synthetic oligonucleotide
cauaucggaacugcuggau

SEQ ID NO: 621070 - RNA, 19 nt, Artificial Sequence
  Description of Artificial Sequence: Synthetic oligonucleotide
gcgcagcagauguucuacc

SEQ ID NO: 621071 - RNA, 19 nt, Artificial Sequence
  Description of Artificial Sequence: Synthetic oligonucleotide
gagggucggguuaacuccu

SEQ ID NO: 621072 - RNA, 19 nt, Artificial Sequence
  Description of Artificial Sequence: Synthetic oligonucleotide
gcccaggcgugugaggugc

SEQ ID NO: 621073 - RNA, 19 nt, Artificial Sequence
  Description of Artificial Sequence: Synthetic oligonucleotide
ggcggaccucaucuagcug

SEQ ID NO: 621074 - RNA, 19 nt, Artificial Sequence
  Description of Artificial Sequence: Synthetic oligonucleotide
acguagccauuaggcagca

SEQ ID NO: 621075 - RNA, 19 nt, Artificial Sequence
  Description of Artificial Sequence: Synthetic oligonucleotide
aucuggcgggaaggccaac

SEQ ID NO: 621076 - RNA, 19 nt, Artificial Sequence
  Description of Artificial Sequence: Synthetic oligonucleotide
caaugccgcucuggcgagc

SEQ ID NO: 621077 - RNA, 19 nt, Artificial Sequence
  Description of Artificial Sequence: Synthetic oligonucleotide
gggcugugccaguuuguuc

SEQ ID NO: 621078 - RNA, 19 nt, Artificial Sequence
  Description of Artificial Sequence: Synthetic oligonucleotide
acauggcaacgcagggccu

SEQ ID NO: 621079 - RNA, 19 nt, Artificial Sequence
  Description of Artificial Sequence: Synthetic oligonucleotide
gccuguagagugaggguga

SEQ ID NO: 621080 - RNA, 19 nt, Artificial Sequence
  Description of Artificial Sequence: Synthetic oligonucleotide
ggcgugcacauggcaacgc

SEQ ID NO: 621081 - RNA, 19 nt, Artificial Sequence
  Description of Artificial Sequence: Synthetic oligonucleotide
cuuccggagucgggacuug

SEQ ID NO: 621082 - RNA, 19 nt, Artificial Sequence
  Description of Artificial Sequence: Synthetic oligonucleotide
gggcaacuacucaaggucu

SEQ ID NO: 621083 - RNA, 19 nt, Artificial Sequence
  Description of Artificial Sequence: Synthetic oligonucleotide
ccgugaauacauucucaaa

SEQ ID NO: 621084 - RNA, 19 nt, Artificial Sequence
  Description of Artificial Sequence: Synthetic oligonucleotide
gcagcagauguucuaccau

SEQ ID NO: 621085 - RNA, 19 nt, Artificial Sequence
  Description of Artificial Sequence: Synthetic oligonucleotide
gcgcuagauacaaaccucu

SEQ ID NO: 621086 - RNA, 19 nt, Artificial Sequence
  Description of Artificial Sequence: Synthetic oligonucleotide
agccauagacguagccauu

SEQ ID NO: 621087 - RNA, 19 nt, Artificial Sequence
  Description of Artificial Sequence: Synthetic oligonucleotide
gucgacagcugggcaacua

SEQ ID NO: 621088 - RNA, 19 nt, Artificial Sequence
  Description of Artificial Sequence: Synthetic oligonucleotide
cagggccuacaugauauau

SEQ ID NO: 621089 - RNA, 19 nt, Artificial Sequence
  Description of Artificial Sequence: Synthetic oligonucleotide
gcaccacgucacaagucac

SEQ ID NO: 621090 - RNA, 19 nt, Artificial Sequence
  Description of Artificial Sequence: Synthetic oligonucleotide
ggcuuucccgugaauacau

SEQ ID NO: 621091 - RNA, 19 nt, Artificial Sequence
  Description of Artificial Sequence: Synthetic oligonucleotide
ccggaggcgugcacauggc

SEQ ID NO: 621092 - RNA, 19 nt, Artificial Sequence
  Description of Artificial Sequence: Synthetic oligonucleotide
gguggcugucucacgccuc

SEQ ID NO: 621093 - RNA, 19 nt, Artificial Sequence
  Description of Artificial Sequence: Synthetic oligonucleotide
ccaaccugguguggcaaca

SEQ ID NO: 621094 - RNA, 19 nt, Artificial Sequence
  Description of Artificial Sequence: Synthetic oligonucleotide
cggguuaacuccugcaccu

SEQ ID NO: 621095 - RNA, 19 nt, Artificial Sequence
  Description of Artificial Sequence: Synthetic oligonucleotide
gcugguguagucgguaguu

SEQ ID NO: 621096 - RNA, 19 nt, Artificial Sequence
  Description of Artificial Sequence: Synthetic oligonucleotide
gcagggccuacaugauaua

SEQ ID NO: 621097 - RNA, 19 nt, Artificial Sequence
  Description of Artificial Sequence: Synthetic oligonucleotide
ggccuacaugauauauacu

SEQ ID NO: 621098 - RNA, 19 nt, Artificial Sequence
  Description of Artificial Sequence: Synthetic oligonucleotide
ggcaacuacucaaggucuu

SEQ ID NO: 621099 - RNA, 19 nt, Artificial Sequence
  Description of Artificial Sequence: Synthetic oligonucleotide
cggcaccacgucacaaguc

SEQ ID NO: 621100 - RNA, 19 nt, Artificial Sequence
  Description of Artificial Sequence: Synthetic oligonucleotide
cgcuagauacaaaccucua

SEQ ID NO: 621101 - RNA, 19 nt, Artificial Sequence
  Description of Artificial Sequence: Synthetic oligonucleotide
cggauagaaagcagagaau

SEQ ID NO: 621102 - RNA, 19 nt, Artificial Sequence
  Description of Artificial Sequence: Synthetic oligonucleotide
ccaugcgcuuccguuucca

SEQ ID NO: 621103 - RNA, 19 nt, Artificial Sequence
  Description of Artificial Sequence: Synthetic oligonucleotide
aggcgggaguuggcacagu

SEQ ID NO: 621104 - RNA, 19 nt, Artificial Sequence
  Description of Artificial Sequence: Synthetic oligonucleotide
ccuagcugguguagucggu

SEQ ID NO: 621105 - RNA, 19 nt, Artificial Sequence
  Description of Artificial Sequence: Synthetic oligonucleotide
ggccggaggcgugcacaug

SEQ ID NO: 621106 - RNA, 19 nt, Artificial Sequence
  Description of Artificial Sequence: Synthetic oligonucleotide
cagcucggaagcguuuauu

SEQ ID NO: 621107 - RNA, 19 nt, Artificial Sequence
  Description of Artificial Sequence: Synthetic oligonucleotide
gcacugcggugucuuuauu

SEQ ID NO: 621108 - RNA, 19 nt, Artificial Sequence
  Description of Artificial Sequence: Synthetic oligonucleotide
ccguuuccacaugcuggcu

SEQ ID NO: 621109 - RNA, 19 nt, Artificial Sequence
  Description of Artificial Sequence: Synthetic oligonucleotide
uuuucuaugagccugggag

SEQ ID NO: 621110 - RNA, 19 nt, Artificial Sequence
  Description of Artificial Sequence: Synthetic oligonucleotide
aagaguuaccaccauagcc

SEQ ID NO: 621111 - RNA, 19 nt, Artificial Sequence
  Description of Artificial Sequence: Synthetic oligonucleotide
aaaaccgugaauuuggaug

SEQ ID NO: 621112 - RNA, 19 nt, Artificial Sequence
  Description of Artificial Sequence: Synthetic oligonucleotide
cuugccaccacauaggccg

SEQ ID NO: 621113 - RNA, 19 nt, Artificial Sequence
  Description of Artificial Sequence: Synthetic oligonucleotide
ucucuuaucagacagcaug

SEQ ID NO: 621114 - RNA, 19 nt, Artificial Sequence
  Description of Artificial Sequence: Synthetic oligonucleotide
aauaucucgaaccuccugu

SEQ ID NO: 621115 - RNA, 19 nt, Artificial Sequence
  Description of Artificial Sequence: Synthetic oligonucleotide
uccaauucgggacaguggg

SEQ ID NO: 621116 - RNA, 19 nt, Artificial Sequence
  Description of Artificial Sequence: Synthetic oligonucleotide
gaaggaguuacaaucaccg

SEQ ID NO: 621117 - RNA, 19 nt, Artificial Sequence
  Description of Artificial Sequence: Synthetic oligonucleotide
aguguucucagucucaguc

SEQ ID NO: 621118 - RNA, 19 nt, Artificial Sequence
  Description of Artificial Sequence: Synthetic oligonucleotide
acugguuucggccacauug

SEQ ID NO: 621119 - RNA, 19 nt, Artificial Sequence
  Description of Artificial Sequence: Synthetic oligonucleotide
aggaguuacaaucaccguc

SEQ ID NO: 621120 - RNA, 19 nt, Artificial Sequence
  Description of Artificial Sequence: Synthetic oligonucleotide
agaguuaccaccauagccg

SEQ ID NO: 621121 - RNA, 19 nt, Artificial Sequence
  Description of Artificial Sequence: Synthetic oligonucleotide
aguacagguguuccuaggc

SEQ ID NO: 621122 - RNA, 19 nt, Artificial Sequence
  Description of Artificial Sequence: Synthetic oligonucleotide
ugugaaucucuuaucagac

SEQ ID NO: 621123 - RNA, 19 nt, Artificial Sequence
  Description of Artificial Sequence: Synthetic oligonucleotide
aauacgcaugcuugccacc

SEQ ID NO: 621124 - RNA, 19 nt, Artificial Sequence
  Description of Artificial Sequence: Synthetic oligonucleotide
ucuaaucgucggcagaucc

SEQ ID NO: 621125 - RNA, 19 nt, Artificial Sequence
  Description of Artificial Sequence: Synthetic oligonucleotide
uugaccuucacugucaaac

SEQ ID NO: 621126 - RNA, 19 nt, Artificial Sequence
  Description of Artificial Sequence: Synthetic oligonucleotide
uuuguguucagcagcggca

SEQ ID NO: 621127 - RNA, 19 nt, Artificial Sequence
  Description of Artificial Sequence: Synthetic oligonucleotide
cucgcuggaauucaucugg

SEQ ID NO: 621128 - RNA, 19 nt, Artificial Sequence
  Description of Artificial Sequence: Synthetic oligonucleotide
aaagucccgaacuccagcu

SEQ ID NO: 621129 - RNA, 19 nt, Artificial Sequence
  Description of Artificial Sequence: Synthetic oligonucleotide
gaagcacauacauggugcg

SEQ ID NO: 621130 - RNA, 19 nt, Artificial Sequence
  Description of Artificial Sequence: Synthetic oligonucleotide
agacacuugaugaagucac

SEQ ID NO: 621131 - RNA, 19 nt, Artificial Sequence
  Description of Artificial Sequence: Synthetic oligonucleotide
agaguguugcucuggauug

SEQ ID NO: 621132 - RNA, 19 nt, Artificial Sequence
  Description of Artificial Sequence: Synthetic oligonucleotide
aggguuuggaugcuacggc

SEQ ID NO: 621133 - RNA, 19 nt, Artificial Sequence
  Description of Artificial Sequence: Synthetic oligonucleotide
agucccgucacaaaugugg

SEQ ID NO: 621134 - RNA, 19 nt, Artificial Sequence
  Description of Artificial Sequence: Synthetic oligonucleotide
caugacgccaguugaaggc

SEQ ID NO: 621135 - RNA, 19 nt, Artificial Sequence
  Description of Artificial Sequence: Synthetic oligonucleotide
gagcauucucaccaaaacc

SEQ ID NO: 621136 - RNA, 19 nt, Artificial Sequence
  Description of Artificial Sequence: Synthetic oligonucleotide
uugacguggaagauacgag

SEQ ID NO: 621137 - RNA, 19 nt, Artificial Sequence
  Description of Artificial Sequence: Synthetic oligonucleotide
gugucuacugcuuggaggc

SEQ ID NO: 621138 - RNA, 19 nt, Artificial Sequence
  Description of Artificial Sequence: Synthetic oligonucleotide
aaggagacgaucucccgcu

SEQ ID NO: 621139 - RNA, 19 nt, Artificial Sequence
  Description of Artificial Sequence: Synthetic oligonucleotide
guacauagcagccauggca

SEQ ID NO: 621140 - RNA, 19 nt, Artificial Sequence
  Description of Artificial Sequence: Synthetic oligonucleotide
acaaucaccgucuugcuuu

SEQ ID NO: 621141 - RNA, 19 nt, Artificial Sequence
  Description of Artificial Sequence: Synthetic oligonucleotide
ucaggucacauucuucgca

SEQ ID NO: 621142 - RNA, 19 nt, Artificial Sequence
  Description of Artificial Sequence: Synthetic oligonucleotide
ucuacuuuccagccuggca

SEQ ID NO: 621143 - RNA, 19 nt, Artificial Sequence
  Description of Artificial Sequence: Synthetic oligonucleotide
caguugacguggaagauac

SEQ ID NO: 621144 - RNA, 19 nt, Artificial Sequence
  Description of Artificial Sequence: Synthetic oligonucleotide
agguacauagcagccaugg

SEQ ID NO: 621145 - RNA, 19 nt, Artificial Sequence
  Description of Artificial Sequence: Synthetic oligonucleotide
ucagguagcuccuaauauc

SEQ ID NO: 621146 - RNA, 19 nt, Artificial Sequence
  Description of Artificial Sequence: Synthetic oligonucleotide
agcuccuaauaucucgaac

SEQ ID NO: 621147 - RNA, 19 nt, Artificial Sequence
  Description of Artificial Sequence: Synthetic oligonucleotide
ucgggagguacauagcagc

SEQ ID NO: 621148 - RNA, 19 nt, Artificial Sequence
  Description of Artificial Sequence: Synthetic oligonucleotide
uuggagguaguguccaaag

SEQ ID NO: 621149 - RNA, 19 nt, Artificial Sequence
  Description of Artificial Sequence: Synthetic oligonucleotide
uaauacgcaugcuugccac

SEQ ID NO: 621150 - RNA, 19 nt, Artificial Sequence
  Description of Artificial Sequence: Synthetic oligonucleotide
ucgugcauaaugaucuuuc

SEQ ID NO: 621151 - RNA, 19 nt, Artificial Sequence
  Description of Artificial Sequence: Synthetic oligonucleotide
uauacuuggggagcuuccg

SEQ ID NO: 621152 - RNA, 19 nt, Artificial Sequence
  Description of Artificial Sequence: Synthetic oligonucleotide
uccagucuagcacucgagc

SEQ ID NO: 621153 - RNA, 19 nt, Artificial Sequence
  Description of Artificial Sequence: Synthetic oligonucleotide
gaugcuacggcguggugac

SEQ ID NO: 621154 - RNA, 19 nt, Artificial Sequence
  Description of Artificial Sequence: Synthetic oligonucleotide
ugcuuuaucucgccggaac

SEQ ID NO: 621155 - RNA, 19 nt, Artificial Sequence
  Description of Artificial Sequence: Synthetic oligonucleotide
ggugucuacugcuuggagg

SEQ ID NO: 621156 - RNA, 19 nt, Artificial Sequence
  Description of Artificial Sequence: Synthetic oligonucleotide
ugguacuagcccaauggga

SEQ ID NO: 621157 - RNA, 19 nt, Artificial Sequence
  Description of Artificial Sequence: Synthetic oligonucleotide
aucgucggcagauccaguc

SEQ ID NO: 621158 - RNA, 19 nt, Artificial Sequence
  Description of Artificial Sequence: Synthetic oligonucleotide
accgaaugcagacacuuga

SEQ ID NO: 621159 - RNA, 19 nt, Artificial Sequence
  Description of Artificial Sequence: Synthetic oligonucleotide
uuucuaugagccugggagu

SEQ ID NO: 621160 - RNA, 19 nt, Artificial Sequence
  Description of Artificial Sequence: Synthetic oligonucleotide
ggagcuuccggauaagacc

SEQ ID NO: 621161 - RNA, 19 nt, Artificial Sequence
  Description of Artificial Sequence: Synthetic oligonucleotide
auaauacgcaugcuugcca

SEQ ID NO: 621162 - RNA, 19 nt, Artificial Sequence
  Description of Artificial Sequence: Synthetic oligonucleotide
cugguuucggccacauugg

SEQ ID NO: 621163 - RNA, 19 nt, Artificial Sequence
  Description of Artificial Sequence: Synthetic oligonucleotide
uaaucgucggcagauccag

SEQ ID NO: 621164 - RNA, 19 nt, Artificial Sequence
  Description of Artificial Sequence: Synthetic oligonucleotide
cacacucuacuuuccagcc

SEQ ID NO: 621165 - RNA, 19 nt, Artificial Sequence
  Description of Artificial Sequence: Synthetic oligonucleotide
cauucuucgcacacgcccc

SEQ ID NO: 621166 - RNA, 19 nt, Artificial Sequence
  Description of Artificial Sequence: Synthetic oligonucleotide
uaggcgggucauaauacgc

SEQ ID NO: 621167 - RNA, 19 nt, Artificial Sequence
  Description of Artificial Sequence: Synthetic oligonucleotide
guugacuugcucugucagg

SEQ ID NO: 621168 - RNA, 19 nt, Artificial Sequence
  Description of Artificial Sequence: Synthetic oligonucleotide
cuaggcgggucauaauacg

SEQ ID NO: 621169 - RNA, 19 nt, Artificial Sequence
  Description of Artificial Sequence: Synthetic oligonucleotide
auagccagauugguuuugc

SEQ ID NO: 621170 - RNA, 19 nt, Artificial Sequence
  Description of Artificial Sequence: Synthetic oligonucleotide
gguacuagcccaaugggag

SEQ ID NO: 621171 - RNA, 19 nt, Artificial Sequence
  Description of Artificial Sequence: Synthetic oligonucleotide
acagcaugggaaaaggucu

SEQ ID NO: 621172 - RNA, 19 nt, Artificial Sequence
  Description of Artificial Sequence: Synthetic oligonucleotide
aaggaguuacaaucaccgu

SEQ ID NO: 621173 - RNA, 19 nt, Artificial Sequence
  Description of Artificial Sequence: Synthetic oligonucleotide
uucucaccaaaaccuggcc

SEQ ID NO: 621174 - RNA, 19 nt, Artificial Sequence
  Description of Artificial Sequence: Synthetic oligonucleotide
auacuuggggagcuuccgg

SEQ ID NO: 621175 - RNA, 19 nt, Artificial Sequence
  Description of Artificial Sequence: Synthetic oligonucleotide
uccugggaaucucucgucc

SEQ ID NO: 621176 - RNA, 19 nt, Artificial Sequence
  Description of Artificial Sequence: Synthetic oligonucleotide
uccuaggcgggucauaaua

SEQ ID NO: 621177 - RNA, 19 nt, Artificial Sequence
  Description of Artificial Sequence: Synthetic oligonucleotide
ugcuugccaccacauaggc

SEQ ID NO: 621178 - RNA, 19 nt, Artificial Sequence
  Description of Artificial Sequence: Synthetic oligonucleotide
augacgccaguugaaggcc

SEQ ID NO: 621179 - RNA, 19 nt, Artificial Sequence
  Description of Artificial Sequence: Synthetic oligonucleotide
uucccaguacacaccacca

SEQ ID NO: 621180 - RNA, 19 nt, Artificial Sequence
  Description of Artificial Sequence: Synthetic oligonucleotide
guugacguggaagauacga

SEQ ID NO: 621181 - RNA, 19 nt, Artificial Sequence
  Description of Artificial Sequence: Synthetic oligonucleotide
auccaggcgaugucauccc

SEQ ID NO: 621182 - RNA, 19 nt, Artificial Sequence
  Description of Artificial Sequence: Synthetic oligonucleotide
ucauacaccagagguacuc

SEQ ID NO: 621183 - RNA, 19 nt, Artificial Sequence
  Description of Artificial Sequence: Synthetic oligonucleotide
auagggacacccucuggug

SEQ ID NO: 621184 - RNA, 19 nt, Artificial Sequence
  Description of Artificial Sequence: Synthetic oligonucleotide
ucucgccggaaccaguuga

SEQ ID NO: 621185 - RNA, 19 nt, Artificial Sequence
  Description of Artificial Sequence: Synthetic oligonucleotide
ucgagcauucucaccaaaa

SEQ ID NO: 621186 - RNA, 19 nt, Artificial Sequence
  Description of Artificial Sequence: Synthetic oligonucleotide
ggaagcacauacauggugc

SEQ ID NO: 621187 - RNA, 19 nt, Artificial Sequence
  Description of Artificial Sequence: Synthetic oligonucleotide
cuaugagccugggaguucg

SEQ ID NO: 621188 - RNA, 19 nt, Artificial Sequence
  Description of Artificial Sequence: Synthetic oligonucleotide
cacucgagcauucucacca

SEQ ID NO: 621189 - RNA, 19 nt, Artificial Sequence
  Description of Artificial Sequence: Synthetic oligonucleotide
agcggccugcuuuaucucg

SEQ ID NO: 621190 - RNA, 19 nt, Artificial Sequence
  Description of Artificial Sequence: Synthetic oligonucleotide
caggguuuggaugcuacgg

SEQ ID NO: 621191 - RNA, 19 nt, Artificial Sequence
  Description of Artificial Sequence: Synthetic oligonucleotide
aguuacaaucaccgucuug

SEQ ID NO: 621192 - RNA, 19 nt, Artificial Sequence
  Description of Artificial Sequence: Synthetic oligonucleotide
cacacgccccuccagagcc

SEQ ID NO: 621193 - RNA, 19 nt, Artificial Sequence
  Description of Artificial Sequence: Synthetic oligonucleotide
ugggaguucgcuacccaga

SEQ ID NO: 621194 - RNA, 19 nt, Artificial Sequence
  Description of Artificial Sequence: Synthetic oligonucleotide
gccacauuggugaaaagag

SEQ ID NO: 621195 - RNA, 19 nt, Artificial Sequence
  Description of Artificial Sequence: Synthetic oligonucleotide
uuccggauaagacccugcu

SEQ ID NO: 621196 - RNA, 19 nt, Artificial Sequence
  Description of Artificial Sequence: Synthetic oligonucleotide
gauaagacccugcuuuucu

SEQ ID NO: 621197 - RNA, 19 nt, Artificial Sequence
  Description of Artificial Sequence: Synthetic oligonucleotide
cuacuuuccagccuggcaa

SEQ ID NO: 621198 - RNA, 19 nt, Artificial Sequence
  Description of Artificial Sequence: Synthetic oligonucleotide
caucaauagggacacccuc

SEQ ID NO: 621199 - RNA, 19 nt, Artificial Sequence
  Description of Artificial Sequence: Synthetic oligonucleotide
uggagguaguguccaaagu

SEQ ID NO: 621200 - RNA, 19 nt, Artificial Sequence
  Description of Artificial Sequence: Synthetic oligonucleotide
aaccucauccaggcgaugu

SEQ ID NO: 621201 - RNA, 19 nt, Artificial Sequence
  Description of Artificial Sequence: Synthetic oligonucleotide
gacccugcuuuucuagcag

SEQ ID NO: 621202 - RNA, 19 nt, Artificial Sequence
  Description of Artificial Sequence: Synthetic oligonucleotide
gaagcggccugcuuuaucu

SEQ ID NO: 621203 - RNA, 19 nt, Artificial Sequence
  Description of Artificial Sequence: Synthetic oligonucleotide
uuacaaucaccgucuugcu

SEQ ID NO: 621204 - RNA, 19 nt, Artificial Sequence
  Description of Artificial Sequence: Synthetic oligonucleotide
aagucccgaacuccagcug

SEQ ID NO: 621205 - RNA, 19 nt, Artificial Sequence
  Description of Artificial Sequence: Synthetic oligonucleotide
uacggcguggugaccagca

SEQ ID NO: 621206 - RNA, 19 nt, Artificial Sequence
  Description of Artificial Sequence: Synthetic oligonucleotide
auagccgcugccgaaggag

SEQ ID NO: 621207 - RNA, 19 nt, Artificial Sequence
  Description of Artificial Sequence: Synthetic oligonucleotide
uggugucuacugcuuggag

SEQ ID NO: 621208 - RNA, 19 nt, Artificial Sequence
  Description of Artificial Sequence: Synthetic oligonucleotide
gccagauugguuuugccac

SEQ ID NO: 621209 - RNA, 19 nt, Artificial Sequence
  Description of Artificial Sequence: Synthetic oligonucleotide
auacaccagagguacuccu

SEQ ID NO: 621210 - RNA, 19 nt, Artificial Sequence
  Description of Artificial Sequence: Synthetic oligonucleotide
agauugguuuugccacagg

SEQ ID NO: 621211 - RNA, 19 nt, Artificial Sequence
  Description of Artificial Sequence: Synthetic oligonucleotide
gacccaugcugaauggaag

SEQ ID NO: 621212 - RNA, 19 nt, Artificial Sequence
  Description of Artificial Sequence: Synthetic oligonucleotide
agacccugcuuuucuagca

SEQ ID NO: 621213 - RNA, 19 nt, Artificial Sequence
  Description of Artificial Sequence: Synthetic oligonucleotide
ucuucgcacacgccccucc

SEQ ID NO: 621214 - RNA, 19 nt, Artificial Sequence
  Description of Artificial Sequence: Synthetic oligonucleotide
aucaaauuguucaucuuuu

SEQ ID NO: 621215 - RNA, 19 nt, Artificial Sequence
  Description of Artificial Sequence: Synthetic oligonucleotide
auccugggaaucucucguc

SEQ ID NO: 621216 - RNA, 19 nt, Artificial Sequence
  Description of Artificial Sequence: Synthetic oligonucleotide
ugugcgagccagccagcag

SEQ ID NO: 621217 - RNA, 19 nt, Artificial Sequence
  Description of Artificial Sequence: Synthetic oligonucleotide
cuugccaaccuagagccuc

SEQ ID NO: 621218 - RNA, 19 nt, Artificial Sequence
  Description of Artificial Sequence: Synthetic oligonucleotide
guucgcuacccagaugggg

SEQ ID NO: 621219 - RNA, 19 nt, Artificial Sequence
  Description of Artificial Sequence: Synthetic oligonucleotide
cugggaguucgcuacccag

SEQ ID NO: 621220 - RNA, 19 nt, Artificial Sequence
  Description of Artificial Sequence: Synthetic oligonucleotide
cucaggucacauucuucgc

SEQ ID NO: 621221 - RNA, 19 nt, Artificial Sequence
  Description of Artificial Sequence: Synthetic oligonucleotide
uacaaucaccgucuugcuu

SEQ ID NO: 621222 - RNA, 19 nt, Artificial Sequence
  Description of Artificial Sequence: Synthetic oligonucleotide
caacccaugccagcuaacc

SEQ ID NO: 621223 - RNA, 19 nt, Artificial Sequence
  Description of Artificial Sequence: Synthetic oligonucleotide
ggcaaagcacuucuugccc

SEQ ID NO: 621224 - RNA, 19 nt, Artificial Sequence
  Description of Artificial Sequence: Synthetic oligonucleotide
cuuccggauaagacccugc

SEQ ID NO: 621225 - RNA, 19 nt, Artificial Sequence
  Description of Artificial Sequence: Synthetic oligonucleotide
ucaccgucuugcuuucuac

SEQ ID NO: 621226 - RNA, 19 nt, Artificial Sequence
  Description of Artificial Sequence: Synthetic oligonucleotide
ugaugggacacuggcgagc

SEQ ID NO: 621227 - RNA, 19 nt, Artificial Sequence
  Description of Artificial Sequence: Synthetic oligonucleotide
uuaucucgccggaaccagu

SEQ ID NO: 621228 - RNA, 19 nt, Artificial Sequence
  Description of Artificial Sequence: Synthetic oligonucleotide
acguggaagauacgaggca

SEQ ID NO: 621229 - RNA, 19 nt, Artificial Sequence
  Description of Artificial Sequence: Synthetic oligonucleotide
ugcuacggcguggugacca

SEQ ID NO: 621230 - RNA, 19 nt, Artificial Sequence
  Description of Artificial Sequence: Synthetic oligonucleotide
acagguguuccuaggcggg

SEQ ID NO: 621231 - RNA, 19 nt, Artificial Sequence
  Description of Artificial Sequence: Synthetic oligonucleotide
cagcaaagaguuaccacca

SEQ ID NO: 621232 - RNA, 19 nt, Artificial Sequence
  Description of Artificial Sequence: Synthetic oligonucleotide
ucguccacagcucgcugga

SEQ ID NO: 621233 - RNA, 19 nt, Artificial Sequence
  Description of Artificial Sequence: Synthetic oligonucleotide
cuagcacucgagcauucuc

SEQ ID NO: 621234 - RNA, 19 nt, Artificial Sequence
  Description of Artificial Sequence: Synthetic oligonucleotide
uggcccaccgaaugcagac

SEQ ID NO: 621235 - RNA, 19 nt, Artificial Sequence
  Description of Artificial Sequence: Synthetic oligonucleotide
uaucucgccggaaccaguu

SEQ ID NO: 621236 - RNA, 19 nt, Artificial Sequence
  Description of Artificial Sequence: Synthetic oligonucleotide
ucgucggcagauccagucu

SEQ ID NO: 621237 - RNA, 19 nt, Artificial Sequence
  Description of Artificial Sequence: Synthetic oligonucleotide
gagguaguguccaaaguua

SEQ ID NO: 621238 - RNA, 19 nt, Artificial Sequence
  Description of Artificial Sequence: Synthetic oligonucleotide
cagcuaacccgcagacucg

SEQ ID NO: 621239 - RNA, 19 nt, Artificial Sequence
  Description of Artificial Sequence: Synthetic oligonucleotide
agcuaacccgcagacucgg

SEQ ID NO: 621240 - RNA, 19 nt, Artificial Sequence
  Description of Artificial Sequence: Synthetic oligonucleotide
cuaaucgucggcagaucca

SEQ ID NO: 621241 - RNA, 19 nt, Artificial Sequence
  Description of Artificial Sequence: Synthetic oligonucleotide
auaucucgaaccuccuguu

SEQ ID NO: 621242 - RNA, 19 nt, Artificial Sequence
  Description of Artificial Sequence: Synthetic oligonucleotide
uucucagucucagucccgu

SEQ ID NO: 621243 - RNA, 19 nt, Artificial Sequence
  Description of Artificial Sequence: Synthetic oligonucleotide
auacauggugcggcccugc

SEQ ID NO: 621244 - RNA, 19 nt, Artificial Sequence
  Description of Artificial Sequence: Synthetic oligonucleotide
gcuuuaucucgccggaacc

SEQ ID NO: 621245 - RNA, 19 nt, Artificial Sequence
  Description of Artificial Sequence: Synthetic oligonucleotide
uucuaugagccugggaguu

SEQ ID NO: 621246 - RNA, 19 nt, Artificial Sequence
  Description of Artificial Sequence: Synthetic oligonucleotide
ucgcacacgccccuccaga

SEQ ID NO: 621247 - RNA, 19 nt, Artificial Sequence
  Description of Artificial Sequence: Synthetic oligonucleotide
uacuagcccaaugggaguc

SEQ ID NO: 621248 - RNA, 19 nt, Artificial Sequence
  Description of Artificial Sequence: Synthetic oligonucleotide
cacauucuucgcacacgcc

SEQ ID NO: 621249 - RNA, 19 nt, Artificial Sequence
  Description of Artificial Sequence: Synthetic oligonucleotide
uccaggcgaugucaucccc

SEQ ID NO: 621250 - RNA, 19 nt, Artificial Sequence
  Description of Artificial Sequence: Synthetic oligonucleotide
cugggaaucucucguccac

SEQ ID NO: 621251 - RNA, 19 nt, Artificial Sequence
  Description of Artificial Sequence: Synthetic oligonucleotide
uccuaauaucucgaaccuc

SEQ ID NO: 621252 - RNA, 19 nt, Artificial Sequence
  Description of Artificial Sequence: Synthetic oligonucleotide
uccuuggggucugugcgag

SEQ ID NO: 621253 - RNA, 19 nt, Artificial Sequence
  Description of Artificial Sequence: Synthetic oligonucleotide
gauugcauggccacuggcu

SEQ ID NO: 621254 - RNA, 19 nt, Artificial Sequence
  Description of Artificial Sequence: Synthetic oligonucleotide
uuggaugcuacggcguggu

SEQ ID NO: 621255 - RNA, 19 nt, Artificial Sequence
  Description of Artificial Sequence: Synthetic oligonucleotide
cccaaaaucagcaugugcu

SEQ ID NO: 621256 - RNA, 19 nt, Artificial Sequence
  Description of Artificial Sequence: Synthetic oligonucleotide
ugacgccaguugaaggccu

SEQ ID NO: 621257 - RNA, 19 nt, Artificial Sequence
  Description of Artificial Sequence: Synthetic oligonucleotide
caauucgggacagugggga

SEQ ID NO: 621258 - RNA, 19 nt, Artificial Sequence
  Description of Artificial Sequence: Synthetic oligonucleotide
augccagcuaacccgcaga

SEQ ID NO: 621259 - RNA, 19 nt, Artificial Sequence
  Description of Artificial Sequence: Synthetic oligonucleotide
ucccaacacuugcacauuu

SEQ ID NO: 621260 - RNA, 19 nt, Artificial Sequence
  Description of Artificial Sequence: Synthetic oligonucleotide
cuuuaucucgccggaacca

SEQ ID NO: 621261 - RNA, 19 nt, Artificial Sequence
  Description of Artificial Sequence: Synthetic oligonucleotide
ugcuuucuacccgugccac

SEQ ID NO: 621262 - RNA, 19 nt, Artificial Sequence
  Description of Artificial Sequence: Synthetic oligonucleotide
acgaucucccgcuggucug

SEQ ID NO: 621263 - RNA, 19 nt, Artificial Sequence
  Description of Artificial Sequence: Synthetic oligonucleotide
aguugaccuucacugucaa

SEQ ID NO: 621264 - RNA, 19 nt, Artificial Sequence
  Description of Artificial Sequence: Synthetic oligonucleotide
agggaucgugcauaaugau

SEQ ID NO: 621265 - RNA, 19 nt, Artificial Sequence
  Description of Artificial Sequence: Synthetic oligonucleotide
ucuagcacucgagcauucu

SEQ ID NO: 621266 - RNA, 19 nt, Artificial Sequence
  Description of Artificial Sequence: Synthetic oligonucleotide
uggcaaagggaucgugcau

SEQ ID NO: 621267 - RNA, 19 nt, Artificial Sequence
  Description of Artificial Sequence: Synthetic oligonucleotide
auucuucgcacacgccccu

SEQ ID NO: 621268 - RNA, 19 nt, Artificial Sequence
  Description of Artificial Sequence: Synthetic oligonucleotide
guggaagauacgaggcagc

SEQ ID NO: 621269 - RNA, 19 nt, Artificial Sequence
  Description of Artificial Sequence: Synthetic oligonucleotide
cauugggauuggugguagc

SEQ ID NO: 621270 - RNA, 19 nt, Artificial Sequence
  Description of Artificial Sequence: Synthetic oligonucleotide
uccggauaagacccugcuu

SEQ ID NO: 621271 - RNA, 19 nt, Artificial Sequence
  Description of Artificial Sequence: Synthetic oligonucleotide
ugggaaucucucguccaca

SEQ ID NO: 621272 - RNA, 19 nt, Artificial Sequence
  Description of Artificial Sequence: Synthetic oligonucleotide
ugccguguucuugccaacc

SEQ ID NO: 621273 - RNA, 19 nt, Artificial Sequence
  Description of Artificial Sequence: Synthetic oligonucleotide
ucgccggaaccaguugacg

SEQ ID NO: 621274 - RNA, 19 nt, Artificial Sequence
  Description of Artificial Sequence: Synthetic oligonucleotide
gugguagcagaggugccag

SEQ ID NO: 621275 - RNA, 19 nt, Artificial Sequence
  Description of Artificial Sequence: Synthetic oligonucleotide
ugcggcccugcaugcaucc

SEQ ID NO: 621276 - RNA, 19 nt, Artificial Sequence
  Description of Artificial Sequence: Synthetic oligonucleotide
auguggaugcccucugguu

SEQ ID NO: 621277 - RNA, 19 nt, Artificial Sequence
  Description of Artificial Sequence: Synthetic oligonucleotide
agccuggcaaugcaggcuu

SEQ ID NO: 621278 - RNA, 19 nt, Artificial Sequence
  Description of Artificial Sequence: Synthetic oligonucleotide
cacaaauguggaugcccuc

SEQ ID NO: 621279 - RNA, 19 nt, Artificial Sequence
  Description of Artificial Sequence: Synthetic oligonucleotide
agucaccgucucccagggc

SEQ ID NO: 621280 - RNA, 19 nt, Artificial Sequence
  Description of Artificial Sequence: Synthetic oligonucleotide
cuaacccgcagacucggga

SEQ ID NO: 621281 - RNA, 19 nt, Artificial Sequence
  Description of Artificial Sequence: Synthetic oligonucleotide
acaaaaccgugaauuugga

SEQ ID NO: 621282 - RNA, 19 nt, Artificial Sequence
  Description of Artificial Sequence: Synthetic oligonucleotide
ccaugacgccaguugaagg

SEQ ID NO: 621283 - RNA, 19 nt, Artificial Sequence
  Description of Artificial Sequence: Synthetic oligonucleotide
caguacacaccaccaucac

SEQ ID NO: 621284 - RNA, 19 nt, Artificial Sequence
  Description of Artificial Sequence: Synthetic oligonucleotide
cguguucuugccaaccuag

SEQ ID NO: 621285 - RNA, 19 nt, Artificial Sequence
  Description of Artificial Sequence: Synthetic oligonucleotide
auaggccgagucagugagc

SEQ ID NO: 621286 - RNA, 19 nt, Artificial Sequence
  Description of Artificial Sequence: Synthetic oligonucleotide
uaugagccugggaguucgc

SEQ ID NO: 621287 - RNA, 19 nt, Artificial Sequence
  Description of Artificial Sequence: Synthetic oligonucleotide
aucaccgucuugcuuucua

SEQ ID NO: 621288 - RNA, 19 nt, Artificial Sequence
  Description of Artificial Sequence: Synthetic oligonucleotide
caccgaaugcagacacuug

SEQ ID NO: 621289 - RNA, 19 nt, Artificial Sequence
  Description of Artificial Sequence: Synthetic oligonucleotide
ccuaggcgggucauaauac

SEQ ID NO: 621290 - RNA, 19 nt, Artificial Sequence
  Description of Artificial Sequence: Synthetic oligonucleotide
ccgucacaaauguggaugc

SEQ ID NO: 621291 - RNA, 19 nt, Artificial Sequence
  Description of Artificial Sequence: Synthetic oligonucleotide
gcaggguuuggaugcuacg

SEQ ID NO: 621292 - RNA, 19 nt, Artificial Sequence
  Description of Artificial Sequence: Synthetic oligonucleotide
gucagguagcuccuaauau

SEQ ID NO: 621293 - RNA, 19 nt, Artificial Sequence
  Description of Artificial Sequence: Synthetic oligonucleotide
ugcugaauggaagcacaua

SEQ ID NO: 621294 - RNA, 19 nt, Artificial Sequence
  Description of Artificial Sequence: Synthetic oligonucleotide
ucggcagauccagucuagc

SEQ ID NO: 621295 - RNA, 19 nt, Artificial Sequence
  Description of Artificial Sequence: Synthetic oligonucleotide
uacgcaugcuugccaccac

SEQ ID NO: 621296 - RNA, 19 nt, Artificial Sequence
  Description of Artificial Sequence: Synthetic oligonucleotide
ggccucauacaccagaggu

SEQ ID NO: 621297 - RNA, 19 nt, Artificial Sequence
  Description of Artificial Sequence: Synthetic oligonucleotide
acggcguggugaccagcac

SEQ ID NO: 621298 - RNA, 19 nt, Artificial Sequence
  Description of Artificial Sequence: Synthetic oligonucleotide
cccgucacaaauguggaug

SEQ ID NO: 621299 - RNA, 19 nt, Artificial Sequence
  Description of Artificial Sequence: Synthetic oligonucleotide
uguuggagguaguguccaa

SEQ ID NO: 621300 - RNA, 19 nt, Artificial Sequence
  Description of Artificial Sequence: Synthetic oligonucleotide
cagauccagucuagcacuc

SEQ ID NO: 621301 - RNA, 19 nt, Artificial Sequence
  Description of Artificial Sequence: Synthetic oligonucleotide
agguagcuccuaauaucuc

SEQ ID NO: 621302 - RNA, 19 nt, Artificial Sequence
  Description of Artificial Sequence: Synthetic oligonucleotide
auccagucuagcacucgag

SEQ ID NO: 621303 - RNA, 19 nt, Artificial Sequence
  Description of Artificial Sequence: Synthetic oligonucleotide
aucucgccggaaccaguug

SEQ ID NO: 621304 - RNA, 19 nt, Artificial Sequence
  Description of Artificial Sequence: Synthetic oligonucleotide
uagcccaaugggagucucu

SEQ ID NO: 621305 - RNA, 19 nt, Artificial Sequence
  Description of Artificial Sequence: Synthetic oligonucleotide
ggccacauuggugaaaaga

SEQ ID NO: 621306 - RNA, 19 nt, Artificial Sequence
  Description of Artificial Sequence: Synthetic oligonucleotide
aguucgcuacccagauggg

SEQ ID NO: 621307 - RNA, 19 nt, Artificial Sequence
  Description of Artificial Sequence: Synthetic oligonucleotide
gacucgggagguacauagc

SEQ ID NO: 621308 - RNA, 19 nt, Artificial Sequence
  Description of Artificial Sequence: Synthetic oligonucleotide
cuccuaauaucucgaaccu

SEQ ID NO: 621309 - RNA, 19 nt, Artificial Sequence
  Description of Artificial Sequence: Synthetic oligonucleotide
uuucuacccgugccacauc

SEQ ID NO: 621310 - RNA, 19 nt, Artificial Sequence
  Description of Artificial Sequence: Synthetic oligonucleotide
ggugccguguucuugccaa

SEQ ID NO: 621311 - RNA, 19 nt, Artificial Sequence
  Description of Artificial Sequence: Synthetic oligonucleotide
ccaguacacaccaccauca

SEQ ID NO: 621312 - RNA, 19 nt, Artificial Sequence
  Description of Artificial Sequence: Synthetic oligonucleotide
agucuagcacucgagcauu

SEQ ID NO: 621313 - RNA, 19 nt, Artificial Sequence
  Description of Artificial Sequence: Synthetic oligonucleotide
gccggaaccaguugacgug

SEQ ID NO: 621314 - RNA, 19 nt, Artificial Sequence
  Description of Artificial Sequence: Synthetic oligonucleotide
uucuaaucgucggcagauc

SEQ ID NO: 621315 - RNA, 19 nt, Artificial Sequence
  Description of Artificial Sequence: Synthetic oligonucleotide
guuccuaggcgggucauaa

SEQ ID NO: 621316 - RNA, 19 nt, Artificial Sequence
  Description of Artificial Sequence: Synthetic oligonucleotide
ggagguaguguccaaaguu

SEQ ID NO: 621317 - RNA, 19 nt, Artificial Sequence
  Description of Artificial Sequence: Synthetic oligonucleotide
cgugcauaaugaucuuucc

SEQ ID NO: 621318 - RNA, 19 nt, Artificial Sequence
  Description of Artificial Sequence: Synthetic oligonucleotide
ccaauucgggacagugggg

SEQ ID NO: 621319 - RNA, 19 nt, Artificial Sequence
  Description of Artificial Sequence: Synthetic oligonucleotide
ggacacaaaaccgugaauu

SEQ ID NO: 621320 - RNA, 19 nt, Artificial Sequence
  Description of Artificial Sequence: Synthetic oligonucleotide
cccgcugugaaggaguuac

SEQ ID NO: 621321 - RNA, 19 nt, Artificial Sequence
  Description of Artificial Sequence: Synthetic oligonucleotide
gggaucgugcauaaugauc

SEQ ID NO: 621322 - RNA, 19 nt, Artificial Sequence
  Description of Artificial Sequence: Synthetic oligonucleotide
aaaccucauccaggcgaug

SEQ ID NO: 621323 - RNA, 19 nt, Artificial Sequence
  Description of Artificial Sequence: Synthetic oligonucleotide
ccccaaaaucagcaugugc

SEQ ID NO: 621324 - RNA, 19 nt, Artificial Sequence
  Description of Artificial Sequence: Synthetic oligonucleotide
agccgggacacaaaaccgu

SEQ ID NO: 621325 - RNA, 19 nt, Artificial Sequence
  Description of Artificial Sequence: Synthetic oligonucleotide
cgagcauucucaccaaaac

SEQ ID NO: 621326 - RNA, 19 nt, Artificial Sequence
  Description of Artificial Sequence: Synthetic oligonucleotide
ccgcauggcaaagggaucg

SEQ ID NO: 621327 - RNA, 19 nt, Artificial Sequence
  Description of Artificial Sequence: Synthetic oligonucleotide
cccagcaaagaguuaccac

SEQ ID NO: 621328 - RNA, 19 nt, Artificial Sequence
  Description of Artificial Sequence: Synthetic oligonucleotide
ggaugcuacggcgugguga

SEQ ID NO: 621329 - RNA, 19 nt, Artificial Sequence
  Description of Artificial Sequence: Synthetic oligonucleotide
ggguuggugauccccaaaa

SEQ ID NO: 621330 - RNA, 19 nt, Artificial Sequence
  Description of Artificial Sequence: Synthetic oligonucleotide
ugcgagccagccagcaguu

SEQ ID NO: 621331 - RNA, 19 nt, Artificial Sequence
  Description of Artificial Sequence: Synthetic oligonucleotide
aucgugcauaaugaucuuu

SEQ ID NO: 621332 - RNA, 19 nt, Artificial Sequence
  Description of Artificial Sequence: Synthetic oligonucleotide
aguugacguggaagauacg

SEQ ID NO: 621333 - RNA, 19 nt, Artificial Sequence
  Description of Artificial Sequence: Synthetic oligonucleotide
ccagucuagcacucgagca

SEQ ID NO: 621334 - RNA, 19 nt, Artificial Sequence
  Description of Artificial Sequence: Synthetic oligonucleotide
cguggaagauacgaggcag

SEQ ID NO: 621335 - RNA, 19 nt, Artificial Sequence
  Description of Artificial Sequence: Synthetic oligonucleotide
cugccgaaggagacgaucu

SEQ ID NO: 621336 - RNA, 19 nt, Artificial Sequence
  Description of Artificial Sequence: Synthetic oligonucleotide
cauacauggugcggcccug

SEQ ID NO: 621337 - RNA, 19 nt, Artificial Sequence
  Description of Artificial Sequence: Synthetic oligonucleotide
uggguccaugaugggacac

SEQ ID NO: 621338 - RNA, 19 nt, Artificial Sequence
  Description of Artificial Sequence: Synthetic oligonucleotide
gcggccuccaaagaugaug

SEQ ID NO: 621339 - RNA, 19 nt, Artificial Sequence
  Description of Artificial Sequence: Synthetic oligonucleotide
aaucgucggcagauccagu

SEQ ID NO: 621340 - RNA, 19 nt, Artificial Sequence
  Description of Artificial Sequence: Synthetic oligonucleotide
cacgggccccaccagccag

SEQ ID NO: 621341 - RNA, 19 nt, Artificial Sequence
  Description of Artificial Sequence: Synthetic oligonucleotide
ccaaccuagagccucaggu

SEQ ID NO: 621342 - RNA, 19 nt, Artificial Sequence
  Description of Artificial Sequence: Synthetic oligonucleotide
aaucaccgucuugcuuucu

SEQ ID NO: 621343 - RNA, 19 nt, Artificial Sequence
  Description of Artificial Sequence: Synthetic oligonucleotide
gcaaagaguuaccaccaua

SEQ ID NO: 621344 - RNA, 19 nt, Artificial Sequence
  Description of Artificial Sequence: Synthetic oligonucleotide
cuucuaaucgucggcagau

SEQ ID NO: 621345 - RNA, 19 nt, Artificial Sequence
  Description of Artificial Sequence: Synthetic oligonucleotide
caggguugauggcccggag

SEQ ID NO: 621346 - RNA, 19 nt, Artificial Sequence
  Description of Artificial Sequence: Synthetic oligonucleotide
ggcuggucaaugccuuccc

SEQ ID NO: 621347 - RNA, 19 nt, Artificial Sequence
  Description of Artificial Sequence: Synthetic oligonucleotide
agcccaaugggagucucuu

SEQ ID NO: 621348 - RNA, 19 nt, Artificial Sequence
  Description of Artificial Sequence: Synthetic oligonucleotide
gguguuccuaggcggguca

SEQ ID NO: 621349 - RNA, 19 nt, Artificial Sequence
  Description of Artificial Sequence: Synthetic oligonucleotide
gcccaccgaaugcagacac

SEQ ID NO: 621350 - RNA, 19 nt, Artificial Sequence
  Description of Artificial Sequence: Synthetic oligonucleotide
augcugaauggaagcacau

SEQ ID NO: 621351 - RNA, 19 nt, Artificial Sequence
  Description of Artificial Sequence: Synthetic oligonucleotide
caaaaccgugaauuuggau

SEQ ID NO: 621352 - RNA, 19 nt, Artificial Sequence
  Description of Artificial Sequence: Synthetic oligonucleotide
ccgugccacauccuugggg

SEQ ID NO: 621353 - RNA, 19 nt, Artificial Sequence
  Description of Artificial Sequence: Synthetic oligonucleotide
ggaguucgcuacccagaug

SEQ ID NO: 621354 - RNA, 19 nt, Artificial Sequence
  Description of Artificial Sequence: Synthetic oligonucleotide
ggauaagacccugcuuuuc

SEQ ID NO: 621355 - RNA, 19 nt, Artificial Sequence
  Description of Artificial Sequence: Synthetic oligonucleotide
caaaccucauccaggcgau

SEQ ID NO: 621356 - RNA, 19 nt, Artificial Sequence
  Description of Artificial Sequence: Synthetic oligonucleotide
gccaaccuagagccucagg

SEQ ID NO: 621357 - RNA, 19 nt, Artificial Sequence
  Description of Artificial Sequence: Synthetic oligonucleotide
cuuucuacccgugccacau

SEQ ID NO: 621358 - RNA, 19 nt, Artificial Sequence
  Description of Artificial Sequence: Synthetic oligonucleotide
cagucuagcacucgagcau

SEQ ID NO: 621359 - RNA, 19 nt, Artificial Sequence
  Description of Artificial Sequence: Synthetic oligonucleotide
gcacucgagcauucucacc

SEQ ID NO: 621360 - RNA, 19 nt, Artificial Sequence
  Description of Artificial Sequence: Synthetic oligonucleotide
gcauaaugaucuuuccuuu

SEQ ID NO: 621361 - RNA, 19 nt, Artificial Sequence
  Description of Artificial Sequence: Synthetic oligonucleotide
augcuacggcguggugacc

SEQ ID NO: 621362 - RNA, 19 nt, Artificial Sequence
  Description of Artificial Sequence: Synthetic oligonucleotide
aguuaccaccauagccgcu

SEQ ID NO: 621363 - RNA, 19 nt, Artificial Sequence
  Description of Artificial Sequence: Synthetic oligonucleotide
ccauagccgcugccgaagg

SEQ ID NO: 621364 - RNA, 19 nt, Artificial Sequence
  Description of Artificial Sequence: Synthetic oligonucleotide
caggaagcggccugcuuua

SEQ ID NO: 621365 - RNA, 19 nt, Artificial Sequence
  Description of Artificial Sequence: Synthetic oligonucleotide
gcaguggacucagagcgca

SEQ ID NO: 621366 - RNA, 19 nt, Artificial Sequence
  Description of Artificial Sequence: Synthetic oligonucleotide
gacgccaguugaaggccuc

SEQ ID NO: 621367 - RNA, 19 nt, Artificial Sequence
  Description of Artificial Sequence: Synthetic oligonucleotide
ggcagauccugguugacuu

SEQ ID NO: 621368 - RNA, 19 nt, Artificial Sequence
  Description of Artificial Sequence: Synthetic oligonucleotide
ccgugaauuuggaugugca

SEQ ID NO: 621369 - RNA, 19 nt, Artificial Sequence
  Description of Artificial Sequence: Synthetic oligonucleotide
cauagccgcugccgaagga

SEQ ID NO: 621370 - RNA, 19 nt, Artificial Sequence
  Description of Artificial Sequence: Synthetic oligonucleotide
ggacccaugcugaauggaa

SEQ ID NO: 621371 - RNA, 19 nt, Artificial Sequence
  Description of Artificial Sequence: Synthetic oligonucleotide
augcccagucaggggcugg

SEQ ID NO: 621372 - RNA, 19 nt, Artificial Sequence
  Description of Artificial Sequence: Synthetic oligonucleotide
cuucgcacacgccccucca

SEQ ID NO: 621373 - RNA, 19 nt, Artificial Sequence
  Description of Artificial Sequence: Synthetic oligonucleotide
cuacggcguggugaccagc

SEQ ID NO: 621374 - RNA, 19 nt, Artificial Sequence
  Description of Artificial Sequence: Synthetic oligonucleotide
gcuugccaccacauaggcc

SEQ ID NO: 621375 - RNA, 19 nt, Artificial Sequence
  Description of Artificial Sequence: Synthetic oligonucleotide
ccaacacuugcacauuuua

SEQ ID NO: 621376 - RNA, 19 nt, Artificial Sequence
  Description of Artificial Sequence: Synthetic oligonucleotide
gaucgugcauaaugaucuu

SEQ ID NO: 621377 - RNA, 19 nt, Artificial Sequence
  Description of Artificial Sequence: Synthetic oligonucleotide
ugcggccuccaaagaugau

SEQ ID NO: 621378 - RNA, 19 nt, Artificial Sequence
  Description of Artificial Sequence: Synthetic oligonucleotide
gcugccgaaggagacgauc

SEQ ID NO: 621379 - RNA, 19 nt, Artificial Sequence
  Description of Artificial Sequence: Synthetic oligonucleotide
acccgcagacucgggaggu

SEQ ID NO: 621380 - RNA, 19 nt, Artificial Sequence
  Description of Artificial Sequence: Synthetic oligonucleotide
ccggauaagacccugcuuu

SEQ ID NO: 621381 - RNA, 19 nt, Artificial Sequence
  Description of Artificial Sequence: Synthetic oligonucleotide
uucuucgcacacgccccuc

SEQ ID NO: 621382 - RNA, 19 nt, Artificial Sequence
  Description of Artificial Sequence: Synthetic oligonucleotide
ggcgagccgggacacaaaa

SEQ ID NO: 621383 - RNA, 19 nt, Artificial Sequence
  Description of Artificial Sequence: Synthetic oligonucleotide
gcuacggcguggugaccag

SEQ ID NO: 621384 - RNA, 19 nt, Artificial Sequence
  Description of Artificial Sequence: Synthetic oligonucleotide
accagcacgagggccucaa

SEQ ID NO: 621385 - RNA, 19 nt, Artificial Sequence
  Description of Artificial Sequence: Synthetic oligonucleotide
gggcuggcccaccgaaugc

SEQ ID NO: 621386 - RNA, 19 nt, Artificial Sequence
  Description of Artificial Sequence: Synthetic oligonucleotide
gucuagcacucgagcauuc

SEQ ID NO: 621387 - RNA, 19 nt, Artificial Sequence
  Description of Artificial Sequence: Synthetic oligonucleotide
ccugcuuuaucucgccgga

SEQ ID NO: 621388 - RNA, 19 nt, Artificial Sequence
  Description of Artificial Sequence: Synthetic oligonucleotide
gccgcugccgaaggagacg

SEQ ID NO: 621389 - RNA, 19 nt, Artificial Sequence
  Description of Artificial Sequence: Synthetic oligonucleotide
acgagggccucaacccaug

SEQ ID NO: 621390 - RNA, 19 nt, Artificial Sequence
  Description of Artificial Sequence: Synthetic oligonucleotide
ggaaccaguugacguggaa

SEQ ID NO: 621391 - RNA, 19 nt, Artificial Sequence
  Description of Artificial Sequence: Synthetic oligonucleotide
gguaguguccaaaguuaua

SEQ ID NO: 621392 - RNA, 19 nt, Artificial Sequence
  Description of Artificial Sequence: Synthetic oligonucleotide
gugccguguucuugccaac

SEQ ID NO: 621393 - RNA, 19 nt, Artificial Sequence
  Description of Artificial Sequence: Synthetic oligonucleotide
caccauagccgcugccgaa

SEQ ID NO: 621394 - RNA, 19 nt, Artificial Sequence
  Description of Artificial Sequence: Synthetic oligonucleotide
ccugggaaucucucgucca

SEQ ID NO: 621395 - RNA, 19 nt, Artificial Sequence
  Description of Artificial Sequence: Synthetic oligonucleotide
uggcaucaauagggacacc

SEQ ID NO: 621396 - RNA, 19 nt, Artificial Sequence
  Description of Artificial Sequence: Synthetic oligonucleotide
gggacacuggcgagccggg

SEQ ID NO: 621397 - RNA, 19 nt, Artificial Sequence
  Description of Artificial Sequence: Synthetic oligonucleotide
gcuuucuacccgugccaca

SEQ ID NO: 621398 - RNA, 19 nt, Artificial Sequence
  Description of Artificial Sequence: Synthetic oligonucleotide
agacgggcacugcgcucca

SEQ ID NO: 621399 - RNA, 19 nt, Artificial Sequence
  Description of Artificial Sequence: Synthetic oligonucleotide
gcuaacccgcagacucggg

SEQ ID NO: 621400 - RNA, 19 nt, Artificial Sequence
  Description of Artificial Sequence: Synthetic oligonucleotide
cugugcgagccagccagca

SEQ ID NO: 621401 - RNA, 19 nt, Artificial Sequence
  Description of Artificial Sequence: Synthetic oligonucleotide
ccacauuggugaaaagagu

SEQ ID NO: 621402 - RNA, 19 nt, Artificial Sequence
  Description of Artificial Sequence: Synthetic oligonucleotide
cugucagguagcuccuaau

SEQ ID NO: 621403 - RNA, 19 nt, Artificial Sequence
  Description of Artificial Sequence: Synthetic oligonucleotide
gggaguucgcuacccagau

SEQ ID NO: 621404 - RNA, 19 nt, Artificial Sequence
  Description of Artificial Sequence: Synthetic oligonucleotide
cgaugcgcagggcaaagca

SEQ ID NO: 621405 - RNA, 19 nt, Artificial Sequence
  Description of Artificial Sequence: Synthetic oligonucleotide
gguacuccuuugggucugc

SEQ ID NO: 621406 - RNA, 19 nt, Artificial Sequence
  Description of Artificial Sequence: Synthetic oligonucleotide
cuacccgugccacauccuu

SEQ ID NO: 621407 - RNA, 19 nt, Artificial Sequence
  Description of Artificial Sequence: Synthetic oligonucleotide
cacgccccuccagagccuc

SEQ ID NO: 621408 - RNA, 19 nt, Artificial Sequence
  Description of Artificial Sequence: Synthetic oligonucleotide
cacgagggccucaacccau

SEQ ID NO: 621409 - RNA, 19 nt, Artificial Sequence
  Description of Artificial Sequence: Synthetic oligonucleotide
cagugagcugcacuccaau

SEQ ID NO: 621410 - RNA, 19 nt, Artificial Sequence
  Description of Artificial Sequence: Synthetic oligonucleotide
ccaccauagccgcugccga

SEQ ID NO: 621411 - RNA, 19 nt, Artificial Sequence
  Description of Artificial Sequence: Synthetic oligonucleotide
aggaagcggccugcuuuau

SEQ ID NO: 621412 - RNA, 19 nt, Artificial Sequence
  Description of Artificial Sequence: Synthetic oligonucleotide
ccgggacacaaaaccguga

SEQ ID NO: 621413 - RNA, 19 nt, Artificial Sequence
  Description of Artificial Sequence: Synthetic oligonucleotide
gcgaugcgcagggcaaagc

SEQ ID NO: 621414 - RNA, 19 nt, Artificial Sequence
  Description of Artificial Sequence: Synthetic oligonucleotide
gccaggcgagaggcgaugc

SEQ ID NO: 621415 - RNA, 19 nt, Artificial Sequence
  Description of Artificial Sequence: Synthetic oligonucleotide
ucccgcugugaaggaguua

SEQ ID NO: 621416 - RNA, 19 nt, Artificial Sequence
  Description of Artificial Sequence: Synthetic oligonucleotide
caccgucucccagggccug

SEQ ID NO: 621417 - RNA, 19 nt, Artificial Sequence
  Description of Artificial Sequence: Synthetic oligonucleotide
gggugccguguucuugcca

SEQ ID NO: 621418 - RNA, 19 nt, Artificial Sequence
  Description of Artificial Sequence: Synthetic oligonucleotide
gccguguucuugccaaccu

SEQ ID NO: 621419 - RNA, 19 nt, Artificial Sequence
  Description of Artificial Sequence: Synthetic oligonucleotide
gcgagccgggacacaaaac

SEQ ID NO: 621420 - RNA, 19 nt, Artificial Sequence
  Description of Artificial Sequence: Synthetic oligonucleotide
gggcacugcgcuccacaaa

SEQ ID NO: 621421 - RNA, 19 nt, Artificial Sequence
  Description of Artificial Sequence: Synthetic oligonucleotide
cagacucgggagguacaua

SEQ ID NO: 621422 - RNA, 19 nt, Artificial Sequence
  Description of Artificial Sequence: Synthetic oligonucleotide
ccccaugacgccaguugaa

SEQ ID NO: 621423 - RNA, 19 nt, Artificial Sequence
  Description of Artificial Sequence: Synthetic oligonucleotide
cgcugugaaggaguuacaa

SEQ ID NO: 621424 - RNA, 19 nt, Artificial Sequence
  Description of Artificial Sequence: Synthetic oligonucleotide
ccguguucuugccaaccua

SEQ ID NO: 621425 - RNA, 19 nt, Artificial Sequence
  Description of Artificial Sequence: Synthetic oligonucleotide
ccgcugccgaaggagacga

SEQ ID NO: 621426 - RNA, 19 nt, Artificial Sequence
  Description of Artificial Sequence: Synthetic oligonucleotide
gcagacucgggagguacau

SEQ ID NO: 621427 - RNA, 19 nt, Artificial Sequence
  Description of Artificial Sequence: Synthetic oligonucleotide
ccaccgaaugcagacacuu

SEQ ID NO: 621428 - RNA, 19 nt, Artificial Sequence
  Description of Artificial Sequence: Synthetic oligonucleotide
caguggacucagagcgcau

SEQ ID NO: 621429 - RNA, 19 nt, Artificial Sequence
  Description of Artificial Sequence: Synthetic oligonucleotide
cgccggaaccaguugacgu

SEQ ID NO: 621430 - RNA, 19 nt, Artificial Sequence
  Description of Artificial Sequence: Synthetic oligonucleotide
ggcagccgggcuccuuugu

SEQ ID NO: 621431 - RNA, 19 nt, Artificial Sequence
  Description of Artificial Sequence: Synthetic oligonucleotide
ccucaacccaugccagcua

SEQ ID NO: 621432 - RNA, 19 nt, Artificial Sequence
  Description of Artificial Sequence: Synthetic oligonucleotide
cacuccaauucgggacagu

SEQ ID NO: 621433 - RNA, 19 nt, Artificial Sequence
  Description of Artificial Sequence: Synthetic oligonucleotide
gcgagccagccagcaguuc

SEQ ID NO: 621434 - RNA, 19 nt, Artificial Sequence
  Description of Artificial Sequence: Synthetic oligonucleotide
cccaccgaaugcagacacu

SEQ ID NO: 621435 - RNA, 19 nt, Artificial Sequence
  Description of Artificial Sequence: Synthetic oligonucleotide
cacugguuucggccacauu

SEQ ID NO: 621436 - RNA, 19 nt, Artificial Sequence
  Description of Artificial Sequence: Synthetic oligonucleotide
gcacugcgcuccacaaagu

SEQ ID NO: 621437 - RNA, 19 nt, Artificial Sequence
  Description of Artificial Sequence: Synthetic oligonucleotide
cggauaagacccugcuuuu

SEQ ID NO: 621438 - RNA, 19 nt, Artificial Sequence
  Description of Artificial Sequence: Synthetic oligonucleotide
cgcaugcuugccaccacau

SEQ ID NO: 621439 - RNA, 19 nt, Artificial Sequence
  Description of Artificial Sequence: Synthetic oligonucleotide
cccgcagacucgggaggua

SEQ ID NO: 621440 - RNA, 19 nt, Artificial Sequence
  Description of Artificial Sequence: Synthetic oligonucleotide
gcggcccugcaugcauccu

SEQ ID NO: 621441 - RNA, 19 nt, Artificial Sequence
  Description of Artificial Sequence: Synthetic oligonucleotide
gcgcugcgggauggccaca

SEQ ID NO: 621442 - RNA, 19 nt, Artificial Sequence
  Description of Artificial Sequence: Synthetic oligonucleotide
cgcugccgaaggagacgau

SEQ ID NO: 621443 - RNA, 19 nt, Artificial Sequence
  Description of Artificial Sequence: Synthetic oligonucleotide
uauauguaaacauuggugg

SEQ ID NO: 621444 - RNA, 19 nt, Artificial Sequence
  Description of Artificial Sequence: Synthetic oligonucleotide
auacaaaccacccaacugc

SEQ ID NO: 621445 - RNA, 19 nt, Artificial Sequence
  Description of Artificial Sequence: Synthetic oligonucleotide
aacugcuugauauuuaguc

SEQ ID NO: 621446 - RNA, 19 nt, Artificial Sequence
  Description of Artificial Sequence: Synthetic oligonucleotide
uugaacuucagaaagauuc

SEQ ID NO: 621447 - RNA, 19 nt, Artificial Sequence
  Description of Artificial Sequence: Synthetic oligonucleotide
cugucaauuacaaacagcg

SEQ ID NO: 621448 - RNA, 19 nt, Artificial Sequence
  Description of Artificial Sequence: Synthetic oligonucleotide
aaugauuuuauuagagccc

SEQ ID NO: 621449 - RNA, 19 nt, Artificial Sequence
  Description of Artificial Sequence: Synthetic oligonucleotide
ucuaaugauuuuauuagag

SEQ ID NO: 621450 - RNA, 19 nt, Artificial Sequence
  Description of Artificial Sequence: Synthetic oligonucleotide
agauguacccauuauuugc

SEQ ID NO: 621451 - RNA, 19 nt, Artificial Sequence
  Description of Artificial Sequence: Synthetic oligonucleotide
augauuuggacuugaaggc

SEQ ID NO: 621452 - RNA, 19 nt, Artificial Sequence
  Description of Artificial Sequence: Synthetic oligonucleotide
aaagauucaauggggaacg

SEQ ID NO: 621453 - RNA, 19 nt, Artificial Sequence
  Description of Artificial Sequence: Synthetic oligonucleotide
ugucuugaacuucagaaag

SEQ ID NO: 621454 - RNA, 19 nt, Artificial Sequence
  Description of Artificial Sequence: Synthetic oligonucleotide
auuacgaccuuccucuucc

SEQ ID NO: 621455 - RNA, 19 nt, Artificial Sequence
  Description of Artificial Sequence: Synthetic oligonucleotide
gaugguuccaaccuggaag

SEQ ID NO: 621456 - RNA, 19 nt, Artificial Sequence
  Description of Artificial Sequence: Synthetic oligonucleotide
acauucaagacccacauca

SEQ ID NO: 621457 - RNA, 19 nt, Artificial Sequence
  Description of Artificial Sequence: Synthetic oligonucleotide
aucagauauagcuucugcc

SEQ ID NO: 621458 - RNA, 19 nt, Artificial Sequence
  Description of Artificial Sequence: Synthetic oligonucleotide
uguaagagacucaacacug

SEQ ID NO: 621459 - RNA, 19 nt, Artificial Sequence
  Description of Artificial Sequence: Synthetic oligonucleotide
aagguacaaccauugaaac

SEQ ID NO: 621460 - RNA, 19 nt, Artificial Sequence
  Description of Artificial Sequence: Synthetic oligonucleotide
aacguuucucauuaauuuc

SEQ ID NO: 621461 - RNA, 19 nt, Artificial Sequence
  Description of Artificial Sequence: Synthetic oligonucleotide
ucuuuucaaaaucaggugu

SEQ ID NO: 621462 - RNA, 19 nt, Artificial Sequence
  Description of Artificial Sequence: Synthetic oligonucleotide
acuauccauauccugagac

SEQ ID NO: 621463 - RNA, 19 nt, Artificial Sequence
  Description of Artificial Sequence: Synthetic oligonucleotide
acccacaucacuuuggcgg

SEQ ID NO: 621464 - RNA, 19 nt, Artificial Sequence
  Description of Artificial Sequence: Synthetic oligonucleotide
uauacaaaccacccaacug

SEQ ID NO: 621465 - RNA, 19 nt, Artificial Sequence
  Description of Artificial Sequence: Synthetic oligonucleotide
aaggcuucgacauggcuuc

SEQ ID NO: 621466 - RNA, 19 nt, Artificial Sequence
  Description of Artificial Sequence: Synthetic oligonucleotide
cuugguguuacucaguaag

SEQ ID NO: 621467 - RNA, 19 nt, Artificial Sequence
  Description of Artificial Sequence: Synthetic oligonucleotide
uauuuaggaugcuugaaug

SEQ ID NO: 621468 - RNA, 19 nt, Artificial Sequence
  Description of Artificial Sequence: Synthetic oligonucleotide
uaggugaaaucucaaauga

SEQ ID NO: 621469 - RNA, 19 nt, Artificial Sequence
  Description of Artificial Sequence: Synthetic oligonucleotide
uuaauauacaaaccaccca

SEQ ID NO: 621470 - RNA, 19 nt, Artificial Sequence
  Description of Artificial Sequence: Synthetic oligonucleotide
cuaaugauuuuauuagagc

SEQ ID NO: 621471 - RNA, 19 nt, Artificial Sequence
  Description of Artificial Sequence: Synthetic oligonucleotide
uuuccgaauacuuccuucg

SEQ ID NO: 621472 - RNA, 19 nt, Artificial Sequence
  Description of Artificial Sequence: Synthetic oligonucleotide
aguuauucuuauaaugggc

SEQ ID NO: 621473 - RNA, 19 nt, Artificial Sequence
  Description of Artificial Sequence: Synthetic oligonucleotide
ucgauucacuauauggugg

SEQ ID NO: 621474 - RNA, 19 nt, Artificial Sequence
  Description of Artificial Sequence: Synthetic oligonucleotide
aaccuggaaguacuuaggg

SEQ ID NO: 621475 - RNA, 19 nt, Artificial Sequence
  Description of Artificial Sequence: Synthetic oligonucleotide
ucaaaaucagguguaauga

SEQ ID NO: 621476 - RNA, 19 nt, Artificial Sequence
  Description of Artificial Sequence: Synthetic oligonucleotide
uuuugcggaagguacaacc

SEQ ID NO: 621477 - RNA, 19 nt, Artificial Sequence
  Description of Artificial Sequence: Synthetic oligonucleotide
ucagauauagcuucugccu

SEQ ID NO: 621478 - RNA, 19 nt, Artificial Sequence
  Description of Artificial Sequence: Synthetic oligonucleotide
uauauggugggauacaaua

SEQ ID NO: 621479 - RNA, 19 nt, Artificial Sequence
  Description of Artificial Sequence: Synthetic oligonucleotide
uuucaugccaaaccaacca

SEQ ID NO: 621480 - RNA, 19 nt, Artificial Sequence
  Description of Artificial Sequence: Synthetic oligonucleotide
gagaauguggucucacugg

SEQ ID NO: 621481 - RNA, 19 nt, Artificial Sequence
  Description of Artificial Sequence: Synthetic oligonucleotide
uauuagagccccaugauuu

SEQ ID NO: 621482 - RNA, 19 nt, Artificial Sequence
  Description of Artificial Sequence: Synthetic oligonucleotide
uuuuccgaaacuucuuucc

SEQ ID NO: 621483 - RNA, 19 nt, Artificial Sequence
  Description of Artificial Sequence: Synthetic oligonucleotide
aaccuuucuaucuucacaa

SEQ ID NO: 621484 - RNA, 19 nt, Artificial Sequence
  Description of Artificial Sequence: Synthetic oligonucleotide
aaugcuuugagaucauuuu

SEQ ID NO: 621485 - RNA, 19 nt, Artificial Sequence
  Description of Artificial Sequence: Synthetic oligonucleotide
uacucuaaugauuuuauua

SEQ ID NO: 621486 - RNA, 19 nt, Artificial Sequence
  Description of Artificial Sequence: Synthetic oligonucleotide
ucacuauuuaggaugcuug

SEQ ID NO: 621487 - RNA, 19 nt, Artificial Sequence
  Description of Artificial Sequence: Synthetic oligonucleotide
agguacaaccauugaaacc

SEQ ID NO: 621488 - RNA, 19 nt, Artificial Sequence
  Description of Artificial Sequence: Synthetic oligonucleotide
uuaaaucuccugaacucag

SEQ ID NO: 621489 - RNA, 19 nt, Artificial Sequence
  Description of Artificial Sequence: Synthetic oligonucleotide
guauauguaaacauuggug

SEQ ID NO: 621490 - RNA, 19 nt, Artificial Sequence
  Description of Artificial Sequence: Synthetic oligonucleotide
uuagccuuacuucuuuugc

SEQ ID NO: 621491 - RNA, 19 nt, Artificial Sequence
  Description of Artificial Sequence: Synthetic oligonucleotide
uuccuaguuauucuuauaa

SEQ ID NO: 621492 - RNA, 19 nt, Artificial Sequence
  Description of Artificial Sequence: Synthetic oligonucleotide
aaugauuuugagaaacuga

SEQ ID NO: 621493 - RNA, 19 nt, Artificial Sequence
  Description of Artificial Sequence: Synthetic oligonucleotide
uguguuaggguuuucuugu

SEQ ID NO: 621494 - RNA, 19 nt, Artificial Sequence
  Description of Artificial Sequence: Synthetic oligonucleotide
ugagaauguggucucacug

SEQ ID NO: 621495 - RNA, 19 nt, Artificial Sequence
  Description of Artificial Sequence: Synthetic oligonucleotide
cuaacacuggacuuugggg

SEQ ID NO: 621496 - RNA, 19 nt, Artificial Sequence
  Description of Artificial Sequence: Synthetic oligonucleotide
aaccccugaagcaugagac

SEQ ID NO: 621497 - RNA, 19 nt, Artificial Sequence
  Description of Artificial Sequence: Synthetic oligonucleotide
uuuucacugaaccacgauc

SEQ ID NO: 621498 - RNA, 19 nt, Artificial Sequence
  Description of Artificial Sequence: Synthetic oligonucleotide
gcuucgauucacuauaugg

SEQ ID NO: 621499 - RNA, 19 nt, Artificial Sequence
  Description of Artificial Sequence: Synthetic oligonucleotide
aauuacgaccuuccucuuc

SEQ ID NO: 621500 - RNA, 19 nt, Artificial Sequence
  Description of Artificial Sequence: Synthetic oligonucleotide
aaaccaaccauuaccagcu

SEQ ID NO: 621501 - RNA, 19 nt, Artificial Sequence
  Description of Artificial Sequence: Synthetic oligonucleotide
cuaggugaaaucucaaaug

SEQ ID NO: 621502 - RNA, 19 nt, Artificial Sequence
  Description of Artificial Sequence: Synthetic oligonucleotide
aucuacgaugguuccaacc

SEQ ID NO: 621503 - RNA, 19 nt, Artificial Sequence
  Description of Artificial Sequence: Synthetic oligonucleotide
uugaaugauuuugagaaac

SEQ ID NO: 621504 - RNA, 19 nt, Artificial Sequence
  Description of Artificial Sequence: Synthetic oligonucleotide
uaauuucgaaauuucuucu

SEQ ID NO: 621505 - RNA, 19 nt, Artificial Sequence
  Description of Artificial Sequence: Synthetic oligonucleotide
uauggugggauacaauagu

SEQ ID NO: 621506 - RNA, 19 nt, Artificial Sequence
  Description of Artificial Sequence: Synthetic oligonucleotide
ucuguggauggaaucauca

SEQ ID NO: 621507 - RNA, 19 nt, Artificial Sequence
  Description of Artificial Sequence: Synthetic oligonucleotide
cuucgguuugucuacauug

SEQ ID NO: 621508 - RNA, 19 nt, Artificial Sequence
  Description of Artificial Sequence: Synthetic oligonucleotide
ugaacuucagaaagauuca

SEQ ID NO: 621509 - RNA, 19 nt, Artificial Sequence
  Description of Artificial Sequence: Synthetic oligonucleotide
aauagcaaccucacugggg

SEQ ID NO: 621510 - RNA, 19 nt, Artificial Sequence
  Description of Artificial Sequence: Synthetic oligonucleotide
gcuugaaugauuuugagaa

SEQ ID NO: 621511 - RNA, 19 nt, Artificial Sequence
  Description of Artificial Sequence: Synthetic oligonucleotide
uuuauuagagccccaugau

SEQ ID NO: 621512 - RNA, 19 nt, Artificial Sequence
  Description of Artificial Sequence: Synthetic oligonucleotide
uggccuauuuaucugagaa

SEQ ID NO: 621513 - RNA, 19 nt, Artificial Sequence
  Description of Artificial Sequence: Synthetic oligonucleotide
cuugaaugguagaagucag

SEQ ID NO: 621514 - RNA, 19 nt, Artificial Sequence
  Description of Artificial Sequence: Synthetic oligonucleotide
guuaggguuuucuugugag

SEQ ID NO: 621515 - RNA, 19 nt, Artificial Sequence
  Description of Artificial Sequence: Synthetic oligonucleotide
ugaaugguagaagucagcu

SEQ ID NO: 621516 - RNA, 19 nt, Artificial Sequence
  Description of Artificial Sequence: Synthetic oligonucleotide
ugaaugauuuugagaaacu

SEQ ID NO: 621517 - RNA, 19 nt, Artificial Sequence
  Description of Artificial Sequence: Synthetic oligonucleotide
uccgaaacuucuuuccugc

SEQ ID NO: 621518 - RNA, 19 nt, Artificial Sequence
  Description of Artificial Sequence: Synthetic oligonucleotide
uuaggguuuucuugugagg

SEQ ID NO: 621519 - RNA, 19 nt, Artificial Sequence
  Description of Artificial Sequence: Synthetic oligonucleotide
auuuaggaugcuugaauga

SEQ ID NO: 621520 - RNA, 19 nt, Artificial Sequence
  Description of Artificial Sequence: Synthetic oligonucleotide
uuauaaugggcuccuggac

SEQ ID NO: 621521 - RNA, 19 nt, Artificial Sequence
  Description of Artificial Sequence: Synthetic oligonucleotide
acucuugaaugguagaagu

SEQ ID NO: 621522 - RNA, 19 nt, Artificial Sequence
  Description of Artificial Sequence: Synthetic oligonucleotide
ucuccuaggugaaaucuca

SEQ ID NO: 621523 - RNA, 19 nt, Artificial Sequence
  Description of Artificial Sequence: Synthetic oligonucleotide
aauuucgaaauuucuucuu

SEQ ID NO: 621524 - RNA, 19 nt, Artificial Sequence
  Description of Artificial Sequence: Synthetic oligonucleotide
uguugaggggcuauuuucu

SEQ ID NO: 621525 - RNA, 19 nt, Artificial Sequence
  Description of Artificial Sequence: Synthetic oligonucleotide
ugcaauuacgaccuuccuc

SEQ ID NO: 621526 - RNA, 19 nt, Artificial Sequence
  Description of Artificial Sequence: Synthetic oligonucleotide
gaugcuucgauucacuaua

SEQ ID NO: 621527 - RNA, 19 nt, Artificial Sequence
  Description of Artificial Sequence: Synthetic oligonucleotide
uucaagacccacaucacuu

SEQ ID NO: 621528 - RNA, 19 nt, Artificial Sequence
  Description of Artificial Sequence: Synthetic oligonucleotide
ucgacuugguguuacucag

SEQ ID NO: 621529 - RNA, 19 nt, Artificial Sequence
  Description of Artificial Sequence: Synthetic oligonucleotide
ugauuuugagaaacugacu

SEQ ID NO: 621530 - RNA, 19 nt, Artificial Sequence
  Description of Artificial Sequence: Synthetic oligonucleotide
acuugcaugcuuugguauc

SEQ ID NO: 621531 - RNA, 19 nt, Artificial Sequence
  Description of Artificial Sequence: Synthetic oligonucleotide
gaagguacaaccauugaaa

SEQ ID NO: 621532 - RNA, 19 nt, Artificial Sequence
  Description of Artificial Sequence: Synthetic oligonucleotide
auggcuucacuauuuagga

SEQ ID NO: 621533 - RNA, 19 nt, Artificial Sequence
  Description of Artificial Sequence: Synthetic oligonucleotide
uuccucgagagacucaugu

SEQ ID NO: 621534 - RNA, 19 nt, Artificial Sequence
  Description of Artificial Sequence: Synthetic oligonucleotide
acagcgcaccaccacacgc

SEQ ID NO: 621535 - RNA, 19 nt, Artificial Sequence
  Description of Artificial Sequence: Synthetic oligonucleotide
uaucuucacaacugcaaac

SEQ ID NO: 621536 - RNA, 19 nt, Artificial Sequence
  Description of Artificial Sequence: Synthetic oligonucleotide
uaaacauuggugguuuugu

SEQ ID NO: 621537 - RNA, 19 nt, Artificial Sequence
  Description of Artificial Sequence: Synthetic oligonucleotide
uucgacuugguguuacuca

SEQ ID NO: 621538 - RNA, 19 nt, Artificial Sequence
  Description of Artificial Sequence: Synthetic oligonucleotide
ggcuucacuauuuaggaug

SEQ ID NO: 621539 - RNA, 19 nt, Artificial Sequence
  Description of Artificial Sequence: Synthetic oligonucleotide
aaacugacugcugaaggcu

SEQ ID NO: 621540 - RNA, 19 nt, Artificial Sequence
  Description of Artificial Sequence: Synthetic oligonucleotide
uuccugauuucuguaagag

SEQ ID NO: 621541 - RNA, 19 nt, Artificial Sequence
  Description of Artificial Sequence: Synthetic oligonucleotide
uuugagaaacugacugcug

SEQ ID NO: 621542 - RNA, 19 nt, Artificial Sequence
  Description of Artificial Sequence: Synthetic oligonucleotide
ucuaugcugcuacuuguca

SEQ ID NO: 621543 - RNA, 19 nt, Artificial Sequence
  Description of Artificial Sequence: Synthetic oligonucleotide
uuccgaauacuuccuucgg

SEQ ID NO: 621544 - RNA, 19 nt, Artificial Sequence
  Description of Artificial Sequence: Synthetic oligonucleotide
uuauucuuauaaugggcuc

SEQ ID NO: 621545 - RNA, 19 nt, Artificial Sequence
  Description of Artificial Sequence: Synthetic oligonucleotide
aaaccccugaagcaugaga

SEQ ID NO: 621546 - RNA, 19 nt, Artificial Sequence
  Description of Artificial Sequence: Synthetic oligonucleotide
agagacucaacacuggcuu

SEQ ID NO: 621547 - RNA, 19 nt, Artificial Sequence
  Description of Artificial Sequence: Synthetic oligonucleotide
uugguaucuuucuucucag

SEQ ID NO: 621548 - RNA, 19 nt, Artificial Sequence
  Description of Artificial Sequence: Synthetic oligonucleotide
ccuaguuauucuuauaaug

SEQ ID NO: 621549 - RNA, 19 nt, Artificial Sequence
  Description of Artificial Sequence: Synthetic oligonucleotide
uuauuagagccccaugauu

SEQ ID NO: 621550 - RNA, 19 nt, Artificial Sequence
  Description of Artificial Sequence: Synthetic oligonucleotide
uugaaugguagaagucagc

SEQ ID NO: 621551 - RNA, 19 nt, Artificial Sequence
  Description of Artificial Sequence: Synthetic oligonucleotide
uaggaugcuugaaugauuu

SEQ ID NO: 621552 - RNA, 19 nt, Artificial Sequence
  Description of Artificial Sequence: Synthetic oligonucleotide
uucgguuugucuacauuga

SEQ ID NO: 621553 - RNA, 19 nt, Artificial Sequence
  Description of Artificial Sequence: Synthetic oligonucleotide
aaguugaugcuucgauuca

SEQ ID NO: 621554 - RNA, 19 nt, Artificial Sequence
  Description of Artificial Sequence: Synthetic oligonucleotide
ggugaaaucucaaaugaug

SEQ ID NO: 621555 - RNA, 19 nt, Artificial Sequence
  Description of Artificial Sequence: Synthetic oligonucleotide
uguuaggguuuucuuguga

SEQ ID NO: 621556 - RNA, 19 nt, Artificial Sequence
  Description of Artificial Sequence: Synthetic oligonucleotide
gaaugguagaagucagcug

SEQ ID NO: 621557 - RNA, 19 nt, Artificial Sequence
  Description of Artificial Sequence: Synthetic oligonucleotide
uuuaggaugcuugaaugau

SEQ ID NO: 621558 - RNA, 19 nt, Artificial Sequence
  Description of Artificial Sequence: Synthetic oligonucleotide
aggacucaccaucagauau

SEQ ID NO: 621559 - RNA, 19 nt, Artificial Sequence
  Description of Artificial Sequence: Synthetic oligonucleotide
agagacucauguugagggg

SEQ ID NO: 621560 - RNA, 19 nt, Artificial Sequence
  Description of Artificial Sequence: Synthetic oligonucleotide
gaugcuugaaugauuuuga

SEQ ID NO: 621561 - RNA, 19 nt, Artificial Sequence
  Description of Artificial Sequence: Synthetic oligonucleotide
agaaagauucaauggggaa

SEQ ID NO: 621562 - RNA, 19 nt, Artificial Sequence
  Description of Artificial Sequence: Synthetic oligonucleotide
ucuugaacuucagaaagau

SEQ ID NO: 621563 - RNA, 19 nt, Artificial Sequence
  Description of Artificial Sequence: Synthetic oligonucleotide
ugcuugauauuuaguccag

SEQ ID NO: 621564 - RNA, 19 nt, Artificial Sequence
  Description of Artificial Sequence: Synthetic oligonucleotide
caucagauauagcuucugc

SEQ ID NO: 621565 - RNA, 19 nt, Artificial Sequence
  Description of Artificial Sequence: Synthetic oligonucleotide
uccucaauagcaaccucac

SEQ ID NO: 621566 - RNA, 19 nt, Artificial Sequence
  Description of Artificial Sequence: Synthetic oligonucleotide
uuaucuacgaugguuccaa

SEQ ID NO: 621567 - RNA, 19 nt, Artificial Sequence
  Description of Artificial Sequence: Synthetic oligonucleotide
acaagcuugguaucuuucu

SEQ ID NO: 621568 - RNA, 19 nt, Artificial Sequence
  Description of Artificial Sequence: Synthetic oligonucleotide
uggggugggugcaauuacg

SEQ ID NO: 621569 - RNA, 19 nt, Artificial Sequence
  Description of Artificial Sequence: Synthetic oligonucleotide
uuuuaucggcacucagucc

SEQ ID NO: 621570 - RNA, 19 nt, Artificial Sequence
  Description of Artificial Sequence: Synthetic oligonucleotide
uggggaacguuucucauua

SEQ ID NO: 621571 - RNA, 19 nt, Artificial Sequence
  Description of Artificial Sequence: Synthetic oligonucleotide
ggugggugcaauuacgacc

SEQ ID NO: 621572 - RNA, 19 nt, Artificial Sequence
  Description of Artificial Sequence: Synthetic oligonucleotide
ugauuuccgaauacuuccu

SEQ ID NO: 621573 - RNA, 19 nt, Artificial Sequence
  Description of Artificial Sequence: Synthetic oligonucleotide
agaauguggucucacuggu

SEQ ID NO: 621574 - RNA, 19 nt, Artificial Sequence
  Description of Artificial Sequence: Synthetic oligonucleotide
ucgguuaaaucuccugaac

SEQ ID NO: 621575 - RNA, 19 nt, Artificial Sequence
  Description of Artificial Sequence: Synthetic oligonucleotide
uacaaaccacccaacugcu

SEQ ID NO: 621576 - RNA, 19 nt, Artificial Sequence
  Description of Artificial Sequence: Synthetic oligonucleotide
uucgacauggcuucacuau

SEQ ID NO: 621577 - RNA, 19 nt, Artificial Sequence
  Description of Artificial Sequence: Synthetic oligonucleotide
uucgguuaaaucuccugaa

SEQ ID NO: 621578 - RNA, 19 nt, Artificial Sequence
  Description of Artificial Sequence: Synthetic oligonucleotide
uguuuucacugaaccacga

SEQ ID NO: 621579 - RNA, 19 nt, Artificial Sequence
  Description of Artificial Sequence: Synthetic oligonucleotide
aaucuccugaacucagaau

SEQ ID NO: 621580 - RNA, 19 nt, Artificial Sequence
  Description of Artificial Sequence: Synthetic oligonucleotide
auuagagccccaugauuug

SEQ ID NO: 621581 - RNA, 19 nt, Artificial Sequence
  Description of Artificial Sequence: Synthetic oligonucleotide
aguugaugcuucgauucac

SEQ ID NO: 621582 - RNA, 19 nt, Artificial Sequence
  Description of Artificial Sequence: Synthetic oligonucleotide
uuagagccccaugauuugg

SEQ ID NO: 621583 - RNA, 19 nt, Artificial Sequence
  Description of Artificial Sequence: Synthetic oligonucleotide
gguuaaaucuccugaacuc

SEQ ID NO: 621584 - RNA, 19 nt, Artificial Sequence
  Description of Artificial Sequence: Synthetic oligonucleotide
uugguguuacucaguaagu

SEQ ID NO: 621585 - RNA, 19 nt, Artificial Sequence
  Description of Artificial Sequence: Synthetic oligonucleotide
ugagcacgaggacucacca

SEQ ID NO: 621586 - RNA, 19 nt, Artificial Sequence
  Description of Artificial Sequence: Synthetic oligonucleotide
cuuugguaucacauucaag

SEQ ID NO: 621587 - RNA, 19 nt, Artificial Sequence
  Description of Artificial Sequence: Synthetic oligonucleotide
uucacuauauggugggaua

SEQ ID NO: 621588 - RNA, 19 nt, Artificial Sequence
  Description of Artificial Sequence: Synthetic oligonucleotide
cugcuugauauuuagucca

SEQ ID NO: 621589 - RNA, 19 nt, Artificial Sequence
  Description of Artificial Sequence: Synthetic oligonucleotide
uccgaauacuuccuucggu

SEQ ID NO: 621590 - RNA, 19 nt, Artificial Sequence
  Description of Artificial Sequence: Synthetic oligonucleotide
cagauauagcuucugccug

SEQ ID NO: 621591 - RNA, 19 nt, Artificial Sequence
  Description of Artificial Sequence: Synthetic oligonucleotide
cagauguacccauuauuug

SEQ ID NO: 621592 - RNA, 19 nt, Artificial Sequence
  Description of Artificial Sequence: Synthetic oligonucleotide
uccugauuucuguaagaga

SEQ ID NO: 621593 - RNA, 19 nt, Artificial Sequence
  Description of Artificial Sequence: Synthetic oligonucleotide
gccuauuuaucugagaaug

SEQ ID NO: 621594 - RNA, 19 nt, Artificial Sequence
  Description of Artificial Sequence: Synthetic oligonucleotide
auauggugggauacaauag

SEQ ID NO: 621595 - RNA, 19 nt, Artificial Sequence
  Description of Artificial Sequence: Synthetic oligonucleotide
gagacucauguugaggggc

SEQ ID NO: 621596 - RNA, 19 nt, Artificial Sequence
  Description of Artificial Sequence: Synthetic oligonucleotide
gaaguacuuagggaaacca

SEQ ID NO: 621597 - RNA, 19 nt, Artificial Sequence
  Description of Artificial Sequence: Synthetic oligonucleotide
guuaaaucuccugaacuca

SEQ ID NO: 621598 - RNA, 19 nt, Artificial Sequence
  Description of Artificial Sequence: Synthetic oligonucleotide
uggugggauacaauaguuc

SEQ ID NO: 621599 - RNA, 19 nt, Artificial Sequence
  Description of Artificial Sequence: Synthetic oligonucleotide
uggauggaaucaucaaagu

SEQ ID NO: 621600 - RNA, 19 nt, Artificial Sequence
  Description of Artificial Sequence: Synthetic oligonucleotide
uguggucucacugguaacu

SEQ ID NO: 621601 - RNA, 19 nt, Artificial Sequence
  Description of Artificial Sequence: Synthetic oligonucleotide
ugaugcuucgauucacuau

SEQ ID NO: 621602 - RNA, 19 nt, Artificial Sequence
  Description of Artificial Sequence: Synthetic oligonucleotide
aacugcaaacuuguacucu

SEQ ID NO: 621603 - RNA, 19 nt, Artificial Sequence
  Description of Artificial Sequence: Synthetic oligonucleotide
acagauguacccauuauuu

SEQ ID NO: 621604 - RNA, 19 nt, Artificial Sequence
  Description of Artificial Sequence: Synthetic oligonucleotide
uagccuuacuucuuuugcu

SEQ ID NO: 621605 - RNA, 19 nt, Artificial Sequence
  Description of Artificial Sequence: Synthetic oligonucleotide
gaacguuucucauuaauuu

SEQ ID NO: 621606 - RNA, 19 nt, Artificial Sequence
  Description of Artificial Sequence: Synthetic oligonucleotide
agagccccaugauuuggac

SEQ ID NO: 621607 - RNA, 19 nt, Artificial Sequence
  Description of Artificial Sequence: Synthetic oligonucleotide
caggaguucugucaauuac

SEQ ID NO: 621608 - RNA, 19 nt, Artificial Sequence
  Description of Artificial Sequence: Synthetic oligonucleotide
uacaagcuugguaucuuuc

SEQ ID NO: 621609 - RNA, 19 nt, Artificial Sequence
  Description of Artificial Sequence: Synthetic oligonucleotide
uccuaguuauucuuauaau

SEQ ID NO: 621610 - RNA, 19 nt, Artificial Sequence
  Description of Artificial Sequence: Synthetic oligonucleotide
ucugagauuuagccuuacu

SEQ ID NO: 621611 - RNA, 19 nt, Artificial Sequence
  Description of Artificial Sequence: Synthetic oligonucleotide
guuauucuuauaaugggcu

SEQ ID NO: 621612 - RNA, 19 nt, Artificial Sequence
  Description of Artificial Sequence: Synthetic oligonucleotide
ucaaccuuucuaucuucac

SEQ ID NO: 621613 - RNA, 19 nt, Artificial Sequence
  Description of Artificial Sequence: Synthetic oligonucleotide
uuaggaugcuugaaugauu

SEQ ID NO: 621614 - RNA, 19 nt, Artificial Sequence
  Description of Artificial Sequence: Synthetic oligonucleotide
cuucgguuaaaucuccuga

SEQ ID NO: 621615 - RNA, 19 nt, Artificial Sequence
  Description of Artificial Sequence: Synthetic oligonucleotide
ucacuauauggugggauac

SEQ ID NO: 621616 - RNA, 19 nt, Artificial Sequence
  Description of Artificial Sequence: Synthetic oligonucleotide
uccugguuguucuccuagg

SEQ ID NO: 621617 - RNA, 19 nt, Artificial Sequence
  Description of Artificial Sequence: Synthetic oligonucleotide
uuuuggcgcucuuuccugc

SEQ ID NO: 621618 - RNA, 19 nt, Artificial Sequence
  Description of Artificial Sequence: Synthetic oligonucleotide
ucggcacucaguccaggag

SEQ ID NO: 621619 - RNA, 19 nt, Artificial Sequence
  Description of Artificial Sequence: Synthetic oligonucleotide
uucuccuaggugaaaucuc

SEQ ID NO: 621620 - RNA, 19 nt, Artificial Sequence
  Description of Artificial Sequence: Synthetic oligonucleotide
uuccuucgguuaaaucucc

SEQ ID NO: 621621 - RNA, 19 nt, Artificial Sequence
  Description of Artificial Sequence: Synthetic oligonucleotide
gcuggguuaucuacgaugg

SEQ ID NO: 621622 - RNA, 19 nt, Artificial Sequence
  Description of Artificial Sequence: Synthetic oligonucleotide
ggaugcuugaaugauuuug

SEQ ID NO: 621623 - RNA, 19 nt, Artificial Sequence
  Description of Artificial Sequence: Synthetic oligonucleotide
uccuuuuaaggcugcccgc

SEQ ID NO: 621624 - RNA, 19 nt, Artificial Sequence
  Description of Artificial Sequence: Synthetic oligonucleotide
gcaauuacgaccuuccucu

SEQ ID NO: 621625 - RNA, 19 nt, Artificial Sequence
  Description of Artificial Sequence: Synthetic oligonucleotide
aggucuguaguaucugagu

SEQ ID NO: 621626 - RNA, 19 nt, Artificial Sequence
  Description of Artificial Sequence: Synthetic oligonucleotide
cucuugaaugguagaaguc

SEQ ID NO: 621627 - RNA, 19 nt, Artificial Sequence
  Description of Artificial Sequence: Synthetic oligonucleotide
uauuuaguccaggaucuau

SEQ ID NO: 621628 - RNA, 19 nt, Artificial Sequence
  Description of Artificial Sequence: Synthetic oligonucleotide
cugaaccacgaucacugag

SEQ ID NO: 621629 - RNA, 19 nt, Artificial Sequence
  Description of Artificial Sequence: Synthetic oligonucleotide
ggaucuaugcugcuacuug

SEQ ID NO: 621630 - RNA, 19 nt, Artificial Sequence
  Description of Artificial Sequence: Synthetic oligonucleotide
ugggacuguaauuccuucu

SEQ ID NO: 621631 - RNA, 19 nt, Artificial Sequence
  Description of Artificial Sequence: Synthetic oligonucleotide
cuucgauucacuauauggu

SEQ ID NO: 621632 - RNA, 19 nt, Artificial Sequence
  Description of Artificial Sequence: Synthetic oligonucleotide
gucagcuggguuaucuacg

SEQ ID NO: 621633 - RNA, 19 nt, Artificial Sequence
  Description of Artificial Sequence: Synthetic oligonucleotide
ucgagagacucauguugag

SEQ ID NO: 621634 - RNA, 19 nt, Artificial Sequence
  Description of Artificial Sequence: Synthetic oligonucleotide
uucacuauuuaggaugcuu

SEQ ID NO: 621635 - RNA, 19 nt, Artificial Sequence
  Description of Artificial Sequence: Synthetic oligonucleotide
gacccacaucacuuuggcg

SEQ ID NO: 621636 - RNA, 19 nt, Artificial Sequence
  Description of Artificial Sequence: Synthetic oligonucleotide
uggguuaucuacgaugguu

SEQ ID NO: 621637 - RNA, 19 nt, Artificial Sequence
  Description of Artificial Sequence: Synthetic oligonucleotide
uguacccauuauuugcuuu

SEQ ID NO: 621638 - RNA, 19 nt, Artificial Sequence
  Description of Artificial Sequence: Synthetic oligonucleotide
cugguaacugacaggucug

SEQ ID NO: 621639 - RNA, 19 nt, Artificial Sequence
  Description of Artificial Sequence: Synthetic oligonucleotide
gaacucagaaucagccagc

SEQ ID NO: 621640 - RNA, 19 nt, Artificial Sequence
  Description of Artificial Sequence: Synthetic oligonucleotide
uggaaguacuuagggaaac

SEQ ID NO: 621641 - RNA, 19 nt, Artificial Sequence
  Description of Artificial Sequence: Synthetic oligonucleotide
uacuuagggaaaccaucuc

SEQ ID NO: 621642 - RNA, 19 nt, Artificial Sequence
  Description of Artificial Sequence: Synthetic oligonucleotide
guugaggggcuauuuucug

SEQ ID NO: 621643 - RNA, 19 nt, Artificial Sequence
  Description of Artificial Sequence: Synthetic oligonucleotide
ccuaacacuggacuuuggg

SEQ ID NO: 621644 - RNA, 19 nt, Artificial Sequence
  Description of Artificial Sequence: Synthetic oligonucleotide
uagagccccaugauuugga

SEQ ID NO: 621645 - RNA, 19 nt, Artificial Sequence
  Description of Artificial Sequence: Synthetic oligonucleotide
ugccugagcacgaggacuc

SEQ ID NO: 621646 - RNA, 19 nt, Artificial Sequence
  Description of Artificial Sequence: Synthetic oligonucleotide
cuugugaggcuucgguuug

SEQ ID NO: 621647 - RNA, 19 nt, Artificial Sequence
  Description of Artificial Sequence: Synthetic oligonucleotide
ggugcaauuacgaccuucc

SEQ ID NO: 621648 - RNA, 19 nt, Artificial Sequence
  Description of Artificial Sequence: Synthetic oligonucleotide
gguuugucuacauugaaau

SEQ ID NO: 621649 - RNA, 19 nt, Artificial Sequence
  Description of Artificial Sequence: Synthetic oligonucleotide
uuggggugggugcaauuac

SEQ ID NO: 621650 - RNA, 19 nt, Artificial Sequence
  Description of Artificial Sequence: Synthetic oligonucleotide
uccugguacaagcuuggua

SEQ ID NO: 621651 - RNA, 19 nt, Artificial Sequence
  Description of Artificial Sequence: Synthetic oligonucleotide
aguccaggaguucugucaa

SEQ ID NO: 621652 - RNA, 19 nt, Artificial Sequence
  Description of Artificial Sequence: Synthetic oligonucleotide
ugguaucuuucuucucagc

SEQ ID NO: 621653 - RNA, 19 nt, Artificial Sequence
  Description of Artificial Sequence: Synthetic oligonucleotide
guuuucuugugaggcuucg

SEQ ID NO: 621654 - RNA, 19 nt, Artificial Sequence
  Description of Artificial Sequence: Synthetic oligonucleotide
uuccuaacacuggacuuug

SEQ ID NO: 621655 - RNA, 19 nt, Artificial Sequence
  Description of Artificial Sequence: Synthetic oligonucleotide
acuauauggugggauacaa

SEQ ID NO: 621656 - RNA, 19 nt, Artificial Sequence
  Description of Artificial Sequence: Synthetic oligonucleotide
cucgagagacucauguuga

SEQ ID NO: 621657 - RNA, 19 nt, Artificial Sequence
  Description of Artificial Sequence: Synthetic oligonucleotide
ggaagguacaaccauugaa

SEQ ID NO: 621658 - RNA, 19 nt, Artificial Sequence
  Description of Artificial Sequence: Synthetic oligonucleotide
ucaagacccacaucacuuu

SEQ ID NO: 621659 - RNA, 19 nt, Artificial Sequence
  Description of Artificial Sequence: Synthetic oligonucleotide
uugcggaagguacaaccau

SEQ ID NO: 621660 - RNA, 19 nt, Artificial Sequence
  Description of Artificial Sequence: Synthetic oligonucleotide
ucgacauggcuucacuauu

SEQ ID NO: 621661 - RNA, 19 nt, Artificial Sequence
  Description of Artificial Sequence: Synthetic oligonucleotide
cacuauuuaggaugcuuga

SEQ ID NO: 621662 - RNA, 19 nt, Artificial Sequence
  Description of Artificial Sequence: Synthetic oligonucleotide
gacuugguguuacucagua

SEQ ID NO: 621663 - RNA, 19 nt, Artificial Sequence
  Description of Artificial Sequence: Synthetic oligonucleotide
auucacuauauggugggau

SEQ ID NO: 621664 - RNA, 19 nt, Artificial Sequence
  Description of Artificial Sequence: Synthetic oligonucleotide
gauucaauggggaacguuu

SEQ ID NO: 621665 - RNA, 19 nt, Artificial Sequence
  Description of Artificial Sequence: Synthetic oligonucleotide
acgugcugacuccuccugg

SEQ ID NO: 621666 - RNA, 19 nt, Artificial Sequence
  Description of Artificial Sequence: Synthetic oligonucleotide
cuuuuccuaacacuggacu

SEQ ID NO: 621667 - RNA, 19 nt, Artificial Sequence
  Description of Artificial Sequence: Synthetic oligonucleotide
cauuggugguuuuguguug

SEQ ID NO: 621668 - RNA, 19 nt, Artificial Sequence
  Description of Artificial Sequence: Synthetic oligonucleotide
uucuguggauggaaucauc

SEQ ID NO: 621669 - RNA, 19 nt, Artificial Sequence
  Description of Artificial Sequence: Synthetic oligonucleotide
ggugggauacaauaguucu

SEQ ID NO: 621670 - RNA, 19 nt, Artificial Sequence
  Description of Artificial Sequence: Synthetic oligonucleotide
ugcggaagguacaaccauu

SEQ ID NO: 621671 - RNA, 19 nt, Artificial Sequence
  Description of Artificial Sequence: Synthetic oligonucleotide
agcuucgacuugguguuac

SEQ ID NO: 621672 - RNA, 19 nt, Artificial Sequence
  Description of Artificial Sequence: Synthetic oligonucleotide
caauggggaacguuucuca

SEQ ID NO: 621673 - RNA, 19 nt, Artificial Sequence
  Description of Artificial Sequence: Synthetic oligonucleotide
aggguuuucuugugaggcu

SEQ ID NO: 621674 - RNA, 19 nt, Artificial Sequence
  Description of Artificial Sequence: Synthetic oligonucleotide
caaacagcgcaccaccaca

SEQ ID NO: 621675 - RNA, 19 nt, Artificial Sequence
  Description of Artificial Sequence: Synthetic oligonucleotide
ggaccucaagcacagaaga

SEQ ID NO: 621676 - RNA, 19 nt, Artificial Sequence
  Description of Artificial Sequence: Synthetic oligonucleotide
cuacgaugguuccaaccug

SEQ ID NO: 621677 - RNA, 19 nt, Artificial Sequence
  Description of Artificial Sequence: Synthetic oligonucleotide
uuggccuauuuaucugaga

SEQ ID NO: 621678 - RNA, 19 nt, Artificial Sequence
  Description of Artificial Sequence: Synthetic oligonucleotide
agguguaaugacagcuuuc

SEQ ID NO: 621679 - RNA, 19 nt, Artificial Sequence
  Description of Artificial Sequence: Synthetic oligonucleotide
agacucaacacuggcuucu

SEQ ID NO: 621680 - RNA, 19 nt, Artificial Sequence
  Description of Artificial Sequence: Synthetic oligonucleotide
aaccaaccauuaccagcug

SEQ ID NO: 621681 - RNA, 19 nt, Artificial Sequence
  Description of Artificial Sequence: Synthetic oligonucleotide
ccucgagagacucauguug

SEQ ID NO: 621682 - RNA, 19 nt, Artificial Sequence
  Description of Artificial Sequence: Synthetic oligonucleotide
ugucuacauugaaauuaau

SEQ ID NO: 621683 - RNA, 19 nt, Artificial Sequence
  Description of Artificial Sequence: Synthetic oligonucleotide
gagacucaacacuggcuuc

SEQ ID NO: 621684 - RNA, 19 nt, Artificial Sequence
  Description of Artificial Sequence: Synthetic oligonucleotide
cuauuuaggaugcuugaau

SEQ ID NO: 621685 - RNA, 19 nt, Artificial Sequence
  Description of Artificial Sequence: Synthetic oligonucleotide
cuugucaacuucagaagcu

SEQ ID NO: 621686 - RNA, 19 nt, Artificial Sequence
  Description of Artificial Sequence: Synthetic oligonucleotide
cuugaaugauuuugagaaa

SEQ ID NO: 621687 - RNA, 19 nt, Artificial Sequence
  Description of Artificial Sequence: Synthetic oligonucleotide
cgauucacuauaugguggg

SEQ ID NO: 621688 - RNA, 19 nt, Artificial Sequence
  Description of Artificial Sequence: Synthetic oligonucleotide
cuguaauuccuucugcaua

SEQ ID NO: 621689 - RNA, 19 nt, Artificial Sequence
  Description of Artificial Sequence: Synthetic oligonucleotide
gcugcuacuugucaacuuc

SEQ ID NO: 621690 - RNA, 19 nt, Artificial Sequence
  Description of Artificial Sequence: Synthetic oligonucleotide
cuccugaacucagaaucag

SEQ ID NO: 621691 - RNA, 19 nt, Artificial Sequence
  Description of Artificial Sequence: Synthetic oligonucleotide
uccuucgguuaaaucuccu

SEQ ID NO: 621692 - RNA, 19 nt, Artificial Sequence
  Description of Artificial Sequence: Synthetic oligonucleotide
gcuucacuauuuaggaugc

SEQ ID NO: 621693 - RNA, 19 nt, Artificial Sequence
  Description of Artificial Sequence: Synthetic oligonucleotide
cugagauuuagccuuacuu

SEQ ID NO: 621694 - RNA, 19 nt, Artificial Sequence
  Description of Artificial Sequence: Synthetic oligonucleotide
cuuuuaaggcugcccgcuc

SEQ ID NO: 621695 - RNA, 19 nt, Artificial Sequence
  Description of Artificial Sequence: Synthetic oligonucleotide
guguuaggguuuucuugug

SEQ ID NO: 621696 - RNA, 19 nt, Artificial Sequence
  Description of Artificial Sequence: Synthetic oligonucleotide
gcuuucaugccaaaccaac

SEQ ID NO: 621697 - RNA, 19 nt, Artificial Sequence
  Description of Artificial Sequence: Synthetic oligonucleotide
guacuuagggaaaccaucu

SEQ ID NO: 621698 - RNA, 19 nt, Artificial Sequence
  Description of Artificial Sequence: Synthetic oligonucleotide
aagauucaauggggaacgu

SEQ ID NO: 621699 - RNA, 19 nt, Artificial Sequence
  Description of Artificial Sequence: Synthetic oligonucleotide
uggcuucacuauuuaggau

SEQ ID NO: 621700 - RNA, 19 nt, Artificial Sequence
  Description of Artificial Sequence: Synthetic oligonucleotide
ugaucuguguuaggguuuu

SEQ ID NO: 621701 - RNA, 19 nt, Artificial Sequence
  Description of Artificial Sequence: Synthetic oligonucleotide
uguaaacauuggugguuuu

SEQ ID NO: 621702 - RNA, 19 nt, Artificial Sequence
  Description of Artificial Sequence: Synthetic oligonucleotide
augugaugaccuucagcaa

SEQ ID NO: 621703 - RNA, 19 nt, Artificial Sequence
  Description of Artificial Sequence: Synthetic oligonucleotide
ggguuaucuacgaugguuc

SEQ ID NO: 621704 - RNA, 19 nt, Artificial Sequence
  Description of Artificial Sequence: Synthetic oligonucleotide
acuugguguuacucaguaa

SEQ ID NO: 621705 - RNA, 19 nt, Artificial Sequence
  Description of Artificial Sequence: Synthetic oligonucleotide
uaucuacgaugguuccaac

SEQ ID NO: 621706 - RNA, 19 nt, Artificial Sequence
  Description of Artificial Sequence: Synthetic oligonucleotide
cuucgacuugguguuacuc

SEQ ID NO: 621707 - RNA, 19 nt, Artificial Sequence
  Description of Artificial Sequence: Synthetic oligonucleotide
gccaaaccaaccauuacca

SEQ ID NO: 621708 - RNA, 19 nt, Artificial Sequence
  Description of Artificial Sequence: Synthetic oligonucleotide
cugaagcaugagacucugc

SEQ ID NO: 621709 - RNA, 19 nt, Artificial Sequence
  Description of Artificial Sequence: Synthetic oligonucleotide
guacaaccauugaaacccc

SEQ ID NO: 621710 - RNA, 19 nt, Artificial Sequence
  Description of Artificial Sequence: Synthetic oligonucleotide
ggaacucuugaaugguaga

SEQ ID NO: 621711 - RNA, 19 nt, Artificial Sequence
  Description of Artificial Sequence: Synthetic oligonucleotide
gaaaccccugaagcaugag

SEQ ID NO: 621712 - RNA, 19 nt, Artificial Sequence
  Description of Artificial Sequence: Synthetic oligonucleotide
uucuuauaaugggcuccug

SEQ ID NO: 621713 - RNA, 19 nt, Artificial Sequence
  Description of Artificial Sequence: Synthetic oligonucleotide
ggucaagucacuccuuuua

SEQ ID NO: 621714 - RNA, 19 nt, Artificial Sequence
  Description of Artificial Sequence: Synthetic oligonucleotide
ccugguacaagcuugguau

SEQ ID NO: 621715 - RNA, 19 nt, Artificial Sequence
  Description of Artificial Sequence: Synthetic oligonucleotide
acucaccaucagauauagc

SEQ ID NO: 621716 - RNA, 19 nt, Artificial Sequence
  Description of Artificial Sequence: Synthetic oligonucleotide
guucuccuaggugaaaucu

SEQ ID NO: 621717 - RNA, 19 nt, Artificial Sequence
  Description of Artificial Sequence: Synthetic oligonucleotide
ugcugcuacuugucaacuu

SEQ ID NO: 621718 - RNA, 19 nt, Artificial Sequence
  Description of Artificial Sequence: Synthetic oligonucleotide
agacucauguugaggggcu

SEQ ID NO: 621719 - RNA, 19 nt, Artificial Sequence
  Description of Artificial Sequence: Synthetic oligonucleotide
agaaaccccugaagcauga

SEQ ID NO: 621720 - RNA, 19 nt, Artificial Sequence
  Description of Artificial Sequence: Synthetic oligonucleotide
cacgaggacucaccaucag

SEQ ID NO: 621721 - RNA, 19 nt, Artificial Sequence
  Description of Artificial Sequence: Synthetic oligonucleotide
auguacccauuauuugcuu

SEQ ID NO: 621722 - RNA, 19 nt, Artificial Sequence
  Description of Artificial Sequence: Synthetic oligonucleotide
ccuucgguuaaaucuccug

SEQ ID NO: 621723 - RNA, 19 nt, Artificial Sequence
  Description of Artificial Sequence: Synthetic oligonucleotide
cacgugcugacuccuccug

SEQ ID NO: 621724 - RNA, 19 nt, Artificial Sequence
  Description of Artificial Sequence: Synthetic oligonucleotide
gcuacuugucaacuucaga

SEQ ID NO: 621725 - RNA, 19 nt, Artificial Sequence
  Description of Artificial Sequence: Synthetic oligonucleotide
uuacgaccuuccucuuccu

SEQ ID NO: 621726 - RNA, 19 nt, Artificial Sequence
  Description of Artificial Sequence: Synthetic oligonucleotide
gggaucuauaaaaugcucu

SEQ ID NO: 621727 - RNA, 19 nt, Artificial Sequence
  Description of Artificial Sequence: Synthetic oligonucleotide
cugauuucuguaagagacu

SEQ ID NO: 621728 - RNA, 19 nt, Artificial Sequence
  Description of Artificial Sequence: Synthetic oligonucleotide
gcggaagguacaaccauug

SEQ ID NO: 621729 - RNA, 19 nt, Artificial Sequence
  Description of Artificial Sequence: Synthetic oligonucleotide
augcugcuacuugucaacu

SEQ ID NO: 621730 - RNA, 19 nt, Artificial Sequence
  Description of Artificial Sequence: Synthetic oligonucleotide
cuucgacauggcuucacua

SEQ ID NO: 621731 - RNA, 19 nt, Artificial Sequence
  Description of Artificial Sequence: Synthetic oligonucleotide
acccaacugcuugauauuu

SEQ ID NO: 621732 - RNA, 19 nt, Artificial Sequence
  Description of Artificial Sequence: Synthetic oligonucleotide
cucaacacuggcuucuuuu

SEQ ID NO: 621733 - RNA, 19 nt, Artificial Sequence
  Description of Artificial Sequence: Synthetic oligonucleotide
uuccaaccuggaaguacuu

SEQ ID NO: 621734 - RNA, 19 nt, Artificial Sequence
  Description of Artificial Sequence: Synthetic oligonucleotide
gaaccacgaucacugaguu

SEQ ID NO: 621735 - RNA, 19 nt, Artificial Sequence
  Description of Artificial Sequence: Synthetic oligonucleotide
cuuccucgagagacucaug

SEQ ID NO: 621736 - RNA, 19 nt, Artificial Sequence
  Description of Artificial Sequence: Synthetic oligonucleotide
cacuauauggugggauaca

SEQ ID NO: 621737 - RNA, 19 nt, Artificial Sequence
  Description of Artificial Sequence: Synthetic oligonucleotide
cacaucacuuuggcggcug

SEQ ID NO: 621738 - RNA, 19 nt, Artificial Sequence
  Description of Artificial Sequence: Synthetic oligonucleotide
gaucacugaguugggucaa

SEQ ID NO: 621739 - RNA, 19 nt, Artificial Sequence
  Description of Artificial Sequence: Synthetic oligonucleotide
auacuuccuucgguuaaau

SEQ ID NO: 621740 - RNA, 19 nt, Artificial Sequence
  Description of Artificial Sequence: Synthetic oligonucleotide
aggaugcuugaaugauuuu

SEQ ID NO: 621741 - RNA, 19 nt, Artificial Sequence
  Description of Artificial Sequence: Synthetic oligonucleotide
guguuacucaguaagucuu

SEQ ID NO: 621742 - RNA, 19 nt, Artificial Sequence
  Description of Artificial Sequence: Synthetic oligonucleotide
gccugugauucuuggcuug

SEQ ID NO: 621743 - RNA, 19 nt, Artificial Sequence
  Description of Artificial Sequence: Synthetic oligonucleotide
cacagauguacccauuauu

SEQ ID NO: 621744 - RNA, 19 nt, Artificial Sequence
  Description of Artificial Sequence: Synthetic oligonucleotide
guuuucacugaaccacgau

SEQ ID NO: 621745 - RNA, 19 nt, Artificial Sequence
  Description of Artificial Sequence: Synthetic oligonucleotide
guugaugcuucgauucacu

SEQ ID NO: 621746 - RNA, 19 nt, Artificial Sequence
  Description of Artificial Sequence: Synthetic oligonucleotide
ggucuguaguaucugaguu

SEQ ID NO: 621747 - RNA, 19 nt, Artificial Sequence
  Description of Artificial Sequence: Synthetic oligonucleotide
uuccugcgcuguuucugaa

SEQ ID NO: 621748 - RNA, 19 nt, Artificial Sequence
  Description of Artificial Sequence: Synthetic oligonucleotide
cuguaguaucugaguucuc

SEQ ID NO: 621749 - RNA, 19 nt, Artificial Sequence
  Description of Artificial Sequence: Synthetic oligonucleotide
cugagaauguggucucacu

SEQ ID NO: 621750 - RNA, 19 nt, Artificial Sequence
  Description of Artificial Sequence: Synthetic oligonucleotide
cuauauggugggauacaau

SEQ ID NO: 621751 - RNA, 19 nt, Artificial Sequence
  Description of Artificial Sequence: Synthetic oligonucleotide
cgagagacucauguugagg

SEQ ID NO: 621752 - RNA, 19 nt, Artificial Sequence
  Description of Artificial Sequence: Synthetic oligonucleotide
cuccuaggugaaaucucaa

SEQ ID NO: 621753 - RNA, 19 nt, Artificial Sequence
  Description of Artificial Sequence: Synthetic oligonucleotide
guacucuaaugauuuuauu

SEQ ID NO: 621754 - RNA, 19 nt, Artificial Sequence
  Description of Artificial Sequence: Synthetic oligonucleotide
cagccaugauuuccgaaua

SEQ ID NO: 621755 - RNA, 19 nt, Artificial Sequence
  Description of Artificial Sequence: Synthetic oligonucleotide
ugcccgcucuuucuucauu

SEQ ID NO: 621756 - RNA, 19 nt, Artificial Sequence
  Description of Artificial Sequence: Synthetic oligonucleotide
uuaaggcugcccgcucuuu

SEQ ID NO: 621757 - RNA, 19 nt, Artificial Sequence
  Description of Artificial Sequence: Synthetic oligonucleotide
cuugaacuucagaaagauu

SEQ ID NO: 621758 - RNA, 19 nt, Artificial Sequence
  Description of Artificial Sequence: Synthetic oligonucleotide
ggaacguuucucauuaauu

SEQ ID NO: 621759 - RNA, 19 nt, Artificial Sequence
  Description of Artificial Sequence: Synthetic oligonucleotide
ccuuucuaucuucacaacu

SEQ ID NO: 621760 - RNA, 19 nt, Artificial Sequence
  Description of Artificial Sequence: Synthetic oligonucleotide
cauguugaggggcuauuuu

SEQ ID NO: 621761 - RNA, 19 nt, Artificial Sequence
  Description of Artificial Sequence: Synthetic oligonucleotide
acgaugguuccaaccugga

SEQ ID NO: 621762 - RNA, 19 nt, Artificial Sequence
  Description of Artificial Sequence: Synthetic oligonucleotide
guacaagcuugguaucuuu

SEQ ID NO: 621763 - RNA, 19 nt, Artificial Sequence
  Description of Artificial Sequence: Synthetic oligonucleotide
acuuuggggugggugcaau

SEQ ID NO: 621764 - RNA, 19 nt, Artificial Sequence
  Description of Artificial Sequence: Synthetic oligonucleotide
caagcuugguaucuuucuu

SEQ ID NO: 621765 - RNA, 19 nt, Artificial Sequence
  Description of Artificial Sequence: Synthetic oligonucleotide
augcuucgauucacuauau

SEQ ID NO: 621766 - RNA, 19 nt, Artificial Sequence
  Description of Artificial Sequence: Synthetic oligonucleotide
gggaacguuucucauuaau

SEQ ID NO: 621767 - RNA, 19 nt, Artificial Sequence
  Description of Artificial Sequence: Synthetic oligonucleotide
gaggggcuauuuucugccu

SEQ ID NO: 621768 - RNA, 19 nt, Artificial Sequence
  Description of Artificial Sequence: Synthetic oligonucleotide
gggugcaauuacgaccuuc

SEQ ID NO: 621769 - RNA, 19 nt, Artificial Sequence
  Description of Artificial Sequence: Synthetic oligonucleotide
ugguuccaaccuggaagua

SEQ ID NO: 621770 - RNA, 19 nt, Artificial Sequence
  Description of Artificial Sequence: Synthetic oligonucleotide
gcaugcuuugguaucacau

SEQ ID NO: 621771 - RNA, 19 nt, Artificial Sequence
  Description of Artificial Sequence: Synthetic oligonucleotide
acaaaccacccaacugcuu

SEQ ID NO: 621772 - RNA, 19 nt, Artificial Sequence
  Description of Artificial Sequence: Synthetic oligonucleotide
gaucuguguuaggguuuuc

SEQ ID NO: 621773 - RNA, 19 nt, Artificial Sequence
  Description of Artificial Sequence: Synthetic oligonucleotide
ggccuauuuaucugagaau

SEQ ID NO: 621774 - RNA, 19 nt, Artificial Sequence
  Description of Artificial Sequence: Synthetic oligonucleotide
aggcuucgguuugucuaca

SEQ ID NO: 621775 - RNA, 19 nt, Artificial Sequence
  Description of Artificial Sequence: Synthetic oligonucleotide
aagcuucgacuugguguua

SEQ ID NO: 621776 - RNA, 19 nt, Artificial Sequence
  Description of Artificial Sequence: Synthetic oligonucleotide
gacuuuggggugggugcaa

SEQ ID NO: 621777 - RNA, 19 nt, Artificial Sequence
  Description of Artificial Sequence: Synthetic oligonucleotide
gacucauguugaggggcua

SEQ ID NO: 621778 - RNA, 19 nt, Artificial Sequence
  Description of Artificial Sequence: Synthetic oligonucleotide
cgguuaaaucuccugaacu

SEQ ID NO: 621779 - RNA, 19 nt, Artificial Sequence
  Description of Artificial Sequence: Synthetic oligonucleotide
gcuucgacauggcuucacu

SEQ ID NO: 621780 - RNA, 19 nt, Artificial Sequence
  Description of Artificial Sequence: Synthetic oligonucleotide
ugggugcaauuacgaccuu

SEQ ID NO: 621781 - RNA, 19 nt, Artificial Sequence
  Description of Artificial Sequence: Synthetic oligonucleotide
ccgaagcaugagacucugc

SEQ ID NO: 621782 - RNA, 19 nt, Artificial Sequence
  Description of Artificial Sequence: Synthetic oligonucleotide
caggaucuaugcugcuacu

SEQ ID NO: 621783 - RNA, 19 nt, Artificial Sequence
  Description of Artificial Sequence: Synthetic oligonucleotide
gcacgaggacucaccauca

SEQ ID NO: 621784 - RNA, 19 nt, Artificial Sequence
  Description of Artificial Sequence: Synthetic oligonucleotide
gguaacugacaggucugua

SEQ ID NO: 621785 - RNA, 19 nt, Artificial Sequence
  Description of Artificial Sequence: Synthetic oligonucleotide
cccgaagcaugagacucug

SEQ ID NO: 621786 - RNA, 19 nt, Artificial Sequence
  Description of Artificial Sequence: Synthetic oligonucleotide
ccgaauacuuccuucgguu

SEQ ID NO: 621787 - RNA, 19 nt, Artificial Sequence
  Description of Artificial Sequence: Synthetic oligonucleotide
ccaaccauuaccagcuguu

SEQ ID NO: 621788 - RNA, 19 nt, Artificial Sequence
  Description of Artificial Sequence: Synthetic oligonucleotide
cagaacacacagugucuuu

SEQ ID NO: 621789 - RNA, 19 nt, Artificial Sequence
  Description of Artificial Sequence: Synthetic oligonucleotide
cgaauacuuccuucgguua

SEQ ID NO: 621790 - RNA, 19 nt, Artificial Sequence
  Description of Artificial Sequence: Synthetic oligonucleotide
gcuugggacuguaauuccu

SEQ ID NO: 621791 - RNA, 19 nt, Artificial Sequence
  Description of Artificial Sequence: Synthetic oligonucleotide
cacccaacugcuugauauu

SEQ ID NO: 621792 - RNA, 19 nt, Artificial Sequence
  Description of Artificial Sequence: Synthetic oligonucleotide
cuggguuaucuacgauggu

SEQ ID NO: 621793 - RNA, 19 nt, Artificial Sequence
  Description of Artificial Sequence: Synthetic oligonucleotide
gguacaagcuugguaucuu

SEQ ID NO: 621794 - RNA, 19 nt, Artificial Sequence
  Description of Artificial Sequence: Synthetic oligonucleotide
caaccauuaccagcuguuu

SEQ ID NO: 621795 - RNA, 19 nt, Artificial Sequence
  Description of Artificial Sequence: Synthetic oligonucleotide
cuuuggcggcuguuguuuu

SEQ ID NO: 621796 - RNA, 19 nt, Artificial Sequence
  Description of Artificial Sequence: Synthetic oligonucleotide
ccuuuuaaggcugcccgcu

SEQ ID NO: 621797 - RNA, 19 nt, Artificial Sequence
  Description of Artificial Sequence: Synthetic oligonucleotide
cccgcucuuucuucauuca

SEQ ID NO: 621798 - RNA, 19 nt, Artificial Sequence
  Description of Artificial Sequence: Synthetic oligonucleotide
aggcuucgacauggcuuca

SEQ ID NO: 621799 - RNA, 19 nt, Artificial Sequence
  Description of Artificial Sequence: Synthetic oligonucleotide
cuucacuauuuaggaugcu

SEQ ID NO: 621800 - RNA, 19 nt, Artificial Sequence
  Description of Artificial Sequence: Synthetic oligonucleotide
caauuacgaccuuccucuu

SEQ ID NO: 621801 - RNA, 19 nt, Artificial Sequence
  Description of Artificial Sequence: Synthetic oligonucleotide
gacucaacacuggcuucuu

SEQ ID NO: 621802 - RNA, 19 nt, Artificial Sequence
  Description of Artificial Sequence: Synthetic oligonucleotide
gcuucgguuugucuacauu

SEQ ID NO: 621803 - RNA, 19 nt, Artificial Sequence
  Description of Artificial Sequence: Synthetic oligonucleotide
ggggaacguuucucauuaa

SEQ ID NO: 621804 - RNA, 19 nt, Artificial Sequence
  Description of Artificial Sequence: Synthetic oligonucleotide
gguccaugcuugcucucau

SEQ ID NO: 621805 - RNA, 19 nt, Artificial Sequence
  Description of Artificial Sequence: Synthetic oligonucleotide
gcuucgacuugguguuacu

SEQ ID NO: 621806 - RNA, 19 nt, Artificial Sequence
  Description of Artificial Sequence: Synthetic oligonucleotide
ccgcucuuucuucauucaa

SEQ ID NO: 621807 - RNA, 19 nt, Artificial Sequence
  Description of Artificial Sequence: Synthetic oligonucleotide
cggaagguacaaccauuga

SEQ ID NO: 621808 - RNA, 19 nt, Artificial Sequence
  Description of Artificial Sequence: Synthetic oligonucleotide
gcacucaguccaggaguuc

SEQ ID NO: 621809 - RNA, 19 nt, Artificial Sequence
  Description of Artificial Sequence: Synthetic oligonucleotide
ggcuucgguuugucuacau

SEQ ID NO: 621810 - RNA, 19 nt, Artificial Sequence
  Description of Artificial Sequence: Synthetic oligonucleotide
cagcuggguuaucuacgau

SEQ ID NO: 621811 - RNA, 19 nt, Artificial Sequence
  Description of Artificial Sequence: Synthetic oligonucleotide
ccccgaagcaugagacucu

SEQ ID NO: 621812 - RNA, 19 nt, Artificial Sequence
  Description of Artificial Sequence: Synthetic oligonucleotide
cgacauggcuucacuauuu

SEQ ID NO: 621813 - RNA, 19 nt, Artificial Sequence
  Description of Artificial Sequence: Synthetic oligonucleotide
ccuggaccucaagcacaga

SEQ ID NO: 621814 - RNA, 19 nt, Artificial Sequence
  Description of Artificial Sequence: Synthetic oligonucleotide
ccacaucacuuuggcggcu

SEQ ID NO: 621815 - RNA, 19 nt, Artificial Sequence
  Description of Artificial Sequence: Synthetic oligonucleotide
aacauugggcucuaggccc

SEQ ID NO: 621816 - RNA, 19 nt, Artificial Sequence
  Description of Artificial Sequence: Synthetic oligonucleotide
auuuggaucaucugaaaac

SEQ ID NO: 621817 - RNA, 19 nt, Artificial Sequence
  Description of Artificial Sequence: Synthetic oligonucleotide
uguaguucugcauugaccc

SEQ ID NO: 621818 - RNA, 19 nt, Artificial Sequence
  Description of Artificial Sequence: Synthetic oligonucleotide
gaauuaucgauuuugcccc

SEQ ID NO: 621819 - RNA, 19 nt, Artificial Sequence
  Description of Artificial Sequence: Synthetic oligonucleotide
gugauaugcaacuauauag

SEQ ID NO: 621820 - RNA, 19 nt, Artificial Sequence
  Description of Artificial Sequence: Synthetic oligonucleotide
uuaaugaguaacuugcccc

SEQ ID NO: 621821 - RNA, 19 nt, Artificial Sequence
  Description of Artificial Sequence: Synthetic oligonucleotide
cucaauaugaggcaagucc

SEQ ID NO: 621822 - RNA, 19 nt, Artificial Sequence
  Description of Artificial Sequence: Synthetic oligonucleotide
uuuauaucauagaagcaug

SEQ ID NO: 621823 - RNA, 19 nt, Artificial Sequence
  Description of Artificial Sequence: Synthetic oligonucleotide
auaaagagaaaguaugcug

SEQ ID NO: 621824 - RNA, 19 nt, Artificial Sequence
  Description of Artificial Sequence: Synthetic oligonucleotide
auugagaucuucaugcugc

SEQ ID NO: 621825 - RNA, 19 nt, Artificial Sequence
  Description of Artificial Sequence: Synthetic oligonucleotide
uuaauuugugauaugcaac

SEQ ID NO: 621826 - RNA, 19 nt, Artificial Sequence
  Description of Artificial Sequence: Synthetic oligonucleotide
ucaaucuucgugaauguug

SEQ ID NO: 621827 - RNA, 19 nt, Artificial Sequence
  Description of Artificial Sequence: Synthetic oligonucleotide
aacuacuguccacaagacc

SEQ ID NO: 621828 - RNA, 19 nt, Artificial Sequence
  Description of Artificial Sequence: Synthetic oligonucleotide
uaauuugugauaugcaacu

SEQ ID NO: 621829 - RNA, 19 nt, Artificial Sequence
  Description of Artificial Sequence: Synthetic oligonucleotide
auaucauagaagcaugcag

SEQ ID NO: 621830 - RNA, 19 nt, Artificial Sequence
  Description of Artificial Sequence: Synthetic oligonucleotide
ugcacaauugcauugggca

SEQ ID NO: 621831 - RNA, 19 nt, Artificial Sequence
  Description of Artificial Sequence: Synthetic oligonucleotide
uuggcauucgguuaaagac

SEQ ID NO: 621832 - RNA, 19 nt, Artificial Sequence
  Description of Artificial Sequence: Synthetic oligonucleotide
ugcuccuacauaaagagaa

SEQ ID NO: 621833 - RNA, 19 nt, Artificial Sequence
  Description of Artificial Sequence: Synthetic oligonucleotide
aaagacguuccauagcaca

SEQ ID NO: 621834 - RNA, 19 nt, Artificial Sequence
  Description of Artificial Sequence: Synthetic oligonucleotide
uggcauucgguuaaagacg

SEQ ID NO: 621835 - RNA, 19 nt, Artificial Sequence
  Description of Artificial Sequence: Synthetic oligonucleotide
aacaaguugccuggaagcc

SEQ ID NO: 621836 - RNA, 19 nt, Artificial Sequence
  Description of Artificial Sequence: Synthetic oligonucleotide
aaaucacuccagaacaucg

SEQ ID NO: 621837 - RNA, 19 nt, Artificial Sequence
  Description of Artificial Sequence: Synthetic oligonucleotide
gacuaacacagaauuaucg

SEQ ID NO: 621838 - RNA, 19 nt, Artificial Sequence
  Description of Artificial Sequence: Synthetic oligonucleotide
uguguauuccaugaugggg

SEQ ID NO: 621839 - RNA, 19 nt, Artificial Sequence
  Description of Artificial Sequence: Synthetic oligonucleotide
ucuuacauccaacuguacu

SEQ ID NO: 621840 - RNA, 19 nt, Artificial Sequence
  Description of Artificial Sequence: Synthetic oligonucleotide
uuuggcaaccgcuacucgg

SEQ ID NO: 621841 - RNA, 19 nt, Artificial Sequence
  Description of Artificial Sequence: Synthetic oligonucleotide
uguugauaagcccacaaua

SEQ ID NO: 621842 - RNA, 19 nt, Artificial Sequence
  Description of Artificial Sequence: Synthetic oligonucleotide
ugugacauuuggaucaucu

SEQ ID NO: 621843 - RNA, 19 nt, Artificial Sequence
  Description of Artificial Sequence: Synthetic oligonucleotide
accgccaccaaucagcagg

SEQ ID NO: 621844 - RNA, 19 nt, Artificial Sequence
  Description of Artificial Sequence: Synthetic oligonucleotide
ugaaucacuucaaugccug

SEQ ID NO: 621845 - RNA, 19 nt, Artificial Sequence
  Description of Artificial Sequence: Synthetic oligonucleotide
gaacaaguugccuggaagc

SEQ ID NO: 621846 - RNA, 19 nt, Artificial Sequence
  Description of Artificial Sequence: Synthetic oligonucleotide
agcccuaacccugauaucc

SEQ ID NO: 621847 - RNA, 19 nt, Artificial Sequence
  Description of Artificial Sequence: Synthetic oligonucleotide
aguaccgccaccaaucagc

SEQ ID NO: 621848 - RNA, 19 nt, Artificial Sequence
  Description of Artificial Sequence: Synthetic oligonucleotide
aguacggcuuagcagcucc

SEQ ID NO: 621849 - RNA, 19 nt, Artificial Sequence
  Description of Artificial Sequence: Synthetic oligonucleotide
uaauugacuugacuucccg

SEQ ID NO: 621850 - RNA, 19 nt, Artificial Sequence
  Description of Artificial Sequence: Synthetic oligonucleotide
ucuaaagucuccaaucuuu

SEQ ID NO: 621851 - RNA, 19 nt, Artificial Sequence
  Description of Artificial Sequence: Synthetic oligonucleotide
auugacuugacuucccgug

SEQ ID NO: 621852 - RNA, 19 nt, Artificial Sequence
  Description of Artificial Sequence: Synthetic oligonucleotide
acuaacacagaauuaucga

SEQ ID NO: 621853 - RNA, 19 nt, Artificial Sequence
  Description of Artificial Sequence: Synthetic oligonucleotide
ucagcccuaacccugauau

SEQ ID NO: 621854 - RNA, 19 nt, Artificial Sequence
  Description of Artificial Sequence: Synthetic oligonucleotide
acuauauagaugaaaauau

SEQ ID NO: 621855 - RNA, 19 nt, Artificial Sequence
  Description of Artificial Sequence: Synthetic oligonucleotide
acuacuguccacaagacca

SEQ ID NO: 621856 - RNA, 19 nt, Artificial Sequence
  Description of Artificial Sequence: Synthetic oligonucleotide
ucuggacgcacacuguccg

SEQ ID NO: 621857 - RNA, 19 nt, Artificial Sequence
  Description of Artificial Sequence: Synthetic oligonucleotide
uagaauggguacaaacacc

SEQ ID NO: 621858 - RNA, 19 nt, Artificial Sequence
  Description of Artificial Sequence: Synthetic oligonucleotide
uucaggaaggaucuucccc

SEQ ID NO: 621859 - RNA, 19 nt, Artificial Sequence
  Description of Artificial Sequence: Synthetic oligonucleotide
acagaauuaucgauuuugc

SEQ ID NO: 621860 - RNA, 19 nt, Artificial Sequence
  Description of Artificial Sequence: Synthetic oligonucleotide
ucuugcuccuacauaaaga

SEQ ID NO: 621861 - RNA, 19 nt, Artificial Sequence
  Description of Artificial Sequence: Synthetic oligonucleotide
uuguaguucugcauugacc

SEQ ID NO: 621862 - RNA, 19 nt, Artificial Sequence
  Description of Artificial Sequence: Synthetic oligonucleotide
ucgacugaugccaguacgg

SEQ ID NO: 621863 - RNA, 19 nt, Artificial Sequence
  Description of Artificial Sequence: Synthetic oligonucleotide
cauagaagcaugcagcauc

SEQ ID NO: 621864 - RNA, 19 nt, Artificial Sequence
  Description of Artificial Sequence: Synthetic oligonucleotide
uccuacauaaagagaaagu

SEQ ID NO: 621865 - RNA, 19 nt, Artificial Sequence
  Description of Artificial Sequence: Synthetic oligonucleotide
uucagcuuaaugaguaacu

SEQ ID NO: 621866 - RNA, 19 nt, Artificial Sequence
  Description of Artificial Sequence: Synthetic oligonucleotide
ucaccguccuuaaugaucu

SEQ ID NO: 621867 - RNA, 19 nt, Artificial Sequence
  Description of Artificial Sequence: Synthetic oligonucleotide
uucuugcuccuacauaaag

SEQ ID NO: 621868 - RNA, 19 nt, Artificial Sequence
  Description of Artificial Sequence: Synthetic oligonucleotide
ucauuaaguuucaccaugu

SEQ ID NO: 621869 - RNA, 19 nt, Artificial Sequence
  Description of Artificial Sequence: Synthetic oligonucleotide
uuucacucccucuugcuug

SEQ ID NO: 621870 - RNA, 19 nt, Artificial Sequence
  Description of Artificial Sequence: Synthetic oligonucleotide
agaacaucgacugaugcca

SEQ ID NO: 621871 - RNA, 19 nt, Artificial Sequence
  Description of Artificial Sequence: Synthetic oligonucleotide
ugaaaaguguuguucugcu

SEQ ID NO: 621872 - RNA, 19 nt, Artificial Sequence
  Description of Artificial Sequence: Synthetic oligonucleotide
aucacuccagaacaucgac

SEQ ID NO: 621873 - RNA, 19 nt, Artificial Sequence
  Description of Artificial Sequence: Synthetic oligonucleotide
caacugauugcacaauugc

SEQ ID NO: 621874 - RNA, 19 nt, Artificial Sequence
  Description of Artificial Sequence: Synthetic oligonucleotide
ugagucuauuuccagucca

SEQ ID NO: 621875 - RNA, 19 nt, Artificial Sequence
  Description of Artificial Sequence: Synthetic oligonucleotide
ugauugcacaauugcauug

SEQ ID NO: 621876 - RNA, 19 nt, Artificial Sequence
  Description of Artificial Sequence: Synthetic oligonucleotide
aauugacuugacuucccgu

SEQ ID NO: 621877 - RNA, 19 nt, Artificial Sequence
  Description of Artificial Sequence: Synthetic oligonucleotide
ugacuugguauucugacuu

SEQ ID NO: 621878 - RNA, 19 nt, Artificial Sequence
  Description of Artificial Sequence: Synthetic oligonucleotide
caguucacugccaaggaag

SEQ ID NO: 621879 - RNA, 19 nt, Artificial Sequence
  Description of Artificial Sequence: Synthetic oligonucleotide
auucgguuaaagacguucc

SEQ ID NO: 621880 - RNA, 19 nt, Artificial Sequence
  Description of Artificial Sequence: Synthetic oligonucleotide
aauccccacgacuacuuug

SEQ ID NO: 621881 - RNA, 19 nt, Artificial Sequence
  Description of Artificial Sequence: Synthetic oligonucleotide
ucgugaauguugaagaguu

SEQ ID NO: 621882 - RNA, 19 nt, Artificial Sequence
  Description of Artificial Sequence: Synthetic oligonucleotide
aucgacugaugccaguacg

SEQ ID NO: 621883 - RNA, 19 nt, Artificial Sequence
  Description of Artificial Sequence: Synthetic oligonucleotide
uuggccaacucaacauugg

SEQ ID NO: 621884 - RNA, 19 nt, Artificial Sequence
  Description of Artificial Sequence: Synthetic oligonucleotide
uauaucauagaagcaugca

SEQ ID NO: 621885 - RNA, 19 nt, Artificial Sequence
  Description of Artificial Sequence: Synthetic oligonucleotide
aucauagaagcaugcagca

SEQ ID NO: 621886 - RNA, 19 nt, Artificial Sequence
  Description of Artificial Sequence: Synthetic oligonucleotide
cagucuuccacucacaaca

SEQ ID NO: 621887 - RNA, 19 nt, Artificial Sequence
  Description of Artificial Sequence: Synthetic oligonucleotide
aggaacacgccaucgcugg

SEQ ID NO: 621888 - RNA, 19 nt, Artificial Sequence
  Description of Artificial Sequence: Synthetic oligonucleotide
ucccugauugcucuguggc

SEQ ID NO: 621889 - RNA, 19 nt, Artificial Sequence
  Description of Artificial Sequence: Synthetic oligonucleotide
accgauaacuguaauugac

SEQ ID NO: 621890 - RNA, 19 nt, Artificial Sequence
  Description of Artificial Sequence: Synthetic oligonucleotide
agcccuaucaauggcagac

SEQ ID NO: 621891 - RNA, 19 nt, Artificial Sequence
  Description of Artificial Sequence: Synthetic oligonucleotide
uccuguugcaaucaagcau

SEQ ID NO: 621892 - RNA, 19 nt, Artificial Sequence
  Description of Artificial Sequence: Synthetic oligonucleotide
agaacgugcuuguaguucu

SEQ ID NO: 621893 - RNA, 19 nt, Artificial Sequence
  Description of Artificial Sequence: Synthetic oligonucleotide
auuuuggcaaccgcuacuc

SEQ ID NO: 621894 - RNA, 19 nt, Artificial Sequence
  Description of Artificial Sequence: Synthetic oligonucleotide
gguuaaagacguuccauag

SEQ ID NO: 621895 - RNA, 19 nt, Artificial Sequence
  Description of Artificial Sequence: Synthetic oligonucleotide
caacauugggcucuaggcc

SEQ ID NO: 621896 - RNA, 19 nt, Artificial Sequence
  Description of Artificial Sequence: Synthetic oligonucleotide
gagguauucaggaaggauc

SEQ ID NO: 621897 - RNA, 19 nt, Artificial Sequence
  Description of Artificial Sequence: Synthetic oligonucleotide
ucgacccaacuuuauauca

SEQ ID NO: 621898 - RNA, 19 nt, Artificial Sequence
  Description of Artificial Sequence: Synthetic oligonucleotide
ugaucuuccuugcgauugg

SEQ ID NO: 621899 - RNA, 19 nt, Artificial Sequence
  Description of Artificial Sequence: Synthetic oligonucleotide
aguucuagaggaacacgcc

SEQ ID NO: 621900 - RNA, 19 nt, Artificial Sequence
  Description of Artificial Sequence: Synthetic oligonucleotide
gaaaagugcguguguauuc

SEQ ID NO: 621901 - RNA, 19 nt, Artificial Sequence
  Description of Artificial Sequence: Synthetic oligonucleotide
cacaccggaacauuuuggc

SEQ ID NO: 621902 - RNA, 19 nt, Artificial Sequence
  Description of Artificial Sequence: Synthetic oligonucleotide
uaaugaucuuccuugcgau

SEQ ID NO: 621903 - RNA, 19 nt, Artificial Sequence
  Description of Artificial Sequence: Synthetic oligonucleotide
cuggugucagcccuaaccc

SEQ ID NO: 621904 - RNA, 19 nt, Artificial Sequence
  Description of Artificial Sequence: Synthetic oligonucleotide
aggaacaugacuugguauu

SEQ ID NO: 621905 - RNA, 19 nt, Artificial Sequence
  Description of Artificial Sequence: Synthetic oligonucleotide
uauucacagaggcuuguuc

SEQ ID NO: 621906 - RNA, 19 nt, Artificial Sequence
  Description of Artificial Sequence: Synthetic oligonucleotide
aguucacugccaaggaagc

SEQ ID NO: 621907 - RNA, 19 nt, Artificial Sequence
  Description of Artificial Sequence: Synthetic oligonucleotide
uccaacuguacuaccuucu

SEQ ID NO: 621908 - RNA, 19 nt, Artificial Sequence
  Description of Artificial Sequence: Synthetic oligonucleotide
accauguugucucuuacau

SEQ ID NO: 621909 - RNA, 19 nt, Artificial Sequence
  Description of Artificial Sequence: Synthetic oligonucleotide
auccaacuguacuaccuuc

SEQ ID NO: 621910 - RNA, 19 nt, Artificial Sequence
  Description of Artificial Sequence: Synthetic oligonucleotide
cuaaagucuccaaucuuuc

SEQ ID NO: 621911 - RNA, 19 nt, Artificial Sequence
  Description of Artificial Sequence: Synthetic oligonucleotide
cuuacauccaacuguacua

SEQ ID NO: 621912 - RNA, 19 nt, Artificial Sequence
  Description of Artificial Sequence: Synthetic oligonucleotide
gccaguacggcuuagcagc

SEQ ID NO: 621913 - RNA, 19 nt, Artificial Sequence
  Description of Artificial Sequence: Synthetic oligonucleotide
uugacuugacuucccguga

SEQ ID NO: 621914 - RNA, 19 nt, Artificial Sequence
  Description of Artificial Sequence: Synthetic oligonucleotide
aacccugauauccuuucau

SEQ ID NO: 621915 - RNA, 19 nt, Artificial Sequence
  Description of Artificial Sequence: Synthetic oligonucleotide
uuggcaaccgcuacucgga

SEQ ID NO: 621916 - RNA, 19 nt, Artificial Sequence
  Description of Artificial Sequence: Synthetic oligonucleotide
auaugaggcaaguccugag

SEQ ID NO: 621917 - RNA, 19 nt, Artificial Sequence
  Description of Artificial Sequence: Synthetic oligonucleotide
gaccucuggacgcacacug

SEQ ID NO: 621918 - RNA, 19 nt, Artificial Sequence
  Description of Artificial Sequence: Synthetic oligonucleotide
uuguugauaagcccacaau

SEQ ID NO: 621919 - RNA, 19 nt, Artificial Sequence
  Description of Artificial Sequence: Synthetic oligonucleotide
agaggaacacgccaucgcu

SEQ ID NO: 621920 - RNA, 19 nt, Artificial Sequence
  Description of Artificial Sequence: Synthetic oligonucleotide
ggaacaaguugccuggaag

SEQ ID NO: 621921 - RNA, 19 nt, Artificial Sequence
  Description of Artificial Sequence: Synthetic oligonucleotide
uguauuccaugauggggca

SEQ ID NO: 621922 - RNA, 19 nt, Artificial Sequence
  Description of Artificial Sequence: Synthetic oligonucleotide
ugccaguacggcuuagcag

SEQ ID NO: 621923 - RNA, 19 nt, Artificial Sequence
  Description of Artificial Sequence: Synthetic oligonucleotide
caaucuucgugaauguuga

SEQ ID NO: 621924 - RNA, 19 nt, Artificial Sequence
  Description of Artificial Sequence: Synthetic oligonucleotide
ugaggcaaguccugagcag

SEQ ID NO: 621925 - RNA, 19 nt, Artificial Sequence
  Description of Artificial Sequence: Synthetic oligonucleotide
cucaccguccuuaaugauc

SEQ ID NO: 621926 - RNA, 19 nt, Artificial Sequence
  Description of Artificial Sequence: Synthetic oligonucleotide
aggaucucgagcccggaug

SEQ ID NO: 621927 - RNA, 19 nt, Artificial Sequence
  Description of Artificial Sequence: Synthetic oligonucleotide
ugucucgaccucuggacgc

SEQ ID NO: 621928 - RNA, 19 nt, Artificial Sequence
  Description of Artificial Sequence: Synthetic oligonucleotide
uccagaacaucgacugaug

SEQ ID NO: 621929 - RNA, 19 nt, Artificial Sequence
  Description of Artificial Sequence: Synthetic oligonucleotide
cauucgguuaaagacguuc

SEQ ID NO: 621930 - RNA, 19 nt, Artificial Sequence
  Description of Artificial Sequence: Synthetic oligonucleotide
acugauugcacaauugcau

SEQ ID NO: 621931 - RNA, 19 nt, Artificial Sequence
  Description of Artificial Sequence: Synthetic oligonucleotide
gaaagaagguggcuggaaa

SEQ ID NO: 621932 - RNA, 19 nt, Artificial Sequence
  Description of Artificial Sequence: Synthetic oligonucleotide
cuccuacauaaagagaaag

SEQ ID NO: 621933 - RNA, 19 nt, Artificial Sequence
  Description of Artificial Sequence: Synthetic oligonucleotide
ucccgugagaucuucucca

SEQ ID NO: 621934 - RNA, 19 nt, Artificial Sequence
  Description of Artificial Sequence: Synthetic oligonucleotide
cuuuauaucauagaagcau

SEQ ID NO: 621935 - RNA, 19 nt, Artificial Sequence
  Description of Artificial Sequence: Synthetic oligonucleotide
cuuguaguucugcauugac

SEQ ID NO: 621936 - RNA, 19 nt, Artificial Sequence
  Description of Artificial Sequence: Synthetic oligonucleotide
gucaaggauggaaaagugc

SEQ ID NO: 621937 - RNA, 19 nt, Artificial Sequence
  Description of Artificial Sequence: Synthetic oligonucleotide
cacugacuccaacugauug

SEQ ID NO: 621938 - RNA, 19 nt, Artificial Sequence
  Description of Artificial Sequence: Synthetic oligonucleotide
guuagaacgugcuuguagu

SEQ ID NO: 621939 - RNA, 19 nt, Artificial Sequence
  Description of Artificial Sequence: Synthetic oligonucleotide
uucgacccaacuuuauauc

SEQ ID NO: 621940 - RNA, 19 nt, Artificial Sequence
  Description of Artificial Sequence: Synthetic oligonucleotide
agugcguguguauuccaug

SEQ ID NO: 621941 - RNA, 19 nt, Artificial Sequence
  Description of Artificial Sequence: Synthetic oligonucleotide
guaguucugcauugacccg

SEQ ID NO: 621942 - RNA, 19 nt, Artificial Sequence
  Description of Artificial Sequence: Synthetic oligonucleotide
cccacgacuacuuuguccc

SEQ ID NO: 621943 - RNA, 19 nt, Artificial Sequence
  Description of Artificial Sequence: Synthetic oligonucleotide
uccaaggcucuaaagucuc

SEQ ID NO: 621944 - RNA, 19 nt, Artificial Sequence
  Description of Artificial Sequence: Synthetic oligonucleotide
cucgagcccggauggaucg

SEQ ID NO: 621945 - RNA, 19 nt, Artificial Sequence
  Description of Artificial Sequence: Synthetic oligonucleotide
aagguggcuggaaauauau

SEQ ID NO: 621946 - RNA, 19 nt, Artificial Sequence
  Description of Artificial Sequence: Synthetic oligonucleotide
ucgccuucgacccaacuuu

SEQ ID NO: 621947 - RNA, 19 nt, Artificial Sequence
  Description of Artificial Sequence: Synthetic oligonucleotide
ucuccgagcggauaccggu

SEQ ID NO: 621948 - RNA, 19 nt, Artificial Sequence
  Description of Artificial Sequence: Synthetic oligonucleotide
cuucaugcugcucaccguc

SEQ ID NO: 621949 - RNA, 19 nt, Artificial Sequence
  Description of Artificial Sequence: Synthetic oligonucleotide
aguuucuaccuuccgucca

SEQ ID NO: 621950 - RNA, 19 nt, Artificial Sequence
  Description of Artificial Sequence: Synthetic oligonucleotide
uucaugcugcucaccgucc

SEQ ID NO: 621951 - RNA, 19 nt, Artificial Sequence
  Description of Artificial Sequence: Synthetic oligonucleotide
guucuagaggaacacgcca

SEQ ID NO: 621952 - RNA, 19 nt, Artificial Sequence
  Description of Artificial Sequence: Synthetic oligonucleotide
ugcucuacucgccuucgac

SEQ ID NO: 621953 - RNA, 19 nt, Artificial Sequence
  Description of Artificial Sequence: Synthetic oligonucleotide
gguagaauggguacaaaca

SEQ ID NO: 621954 - RNA, 19 nt, Artificial Sequence
  Description of Artificial Sequence: Synthetic oligonucleotide
gaaaaguguuguucugcuc

SEQ ID NO: 621955 - RNA, 19 nt, Artificial Sequence
  Description of Artificial Sequence: Synthetic oligonucleotide
gucuauuuccaguccacca

SEQ ID NO: 621956 - RNA, 19 nt, Artificial Sequence
  Description of Artificial Sequence: Synthetic oligonucleotide
ccuauuguugauaagccca

SEQ ID NO: 621957 - RNA, 19 nt, Artificial Sequence
  Description of Artificial Sequence: Synthetic oligonucleotide
gcaaccgcuacucggaacc

SEQ ID NO: 621958 - RNA, 19 nt, Artificial Sequence
  Description of Artificial Sequence: Synthetic oligonucleotide
uugcuccuacauaaagaga

SEQ ID NO: 621959 - RNA, 19 nt, Artificial Sequence
  Description of Artificial Sequence: Synthetic oligonucleotide
cugucucgaccucuggacg

SEQ ID NO: 621960 - RNA, 19 nt, Artificial Sequence
  Description of Artificial Sequence: Synthetic oligonucleotide
cagucauauuuucuccagc

SEQ ID NO: 621961 - RNA, 19 nt, Artificial Sequence
  Description of Artificial Sequence: Synthetic oligonucleotide
gacuugguauucugacuug

SEQ ID NO: 621962 - RNA, 19 nt, Artificial Sequence
  Description of Artificial Sequence: Synthetic oligonucleotide
gaugcucuacucgccuucg

SEQ ID NO: 621963 - RNA, 19 nt, Artificial Sequence
  Description of Artificial Sequence: Synthetic oligonucleotide
cugagucuauuuccagucc

SEQ ID NO: 621964 - RNA, 19 nt, Artificial Sequence
  Description of Artificial Sequence: Synthetic oligonucleotide
gaggucgcauguauggcag

SEQ ID NO: 621965 - RNA, 19 nt, Artificial Sequence
  Description of Artificial Sequence: Synthetic oligonucleotide
aauuugugauaugcaacua

SEQ ID NO: 621966 - RNA, 19 nt, Artificial Sequence
  Description of Artificial Sequence: Synthetic oligonucleotide
ugagguauucaggaaggau

SEQ ID NO: 621967 - RNA, 19 nt, Artificial Sequence
  Description of Artificial Sequence: Synthetic oligonucleotide
ggaacauuuuggcaaccgc

SEQ ID NO: 621968 - RNA, 19 nt, Artificial Sequence
  Description of Artificial Sequence: Synthetic oligonucleotide
aagacguuccauagcacaa

SEQ ID NO: 621969 - RNA, 19 nt, Artificial Sequence
  Description of Artificial Sequence: Synthetic oligonucleotide
uccgagcggauaccggucc

SEQ ID NO: 621970 - RNA, 19 nt, Artificial Sequence
  Description of Artificial Sequence: Synthetic oligonucleotide
acuuuauaucauagaagca

SEQ ID NO: 621971 - RNA, 19 nt, Artificial Sequence
  Description of Artificial Sequence: Synthetic oligonucleotide
cauuuggaucaucugaaaa

SEQ ID NO: 621972 - RNA, 19 nt, Artificial Sequence
  Description of Artificial Sequence: Synthetic oligonucleotide
aggauggaaaagugcgugu

SEQ ID NO: 621973 - RNA, 19 nt, Artificial Sequence
  Description of Artificial Sequence: Synthetic oligonucleotide
ugacccggaagccaccaaa

SEQ ID NO: 621974 - RNA, 19 nt, Artificial Sequence
  Description of Artificial Sequence: Synthetic oligonucleotide
cuagccauuugucuugcca

SEQ ID NO: 621975 - RNA, 19 nt, Artificial Sequence
  Description of Artificial Sequence: Synthetic oligonucleotide
cucuggacgcacacugucc

SEQ ID NO: 621976 - RNA, 19 nt, Artificial Sequence
  Description of Artificial Sequence: Synthetic oligonucleotide
ccaccgauaacuguaauug

SEQ ID NO: 621977 - RNA, 19 nt, Artificial Sequence
  Description of Artificial Sequence: Synthetic oligonucleotide
gacguuccauagcacaauc

SEQ ID NO: 621978 - RNA, 19 nt, Artificial Sequence
  Description of Artificial Sequence: Synthetic oligonucleotide
acaccggaacauuuuggca

SEQ ID NO: 621979 - RNA, 19 nt, Artificial Sequence
  Description of Artificial Sequence: Synthetic oligonucleotide
uggaaaagugcguguguau

SEQ ID NO: 621980 - RNA, 19 nt, Artificial Sequence
  Description of Artificial Sequence: Synthetic oligonucleotide
uuagaacgugcuuguaguu

SEQ ID NO: 621981 - RNA, 19 nt, Artificial Sequence
  Description of Artificial Sequence: Synthetic oligonucleotide
augccaguacggcuuagca

SEQ ID NO: 621982 - RNA, 19 nt, Artificial Sequence
  Description of Artificial Sequence: Synthetic oligonucleotide
gaacauuuuggcaaccgcu

SEQ ID NO: 621983 - RNA, 19 nt, Artificial Sequence
  Description of Artificial Sequence: Synthetic oligonucleotide
guaauugacuugacuuccc

SEQ ID NO: 621984 - RNA, 19 nt, Artificial Sequence
  Description of Artificial Sequence: Synthetic oligonucleotide
gcugagguauucaggaagg

SEQ ID NO: 621985 - RNA, 19 nt, Artificial Sequence
  Description of Artificial Sequence: Synthetic oligonucleotide
caccggaacauuuuggcaa

SEQ ID NO: 621986 - RNA, 19 nt, Artificial Sequence
  Description of Artificial Sequence: Synthetic oligonucleotide
caaaucacuccagaacauc

SEQ ID NO: 621987 - RNA, 19 nt, Artificial Sequence
  Description of Artificial Sequence: Synthetic oligonucleotide
ucgguuaaagacguuccau

SEQ ID NO: 621988 - RNA, 19 nt, Artificial Sequence
  Description of Artificial Sequence: Synthetic oligonucleotide
ggguacaaacaccacgggc

SEQ ID NO: 621989 - RNA, 19 nt, Artificial Sequence
  Description of Artificial Sequence: Synthetic oligonucleotide
cacaauugcauugggcauc

SEQ ID NO: 621990 - RNA, 19 nt, Artificial Sequence
  Description of Artificial Sequence: Synthetic oligonucleotide
cuugacuucccgugagauc

SEQ ID NO: 621991 - RNA, 19 nt, Artificial Sequence
  Description of Artificial Sequence: Synthetic oligonucleotide
acccaacuuuauaucauag

SEQ ID NO: 621992 - RNA, 19 nt, Artificial Sequence
  Description of Artificial Sequence: Synthetic oligonucleotide
ucacacccgguagaauggg

SEQ ID NO: 621993 - RNA, 19 nt, Artificial Sequence
  Description of Artificial Sequence: Synthetic oligonucleotide
uugugauuucagaggcuuc

SEQ ID NO: 621994 - RNA, 19 nt, Artificial Sequence
  Description of Artificial Sequence: Synthetic oligonucleotide
aggucgcauguauggcagc

SEQ ID NO: 621995 - RNA, 19 nt, Artificial Sequence
  Description of Artificial Sequence: Synthetic oligonucleotide
ggauaccggucccugauug

SEQ ID NO: 621996 - RNA, 19 nt, Artificial Sequence
  Description of Artificial Sequence: Synthetic oligonucleotide
aacccgucaaggauggaaa

SEQ ID NO: 621997 - RNA, 19 nt, Artificial Sequence
  Description of Artificial Sequence: Synthetic oligonucleotide
uggagugccuccuguugca

SEQ ID NO: 621998 - RNA, 19 nt, Artificial Sequence
  Description of Artificial Sequence: Synthetic oligonucleotide
acaauugcauugggcauca

SEQ ID NO: 621999 - RNA, 19 nt, Artificial Sequence
  Description of Artificial Sequence: Synthetic oligonucleotide
gaggaacacgccaucgcug

SEQ ID NO: 622000 - RNA, 19 nt, Artificial Sequence
  Description of Artificial Sequence: Synthetic oligonucleotide
acgacuacuuugucccuga

SEQ ID NO: 622001 - RNA, 19 nt, Artificial Sequence
  Description of Artificial Sequence: Synthetic oligonucleotide
accaacugugggcaaacua

SEQ ID NO: 622002 - RNA, 19 nt, Artificial Sequence
  Description of Artificial Sequence: Synthetic oligonucleotide
gagucuauuuccaguccac

SEQ ID NO: 622003 - RNA, 19 nt, Artificial Sequence
  Description of Artificial Sequence: Synthetic oligonucleotide
ugucucgcucuccgagcgg

SEQ ID NO: 622004 - RNA, 19 nt, Artificial Sequence
  Description of Artificial Sequence: Synthetic oligonucleotide
gugcguguguauuccauga

SEQ ID NO: 622005 - RNA, 19 nt, Artificial Sequence
  Description of Artificial Sequence: Synthetic oligonucleotide
ccguccuuaaugaucuucc

SEQ ID NO: 622006 - RNA, 19 nt, Artificial Sequence
  Description of Artificial Sequence: Synthetic oligonucleotide
aaucuucgugaauguugaa

SEQ ID NO: 622007 - RNA, 19 nt, Artificial Sequence
  Description of Artificial Sequence: Synthetic oligonucleotide
cacccgguagaauggguac

SEQ ID NO: 622008 - RNA, 19 nt, Artificial Sequence
  Description of Artificial Sequence: Synthetic oligonucleotide
gaacaucgacugaugccag

SEQ ID NO: 622009 - RNA, 19 nt, Artificial Sequence
  Description of Artificial Sequence: Synthetic oligonucleotide
gacccaacuuuauaucaua

SEQ ID NO: 622010 - RNA, 19 nt, Artificial Sequence
  Description of Artificial Sequence: Synthetic oligonucleotide
gaucgggcugcagcaaaag

SEQ ID NO: 622011 - RNA, 19 nt, Artificial Sequence
  Description of Artificial Sequence: Synthetic oligonucleotide
gcauguauggcagcucagg

SEQ ID NO: 622012 - RNA, 19 nt, Artificial Sequence
  Description of Artificial Sequence: Synthetic oligonucleotide
cccacaauaaggacuaaca

SEQ ID NO: 622013 - RNA, 19 nt, Artificial Sequence
  Description of Artificial Sequence: Synthetic oligonucleotide
ccaccauucucaauaugag

SEQ ID NO: 622014 - RNA, 19 nt, Artificial Sequence
  Description of Artificial Sequence: Synthetic oligonucleotide
uccccauauuuccuuucuc

SEQ ID NO: 622015 - RNA, 19 nt, Artificial Sequence
  Description of Artificial Sequence: Synthetic oligonucleotide
ugcguguguauuccaugau

SEQ ID NO: 622016 - RNA, 19 nt, Artificial Sequence
  Description of Artificial Sequence: Synthetic oligonucleotide
acccugauauccuuucauu

SEQ ID NO: 622017 - RNA, 19 nt, Artificial Sequence
  Description of Artificial Sequence: Synthetic oligonucleotide
acuugacuucccgugagau

SEQ ID NO: 622018 - RNA, 19 nt, Artificial Sequence
  Description of Artificial Sequence: Synthetic oligonucleotide
uggacgcacacuguccgca

SEQ ID NO: 622019 - RNA, 19 nt, Artificial Sequence
  Description of Artificial Sequence: Synthetic oligonucleotide
auaccggucccugauugcu

SEQ ID NO: 622020 - RNA, 19 nt, Artificial Sequence
  Description of Artificial Sequence: Synthetic oligonucleotide
gcucuacucgccuucgacc

SEQ ID NO: 622021 - RNA, 19 nt, Artificial Sequence
  Description of Artificial Sequence: Synthetic oligonucleotide
cuugcgauuggcauucggu

SEQ ID NO: 622022 - RNA, 19 nt, Artificial Sequence
  Description of Artificial Sequence: Synthetic oligonucleotide
uaccuuccguccaucuuuc

SEQ ID NO: 622023 - RNA, 19 nt, Artificial Sequence
  Description of Artificial Sequence: Synthetic oligonucleotide
ggauggaaaagugcgugug

SEQ ID NO: 622024 - RNA, 19 nt, Artificial Sequence
  Description of Artificial Sequence: Synthetic oligonucleotide
caccaagggcaccaguuuc

SEQ ID NO: 622025 - RNA, 19 nt, Artificial Sequence
  Description of Artificial Sequence: Synthetic oligonucleotide
caucgacugaugccaguac

SEQ ID NO: 622026 - RNA, 19 nt, Artificial Sequence
  Description of Artificial Sequence: Synthetic oligonucleotide
cuucgacccaacuuuauau

SEQ ID NO: 622027 - RNA, 19 nt, Artificial Sequence
  Description of Artificial Sequence: Synthetic oligonucleotide
cucuccgagcggauaccgg

SEQ ID NO: 622028 - RNA, 19 nt, Artificial Sequence
  Description of Artificial Sequence: Synthetic oligonucleotide
gacuguagggguacuggga

SEQ ID NO: 622029 - RNA, 19 nt, Artificial Sequence
  Description of Artificial Sequence: Synthetic oligonucleotide
ugucacuauguggucaguu

SEQ ID NO: 622030 - RNA, 19 nt, Artificial Sequence
  Description of Artificial Sequence: Synthetic oligonucleotide
ccaugauggggcaucaauc

SEQ ID NO: 622031 - RNA, 19 nt, Artificial Sequence
  Description of Artificial Sequence: Synthetic oligonucleotide
gaauggguacaaacaccac

SEQ ID NO: 622032 - RNA, 19 nt, Artificial Sequence
  Description of Artificial Sequence: Synthetic oligonucleotide
cuccuguugcaaucaagca

SEQ ID NO: 622033 - RNA, 19 nt, Artificial Sequence
  Description of Artificial Sequence: Synthetic oligonucleotide
ugggguugucuugugcugu

SEQ ID NO: 622034 - RNA, 19 nt, Artificial Sequence
  Description of Artificial Sequence: Synthetic oligonucleotide
ucuucuggugucagcccua

SEQ ID NO: 622035 - RNA, 19 nt, Artificial Sequence
  Description of Artificial Sequence: Synthetic oligonucleotide
acaugacuugguauucuga

SEQ ID NO: 622036 - RNA, 19 nt, Artificial Sequence
  Description of Artificial Sequence: Synthetic oligonucleotide
auccccacgacuacuuugu

SEQ ID NO: 622037 - RNA, 19 nt, Artificial Sequence
  Description of Artificial Sequence: Synthetic oligonucleotide
cucuuacauccaacuguac

SEQ ID NO: 622038 - RNA, 19 nt, Artificial Sequence
  Description of Artificial Sequence: Synthetic oligonucleotide
acgcacacuguccgcacca

SEQ ID NO: 622039 - RNA, 19 nt, Artificial Sequence
  Description of Artificial Sequence: Synthetic oligonucleotide
auagucuuguaggcauaug

SEQ ID NO: 622040 - RNA, 19 nt, Artificial Sequence
  Description of Artificial Sequence: Synthetic oligonucleotide
ggaggucgcauguauggca

SEQ ID NO: 622041 - RNA, 19 nt, Artificial Sequence
  Description of Artificial Sequence: Synthetic oligonucleotide
ugauugcucuguggcagac

SEQ ID NO: 622042 - RNA, 19 nt, Artificial Sequence
  Description of Artificial Sequence: Synthetic oligonucleotide
gacugaugccaguacggcu

SEQ ID NO: 622043 - RNA, 19 nt, Artificial Sequence
  Description of Artificial Sequence: Synthetic oligonucleotide
ggccaacucaacauugggc

SEQ ID NO: 622044 - RNA, 19 nt, Artificial Sequence
  Description of Artificial Sequence: Synthetic oligonucleotide
caccgauaacuguaauuga

SEQ ID NO: 622045 - RNA, 19 nt, Artificial Sequence
  Description of Artificial Sequence: Synthetic oligonucleotide
acaucgacugaugccagua

SEQ ID NO: 622046 - RNA, 19 nt, Artificial Sequence
  Description of Artificial Sequence: Synthetic oligonucleotide
auugacccggaagccacca

SEQ ID NO: 622047 - RNA, 19 nt, Artificial Sequence
  Description of Artificial Sequence: Synthetic oligonucleotide
uguuccauucuugcuccua

SEQ ID NO: 622048 - RNA, 19 nt, Artificial Sequence
  Description of Artificial Sequence: Synthetic oligonucleotide
cccuaucaauggcagacag

SEQ ID NO: 622049 - RNA, 19 nt, Artificial Sequence
  Description of Artificial Sequence: Synthetic oligonucleotide
cgaugaaccagagcuagcc

SEQ ID NO: 622050 - RNA, 19 nt, Artificial Sequence
  Description of Artificial Sequence: Synthetic oligonucleotide
cacgacuacuuugucccug

SEQ ID NO: 622051 - RNA, 19 nt, Artificial Sequence
  Description of Artificial Sequence: Synthetic oligonucleotide
cuggacgcacacuguccgc

SEQ ID NO: 622052 - RNA, 19 nt, Artificial Sequence
  Description of Artificial Sequence: Synthetic oligonucleotide
ccggaagccaccaaaaucu

SEQ ID NO: 622053 - RNA, 19 nt, Artificial Sequence
  Description of Artificial Sequence: Synthetic oligonucleotide
caaugccugaggcuugaga

SEQ ID NO: 622054 - RNA, 19 nt, Artificial Sequence
  Description of Artificial Sequence: Synthetic oligonucleotide
aucaaucuucgugaauguu

SEQ ID NO: 622055 - RNA, 19 nt, Artificial Sequence
  Description of Artificial Sequence: Synthetic oligonucleotide
cgguagaauggguacaaac

SEQ ID NO: 622056 - RNA, 19 nt, Artificial Sequence
  Description of Artificial Sequence: Synthetic oligonucleotide
cccaacccgucaaggaugg

SEQ ID NO: 622057 - RNA, 19 nt, Artificial Sequence
  Description of Artificial Sequence: Synthetic oligonucleotide
agacguuccauagcacaau

SEQ ID NO: 622058 - RNA, 19 nt, Artificial Sequence
  Description of Artificial Sequence: Synthetic oligonucleotide
acccgucaaggauggaaaa

SEQ ID NO: 622059 - RNA, 19 nt, Artificial Sequence
  Description of Artificial Sequence: Synthetic oligonucleotide
caguaccgccaccaaucag

SEQ ID NO: 622060 - RNA, 19 nt, Artificial Sequence
  Description of Artificial Sequence: Synthetic oligonucleotide
ccaucgcuggaacaaguug

SEQ ID NO: 622061 - RNA, 19 nt, Artificial Sequence
  Description of Artificial Sequence: Synthetic oligonucleotide
agcccggauggaucgggcu

SEQ ID NO: 622062 - RNA, 19 nt, Artificial Sequence
  Description of Artificial Sequence: Synthetic oligonucleotide
gaaccgcuccuuccuuuuc

SEQ ID NO: 622063 - RNA, 19 nt, Artificial Sequence
  Description of Artificial Sequence: Synthetic oligonucleotide
ugggaggaauugugauuuc

SEQ ID NO: 622064 - RNA, 19 nt, Artificial Sequence
  Description of Artificial Sequence: Synthetic oligonucleotide
aggccuccacaccggaaca

SEQ ID NO: 622065 - RNA, 19 nt, Artificial Sequence
  Description of Artificial Sequence: Synthetic oligonucleotide
uggcaaccgcuacucggaa

SEQ ID NO: 622066 - RNA, 19 nt, Artificial Sequence
  Description of Artificial Sequence: Synthetic oligonucleotide
uguugcaaucaagcauuuu

SEQ ID NO: 622067 - RNA, 19 nt, Artificial Sequence
  Description of Artificial Sequence: Synthetic oligonucleotide
caugaugcucuacucgccu

SEQ ID NO: 622068 - RNA, 19 nt, Artificial Sequence
  Description of Artificial Sequence: Synthetic oligonucleotide
cugauugcacaauugcauu

SEQ ID NO: 622069 - RNA, 19 nt, Artificial Sequence
  Description of Artificial Sequence: Synthetic oligonucleotide
caaccgcuacucggaaccg

SEQ ID NO: 622070 - RNA, 19 nt, Artificial Sequence
  Description of Artificial Sequence: Synthetic oligonucleotide
cuccgagcggauaccgguc

SEQ ID NO: 622071 - RNA, 19 nt, Artificial Sequence
  Description of Artificial Sequence: Synthetic oligonucleotide
ggacccaaaucacuccaga

SEQ ID NO: 622072 - RNA, 19 nt, Artificial Sequence
  Description of Artificial Sequence: Synthetic oligonucleotide
ccccacgacuacuuugucc

SEQ ID NO: 622073 - RNA, 19 nt, Artificial Sequence
  Description of Artificial Sequence: Synthetic oligonucleotide
gucacuauguggucaguuu

SEQ ID NO: 622074 - RNA, 19 nt, Artificial Sequence
  Description of Artificial Sequence: Synthetic oligonucleotide
caacccgucaaggauggaa

SEQ ID NO: 622075 - RNA, 19 nt, Artificial Sequence
  Description of Artificial Sequence: Synthetic oligonucleotide
acacgccaucgcuggaaca

SEQ ID NO: 622076 - RNA, 19 nt, Artificial Sequence
  Description of Artificial Sequence: Synthetic oligonucleotide
uugacccggaagccaccaa

SEQ ID NO: 622077 - RNA, 19 nt, Artificial Sequence
  Description of Artificial Sequence: Synthetic oligonucleotide
acaauccccacgacuacuu

SEQ ID NO: 622078 - RNA, 19 nt, Artificial Sequence
  Description of Artificial Sequence: Synthetic oligonucleotide
uaccgccaccaaucagcag

SEQ ID NO: 622079 - RNA, 19 nt, Artificial Sequence
  Description of Artificial Sequence: Synthetic oligonucleotide
accgcuacucggaaccgcu

SEQ ID NO: 622080 - RNA, 19 nt, Artificial Sequence
  Description of Artificial Sequence: Synthetic oligonucleotide
cgucaaggauggaaaagug

SEQ ID NO: 622081 - RNA, 19 nt, Artificial Sequence
  Description of Artificial Sequence: Synthetic oligonucleotide
gcgauuggcauucgguuaa

SEQ ID NO: 622082 - RNA, 19 nt, Artificial Sequence
  Description of Artificial Sequence: Synthetic oligonucleotide
ugaugccaguacggcuuag

SEQ ID NO: 622083 - RNA, 19 nt, Artificial Sequence
  Description of Artificial Sequence: Synthetic oligonucleotide
cugggaggaauugugauuu

SEQ ID NO: 622084 - RNA, 19 nt, Artificial Sequence
  Description of Artificial Sequence: Synthetic oligonucleotide
guaccgccaccaaucagca

SEQ ID NO: 622085 - RNA, 19 nt, Artificial Sequence
  Description of Artificial Sequence: Synthetic oligonucleotide
acucgccuucgacccaacu

SEQ ID NO: 622086 - RNA, 19 nt, Artificial Sequence
  Description of Artificial Sequence: Synthetic oligonucleotide
ucgcuggaacaaguugccu

SEQ ID NO: 622087 - RNA, 19 nt, Artificial Sequence
  Description of Artificial Sequence: Synthetic oligonucleotide
cacgccaucgcuggaacaa

SEQ ID NO: 622088 - RNA, 19 nt, Artificial Sequence
  Description of Artificial Sequence: Synthetic oligonucleotide
gacccggaagccaccaaaa

SEQ ID NO: 622089 - RNA, 19 nt, Artificial Sequence
  Description of Artificial Sequence: Synthetic oligonucleotide
ccaacucaacauugggcuc

SEQ ID NO: 622090 - RNA, 19 nt, Artificial Sequence
  Description of Artificial Sequence: Synthetic oligonucleotide
acgccaucgcuggaacaag

SEQ ID NO: 622091 - RNA, 19 nt, Artificial Sequence
  Description of Artificial Sequence: Synthetic oligonucleotide
acacccgguagaaugggua

SEQ ID NO: 622092 - RNA, 19 nt, Artificial Sequence
  Description of Artificial Sequence: Synthetic oligonucleotide
acccgguagaauggguaca

SEQ ID NO: 622093 - RNA, 19 nt, Artificial Sequence
  Description of Artificial Sequence: Synthetic oligonucleotide
ucgagcccggauggaucgg

SEQ ID NO: 622094 - RNA, 19 nt, Artificial Sequence
  Description of Artificial Sequence: Synthetic oligonucleotide
uggcuacuucauugagauc

SEQ ID NO: 622095 - RNA, 19 nt, Artificial Sequence
  Description of Artificial Sequence: Synthetic oligonucleotide
augcucuacucgccuucga

SEQ ID NO: 622096 - RNA, 19 nt, Artificial Sequence
  Description of Artificial Sequence: Synthetic oligonucleotide
uccccacgacuacuuuguc

SEQ ID NO: 622097 - RNA, 19 nt, Artificial Sequence
  Description of Artificial Sequence: Synthetic oligonucleotide
aggaaggaucuuccccaua

SEQ ID NO: 622098 - RNA, 19 nt, Artificial Sequence
  Description of Artificial Sequence: Synthetic oligonucleotide
ccuugcgauuggcauucgg

SEQ ID NO: 622099 - RNA, 19 nt, Artificial Sequence
  Description of Artificial Sequence: Synthetic oligonucleotide
agcagaugcaauggcccuu

SEQ ID NO: 622100 - RNA, 19 nt, Artificial Sequence
  Description of Artificial Sequence: Synthetic oligonucleotide
uccuugcgauuggcauucg

SEQ ID NO: 622101 - RNA, 19 nt, Artificial Sequence
  Description of Artificial Sequence: Synthetic oligonucleotide
cccgucaaggauggaaaag

SEQ ID NO: 622102 - RNA, 19 nt, Artificial Sequence
  Description of Artificial Sequence: Synthetic oligonucleotide
cagcccuaacccugauauc

SEQ ID NO: 622103 - RNA, 19 nt, Artificial Sequence
  Description of Artificial Sequence: Synthetic oligonucleotide
cugagguauucaggaagga

SEQ ID NO: 622104 - RNA, 19 nt, Artificial Sequence
  Description of Artificial Sequence: Synthetic oligonucleotide
caggccaguucacugccaa

SEQ ID NO: 622105 - RNA, 19 nt, Artificial Sequence
  Description of Artificial Sequence: Synthetic oligonucleotide
gguccaguugcugagguau

SEQ ID NO: 622106 - RNA, 19 nt, Artificial Sequence
  Description of Artificial Sequence: Synthetic oligonucleotide
ggcauucgguuaaagacgu

SEQ ID NO: 622107 - RNA, 19 nt, Artificial Sequence
  Description of Artificial Sequence: Synthetic oligonucleotide
ccgauaacuguaauugacu

SEQ ID NO: 622108 - RNA, 19 nt, Artificial Sequence
  Description of Artificial Sequence: Synthetic oligonucleotide
gcaguaccgccaccaauca

SEQ ID NO: 622109 - RNA, 19 nt, Artificial Sequence
  Description of Artificial Sequence: Synthetic oligonucleotide
cuccagaacaucgacugau

SEQ ID NO: 622110 - RNA, 19 nt, Artificial Sequence
  Description of Artificial Sequence: Synthetic oligonucleotide
cccugauauccuuucauua

SEQ ID NO: 622111 - RNA, 19 nt, Artificial Sequence
  Description of Artificial Sequence: Synthetic oligonucleotide
acuucccgugagaucuucu

SEQ ID NO: 622112 - RNA, 19 nt, Artificial Sequence
  Description of Artificial Sequence: Synthetic oligonucleotide
ucucgcucuccgagcggau

SEQ ID NO: 622113 - RNA, 19 nt, Artificial Sequence
  Description of Artificial Sequence: Synthetic oligonucleotide
ccucuggacgcacacuguc

SEQ ID NO: 622114 - RNA, 19 nt, Artificial Sequence
  Description of Artificial Sequence: Synthetic oligonucleotide
gcccggauggaucgggcug

SEQ ID NO: 622115 - RNA, 19 nt, Artificial Sequence
  Description of Artificial Sequence: Synthetic oligonucleotide
ggcaaccgcuacucggaac

SEQ ID NO: 622116 - RNA, 19 nt, Artificial Sequence
  Description of Artificial Sequence: Synthetic oligonucleotide
cuuccuugcgauuggcauu

SEQ ID NO: 622117 - RNA, 19 nt, Artificial Sequence
  Description of Artificial Sequence: Synthetic oligonucleotide
gcccacaauaaggacuaac

SEQ ID NO: 622118 - RNA, 19 nt, Artificial Sequence
  Description of Artificial Sequence: Synthetic oligonucleotide
ucucgaccucuggacgcac

SEQ ID NO: 622119 - RNA, 19 nt, Artificial Sequence
  Description of Artificial Sequence: Synthetic oligonucleotide
ccgaugaaccagagcuagc

SEQ ID NO: 622120 - RNA, 19 nt, Artificial Sequence
  Description of Artificial Sequence: Synthetic oligonucleotide
uacucgccuucgacccaac

SEQ ID NO: 622121 - RNA, 19 nt, Artificial Sequence
  Description of Artificial Sequence: Synthetic oligonucleotide
gggguacugggaggaauug

SEQ ID NO: 622122 - RNA, 19 nt, Artificial Sequence
  Description of Artificial Sequence: Synthetic oligonucleotide
cauuaaguuucaccauguu

SEQ ID NO: 622123 - RNA, 19 nt, Artificial Sequence
  Description of Artificial Sequence: Synthetic oligonucleotide
cccacccaacccgucaagg

SEQ ID NO: 622124 - RNA, 19 nt, Artificial Sequence
  Description of Artificial Sequence: Synthetic oligonucleotide
gucucgaccucuggacgca

SEQ ID NO: 622125 - RNA, 19 nt, Artificial Sequence
  Description of Artificial Sequence: Synthetic oligonucleotide
cucgccuucgacccaacuu

SEQ ID NO: 622126 - RNA, 19 nt, Artificial Sequence
  Description of Artificial Sequence: Synthetic oligonucleotide
ggacgcacacuguccgcac

SEQ ID NO: 622127 - RNA, 19 nt, Artificial Sequence
  Description of Artificial Sequence: Synthetic oligonucleotide
gcuagccauuugucuugcc

SEQ ID NO: 622128 - RNA, 19 nt, Artificial Sequence
  Description of Artificial Sequence: Synthetic oligonucleotide
gucagcccuaacccugaua

SEQ ID NO: 622129 - RNA, 19 nt, Artificial Sequence
  Description of Artificial Sequence: Synthetic oligonucleotide
gaaccagagcuagccauuu

SEQ ID NO: 622130 - RNA, 19 nt, Artificial Sequence
  Description of Artificial Sequence: Synthetic oligonucleotide
gcacaauugcauugggcau

SEQ ID NO: 622131 - RNA, 19 nt, Artificial Sequence
  Description of Artificial Sequence: Synthetic oligonucleotide
cgacugaugccaguacggc

SEQ ID NO: 622132 - RNA, 19 nt, Artificial Sequence
  Description of Artificial Sequence: Synthetic oligonucleotide
cccggauggaucgggcugc

SEQ ID NO: 622133 - RNA, 19 nt, Artificial Sequence
  Description of Artificial Sequence: Synthetic oligonucleotide
cuggaacaaguugccugga

SEQ ID NO: 622134 - RNA, 19 nt, Artificial Sequence
  Description of Artificial Sequence: Synthetic oligonucleotide
cgguuaaagacguuccaua

SEQ ID NO: 622135 - RNA, 19 nt, Artificial Sequence
  Description of Artificial Sequence: Synthetic oligonucleotide
cacaauccccacgacuacu

SEQ ID NO: 622136 - RNA, 19 nt, Artificial Sequence
  Description of Artificial Sequence: Synthetic oligonucleotide
cugaugccaguacggcuua

SEQ ID NO: 622137 - RNA, 19 nt, Artificial Sequence
  Description of Artificial Sequence: Synthetic oligonucleotide
guacggcuuagcagcucca

SEQ ID NO: 622138 - RNA, 19 nt, Artificial Sequence
  Description of Artificial Sequence: Synthetic oligonucleotide
caguacggcuuagcagcuc

SEQ ID NO: 622139 - RNA, 19 nt, Artificial Sequence
  Description of Artificial Sequence: Synthetic oligonucleotide
guacuaccuucuucccagu

SEQ ID NO: 622140 - RNA, 19 nt, Artificial Sequence
  Description of Artificial Sequence: Synthetic oligonucleotide
ggaacacgccaucgcugga

SEQ ID NO: 622141 - RNA, 19 nt, Artificial Sequence
  Description of Artificial Sequence: Synthetic oligonucleotide
cgcauguauggcagcucag

SEQ ID NO: 622142 - RNA, 19 nt, Artificial Sequence
  Description of Artificial Sequence: Synthetic oligonucleotide
ccauucuugcuccuacaua

SEQ ID NO: 622143 - RNA, 19 nt, Artificial Sequence
  Description of Artificial Sequence: Synthetic oligonucleotide
ccuucgacccaacuuuaua

SEQ ID NO: 622144 - RNA, 19 nt, Artificial Sequence
  Description of Artificial Sequence: Synthetic oligonucleotide
ggucgcauguauggcagcu

SEQ ID NO: 622145 - RNA, 19 nt, Artificial Sequence
  Description of Artificial Sequence: Synthetic oligonucleotide
cacacccgguagaaugggu

SEQ ID NO: 622146 - RNA, 19 nt, Artificial Sequence
  Description of Artificial Sequence: Synthetic oligonucleotide
guauggcagcucagggucu

SEQ ID NO: 622147 - RNA, 19 nt, Artificial Sequence
  Description of Artificial Sequence: Synthetic oligonucleotide
caauugcauugggcaucac

SEQ ID NO: 622148 - RNA, 19 nt, Artificial Sequence
  Description of Artificial Sequence: Synthetic oligonucleotide
cagaggcuuguuccauucu

SEQ ID NO: 622149 - RNA, 19 nt, Artificial Sequence
  Description of Artificial Sequence: Synthetic oligonucleotide
ccgagcggauaccgguccc

SEQ ID NO: 622150 - RNA, 19 nt, Artificial Sequence
  Description of Artificial Sequence: Synthetic oligonucleotide
guagggguacugggaggaa

SEQ ID NO: 622151 - RNA, 19 nt, Artificial Sequence
  Description of Artificial Sequence: Synthetic oligonucleotide
cuguugcaaucaagcauuu

SEQ ID NO: 622152 - RNA, 19 nt, Artificial Sequence
  Description of Artificial Sequence: Synthetic oligonucleotide
cacucccucuugcuugacu

SEQ ID NO: 622153 - RNA, 19 nt, Artificial Sequence
  Description of Artificial Sequence: Synthetic oligonucleotide
gcccuaucaauggcagaca

SEQ ID NO: 622154 - RNA, 19 nt, Artificial Sequence
  Description of Artificial Sequence: Synthetic oligonucleotide
agccaacaucaggacccaa

SEQ ID NO: 622155 - RNA, 19 nt, Artificial Sequence
  Description of Artificial Sequence: Synthetic oligonucleotide
gcggauaccggucccugau

SEQ ID NO: 622156 - RNA, 19 nt, Artificial Sequence
  Description of Artificial Sequence: Synthetic oligonucleotide
ggaaccgcuccuuccuuuu

SEQ ID NO: 622157 - RNA, 19 nt, Artificial Sequence
  Description of Artificial Sequence: Synthetic oligonucleotide
ccgccaccaaucagcagga

SEQ ID NO: 622158 - RNA, 19 nt, Artificial Sequence
  Description of Artificial Sequence: Synthetic oligonucleotide
cgagcccggauggaucggg

SEQ ID NO: 622159 - RNA, 19 nt, Artificial Sequence
  Description of Artificial Sequence: Synthetic oligonucleotide
agcccacaauaaggacuaa

SEQ ID NO: 622160 - RNA, 19 nt, Artificial Sequence
  Description of Artificial Sequence: Synthetic oligonucleotide
cccaccgauaacuguaauu

SEQ ID NO: 622161 - RNA, 19 nt, Artificial Sequence
  Description of Artificial Sequence: Synthetic oligonucleotide
caauccccacgacuacuuu

SEQ ID NO: 622162 - RNA, 19 nt, Artificial Sequence
  Description of Artificial Sequence: Synthetic oligonucleotide
cgacuacuuugucccugag

SEQ ID NO: 622163 - RNA, 19 nt, Artificial Sequence
  Description of Artificial Sequence: Synthetic oligonucleotide
cccgugagaucuucuccaa

SEQ ID NO: 622164 - RNA, 19 nt, Artificial Sequence
  Description of Artificial Sequence: Synthetic oligonucleotide
ccuaacccugauauccuuu

SEQ ID NO: 622165 - RNA, 19 nt, Artificial Sequence
  Description of Artificial Sequence: Synthetic oligonucleotide
ccaacuguacuaccuucuu

SEQ ID NO: 622166 - RNA, 19 nt, Artificial Sequence
  Description of Artificial Sequence: Synthetic oligonucleotide
cagauacaaucaggacccu

SEQ ID NO: 622167 - RNA, 19 nt, Artificial Sequence
  Description of Artificial Sequence: Synthetic oligonucleotide
gcucaccguccuuaaugau

SEQ ID NO: 622168 - RNA, 19 nt, Artificial Sequence
  Description of Artificial Sequence: Synthetic oligonucleotide
ccggucccugauugcucug

SEQ ID NO: 622169 - RNA, 19 nt, Artificial Sequence
  Description of Artificial Sequence: Synthetic oligonucleotide
ccaguacggcuuagcagcu

SEQ ID NO: 622170 - RNA, 19 nt, Artificial Sequence
  Description of Artificial Sequence: Synthetic oligonucleotide
gggguugucuugugcuguu

SEQ ID NO: 622171 - RNA, 19 nt, Artificial Sequence
  Description of Artificial Sequence: Synthetic oligonucleotide
gguauucaggaaggaucuu

SEQ ID NO: 622172 - RNA, 19 nt, Artificial Sequence
  Description of Artificial Sequence: Synthetic oligonucleotide
caccaacugugggcaaacu

SEQ ID NO: 622173 - RNA, 19 nt, Artificial Sequence
  Description of Artificial Sequence: Synthetic oligonucleotide
cugucacuauguggucagu

SEQ ID NO: 622174 - RNA, 19 nt, Artificial Sequence
  Description of Artificial Sequence: Synthetic oligonucleotide
cccuaacccugauauccuu

SEQ ID NO: 622175 - RNA, 19 nt, Artificial Sequence
  Description of Artificial Sequence: Synthetic oligonucleotide
ccgguagaauggguacaaa

SEQ ID NO: 622176 - RNA, 19 nt, Artificial Sequence
  Description of Artificial Sequence: Synthetic oligonucleotide
gccuucgacccaacuuuau

SEQ ID NO: 622177 - RNA, 19 nt, Artificial Sequence
  Description of Artificial Sequence: Synthetic oligonucleotide
cgugaauguugaagaguuu

SEQ ID NO: 622178 - RNA, 19 nt, Artificial Sequence
  Description of Artificial Sequence: Synthetic oligonucleotide
ccacgacuacuuugucccu

SEQ ID NO: 622179 - RNA, 19 nt, Artificial Sequence
  Description of Artificial Sequence: Synthetic oligonucleotide
cgccuucgacccaacuuua

SEQ ID NO: 622180 - RNA, 19 nt, Artificial Sequence
  Description of Artificial Sequence: Synthetic oligonucleotide
cgccaucgcuggaacaagu

SEQ ID NO: 622181 - RNA, 19 nt, Artificial Sequence
  Description of Artificial Sequence: Synthetic oligonucleotide
ccggauggaucgggcugca

SEQ ID NO: 622182 - RNA, 19 nt, Artificial Sequence
  Description of Artificial Sequence: Synthetic oligonucleotide
cgauuggcauucgguuaaa

SEQ ID NO: 622183 - RNA, 19 nt, Artificial Sequence
  Description of Artificial Sequence: Synthetic oligonucleotide
gcauucgguuaaagacguu

SEQ ID NO: 622184 - RNA, 19 nt, Artificial Sequence
  Description of Artificial Sequence: Synthetic oligonucleotide
ccaacccgucaaggaugga

SEQ ID NO: 622185 - RNA, 19 nt, Artificial Sequence
  Description of Artificial Sequence: Synthetic oligonucleotide
cgagcggauaccggucccu

SEQ ID NO: 622186 - RNA, 19 nt, Artificial Sequence
  Description of Artificial Sequence: Synthetic oligonucleotide
ccccaccgauaacuguaau

SEQ ID NO: 622187 - RNA, 19 nt, Artificial Sequence
  Description of Artificial Sequence: Synthetic oligonucleotide
ccgcaccaagggcaccagu

SEQ ID NO: 622188 - RNA, 19 nt, Artificial Sequence
  Description of Artificial Sequence: Synthetic oligonucleotide
cggauaccggucccugauu

SEQ ID NO: 622189 - RNA, 19 nt, Artificial Sequence
  Description of Artificial Sequence: Synthetic oligonucleotide
aauacagcgagguacauuc

SEQ ID NO: 622190 - RNA, 19 nt, Artificial Sequence
  Description of Artificial Sequence: Synthetic oligonucleotide
aacguuucagcauuuaacc

SEQ ID NO: 622191 - RNA, 19 nt, Artificial Sequence
  Description of Artificial Sequence: Synthetic oligonucleotide
aaaagacacacacacacac

SEQ ID NO: 622192 - RNA, 19 nt, Artificial Sequence
  Description of Artificial Sequence: Synthetic oligonucleotide
aaagcaaagggaaaggacc

SEQ ID NO: 622193 - RNA, 19 nt, Artificial Sequence
  Description of Artificial Sequence: Synthetic oligonucleotide
aguaucacggccuaucugc

SEQ ID NO: 622194 - RNA, 19 nt, Artificial Sequence
  Description of Artificial Sequence: Synthetic oligonucleotide
aagacacacacacacacac

SEQ ID NO: 622195 - RNA, 19 nt, Artificial Sequence
  Description of Artificial Sequence: Synthetic oligonucleotide
aacggcaccaaacugcugc

SEQ ID NO: 622196 - RNA, 19 nt, Artificial Sequence
  Description of Artificial Sequence: Synthetic oligonucleotide
aguaugaccaauccagacc

SEQ ID NO: 622197 - RNA, 19 nt, Artificial Sequence
  Description of Artificial Sequence: Synthetic oligonucleotide
cuaagaaacaguauuuacc

SEQ ID NO: 622198 - RNA, 19 nt, Artificial Sequence
  Description of Artificial Sequence: Synthetic oligonucleotide
uaagaaacaguauuuaccu

SEQ ID NO: 622199 - RNA, 19 nt, Artificial Sequence
  Description of Artificial Sequence: Synthetic oligonucleotide
uggcaauggaauauaaugg

SEQ ID NO: 622200 - RNA, 19 nt, Artificial Sequence
  Description of Artificial Sequence: Synthetic oligonucleotide
aaggguacuaacugagggc

SEQ ID NO: 622201 - RNA, 19 nt, Artificial Sequence
  Description of Artificial Sequence: Synthetic oligonucleotide
ucugcuacuccacauaacc

SEQ ID NO: 622202 - RNA, 19 nt, Artificial Sequence
  Description of Artificial Sequence: Synthetic oligonucleotide
uuuaccuguguguacauag

SEQ ID NO: 622203 - RNA, 19 nt, Artificial Sequence
  Description of Artificial Sequence: Synthetic oligonucleotide
acggauaccaaaucguccc

SEQ ID NO: 622204 - RNA, 19 nt, Artificial Sequence
  Description of Artificial Sequence: Synthetic oligonucleotide
ucucaaauuucauuggacc

SEQ ID NO: 622205 - RNA, 19 nt, Artificial Sequence
  Description of Artificial Sequence: Synthetic oligonucleotide
aaacguuucagcauuuaac

SEQ ID NO: 622206 - RNA, 19 nt, Artificial Sequence
  Description of Artificial Sequence: Synthetic oligonucleotide
cauuggaccaucucgacgg

SEQ ID NO: 622207 - RNA, 19 nt, Artificial Sequence
  Description of Artificial Sequence: Synthetic oligonucleotide
ucaaaggguacuaacugag

SEQ ID NO: 622208 - RNA, 19 nt, Artificial Sequence
  Description of Artificial Sequence: Synthetic oligonucleotide
gucaaaauaagcuaccuca

SEQ ID NO: 622209 - RNA, 19 nt, Artificial Sequence
  Description of Artificial Sequence: Synthetic oligonucleotide
auguuugcugacuuuaaac

SEQ ID NO: 622210 - RNA, 19 nt, Artificial Sequence
  Description of Artificial Sequence: Synthetic oligonucleotide
aauggaauauaauggaauu

SEQ ID NO: 622211 - RNA, 19 nt, Artificial Sequence
  Description of Artificial Sequence: Synthetic oligonucleotide
ugacuuuaaacguuuauuc

SEQ ID NO: 622212 - RNA, 19 nt, Artificial Sequence
  Description of Artificial Sequence: Synthetic oligonucleotide
aaggacuuaguuuugucgu

SEQ ID NO: 622213 - RNA, 19 nt, Artificial Sequence
  Description of Artificial Sequence: Synthetic oligonucleotide
gacuuuaugaacuucagcu

SEQ ID NO: 622214 - RNA, 19 nt, Artificial Sequence
  Description of Artificial Sequence: Synthetic oligonucleotide
cuuaguuuugucguaauag

SEQ ID NO: 622215 - RNA, 19 nt, Artificial Sequence
  Description of Artificial Sequence: Synthetic oligonucleotide
ucaacucuagcaaggauca

SEQ ID NO: 622216 - RNA, 19 nt, Artificial Sequence
  Description of Artificial Sequence: Synthetic oligonucleotide
aagguuacucaucugaaaa

SEQ ID NO: 622217 - RNA, 19 nt, Artificial Sequence
  Description of Artificial Sequence: Synthetic oligonucleotide
ucucaaaggguacuaacug

SEQ ID NO: 622218 - RNA, 19 nt, Artificial Sequence
  Description of Artificial Sequence: Synthetic oligonucleotide
ucugcuacaaaaugaaguc

SEQ ID NO: 622219 - RNA, 19 nt, Artificial Sequence
  Description of Artificial Sequence: Synthetic oligonucleotide
uucaacucuagcaaggauc

SEQ ID NO: 622220 - RNA, 19 nt, Artificial Sequence
  Description of Artificial Sequence: Synthetic oligonucleotide
uuuuaggguccaaaagccg

SEQ ID NO: 622221 - RNA, 19 nt, Artificial Sequence
  Description of Artificial Sequence: Synthetic oligonucleotide
accaugaagagcuaggagu

SEQ ID NO: 622222 - RNA, 19 nt, Artificial Sequence
  Description of Artificial Sequence: Synthetic oligonucleotide
agguacugcuauucgaugc

SEQ ID NO: 622223 - RNA, 19 nt, Artificial Sequence
  Description of Artificial Sequence: Synthetic oligonucleotide
auaucuguuauuuggacaa

SEQ ID NO: 622224 - RNA, 19 nt, Artificial Sequence
  Description of Artificial Sequence: Synthetic oligonucleotide
cuaggagucaccuauuuuc

SEQ ID NO: 622225 - RNA, 19 nt, Artificial Sequence
  Description of Artificial Sequence: Synthetic oligonucleotide
ucuauugcuuucuggcugg

SEQ ID NO: 622226 - RNA, 19 nt, Artificial Sequence
  Description of Artificial Sequence: Synthetic oligonucleotide
uuuaggguccaaaagccgu

SEQ ID NO: 622227 - RNA, 19 nt, Artificial Sequence
  Description of Artificial Sequence: Synthetic oligonucleotide
auccagaccuuuuaggguc

SEQ ID NO: 622228 - RNA, 19 nt, Artificial Sequence
  Description of Artificial Sequence: Synthetic oligonucleotide
agcaguaugaccaauccag

SEQ ID NO: 622229 - RNA, 19 nt, Artificial Sequence
  Description of Artificial Sequence: Synthetic oligonucleotide
uuuuacagaucuugugucc

SEQ ID NO: 622230 - RNA, 19 nt, Artificial Sequence
  Description of Artificial Sequence: Synthetic oligonucleotide
uuacucaucugaaaauaca

SEQ ID NO: 622231 - RNA, 19 nt, Artificial Sequence
  Description of Artificial Sequence: Synthetic oligonucleotide
aauguuucuuuggcaaugg

SEQ ID NO: 622232 - RNA, 19 nt, Artificial Sequence
  Description of Artificial Sequence: Synthetic oligonucleotide
ucauauuauaggcucucca

SEQ ID NO: 622233 - RNA, 19 nt, Artificial Sequence
  Description of Artificial Sequence: Synthetic oligonucleotide
gacacacacacacacacac

SEQ ID NO: 622234 - RNA, 19 nt, Artificial Sequence
  Description of Artificial Sequence: Synthetic oligonucleotide
aagacuuguuuguagacua

SEQ ID NO: 622235 - RNA, 19 nt, Artificial Sequence
  Description of Artificial Sequence: Synthetic oligonucleotide
uuguagacuaugcagcaac

SEQ ID NO: 622236 - RNA, 19 nt, Artificial Sequence
  Description of Artificial Sequence: Synthetic oligonucleotide
aaagccgugguuuuccuau

SEQ ID NO: 622237 - RNA, 19 nt, Artificial Sequence
  Description of Artificial Sequence: Synthetic oligonucleotide
auacacugaaaauaucugu

SEQ ID NO: 622238 - RNA, 19 nt, Artificial Sequence
  Description of Artificial Sequence: Synthetic oligonucleotide
aauccagaccuuuuagggu

SEQ ID NO: 622239 - RNA, 19 nt, Artificial Sequence
  Description of Artificial Sequence: Synthetic oligonucleotide
uauuauaggcucuccaaaa

SEQ ID NO: 622240 - RNA, 19 nt, Artificial Sequence
  Description of Artificial Sequence: Synthetic oligonucleotide
aaauccaccacgaaauccu

SEQ ID NO: 622241 - RNA, 19 nt, Artificial Sequence
  Description of Artificial Sequence: Synthetic oligonucleotide
uuuaugaacuucagcucgc

SEQ ID NO: 622242 - RNA, 19 nt, Artificial Sequence
  Description of Artificial Sequence: Synthetic oligonucleotide
uuaacccuggaaagcaaag

SEQ ID NO: 622243 - RNA, 19 nt, Artificial Sequence
  Description of Artificial Sequence: Synthetic oligonucleotide
ugcucuggggauaagguac

SEQ ID NO: 622244 - RNA, 19 nt, Artificial Sequence
  Description of Artificial Sequence: Synthetic oligonucleotide
acuuguuuguagacuaugc

SEQ ID NO: 622245 - RNA, 19 nt, Artificial Sequence
  Description of Artificial Sequence: Synthetic oligonucleotide
gacugaacugacuguaugc

SEQ ID NO: 622246 - RNA, 19 nt, Artificial Sequence
  Description of Artificial Sequence: Synthetic oligonucleotide
ggaacuauuugccucuugg

SEQ ID NO: 622247 - RNA, 19 nt, Artificial Sequence
  Description of Artificial Sequence: Synthetic oligonucleotide
cacacacacacacacacgc

SEQ ID NO: 622248 - RNA, 19 nt, Artificial Sequence
  Description of Artificial Sequence: Synthetic oligonucleotide
ggaaguaaucaccaaauac

SEQ ID NO: 622249 - RNA, 19 nt, Artificial Sequence
  Description of Artificial Sequence: Synthetic oligonucleotide
uugccuaagaaacaguauu

SEQ ID NO: 622250 - RNA, 19 nt, Artificial Sequence
  Description of Artificial Sequence: Synthetic oligonucleotide
uucucaaauuucauuggac

SEQ ID NO: 622251 - RNA, 19 nt, Artificial Sequence
  Description of Artificial Sequence: Synthetic oligonucleotide
acaguauuuaccugugugu

SEQ ID NO: 622252 - RNA, 19 nt, Artificial Sequence
  Description of Artificial Sequence: Synthetic oligonucleotide
acaaccaagugcuggugac

SEQ ID NO: 622253 - RNA, 19 nt, Artificial Sequence
  Description of Artificial Sequence: Synthetic oligonucleotide
agcuaccucauauuauagg

SEQ ID NO: 622254 - RNA, 19 nt, Artificial Sequence
  Description of Artificial Sequence: Synthetic oligonucleotide
ucgaccuugggcuagcugu

SEQ ID NO: 622255 - RNA, 19 nt, Artificial Sequence
  Description of Artificial Sequence: Synthetic oligonucleotide
accaacggcaccaaacugc

SEQ ID NO: 622256 - RNA, 19 nt, Artificial Sequence
  Description of Artificial Sequence: Synthetic oligonucleotide
aaaguuaccuuugccuaag

SEQ ID NO: 622257 - RNA, 19 nt, Artificial Sequence
  Description of Artificial Sequence: Synthetic oligonucleotide
aguuuugucguaauagcag

SEQ ID NO: 622258 - RNA, 19 nt, Artificial Sequence
  Description of Artificial Sequence: Synthetic oligonucleotide
cucgacggauaccaaaucg

SEQ ID NO: 622259 - RNA, 19 nt, Artificial Sequence
  Description of Artificial Sequence: Synthetic oligonucleotide
aaagguuacucaucugaaa

SEQ ID NO: 622260 - RNA, 19 nt, Artificial Sequence
  Description of Artificial Sequence: Synthetic oligonucleotide
gucguaauagcaguugggg

SEQ ID NO: 622261 - RNA, 19 nt, Artificial Sequence
  Description of Artificial Sequence: Synthetic oligonucleotide
acuaacugagggcuugauc

SEQ ID NO: 622262 - RNA, 19 nt, Artificial Sequence
  Description of Artificial Sequence: Synthetic oligonucleotide
gcuaccucauauuauaggc

SEQ ID NO: 622263 - RNA, 19 nt, Artificial Sequence
  Description of Artificial Sequence: Synthetic oligonucleotide
auaaccuaugcucauguuu

SEQ ID NO: 622264 - RNA, 19 nt, Artificial Sequence
  Description of Artificial Sequence: Synthetic oligonucleotide
auaccaaaucguccccugc

SEQ ID NO: 622265 - RNA, 19 nt, Artificial Sequence
  Description of Artificial Sequence: Synthetic oligonucleotide
ucgauuucuuccuuguuaa

SEQ ID NO: 622266 - RNA, 19 nt, Artificial Sequence
  Description of Artificial Sequence: Synthetic oligonucleotide
uccggaguccccuuuaucu

SEQ ID NO: 622267 - RNA, 19 nt, Artificial Sequence
  Description of Artificial Sequence: Synthetic oligonucleotide
cacacacacacacacacac

SEQ ID NO: 622268 - RNA, 19 nt, Artificial Sequence
  Description of Artificial Sequence: Synthetic oligonucleotide
aucacggccuaucugcagg

SEQ ID NO: 622269 - RNA, 19 nt, Artificial Sequence
  Description of Artificial Sequence: Synthetic oligonucleotide
uugucgaagaaggacuuag

SEQ ID NO: 622270 - RNA, 19 nt, Artificial Sequence
  Description of Artificial Sequence: Synthetic oligonucleotide
ucguaauagcaguuggggc

SEQ ID NO: 622271 - RNA, 19 nt, Artificial Sequence
  Description of Artificial Sequence: Synthetic oligonucleotide
guuaccuuugccuaagaaa

SEQ ID NO: 622272 - RNA, 19 nt, Artificial Sequence
  Description of Artificial Sequence: Synthetic oligonucleotide
auauugucgaagaaggacu

SEQ ID NO: 622273 - RNA, 19 nt, Artificial Sequence
  Description of Artificial Sequence: Synthetic oligonucleotide
uggccuugggacuuuauga

SEQ ID NO: 622274 - RNA, 19 nt, Artificial Sequence
  Description of Artificial Sequence: Synthetic oligonucleotide
gacaaauccugugaucugc

SEQ ID NO: 622275 - RNA, 19 nt, Artificial Sequence
  Description of Artificial Sequence: Synthetic oligonucleotide
guuccaaaggaugucaaug

SEQ ID NO: 622276 - RNA, 19 nt, Artificial Sequence
  Description of Artificial Sequence: Synthetic oligonucleotide
agugaaagucccuccucgg

SEQ ID NO: 622277 - RNA, 19 nt, Artificial Sequence
  Description of Artificial Sequence: Synthetic oligonucleotide
aucugcuacaaaaugaagu

SEQ ID NO: 622278 - RNA, 19 nt, Artificial Sequence
  Description of Artificial Sequence: Synthetic oligonucleotide
uuccuauauucaaaaucug

SEQ ID NO: 622279 - RNA, 19 nt, Artificial Sequence
  Description of Artificial Sequence: Synthetic oligonucleotide
uuaaacguuuauucuuuaa

SEQ ID NO: 622280 - RNA, 19 nt, Artificial Sequence
  Description of Artificial Sequence: Synthetic oligonucleotide
uguguguacauaguugacu

SEQ ID NO: 622281 - RNA, 19 nt, Artificial Sequence
  Description of Artificial Sequence: Synthetic oligonucleotide
cacacacacacgcacacgc

SEQ ID NO: 622282 - RNA, 19 nt, Artificial Sequence
  Description of Artificial Sequence: Synthetic oligonucleotide
ucgaagaaggacuuaguuu

SEQ ID NO: 622283 - RNA, 19 nt, Artificial Sequence
  Description of Artificial Sequence: Synthetic oligonucleotide
uagacuaugcagcaacuuu

SEQ ID NO: 622284 - RNA, 19 nt, Artificial Sequence
  Description of Artificial Sequence: Synthetic oligonucleotide
gucaccuauuuucaaagac

SEQ ID NO: 622285 - RNA, 19 nt, Artificial Sequence
  Description of Artificial Sequence: Synthetic oligonucleotide
agcacccuaauuaaguguc

SEQ ID NO: 622286 - RNA, 19 nt, Artificial Sequence
  Description of Artificial Sequence: Synthetic oligonucleotide
acauaaccuaugcucaugu

SEQ ID NO: 622287 - RNA, 19 nt, Artificial Sequence
  Description of Artificial Sequence: Synthetic oligonucleotide
aaaacuuaagcgguuccau

SEQ ID NO: 622288 - RNA, 19 nt, Artificial Sequence
  Description of Artificial Sequence: Synthetic oligonucleotide
gaaaggacccacccguagc

SEQ ID NO: 622289 - RNA, 19 nt, Artificial Sequence
  Description of Artificial Sequence: Synthetic oligonucleotide
uuaagcgguuccauucagc

SEQ ID NO: 622290 - RNA, 19 nt, Artificial Sequence
  Description of Artificial Sequence: Synthetic oligonucleotide
aagcaguaugaccaaucca

SEQ ID NO: 622291 - RNA, 19 nt, Artificial Sequence
  Description of Artificial Sequence: Synthetic oligonucleotide
ugcaaggacacguauguuu

SEQ ID NO: 622292 - RNA, 19 nt, Artificial Sequence
  Description of Artificial Sequence: Synthetic oligonucleotide
uuuacagaucuuguguccu

SEQ ID NO: 622293 - RNA, 19 nt, Artificial Sequence
  Description of Artificial Sequence: Synthetic oligonucleotide
uuaggguccaaaagccgug

SEQ ID NO: 622294 - RNA, 19 nt, Artificial Sequence
  Description of Artificial Sequence: Synthetic oligonucleotide
agauaauggaauaaaguua

SEQ ID NO: 622295 - RNA, 19 nt, Artificial Sequence
  Description of Artificial Sequence: Synthetic oligonucleotide
gguaucauuucugagcugc

SEQ ID NO: 622296 - RNA, 19 nt, Artificial Sequence
  Description of Artificial Sequence: Synthetic oligonucleotide
cagugaaagucccuccucg

SEQ ID NO: 622297 - RNA, 19 nt, Artificial Sequence
  Description of Artificial Sequence: Synthetic oligonucleotide
aacugcgcugcucugggga

SEQ ID NO: 622298 - RNA, 19 nt, Artificial Sequence
  Description of Artificial Sequence: Synthetic oligonucleotide
gauaccaaaucguccccug

SEQ ID NO: 622299 - RNA, 19 nt, Artificial Sequence
  Description of Artificial Sequence: Synthetic oligonucleotide
cacgaccaccucuaaaucc

SEQ ID NO: 622300 - RNA, 19 nt, Artificial Sequence
  Description of Artificial Sequence: Synthetic oligonucleotide
caaaggguacuaacugagg

SEQ ID NO: 622301 - RNA, 19 nt, Artificial Sequence
  Description of Artificial Sequence: Synthetic oligonucleotide
uguagacuaugcagcaacu

SEQ ID NO: 622302 - RNA, 19 nt, Artificial Sequence
  Description of Artificial Sequence: Synthetic oligonucleotide
aagcgguuccauucagcuc

SEQ ID NO: 622303 - RNA, 19 nt, Artificial Sequence
  Description of Artificial Sequence: Synthetic oligonucleotide
ugucuauugcuuucuggcu

SEQ ID NO: 622304 - RNA, 19 nt, Artificial Sequence
  Description of Artificial Sequence: Synthetic oligonucleotide
aaacuuaagcgguuccauu

SEQ ID NO: 622305 - RNA, 19 nt, Artificial Sequence
  Description of Artificial Sequence: Synthetic oligonucleotide
cauauuauaggcucuccaa

SEQ ID NO: 622306 - RNA, 19 nt, Artificial Sequence
  Description of Artificial Sequence: Synthetic oligonucleotide
aacugagggcuugaucgac

SEQ ID NO: 622307 - RNA, 19 nt, Artificial Sequence
  Description of Artificial Sequence: Synthetic oligonucleotide
acacgcacguggcucaaac

SEQ ID NO: 622308 - RNA, 19 nt, Artificial Sequence
  Description of Artificial Sequence: Synthetic oligonucleotide
ugccuaagaaacaguauuu

SEQ ID NO: 622309 - RNA, 19 nt, Artificial Sequence
  Description of Artificial Sequence: Synthetic oligonucleotide
cuaugcaugaauaauuuau

SEQ ID NO: 622310 - RNA, 19 nt, Artificial Sequence
  Description of Artificial Sequence: Synthetic oligonucleotide
cguaauagcaguuggggcc

SEQ ID NO: 622311 - RNA, 19 nt, Artificial Sequence
  Description of Artificial Sequence: Synthetic oligonucleotide
agacuaugcagcaacuuug

SEQ ID NO: 622312 - RNA, 19 nt, Artificial Sequence
  Description of Artificial Sequence: Synthetic oligonucleotide
ugcucuugguugucuauug

SEQ ID NO: 622313 - RNA, 19 nt, Artificial Sequence
  Description of Artificial Sequence: Synthetic oligonucleotide
gacggauaccaaaucgucc

SEQ ID NO: 622314 - RNA, 19 nt, Artificial Sequence
  Description of Artificial Sequence: Synthetic oligonucleotide
acugcuauucgaugcuucu

SEQ ID NO: 622315 - RNA, 19 nt, Artificial Sequence
  Description of Artificial Sequence: Synthetic oligonucleotide
uucauacacugaaaauauc

SEQ ID NO: 622316 - RNA, 19 nt, Artificial Sequence
  Description of Artificial Sequence: Synthetic oligonucleotide
cacacacacacacacgcac

SEQ ID NO: 622317 - RNA, 19 nt, Artificial Sequence
  Description of Artificial Sequence: Synthetic oligonucleotide
cuuguuuguagacuaugca

SEQ ID NO: 622318 - RNA, 19 nt, Artificial Sequence
  Description of Artificial Sequence: Synthetic oligonucleotide
uccuuguuaaauugugcau

SEQ ID NO: 622319 - RNA, 19 nt, Artificial Sequence
  Description of Artificial Sequence: Synthetic oligonucleotide
gguaagugggccgaggcgg

SEQ ID NO: 622320 - RNA, 19 nt, Artificial Sequence
  Description of Artificial Sequence: Synthetic oligonucleotide
cacgauugggacgaagggg

SEQ ID NO: 622321 - RNA, 19 nt, Artificial Sequence
  Description of Artificial Sequence: Synthetic oligonucleotide
ugcccgaccaaugugcuug

SEQ ID NO: 622322 - RNA, 19 nt, Artificial Sequence
  Description of Artificial Sequence: Synthetic oligonucleotide
cuauuugccucuugguauc

SEQ ID NO: 622323 - RNA, 19 nt, Artificial Sequence
  Description of Artificial Sequence: Synthetic oligonucleotide
guuacucaucugaaaauac

SEQ ID NO: 622324 - RNA, 19 nt, Artificial Sequence
  Description of Artificial Sequence: Synthetic oligonucleotide
guauuuaccuguguguaca

SEQ ID NO: 622325 - RNA, 19 nt, Artificial Sequence
  Description of Artificial Sequence: Synthetic oligonucleotide
accaucucgacggauacca

SEQ ID NO: 622326 - RNA, 19 nt, Artificial Sequence
  Description of Artificial Sequence: Synthetic oligonucleotide
uuuaaacguuuauucuuua

SEQ ID NO: 622327 - RNA, 19 nt, Artificial Sequence
  Description of Artificial Sequence: Synthetic oligonucleotide
uacagcgagguacauucuc

SEQ ID NO: 622328 - RNA, 19 nt, Artificial Sequence
  Description of Artificial Sequence: Synthetic oligonucleotide
aaggacacguauguuugcu

SEQ ID NO: 622329 - RNA, 19 nt, Artificial Sequence
  Description of Artificial Sequence: Synthetic oligonucleotide
aggguacuaacugagggcu

SEQ ID NO: 622330 - RNA, 19 nt, Artificial Sequence
  Description of Artificial Sequence: Synthetic oligonucleotide
ggcaauggaauauaaugga

SEQ ID NO: 622331 - RNA, 19 nt, Artificial Sequence
  Description of Artificial Sequence: Synthetic oligonucleotide
acguuucagcauuuaaccu

SEQ ID NO: 622332 - RNA, 19 nt, Artificial Sequence
  Description of Artificial Sequence: Synthetic oligonucleotide
ccuaucugcaggcagcugg

SEQ ID NO: 622333 - RNA, 19 nt, Artificial Sequence
  Description of Artificial Sequence: Synthetic oligonucleotide
aaagacacacacacacaca

SEQ ID NO: 622334 - RNA, 19 nt, Artificial Sequence
  Description of Artificial Sequence: Synthetic oligonucleotide
uuacagaucuuguguccug

SEQ ID NO: 622335 - RNA, 19 nt, Artificial Sequence
  Description of Artificial Sequence: Synthetic oligonucleotide
aagcuaccucauauuauag

SEQ ID NO: 622336 - RNA, 19 nt, Artificial Sequence
  Description of Artificial Sequence: Synthetic oligonucleotide
gaagggguauuccaaacgu

SEQ ID NO: 622337 - RNA, 19 nt, Artificial Sequence
  Description of Artificial Sequence: Synthetic oligonucleotide
gacuuguuuguagacuaug

SEQ ID NO: 622338 - RNA, 19 nt, Artificial Sequence
  Description of Artificial Sequence: Synthetic oligonucleotide
uaugaaacucucugucgau

SEQ ID NO: 622339 - RNA, 19 nt, Artificial Sequence
  Description of Artificial Sequence: Synthetic oligonucleotide
acaguaucacggccuaucu

SEQ ID NO: 622340 - RNA, 19 nt, Artificial Sequence
  Description of Artificial Sequence: Synthetic oligonucleotide
cugaacugacuguaugcug

SEQ ID NO: 622341 - RNA, 19 nt, Artificial Sequence
  Description of Artificial Sequence: Synthetic oligonucleotide
gaaguccauacacuaugca

SEQ ID NO: 622342 - RNA, 19 nt, Artificial Sequence
  Description of Artificial Sequence: Synthetic oligonucleotide
cucaaaggguacuaacuga

SEQ ID NO: 622343 - RNA, 19 nt, Artificial Sequence
  Description of Artificial Sequence: Synthetic oligonucleotide
uccucggaagccaaggcuu

SEQ ID NO: 622344 - RNA, 19 nt, Artificial Sequence
  Description of Artificial Sequence: Synthetic oligonucleotide
uguaugcuggcauccugac

SEQ ID NO: 622345 - RNA, 19 nt, Artificial Sequence
  Description of Artificial Sequence: Synthetic oligonucleotide
agguuacucaucugaaaau

SEQ ID NO: 622346 - RNA, 19 nt, Artificial Sequence
  Description of Artificial Sequence: Synthetic oligonucleotide
cuuaagcgguuccauucag

SEQ ID NO: 622347 - RNA, 19 nt, Artificial Sequence
  Description of Artificial Sequence: Synthetic oligonucleotide
agcgagguacauucucauc

SEQ ID NO: 622348 - RNA, 19 nt, Artificial Sequence
  Description of Artificial Sequence: Synthetic oligonucleotide
uucauuggaccaucucgac

SEQ ID NO: 622349 - RNA, 19 nt, Artificial Sequence
  Description of Artificial Sequence: Synthetic oligonucleotide
ggcuugaucgaccuugggc

SEQ ID NO: 622350 - RNA, 19 nt, Artificial Sequence
  Description of Artificial Sequence: Synthetic oligonucleotide
ugaaaccacuuuccaggac

SEQ ID NO: 622351 - RNA, 19 nt, Artificial Sequence
  Description of Artificial Sequence: Synthetic oligonucleotide
aguuaccuuugccuaagaa

SEQ ID NO: 622352 - RNA, 19 nt, Artificial Sequence
  Description of Artificial Sequence: Synthetic oligonucleotide
agucaccuauuuucaaaga

SEQ ID NO: 622353 - RNA, 19 nt, Artificial Sequence
  Description of Artificial Sequence: Synthetic oligonucleotide
cuaaauccaccacgaaauc

SEQ ID NO: 622354 - RNA, 19 nt, Artificial Sequence
  Description of Artificial Sequence: Synthetic oligonucleotide
ccaaauacaauuaauuagu

SEQ ID NO: 622355 - RNA, 19 nt, Artificial Sequence
  Description of Artificial Sequence: Synthetic oligonucleotide
acugagggcuugaucgacc

SEQ ID NO: 622356 - RNA, 19 nt, Artificial Sequence
  Description of Artificial Sequence: Synthetic oligonucleotide
gacacguauguuugcugac

SEQ ID NO: 622357 - RNA, 19 nt, Artificial Sequence
  Description of Artificial Sequence: Synthetic oligonucleotide
uacugcuauucgaugcuuc

SEQ ID NO: 622358 - RNA, 19 nt, Artificial Sequence
  Description of Artificial Sequence: Synthetic oligonucleotide
gaaacucucugucgauuuc

SEQ ID NO: 622359 - RNA, 19 nt, Artificial Sequence
  Description of Artificial Sequence: Synthetic oligonucleotide
uccagaccuuuuagggucc

SEQ ID NO: 622360 - RNA, 19 nt, Artificial Sequence
  Description of Artificial Sequence: Synthetic oligonucleotide
uaucacggccuaucugcag

SEQ ID NO: 622361 - RNA, 19 nt, Artificial Sequence
  Description of Artificial Sequence: Synthetic oligonucleotide
gguauuccaaacguuucag

SEQ ID NO: 622362 - RNA, 19 nt, Artificial Sequence
  Description of Artificial Sequence: Synthetic oligonucleotide
aaauacagcgagguacauu

SEQ ID NO: 622363 - RNA, 19 nt, Artificial Sequence
  Description of Artificial Sequence: Synthetic oligonucleotide
cacacacacacacgcacac

SEQ ID NO: 622364 - RNA, 19 nt, Artificial Sequence
  Description of Artificial Sequence: Synthetic oligonucleotide
gaccuuuuaggguccaaaa

SEQ ID NO: 622365 - RNA, 19 nt, Artificial Sequence
  Description of Artificial Sequence: Synthetic oligonucleotide
acuuaguuuugucguaaua

SEQ ID NO: 622366 - RNA, 19 nt, Artificial Sequence
  Description of Artificial Sequence: Synthetic oligonucleotide
aggacacguauguuugcug

SEQ ID NO: 622367 - RNA, 19 nt, Artificial Sequence
  Description of Artificial Sequence: Synthetic oligonucleotide
cucauauuauaggcucucc

SEQ ID NO: 622368 - RNA, 19 nt, Artificial Sequence
  Description of Artificial Sequence: Synthetic oligonucleotide
caauggaauauaauggaau

SEQ ID NO: 622369 - RNA, 19 nt, Artificial Sequence
  Description of Artificial Sequence: Synthetic oligonucleotide
ggcaccaaacugcugcccg

SEQ ID NO: 622370 - RNA, 19 nt, Artificial Sequence
  Description of Artificial Sequence: Synthetic oligonucleotide
aggcagaaccaacugcgcu

SEQ ID NO: 622371 - RNA, 19 nt, Artificial Sequence
  Description of Artificial Sequence: Synthetic oligonucleotide
uugaucgaccuugggcuag

SEQ ID NO: 622372 - RNA, 19 nt, Artificial Sequence
  Description of Artificial Sequence: Synthetic oligonucleotide
acguggcucaaacacagua

SEQ ID NO: 622373 - RNA, 19 nt, Artificial Sequence
  Description of Artificial Sequence: Synthetic oligonucleotide
acggccuaucugcaggcag

SEQ ID NO: 622374 - RNA, 19 nt, Artificial Sequence
  Description of Artificial Sequence: Synthetic oligonucleotide
ucucgacggauaccaaauc

SEQ ID NO: 622375 - RNA, 19 nt, Artificial Sequence
  Description of Artificial Sequence: Synthetic oligonucleotide
aaauccucguggggcagug

SEQ ID NO: 622376 - RNA, 19 nt, Artificial Sequence
  Description of Artificial Sequence: Synthetic oligonucleotide
aaguuaccuuugccuaaga

SEQ ID NO: 622377 - RNA, 19 nt, Artificial Sequence
  Description of Artificial Sequence: Synthetic oligonucleotide
uuuguagacuaugcagcaa

SEQ ID NO: 622378 - RNA, 19 nt, Artificial Sequence
  Description of Artificial Sequence: Synthetic oligonucleotide
accacuuuccaggaccaug

SEQ ID NO: 622379 - RNA, 19 nt, Artificial Sequence
  Description of Artificial Sequence: Synthetic oligonucleotide
cuuuaaacguuuauucuuu

SEQ ID NO: 622380 - RNA, 19 nt, Artificial Sequence
  Description of Artificial Sequence: Synthetic oligonucleotide
ccuaugcucauguuuuaag

SEQ ID NO: 622381 - RNA, 19 nt, Artificial Sequence
  Description of Artificial Sequence: Synthetic oligonucleotide
gacacaaccaagugcuggu

SEQ ID NO: 622382 - RNA, 19 nt, Artificial Sequence
  Description of Artificial Sequence: Synthetic oligonucleotide
ccaugaagagcuaggaguc

SEQ ID NO: 622383 - RNA, 19 nt, Artificial Sequence
  Description of Artificial Sequence: Synthetic oligonucleotide
ucacggccuaucugcaggc

SEQ ID NO: 622384 - RNA, 19 nt, Artificial Sequence
  Description of Artificial Sequence: Synthetic oligonucleotide
guaauagcaguuggggcca

SEQ ID NO: 622385 - RNA, 19 nt, Artificial Sequence
  Description of Artificial Sequence: Synthetic oligonucleotide
uggacugaacugacuguau

SEQ ID NO: 622386 - RNA, 19 nt, Artificial Sequence
  Description of Artificial Sequence: Synthetic oligonucleotide
ugaccaauccagaccuuuu

SEQ ID NO: 622387 - RNA, 19 nt, Artificial Sequence
  Description of Artificial Sequence: Synthetic oligonucleotide
ggacugaacugacuguaug

SEQ ID NO: 622388 - RNA, 19 nt, Artificial Sequence
  Description of Artificial Sequence: Synthetic oligonucleotide
cuguaugcuggcauccuga

SEQ ID NO: 622389 - RNA, 19 nt, Artificial Sequence
  Description of Artificial Sequence: Synthetic oligonucleotide
aagagcuaggagucaccua

SEQ ID NO: 622390 - RNA, 19 nt, Artificial Sequence
  Description of Artificial Sequence: Synthetic oligonucleotide
ggaaaggacccacccguag

SEQ ID NO: 622391 - RNA, 19 nt, Artificial Sequence
  Description of Artificial Sequence: Synthetic oligonucleotide
aaucguccccugccaccuc

SEQ ID NO: 622392 - RNA, 19 nt, Artificial Sequence
  Description of Artificial Sequence: Synthetic oligonucleotide
acacacacacacacacacg

SEQ ID NO: 622393 - RNA, 19 nt, Artificial Sequence
  Description of Artificial Sequence: Synthetic oligonucleotide
guaugcuggcauccugacc

SEQ ID NO: 622394 - RNA, 19 nt, Artificial Sequence
  Description of Artificial Sequence: Synthetic oligonucleotide
aauagcaguuggggccaag

SEQ ID NO: 622395 - RNA, 19 nt, Artificial Sequence
  Description of Artificial Sequence: Synthetic oligonucleotide
acggccacgauugggacga

SEQ ID NO: 622396 - RNA, 19 nt, Artificial Sequence
  Description of Artificial Sequence: Synthetic oligonucleotide
uggggauaagguacugcua

SEQ ID NO: 622397 - RNA, 19 nt, Artificial Sequence
  Description of Artificial Sequence: Synthetic oligonucleotide
caaacguuucagcauuuaa

SEQ ID NO: 622398 - RNA, 19 nt, Artificial Sequence
  Description of Artificial Sequence: Synthetic oligonucleotide
gguacuaacugagggcuug

SEQ ID NO: 622399 - RNA, 19 nt, Artificial Sequence
  Description of Artificial Sequence: Synthetic oligonucleotide
auucgaugcuucuguucca

SEQ ID NO: 622400 - RNA, 19 nt, Artificial Sequence
  Description of Artificial Sequence: Synthetic oligonucleotide
gugucaacuccggaguccc

SEQ ID NO: 622401 - RNA, 19 nt, Artificial Sequence
  Description of Artificial Sequence: Synthetic oligonucleotide
cauccagcacccuaauuaa

SEQ ID NO: 622402 - RNA, 19 nt, Artificial Sequence
  Description of Artificial Sequence: Synthetic oligonucleotide
ggacacguauguuugcuga

SEQ ID NO: 622403 - RNA, 19 nt, Artificial Sequence
  Description of Artificial Sequence: Synthetic oligonucleotide
aggcggucuguacugcuug

SEQ ID NO: 622404 - RNA, 19 nt, Artificial Sequence
  Description of Artificial Sequence: Synthetic oligonucleotide
ugcuuggacugaacugacu

SEQ ID NO: 622405 - RNA, 19 nt, Artificial Sequence
  Description of Artificial Sequence: Synthetic oligonucleotide
auguuucuuuggcaaugga

SEQ ID NO: 622406 - RNA, 19 nt, Artificial Sequence
  Description of Artificial Sequence: Synthetic oligonucleotide
uccccuuuaucuucaccau

SEQ ID NO: 622407 - RNA, 19 nt, Artificial Sequence
  Description of Artificial Sequence: Synthetic oligonucleotide
acccuaauuaagugucaaa

SEQ ID NO: 622408 - RNA, 19 nt, Artificial Sequence
  Description of Artificial Sequence: Synthetic oligonucleotide
cacggccacgauugggacg

SEQ ID NO: 622409 - RNA, 19 nt, Artificial Sequence
  Description of Artificial Sequence: Synthetic oligonucleotide
aguaaucaccaaauacaau

SEQ ID NO: 622410 - RNA, 19 nt, Artificial Sequence
  Description of Artificial Sequence: Synthetic oligonucleotide
acacguauguuugcugacu

SEQ ID NO: 622411 - RNA, 19 nt, Artificial Sequence
  Description of Artificial Sequence: Synthetic oligonucleotide
caguaucacggccuaucug

SEQ ID NO: 622412 - RNA, 19 nt, Artificial Sequence
  Description of Artificial Sequence: Synthetic oligonucleotide
ggauaagguacugcuauuc

SEQ ID NO: 622413 - RNA, 19 nt, Artificial Sequence
  Description of Artificial Sequence: Synthetic oligonucleotide
acacacacacacgcacacg

SEQ ID NO: 622414 - RNA, 19 nt, Artificial Sequence
  Description of Artificial Sequence: Synthetic oligonucleotide
ugguaucauuucugagcug

SEQ ID NO: 622415 - RNA, 19 nt, Artificial Sequence
  Description of Artificial Sequence: Synthetic oligonucleotide
uauuugccucuugguauca

SEQ ID NO: 622416 - RNA, 19 nt, Artificial Sequence
  Description of Artificial Sequence: Synthetic oligonucleotide
gagugucaacuccggaguc

SEQ ID NO: 622417 - RNA, 19 nt, Artificial Sequence
  Description of Artificial Sequence: Synthetic oligonucleotide
agggguauuccaaacguuu

SEQ ID NO: 622418 - RNA, 19 nt, Artificial Sequence
  Description of Artificial Sequence: Synthetic oligonucleotide
aggacuuaguuuugucgua

SEQ ID NO: 622419 - RNA, 19 nt, Artificial Sequence
  Description of Artificial Sequence: Synthetic oligonucleotide
aucucgacggauaccaaau

SEQ ID NO: 622420 - RNA, 19 nt, Artificial Sequence
  Description of Artificial Sequence: Synthetic oligonucleotide
ugggacgaagggguauucc

SEQ ID NO: 622421 - RNA, 19 nt, Artificial Sequence
  Description of Artificial Sequence: Synthetic oligonucleotide
ucuucaccauuuacagguu

SEQ ID NO: 622422 - RNA, 19 nt, Artificial Sequence
  Description of Artificial Sequence: Synthetic oligonucleotide
agcuaggagucaccuauuu

SEQ ID NO: 622423 - RNA, 19 nt, Artificial Sequence
  Description of Artificial Sequence: Synthetic oligonucleotide
caaugagcucccagcaaca

SEQ ID NO: 622424 - RNA, 19 nt, Artificial Sequence
  Description of Artificial Sequence: Synthetic oligonucleotide
aacuccggaguccccuuua

SEQ ID NO: 622425 - RNA, 19 nt, Artificial Sequence
  Description of Artificial Sequence: Synthetic oligonucleotide
aucgaccuugggcuagcug

SEQ ID NO: 622426 - RNA, 19 nt, Artificial Sequence
  Description of Artificial Sequence: Synthetic oligonucleotide
cuaccucauauuauaggcu

SEQ ID NO: 622427 - RNA, 19 nt, Artificial Sequence
  Description of Artificial Sequence: Synthetic oligonucleotide
caccaacggcaccaaacug

SEQ ID NO: 622428 - RNA, 19 nt, Artificial Sequence
  Description of Artificial Sequence: Synthetic oligonucleotide
ugucaacuccggagucccc

SEQ ID NO: 622429 - RNA, 19 nt, Artificial Sequence
  Description of Artificial Sequence: Synthetic oligonucleotide
caccuauuuucaaagacuu

SEQ ID NO: 622430 - RNA, 19 nt, Artificial Sequence
  Description of Artificial Sequence: Synthetic oligonucleotide
gaagagcuaggagucaccu

SEQ ID NO: 622431 - RNA, 19 nt, Artificial Sequence
  Description of Artificial Sequence: Synthetic oligonucleotide
cacaaccaagugcugguga

SEQ ID NO: 622432 - RNA, 19 nt, Artificial Sequence
  Description of Artificial Sequence: Synthetic oligonucleotide
caucucgacggauaccaaa

SEQ ID NO: 622433 - RNA, 19 nt, Artificial Sequence
  Description of Artificial Sequence: Synthetic oligonucleotide
uccaaaagccgugguuuuc

SEQ ID NO: 622434 - RNA, 19 nt, Artificial Sequence
  Description of Artificial Sequence: Synthetic oligonucleotide
gaccuugggcuagcugugg

SEQ ID NO: 622435 - RNA, 19 nt, Artificial Sequence
  Description of Artificial Sequence: Synthetic oligonucleotide
acuaugcagcaacuuuguu

SEQ ID NO: 622436 - RNA, 19 nt, Artificial Sequence
  Description of Artificial Sequence: Synthetic oligonucleotide
gggacgaagggguauucca

SEQ ID NO: 622437 - RNA, 19 nt, Artificial Sequence
  Description of Artificial Sequence: Synthetic oligonucleotide
ccacccguagcccugcucc

SEQ ID NO: 622438 - RNA, 19 nt, Artificial Sequence
  Description of Artificial Sequence: Synthetic oligonucleotide
augaccaauccagaccuuu

SEQ ID NO: 622439 - RNA, 19 nt, Artificial Sequence
  Description of Artificial Sequence: Synthetic oligonucleotide
aagugggccgaggcggucu

SEQ ID NO: 622440 - RNA, 19 nt, Artificial Sequence
  Description of Artificial Sequence: Synthetic oligonucleotide
acacacacacacacgcaca

SEQ ID NO: 622441 - RNA, 19 nt, Artificial Sequence
  Description of Artificial Sequence: Synthetic oligonucleotide
ugaucgaccuugggcuagc

SEQ ID NO: 622442 - RNA, 19 nt, Artificial Sequence
  Description of Artificial Sequence: Synthetic oligonucleotide
cugcuauucgaugcuucug

SEQ ID NO: 622443 - RNA, 19 nt, Artificial Sequence
  Description of Artificial Sequence: Synthetic oligonucleotide
acacaaccaagugcuggug

SEQ ID NO: 622444 - RNA, 19 nt, Artificial Sequence
  Description of Artificial Sequence: Synthetic oligonucleotide
acguauguuugcugacuuu

SEQ ID NO: 622445 - RNA, 19 nt, Artificial Sequence
  Description of Artificial Sequence: Synthetic oligonucleotide
gacuaugcagcaacuuugu

SEQ ID NO: 622446 - RNA, 19 nt, Artificial Sequence
  Description of Artificial Sequence: Synthetic oligonucleotide
gcucuugguugucuauugc

SEQ ID NO: 622447 - RNA, 19 nt, Artificial Sequence
  Description of Artificial Sequence: Synthetic oligonucleotide
ucggaagccaaggcuuccu

SEQ ID NO: 622448 - RNA, 19 nt, Artificial Sequence
  Description of Artificial Sequence: Synthetic oligonucleotide
ccaacugcgcugcucuggg

SEQ ID NO: 622449 - RNA, 19 nt, Artificial Sequence
  Description of Artificial Sequence: Synthetic oligonucleotide
ggggauaagguacugcuau

SEQ ID NO: 622450 - RNA, 19 nt, Artificial Sequence
  Description of Artificial Sequence: Synthetic oligonucleotide
agugcagcuuugaaaugaa

SEQ ID NO: 622451 - RNA, 19 nt, Artificial Sequence
  Description of Artificial Sequence: Synthetic oligonucleotide
aggguccaaaagccguggu

SEQ ID NO: 622452 - RNA, 19 nt, Artificial Sequence
  Description of Artificial Sequence: Synthetic oligonucleotide
cccuaauuaagugucaaaa

SEQ ID NO: 622453 - RNA, 19 nt, Artificial Sequence
  Description of Artificial Sequence: Synthetic oligonucleotide
agccgugguuuuccuauau

SEQ ID NO: 622454 - RNA, 19 nt, Artificial Sequence
  Description of Artificial Sequence: Synthetic oligonucleotide
aagccgugguuuuccuaua

SEQ ID NO: 622455 - RNA, 19 nt, Artificial Sequence
  Description of Artificial Sequence: Synthetic oligonucleotide
agacacacacacacacaca

SEQ ID NO: 622456 - RNA, 19 nt, Artificial Sequence
  Description of Artificial Sequence: Synthetic oligonucleotide
guauguuugcugacuuuaa

SEQ ID NO: 622457 - RNA, 19 nt, Artificial Sequence
  Description of Artificial Sequence: Synthetic oligonucleotide
gcaauggaauauaauggaa

SEQ ID NO: 622458 - RNA, 19 nt, Artificial Sequence
  Description of Artificial Sequence: Synthetic oligonucleotide
caacugcgcugcucugggg

SEQ ID NO: 622459 - RNA, 19 nt, Artificial Sequence
  Description of Artificial Sequence: Synthetic oligonucleotide
ccucguggggcagugaaag

SEQ ID NO: 622460 - RNA, 19 nt, Artificial Sequence
  Description of Artificial Sequence: Synthetic oligonucleotide
caccauuuacagguuucuc

SEQ ID NO: 622461 - RNA, 19 nt, Artificial Sequence
  Description of Artificial Sequence: Synthetic oligonucleotide
cucggaagccaaggcuucc

SEQ ID NO: 622462 - RNA, 19 nt, Artificial Sequence
  Description of Artificial Sequence: Synthetic oligonucleotide
gguacugcuauucgaugcu

SEQ ID NO: 622463 - RNA, 19 nt, Artificial Sequence
  Description of Artificial Sequence: Synthetic oligonucleotide
acacacacacacacacaca

SEQ ID NO: 622464 - RNA, 19 nt, Artificial Sequence
  Description of Artificial Sequence: Synthetic oligonucleotide
acacacacacacacacgca

SEQ ID NO: 622465 - RNA, 19 nt, Artificial Sequence
  Description of Artificial Sequence: Synthetic oligonucleotide
uacuaacugagggcuugau

SEQ ID NO: 622466 - RNA, 19 nt, Artificial Sequence
  Description of Artificial Sequence: Synthetic oligonucleotide
gacuuaguuuugucguaau

SEQ ID NO: 622467 - RNA, 19 nt, Artificial Sequence
  Description of Artificial Sequence: Synthetic oligonucleotide
cuugaucgaccuugggcua

SEQ ID NO: 622468 - RNA, 19 nt, Artificial Sequence
  Description of Artificial Sequence: Synthetic oligonucleotide
guaucacggccuaucugca

SEQ ID NO: 622469 - RNA, 19 nt, Artificial Sequence
  Description of Artificial Sequence: Synthetic oligonucleotide
cgugguuuuccuauauuca

SEQ ID NO: 622470 - RNA, 19 nt, Artificial Sequence
  Description of Artificial Sequence: Synthetic oligonucleotide
cugugaucugcuacaaaau

SEQ ID NO: 622471 - RNA, 19 nt, Artificial Sequence
  Description of Artificial Sequence: Synthetic oligonucleotide
uccauacacuaugcaugaa

SEQ ID NO: 622472 - RNA, 19 nt, Artificial Sequence
  Description of Artificial Sequence: Synthetic oligonucleotide
ggaccaugaagagcuagga

SEQ ID NO: 622473 - RNA, 19 nt, Artificial Sequence
  Description of Artificial Sequence: Synthetic oligonucleotide
ccuaauuaagugucaaaau

SEQ ID NO: 622474 - RNA, 19 nt, Artificial Sequence
  Description of Artificial Sequence: Synthetic oligonucleotide
cugcuacuccacauaaccu

SEQ ID NO: 622475 - RNA, 19 nt, Artificial Sequence
  Description of Artificial Sequence: Synthetic oligonucleotide
agacuuguuuguagacuau

SEQ ID NO: 622476 - RNA, 19 nt, Artificial Sequence
  Description of Artificial Sequence: Synthetic oligonucleotide
gccgaggcggucuguacug

SEQ ID NO: 622477 - RNA, 19 nt, Artificial Sequence
  Description of Artificial Sequence: Synthetic oligonucleotide
ccgaccaaugugcuuggac

SEQ ID NO: 622478 - RNA, 19 nt, Artificial Sequence
  Description of Artificial Sequence: Synthetic oligonucleotide
ccaaaucguccccugccac

SEQ ID NO: 622479 - RNA, 19 nt, Artificial Sequence
  Description of Artificial Sequence: Synthetic oligonucleotide
ccucauauuauaggcucuc

SEQ ID NO: 622480 - RNA, 19 nt, Artificial Sequence
  Description of Artificial Sequence: Synthetic oligonucleotide
caaauccugugaucugcua

SEQ ID NO: 622481 - RNA, 19 nt, Artificial Sequence
  Description of Artificial Sequence: Synthetic oligonucleotide
gcagguaagugggccgagg

SEQ ID NO: 622482 - RNA, 19 nt, Artificial Sequence
  Description of Artificial Sequence: Synthetic oligonucleotide
cacccuaauuaagugucaa

SEQ ID NO: 622483 - RNA, 19 nt, Artificial Sequence
  Description of Artificial Sequence: Synthetic oligonucleotide
guacuaacugagggcuuga

SEQ ID NO: 622484 - RNA, 19 nt, Artificial Sequence
  Description of Artificial Sequence: Synthetic oligonucleotide
ggacuuaguuuugucguaa

SEQ ID NO: 622485 - RNA, 19 nt, Artificial Sequence
  Description of Artificial Sequence: Synthetic oligonucleotide
auccugugaucugcuacaa

SEQ ID NO: 622486 - RNA, 19 nt, Artificial Sequence
  Description of Artificial Sequence: Synthetic oligonucleotide
cugagggcuugaucgaccu

SEQ ID NO: 622487 - RNA, 19 nt, Artificial Sequence
  Description of Artificial Sequence: Synthetic oligonucleotide
auacagcgagguacauucu

SEQ ID NO: 622488 - RNA, 19 nt, Artificial Sequence
  Description of Artificial Sequence: Synthetic oligonucleotide
guaggucuccuuucucuau

SEQ ID NO: 622489 - RNA, 19 nt, Artificial Sequence
  Description of Artificial Sequence: Synthetic oligonucleotide
gccuaagaaacaguauuua

SEQ ID NO: 622490 - RNA, 19 nt, Artificial Sequence
  Description of Artificial Sequence: Synthetic oligonucleotide
gcaguaugaccaauccaga

SEQ ID NO: 622491 - RNA, 19 nt, Artificial Sequence
  Description of Artificial Sequence: Synthetic oligonucleotide
gguccaaaagccgugguuu

SEQ ID NO: 622492 - RNA, 19 nt, Artificial Sequence
  Description of Artificial Sequence: Synthetic oligonucleotide
caacucuagcaaggaucac

SEQ ID NO: 622493 - RNA, 19 nt, Artificial Sequence
  Description of Artificial Sequence: Synthetic oligonucleotide
gcuauacaaaguucuuaau

SEQ ID NO: 622494 - RNA, 19 nt, Artificial Sequence
  Description of Artificial Sequence: Synthetic oligonucleotide
uaauagcaguuggggccaa

SEQ ID NO: 622495 - RNA, 19 nt, Artificial Sequence
  Description of Artificial Sequence: Synthetic oligonucleotide
guagacuaugcagcaacuu

SEQ ID NO: 622496 - RNA, 19 nt, Artificial Sequence
  Description of Artificial Sequence: Synthetic oligonucleotide
gacuguaugcuggcauccu

SEQ ID NO: 622497 - RNA, 19 nt, Artificial Sequence
  Description of Artificial Sequence: Synthetic oligonucleotide
caaaagccgugguuuuccu

SEQ ID NO: 622498 - RNA, 19 nt, Artificial Sequence
  Description of Artificial Sequence: Synthetic oligonucleotide
ggacgaagggguauuccaa

SEQ ID NO: 622499 - RNA, 19 nt, Artificial Sequence
  Description of Artificial Sequence: Synthetic oligonucleotide
cacguauguuugcugacuu

SEQ ID NO: 622500 - RNA, 19 nt, Artificial Sequence
  Description of Artificial Sequence: Synthetic oligonucleotide
ggcuagcugugguuuuaca

SEQ ID NO: 622501 - RNA, 19 nt, Artificial Sequence
  Description of Artificial Sequence: Synthetic oligonucleotide
cuugggcuagcugugguuu

SEQ ID NO: 622502 - RNA, 19 nt, Artificial Sequence
  Description of Artificial Sequence: Synthetic oligonucleotide
cauaaccuaugcucauguu

SEQ ID NO: 622503 - RNA, 19 nt, Artificial Sequence
  Description of Artificial Sequence: Synthetic oligonucleotide
cggauaccaaaucgucccc

SEQ ID NO: 622504 - RNA, 19 nt, Artificial Sequence
  Description of Artificial Sequence: Synthetic oligonucleotide
ggauaccaaaucguccccu

SEQ ID NO: 622505 - RNA, 19 nt, Artificial Sequence
  Description of Artificial Sequence: Synthetic oligonucleotide
ccaaguaggucuccuuucu

SEQ ID NO: 622506 - RNA, 19 nt, Artificial Sequence
  Description of Artificial Sequence: Synthetic oligonucleotide
gcuacuccacauaaccuau

SEQ ID NO: 622507 - RNA, 19 nt, Artificial Sequence
  Description of Artificial Sequence: Synthetic oligonucleotide
guaagugggccgaggcggu

SEQ ID NO: 622508 - RNA, 19 nt, Artificial Sequence
  Description of Artificial Sequence: Synthetic oligonucleotide
cgaccuugggcuagcugug

SEQ ID NO: 622509 - RNA, 19 nt, Artificial Sequence
  Description of Artificial Sequence: Synthetic oligonucleotide
ccacggccacgauugggac

SEQ ID NO: 622510 - RNA, 19 nt, Artificial Sequence
  Description of Artificial Sequence: Synthetic oligonucleotide
gcacccuaauuaaguguca

SEQ ID NO: 622511 - RNA, 19 nt, Artificial Sequence
  Description of Artificial Sequence: Synthetic oligonucleotide
gcuaggagucaccuauuuu

SEQ ID NO: 622512 - RNA, 19 nt, Artificial Sequence
  Description of Artificial Sequence: Synthetic oligonucleotide
cucgccugugcucuugguu

SEQ ID NO: 622513 - RNA, 19 nt, Artificial Sequence
  Description of Artificial Sequence: Synthetic oligonucleotide
gcuauucgaugcuucuguu

SEQ ID NO: 622514 - RNA, 19 nt, Artificial Sequence
  Description of Artificial Sequence: Synthetic oligonucleotide
gggauaagguacugcuauu

SEQ ID NO: 622515 - RNA, 19 nt, Artificial Sequence
  Description of Artificial Sequence: Synthetic oligonucleotide
ggguccaaaagccgugguu

SEQ ID NO: 622516 - RNA, 19 nt, Artificial Sequence
  Description of Artificial Sequence: Synthetic oligonucleotide
ggccgaggcggucuguacu

SEQ ID NO: 622517 - RNA, 19 nt, Artificial Sequence
  Description of Artificial Sequence: Synthetic oligonucleotide
ccucuaaauccaccacgaa

SEQ ID NO: 622518 - RNA, 19 nt, Artificial Sequence
  Description of Artificial Sequence: Synthetic oligonucleotide
acccacccguagcccugcu

SEQ ID NO: 622519 - RNA, 19 nt, Artificial Sequence
  Description of Artificial Sequence: Synthetic oligonucleotide
gaggcggucuguacugcuu

SEQ ID NO: 622520 - RNA, 19 nt, Artificial Sequence
  Description of Artificial Sequence: Synthetic oligonucleotide
caucagcguucccuucacu

SEQ ID NO: 622521 - RNA, 19 nt, Artificial Sequence
  Description of Artificial Sequence: Synthetic oligonucleotide
cacggccuaucugcaggca

SEQ ID NO: 622522 - RNA, 19 nt, Artificial Sequence
  Description of Artificial Sequence: Synthetic oligonucleotide
gaucgaccuugggcuagcu

SEQ ID NO: 622523 - RNA, 19 nt, Artificial Sequence
  Description of Artificial Sequence: Synthetic oligonucleotide
cugugguuuuacagaucuu

SEQ ID NO: 622524 - RNA, 19 nt, Artificial Sequence
  Description of Artificial Sequence: Synthetic oligonucleotide
gagcuaggagucaccuauu

SEQ ID NO: 622525 - RNA, 19 nt, Artificial Sequence
  Description of Artificial Sequence: Synthetic oligonucleotide
ggcggucuguacugcuugu

SEQ ID NO: 622526 - RNA, 19 nt, Artificial Sequence
  Description of Artificial Sequence: Synthetic oligonucleotide
ggguccauaggagcccacu

SEQ ID NO: 622527 - RNA, 19 nt, Artificial Sequence
  Description of Artificial Sequence: Synthetic oligonucleotide
gcguucccuucacuguucu

SEQ ID NO: 622528 - RNA, 19 nt, Artificial Sequence
  Description of Artificial Sequence: Synthetic oligonucleotide
ccgaggcggucuguacugc

SEQ ID NO: 622529 - RNA, 19 nt, Artificial Sequence
  Description of Artificial Sequence: Synthetic oligonucleotide
cccacccguagcccugcuc

SEQ ID NO: 622530 - RNA, 19 nt, Artificial Sequence
  Description of Artificial Sequence: Synthetic oligonucleotide
caacuccggaguccccuuu

SEQ ID NO: 622531 - RNA, 19 nt, Artificial Sequence
  Description of Artificial Sequence: Synthetic oligonucleotide
cacacgcacguggcucaaa

SEQ ID NO: 622532 - RNA, 19 nt, Artificial Sequence
  Description of Artificial Sequence: Synthetic oligonucleotide
cugcaaggacacguauguu

SEQ ID NO: 622533 - RNA, 19 nt, Artificial Sequence
  Description of Artificial Sequence: Synthetic oligonucleotide
ccggaguccccuuuaucuu

SEQ ID NO: 622534 - RNA, 19 nt, Artificial Sequence
  Description of Artificial Sequence: Synthetic oligonucleotide
cugcccgaccaaugugcuu

SEQ ID NO: 622535 - RNA, 19 nt, Artificial Sequence
  Description of Artificial Sequence: Synthetic oligonucleotide
ggguacuaacugagggcuu

SEQ ID NO: 622536 - RNA, 19 nt, Artificial Sequence
  Description of Artificial Sequence: Synthetic oligonucleotide
gcggucuguacugcuuguu

SEQ ID NO: 622537 - RNA, 19 nt, Artificial Sequence
  Description of Artificial Sequence: Synthetic oligonucleotide
cgaggcggucuguacugcu

SEQ ID NO: 622538 - RNA, 19 nt, Artificial Sequence
  Description of Artificial Sequence: Synthetic oligonucleotide
aauggaacggaacuuuucc

SEQ ID NO: 622539 - RNA, 19 nt, Artificial Sequence
  Description of Artificial Sequence: Synthetic oligonucleotide
aggucauuaagcuuuaggc

SEQ ID NO: 622540 - RNA, 19 nt, Artificial Sequence
  Description of Artificial Sequence: Synthetic oligonucleotide
aguaauaagguacaagaag

SEQ ID NO: 622541 - RNA, 19 nt, Artificial Sequence
  Description of Artificial Sequence: Synthetic oligonucleotide
guaauaagguacaagaagg

SEQ ID NO: 622542 - RNA, 19 nt, Artificial Sequence
  Description of Artificial Sequence: Synthetic oligonucleotide
uggagauaagcaaugauug

SEQ ID NO: 622543 - RNA, 19 nt, Artificial Sequence
  Description of Artificial Sequence: Synthetic oligonucleotide
uaaucguuggaucagguca

SEQ ID NO: 622544 - RNA, 19 nt, Artificial Sequence
  Description of Artificial Sequence: Synthetic oligonucleotide
augugauuaauccacgaac

SEQ ID NO: 622545 - RNA, 19 nt, Artificial Sequence
  Description of Artificial Sequence: Synthetic oligonucleotide
auuacccuguagcagagcc

SEQ ID NO: 622546 - RNA, 19 nt, Artificial Sequence
  Description of Artificial Sequence: Synthetic oligonucleotide
uuugaguugggcuuguucc

SEQ ID NO: 622547 - RNA, 19 nt, Artificial Sequence
  Description of Artificial Sequence: Synthetic oligonucleotide
ugacacaucacccagguaa

SEQ ID NO: 622548 - RNA, 19 nt, Artificial Sequence
  Description of Artificial Sequence: Synthetic oligonucleotide
ggaacaguugcuuauaggg

SEQ ID NO: 622549 - RNA, 19 nt, Artificial Sequence
  Description of Artificial Sequence: Synthetic oligonucleotide
ucaaagaacccuuuggaca

SEQ ID NO: 622550 - RNA, 19 nt, Artificial Sequence
  Description of Artificial Sequence: Synthetic oligonucleotide
auguauucacggcagaugg

SEQ ID NO: 622551 - RNA, 19 nt, Artificial Sequence
  Description of Artificial Sequence: Synthetic oligonucleotide
gagugugugaaauaggcug

SEQ ID NO: 622552 - RNA, 19 nt, Artificial Sequence
  Description of Artificial Sequence: Synthetic oligonucleotide
gucauuaagcuuuaggccc

SEQ ID NO: 622553 - RNA, 19 nt, Artificial Sequence
  Description of Artificial Sequence: Synthetic oligonucleotide
uucaaaagaaccugccagg

SEQ ID NO: 622554 - RNA, 19 nt, Artificial Sequence
  Description of Artificial Sequence: Synthetic oligonucleotide
ugugauuaauccacgaacu

SEQ ID NO: 622555 - RNA, 19 nt, Artificial Sequence
  Description of Artificial Sequence: Synthetic oligonucleotide
aucaacuggaagcugagag

SEQ ID NO: 622556 - RNA, 19 nt, Artificial Sequence
  Description of Artificial Sequence: Synthetic oligonucleotide
ucaauaagggccaauuggu

SEQ ID NO: 622557 - RNA, 19 nt, Artificial Sequence
  Description of Artificial Sequence: Synthetic oligonucleotide
acagaugcgcuucugcugc

SEQ ID NO: 622558 - RNA, 19 nt, Artificial Sequence
  Description of Artificial Sequence: Synthetic oligonucleotide
uguagcagcugugagauag

SEQ ID NO: 622559 - RNA, 19 nt, Artificial Sequence
  Description of Artificial Sequence: Synthetic oligonucleotide
aagcuuuaggcccacagcu

SEQ ID NO: 622560 - RNA, 19 nt, Artificial Sequence
  Description of Artificial Sequence: Synthetic oligonucleotide
uuuacaaaaugcagggcca

SEQ ID NO: 622561 - RNA, 19 nt, Artificial Sequence
  Description of Artificial Sequence: Synthetic oligonucleotide
agcaaugauugacuggccc

SEQ ID NO: 622562 - RNA, 19 nt, Artificial Sequence
  Description of Artificial Sequence: Synthetic oligonucleotide
ugugagauaggccagggau

SEQ ID NO: 622563 - RNA, 19 nt, Artificial Sequence
  Description of Artificial Sequence: Synthetic oligonucleotide
aacuggauuacucccaccu

SEQ ID NO: 622564 - RNA, 19 nt, Artificial Sequence
  Description of Artificial Sequence: Synthetic oligonucleotide
uuaagcuuuaggcccacag

SEQ ID NO: 622565 - RNA, 19 nt, Artificial Sequence
  Description of Artificial Sequence: Synthetic oligonucleotide
uuuugguucgcugauagca

SEQ ID NO: 622566 - RNA, 19 nt, Artificial Sequence
  Description of Artificial Sequence: Synthetic oligonucleotide
uauuugaugugguugcuug

SEQ ID NO: 622567 - RNA, 19 nt, Artificial Sequence
  Description of Artificial Sequence: Synthetic oligonucleotide
aauguuuccgcaccuccag

SEQ ID NO: 622568 - RNA, 19 nt, Artificial Sequence
  Description of Artificial Sequence: Synthetic oligonucleotide
cuuauuguccacaacaaga

SEQ ID NO: 622569 - RNA, 19 nt, Artificial Sequence
  Description of Artificial Sequence: Synthetic oligonucleotide
gucuaggcaauauacauug

SEQ ID NO: 622570 - RNA, 19 nt, Artificial Sequence
  Description of Artificial Sequence: Synthetic oligonucleotide
uguuucaaaagaaccugcc

SEQ ID NO: 622571 - RNA, 19 nt, Artificial Sequence
  Description of Artificial Sequence: Synthetic oligonucleotide
gacauagaugggcaaaucc

SEQ ID NO: 622572 - RNA, 19 nt, Artificial Sequence
  Description of Artificial Sequence: Synthetic oligonucleotide
aagcuuggcauuaggaucg

SEQ ID NO: 622573 - RNA, 19 nt, Artificial Sequence
  Description of Artificial Sequence: Synthetic oligonucleotide
agagcaaucucaauguuuc

SEQ ID NO: 622574 - RNA, 19 nt, Artificial Sequence
  Description of Artificial Sequence: Synthetic oligonucleotide
ucgauuaggguaacuauac

SEQ ID NO: 622575 - RNA, 19 nt, Artificial Sequence
  Description of Artificial Sequence: Synthetic oligonucleotide
uuggcauuaggaucgaugu

SEQ ID NO: 622576 - RNA, 19 nt, Artificial Sequence
  Description of Artificial Sequence: Synthetic oligonucleotide
auuaggaucgauguccggg

SEQ ID NO: 622577 - RNA, 19 nt, Artificial Sequence
  Description of Artificial Sequence: Synthetic oligonucleotide
aacggaacuuuuccacagc

SEQ ID NO: 622578 - RNA, 19 nt, Artificial Sequence
  Description of Artificial Sequence: Synthetic oligonucleotide
ugauuaauccacgaacuug

SEQ ID NO: 622579 - RNA, 19 nt, Artificial Sequence
  Description of Artificial Sequence: Synthetic oligonucleotide
ucuugugacauagaugggc

SEQ ID NO: 622580 - RNA, 19 nt, Artificial Sequence
  Description of Artificial Sequence: Synthetic oligonucleotide
auucuuuagcccugccucc

SEQ ID NO: 622581 - RNA, 19 nt, Artificial Sequence
  Description of Artificial Sequence: Synthetic oligonucleotide
ucaucuaagccauguguag

SEQ ID NO: 622582 - RNA, 19 nt, Artificial Sequence
  Description of Artificial Sequence: Synthetic oligonucleotide
ucgggcauaugucuguagg

SEQ ID NO: 622583 - RNA, 19 nt, Artificial Sequence
  Description of Artificial Sequence: Synthetic oligonucleotide
acuaguuuggcguuccuca

SEQ ID NO: 622584 - RNA, 19 nt, Artificial Sequence
  Description of Artificial Sequence: Synthetic oligonucleotide
aauguauucacggcagaug

SEQ ID NO: 622585 - RNA, 19 nt, Artificial Sequence
  Description of Artificial Sequence: Synthetic oligonucleotide
aaaaugcagggccacuuca

SEQ ID NO: 622586 - RNA, 19 nt, Artificial Sequence
  Description of Artificial Sequence: Synthetic oligonucleotide
acccacaauguauucacgg

SEQ ID NO: 622587 - RNA, 19 nt, Artificial Sequence
  Description of Artificial Sequence: Synthetic oligonucleotide
gauuaauccacgaacuuga

SEQ ID NO: 622588 - RNA, 19 nt, Artificial Sequence
  Description of Artificial Sequence: Synthetic oligonucleotide
guugccaguaauaagguac

SEQ ID NO: 622589 - RNA, 19 nt, Artificial Sequence
  Description of Artificial Sequence: Synthetic oligonucleotide
ugugggguucuucucacag

SEQ ID NO: 622590 - RNA, 19 nt, Artificial Sequence
  Description of Artificial Sequence: Synthetic oligonucleotide
agggcguucugauaauggc

SEQ ID NO: 622591 - RNA, 19 nt, Artificial Sequence
  Description of Artificial Sequence: Synthetic oligonucleotide
uucuuaaggauucguacuc

SEQ ID NO: 622592 - RNA, 19 nt, Artificial Sequence
  Description of Artificial Sequence: Synthetic oligonucleotide
uaagcuuuaggcccacagc

SEQ ID NO: 622593 - RNA, 19 nt, Artificial Sequence
  Description of Artificial Sequence: Synthetic oligonucleotide
gagauaagcaaugauugac

SEQ ID NO: 622594 - RNA, 19 nt, Artificial Sequence
  Description of Artificial Sequence: Synthetic oligonucleotide
aguucggaugaucccaugg

SEQ ID NO: 622595 - RNA, 19 nt, Artificial Sequence
  Description of Artificial Sequence: Synthetic oligonucleotide
ugggguucuucucacaggc

SEQ ID NO: 622596 - RNA, 19 nt, Artificial Sequence
  Description of Artificial Sequence: Synthetic oligonucleotide
aggacugauccucagacca

SEQ ID NO: 622597 - RNA, 19 nt, Artificial Sequence
  Description of Artificial Sequence: Synthetic oligonucleotide
uauuguccacaacaagaag

SEQ ID NO: 622598 - RNA, 19 nt, Artificial Sequence
  Description of Artificial Sequence: Synthetic oligonucleotide
uaagccauguguagcagcu

SEQ ID NO: 622599 - RNA, 19 nt, Artificial Sequence
  Description of Artificial Sequence: Synthetic oligonucleotide
cuggauuacucccaccugg

SEQ ID NO: 622600 - RNA, 19 nt, Artificial Sequence
  Description of Artificial Sequence: Synthetic oligonucleotide
auuaggguaacuauacaug

SEQ ID NO: 622601 - RNA, 19 nt, Artificial Sequence
  Description of Artificial Sequence: Synthetic oligonucleotide
agugcuugauagguggugc

SEQ ID NO: 622602 - RNA, 19 nt, Artificial Sequence
  Description of Artificial Sequence: Synthetic oligonucleotide
uucaucuaagccaugugua

SEQ ID NO: 622603 - RNA, 19 nt, Artificial Sequence
  Description of Artificial Sequence: Synthetic oligonucleotide
uaucuccaugcacaaaccc

SEQ ID NO: 622604 - RNA, 19 nt, Artificial Sequence
  Description of Artificial Sequence: Synthetic oligonucleotide
ugggcaaauccagaguucg

SEQ ID NO: 622605 - RNA, 19 nt, Artificial Sequence
  Description of Artificial Sequence: Synthetic oligonucleotide
uggcacaccauucuuuagc

SEQ ID NO: 622606 - RNA, 19 nt, Artificial Sequence
  Description of Artificial Sequence: Synthetic oligonucleotide
gaacggaacuuuuccacag

SEQ ID NO: 622607 - RNA, 19 nt, Artificial Sequence
  Description of Artificial Sequence: Synthetic oligonucleotide
uaugucuguaggaacaguu

SEQ ID NO: 622608 - RNA, 19 nt, Artificial Sequence
  Description of Artificial Sequence: Synthetic oligonucleotide
uucgauuaggguaacuaua

SEQ ID NO: 622609 - RNA, 19 nt, Artificial Sequence
  Description of Artificial Sequence: Synthetic oligonucleotide
uuaaggauucguacucucu

SEQ ID NO: 622610 - RNA, 19 nt, Artificial Sequence
  Description of Artificial Sequence: Synthetic oligonucleotide
gauaggugcaggcggcugg

SEQ ID NO: 622611 - RNA, 19 nt, Artificial Sequence
  Description of Artificial Sequence: Synthetic oligonucleotide
ucugacacaucacccaggu

SEQ ID NO: 622612 - RNA, 19 nt, Artificial Sequence
  Description of Artificial Sequence: Synthetic oligonucleotide
ggucauuaagcuuuaggcc

SEQ ID NO: 622613 - RNA, 19 nt, Artificial Sequence
  Description of Artificial Sequence: Synthetic oligonucleotide
gaucccaugguccccagug

SEQ ID NO: 622614 - RNA, 19 nt, Artificial Sequence
  Description of Artificial Sequence: Synthetic oligonucleotide
aaggauucguacucucucu

SEQ ID NO: 622615 - RNA, 19 nt, Artificial Sequence
  Description of Artificial Sequence: Synthetic oligonucleotide
accguagugacucugcaga

SEQ ID NO: 622616 - RNA, 19 nt, Artificial Sequence
  Description of Artificial Sequence: Synthetic oligonucleotide
acaggaucuuccuagucug

SEQ ID NO: 622617 - RNA, 19 nt, Artificial Sequence
  Description of Artificial Sequence: Synthetic oligonucleotide
ucauuaagcuuuaggccca

SEQ ID NO: 622618 - RNA, 19 nt, Artificial Sequence
  Description of Artificial Sequence: Synthetic oligonucleotide
ucgcugauagcacauuucu

SEQ ID NO: 622619 - RNA, 19 nt, Artificial Sequence
  Description of Artificial Sequence: Synthetic oligonucleotide
ugagaguuauugcaccaga

SEQ ID NO: 622620 - RNA, 19 nt, Artificial Sequence
  Description of Artificial Sequence: Synthetic oligonucleotide
ucuacaaucuggugauuac

SEQ ID NO: 622621 - RNA, 19 nt, Artificial Sequence
  Description of Artificial Sequence: Synthetic oligonucleotide
cuugagcuugaagaaaagg

SEQ ID NO: 622622 - RNA, 19 nt, Artificial Sequence
  Description of Artificial Sequence: Synthetic oligonucleotide
uggugaguacucgaggacg

SEQ ID NO: 622623 - RNA, 19 nt, Artificial Sequence
  Description of Artificial Sequence: Synthetic oligonucleotide
gcugauagcacauuucuac

SEQ ID NO: 622624 - RNA, 19 nt, Artificial Sequence
  Description of Artificial Sequence: Synthetic oligonucleotide
auugguauccaguggcaug

SEQ ID NO: 622625 - RNA, 19 nt, Artificial Sequence
  Description of Artificial Sequence: Synthetic oligonucleotide
uuucgauuaggguaacuau

SEQ ID NO: 622626 - RNA, 19 nt, Artificial Sequence
  Description of Artificial Sequence: Synthetic oligonucleotide
uggaacggaacuuuuccac

SEQ ID NO: 622627 - RNA, 19 nt, Artificial Sequence
  Description of Artificial Sequence: Synthetic oligonucleotide
ucaggacuaacccuucuuc

SEQ ID NO: 622628 - RNA, 19 nt, Artificial Sequence
  Description of Artificial Sequence: Synthetic oligonucleotide
gaacccuuuggacacaguc

SEQ ID NO: 622629 - RNA, 19 nt, Artificial Sequence
  Description of Artificial Sequence: Synthetic oligonucleotide
ucguaacugagcuggcagg

SEQ ID NO: 622630 - RNA, 19 nt, Artificial Sequence
  Description of Artificial Sequence: Synthetic oligonucleotide
uuugguucgcugauagcac

SEQ ID NO: 622631 - RNA, 19 nt, Artificial Sequence
  Description of Artificial Sequence: Synthetic oligonucleotide
ucuugcgaaguuucucuag

SEQ ID NO: 622632 - RNA, 19 nt, Artificial Sequence
  Description of Artificial Sequence: Synthetic oligonucleotide
ucuagguugccaguaauaa

SEQ ID NO: 622633 - RNA, 19 nt, Artificial Sequence
  Description of Artificial Sequence: Synthetic oligonucleotide
gauucguacucucucugac

SEQ ID NO: 622634 - RNA, 19 nt, Artificial Sequence
  Description of Artificial Sequence: Synthetic oligonucleotide
uuaggaucgauguccggga

SEQ ID NO: 622635 - RNA, 19 nt, Artificial Sequence
  Description of Artificial Sequence: Synthetic oligonucleotide
uugccaguaauaagguaca

SEQ ID NO: 622636 - RNA, 19 nt, Artificial Sequence
  Description of Artificial Sequence: Synthetic oligonucleotide
cauaugcacaggcugcagg

SEQ ID NO: 622637 - RNA, 19 nt, Artificial Sequence
  Description of Artificial Sequence: Synthetic oligonucleotide
ugcuuauuguccacaacaa

SEQ ID NO: 622638 - RNA, 19 nt, Artificial Sequence
  Description of Artificial Sequence: Synthetic oligonucleotide
ugauagcacauuucuacaa

SEQ ID NO: 622639 - RNA, 19 nt, Artificial Sequence
  Description of Artificial Sequence: Synthetic oligonucleotide
gauuaggguaacuauacau

SEQ ID NO: 622640 - RNA, 19 nt, Artificial Sequence
  Description of Artificial Sequence: Synthetic oligonucleotide
cuuuccacgguagaugggc

SEQ ID NO: 622641 - RNA, 19 nt, Artificial Sequence
  Description of Artificial Sequence: Synthetic oligonucleotide
ugguauagauaaacacccc

SEQ ID NO: 622642 - RNA, 19 nt, Artificial Sequence
  Description of Artificial Sequence: Synthetic oligonucleotide
acuuagcggaacugaagag

SEQ ID NO: 622643 - RNA, 19 nt, Artificial Sequence
  Description of Artificial Sequence: Synthetic oligonucleotide
caaucuggugauuacccug

SEQ ID NO: 622644 - RNA, 19 nt, Artificial Sequence
  Description of Artificial Sequence: Synthetic oligonucleotide
aagggcguucugauaaugg

SEQ ID NO: 622645 - RNA, 19 nt, Artificial Sequence
  Description of Artificial Sequence: Synthetic oligonucleotide
agcgcaaaugucgaagggg

SEQ ID NO: 622646 - RNA, 19 nt, Artificial Sequence
  Description of Artificial Sequence: Synthetic oligonucleotide
cuagguugccaguaauaag

SEQ ID NO: 622647 - RNA, 19 nt, Artificial Sequence
  Description of Artificial Sequence: Synthetic oligonucleotide
ugauuacccuguagcagag

SEQ ID NO: 622648 - RNA, 19 nt, Artificial Sequence
  Description of Artificial Sequence: Synthetic oligonucleotide
ggcauuaggaucgaugucc

SEQ ID NO: 622649 - RNA, 19 nt, Artificial Sequence
  Description of Artificial Sequence: Synthetic oligonucleotide
gucguaacugagcuggcag

SEQ ID NO: 622650 - RNA, 19 nt, Artificial Sequence
  Description of Artificial Sequence: Synthetic oligonucleotide
aggacuaacccuucuucug

SEQ ID NO: 622651 - RNA, 19 nt, Artificial Sequence
  Description of Artificial Sequence: Synthetic oligonucleotide
gugauuacccuguagcaga

SEQ ID NO: 622652 - RNA, 19 nt, Artificial Sequence
  Description of Artificial Sequence: Synthetic oligonucleotide
caauggugaguacucgagg

SEQ ID NO: 622653 - RNA, 19 nt, Artificial Sequence
  Description of Artificial Sequence: Synthetic oligonucleotide
aguuuggcguuccucacca

SEQ ID NO: 622654 - RNA, 19 nt, Artificial Sequence
  Description of Artificial Sequence: Synthetic oligonucleotide
uugguauccaguggcauga

SEQ ID NO: 622655 - RNA, 19 nt, Artificial Sequence
  Description of Artificial Sequence: Synthetic oligonucleotide
cuaucuccaugcacaaacc

SEQ ID NO: 622656 - RNA, 19 nt, Artificial Sequence
  Description of Artificial Sequence: Synthetic oligonucleotide
guauucacggcagauggug

SEQ ID NO: 622657 - RNA, 19 nt, Artificial Sequence
  Description of Artificial Sequence: Synthetic oligonucleotide
acaguugcuuauaggggcc

SEQ ID NO: 622658 - RNA, 19 nt, Artificial Sequence
  Description of Artificial Sequence: Synthetic oligonucleotide
uauucacggcagaugguga

SEQ ID NO: 622659 - RNA, 19 nt, Artificial Sequence
  Description of Artificial Sequence: Synthetic oligonucleotide
cuaagccauguguagcagc

SEQ ID NO: 622660 - RNA, 19 nt, Artificial Sequence
  Description of Artificial Sequence: Synthetic oligonucleotide
ugucuaggcaauauacauu

SEQ ID NO: 622661 - RNA, 19 nt, Artificial Sequence
  Description of Artificial Sequence: Synthetic oligonucleotide
ccaauugguauccaguggc

SEQ ID NO: 622662 - RNA, 19 nt, Artificial Sequence
  Description of Artificial Sequence: Synthetic oligonucleotide
ggcaauauacauuguugcc

SEQ ID NO: 622663 - RNA, 19 nt, Artificial Sequence
  Description of Artificial Sequence: Synthetic oligonucleotide
ugcaguaccucaucauacu

SEQ ID NO: 622664 - RNA, 19 nt, Artificial Sequence
  Description of Artificial Sequence: Synthetic oligonucleotide
cuaacugcaguuccgcauc

SEQ ID NO: 622665 - RNA, 19 nt, Artificial Sequence
  Description of Artificial Sequence: Synthetic oligonucleotide
gguauagauaaacacccca

SEQ ID NO: 622666 - RNA, 19 nt, Artificial Sequence
  Description of Artificial Sequence: Synthetic oligonucleotide
ggacuaacccuucuucugg

SEQ ID NO: 622667 - RNA, 19 nt, Artificial Sequence
  Description of Artificial Sequence: Synthetic oligonucleotide
acgacauucccugucuagg

SEQ ID NO: 622668 - RNA, 19 nt, Artificial Sequence
  Description of Artificial Sequence: Synthetic oligonucleotide
cuugauagguggugcggcc

SEQ ID NO: 622669 - RNA, 19 nt, Artificial Sequence
  Description of Artificial Sequence: Synthetic oligonucleotide
cuacaaucuggugauuacc

SEQ ID NO: 622670 - RNA, 19 nt, Artificial Sequence
  Description of Artificial Sequence: Synthetic oligonucleotide
auaggggccaaacuggauu

SEQ ID NO: 622671 - RNA, 19 nt, Artificial Sequence
  Description of Artificial Sequence: Synthetic oligonucleotide
gcaugauaggugcaggcgg

SEQ ID NO: 622672 - RNA, 19 nt, Artificial Sequence
  Description of Artificial Sequence: Synthetic oligonucleotide
agaguuauugcaccagauu

SEQ ID NO: 622673 - RNA, 19 nt, Artificial Sequence
  Description of Artificial Sequence: Synthetic oligonucleotide
gaauuugaacuucaauggu

SEQ ID NO: 622674 - RNA, 19 nt, Artificial Sequence
  Description of Artificial Sequence: Synthetic oligonucleotide
acugagcaaaauggaacgg

SEQ ID NO: 622675 - RNA, 19 nt, Artificial Sequence
  Description of Artificial Sequence: Synthetic oligonucleotide
ggcuuuccacgguagaugg

SEQ ID NO: 622676 - RNA, 19 nt, Artificial Sequence
  Description of Artificial Sequence: Synthetic oligonucleotide
agagcuaggcugaagcgag

SEQ ID NO: 622677 - RNA, 19 nt, Artificial Sequence
  Description of Artificial Sequence: Synthetic oligonucleotide
agacaggaucuuccuaguc

SEQ ID NO: 622678 - RNA, 19 nt, Artificial Sequence
  Description of Artificial Sequence: Synthetic oligonucleotide
guggugacggcauauuuga

SEQ ID NO: 622679 - RNA, 19 nt, Artificial Sequence
  Description of Artificial Sequence: Synthetic oligonucleotide
uuuccacgguagaugggcc

SEQ ID NO: 622680 - RNA, 19 nt, Artificial Sequence
  Description of Artificial Sequence: Synthetic oligonucleotide
ugcuugauagguggugcgg

SEQ ID NO: 622681 - RNA, 19 nt, Artificial Sequence
  Description of Artificial Sequence: Synthetic oligonucleotide
aacccuuuggacacaguca

SEQ ID NO: 622682 - RNA, 19 nt, Artificial Sequence
  Description of Artificial Sequence: Synthetic oligonucleotide
uggauuacucccaccuggu

SEQ ID NO: 622683 - RNA, 19 nt, Artificial Sequence
  Description of Artificial Sequence: Synthetic oligonucleotide
ugcccuucacucuugugac

SEQ ID NO: 622684 - RNA, 19 nt, Artificial Sequence
  Description of Artificial Sequence: Synthetic oligonucleotide
aggauucguacucucucug

SEQ ID NO: 622685 - RNA, 19 nt, Artificial Sequence
  Description of Artificial Sequence: Synthetic oligonucleotide
uugguucgcugauagcaca

SEQ ID NO: 622686 - RNA, 19 nt, Artificial Sequence
  Description of Artificial Sequence: Synthetic oligonucleotide
uucuacaucccagccaccu

SEQ ID NO: 622687 - RNA, 19 nt, Artificial Sequence
  Description of Artificial Sequence: Synthetic oligonucleotide
auggaacggaacuuuucca

SEQ ID NO: 622688 - RNA, 19 nt, Artificial Sequence
  Description of Artificial Sequence: Synthetic oligonucleotide
agccauguguagcagcugu

SEQ ID NO: 622689 - RNA, 19 nt, Artificial Sequence
  Description of Artificial Sequence: Synthetic oligonucleotide
aagaacccuuuggacacag

SEQ ID NO: 622690 - RNA, 19 nt, Artificial Sequence
  Description of Artificial Sequence: Synthetic oligonucleotide
ugcagauuugccccuugaa

SEQ ID NO: 622691 - RNA, 19 nt, Artificial Sequence
  Description of Artificial Sequence: Synthetic oligonucleotide
uuccuagucuguugggcca

SEQ ID NO: 622692 - RNA, 19 nt, Artificial Sequence
  Description of Artificial Sequence: Synthetic oligonucleotide
aguggugacggcauauuug

SEQ ID NO: 622693 - RNA, 19 nt, Artificial Sequence
  Description of Artificial Sequence: Synthetic oligonucleotide
ucuagcaagcgccgggcaa

SEQ ID NO: 622694 - RNA, 19 nt, Artificial Sequence
  Description of Artificial Sequence: Synthetic oligonucleotide
acuaacccuucuucuggag

SEQ ID NO: 622695 - RNA, 19 nt, Artificial Sequence
  Description of Artificial Sequence: Synthetic oligonucleotide
ggaugugaucaacuggaag

SEQ ID NO: 622696 - RNA, 19 nt, Artificial Sequence
  Description of Artificial Sequence: Synthetic oligonucleotide
aucuuccuagucuguuggg

SEQ ID NO: 622697 - RNA, 19 nt, Artificial Sequence
  Description of Artificial Sequence: Synthetic oligonucleotide
ugggccgguaagaugcagc

SEQ ID NO: 622698 - RNA, 19 nt, Artificial Sequence
  Description of Artificial Sequence: Synthetic oligonucleotide
ucugaaggacaggauguga

SEQ ID NO: 622699 - RNA, 19 nt, Artificial Sequence
  Description of Artificial Sequence: Synthetic oligonucleotide
ucuaagccauguguagcag

SEQ ID NO: 622700 - RNA, 19 nt, Artificial Sequence
  Description of Artificial Sequence: Synthetic oligonucleotide
guucuuaaggauucguacu

SEQ ID NO: 622701 - RNA, 19 nt, Artificial Sequence
  Description of Artificial Sequence: Synthetic oligonucleotide
accauucuuuagcccugcc

SEQ ID NO: 622702 - RNA, 19 nt, Artificial Sequence
  Description of Artificial Sequence: Synthetic oligonucleotide
gugacggcauauuugaugu

SEQ ID NO: 622703 - RNA, 19 nt, Artificial Sequence
  Description of Artificial Sequence: Synthetic oligonucleotide
ucaguaccaacagugucaa

SEQ ID NO: 622704 - RNA, 19 nt, Artificial Sequence
  Description of Artificial Sequence: Synthetic oligonucleotide
guaaucguuggaucagguc

SEQ ID NO: 622705 - RNA, 19 nt, Artificial Sequence
  Description of Artificial Sequence: Synthetic oligonucleotide
gugcuugauagguggugcg

SEQ ID NO: 622706 - RNA, 19 nt, Artificial Sequence
  Description of Artificial Sequence: Synthetic oligonucleotide
uccacgguagaugggccgg

SEQ ID NO: 622707 - RNA, 19 nt, Artificial Sequence
  Description of Artificial Sequence: Synthetic oligonucleotide
aaucguuggaucaggucau

SEQ ID NO: 622708 - RNA, 19 nt, Artificial Sequence
  Description of Artificial Sequence: Synthetic oligonucleotide
cacaacaagaagaggcaca

SEQ ID NO: 622709 - RNA, 19 nt, Artificial Sequence
  Description of Artificial Sequence: Synthetic oligonucleotide
ugaguacucgaggacgaca

SEQ ID NO: 622710 - RNA, 19 nt, Artificial Sequence
  Description of Artificial Sequence: Synthetic oligonucleotide
agcggaacugaagaggacu

SEQ ID NO: 622711 - RNA, 19 nt, Artificial Sequence
  Description of Artificial Sequence: Synthetic oligonucleotide
ucucuagguugccaguaau

SEQ ID NO: 622712 - RNA, 19 nt, Artificial Sequence
  Description of Artificial Sequence: Synthetic oligonucleotide
aacccacaauguauucacg

SEQ ID NO: 622713 - RNA, 19 nt, Artificial Sequence
  Description of Artificial Sequence: Synthetic oligonucleotide
ggugauuacccuguagcag

SEQ ID NO: 622714 - RNA, 19 nt, Artificial Sequence
  Description of Artificial Sequence: Synthetic oligonucleotide
ucuaggcaauauacauugu

SEQ ID NO: 622715 - RNA, 19 nt, Artificial Sequence
  Description of Artificial Sequence: Synthetic oligonucleotide
aucgauguccgggauuguc

SEQ ID NO: 622716 - RNA, 19 nt, Artificial Sequence
  Description of Artificial Sequence: Synthetic oligonucleotide
gcuuauuguccacaacaag

SEQ ID NO: 622717 - RNA, 19 nt, Artificial Sequence
  Description of Artificial Sequence: Synthetic oligonucleotide
acaauguauucacggcaga

SEQ ID NO: 622718 - RNA, 19 nt, Artificial Sequence
  Description of Artificial Sequence: Synthetic oligonucleotide
gaugcagcgcaaaugucga

SEQ ID NO: 622719 - RNA, 19 nt, Artificial Sequence
  Description of Artificial Sequence: Synthetic oligonucleotide
cuaguuuggcguuccucac

SEQ ID NO: 622720 - RNA, 19 nt, Artificial Sequence
  Description of Artificial Sequence: Synthetic oligonucleotide
aggacgacauucccugucu

SEQ ID NO: 622721 - RNA, 19 nt, Artificial Sequence
  Description of Artificial Sequence: Synthetic oligonucleotide
ugcagguuugaguguguga

SEQ ID NO: 622722 - RNA, 19 nt, Artificial Sequence
  Description of Artificial Sequence: Synthetic oligonucleotide
aagggguugugcaugucgu

SEQ ID NO: 622723 - RNA, 19 nt, Artificial Sequence
  Description of Artificial Sequence: Synthetic oligonucleotide
caugaagaagccgcauggc

SEQ ID NO: 622724 - RNA, 19 nt, Artificial Sequence
  Description of Artificial Sequence: Synthetic oligonucleotide
caaugauugacuggcccac

SEQ ID NO: 622725 - RNA, 19 nt, Artificial Sequence
  Description of Artificial Sequence: Synthetic oligonucleotide
ugagggccaacuugaauuu

SEQ ID NO: 622726 - RNA, 19 nt, Artificial Sequence
  Description of Artificial Sequence: Synthetic oligonucleotide
gaagaagccgcauggcugu

SEQ ID NO: 622727 - RNA, 19 nt, Artificial Sequence
  Description of Artificial Sequence: Synthetic oligonucleotide
aagcgaguuuucucauccu

SEQ ID NO: 622728 - RNA, 19 nt, Artificial Sequence
  Description of Artificial Sequence: Synthetic oligonucleotide
cuuuaggcccacagcuggc

SEQ ID NO: 622729 - RNA, 19 nt, Artificial Sequence
  Description of Artificial Sequence: Synthetic oligonucleotide
gcagcgcaaaugucgaagg

SEQ ID NO: 622730 - RNA, 19 nt, Artificial Sequence
  Description of Artificial Sequence: Synthetic oligonucleotide
ggccaauugguauccagug

SEQ ID NO: 622731 - RNA, 19 nt, Artificial Sequence
  Description of Artificial Sequence: Synthetic oligonucleotide
ucacggcagauggugauga

SEQ ID NO: 622732 - RNA, 19 nt, Artificial Sequence
  Description of Artificial Sequence: Synthetic oligonucleotide
cauuaggaucgauguccgg

SEQ ID NO: 622733 - RNA, 19 nt, Artificial Sequence
  Description of Artificial Sequence: Synthetic oligonucleotide
guuucgauuaggguaacua

SEQ ID NO: 622734 - RNA, 19 nt, Artificial Sequence
  Description of Artificial Sequence: Synthetic oligonucleotide
guggacacuucuccacggg

SEQ ID NO: 622735 - RNA, 19 nt, Artificial Sequence
  Description of Artificial Sequence: Synthetic oligonucleotide
auaggccagggauuucugu

SEQ ID NO: 622736 - RNA, 19 nt, Artificial Sequence
  Description of Artificial Sequence: Synthetic oligonucleotide
guucugauaauggccacuc

SEQ ID NO: 622737 - RNA, 19 nt, Artificial Sequence
  Description of Artificial Sequence: Synthetic oligonucleotide
gccaauugguauccagugg

SEQ ID NO: 622738 - RNA, 19 nt, Artificial Sequence
  Description of Artificial Sequence: Synthetic oligonucleotide
aaugauugacuggcccacu

SEQ ID NO: 622739 - RNA, 19 nt, Artificial Sequence
  Description of Artificial Sequence: Synthetic oligonucleotide
guacucgaggacgacauuc

SEQ ID NO: 622740 - RNA, 19 nt, Artificial Sequence
  Description of Artificial Sequence: Synthetic oligonucleotide
gaagccgcauggcuguuuc

SEQ ID NO: 622741 - RNA, 19 nt, Artificial Sequence
  Description of Artificial Sequence: Synthetic oligonucleotide
cucuugugacauagauggg

SEQ ID NO: 622742 - RNA, 19 nt, Artificial Sequence
  Description of Artificial Sequence: Synthetic oligonucleotide
uguccgcaacaccaggauc

SEQ ID NO: 622743 - RNA, 19 nt, Artificial Sequence
  Description of Artificial Sequence: Synthetic oligonucleotide
guccgcaacaccaggauca

SEQ ID NO: 622744 - RNA, 19 nt, Artificial Sequence
  Description of Artificial Sequence: Synthetic oligonucleotide
ugauagguggugcggccuc

SEQ ID NO: 622745 - RNA, 19 nt, Artificial Sequence
  Description of Artificial Sequence: Synthetic oligonucleotide
uauaggggccaaacuggau

SEQ ID NO: 622746 - RNA, 19 nt, Artificial Sequence
  Description of Artificial Sequence: Synthetic oligonucleotide
gauugacuggcccacuagu

SEQ ID NO: 622747 - RNA, 19 nt, Artificial Sequence
  Description of Artificial Sequence: Synthetic oligonucleotide
ggaucgauguccgggauug

SEQ ID NO: 622748 - RNA, 19 nt, Artificial Sequence
  Description of Artificial Sequence: Synthetic oligonucleotide
guuuccgcaccuccagagc

SEQ ID NO: 622749 - RNA, 19 nt, Artificial Sequence
  Description of Artificial Sequence: Synthetic oligonucleotide
uucuagcaagcgccgggca

SEQ ID NO: 622750 - RNA, 19 nt, Artificial Sequence
  Description of Artificial Sequence: Synthetic oligonucleotide
gcaaaugucgaagggguug

SEQ ID NO: 622751 - RNA, 19 nt, Artificial Sequence
  Description of Artificial Sequence: Synthetic oligonucleotide
ccuuuagacucucagcuuc

SEQ ID NO: 622752 - RNA, 19 nt, Artificial Sequence
  Description of Artificial Sequence: Synthetic oligonucleotide
gacuaacccuucuucugga

SEQ ID NO: 622753 - RNA, 19 nt, Artificial Sequence
  Description of Artificial Sequence: Synthetic oligonucleotide
cuggagauaagcaaugauu

SEQ ID NO: 622754 - RNA, 19 nt, Artificial Sequence
  Description of Artificial Sequence: Synthetic oligonucleotide
aagcgccgggcaaaugugg

SEQ ID NO: 622755 - RNA, 19 nt, Artificial Sequence
  Description of Artificial Sequence: Synthetic oligonucleotide
guaccaacagugucaaugu

SEQ ID NO: 622756 - RNA, 19 nt, Artificial Sequence
  Description of Artificial Sequence: Synthetic oligonucleotide
cagauuugaguugggcuug

SEQ ID NO: 622757 - RNA, 19 nt, Artificial Sequence
  Description of Artificial Sequence: Synthetic oligonucleotide
ggagauaagcaaugauuga

SEQ ID NO: 622758 - RNA, 19 nt, Artificial Sequence
  Description of Artificial Sequence: Synthetic oligonucleotide
gacuggcccacuaguuugg

SEQ ID NO: 622759 - RNA, 19 nt, Artificial Sequence
  Description of Artificial Sequence: Synthetic oligonucleotide
cuaacccuucuucuggaga

SEQ ID NO: 622760 - RNA, 19 nt, Artificial Sequence
  Description of Artificial Sequence: Synthetic oligonucleotide
guugugcaugucguaacug

SEQ ID NO: 622761 - RNA, 19 nt, Artificial Sequence
  Description of Artificial Sequence: Synthetic oligonucleotide
caccguagugacucugcag

SEQ ID NO: 622762 - RNA, 19 nt, Artificial Sequence
  Description of Artificial Sequence: Synthetic oligonucleotide
cccugucuaggcaauauac

SEQ ID NO: 622763 - RNA, 19 nt, Artificial Sequence
  Description of Artificial Sequence: Synthetic oligonucleotide
caaucucaauguuuccgca

SEQ ID NO: 622764 - RNA, 19 nt, Artificial Sequence
  Description of Artificial Sequence: Synthetic oligonucleotide
ugucgaagggguugugcau

SEQ ID NO: 622765 - RNA, 19 nt, Artificial Sequence
  Description of Artificial Sequence: Synthetic oligonucleotide
cccacaauguauucacggc

SEQ ID NO: 622766 - RNA, 19 nt, Artificial Sequence
  Description of Artificial Sequence: Synthetic oligonucleotide
uguugcccuucacucuugu

SEQ ID NO: 622767 - RNA, 19 nt, Artificial Sequence
  Description of Artificial Sequence: Synthetic oligonucleotide
caagcgccgggcaaaugug

SEQ ID NO: 622768 - RNA, 19 nt, Artificial Sequence
  Description of Artificial Sequence: Synthetic oligonucleotide
ugguucgcugauagcacau

SEQ ID NO: 622769 - RNA, 19 nt, Artificial Sequence
  Description of Artificial Sequence: Synthetic oligonucleotide
cugucuaggcaauauacau

SEQ ID NO: 622770 - RNA, 19 nt, Artificial Sequence
  Description of Artificial Sequence: Synthetic oligonucleotide
uugauagguggugcggccu

SEQ ID NO: 622771 - RNA, 19 nt, Artificial Sequence
  Description of Artificial Sequence: Synthetic oligonucleotide
ugacauagaugggcaaauc

SEQ ID NO: 622772 - RNA, 19 nt, Artificial Sequence
  Description of Artificial Sequence: Synthetic oligonucleotide
ugauaggugcaggcggcug

SEQ ID NO: 622773 - RNA, 19 nt, Artificial Sequence
  Description of Artificial Sequence: Synthetic oligonucleotide
augugguugcuugugguau

SEQ ID NO: 622774 - RNA, 19 nt, Artificial Sequence
  Description of Artificial Sequence: Synthetic oligonucleotide
guucuagcaagcgccgggc

SEQ ID NO: 622775 - RNA, 19 nt, Artificial Sequence
  Description of Artificial Sequence: Synthetic oligonucleotide
aaagaacccuuuggacaca

SEQ ID NO: 622776 - RNA, 19 nt, Artificial Sequence
  Description of Artificial Sequence: Synthetic oligonucleotide
caccagauuugaguugggc

SEQ ID NO: 622777 - RNA, 19 nt, Artificial Sequence
  Description of Artificial Sequence: Synthetic oligonucleotide
ugugguugcuugugguaua

SEQ ID NO: 622778 - RNA, 19 nt, Artificial Sequence
  Description of Artificial Sequence: Synthetic oligonucleotide
aaaugucgaagggguugug

SEQ ID NO: 622779 - RNA, 19 nt, Artificial Sequence
  Description of Artificial Sequence: Synthetic oligonucleotide
augauugacuggcccacua

SEQ ID NO: 622780 - RNA, 19 nt, Artificial Sequence
  Description of Artificial Sequence: Synthetic oligonucleotide
ugacggcauauuugaugug

SEQ ID NO: 622781 - RNA, 19 nt, Artificial Sequence
  Description of Artificial Sequence: Synthetic oligonucleotide
ugucccuugccaagagcau

SEQ ID NO: 622782 - RNA, 19 nt, Artificial Sequence
  Description of Artificial Sequence: Synthetic oligonucleotide
gcauuaggaucgauguccg

SEQ ID NO: 622783 - RNA, 19 nt, Artificial Sequence
  Description of Artificial Sequence: Synthetic oligonucleotide
ggcauagcaggccccacug

SEQ ID NO: 622784 - RNA, 19 nt, Artificial Sequence
  Description of Artificial Sequence: Synthetic oligonucleotide
ucccugucuaggcaauaua

SEQ ID NO: 622785 - RNA, 19 nt, Artificial Sequence
  Description of Artificial Sequence: Synthetic oligonucleotide
caauaagggccaauuggua

SEQ ID NO: 622786 - RNA, 19 nt, Artificial Sequence
  Description of Artificial Sequence: Synthetic oligonucleotide
uucggaucucagcaaucuu

SEQ ID NO: 622787 - RNA, 19 nt, Artificial Sequence
  Description of Artificial Sequence: Synthetic oligonucleotide
gugguugcuugugguauag

SEQ ID NO: 622788 - RNA, 19 nt, Artificial Sequence
  Description of Artificial Sequence: Synthetic oligonucleotide
gugugugaaauaggcugcc

SEQ ID NO: 622789 - RNA, 19 nt, Artificial Sequence
  Description of Artificial Sequence: Synthetic oligonucleotide
auauuugaugugguugcuu

SEQ ID NO: 622790 - RNA, 19 nt, Artificial Sequence
  Description of Artificial Sequence: Synthetic oligonucleotide
ccucagaccaaucacaucu

SEQ ID NO: 622791 - RNA, 19 nt, Artificial Sequence
  Description of Artificial Sequence: Synthetic oligonucleotide
gauuacccuguagcagagc

SEQ ID NO: 622792 - RNA, 19 nt, Artificial Sequence
  Description of Artificial Sequence: Synthetic oligonucleotide
gucaccguagugacucugc

SEQ ID NO: 622793 - RNA, 19 nt, Artificial Sequence
  Description of Artificial Sequence: Synthetic oligonucleotide
aucuugcgaaguuucucua

SEQ ID NO: 622794 - RNA, 19 nt, Artificial Sequence
  Description of Artificial Sequence: Synthetic oligonucleotide
uaggaucgauguccgggau

SEQ ID NO: 622795 - RNA, 19 nt, Artificial Sequence
  Description of Artificial Sequence: Synthetic oligonucleotide
ggguaacuauacauggaug

SEQ ID NO: 622796 - RNA, 19 nt, Artificial Sequence
  Description of Artificial Sequence: Synthetic oligonucleotide
ggcguucugauaauggcca

SEQ ID NO: 622797 - RNA, 19 nt, Artificial Sequence
  Description of Artificial Sequence: Synthetic oligonucleotide
cucgggcauaugucuguag

SEQ ID NO: 622798 - RNA, 19 nt, Artificial Sequence
  Description of Artificial Sequence: Synthetic oligonucleotide
ccaguuucgauuaggguaa

SEQ ID NO: 622799 - RNA, 19 nt, Artificial Sequence
  Description of Artificial Sequence: Synthetic oligonucleotide
augucguaacugagcuggc

SEQ ID NO: 622800 - RNA, 19 nt, Artificial Sequence
  Description of Artificial Sequence: Synthetic oligonucleotide
gguggugcggccucgggca

SEQ ID NO: 622801 - RNA, 19 nt, Artificial Sequence
  Description of Artificial Sequence: Synthetic oligonucleotide
agguugccaguaauaaggu

SEQ ID NO: 622802 - RNA, 19 nt, Artificial Sequence
  Description of Artificial Sequence: Synthetic oligonucleotide
ggagacuuagcggaacuga

SEQ ID NO: 622803 - RNA, 19 nt, Artificial Sequence
  Description of Artificial Sequence: Synthetic oligonucleotide
auugacuggcccacuaguu

SEQ ID NO: 622804 - RNA, 19 nt, Artificial Sequence
  Description of Artificial Sequence: Synthetic oligonucleotide
cucuagguugccaguaaua

SEQ ID NO: 622805 - RNA, 19 nt, Artificial Sequence
  Description of Artificial Sequence: Synthetic oligonucleotide
cagugcuugauagguggug

SEQ ID NO: 622806 - RNA, 19 nt, Artificial Sequence
  Description of Artificial Sequence: Synthetic oligonucleotide
gcugagaguuauugcacca

SEQ ID NO: 622807 - RNA, 19 nt, Artificial Sequence
  Description of Artificial Sequence: Synthetic oligonucleotide
cuugaaggaaggagacuua

SEQ ID NO: 622808 - RNA, 19 nt, Artificial Sequence
  Description of Artificial Sequence: Synthetic oligonucleotide
ugaucccaugguccccagu

SEQ ID NO: 622809 - RNA, 19 nt, Artificial Sequence
  Description of Artificial Sequence: Synthetic oligonucleotide
auagguggugcggccucgg

SEQ ID NO: 622810 - RNA, 19 nt, Artificial Sequence
  Description of Artificial Sequence: Synthetic oligonucleotide
aacugcaguuccgcauccu

SEQ ID NO: 622811 - RNA, 19 nt, Artificial Sequence
  Description of Artificial Sequence: Synthetic oligonucleotide
gagggccaacuugaauuug

SEQ ID NO: 622812 - RNA, 19 nt, Artificial Sequence
  Description of Artificial Sequence: Synthetic oligonucleotide
aggaucgauguccgggauu

SEQ ID NO: 622813 - RNA, 19 nt, Artificial Sequence
  Description of Artificial Sequence: Synthetic oligonucleotide
aagccgcauggcuguuuca

SEQ ID NO: 622814 - RNA, 19 nt, Artificial Sequence
  Description of Artificial Sequence: Synthetic oligonucleotide
ggauucguacucucucuga

SEQ ID NO: 622815 - RNA, 19 nt, Artificial Sequence
  Description of Artificial Sequence: Synthetic oligonucleotide
uccuagucuguugggccac

SEQ ID NO: 622816 - RNA, 19 nt, Artificial Sequence
  Description of Artificial Sequence: Synthetic oligonucleotide
ggcguuccucaccaugugc

SEQ ID NO: 622817 - RNA, 19 nt, Artificial Sequence
  Description of Artificial Sequence: Synthetic oligonucleotide
auuaauccacgaacuugaa

SEQ ID NO: 622818 - RNA, 19 nt, Artificial Sequence
  Description of Artificial Sequence: Synthetic oligonucleotide
uggugacggcauauuugau

SEQ ID NO: 622819 - RNA, 19 nt, Artificial Sequence
  Description of Artificial Sequence: Synthetic oligonucleotide
gguugcuugugguauagau

SEQ ID NO: 622820 - RNA, 19 nt, Artificial Sequence
  Description of Artificial Sequence: Synthetic oligonucleotide
acgguagaugggccgguaa

SEQ ID NO: 622821 - RNA, 19 nt, Artificial Sequence
  Description of Artificial Sequence: Synthetic oligonucleotide
ggguugugcaugucguaac

SEQ ID NO: 622822 - RNA, 19 nt, Artificial Sequence
  Description of Artificial Sequence: Synthetic oligonucleotide
gaguacucgaggacgacau

SEQ ID NO: 622823 - RNA, 19 nt, Artificial Sequence
  Description of Artificial Sequence: Synthetic oligonucleotide
ccugucuaggcaauauaca

SEQ ID NO: 622824 - RNA, 19 nt, Artificial Sequence
  Description of Artificial Sequence: Synthetic oligonucleotide
caggacuaacccuucuucu

SEQ ID NO: 622825 - RNA, 19 nt, Artificial Sequence
  Description of Artificial Sequence: Synthetic oligonucleotide
gugauuaauccacgaacuu

SEQ ID NO: 622826 - RNA, 19 nt, Artificial Sequence
  Description of Artificial Sequence: Synthetic oligonucleotide
cauuaagcuuuaggcccac

SEQ ID NO: 622827 - RNA, 19 nt, Artificial Sequence
  Description of Artificial Sequence: Synthetic oligonucleotide
acgggcuuuccacgguaga

SEQ ID NO: 622828 - RNA, 19 nt, Artificial Sequence
  Description of Artificial Sequence: Synthetic oligonucleotide
ucguuggaucaggucauua

SEQ ID NO: 622829 - RNA, 19 nt, Artificial Sequence
  Description of Artificial Sequence: Synthetic oligonucleotide
gguacaagaaggaaagcuu

SEQ ID NO: 622830 - RNA, 19 nt, Artificial Sequence
  Description of Artificial Sequence: Synthetic oligonucleotide
aguacucgaggacgacauu

SEQ ID NO: 622831 - RNA, 19 nt, Artificial Sequence
  Description of Artificial Sequence: Synthetic oligonucleotide
gagaguuauugcaccagau

SEQ ID NO: 622832 - RNA, 19 nt, Artificial Sequence
  Description of Artificial Sequence: Synthetic oligonucleotide
aggcugaagcgaguuuucu

SEQ ID NO: 622833 - RNA, 19 nt, Artificial Sequence
  Description of Artificial Sequence: Synthetic oligonucleotide
ggugaguacucgaggacga

SEQ ID NO: 622834 - RNA, 19 nt, Artificial Sequence
  Description of Artificial Sequence: Synthetic oligonucleotide
cacggcagauggugaugag

SEQ ID NO: 622835 - RNA, 19 nt, Artificial Sequence
  Description of Artificial Sequence: Synthetic oligonucleotide
cgacauucccugucuaggc

SEQ ID NO: 622836 - RNA, 19 nt, Artificial Sequence
  Description of Artificial Sequence: Synthetic oligonucleotide
cucgaggacgacauucccu

SEQ ID NO: 622837 - RNA, 19 nt, Artificial Sequence
  Description of Artificial Sequence: Synthetic oligonucleotide
auuaagcuuuaggcccaca

SEQ ID NO: 622838 - RNA, 19 nt, Artificial Sequence
  Description of Artificial Sequence: Synthetic oligonucleotide
gcggaacugaagaggacug

SEQ ID NO: 622839 - RNA, 19 nt, Artificial Sequence
  Description of Artificial Sequence: Synthetic oligonucleotide
accggcaaccccagcaggu

SEQ ID NO: 622840 - RNA, 19 nt, Artificial Sequence
  Description of Artificial Sequence: Synthetic oligonucleotide
caacuggaagcugagaguu

SEQ ID NO: 622841 - RNA, 19 nt, Artificial Sequence
  Description of Artificial Sequence: Synthetic oligonucleotide
cuagcaagcgccgggcaaa

SEQ ID NO: 622842 - RNA, 19 nt, Artificial Sequence
  Description of Artificial Sequence: Synthetic oligonucleotide
gguaaagggcguucugaua

SEQ ID NO: 622843 - RNA, 19 nt, Artificial Sequence
  Description of Artificial Sequence: Synthetic oligonucleotide
gguaagaugcagcgcaaau

SEQ ID NO: 622844 - RNA, 19 nt, Artificial Sequence
  Description of Artificial Sequence: Synthetic oligonucleotide
ugguugcuugugguauaga

SEQ ID NO: 622845 - RNA, 19 nt, Artificial Sequence
  Description of Artificial Sequence: Synthetic oligonucleotide
gcucuccuuaggcagcuuc

SEQ ID NO: 622846 - RNA, 19 nt, Artificial Sequence
  Description of Artificial Sequence: Synthetic oligonucleotide
caaaugucgaagggguugu

SEQ ID NO: 622847 - RNA, 19 nt, Artificial Sequence
  Description of Artificial Sequence: Synthetic oligonucleotide
cugcagauuugccccuuga

SEQ ID NO: 622848 - RNA, 19 nt, Artificial Sequence
  Description of Artificial Sequence: Synthetic oligonucleotide
gggcaaauguggcagcugu

SEQ ID NO: 622849 - RNA, 19 nt, Artificial Sequence
  Description of Artificial Sequence: Synthetic oligonucleotide
uccucaccaugugcaguac

SEQ ID NO: 622850 - RNA, 19 nt, Artificial Sequence
  Description of Artificial Sequence: Synthetic oligonucleotide
augggccgguaagaugcag

SEQ ID NO: 622851 - RNA, 19 nt, Artificial Sequence
  Description of Artificial Sequence: Synthetic oligonucleotide
ggcccaaguucuagcaagc

SEQ ID NO: 622852 - RNA, 19 nt, Artificial Sequence
  Description of Artificial Sequence: Synthetic oligonucleotide
gugaguacucgaggacgac

SEQ ID NO: 622853 - RNA, 19 nt, Artificial Sequence
  Description of Artificial Sequence: Synthetic oligonucleotide
gggccaaacuggauuacuc

SEQ ID NO: 622854 - RNA, 19 nt, Artificial Sequence
  Description of Artificial Sequence: Synthetic oligonucleotide
gcguuccucaccaugugca

SEQ ID NO: 622855 - RNA, 19 nt, Artificial Sequence
  Description of Artificial Sequence: Synthetic oligonucleotide
guagaugggccgguaagau

SEQ ID NO: 622856 - RNA, 19 nt, Artificial Sequence
  Description of Artificial Sequence: Synthetic oligonucleotide
caaaagaaccugccaggau

SEQ ID NO: 622857 - RNA, 19 nt, Artificial Sequence
  Description of Artificial Sequence: Synthetic oligonucleotide
caauguauucacggcagau

SEQ ID NO: 622858 - RNA, 19 nt, Artificial Sequence
  Description of Artificial Sequence: Synthetic oligonucleotide
uuacucccaccuggucaug

SEQ ID NO: 622859 - RNA, 19 nt, Artificial Sequence
  Description of Artificial Sequence: Synthetic oligonucleotide
ccagauuugaguugggcuu

SEQ ID NO: 622860 - RNA, 19 nt, Artificial Sequence
  Description of Artificial Sequence: Synthetic oligonucleotide
gccaaucucugucaccgua

SEQ ID NO: 622861 - RNA, 19 nt, Artificial Sequence
  Description of Artificial Sequence: Synthetic oligonucleotide
cuagagcaaucucaauguu

SEQ ID NO: 622862 - RNA, 19 nt, Artificial Sequence
  Description of Artificial Sequence: Synthetic oligonucleotide
uagcaagcgccgggcaaau

SEQ ID NO: 622863 - RNA, 19 nt, Artificial Sequence
  Description of Artificial Sequence: Synthetic oligonucleotide
caguuucgauuaggguaac

SEQ ID NO: 622864 - RNA, 19 nt, Artificial Sequence
  Description of Artificial Sequence: Synthetic oligonucleotide
guugggccacuucaggcuu

SEQ ID NO: 622865 - RNA, 19 nt, Artificial Sequence
  Description of Artificial Sequence: Synthetic oligonucleotide
gguauccaguggcaugaua

SEQ ID NO: 622866 - RNA, 19 nt, Artificial Sequence
  Description of Artificial Sequence: Synthetic oligonucleotide
ccuguagcagagccacuuc

SEQ ID NO: 622867 - RNA, 19 nt, Artificial Sequence
  Description of Artificial Sequence: Synthetic oligonucleotide
gcguucugauaauggccac

SEQ ID NO: 622868 - RNA, 19 nt, Artificial Sequence
  Description of Artificial Sequence: Synthetic oligonucleotide
gcgcaaaugucgaaggggu

SEQ ID NO: 622869 - RNA, 19 nt, Artificial Sequence
  Description of Artificial Sequence: Synthetic oligonucleotide
cguuggaucaggucauuaa

SEQ ID NO: 622870 - RNA, 19 nt, Artificial Sequence
  Description of Artificial Sequence: Synthetic oligonucleotide
agaagccgcauggcuguuu

SEQ ID NO: 622871 - RNA, 19 nt, Artificial Sequence
  Description of Artificial Sequence: Synthetic oligonucleotide
agaacccuuuggacacagu

SEQ ID NO: 622872 - RNA, 19 nt, Artificial Sequence
  Description of Artificial Sequence: Synthetic oligonucleotide
gccauguguagcagcugug

SEQ ID NO: 622873 - RNA, 19 nt, Artificial Sequence
  Description of Artificial Sequence: Synthetic oligonucleotide
agcaagcgccgggcaaaug

SEQ ID NO: 622874 - RNA, 19 nt, Artificial Sequence
  Description of Artificial Sequence: Synthetic oligonucleotide
agcuuggcauuaggaucga

SEQ ID NO: 622875 - RNA, 19 nt, Artificial Sequence
  Description of Artificial Sequence: Synthetic oligonucleotide
ggccucgggcauaugucug

SEQ ID NO: 622876 - RNA, 19 nt, Artificial Sequence
  Description of Artificial Sequence: Synthetic oligonucleotide
aucguuggaucaggucauu

SEQ ID NO: 622877 - RNA, 19 nt, Artificial Sequence
  Description of Artificial Sequence: Synthetic oligonucleotide
cuguccgcaacaccaggau

SEQ ID NO: 622878 - RNA, 19 nt, Artificial Sequence
  Description of Artificial Sequence: Synthetic oligonucleotide
ccgggauugucuccuucuc

SEQ ID NO: 622879 - RNA, 19 nt, Artificial Sequence
  Description of Artificial Sequence: Synthetic oligonucleotide
gcaguaccucaucauacuu

SEQ ID NO: 622880 - RNA, 19 nt, Artificial Sequence
  Description of Artificial Sequence: Synthetic oligonucleotide
gguugagggcuguccgcaa

SEQ ID NO: 622881 - RNA, 19 nt, Artificial Sequence
  Description of Artificial Sequence: Synthetic oligonucleotide
ggacugauccucagaccaa

SEQ ID NO: 622882 - RNA, 19 nt, Artificial Sequence
  Description of Artificial Sequence: Synthetic oligonucleotide
ggacgacauucccugucua

SEQ ID NO: 622883 - RNA, 19 nt, Artificial Sequence
  Description of Artificial Sequence: Synthetic oligonucleotide
cgccgggcaaauguggcag

SEQ ID NO: 622884 - RNA, 19 nt, Artificial Sequence
  Description of Artificial Sequence: Synthetic oligonucleotide
gccgcauggcuguuucaaa

SEQ ID NO: 622885 - RNA, 19 nt, Artificial Sequence
  Description of Artificial Sequence: Synthetic oligonucleotide
gcgccgggcaaauguggca

SEQ ID NO: 622886 - RNA, 19 nt, Artificial Sequence
  Description of Artificial Sequence: Synthetic oligonucleotide
gccaucucacagaugcgcu

SEQ ID NO: 622887 - RNA, 19 nt, Artificial Sequence
  Description of Artificial Sequence: Synthetic oligonucleotide
gaucgauguccgggauugu

SEQ ID NO: 622888 - RNA, 19 nt, Artificial Sequence
  Description of Artificial Sequence: Synthetic oligonucleotide
gcgaguuuucucauccuuu

SEQ ID NO: 622889 - RNA, 19 nt, Artificial Sequence
  Description of Artificial Sequence: Synthetic oligonucleotide
gagcuaggcugaagcgagu

SEQ ID NO: 622890 - RNA, 19 nt, Artificial Sequence
  Description of Artificial Sequence: Synthetic oligonucleotide
cguacucucucugacacau

SEQ ID NO: 622891 - RNA, 19 nt, Artificial Sequence
  Description of Artificial Sequence: Synthetic oligonucleotide
ggucaugaagaagccgcau

SEQ ID NO: 622892 - RNA, 19 nt, Artificial Sequence
  Description of Artificial Sequence: Synthetic oligonucleotide
cugucaccguagugacucu

SEQ ID NO: 622893 - RNA, 19 nt, Artificial Sequence
  Description of Artificial Sequence: Synthetic oligonucleotide
guuuggcguuccucaccau

SEQ ID NO: 622894 - RNA, 19 nt, Artificial Sequence
  Description of Artificial Sequence: Synthetic oligonucleotide
ccgguaagaugcagcgcaa

SEQ ID NO: 622895 - RNA, 19 nt, Artificial Sequence
  Description of Artificial Sequence: Synthetic oligonucleotide
cgcugauagcacauuucua

SEQ ID NO: 622896 - RNA, 19 nt, Artificial Sequence
  Description of Artificial Sequence: Synthetic oligonucleotide
ccgcaccuccagagcuagg

SEQ ID NO: 622897 - RNA, 19 nt, Artificial Sequence
  Description of Artificial Sequence: Synthetic oligonucleotide
gguucgcugauagcacauu

SEQ ID NO: 622898 - RNA, 19 nt, Artificial Sequence
  Description of Artificial Sequence: Synthetic oligonucleotide
ccguagugacucugcagau

SEQ ID NO: 622899 - RNA, 19 nt, Artificial Sequence
  Description of Artificial Sequence: Synthetic oligonucleotide
cguucugauaauggccacu

SEQ ID NO: 622900 - RNA, 19 nt, Artificial Sequence
  Description of Artificial Sequence: Synthetic oligonucleotide
cgguaagaugcagcgcaaa

SEQ ID NO: 622901 - RNA, 19 nt, Artificial Sequence
  Description of Artificial Sequence: Synthetic oligonucleotide
ccucgggcauaugucugua

SEQ ID NO: 622902 - RNA, 19 nt, Artificial Sequence
  Description of Artificial Sequence: Synthetic oligonucleotide
ccggcaaccccagcaggua

SEQ ID NO: 622903 - RNA, 19 nt, Artificial Sequence
  Description of Artificial Sequence: Synthetic oligonucleotide
cccuuuggacacagucaau

SEQ ID NO: 622904 - RNA, 19 nt, Artificial Sequence
  Description of Artificial Sequence: Synthetic oligonucleotide
cggcauauuugaugugguu

SEQ ID NO: 622905 - RNA, 19 nt, Artificial Sequence
  Description of Artificial Sequence: Synthetic oligonucleotide
cgaggacgacauucccugu

SEQ ID NO: 622906 - RNA, 19 nt, Artificial Sequence
  Description of Artificial Sequence: Synthetic oligonucleotide
ccuagucuguugggccacu

SEQ ID NO: 622907 - RNA, 19 nt, Artificial Sequence
  Description of Artificial Sequence: Synthetic oligonucleotide
cggcaaccccagcagguau

SEQ ID NO: 622908 - RNA, 19 nt, Artificial Sequence
  Description of Artificial Sequence: Synthetic oligonucleotide
aauaguuuaacuuuggucc

SEQ ID NO: 622909 - RNA, 19 nt, Artificial Sequence
  Description of Artificial Sequence: Synthetic oligonucleotide
aauaaagccagcccgaccc

SEQ ID NO: 622910 - RNA, 19 nt, Artificial Sequence
  Description of Artificial Sequence: Synthetic oligonucleotide
aaagauuccauucaaaaca

SEQ ID NO: 622911 - RNA, 19 nt, Artificial Sequence
  Description of Artificial Sequence: Synthetic oligonucleotide
aauagaugcauucguaccc

SEQ ID NO: 622912 - RNA, 19 nt, Artificial Sequence
  Description of Artificial Sequence: Synthetic oligonucleotide
aaugguuggguuuaucucc

SEQ ID NO: 622913 - RNA, 19 nt, Artificial Sequence
  Description of Artificial Sequence: Synthetic oligonucleotide
aaaauagaugcauucguac

SEQ ID NO: 622914 - RNA, 19 nt, Artificial Sequence
  Description of Artificial Sequence: Synthetic oligonucleotide
aaauagaugcauucguacc

SEQ ID NO: 622915 - RNA, 19 nt, Artificial Sequence
  Description of Artificial Sequence: Synthetic oligonucleotide
aauaccaaguaccagagca

SEQ ID NO: 622916 - RNA, 19 nt, Artificial Sequence
  Description of Artificial Sequence: Synthetic oligonucleotide
uguuguucaaaauaaagcc

SEQ ID NO: 622917 - RNA, 19 nt, Artificial Sequence
  Description of Artificial Sequence: Synthetic oligonucleotide
acaguaacaaugcacuucc

SEQ ID NO: 622918 - RNA, 19 nt, Artificial Sequence
  Description of Artificial Sequence: Synthetic oligonucleotide
auaugcaaagaauuuaagg

SEQ ID NO: 622919 - RNA, 19 nt, Artificial Sequence
  Description of Artificial Sequence: Synthetic oligonucleotide
aauacggagacccuuacca

SEQ ID NO: 622920 - RNA, 19 nt, Artificial Sequence
  Description of Artificial Sequence: Synthetic oligonucleotide
gugagcaucacuaagaugc

SEQ ID NO: 622921 - RNA, 19 nt, Artificial Sequence
  Description of Artificial Sequence: Synthetic oligonucleotide
ucuaugauagucaucgaug

SEQ ID NO: 622922 - RNA, 19 nt, Artificial Sequence
  Description of Artificial Sequence: Synthetic oligonucleotide
aauuuaaggaaggacauga

SEQ ID NO: 622923 - RNA, 19 nt, Artificial Sequence
  Description of Artificial Sequence: Synthetic oligonucleotide
auuuguaaccacuggauag

SEQ ID NO: 622924 - RNA, 19 nt, Artificial Sequence
  Description of Artificial Sequence: Synthetic oligonucleotide
uuagaauacaaauguaugu

SEQ ID NO: 622925 - RNA, 19 nt, Artificial Sequence
  Description of Artificial Sequence: Synthetic oligonucleotide
aaagaauugauaguuguca

SEQ ID NO: 622926 - RNA, 19 nt, Artificial Sequence
  Description of Artificial Sequence: Synthetic oligonucleotide
aagaauuuaaggaaggaca

SEQ ID NO: 622927 - RNA, 19 nt, Artificial Sequence
  Description of Artificial Sequence: Synthetic oligonucleotide
uuuaaggaaggacaugacc

SEQ ID NO: 622928 - RNA, 19 nt, Artificial Sequence
  Description of Artificial Sequence: Synthetic oligonucleotide
uuaacauucugccaccacc

SEQ ID NO: 622929 - RNA, 19 nt, Artificial Sequence
  Description of Artificial Sequence: Synthetic oligonucleotide
auagcuuaaggucacacug

SEQ ID NO: 622930 - RNA, 19 nt, Artificial Sequence
  Description of Artificial Sequence: Synthetic oligonucleotide
aaauaaagccagcccgacc

SEQ ID NO: 622931 - RNA, 19 nt, Artificial Sequence
  Description of Artificial Sequence: Synthetic oligonucleotide
cuugguuuagucucuaacc

SEQ ID NO: 622932 - RNA, 19 nt, Artificial Sequence
  Description of Artificial Sequence: Synthetic oligonucleotide
aauauugugagcaucacua

SEQ ID NO: 622933 - RNA, 19 nt, Artificial Sequence
  Description of Artificial Sequence: Synthetic oligonucleotide
aacuuguucuaugauaguc

SEQ ID NO: 622934 - RNA, 19 nt, Artificial Sequence
  Description of Artificial Sequence: Synthetic oligonucleotide
ugaucuuugaacugguccc

SEQ ID NO: 622935 - RNA, 19 nt, Artificial Sequence
  Description of Artificial Sequence: Synthetic oligonucleotide
uugguuuagucucuaaccc

SEQ ID NO: 622936 - RNA, 19 nt, Artificial Sequence
  Description of Artificial Sequence: Synthetic oligonucleotide
uguuucuacugaaaggacc

SEQ ID NO: 622937 - RNA, 19 nt, Artificial Sequence
  Description of Artificial Sequence: Synthetic oligonucleotide
uggauagacaagaauguug

SEQ ID NO: 622938 - RNA, 19 nt, Artificial Sequence
  Description of Artificial Sequence: Synthetic oligonucleotide
uuauaagagauauucccac

SEQ ID NO: 622939 - RNA, 19 nt, Artificial Sequence
  Description of Artificial Sequence: Synthetic oligonucleotide
uacucaauuuccuagcaug

SEQ ID NO: 622940 - RNA, 19 nt, Artificial Sequence
  Description of Artificial Sequence: Synthetic oligonucleotide
uguacgugaacucaauuaa

SEQ ID NO: 622941 - RNA, 19 nt, Artificial Sequence
  Description of Artificial Sequence: Synthetic oligonucleotide
ucauaggugagucaugcac

SEQ ID NO: 622942 - RNA, 19 nt, Artificial Sequence
  Description of Artificial Sequence: Synthetic oligonucleotide
aaauaccaaguaccagagc

SEQ ID NO: 622943 - RNA, 19 nt, Artificial Sequence
  Description of Artificial Sequence: Synthetic oligonucleotide
cuugggaauauucucuugg

SEQ ID NO: 622944 - RNA, 19 nt, Artificial Sequence
  Description of Artificial Sequence: Synthetic oligonucleotide
uuuaaguuaccagaaauau

SEQ ID NO: 622945 - RNA, 19 nt, Artificial Sequence
  Description of Artificial Sequence: Synthetic oligonucleotide
aaauauugugagcaucacu

SEQ ID NO: 622946 - RNA, 19 nt, Artificial Sequence
  Description of Artificial Sequence: Synthetic oligonucleotide
uggaagcucacucauaggu

SEQ ID NO: 622947 - RNA, 19 nt, Artificial Sequence
  Description of Artificial Sequence: Synthetic oligonucleotide
guuucuauuucggagacag

SEQ ID NO: 622948 - RNA, 19 nt, Artificial Sequence
  Description of Artificial Sequence: Synthetic oligonucleotide
uucuauuucggagacagca

SEQ ID NO: 622949 - RNA, 19 nt, Artificial Sequence
  Description of Artificial Sequence: Synthetic oligonucleotide
agauaacucacuuggaccu

SEQ ID NO: 622950 - RNA, 19 nt, Artificial Sequence
  Description of Artificial Sequence: Synthetic oligonucleotide
aaaauaaagccagcccgac

SEQ ID NO: 622951 - RNA, 19 nt, Artificial Sequence
  Description of Artificial Sequence: Synthetic oligonucleotide
uaacugcacaguaacaaug

SEQ ID NO: 622952 - RNA, 19 nt, Artificial Sequence
  Description of Artificial Sequence: Synthetic oligonucleotide
aaguuauagcacaaaaucu

SEQ ID NO: 622953 - RNA, 19 nt, Artificial Sequence
  Description of Artificial Sequence: Synthetic oligonucleotide
cuagcaugcauuagaauac

SEQ ID NO: 622954 - RNA, 19 nt, Artificial Sequence
  Description of Artificial Sequence: Synthetic oligonucleotide
uuagucucuaaccccuccg

SEQ ID NO: 622955 - RNA, 19 nt, Artificial Sequence
  Description of Artificial Sequence: Synthetic oligonucleotide
acucauaggugagucaugc

SEQ ID NO: 622956 - RNA, 19 nt, Artificial Sequence
  Description of Artificial Sequence: Synthetic oligonucleotide
aacuuugguccacuuaucu

SEQ ID NO: 622957 - RNA, 19 nt, Artificial Sequence
  Description of Artificial Sequence: Synthetic oligonucleotide
aucagcuuaccccaaaugu

SEQ ID NO: 622958 - RNA, 19 nt, Artificial Sequence
  Description of Artificial Sequence: Synthetic oligonucleotide
ggugguaaaauacuagugc

SEQ ID NO: 622959 - RNA, 19 nt, Artificial Sequence
  Description of Artificial Sequence: Synthetic oligonucleotide
acauacuuuuccucuguac

SEQ ID NO: 622960 - RNA, 19 nt, Artificial Sequence
  Description of Artificial Sequence: Synthetic oligonucleotide
cacaccuacuuuuaagucc

SEQ ID NO: 622961 - RNA, 19 nt, Artificial Sequence
  Description of Artificial Sequence: Synthetic oligonucleotide
cauucuaaaacuggcacag

SEQ ID NO: 622962 - RNA, 19 nt, Artificial Sequence
  Description of Artificial Sequence: Synthetic oligonucleotide
auuuacccguucaacaugc

SEQ ID NO: 622963 - RNA, 19 nt, Artificial Sequence
  Description of Artificial Sequence: Synthetic oligonucleotide
uccuuaauucauuuccuug

SEQ ID NO: 622964 - RNA, 19 nt, Artificial Sequence
  Description of Artificial Sequence: Synthetic oligonucleotide
uacgcucugaaauauugug

SEQ ID NO: 622965 - RNA, 19 nt, Artificial Sequence
  Description of Artificial Sequence: Synthetic oligonucleotide
aacucaauuaaaugacgaa

SEQ ID NO: 622966 - RNA, 19 nt, Artificial Sequence
  Description of Artificial Sequence: Synthetic oligonucleotide
uguguugccuacauacuca

SEQ ID NO: 622967 - RNA, 19 nt, Artificial Sequence
  Description of Artificial Sequence: Synthetic oligonucleotide
aagaauugauaguugucau

SEQ ID NO: 622968 - RNA, 19 nt, Artificial Sequence
  Description of Artificial Sequence: Synthetic oligonucleotide
ucauucuaaaacuggcaca

SEQ ID NO: 622969 - RNA, 19 nt, Artificial Sequence
  Description of Artificial Sequence: Synthetic oligonucleotide
aguaacaaugcacuucccu

SEQ ID NO: 622970 - RNA, 19 nt, Artificial Sequence
  Description of Artificial Sequence: Synthetic oligonucleotide
agugauaacauugguaagu

SEQ ID NO: 622971 - RNA, 19 nt, Artificial Sequence
  Description of Artificial Sequence: Synthetic oligonucleotide
augauagucaucgauguca

SEQ ID NO: 622972 - RNA, 19 nt, Artificial Sequence
  Description of Artificial Sequence: Synthetic oligonucleotide
uucuaugauagucaucgau

SEQ ID NO: 622973 - RNA, 19 nt, Artificial Sequence
  Description of Artificial Sequence: Synthetic oligonucleotide
ucuguuggacuuugaaaag

SEQ ID NO: 622974 - RNA, 19 nt, Artificial Sequence
  Description of Artificial Sequence: Synthetic oligonucleotide
uauuuacacaccuacuuuu

SEQ ID NO: 622975 - RNA, 19 nt, Artificial Sequence
  Description of Artificial Sequence: Synthetic oligonucleotide
cugaaugcggcccacuucc

SEQ ID NO: 622976 - RNA, 19 nt, Artificial Sequence
  Description of Artificial Sequence: Synthetic oligonucleotide
auuuccuugcauaaaccac

SEQ ID NO: 622977 - RNA, 19 nt, Artificial Sequence
  Description of Artificial Sequence: Synthetic oligonucleotide
caaugcacuucccucaugc

SEQ ID NO: 622978 - RNA, 19 nt, Artificial Sequence
  Description of Artificial Sequence: Synthetic oligonucleotide
uguucaaaauaaagccagc

SEQ ID NO: 622979 - RNA, 19 nt, Artificial Sequence
  Description of Artificial Sequence: Synthetic oligonucleotide
uacgugaacucaauuaaau

SEQ ID NO: 622980 - RNA, 19 nt, Artificial Sequence
  Description of Artificial Sequence: Synthetic oligonucleotide
agcauuuguaaccacugga

SEQ ID NO: 622981 - RNA, 19 nt, Artificial Sequence
  Description of Artificial Sequence: Synthetic oligonucleotide
ucuaaugguuuuauguaua

SEQ ID NO: 622982 - RNA, 19 nt, Artificial Sequence
  Description of Artificial Sequence: Synthetic oligonucleotide
acucaauuuccuagcaugc

SEQ ID NO: 622983 - RNA, 19 nt, Artificial Sequence
  Description of Artificial Sequence: Synthetic oligonucleotide
uuaaguuaccagaaauaua

SEQ ID NO: 622984 - RNA, 19 nt, Artificial Sequence
  Description of Artificial Sequence: Synthetic oligonucleotide
uacccguucaacaugcagu

SEQ ID NO: 622985 - RNA, 19 nt, Artificial Sequence
  Description of Artificial Sequence: Synthetic oligonucleotide
gaagcucacucauagguga

SEQ ID NO: 622986 - RNA, 19 nt, Artificial Sequence
  Description of Artificial Sequence: Synthetic oligonucleotide
uuguauggcuuuaaaaguu

SEQ ID NO: 622987 - RNA, 19 nt, Artificial Sequence
  Description of Artificial Sequence: Synthetic oligonucleotide
uucuaaugguuuuauguau

SEQ ID NO: 622988 - RNA, 19 nt, Artificial Sequence
  Description of Artificial Sequence: Synthetic oligonucleotide
uucguacccaacuauaaua

SEQ ID NO: 622989 - RNA, 19 nt, Artificial Sequence
  Description of Artificial Sequence: Synthetic oligonucleotide
uccggugguaaaauacuag

SEQ ID NO: 622990 - RNA, 19 nt, Artificial Sequence
  Description of Artificial Sequence: Synthetic oligonucleotide
guaacaaugcacuucccuc

SEQ ID NO: 622991 - RNA, 19 nt, Artificial Sequence
  Description of Artificial Sequence: Synthetic oligonucleotide
gauuuacccguucaacaug

SEQ ID NO: 622992 - RNA, 19 nt, Artificial Sequence
  Description of Artificial Sequence: Synthetic oligonucleotide
ugauuuacccguucaacau

SEQ ID NO: 622993 - RNA, 19 nt, Artificial Sequence
  Description of Artificial Sequence: Synthetic oligonucleotide
aguuaccagaaauauacuu

SEQ ID NO: 622994 - RNA, 19 nt, Artificial Sequence
  Description of Artificial Sequence: Synthetic oligonucleotide
gaauugauaguugucauua

SEQ ID NO: 622995 - RNA, 19 nt, Artificial Sequence
  Description of Artificial Sequence: Synthetic oligonucleotide
uuuguaaccacuggauaga

SEQ ID NO: 622996 - RNA, 19 nt, Artificial Sequence
  Description of Artificial Sequence: Synthetic oligonucleotide
augacgaaaagccauuuua

SEQ ID NO: 622997 - RNA, 19 nt, Artificial Sequence
  Description of Artificial Sequence: Synthetic oligonucleotide
auaguuuaacuuuggucca

SEQ ID NO: 622998 - RNA, 19 nt, Artificial Sequence
  Description of Artificial Sequence: Synthetic oligonucleotide
uuacccguucaacaugcag

SEQ ID NO: 622999 - RNA, 19 nt, Artificial Sequence
  Description of Artificial Sequence: Synthetic oligonucleotide
ugguuuagucucuaacccc

SEQ ID NO: 623000 - RNA, 19 nt, Artificial Sequence
  Description of Artificial Sequence: Synthetic oligonucleotide
agaccuggcauucguaaag

SEQ ID NO: 623001 - RNA, 19 nt, Artificial Sequence
  Description of Artificial Sequence: Synthetic oligonucleotide
ugauagucaucgaugucac

SEQ ID NO: 623002 - RNA, 19 nt, Artificial Sequence
  Description of Artificial Sequence: Synthetic oligonucleotide
uuguguugccuacauacuc

SEQ ID NO: 623003 - RNA, 19 nt, Artificial Sequence
  Description of Artificial Sequence: Synthetic oligonucleotide
cuuuguuccggacuucaag

SEQ ID NO: 623004 - RNA, 19 nt, Artificial Sequence
  Description of Artificial Sequence: Synthetic oligonucleotide
uagcuuaaggucacacugc

SEQ ID NO: 623005 - RNA, 19 nt, Artificial Sequence
  Description of Artificial Sequence: Synthetic oligonucleotide
uuuguguugccuacauacu

SEQ ID NO: 623006 - RNA, 19 nt, Artificial Sequence
  Description of Artificial Sequence: Synthetic oligonucleotide
agaauacggagacccuuac

SEQ ID NO: 623007 - RNA, 19 nt, Artificial Sequence
  Description of Artificial Sequence: Synthetic oligonucleotide
uauuaccaagugaucuuug

SEQ ID NO: 623008 - RNA, 19 nt, Artificial Sequence
  Description of Artificial Sequence: Synthetic oligonucleotide
ucagcuuaccccaaaugua

SEQ ID NO: 623009 - RNA, 19 nt, Artificial Sequence
  Description of Artificial Sequence: Synthetic oligonucleotide
auuaccaagugaucuuuga

SEQ ID NO: 623010 - RNA, 19 nt, Artificial Sequence
  Description of Artificial Sequence: Synthetic oligonucleotide
aguguguauuaccaaguga

SEQ ID NO: 623011 - RNA, 19 nt, Artificial Sequence
  Description of Artificial Sequence: Synthetic oligonucleotide
uguauggcuuuaaaaguua

SEQ ID NO: 623012 - RNA, 19 nt, Artificial Sequence
  Description of Artificial Sequence: Synthetic oligonucleotide
auaacucacuuggaccugc

SEQ ID NO: 623013 - RNA, 19 nt, Artificial Sequence
  Description of Artificial Sequence: Synthetic oligonucleotide
cacguguuucuacugaaag

SEQ ID NO: 623014 - RNA, 19 nt, Artificial Sequence
  Description of Artificial Sequence: Synthetic oligonucleotide
uccaacuuguucuaugaua

SEQ ID NO: 623015 - RNA, 19 nt, Artificial Sequence
  Description of Artificial Sequence: Synthetic oligonucleotide
auacggagacccuuaccac

SEQ ID NO: 623016 - RNA, 19 nt, Artificial Sequence
  Description of Artificial Sequence: Synthetic oligonucleotide
uaaaugacgaaaagccauu

SEQ ID NO: 623017 - RNA, 19 nt, Artificial Sequence
  Description of Artificial Sequence: Synthetic oligonucleotide
cuuggcucaugauuucggg

SEQ ID NO: 623018 - RNA, 19 nt, Artificial Sequence
  Description of Artificial Sequence: Synthetic oligonucleotide
aagaugccuccuuaauuca

SEQ ID NO: 623019 - RNA, 19 nt, Artificial Sequence
  Description of Artificial Sequence: Synthetic oligonucleotide
accguuucuauuucggaga

SEQ ID NO: 623020 - RNA, 19 nt, Artificial Sequence
  Description of Artificial Sequence: Synthetic oligonucleotide
aguuauagcacaaaaucuu

SEQ ID NO: 623021 - RNA, 19 nt, Artificial Sequence
  Description of Artificial Sequence: Synthetic oligonucleotide
uuuacacaccuacuuuuaa

SEQ ID NO: 623022 - RNA, 19 nt, Artificial Sequence
  Description of Artificial Sequence: Synthetic oligonucleotide
gauggcaaugauucaguga

SEQ ID NO: 623023 - RNA, 19 nt, Artificial Sequence
  Description of Artificial Sequence: Synthetic oligonucleotide
uuagcacucuuauuuguau

SEQ ID NO: 623024 - RNA, 19 nt, Artificial Sequence
  Description of Artificial Sequence: Synthetic oligonucleotide
aggaaauaguuuaacuuug

SEQ ID NO: 623025 - RNA, 19 nt, Artificial Sequence
  Description of Artificial Sequence: Synthetic oligonucleotide
uccucuguacuuuauuuua

SEQ ID NO: 623026 - RNA, 19 nt, Artificial Sequence
  Description of Artificial Sequence: Synthetic oligonucleotide
ucuauuucggagacagcau

SEQ ID NO: 623027 - RNA, 19 nt, Artificial Sequence
  Description of Artificial Sequence: Synthetic oligonucleotide
cugauuuacccguucaaca

SEQ ID NO: 623028 - RNA, 19 nt, Artificial Sequence
  Description of Artificial Sequence: Synthetic oligonucleotide
aagccugauauauuauaua

SEQ ID NO: 623029 - RNA, 19 nt, Artificial Sequence
  Description of Artificial Sequence: Synthetic oligonucleotide
caccguuucuauuucggag

SEQ ID NO: 623030 - RNA, 19 nt, Artificial Sequence
  Description of Artificial Sequence: Synthetic oligonucleotide
uaaccccuccgcaucuucg

SEQ ID NO: 623031 - RNA, 19 nt, Artificial Sequence
  Description of Artificial Sequence: Synthetic oligonucleotide
uugugagcaucacuaagau

SEQ ID NO: 623032 - RNA, 19 nt, Artificial Sequence
  Description of Artificial Sequence: Synthetic oligonucleotide
aagauuccauucaaaacaa

SEQ ID NO: 623033 - RNA, 19 nt, Artificial Sequence
  Description of Artificial Sequence: Synthetic oligonucleotide
uacuauacgcucugaaaua

SEQ ID NO: 623034 - RNA, 19 nt, Artificial Sequence
  Description of Artificial Sequence: Synthetic oligonucleotide
agucacacagagugcaaug

SEQ ID NO: 623035 - RNA, 19 nt, Artificial Sequence
  Description of Artificial Sequence: Synthetic oligonucleotide
uacuagugcaacuucucau

SEQ ID NO: 623036 - RNA, 19 nt, Artificial Sequence
  Description of Artificial Sequence: Synthetic oligonucleotide
ucaacuggcaucugauuua

SEQ ID NO: 623037 - RNA, 19 nt, Artificial Sequence
  Description of Artificial Sequence: Synthetic oligonucleotide
gaugcauucguacccaacu

SEQ ID NO: 623038 - RNA, 19 nt, Artificial Sequence
  Description of Artificial Sequence: Synthetic oligonucleotide
agcuguuaaacacacuauu

SEQ ID NO: 623039 - RNA, 19 nt, Artificial Sequence
  Description of Artificial Sequence: Synthetic oligonucleotide
uacggagacccuuaccaca

SEQ ID NO: 623040 - RNA, 19 nt, Artificial Sequence
  Description of Artificial Sequence: Synthetic oligonucleotide
auuuaaggaaggacaugac

SEQ ID NO: 623041 - RNA, 19 nt, Artificial Sequence
  Description of Artificial Sequence: Synthetic oligonucleotide
acuggauagacaagaaugu

SEQ ID NO: 623042 - RNA, 19 nt, Artificial Sequence
  Description of Artificial Sequence: Synthetic oligonucleotide
aaugcacuucccucaugca

SEQ ID NO: 623043 - RNA, 19 nt, Artificial Sequence
  Description of Artificial Sequence: Synthetic oligonucleotide
ugcauucguacccaacuau

SEQ ID NO: 623044 - RNA, 19 nt, Artificial Sequence
  Description of Artificial Sequence: Synthetic oligonucleotide
gccuccuuaauucauuucc

SEQ ID NO: 623045 - RNA, 19 nt, Artificial Sequence
  Description of Artificial Sequence: Synthetic oligonucleotide
uaugauagucaucgauguc

SEQ ID NO: 623046 - RNA, 19 nt, Artificial Sequence
  Description of Artificial Sequence: Synthetic oligonucleotide
uuacagaccuggcauucgu

SEQ ID NO: 623047 - RNA, 19 nt, Artificial Sequence
  Description of Artificial Sequence: Synthetic oligonucleotide
acuaagaugccuccuuaau

SEQ ID NO: 623048 - RNA, 19 nt, Artificial Sequence
  Description of Artificial Sequence: Synthetic oligonucleotide
ccuagggaagagaauacgg

SEQ ID NO: 623049 - RNA, 19 nt, Artificial Sequence
  Description of Artificial Sequence: Synthetic oligonucleotide
uuaccacaaugaaaauaga

SEQ ID NO: 623050 - RNA, 19 nt, Artificial Sequence
  Description of Artificial Sequence: Synthetic oligonucleotide
acuuguucuaugauaguca

SEQ ID NO: 623051 - RNA, 19 nt, Artificial Sequence
  Description of Artificial Sequence: Synthetic oligonucleotide
gaauacggagacccuuacc

SEQ ID NO: 623052 - RNA, 19 nt, Artificial Sequence
  Description of Artificial Sequence: Synthetic oligonucleotide
gucaugugauccaagucag

SEQ ID NO: 623053 - RNA, 19 nt, Artificial Sequence
  Description of Artificial Sequence: Synthetic oligonucleotide
ucacucauaggugagucau

SEQ ID NO: 623054 - RNA, 19 nt, Artificial Sequence
  Description of Artificial Sequence: Synthetic oligonucleotide
cagugguaacacaugcacc

SEQ ID NO: 623055 - RNA, 19 nt, Artificial Sequence
  Description of Artificial Sequence: Synthetic oligonucleotide
agauggcaaugauucagug

SEQ ID NO: 623056 - RNA, 19 nt, Artificial Sequence
  Description of Artificial Sequence: Synthetic oligonucleotide
agaauugauaguugucauu

SEQ ID NO: 623057 - RNA, 19 nt, Artificial Sequence
  Description of Artificial Sequence: Synthetic oligonucleotide
aaaugaugcucaucuuaua

SEQ ID NO: 623058 - RNA, 19 nt, Artificial Sequence
  Description of Artificial Sequence: Synthetic oligonucleotide
ugccguuaaaugaaaccau

SEQ ID NO: 623059 - RNA, 19 nt, Artificial Sequence
  Description of Artificial Sequence: Synthetic oligonucleotide
aucgaugucacugguucag

SEQ ID NO: 623060 - RNA, 19 nt, Artificial Sequence
  Description of Artificial Sequence: Synthetic oligonucleotide
ugauagcuuaaggucacac

SEQ ID NO: 623061 - RNA, 19 nt, Artificial Sequence
  Description of Artificial Sequence: Synthetic oligonucleotide
ucucuaaccccuccgcauc

SEQ ID NO: 623062 - RNA, 19 nt, Artificial Sequence
  Description of Artificial Sequence: Synthetic oligonucleotide
cauccuggagcagaucugg

SEQ ID NO: 623063 - RNA, 19 nt, Artificial Sequence
  Description of Artificial Sequence: Synthetic oligonucleotide
gggaagagaauacggagac

SEQ ID NO: 623064 - RNA, 19 nt, Artificial Sequence
  Description of Artificial Sequence: Synthetic oligonucleotide
auucguacccaacuauaau

SEQ ID NO: 623065 - RNA, 19 nt, Artificial Sequence
  Description of Artificial Sequence: Synthetic oligonucleotide
accuagggaagagaauacg

SEQ ID NO: 623066 - RNA, 19 nt, Artificial Sequence
  Description of Artificial Sequence: Synthetic oligonucleotide
ucugaaugcggcccacuuc

SEQ ID NO: 623067 - RNA, 19 nt, Artificial Sequence
  Description of Artificial Sequence: Synthetic oligonucleotide
gagacagcauuuguaacca

SEQ ID NO: 623068 - RNA, 19 nt, Artificial Sequence
  Description of Artificial Sequence: Synthetic oligonucleotide
uuucuauuucggagacagc

SEQ ID NO: 623069 - RNA, 19 nt, Artificial Sequence
  Description of Artificial Sequence: Synthetic oligonucleotide
gacgaaaagccauuuuacu

SEQ ID NO: 623070 - RNA, 19 nt, Artificial Sequence
  Description of Artificial Sequence: Synthetic oligonucleotide
caugaccuagggaagagaa

SEQ ID NO: 623071 - RNA, 19 nt, Artificial Sequence
  Description of Artificial Sequence: Synthetic oligonucleotide
cauggcuaggcucacucuc

SEQ ID NO: 623072 - RNA, 19 nt, Artificial Sequence
  Description of Artificial Sequence: Synthetic oligonucleotide
auauugugagcaucacuaa

SEQ ID NO: 623073 - RNA, 19 nt, Artificial Sequence
  Description of Artificial Sequence: Synthetic oligonucleotide
gcugccguuaaaugaaacc

SEQ ID NO: 623074 - RNA, 19 nt, Artificial Sequence
  Description of Artificial Sequence: Synthetic oligonucleotide
acagaccuggcauucguaa

SEQ ID NO: 623075 - RNA, 19 nt, Artificial Sequence
  Description of Artificial Sequence: Synthetic oligonucleotide
ucacuaagaugccuccuua

SEQ ID NO: 623076 - RNA, 19 nt, Artificial Sequence
  Description of Artificial Sequence: Synthetic oligonucleotide
guaacacaugcaccuuucc

SEQ ID NO: 623077 - RNA, 19 nt, Artificial Sequence
  Description of Artificial Sequence: Synthetic oligonucleotide
gauagcuuaaggucacacu

SEQ ID NO: 623078 - RNA, 19 nt, Artificial Sequence
  Description of Artificial Sequence: Synthetic oligonucleotide
acuauacgcucugaaauau

SEQ ID NO: 623079 - RNA, 19 nt, Artificial Sequence
  Description of Artificial Sequence: Synthetic oligonucleotide
cuaugauagucaucgaugu

SEQ ID NO: 623080 - RNA, 19 nt, Artificial Sequence
  Description of Artificial Sequence: Synthetic oligonucleotide
auacucaauuuccuagcau

SEQ ID NO: 623081 - RNA, 19 nt, Artificial Sequence
  Description of Artificial Sequence: Synthetic oligonucleotide
gaaugcggcccacuuccag

SEQ ID NO: 623082 - RNA, 19 nt, Artificial Sequence
  Description of Artificial Sequence: Synthetic oligonucleotide
aucacuaagaugccuccuu

SEQ ID NO: 623083 - RNA, 19 nt, Artificial Sequence
  Description of Artificial Sequence: Synthetic oligonucleotide
gacccuacauuuaacugca

SEQ ID NO: 623084 - RNA, 19 nt, Artificial Sequence
  Description of Artificial Sequence: Synthetic oligonucleotide
caguguguauuaccaagug

SEQ ID NO: 623085 - RNA, 19 nt, Artificial Sequence
  Description of Artificial Sequence: Synthetic oligonucleotide
auuucggagacagcauuug

SEQ ID NO: 623086 - RNA, 19 nt, Artificial Sequence
  Description of Artificial Sequence: Synthetic oligonucleotide
cugccguuaaaugaaacca

SEQ ID NO: 623087 - RNA, 19 nt, Artificial Sequence
  Description of Artificial Sequence: Synthetic oligonucleotide
aaaugacgaaaagccauuu

SEQ ID NO: 623088 - RNA, 19 nt, Artificial Sequence
  Description of Artificial Sequence: Synthetic oligonucleotide
ggucccagcuguuaaacac

SEQ ID NO: 623089 - RNA, 19 nt, Artificial Sequence
  Description of Artificial Sequence: Synthetic oligonucleotide
agacagcauuuguaaccac

SEQ ID NO: 623090 - RNA, 19 nt, Artificial Sequence
  Description of Artificial Sequence: Synthetic oligonucleotide
ucccucaugcagcuuugug

SEQ ID NO: 623091 - RNA, 19 nt, Artificial Sequence
  Description of Artificial Sequence: Synthetic oligonucleotide
ugucacugguucagucugc

SEQ ID NO: 623092 - RNA, 19 nt, Artificial Sequence
  Description of Artificial Sequence: Synthetic oligonucleotide
accaccguuucuauuucgg

SEQ ID NO: 623093 - RNA, 19 nt, Artificial Sequence
  Description of Artificial Sequence: Synthetic oligonucleotide
cacuauuacagaccuggca

SEQ ID NO: 623094 - RNA, 19 nt, Artificial Sequence
  Description of Artificial Sequence: Synthetic oligonucleotide
auuuccucuaauggagcug

SEQ ID NO: 623095 - RNA, 19 nt, Artificial Sequence
  Description of Artificial Sequence: Synthetic oligonucleotide
ugguaacacaugcaccuuu

SEQ ID NO: 623096 - RNA, 19 nt, Artificial Sequence
  Description of Artificial Sequence: Synthetic oligonucleotide
agucucuaaccccuccgca

SEQ ID NO: 623097 - RNA, 19 nt, Artificial Sequence
  Description of Artificial Sequence: Synthetic oligonucleotide
gagacccuuaccacaauga

SEQ ID NO: 623098 - RNA, 19 nt, Artificial Sequence
  Description of Artificial Sequence: Synthetic oligonucleotide
gauaacucacuuggaccug

SEQ ID NO: 623099 - RNA, 19 nt, Artificial Sequence
  Description of Artificial Sequence: Synthetic oligonucleotide
uccacuuaucugauagcuu

SEQ ID NO: 623100 - RNA, 19 nt, Artificial Sequence
  Description of Artificial Sequence: Synthetic oligonucleotide
aaccccuccgcaucuucgu

SEQ ID NO: 623101 - RNA, 19 nt, Artificial Sequence
  Description of Artificial Sequence: Synthetic oligonucleotide
agaugcauucguacccaac

SEQ ID NO: 623102 - RNA, 19 nt, Artificial Sequence
  Description of Artificial Sequence: Synthetic oligonucleotide
cccaacuauaauaagaaua

SEQ ID NO: 623103 - RNA, 19 nt, Artificial Sequence
  Description of Artificial Sequence: Synthetic oligonucleotide
guguauuaccaagugaucu

SEQ ID NO: 623104 - RNA, 19 nt, Artificial Sequence
  Description of Artificial Sequence: Synthetic oligonucleotide
cauucguacccaacuauaa

SEQ ID NO: 623105 - RNA, 19 nt, Artificial Sequence
  Description of Artificial Sequence: Synthetic oligonucleotide
uguagaaacucugcugcuu

SEQ ID NO: 623106 - RNA, 19 nt, Artificial Sequence
  Description of Artificial Sequence: Synthetic oligonucleotide
uagcaugcauuagaauaca

SEQ ID NO: 623107 - RNA, 19 nt, Artificial Sequence
  Description of Artificial Sequence: Synthetic oligonucleotide
uuccaacuuguucuaugau

SEQ ID NO: 623108 - RNA, 19 nt, Artificial Sequence
  Description of Artificial Sequence: Synthetic oligonucleotide
augaaaccauuucaaugua

SEQ ID NO: 623109 - RNA, 19 nt, Artificial Sequence
  Description of Artificial Sequence: Synthetic oligonucleotide
uuuacccguucaacaugca

SEQ ID NO: 623110 - RNA, 19 nt, Artificial Sequence
  Description of Artificial Sequence: Synthetic oligonucleotide
cugugacuugugcugaauc

SEQ ID NO: 623111 - RNA, 19 nt, Artificial Sequence
  Description of Artificial Sequence: Synthetic oligonucleotide
cgacccuacauuuaacugc

SEQ ID NO: 623112 - RNA, 19 nt, Artificial Sequence
  Description of Artificial Sequence: Synthetic oligonucleotide
cagcuuaccccaaauguaa

SEQ ID NO: 623113 - RNA, 19 nt, Artificial Sequence
  Description of Artificial Sequence: Synthetic oligonucleotide
agcucccacucauuauaag

SEQ ID NO: 623114 - RNA, 19 nt, Artificial Sequence
  Description of Artificial Sequence: Synthetic oligonucleotide
uacuuuuccucuguacuuu

SEQ ID NO: 623115 - RNA, 19 nt, Artificial Sequence
  Description of Artificial Sequence: Synthetic oligonucleotide
agggcuuuaauagcuucca

SEQ ID NO: 623116 - RNA, 19 nt, Artificial Sequence
  Description of Artificial Sequence: Synthetic oligonucleotide
acuuuuaaguccacaguuu

SEQ ID NO: 623117 - RNA, 19 nt, Artificial Sequence
  Description of Artificial Sequence: Synthetic oligonucleotide
ccacaugcacuucaguacc

SEQ ID NO: 623118 - RNA, 19 nt, Artificial Sequence
  Description of Artificial Sequence: Synthetic oligonucleotide
cauaggugagucaugcacu

SEQ ID NO: 623119 - RNA, 19 nt, Artificial Sequence
  Description of Artificial Sequence: Synthetic oligonucleotide
uagugcaacuucucaucaa

SEQ ID NO: 623120 - RNA, 19 nt, Artificial Sequence
  Description of Artificial Sequence: Synthetic oligonucleotide
aggacaugaccuagggaag

SEQ ID NO: 623121 - RNA, 19 nt, Artificial Sequence
  Description of Artificial Sequence: Synthetic oligonucleotide
caucugauuuacccguuca

SEQ ID NO: 623122 - RNA, 19 nt, Artificial Sequence
  Description of Artificial Sequence: Synthetic oligonucleotide
caugcagcuuuguguugcc

SEQ ID NO: 623123 - RNA, 19 nt, Artificial Sequence
  Description of Artificial Sequence: Synthetic oligonucleotide
gaccuagggaagagaauac

SEQ ID NO: 623124 - RNA, 19 nt, Artificial Sequence
  Description of Artificial Sequence: Synthetic oligonucleotide
ccaacuauaauaagaauau

SEQ ID NO: 623125 - RNA, 19 nt, Artificial Sequence
  Description of Artificial Sequence: Synthetic oligonucleotide
auaaagccagcccgacccu

SEQ ID NO: 623126 - RNA, 19 nt, Artificial Sequence
  Description of Artificial Sequence: Synthetic oligonucleotide
agagaauacggagacccuu

SEQ ID NO: 623127 - RNA, 19 nt, Artificial Sequence
  Description of Artificial Sequence: Synthetic oligonucleotide
uucagucugcacacguguu

SEQ ID NO: 623128 - RNA, 19 nt, Artificial Sequence
  Description of Artificial Sequence: Synthetic oligonucleotide
ggauagacaagaauguugu

SEQ ID NO: 623129 - RNA, 19 nt, Artificial Sequence
  Description of Artificial Sequence: Synthetic oligonucleotide
ggacuuguuccacugugac

SEQ ID NO: 623130 - RNA, 19 nt, Artificial Sequence
  Description of Artificial Sequence: Synthetic oligonucleotide
cuacauacucaauuuccua

SEQ ID NO: 623131 - RNA, 19 nt, Artificial Sequence
  Description of Artificial Sequence: Synthetic oligonucleotide
agcugccguuaaaugaaac

SEQ ID NO: 623132 - RNA, 19 nt, Artificial Sequence
  Description of Artificial Sequence: Synthetic oligonucleotide
uugcuguguacgugaacuc

SEQ ID NO: 623133 - RNA, 19 nt, Artificial Sequence
  Description of Artificial Sequence: Synthetic oligonucleotide
guauguauucuaaugguuu

SEQ ID NO: 623134 - RNA, 19 nt, Artificial Sequence
  Description of Artificial Sequence: Synthetic oligonucleotide
caacuggcaucugauuuac

SEQ ID NO: 623135 - RNA, 19 nt, Artificial Sequence
  Description of Artificial Sequence: Synthetic oligonucleotide
acgcucugaaauauuguga

SEQ ID NO: 623136 - RNA, 19 nt, Artificial Sequence
  Description of Artificial Sequence: Synthetic oligonucleotide
gacccuuaccacaaugaaa

SEQ ID NO: 623137 - RNA, 19 nt, Artificial Sequence
  Description of Artificial Sequence: Synthetic oligonucleotide
guucagucugcacacgugu

SEQ ID NO: 623138 - RNA, 19 nt, Artificial Sequence
  Description of Artificial Sequence: Synthetic oligonucleotide
uacagaccuggcauucgua

SEQ ID NO: 623139 - RNA, 19 nt, Artificial Sequence
  Description of Artificial Sequence: Synthetic oligonucleotide
caguaacaaugcacuuccc

SEQ ID NO: 623140 - RNA, 19 nt, Artificial Sequence
  Description of Artificial Sequence: Synthetic oligonucleotide
ugaauccaccuggaccuga

SEQ ID NO: 623141 - RNA, 19 nt, Artificial Sequence
  Description of Artificial Sequence: Synthetic oligonucleotide
agcccgacccuacauuuaa

SEQ ID NO: 623142 - RNA, 19 nt, Artificial Sequence
  Description of Artificial Sequence: Synthetic oligonucleotide
auauucccacucuguggca

SEQ ID NO: 623143 - RNA, 19 nt, Artificial Sequence
  Description of Artificial Sequence: Synthetic oligonucleotide
auacgcucugaaauauugu

SEQ ID NO: 623144 - RNA, 19 nt, Artificial Sequence
  Description of Artificial Sequence: Synthetic oligonucleotide
caucuucgugaucuuccac

SEQ ID NO: 623145 - RNA, 19 nt, Artificial Sequence
  Description of Artificial Sequence: Synthetic oligonucleotide
cacucauaggugagucaug

SEQ ID NO: 623146 - RNA, 19 nt, Artificial Sequence
  Description of Artificial Sequence: Synthetic oligonucleotide
cuucccucaugcagcuuug

SEQ ID NO: 623147 - RNA, 19 nt, Artificial Sequence
  Description of Artificial Sequence: Synthetic oligonucleotide
gagaauacggagacccuua

SEQ ID NO: 623148 - RNA, 19 nt, Artificial Sequence
  Description of Artificial Sequence: Synthetic oligonucleotide
guaccagagcauguuuuac

SEQ ID NO: 623149 - RNA, 19 nt, Artificial Sequence
  Description of Artificial Sequence: Synthetic oligonucleotide
uguugccuacauacucaau

SEQ ID NO: 623150 - RNA, 19 nt, Artificial Sequence
  Description of Artificial Sequence: Synthetic oligonucleotide
uggcauuaacuggaaggaa

SEQ ID NO: 623151 - RNA, 19 nt, Artificial Sequence
  Description of Artificial Sequence: Synthetic oligonucleotide
augccuccuuaauucauuu

SEQ ID NO: 623152 - RNA, 19 nt, Artificial Sequence
  Description of Artificial Sequence: Synthetic oligonucleotide
guguuucuacugaaaggac

SEQ ID NO: 623153 - RNA, 19 nt, Artificial Sequence
  Description of Artificial Sequence: Synthetic oligonucleotide
uuucuacugaaaggaccuc

SEQ ID NO: 623154 - RNA, 19 nt, Artificial Sequence
  Description of Artificial Sequence: Synthetic oligonucleotide
guccacuuaucugauagcu

SEQ ID NO: 623155 - RNA, 19 nt, Artificial Sequence
  Description of Artificial Sequence: Synthetic oligonucleotide
ccaaguaauacugauuaaa

SEQ ID NO: 623156 - RNA, 19 nt, Artificial Sequence
  Description of Artificial Sequence: Synthetic oligonucleotide
gguccacuuaucugauagc

SEQ ID NO: 623157 - RNA, 19 nt, Artificial Sequence
  Description of Artificial Sequence: Synthetic oligonucleotide
ccacuuaucugauagcuua

SEQ ID NO: 623158 - RNA, 19 nt, Artificial Sequence
  Description of Artificial Sequence: Synthetic oligonucleotide
cucacucauaggugaguca

SEQ ID NO: 623159 - RNA, 19 nt, Artificial Sequence
  Description of Artificial Sequence: Synthetic oligonucleotide
cuaagaugccuccuuaauu

SEQ ID NO: 623160 - RNA, 19 nt, Artificial Sequence
  Description of Artificial Sequence: Synthetic oligonucleotide
cacuaagaugccuccuuaa

SEQ ID NO: 623161 - RNA, 19 nt, Artificial Sequence
  Description of Artificial Sequence: Synthetic oligonucleotide
guacgugaacucaauuaaa

SEQ ID NO: 623162 - RNA, 19 nt, Artificial Sequence
  Description of Artificial Sequence: Synthetic oligonucleotide
cacacguguuucuacugaa

SEQ ID NO: 623163 - RNA, 19 nt, Artificial Sequence
  Description of Artificial Sequence: Synthetic oligonucleotide
cagcuugggaauauucucu

SEQ ID NO: 623164 - RNA, 19 nt, Artificial Sequence
  Description of Artificial Sequence: Synthetic oligonucleotide
uggcaaugauucagugaua

SEQ ID NO: 623165 - RNA, 19 nt, Artificial Sequence
  Description of Artificial Sequence: Synthetic oligonucleotide
ucgaugucacugguucagu

SEQ ID NO: 623166 - RNA, 19 nt, Artificial Sequence
  Description of Artificial Sequence: Synthetic oligonucleotide
caucgaugucacugguuca

SEQ ID NO: 623167 - RNA, 19 nt, Artificial Sequence
  Description of Artificial Sequence: Synthetic oligonucleotide
gguuuagucucuaaccccu

SEQ ID NO: 623168 - RNA, 19 nt, Artificial Sequence
  Description of Artificial Sequence: Synthetic oligonucleotide
caauuuccuagcaugcauu

SEQ ID NO: 623169 - RNA, 19 nt, Artificial Sequence
  Description of Artificial Sequence: Synthetic oligonucleotide
agaugccuccuuaauucau

SEQ ID NO: 623170 - RNA, 19 nt, Artificial Sequence
  Description of Artificial Sequence: Synthetic oligonucleotide
gagugcaaugguuggguuu

SEQ ID NO: 623171 - RNA, 19 nt, Artificial Sequence
  Description of Artificial Sequence: Synthetic oligonucleotide
acggagacccuuaccacaa

SEQ ID NO: 623172 - RNA, 19 nt, Artificial Sequence
  Description of Artificial Sequence: Synthetic oligonucleotide
aguacccucuucagucuga

SEQ ID NO: 623173 - RNA, 19 nt, Artificial Sequence
  Description of Artificial Sequence: Synthetic oligonucleotide
cguacccaacuauaauaag

SEQ ID NO: 623174 - RNA, 19 nt, Artificial Sequence
  Description of Artificial Sequence: Synthetic oligonucleotide
gacaucagucuguuuccau

SEQ ID NO: 623175 - RNA, 19 nt, Artificial Sequence
  Description of Artificial Sequence: Synthetic oligonucleotide
gugauaacauugguaaguu

SEQ ID NO: 623176 - RNA, 19 nt, Artificial Sequence
  Description of Artificial Sequence: Synthetic oligonucleotide
gcuaggcucacucuccucu

SEQ ID NO: 623177 - RNA, 19 nt, Artificial Sequence
  Description of Artificial Sequence: Synthetic oligonucleotide
gguugugccuucagcaauc

SEQ ID NO: 623178 - RNA, 19 nt, Artificial Sequence
  Description of Artificial Sequence: Synthetic oligonucleotide
gucucuaaccccuccgcau

SEQ ID NO: 623179 - RNA, 19 nt, Artificial Sequence
  Description of Artificial Sequence: Synthetic oligonucleotide
ccguuucuauuucggagac

SEQ ID NO: 623180 - RNA, 19 nt, Artificial Sequence
  Description of Artificial Sequence: Synthetic oligonucleotide
cagaccuggcauucguaaa

SEQ ID NO: 623181 - RNA, 19 nt, Artificial Sequence
  Description of Artificial Sequence: Synthetic oligonucleotide
augaccuagggaagagaau

SEQ ID NO: 623182 - RNA, 19 nt, Artificial Sequence
  Description of Artificial Sequence: Synthetic oligonucleotide
cucuaauggagcugaguuu

SEQ ID NO: 623183 - RNA, 19 nt, Artificial Sequence
  Description of Artificial Sequence: Synthetic oligonucleotide
ccuacauacucaauuuccu

SEQ ID NO: 623184 - RNA, 19 nt, Artificial Sequence
  Description of Artificial Sequence: Synthetic oligonucleotide
gcaucugauuuacccguuc

SEQ ID NO: 623185 - RNA, 19 nt, Artificial Sequence
  Description of Artificial Sequence: Synthetic oligonucleotide
agcuuaccccaaauguaaa

SEQ ID NO: 623186 - RNA, 19 nt, Artificial Sequence
  Description of Artificial Sequence: Synthetic oligonucleotide
acacacuauuacagaccug

SEQ ID NO: 623187 - RNA, 19 nt, Artificial Sequence
  Description of Artificial Sequence: Synthetic oligonucleotide
gaugccuccuuaauucauu

SEQ ID NO: 623188 - RNA, 19 nt, Artificial Sequence
  Description of Artificial Sequence: Synthetic oligonucleotide
ggacaugaccuagggaaga

SEQ ID NO: 623189 - RNA, 19 nt, Artificial Sequence
  Description of Artificial Sequence: Synthetic oligonucleotide
ccucaauucacaggcucug

SEQ ID NO: 623190 - RNA, 19 nt, Artificial Sequence
  Description of Artificial Sequence: Synthetic oligonucleotide
gcauuagaauacaaaugua

SEQ ID NO: 623191 - RNA, 19 nt, Artificial Sequence
  Description of Artificial Sequence: Synthetic oligonucleotide
caaagcucccacucauuau

SEQ ID NO: 623192 - RNA, 19 nt, Artificial Sequence
  Description of Artificial Sequence: Synthetic oligonucleotide
ggcacagauguucugucau

SEQ ID NO: 623193 - RNA, 19 nt, Artificial Sequence
  Description of Artificial Sequence: Synthetic oligonucleotide
ugccaccaccguuucuauu

SEQ ID NO: 623194 - RNA, 19 nt, Artificial Sequence
  Description of Artificial Sequence: Synthetic oligonucleotide
gccaccaccguuucuauuu

SEQ ID NO: 623195 - RNA, 19 nt, Artificial Sequence
  Description of Artificial Sequence: Synthetic oligonucleotide
ccucuaauggagcugaguu

SEQ ID NO: 623196 - RNA, 19 nt, Artificial Sequence
  Description of Artificial Sequence: Synthetic oligonucleotide
gcggcccacuuccagauaa

SEQ ID NO: 623197 - RNA, 19 nt, Artificial Sequence
  Description of Artificial Sequence: Synthetic oligonucleotide
ccucuguacuuuauuuuaa

SEQ ID NO: 623198 - RNA, 19 nt, Artificial Sequence
  Description of Artificial Sequence: Synthetic oligonucleotide
gcauucguacccaacuaua

SEQ ID NO: 623199 - RNA, 19 nt, Artificial Sequence
  Description of Artificial Sequence: Synthetic oligonucleotide
cggagacagcauuuguaac

SEQ ID NO: 623200 - RNA, 19 nt, Artificial Sequence
  Description of Artificial Sequence: Synthetic oligonucleotide
ccggugguaaaauacuagu

SEQ ID NO: 623201 - RNA, 19 nt, Artificial Sequence
  Description of Artificial Sequence: Synthetic oligonucleotide
cgaugucacugguucaguc

SEQ ID NO: 623202 - RNA, 19 nt, Artificial Sequence
  Description of Artificial Sequence: Synthetic oligonucleotide
cccacucauuauaagagau

SEQ ID NO: 623203 - RNA, 19 nt, Artificial Sequence
  Description of Artificial Sequence: Synthetic oligonucleotide
cugauagcuuaaggucaca

SEQ ID NO: 623204 - RNA, 19 nt, Artificial Sequence
  Description of Artificial Sequence: Synthetic oligonucleotide
ugcggcccacuuccagaua

SEQ ID NO: 623205 - RNA, 19 nt, Artificial Sequence
  Description of Artificial Sequence: Synthetic oligonucleotide
cagcugccguuaaaugaaa

SEQ ID NO: 623206 - RNA, 19 nt, Artificial Sequence
  Description of Artificial Sequence: Synthetic oligonucleotide
ccaccguuucuauuucgga

SEQ ID NO: 623207 - RNA, 19 nt, Artificial Sequence
  Description of Artificial Sequence: Synthetic oligonucleotide
caguuacuauacgcucuga

SEQ ID NO: 623208 - RNA, 19 nt, Artificial Sequence
  Description of Artificial Sequence: Synthetic oligonucleotide
ccucaugcagcuuuguguu

SEQ ID NO: 623209 - RNA, 19 nt, Artificial Sequence
  Description of Artificial Sequence: Synthetic oligonucleotide
caccuggaccugaagcagu

SEQ ID NO: 623210 - RNA, 19 nt, Artificial Sequence
  Description of Artificial Sequence: Synthetic oligonucleotide
guugugccuucagcaaucu

SEQ ID NO: 623211 - RNA, 19 nt, Artificial Sequence
  Description of Artificial Sequence: Synthetic oligonucleotide
caucacuaagaugccuccu

SEQ ID NO: 623212 - RNA, 19 nt, Artificial Sequence
  Description of Artificial Sequence: Synthetic oligonucleotide
cccgacccuacauuuaacu

SEQ ID NO: 623213 - RNA, 19 nt, Artificial Sequence
  Description of Artificial Sequence: Synthetic oligonucleotide
ccguuaaaugaaaccauuu

SEQ ID NO: 623214 - RNA, 19 nt, Artificial Sequence
  Description of Artificial Sequence: Synthetic oligonucleotide
gugauccaagucagcuucu

SEQ ID NO: 623215 - RNA, 19 nt, Artificial Sequence
  Description of Artificial Sequence: Synthetic oligonucleotide
cagcccgacccuacauuua

SEQ ID NO: 623216 - RNA, 19 nt, Artificial Sequence
  Description of Artificial Sequence: Synthetic oligonucleotide
gccguuaaaugaaaccauu

SEQ ID NO: 623217 - RNA, 19 nt, Artificial Sequence
  Description of Artificial Sequence: Synthetic oligonucleotide
gcauggcuaggcucacucu

SEQ ID NO: 623218 - RNA, 19 nt, Artificial Sequence
  Description of Artificial Sequence: Synthetic oligonucleotide
ccacuggauagacaagaau

SEQ ID NO: 623219 - RNA, 19 nt, Artificial Sequence
  Description of Artificial Sequence: Synthetic oligonucleotide
ggcccuucagcugccguua

SEQ ID NO: 623220 - RNA, 19 nt, Artificial Sequence
  Description of Artificial Sequence: Synthetic oligonucleotide
cugccaccaccguuucuau

SEQ ID NO: 623221 - RNA, 19 nt, Artificial Sequence
  Description of Artificial Sequence: Synthetic oligonucleotide
gcccgacccuacauuuaac

SEQ ID NO: 623222 - RNA, 19 nt, Artificial Sequence
  Description of Artificial Sequence: Synthetic oligonucleotide
cccaucagcuuaccccaaa

SEQ ID NO: 623223 - RNA, 19 nt, Artificial Sequence
  Description of Artificial Sequence: Synthetic oligonucleotide
cccguucaacaugcaguuc

SEQ ID NO: 623224 - RNA, 19 nt, Artificial Sequence
  Description of Artificial Sequence: Synthetic oligonucleotide
cggacuucaagggcuuuaa

SEQ ID NO: 623225 - RNA, 19 nt, Artificial Sequence
  Description of Artificial Sequence: Synthetic oligonucleotide
cguuucuauuucggagaca

SEQ ID NO: 623226 - RNA, 19 nt, Artificial Sequence
  Description of Artificial Sequence: Synthetic oligonucleotide
ccggacuucaagggcuuua

SEQ ID NO: 623227 - RNA, 19 nt, Artificial Sequence
  Description of Artificial Sequence: Synthetic oligonucleotide
cccuccgcaucuucgugau

SEQ ID NO: 623228 - RNA, 19 nt, Artificial Sequence
  Description of Artificial Sequence: Synthetic oligonucleotide
cccagcuguuaaacacacu

SEQ ID NO: 623229 - RNA, 19 nt, Artificial Sequence
  Description of Artificial Sequence: Synthetic oligonucleotide
gcccaucagcuuaccccaa

SEQ ID NO: 623230 - RNA, 19 nt, Artificial Sequence
  Description of Artificial Sequence: Synthetic oligonucleotide
cacuucccucaugcagcuu

SEQ ID NO: 623231 - RNA, 19 nt, Artificial Sequence
  Description of Artificial Sequence: Synthetic oligonucleotide
cggagacccuuaccacaau

SEQ ID NO: 623232 - RNA, 19 nt, Artificial Sequence
  Description of Artificial Sequence: Synthetic oligonucleotide
aauuuaaggagccaaaagg

SEQ ID NO: 623233 - RNA, 19 nt, Artificial Sequence
  Description of Artificial Sequence: Synthetic oligonucleotide
uauacuaucaauaacucug

SEQ ID NO: 623234 - RNA, 19 nt, Artificial Sequence
  Description of Artificial Sequence: Synthetic oligonucleotide
aauaaaaucacugaggaga

SEQ ID NO: 623235 - RNA, 19 nt, Artificial Sequence
  Description of Artificial Sequence: Synthetic oligonucleotide
aauaggguguuauucaugg

SEQ ID NO: 623236 - RNA, 19 nt, Artificial Sequence
  Description of Artificial Sequence: Synthetic oligonucleotide
uucauauuaauacugaaac

SEQ ID NO: 623237 - RNA, 19 nt, Artificial Sequence
  Description of Artificial Sequence: Synthetic oligonucleotide
uauaucaagauucauguga

SEQ ID NO: 623238 - RNA, 19 nt, Artificial Sequence
  Description of Artificial Sequence: Synthetic oligonucleotide
aauaaguacaguucauagg

SEQ ID NO: 623239 - RNA, 19 nt, Artificial Sequence
  Description of Artificial Sequence: Synthetic oligonucleotide
aaagauaauguauagguaa

SEQ ID NO: 623240 - RNA, 19 nt, Artificial Sequence
  Description of Artificial Sequence: Synthetic oligonucleotide
acugaaaccagaucaauac

SEQ ID NO: 623241 - RNA, 19 nt, Artificial Sequence
  Description of Artificial Sequence: Synthetic oligonucleotide
ucuuauuauuccaaaacag

SEQ ID NO: 623242 - RNA, 19 nt, Artificial Sequence
  Description of Artificial Sequence: Synthetic oligonucleotide
aaauaauaggguguuauuc

SEQ ID NO: 623243 - RNA, 19 nt, Artificial Sequence
  Description of Artificial Sequence: Synthetic oligonucleotide
aauaauaggguguuauuca

SEQ ID NO: 623244 - RNA, 19 nt, Artificial Sequence
  Description of Artificial Sequence: Synthetic oligonucleotide
aguauaucaagauucaugu

SEQ ID NO: 623245 - RNA, 19 nt, Artificial Sequence
  Description of Artificial Sequence: Synthetic oligonucleotide
auaaguacaguucauagga

SEQ ID NO: 623246 - RNA, 19 nt, Artificial Sequence
  Description of Artificial Sequence: Synthetic oligonucleotide
aaucuuaaggcuuacacua

SEQ ID NO: 623247 - RNA, 19 nt, Artificial Sequence
  Description of Artificial Sequence: Synthetic oligonucleotide
uucuaguauaucaagauuc

SEQ ID NO: 623248 - RNA, 19 nt, Artificial Sequence
  Description of Artificial Sequence: Synthetic oligonucleotide
aauaacuacaaacaucuua

SEQ ID NO: 623249 - RNA, 19 nt, Artificial Sequence
  Description of Artificial Sequence: Synthetic oligonucleotide
uagacuaugccuuuggcag

SEQ ID NO: 623250 - RNA, 19 nt, Artificial Sequence
  Description of Artificial Sequence: Synthetic oligonucleotide
uuggugaacguuaugaccc

SEQ ID NO: 623251 - RNA, 19 nt, Artificial Sequence
  Description of Artificial Sequence: Synthetic oligonucleotide
uaaauacggaguuugaaca

SEQ ID NO: 623252 - RNA, 19 nt, Artificial Sequence
  Description of Artificial Sequence: Synthetic oligonucleotide
uguuaauaacagaaaauac

SEQ ID NO: 623253 - RNA, 19 nt, Artificial Sequence
  Description of Artificial Sequence: Synthetic oligonucleotide
uaugcuaauuauuacucag

SEQ ID NO: 623254 - RNA, 19 nt, Artificial Sequence
  Description of Artificial Sequence: Synthetic oligonucleotide
uuaaggcuuacacuaaaag

SEQ ID NO: 623255 - RNA, 19 nt, Artificial Sequence
  Description of Artificial Sequence: Synthetic oligonucleotide
uaguauaucaagauucaug

SEQ ID NO: 623256 - RNA, 19 nt, Artificial Sequence
  Description of Artificial Sequence: Synthetic oligonucleotide
uuaaauacggaguuugaac

SEQ ID NO: 623257 - RNA, 19 nt, Artificial Sequence
  Description of Artificial Sequence: Synthetic oligonucleotide
auagguaauuuuguuaacc

SEQ ID NO: 623258 - RNA, 19 nt, Artificial Sequence
  Description of Artificial Sequence: Synthetic oligonucleotide
ucguauaaagcucugacuc

SEQ ID NO: 623259 - RNA, 19 nt, Artificial Sequence
  Description of Artificial Sequence: Synthetic oligonucleotide
aaauaugaacccaauguag

SEQ ID NO: 623260 - RNA, 19 nt, Artificial Sequence
  Description of Artificial Sequence: Synthetic oligonucleotide
uagacuagaauagacaggc

SEQ ID NO: 623261 - RNA, 19 nt, Artificial Sequence
  Description of Artificial Sequence: Synthetic oligonucleotide
aaggcuaacauugugugag

SEQ ID NO: 623262 - RNA, 19 nt, Artificial Sequence
  Description of Artificial Sequence: Synthetic oligonucleotide
ugaguaaugggcuggauga

SEQ ID NO: 623263 - RNA, 19 nt, Artificial Sequence
  Description of Artificial Sequence: Synthetic oligonucleotide
auuauuacucagcauaaca

SEQ ID NO: 623264 - RNA, 19 nt, Artificial Sequence
  Description of Artificial Sequence: Synthetic oligonucleotide
auaucuuuacauuucauau

SEQ ID NO: 623265 - RNA, 19 nt, Artificial Sequence
  Description of Artificial Sequence: Synthetic oligonucleotide
cauuuuaacauucagggga

SEQ ID NO: 623266 - RNA, 19 nt, Artificial Sequence
  Description of Artificial Sequence: Synthetic oligonucleotide
aacuguaauuuaaggagcc

SEQ ID NO: 623267 - RNA, 19 nt, Artificial Sequence
  Description of Artificial Sequence: Synthetic oligonucleotide
agcccauaggaucaggucc

SEQ ID NO: 623268 - RNA, 19 nt, Artificial Sequence
  Description of Artificial Sequence: Synthetic oligonucleotide
agucguauaaagcucugac

SEQ ID NO: 623269 - RNA, 19 nt, Artificial Sequence
  Description of Artificial Sequence: Synthetic oligonucleotide
auaggaucagguccuaggc

SEQ ID NO: 623270 - RNA, 19 nt, Artificial Sequence
  Description of Artificial Sequence: Synthetic oligonucleotide
cuuuugauugagaagggag

SEQ ID NO: 623271 - RNA, 19 nt, Artificial Sequence
  Description of Artificial Sequence: Synthetic oligonucleotide
ugaauagacuagaauagac

SEQ ID NO: 623272 - RNA, 19 nt, Artificial Sequence
  Description of Artificial Sequence: Synthetic oligonucleotide
uggcagaaaauaaauaacu

SEQ ID NO: 623273 - RNA, 19 nt, Artificial Sequence
  Description of Artificial Sequence: Synthetic oligonucleotide
aaauacggaguuugaacag

SEQ ID NO: 623274 - RNA, 19 nt, Artificial Sequence
  Description of Artificial Sequence: Synthetic oligonucleotide
uauagcacaaaauuguaua

SEQ ID NO: 623275 - RNA, 19 nt, Artificial Sequence
  Description of Artificial Sequence: Synthetic oligonucleotide
aaugucgccuaucaaucuc

SEQ ID NO: 623276 - RNA, 19 nt, Artificial Sequence
  Description of Artificial Sequence: Synthetic oligonucleotide
gacuagaauagacaggcgc

SEQ ID NO: 623277 - RNA, 19 nt, Artificial Sequence
  Description of Artificial Sequence: Synthetic oligonucleotide
caucuuaaaauaaguacag

SEQ ID NO: 623278 - RNA, 19 nt, Artificial Sequence
  Description of Artificial Sequence: Synthetic oligonucleotide
cuuugaauagacuagaaua

SEQ ID NO: 623279 - RNA, 19 nt, Artificial Sequence
  Description of Artificial Sequence: Synthetic oligonucleotide
gaauccuucggaucuaugc

SEQ ID NO: 623280 - RNA, 19 nt, Artificial Sequence
  Description of Artificial Sequence: Synthetic oligonucleotide
uuuugauugagaagggagu

SEQ ID NO: 623281 - RNA, 19 nt, Artificial Sequence
  Description of Artificial Sequence: Synthetic oligonucleotide
uaauuggugaacguuauga

SEQ ID NO: 623282 - RNA, 19 nt, Artificial Sequence
  Description of Artificial Sequence: Synthetic oligonucleotide
ucuaguauaucaagauuca

SEQ ID NO: 623283 - RNA, 19 nt, Artificial Sequence
  Description of Artificial Sequence: Synthetic oligonucleotide
uguuauacagguccaguga

SEQ ID NO: 623284 - RNA, 19 nt, Artificial Sequence
  Description of Artificial Sequence: Synthetic oligonucleotide
aaggaauacacuggcaauc

SEQ ID NO: 623285 - RNA, 19 nt, Artificial Sequence
  Description of Artificial Sequence: Synthetic oligonucleotide
gaccauuccaccauuagag

SEQ ID NO: 623286 - RNA, 19 nt, Artificial Sequence
  Description of Artificial Sequence: Synthetic oligonucleotide
uauuacucagcauaacacu

SEQ ID NO: 623287 - RNA, 19 nt, Artificial Sequence
  Description of Artificial Sequence: Synthetic oligonucleotide
aauuauuacucagcauaac

SEQ ID NO: 623288 - RNA, 19 nt, Artificial Sequence
  Description of Artificial Sequence: Synthetic oligonucleotide
ucgccuaucaaucucuuca

SEQ ID NO: 623289 - RNA, 19 nt, Artificial Sequence
  Description of Artificial Sequence: Synthetic oligonucleotide
ucugcagguggauacaaag

SEQ ID NO: 623290 - RNA, 19 nt, Artificial Sequence
  Description of Artificial Sequence: Synthetic oligonucleotide
uuggcagaaaauaaauaac

SEQ ID NO: 623291 - RNA, 19 nt, Artificial Sequence
  Description of Artificial Sequence: Synthetic oligonucleotide
aauaugaacccaauguaga

SEQ ID NO: 623292 - RNA, 19 nt, Artificial Sequence
  Description of Artificial Sequence: Synthetic oligonucleotide
aauccuucggaucuaugcu

SEQ ID NO: 623293 - RNA, 19 nt, Artificial Sequence
  Description of Artificial Sequence: Synthetic oligonucleotide
cuggcuaugccuuuccucg

SEQ ID NO: 623294 - RNA, 19 nt, Artificial Sequence
  Description of Artificial Sequence: Synthetic oligonucleotide
uguauagguaauuuuguua

SEQ ID NO: 623295 - RNA, 19 nt, Artificial Sequence
  Description of Artificial Sequence: Synthetic oligonucleotide
gaucaauacagauuuaaua

SEQ ID NO: 623296 - RNA, 19 nt, Artificial Sequence
  Description of Artificial Sequence: Synthetic oligonucleotide
uccacuaugugauggaacu

SEQ ID NO: 623297 - RNA, 19 nt, Artificial Sequence
  Description of Artificial Sequence: Synthetic oligonucleotide
uucauagauuuaauaguug

SEQ ID NO: 623298 - RNA, 19 nt, Artificial Sequence
  Description of Artificial Sequence: Synthetic oligonucleotide
uuacauuaaauuuguccca

SEQ ID NO: 623299 - RNA, 19 nt, Artificial Sequence
  Description of Artificial Sequence: Synthetic oligonucleotide
uauuuggcggcagagaucu

SEQ ID NO: 623300 - RNA, 19 nt, Artificial Sequence
  Description of Artificial Sequence: Synthetic oligonucleotide
ugaaugucgccuaucaauc

SEQ ID NO: 623301 - RNA, 19 nt, Artificial Sequence
  Description of Artificial Sequence: Synthetic oligonucleotide
aaagaacauuggcugacug

SEQ ID NO: 623302 - RNA, 19 nt, Artificial Sequence
  Description of Artificial Sequence: Synthetic oligonucleotide
ucaauaacucuguaacaca

SEQ ID NO: 623303 - RNA, 19 nt, Artificial Sequence
  Description of Artificial Sequence: Synthetic oligonucleotide
ucaaagucguauaaagcuc

SEQ ID NO: 623304 - RNA, 19 nt, Artificial Sequence
  Description of Artificial Sequence: Synthetic oligonucleotide
uaaauuugucccauguuua

SEQ ID NO: 623305 - RNA, 19 nt, Artificial Sequence
  Description of Artificial Sequence: Synthetic oligonucleotide
cauaggaucagguccuagg

SEQ ID NO: 623306 - RNA, 19 nt, Artificial Sequence
  Description of Artificial Sequence: Synthetic oligonucleotide
auauucuguacuggaaccc

SEQ ID NO: 623307 - RNA, 19 nt, Artificial Sequence
  Description of Artificial Sequence: Synthetic oligonucleotide
uguaauuuaaggagccaaa

SEQ ID NO: 623308 - RNA, 19 nt, Artificial Sequence
  Description of Artificial Sequence: Synthetic oligonucleotide
uuguuauacagguccagug

SEQ ID NO: 623309 - RNA, 19 nt, Artificial Sequence
  Description of Artificial Sequence: Synthetic oligonucleotide
aucuaugcucuggagaacc

SEQ ID NO: 623310 - RNA, 19 nt, Artificial Sequence
  Description of Artificial Sequence: Synthetic oligonucleotide
acggggaugaguaaugggc

SEQ ID NO: 623311 - RNA, 19 nt, Artificial Sequence
  Description of Artificial Sequence: Synthetic oligonucleotide
auaacucuguaacacaaau

SEQ ID NO: 623312 - RNA, 19 nt, Artificial Sequence
  Description of Artificial Sequence: Synthetic oligonucleotide
uaucaauaacucuguaaca

SEQ ID NO: 623313 - RNA, 19 nt, Artificial Sequence
  Description of Artificial Sequence: Synthetic oligonucleotide
uagugcuuaaauacggagu

SEQ ID NO: 623314 - RNA, 19 nt, Artificial Sequence
  Description of Artificial Sequence: Synthetic oligonucleotide
uuaauacugaaaccagauc

SEQ ID NO: 623315 - RNA, 19 nt, Artificial Sequence
  Description of Artificial Sequence: Synthetic oligonucleotide
agcacaaaauuguauauuu

SEQ ID NO: 623316 - RNA, 19 nt, Artificial Sequence
  Description of Artificial Sequence: Synthetic oligonucleotide
aaauuugucccauguuuaa

SEQ ID NO: 623317 - RNA, 19 nt, Artificial Sequence
  Description of Artificial Sequence: Synthetic oligonucleotide
agugcuuaaauacggaguu

SEQ ID NO: 623318 - RNA, 19 nt, Artificial Sequence
  Description of Artificial Sequence: Synthetic oligonucleotide
ucuauauaaacaggcucag

SEQ ID NO: 623319 - RNA, 19 nt, Artificial Sequence
  Description of Artificial Sequence: Synthetic oligonucleotide
ugauugagaagggaguuug

SEQ ID NO: 623320 - RNA, 19 nt, Artificial Sequence
  Description of Artificial Sequence: Synthetic oligonucleotide
gaaaccguguccuguguag

SEQ ID NO: 623321 - RNA, 19 nt, Artificial Sequence
  Description of Artificial Sequence: Synthetic oligonucleotide
auaaagcucugacucuccg

SEQ ID NO: 623322 - RNA, 19 nt, Artificial Sequence
  Description of Artificial Sequence: Synthetic oligonucleotide
uccaccauuagagauuuca

SEQ ID NO: 623323 - RNA, 19 nt, Artificial Sequence
  Description of Artificial Sequence: Synthetic oligonucleotide
ucuccgagcagccuuauua

SEQ ID NO: 623324 - RNA, 19 nt, Artificial Sequence
  Description of Artificial Sequence: Synthetic oligonucleotide
ugaacguuaugacccaggu

SEQ ID NO: 623325 - RNA, 19 nt, Artificial Sequence
  Description of Artificial Sequence: Synthetic oligonucleotide
uuuaacauucaggggaugu

SEQ ID NO: 623326 - RNA, 19 nt, Artificial Sequence
  Description of Artificial Sequence: Synthetic oligonucleotide
uaauaggguguuauucaug

SEQ ID NO: 623327 - RNA, 19 nt, Artificial Sequence
  Description of Artificial Sequence: Synthetic oligonucleotide
ugaccauuccaccauuaga

SEQ ID NO: 623328 - RNA, 19 nt, Artificial Sequence
  Description of Artificial Sequence: Synthetic oligonucleotide
ugauggaacugcauauucu

SEQ ID NO: 623329 - RNA, 19 nt, Artificial Sequence
  Description of Artificial Sequence: Synthetic oligonucleotide
uuucuaguauaucaagauu

SEQ ID NO: 623330 - RNA, 19 nt, Artificial Sequence
  Description of Artificial Sequence: Synthetic oligonucleotide
ugucuaaaggagaggcugc

SEQ ID NO: 623331 - RNA, 19 nt, Artificial Sequence
  Description of Artificial Sequence: Synthetic oligonucleotide
guuauacagguccagugac

SEQ ID NO: 623332 - RNA, 19 nt, Artificial Sequence
  Description of Artificial Sequence: Synthetic oligonucleotide
cacaacuguaauuuaagga

SEQ ID NO: 623333 - RNA, 19 nt, Artificial Sequence
  Description of Artificial Sequence: Synthetic oligonucleotide
uuaugacccagguaguuuc

SEQ ID NO: 623334 - RNA, 19 nt, Artificial Sequence
  Description of Artificial Sequence: Synthetic oligonucleotide
uucauaggaucaugggaag

SEQ ID NO: 623335 - RNA, 19 nt, Artificial Sequence
  Description of Artificial Sequence: Synthetic oligonucleotide
auaugcuaauuauuacuca

SEQ ID NO: 623336 - RNA, 19 nt, Artificial Sequence
  Description of Artificial Sequence: Synthetic oligonucleotide
uacacuaaaagauguucau

SEQ ID NO: 623337 - RNA, 19 nt, Artificial Sequence
  Description of Artificial Sequence: Synthetic oligonucleotide
agggaguuugaauauuuca

SEQ ID NO: 623338 - RNA, 19 nt, Artificial Sequence
  Description of Artificial Sequence: Synthetic oligonucleotide
uuuaauaguugcagauauc

SEQ ID NO: 623339 - RNA, 19 nt, Artificial Sequence
  Description of Artificial Sequence: Synthetic oligonucleotide
aauacugaaaccagaucaa

SEQ ID NO: 623340 - RNA, 19 nt, Artificial Sequence
  Description of Artificial Sequence: Synthetic oligonucleotide
ugugugaggcauuccuagg

SEQ ID NO: 623341 - RNA, 19 nt, Artificial Sequence
  Description of Artificial Sequence: Synthetic oligonucleotide
uugaauagacuagaauaga

SEQ ID NO: 623342 - RNA, 19 nt, Artificial Sequence
  Description of Artificial Sequence: Synthetic oligonucleotide
aauacggaguuugaacagu

SEQ ID NO: 623343 - RNA, 19 nt, Artificial Sequence
  Description of Artificial Sequence: Synthetic oligonucleotide
acuggcuaugccuuuccuc

SEQ ID NO: 623344 - RNA, 19 nt, Artificial Sequence
  Description of Artificial Sequence: Synthetic oligonucleotide
acaguucauaggaucaugg

SEQ ID NO: 623345 - RNA, 19 nt, Artificial Sequence
  Description of Artificial Sequence: Synthetic oligonucleotide
auagacuagaauagacagg

SEQ ID NO: 623346 - RNA, 19 nt, Artificial Sequence
  Description of Artificial Sequence: Synthetic oligonucleotide
auccuucggaucuaugcuc

SEQ ID NO: 623347 - RNA, 19 nt, Artificial Sequence
  Description of Artificial Sequence: Synthetic oligonucleotide
cauuucauauuaauacuga

SEQ ID NO: 623348 - RNA, 19 nt, Artificial Sequence
  Description of Artificial Sequence: Synthetic oligonucleotide
auaauaggguguuauucau

SEQ ID NO: 623349 - RNA, 19 nt, Artificial Sequence
  Description of Artificial Sequence: Synthetic oligonucleotide
aaaagauaauguauaggua

SEQ ID NO: 623350 - RNA, 19 nt, Artificial Sequence
  Description of Artificial Sequence: Synthetic oligonucleotide
ucguuagaugacuaaguaa

SEQ ID NO: 623351 - RNA, 19 nt, Artificial Sequence
  Description of Artificial Sequence: Synthetic oligonucleotide
acaucguuagaugacuaag

SEQ ID NO: 623352 - RNA, 19 nt, Artificial Sequence
  Description of Artificial Sequence: Synthetic oligonucleotide
uauucuguacuggaacccc

SEQ ID NO: 623353 - RNA, 19 nt, Artificial Sequence
  Description of Artificial Sequence: Synthetic oligonucleotide
aauuuguuauacaggucca

SEQ ID NO: 623354 - RNA, 19 nt, Artificial Sequence
  Description of Artificial Sequence: Synthetic oligonucleotide
uuauacagguccagugacu

SEQ ID NO: 623355 - RNA, 19 nt, Artificial Sequence
  Description of Artificial Sequence: Synthetic oligonucleotide
uauucauggucuuuugauu

SEQ ID NO: 623356 - RNA, 19 nt, Artificial Sequence
  Description of Artificial Sequence: Synthetic oligonucleotide
cacuaaaagauguucaucu

SEQ ID NO: 623357 - RNA, 19 nt, Artificial Sequence
  Description of Artificial Sequence: Synthetic oligonucleotide
auuuaacugaaugucugca

SEQ ID NO: 623358 - RNA, 19 nt, Artificial Sequence
  Description of Artificial Sequence: Synthetic oligonucleotide
ucauaggaucaugggaagg

SEQ ID NO: 623359 - RNA, 19 nt, Artificial Sequence
  Description of Artificial Sequence: Synthetic oligonucleotide
ucaggggauguuuuauagc

SEQ ID NO: 623360 - RNA, 19 nt, Artificial Sequence
  Description of Artificial Sequence: Synthetic oligonucleotide
aguacaguucauaggauca

SEQ ID NO: 623361 - RNA, 19 nt, Artificial Sequence
  Description of Artificial Sequence: Synthetic oligonucleotide
cugcauauauuaaacuuca

SEQ ID NO: 623362 - RNA, 19 nt, Artificial Sequence
  Description of Artificial Sequence: Synthetic oligonucleotide
uguuuaaaggugaguucgu

SEQ ID NO: 623363 - RNA, 19 nt, Artificial Sequence
  Description of Artificial Sequence: Synthetic oligonucleotide
ucggguucugaauccuucg

SEQ ID NO: 623364 - RNA, 19 nt, Artificial Sequence
  Description of Artificial Sequence: Synthetic oligonucleotide
uugucccauguuuaaaggu

SEQ ID NO: 623365 - RNA, 19 nt, Artificial Sequence
  Description of Artificial Sequence: Synthetic oligonucleotide
agacaggcgcuucauucac

SEQ ID NO: 623366 - RNA, 19 nt, Artificial Sequence
  Description of Artificial Sequence: Synthetic oligonucleotide
gacgcuguguucugguaag

SEQ ID NO: 623367 - RNA, 19 nt, Artificial Sequence
  Description of Artificial Sequence: Synthetic oligonucleotide
gcaaucuuaaggcuuacac

SEQ ID NO: 623368 - RNA, 19 nt, Artificial Sequence
  Description of Artificial Sequence: Synthetic oligonucleotide
aagacacacccgcugacau

SEQ ID NO: 623369 - RNA, 19 nt, Artificial Sequence
  Description of Artificial Sequence: Synthetic oligonucleotide
guagacuaugccuuuggca

SEQ ID NO: 623370 - RNA, 19 nt, Artificial Sequence
  Description of Artificial Sequence: Synthetic oligonucleotide
aagggaguuugaauauuuc

SEQ ID NO: 623371 - RNA, 19 nt, Artificial Sequence
  Description of Artificial Sequence: Synthetic oligonucleotide
acuagaauagacaggcgcu

SEQ ID NO: 623372 - RNA, 19 nt, Artificial Sequence
  Description of Artificial Sequence: Synthetic oligonucleotide
uugagaagggaguuugaau

SEQ ID NO: 623373 - RNA, 19 nt, Artificial Sequence
  Description of Artificial Sequence: Synthetic oligonucleotide
ggaaggcuaacauugugug

SEQ ID NO: 623374 - RNA, 19 nt, Artificial Sequence
  Description of Artificial Sequence: Synthetic oligonucleotide
uagacaggcgcuucauuca

SEQ ID NO: 623375 - RNA, 19 nt, Artificial Sequence
  Description of Artificial Sequence: Synthetic oligonucleotide
aucguuagaugacuaagua

SEQ ID NO: 623376 - RNA, 19 nt, Artificial Sequence
  Description of Artificial Sequence: Synthetic oligonucleotide
uuugauugagaagggaguu

SEQ ID NO: 623377 - RNA, 19 nt, Artificial Sequence
  Description of Artificial Sequence: Synthetic oligonucleotide
agaauagacaggcgcuuca

SEQ ID NO: 623378 - RNA, 19 nt, Artificial Sequence
  Description of Artificial Sequence: Synthetic oligonucleotide
aaccguguccuguguagug

SEQ ID NO: 623379 - RNA, 19 nt, Artificial Sequence
  Description of Artificial Sequence: Synthetic oligonucleotide
auaauuggugaacguuaug

SEQ ID NO: 623380 - RNA, 19 nt, Artificial Sequence
  Description of Artificial Sequence: Synthetic oligonucleotide
auauacagaucauguugca

SEQ ID NO: 623381 - RNA, 19 nt, Artificial Sequence
  Description of Artificial Sequence: Synthetic oligonucleotide
caaugauaauucaauagcu

SEQ ID NO: 623382 - RNA, 19 nt, Artificial Sequence
  Description of Artificial Sequence: Synthetic oligonucleotide
uccuucggaucuaugcucu

SEQ ID NO: 623383 - RNA, 19 nt, Artificial Sequence
  Description of Artificial Sequence: Synthetic oligonucleotide
uaaagcucugacucuccga

SEQ ID NO: 623384 - RNA, 19 nt, Artificial Sequence
  Description of Artificial Sequence: Synthetic oligonucleotide
aguuugaacaguguguguu

SEQ ID NO: 623385 - RNA, 19 nt, Artificial Sequence
  Description of Artificial Sequence: Synthetic oligonucleotide
guaaugggcuggaugaagc

SEQ ID NO: 623386 - RNA, 19 nt, Artificial Sequence
  Description of Artificial Sequence: Synthetic oligonucleotide
uaugacccagguaguuucc

SEQ ID NO: 623387 - RNA, 19 nt, Artificial Sequence
  Description of Artificial Sequence: Synthetic oligonucleotide
uaacucuguaacacaaauu

SEQ ID NO: 623388 - RNA, 19 nt, Artificial Sequence
  Description of Artificial Sequence: Synthetic oligonucleotide
uggcuuucacuguuaauaa

SEQ ID NO: 623389 - RNA, 19 nt, Artificial Sequence
  Description of Artificial Sequence: Synthetic oligonucleotide
ugcauauauuaaacuucac

SEQ ID NO: 623390 - RNA, 19 nt, Artificial Sequence
  Description of Artificial Sequence: Synthetic oligonucleotide
uacaucguuagaugacuaa

SEQ ID NO: 623391 - RNA, 19 nt, Artificial Sequence
  Description of Artificial Sequence: Synthetic oligonucleotide
uacugcaaacacaacugua

SEQ ID NO: 623392 - RNA, 19 nt, Artificial Sequence
  Description of Artificial Sequence: Synthetic oligonucleotide
ggagccaaaaggaauacac

SEQ ID NO: 623393 - RNA, 19 nt, Artificial Sequence
  Description of Artificial Sequence: Synthetic oligonucleotide
accugcugaaggaaaaguc

SEQ ID NO: 623394 - RNA, 19 nt, Artificial Sequence
  Description of Artificial Sequence: Synthetic oligonucleotide
agauaauuggugaacguua

SEQ ID NO: 623395 - RNA, 19 nt, Artificial Sequence
  Description of Artificial Sequence: Synthetic oligonucleotide
acagcuucaaagucguaua

SEQ ID NO: 623396 - RNA, 19 nt, Artificial Sequence
  Description of Artificial Sequence: Synthetic oligonucleotide
auaucaagauucaugugaa

SEQ ID NO: 623397 - RNA, 19 nt, Artificial Sequence
  Description of Artificial Sequence: Synthetic oligonucleotide
aaccugcugaaggaaaagu

SEQ ID NO: 623398 - RNA, 19 nt, Artificial Sequence
  Description of Artificial Sequence: Synthetic oligonucleotide
aggaaaagucacuccuucu

SEQ ID NO: 623399 - RNA, 19 nt, Artificial Sequence
  Description of Artificial Sequence: Synthetic oligonucleotide
agagaucuugggaaucggg

SEQ ID NO: 623400 - RNA, 19 nt, Artificial Sequence
  Description of Artificial Sequence: Synthetic oligonucleotide
uauacagaucauguugcau

SEQ ID NO: 623401 - RNA, 19 nt, Artificial Sequence
  Description of Artificial Sequence: Synthetic oligonucleotide
accguguccuguguagugc

SEQ ID NO: 623402 - RNA, 19 nt, Artificial Sequence
  Description of Artificial Sequence: Synthetic oligonucleotide
ggaucuaugcucuggagaa

SEQ ID NO: 623403 - RNA, 19 nt, Artificial Sequence
  Description of Artificial Sequence: Synthetic oligonucleotide
uccuaggccauagcucugg

SEQ ID NO: 623404 - RNA, 19 nt, Artificial Sequence
  Description of Artificial Sequence: Synthetic oligonucleotide
cugaccauuccaccauuag

SEQ ID NO: 623405 - RNA, 19 nt, Artificial Sequence
  Description of Artificial Sequence: Synthetic oligonucleotide
ucuaugcucuggagaaccu

SEQ ID NO: 623406 - RNA, 19 nt, Artificial Sequence
  Description of Artificial Sequence: Synthetic oligonucleotide
ucggaucuaugcucuggag

SEQ ID NO: 623407 - RNA, 19 nt, Artificial Sequence
  Description of Artificial Sequence: Synthetic oligonucleotide
auacuaucaauaacucugu

SEQ ID NO: 623408 - RNA, 19 nt, Artificial Sequence
  Description of Artificial Sequence: Synthetic oligonucleotide
aaagucguauaaagcucug

SEQ ID NO: 623409 - RNA, 19 nt, Artificial Sequence
  Description of Artificial Sequence: Synthetic oligonucleotide
ugaauccuucggaucuaug

SEQ ID NO: 623410 - RNA, 19 nt, Artificial Sequence
  Description of Artificial Sequence: Synthetic oligonucleotide
auuuuaacauucaggggau

SEQ ID NO: 623411 - RNA, 19 nt, Artificial Sequence
  Description of Artificial Sequence: Synthetic oligonucleotide
cauuaaauuugucccaugu

SEQ ID NO: 623412 - RNA, 19 nt, Artificial Sequence
  Description of Artificial Sequence: Synthetic oligonucleotide
ugaacccaauguagaaauc

SEQ ID NO: 623413 - RNA, 19 nt, Artificial Sequence
  Description of Artificial Sequence: Synthetic oligonucleotide
aggguguuauucauggucu

SEQ ID NO: 623414 - RNA, 19 nt, Artificial Sequence
  Description of Artificial Sequence: Synthetic oligonucleotide
accauuccaccauuagaga

SEQ ID NO: 623415 - RNA, 19 nt, Artificial Sequence
  Description of Artificial Sequence: Synthetic oligonucleotide
aggcuaacauugugugagg

SEQ ID NO: 623416 - RNA, 19 nt, Artificial Sequence
  Description of Artificial Sequence: Synthetic oligonucleotide
ugcuggugguaacuuggug

SEQ ID NO: 623417 - RNA, 19 nt, Artificial Sequence
  Description of Artificial Sequence: Synthetic oligonucleotide
aagucguauaaagcucuga

SEQ ID NO: 623418 - RNA, 19 nt, Artificial Sequence
  Description of Artificial Sequence: Synthetic oligonucleotide
auauuuggcggcagagauc

SEQ ID NO: 623419 - RNA, 19 nt, Artificial Sequence
  Description of Artificial Sequence: Synthetic oligonucleotide
auugagaagggaguuugaa

SEQ ID NO: 623420 - RNA, 19 nt, Artificial Sequence
  Description of Artificial Sequence: Synthetic oligonucleotide
agccgagacagucugggaa

SEQ ID NO: 623421 - RNA, 19 nt, Artificial Sequence
  Description of Artificial Sequence: Synthetic oligonucleotide
ggaaucggguucugaaucc

SEQ ID NO: 623422 - RNA, 19 nt, Artificial Sequence
  Description of Artificial Sequence: Synthetic oligonucleotide
uaacauucaggggauguuu

SEQ ID NO: 623423 - RNA, 19 nt, Artificial Sequence
  Description of Artificial Sequence: Synthetic oligonucleotide
uacggaguuugaacagugu

SEQ ID NO: 623424 - RNA, 19 nt, Artificial Sequence
  Description of Artificial Sequence: Synthetic oligonucleotide
caggccuacaaggacuucc

SEQ ID NO: 623425 - RNA, 19 nt, Artificial Sequence
  Description of Artificial Sequence: Synthetic oligonucleotide
gugaacguuaugacccagg

SEQ ID NO: 623426 - RNA, 19 nt, Artificial Sequence
  Description of Artificial Sequence: Synthetic oligonucleotide
caaagucguauaaagcucu

SEQ ID NO: 623427 - RNA, 19 nt, Artificial Sequence
  Description of Artificial Sequence: Synthetic oligonucleotide
aggcgcuucauucaccaau

SEQ ID NO: 623428 - RNA, 19 nt, Artificial Sequence
  Description of Artificial Sequence: Synthetic oligonucleotide
uuaacauucaggggauguu

SEQ ID NO: 623429 - RNA, 19 nt, Artificial Sequence
  Description of Artificial Sequence: Synthetic oligonucleotide
uaucacaggacuggcuaac

SEQ ID NO: 623430 - RNA, 19 nt, Artificial Sequence
  Description of Artificial Sequence: Synthetic oligonucleotide
cugacggggaugaguaaug

SEQ ID NO: 623431 - RNA, 19 nt, Artificial Sequence
  Description of Artificial Sequence: Synthetic oligonucleotide
uuuuaacauucaggggaug

SEQ ID NO: 623432 - RNA, 19 nt, Artificial Sequence
  Description of Artificial Sequence: Synthetic oligonucleotide
ugguucauguaggaagggu

SEQ ID NO: 623433 - RNA, 19 nt, Artificial Sequence
  Description of Artificial Sequence: Synthetic oligonucleotide
aacuggacgcuguguucug

SEQ ID NO: 623434 - RNA, 19 nt, Artificial Sequence
  Description of Artificial Sequence: Synthetic oligonucleotide
caaucuuaaggcuuacacu

SEQ ID NO: 623435 - RNA, 19 nt, Artificial Sequence
  Description of Artificial Sequence: Synthetic oligonucleotide
uguguguaagcagcuggac

SEQ ID NO: 623436 - RNA, 19 nt, Artificial Sequence
  Description of Artificial Sequence: Synthetic oligonucleotide
agugacaggccuacaagga

SEQ ID NO: 623437 - RNA, 19 nt, Artificial Sequence
  Description of Artificial Sequence: Synthetic oligonucleotide
aaaccguguccuguguagu

SEQ ID NO: 623438 - RNA, 19 nt, Artificial Sequence
  Description of Artificial Sequence: Synthetic oligonucleotide
cugaacuuuacuggcuaug

SEQ ID NO: 623439 - RNA, 19 nt, Artificial Sequence
  Description of Artificial Sequence: Synthetic oligonucleotide
ucugaccauuccaccauua

SEQ ID NO: 623440 - RNA, 19 nt, Artificial Sequence
  Description of Artificial Sequence: Synthetic oligonucleotide
caguacugcaaacacaacu

SEQ ID NO: 623441 - RNA, 19 nt, Artificial Sequence
  Description of Artificial Sequence: Synthetic oligonucleotide
uggugaacguuaugaccca

SEQ ID NO: 623442 - RNA, 19 nt, Artificial Sequence
  Description of Artificial Sequence: Synthetic oligonucleotide
agacuaugccuuuggcaga

SEQ ID NO: 623443 - RNA, 19 nt, Artificial Sequence
  Description of Artificial Sequence: Synthetic oligonucleotide
auacggaguuugaacagug

SEQ ID NO: 623444 - RNA, 19 nt, Artificial Sequence
  Description of Artificial Sequence: Synthetic oligonucleotide
agauaauguauagguaauu

SEQ ID NO: 623445 - RNA, 19 nt, Artificial Sequence
  Description of Artificial Sequence: Synthetic oligonucleotide
uuguucaaugauguaccau

SEQ ID NO: 623446 - RNA, 19 nt, Artificial Sequence
  Description of Artificial Sequence: Synthetic oligonucleotide
cuggcaugucuaaaggaga

SEQ ID NO: 623447 - RNA, 19 nt, Artificial Sequence
  Description of Artificial Sequence: Synthetic oligonucleotide
acuguaauuuaaggagcca

SEQ ID NO: 623448 - RNA, 19 nt, Artificial Sequence
  Description of Artificial Sequence: Synthetic oligonucleotide
gggaaucggguucugaauc

SEQ ID NO: 623449 - RNA, 19 nt, Artificial Sequence
  Description of Artificial Sequence: Synthetic oligonucleotide
uagaauagacaggcgcuuc

SEQ ID NO: 623450 - RNA, 19 nt, Artificial Sequence
  Description of Artificial Sequence: Synthetic oligonucleotide
cccgcugacauccccaugg

SEQ ID NO: 623451 - RNA, 19 nt, Artificial Sequence
  Description of Artificial Sequence: Synthetic oligonucleotide
aucauguugcaugucuuau

SEQ ID NO: 623452 - RNA, 19 nt, Artificial Sequence
  Description of Artificial Sequence: Synthetic oligonucleotide
cuguaauuuaaggagccaa

SEQ ID NO: 623453 - RNA, 19 nt, Artificial Sequence
  Description of Artificial Sequence: Synthetic oligonucleotide
uggaaaccguguccugugu

SEQ ID NO: 623454 - RNA, 19 nt, Artificial Sequence
  Description of Artificial Sequence: Synthetic oligonucleotide
auaggguguuauucauggu

SEQ ID NO: 623455 - RNA, 19 nt, Artificial Sequence
  Description of Artificial Sequence: Synthetic oligonucleotide
gucguauaaagcucugacu

SEQ ID NO: 623456 - RNA, 19 nt, Artificial Sequence
  Description of Artificial Sequence: Synthetic oligonucleotide
uaacauugugugaggcauu

SEQ ID NO: 623457 - RNA, 19 nt, Artificial Sequence
  Description of Artificial Sequence: Synthetic oligonucleotide
acuggcaaucuuaaggcuu

SEQ ID NO: 623458 - RNA, 19 nt, Artificial Sequence
  Description of Artificial Sequence: Synthetic oligonucleotide
gauaauuggugaacguuau

SEQ ID NO: 623459 - RNA, 19 nt, Artificial Sequence
  Description of Artificial Sequence: Synthetic oligonucleotide
uguuacugaggaguucaua

SEQ ID NO: 623460 - RNA, 19 nt, Artificial Sequence
  Description of Artificial Sequence: Synthetic oligonucleotide
ggugguaacuugguggcug

SEQ ID NO: 623461 - RNA, 19 nt, Artificial Sequence
  Description of Artificial Sequence: Synthetic oligonucleotide
uuggcugacuguucauuuu

SEQ ID NO: 623462 - RNA, 19 nt, Artificial Sequence
  Description of Artificial Sequence: Synthetic oligonucleotide
caucguuagaugacuaagu

SEQ ID NO: 623463 - RNA, 19 nt, Artificial Sequence
  Description of Artificial Sequence: Synthetic oligonucleotide
cuaacauugugugaggcau

SEQ ID NO: 623464 - RNA, 19 nt, Artificial Sequence
  Description of Artificial Sequence: Synthetic oligonucleotide
acauucaggggauguuuua

SEQ ID NO: 623465 - RNA, 19 nt, Artificial Sequence
  Description of Artificial Sequence: Synthetic oligonucleotide
gagaucuugggaaucgggu

SEQ ID NO: 623466 - RNA, 19 nt, Artificial Sequence
  Description of Artificial Sequence: Synthetic oligonucleotide
gguaacuugguggcugugc

SEQ ID NO: 623467 - RNA, 19 nt, Artificial Sequence
  Description of Artificial Sequence: Synthetic oligonucleotide
gccuacaaggacuuccaac

SEQ ID NO: 623468 - RNA, 19 nt, Artificial Sequence
  Description of Artificial Sequence: Synthetic oligonucleotide
gaaugucgccuaucaaucu

SEQ ID NO: 623469 - RNA, 19 nt, Artificial Sequence
  Description of Artificial Sequence: Synthetic oligonucleotide
gcuaacauugugugaggca

SEQ ID NO: 623470 - RNA, 19 nt, Artificial Sequence
  Description of Artificial Sequence: Synthetic oligonucleotide
ggaaggguuggaaaccgug

SEQ ID NO: 623471 - RNA, 19 nt, Artificial Sequence
  Description of Artificial Sequence: Synthetic oligonucleotide
cugguucauguaggaaggg

SEQ ID NO: 623472 - RNA, 19 nt, Artificial Sequence
  Description of Artificial Sequence: Synthetic oligonucleotide
gaucuaugcucuggagaac

SEQ ID NO: 623473 - RNA, 19 nt, Artificial Sequence
  Description of Artificial Sequence: Synthetic oligonucleotide
gaacguuaugacccaggua

SEQ ID NO: 623474 - RNA, 19 nt, Artificial Sequence
  Description of Artificial Sequence: Synthetic oligonucleotide
ugaaugucugcagguggau

SEQ ID NO: 623475 - RNA, 19 nt, Artificial Sequence
  Description of Artificial Sequence: Synthetic oligonucleotide
cacugaggagaaacuucug

SEQ ID NO: 623476 - RNA, 19 nt, Artificial Sequence
  Description of Artificial Sequence: Synthetic oligonucleotide
cuggcaaucuuaaggcuua

SEQ ID NO: 623477 - RNA, 19 nt, Artificial Sequence
  Description of Artificial Sequence: Synthetic oligonucleotide
cauuccuaggcccacugcu

SEQ ID NO: 623478 - RNA, 19 nt, Artificial Sequence
  Description of Artificial Sequence: Synthetic oligonucleotide
gguggauacaaaggcuuug

SEQ ID NO: 623479 - RNA, 19 nt, Artificial Sequence
  Description of Artificial Sequence: Synthetic oligonucleotide
augucgccuaucaaucucu

SEQ ID NO: 623480 - RNA, 19 nt, Artificial Sequence
  Description of Artificial Sequence: Synthetic oligonucleotide
ccgggguugagugacaggc

SEQ ID NO: 623481 - RNA, 19 nt, Artificial Sequence
  Description of Artificial Sequence: Synthetic oligonucleotide
uuggacccaucuguuggca

SEQ ID NO: 623482 - RNA, 19 nt, Artificial Sequence
  Description of Artificial Sequence: Synthetic oligonucleotide
gaacauuggcugacuguuc

SEQ ID NO: 623483 - RNA, 19 nt, Artificial Sequence
  Description of Artificial Sequence: Synthetic oligonucleotide
gcuaugccuuuccucgggg

SEQ ID NO: 623484 - RNA, 19 nt, Artificial Sequence
  Description of Artificial Sequence: Synthetic oligonucleotide
gcucuauccauuuuauccu

SEQ ID NO: 623485 - RNA, 19 nt, Artificial Sequence
  Description of Artificial Sequence: Synthetic oligonucleotide
uccucggggaaggcuaaca

SEQ ID NO: 623486 - RNA, 19 nt, Artificial Sequence
  Description of Artificial Sequence: Synthetic oligonucleotide
gaaggguuggaaaccgugu

SEQ ID NO: 623487 - RNA, 19 nt, Artificial Sequence
  Description of Artificial Sequence: Synthetic oligonucleotide
gcggcagagaucucaaaga

SEQ ID NO: 623488 - RNA, 19 nt, Artificial Sequence
  Description of Artificial Sequence: Synthetic oligonucleotide
ggcuaacauugugugaggc

SEQ ID NO: 623489 - RNA, 19 nt, Artificial Sequence
  Description of Artificial Sequence: Synthetic oligonucleotide
cugcuaucacaggacuggc

SEQ ID NO: 623490 - RNA, 19 nt, Artificial Sequence
  Description of Artificial Sequence: Synthetic oligonucleotide
uggacccaucuguuggcaa

SEQ ID NO: 623491 - RNA, 19 nt, Artificial Sequence
  Description of Artificial Sequence: Synthetic oligonucleotide
gagccaaaaggaauacacu

SEQ ID NO: 623492 - RNA, 19 nt, Artificial Sequence
  Description of Artificial Sequence: Synthetic oligonucleotide
gaagggaguuugaauauuu

SEQ ID NO: 623493 - RNA, 19 nt, Artificial Sequence
  Description of Artificial Sequence: Synthetic oligonucleotide
cacacccgcugacaucccc

SEQ ID NO: 623494 - RNA, 19 nt, Artificial Sequence
  Description of Artificial Sequence: Synthetic oligonucleotide
cagcugacggggaugagua

SEQ ID NO: 623495 - RNA, 19 nt, Artificial Sequence
  Description of Artificial Sequence: Synthetic oligonucleotide
ggguucugaauccuucgga

SEQ ID NO: 623496 - RNA, 19 nt, Artificial Sequence
  Description of Artificial Sequence: Synthetic oligonucleotide
aucuuaaggcuuacacuaa

SEQ ID NO: 623497 - RNA, 19 nt, Artificial Sequence
  Description of Artificial Sequence: Synthetic oligonucleotide
cagguaguuuccacuaugu

SEQ ID NO: 623498 - RNA, 19 nt, Artificial Sequence
  Description of Artificial Sequence: Synthetic oligonucleotide
agcuuugaauagacuagaa

SEQ ID NO: 623499 - RNA, 19 nt, Artificial Sequence
  Description of Artificial Sequence: Synthetic oligonucleotide
ggagcaaaacugacaguac

SEQ ID NO: 623500 - RNA, 19 nt, Artificial Sequence
  Description of Artificial Sequence: Synthetic oligonucleotide
caugucuaaaggagaggcu

SEQ ID NO: 623501 - RNA, 19 nt, Artificial Sequence
  Description of Artificial Sequence: Synthetic oligonucleotide
aaucggguucugaauccuu

SEQ ID NO: 623502 - RNA, 19 nt, Artificial Sequence
  Description of Artificial Sequence: Synthetic oligonucleotide
agcauaacacuaggagcaa

SEQ ID NO: 623503 - RNA, 19 nt, Artificial Sequence
  Description of Artificial Sequence: Synthetic oligonucleotide
gucgccuaucaaucucuuc

SEQ ID NO: 623504 - RNA, 19 nt, Artificial Sequence
  Description of Artificial Sequence: Synthetic oligonucleotide
gcuuugaauagacuagaau

SEQ ID NO: 623505 - RNA, 19 nt, Artificial Sequence
  Description of Artificial Sequence: Synthetic oligonucleotide
aggccuacaaggacuucca

SEQ ID NO: 623506 - RNA, 19 nt, Artificial Sequence
  Description of Artificial Sequence: Synthetic oligonucleotide
agggcucuauccauuuuau

SEQ ID NO: 623507 - RNA, 19 nt, Artificial Sequence
  Description of Artificial Sequence: Synthetic oligonucleotide
uggacgcuguguucuggua

SEQ ID NO: 623508 - RNA, 19 nt, Artificial Sequence
  Description of Artificial Sequence: Synthetic oligonucleotide
ggcuaacugcuucaccaca

SEQ ID NO: 623509 - RNA, 19 nt, Artificial Sequence
  Description of Artificial Sequence: Synthetic oligonucleotide
gccuuauuauuuaacugaa

SEQ ID NO: 623510 - RNA, 19 nt, Artificial Sequence
  Description of Artificial Sequence: Synthetic oligonucleotide
cauccccaugggcugugug

SEQ ID NO: 623511 - RNA, 19 nt, Artificial Sequence
  Description of Artificial Sequence: Synthetic oligonucleotide
ggcuuacacuaaaagaugu

SEQ ID NO: 623512 - RNA, 19 nt, Artificial Sequence
  Description of Artificial Sequence: Synthetic oligonucleotide
auuccuaggcccacugcua

SEQ ID NO: 623513 - RNA, 19 nt, Artificial Sequence
  Description of Artificial Sequence: Synthetic oligonucleotide
gugaguucguuguccucaa

SEQ ID NO: 623514 - RNA, 19 nt, Artificial Sequence
  Description of Artificial Sequence: Synthetic oligonucleotide
ggacgcuguguucugguaa

SEQ ID NO: 623515 - RNA, 19 nt, Artificial Sequence
  Description of Artificial Sequence: Synthetic oligonucleotide
gaaucggguucugaauccu

SEQ ID NO: 623516 - RNA, 19 nt, Artificial Sequence
  Description of Artificial Sequence: Synthetic oligonucleotide
cagcugacugaagaugaga

SEQ ID NO: 623517 - RNA, 19 nt, Artificial Sequence
  Description of Artificial Sequence: Synthetic oligonucleotide
gcuaauuauuacucagcau

SEQ ID NO: 623518 - RNA, 19 nt, Artificial Sequence
  Description of Artificial Sequence: Synthetic oligonucleotide
cagauaauuggugaacguu

SEQ ID NO: 623519 - RNA, 19 nt, Artificial Sequence
  Description of Artificial Sequence: Synthetic oligonucleotide
gcuuaaauacggaguuuga

SEQ ID NO: 623520 - RNA, 19 nt, Artificial Sequence
  Description of Artificial Sequence: Synthetic oligonucleotide
guguuauucauggucuuuu

SEQ ID NO: 623521 - RNA, 19 nt, Artificial Sequence
  Description of Artificial Sequence: Synthetic oligonucleotide
gaauagacaggcgcuucau

SEQ ID NO: 623522 - RNA, 19 nt, Artificial Sequence
  Description of Artificial Sequence: Synthetic oligonucleotide
gcauuccuaggcccacugc

SEQ ID NO: 623523 - RNA, 19 nt, Artificial Sequence
  Description of Artificial Sequence: Synthetic oligonucleotide
ggacccaucuguuggcaaa

SEQ ID NO: 623524 - RNA, 19 nt, Artificial Sequence
  Description of Artificial Sequence: Synthetic oligonucleotide
guuaugacccagguaguuu

SEQ ID NO: 623525 - RNA, 19 nt, Artificial Sequence
  Description of Artificial Sequence: Synthetic oligonucleotide
cuugggaaucggguucuga

SEQ ID NO: 623526 - RNA, 19 nt, Artificial Sequence
  Description of Artificial Sequence: Synthetic oligonucleotide
acacccgcugacaucccca

SEQ ID NO: 623527 - RNA, 19 nt, Artificial Sequence
  Description of Artificial Sequence: Synthetic oligonucleotide
gggaaggcuaacauugugu

SEQ ID NO: 623528 - RNA, 19 nt, Artificial Sequence
  Description of Artificial Sequence: Synthetic oligonucleotide
gggguugagugacaggccu

SEQ ID NO: 623529 - RNA, 19 nt, Artificial Sequence
  Description of Artificial Sequence: Synthetic oligonucleotide
cuaugugauggaacugcau

SEQ ID NO: 623530 - RNA, 19 nt, Artificial Sequence
  Description of Artificial Sequence: Synthetic oligonucleotide
guuuaaaggugaguucguu

SEQ ID NO: 623531 - RNA, 19 nt, Artificial Sequence
  Description of Artificial Sequence: Synthetic oligonucleotide
aggaaggguuggaaaccgu

SEQ ID NO: 623532 - RNA, 19 nt, Artificial Sequence
  Description of Artificial Sequence: Synthetic oligonucleotide
cuaguauaucaagauucau

SEQ ID NO: 623533 - RNA, 19 nt, Artificial Sequence
  Description of Artificial Sequence: Synthetic oligonucleotide
agcugacggggaugaguaa

SEQ ID NO: 623534 - RNA, 19 nt, Artificial Sequence
  Description of Artificial Sequence: Synthetic oligonucleotide
acacacccgcugacauccc

SEQ ID NO: 623535 - RNA, 19 nt, Artificial Sequence
  Description of Artificial Sequence: Synthetic oligonucleotide
ccaagagaucuugggaauc

SEQ ID NO: 623536 - RNA, 19 nt, Artificial Sequence
  Description of Artificial Sequence: Synthetic oligonucleotide
cggguucugaauccuucgg

SEQ ID NO: 623537 - RNA, 19 nt, Artificial Sequence
  Description of Artificial Sequence: Synthetic oligonucleotide
ggaaaccguguccugugua

SEQ ID NO: 623538 - RNA, 19 nt, Artificial Sequence
  Description of Artificial Sequence: Synthetic oligonucleotide
cuccgagcagccuuauuau

SEQ ID NO: 623539 - RNA, 19 nt, Artificial Sequence
  Description of Artificial Sequence: Synthetic oligonucleotide
cauucaggggauguuuuau

SEQ ID NO: 623540 - RNA, 19 nt, Artificial Sequence
  Description of Artificial Sequence: Synthetic oligonucleotide
acccgcugacauccccaug

SEQ ID NO: 623541 - RNA, 19 nt, Artificial Sequence
  Description of Artificial Sequence: Synthetic oligonucleotide
cuagaauagacaggcgcuu

SEQ ID NO: 623542 - RNA, 19 nt, Artificial Sequence
  Description of Artificial Sequence: Synthetic oligonucleotide
accccagcugacggggaug

SEQ ID NO: 623543 - RNA, 19 nt, Artificial Sequence
  Description of Artificial Sequence: Synthetic oligonucleotide
cggaucuaugcucuggaga

SEQ ID NO: 623544 - RNA, 19 nt, Artificial Sequence
  Description of Artificial Sequence: Synthetic oligonucleotide
ggcaaucuuaaggcuuaca

SEQ ID NO: 623545 - RNA, 19 nt, Artificial Sequence
  Description of Artificial Sequence: Synthetic oligonucleotide
guccuaggccauagcucug

SEQ ID NO: 623546 - RNA, 19 nt, Artificial Sequence
  Description of Artificial Sequence: Synthetic oligonucleotide
acgcuguguucugguaaga

SEQ ID NO: 623547 - RNA, 19 nt, Artificial Sequence
  Description of Artificial Sequence: Synthetic oligonucleotide
ccacuaugugauggaacug

SEQ ID NO: 623548 - RNA, 19 nt, Artificial Sequence
  Description of Artificial Sequence: Synthetic oligonucleotide
ccgagacagucugggaacc

SEQ ID NO: 623549 - RNA, 19 nt, Artificial Sequence
  Description of Artificial Sequence: Synthetic oligonucleotide
ccgcugacauccccauggg

SEQ ID NO: 623550 - RNA, 19 nt, Artificial Sequence
  Description of Artificial Sequence: Synthetic oligonucleotide
ccauaggaucagguccuag

SEQ ID NO: 623551 - RNA, 19 nt, Artificial Sequence
  Description of Artificial Sequence: Synthetic oligonucleotide
ccuucggaucuaugcucug

SEQ ID NO: 623552 - RNA, 19 nt, Artificial Sequence
  Description of Artificial Sequence: Synthetic oligonucleotide
gcauaacacuaggagcaaa

SEQ ID NO: 623553 - RNA, 19 nt, Artificial Sequence
  Description of Artificial Sequence: Synthetic oligonucleotide
acuaugccuuuggcagaaa

SEQ ID NO: 623554 - RNA, 19 nt, Artificial Sequence
  Description of Artificial Sequence: Synthetic oligonucleotide
gguguuauucauggucuuu

SEQ ID NO: 623555 - RNA, 19 nt, Artificial Sequence
  Description of Artificial Sequence: Synthetic oligonucleotide
gcugacggggaugaguaau

SEQ ID NO: 623556 - RNA, 19 nt, Artificial Sequence
  Description of Artificial Sequence: Synthetic oligonucleotide
ggccuacaaggacuuccaa

SEQ ID NO: 623557 - RNA, 19 nt, Artificial Sequence
  Description of Artificial Sequence: Synthetic oligonucleotide
caggcgcuucauucaccaa

SEQ ID NO: 623558 - RNA, 19 nt, Artificial Sequence
  Description of Artificial Sequence: Synthetic oligonucleotide
cugaauccuucggaucuau

SEQ ID NO: 623559 - RNA, 19 nt, Artificial Sequence
  Description of Artificial Sequence: Synthetic oligonucleotide
ggcgcuucauucaccaauu

SEQ ID NO: 623560 - RNA, 19 nt, Artificial Sequence
  Description of Artificial Sequence: Synthetic oligonucleotide
ggguguuauucauggucuu

SEQ ID NO: 623561 - RNA, 19 nt, Artificial Sequence
  Description of Artificial Sequence: Synthetic oligonucleotide
cacccgcugacauccccau

SEQ ID NO: 623562 - RNA, 19 nt, Artificial Sequence
  Description of Artificial Sequence: Synthetic oligonucleotide
cccauguuuaaaggugagu

SEQ ID NO: 623563 - RNA, 19 nt, Artificial Sequence
  Description of Artificial Sequence: Synthetic oligonucleotide
ccguguccuguguagugcu

SEQ ID NO: 623564 - RNA, 19 nt, Artificial Sequence
  Description of Artificial Sequence: Synthetic oligonucleotide
ccucggggaaggcuaacau

SEQ ID NO: 623565 - RNA, 19 nt, Artificial Sequence
  Description of Artificial Sequence: Synthetic oligonucleotide
uguuuugggauuaaguagg

SEQ ID NO: 623566 - RNA, 19 nt, Artificial Sequence
  Description of Artificial Sequence: Synthetic oligonucleotide
agcuuauaagaucugaggg

SEQ ID NO: 623567 - RNA, 19 nt, Artificial Sequence
  Description of Artificial Sequence: Synthetic oligonucleotide
aaguaggguaggcaaagcc

SEQ ID NO: 623568 - RNA, 19 nt, Artificial Sequence
  Description of Artificial Sequence: Synthetic oligonucleotide
uccguuaccacguagaaga

SEQ ID NO: 623569 - RNA, 19 nt, Artificial Sequence
  Description of Artificial Sequence: Synthetic oligonucleotide
gagaaaggaacuuucagug

SEQ ID NO: 623570 - RNA, 19 nt, Artificial Sequence
  Description of Artificial Sequence: Synthetic oligonucleotide
aggauaguggcacuggccc

SEQ ID NO: 623571 - RNA, 19 nt, Artificial Sequence
  Description of Artificial Sequence: Synthetic oligonucleotide
uuuagaugauucuuuacca

SEQ ID NO: 623572 - RNA, 19 nt, Artificial Sequence
  Description of Artificial Sequence: Synthetic oligonucleotide
cuacuuucugcucagaccc

SEQ ID NO: 623573 - RNA, 19 nt, Artificial Sequence
  Description of Artificial Sequence: Synthetic oligonucleotide
agaaugaucgggaagguac

SEQ ID NO: 623574 - RNA, 19 nt, Artificial Sequence
  Description of Artificial Sequence: Synthetic oligonucleotide
uugggauuaaguaggguag

SEQ ID NO: 623575 - RNA, 19 nt, Artificial Sequence
  Description of Artificial Sequence: Synthetic oligonucleotide
uccuuuaacuggaaggucc

SEQ ID NO: 623576 - RNA, 19 nt, Artificial Sequence
  Description of Artificial Sequence: Synthetic oligonucleotide
ucaagaacuguccuugccc

SEQ ID NO: 623577 - RNA, 19 nt, Artificial Sequence
  Description of Artificial Sequence: Synthetic oligonucleotide
agaacauuuagcaggggcc

SEQ ID NO: 623578 - RNA, 19 nt, Artificial Sequence
  Description of Artificial Sequence: Synthetic oligonucleotide
ugagcuuauaagaucugag

SEQ ID NO: 623579 - RNA, 19 nt, Artificial Sequence
  Description of Artificial Sequence: Synthetic oligonucleotide
cuguaaaagaggcuggagg

SEQ ID NO: 623580 - RNA, 19 nt, Artificial Sequence
  Description of Artificial Sequence: Synthetic oligonucleotide
aaagacucccaguucagga

SEQ ID NO: 623581 - RNA, 19 nt, Artificial Sequence
  Description of Artificial Sequence: Synthetic oligonucleotide
aaggaugugaugcccuggg

SEQ ID NO: 623582 - RNA, 19 nt, Artificial Sequence
  Description of Artificial Sequence: Synthetic oligonucleotide
gaaauagccaaucccacca

SEQ ID NO: 623583 - RNA, 19 nt, Artificial Sequence
  Description of Artificial Sequence: Synthetic oligonucleotide
aaggagacaccugagauga

SEQ ID NO: 623584 - RNA, 19 nt, Artificial Sequence
  Description of Artificial Sequence: Synthetic oligonucleotide
caugauagagcuugguggc

SEQ ID NO: 623585 - RNA, 19 nt, Artificial Sequence
  Description of Artificial Sequence: Synthetic oligonucleotide
uguagucugguauugccgc

SEQ ID NO: 623586 - RNA, 19 nt, Artificial Sequence
  Description of Artificial Sequence: Synthetic oligonucleotide
guguuuugggauuaaguag

SEQ ID NO: 623587 - RNA, 19 nt, Artificial Sequence
  Description of Artificial Sequence: Synthetic oligonucleotide
aguguuuugggauuaagua

SEQ ID NO: 623588 - RNA, 19 nt, Artificial Sequence
  Description of Artificial Sequence: Synthetic oligonucleotide
aucaagaacuguccuugcc

SEQ ID NO: 623589 - RNA, 19 nt, Artificial Sequence
  Description of Artificial Sequence: Synthetic oligonucleotide
uauaagaucugagggaaca

SEQ ID NO: 623590 - RNA, 19 nt, Artificial Sequence
  Description of Artificial Sequence: Synthetic oligonucleotide
aagacucccaguucaggag

SEQ ID NO: 623591 - RNA, 19 nt, Artificial Sequence
  Description of Artificial Sequence: Synthetic oligonucleotide
aauagccaaucccaccaag

SEQ ID NO: 623592 - RNA, 19 nt, Artificial Sequence
  Description of Artificial Sequence: Synthetic oligonucleotide
gauuaaguaggguaggcaa

SEQ ID NO: 623593 - RNA, 19 nt, Artificial Sequence
  Description of Artificial Sequence: Synthetic oligonucleotide
ggaagaaugaucgggaagg

SEQ ID NO: 623594 - RNA, 19 nt, Artificial Sequence
  Description of Artificial Sequence: Synthetic oligonucleotide
agaaguguaaggcggaagu

SEQ ID NO: 623595 - RNA, 19 nt, Artificial Sequence
  Description of Artificial Sequence: Synthetic oligonucleotide
auuggcacggaguucauga

SEQ ID NO: 623596 - RNA, 19 nt, Artificial Sequence
  Description of Artificial Sequence: Synthetic oligonucleotide
guagggaccuuccacaugc

SEQ ID NO: 623597 - RNA, 19 nt, Artificial Sequence
  Description of Artificial Sequence: Synthetic oligonucleotide
uaaggcggaagucaccaag

SEQ ID NO: 623598 - RNA, 19 nt, Artificial Sequence
  Description of Artificial Sequence: Synthetic oligonucleotide
acuuugauggagccaagag

SEQ ID NO: 623599 - RNA, 19 nt, Artificial Sequence
  Description of Artificial Sequence: Synthetic oligonucleotide
agcuagguaguugauauuc

SEQ ID NO: 623600 - RNA, 19 nt, Artificial Sequence
  Description of Artificial Sequence: Synthetic oligonucleotide
gaucugagggaacaagacc

SEQ ID NO: 623601 - RNA, 19 nt, Artificial Sequence
  Description of Artificial Sequence: Synthetic oligonucleotide
uccaagugacacaaguggc

SEQ ID NO: 623602 - RNA, 19 nt, Artificial Sequence
  Description of Artificial Sequence: Synthetic oligonucleotide
gggagcguaacccaaaggg

SEQ ID NO: 623603 - RNA, 19 nt, Artificial Sequence
  Description of Artificial Sequence: Synthetic oligonucleotide
cacuaaugaacuucaacug

SEQ ID NO: 623604 - RNA, 19 nt, Artificial Sequence
  Description of Artificial Sequence: Synthetic oligonucleotide
guaguugauauucaaccac

SEQ ID NO: 623605 - RNA, 19 nt, Artificial Sequence
  Description of Artificial Sequence: Synthetic oligonucleotide
ugucagcuagaacauuuag

SEQ ID NO: 623606 - RNA, 19 nt, Artificial Sequence
  Description of Artificial Sequence: Synthetic oligonucleotide
agacaaggcuuguccaucc

SEQ ID NO: 623607 - RNA, 19 nt, Artificial Sequence
  Description of Artificial Sequence: Synthetic oligonucleotide
aauuacgcugucuguaaaa

SEQ ID NO: 623608 - RNA, 19 nt, Artificial Sequence
  Description of Artificial Sequence: Synthetic oligonucleotide
aaggcuuguccauccgugg

SEQ ID NO: 623609 - RNA, 19 nt, Artificial Sequence
  Description of Artificial Sequence: Synthetic oligonucleotide
augaucaguaagacaaggc

SEQ ID NO: 623610 - RNA, 19 nt, Artificial Sequence
  Description of Artificial Sequence: Synthetic oligonucleotide
uugcucacuacauuggcac

SEQ ID NO: 623611 - RNA, 19 nt, Artificial Sequence
  Description of Artificial Sequence: Synthetic oligonucleotide
cauccaucagcauugagca

SEQ ID NO: 623612 - RNA, 19 nt, Artificial Sequence
  Description of Artificial Sequence: Synthetic oligonucleotide
ucgggaucgggccucaucc

SEQ ID NO: 623613 - RNA, 19 nt, Artificial Sequence
  Description of Artificial Sequence: Synthetic oligonucleotide
aacauuuagcaggggcccc

SEQ ID NO: 623614 - RNA, 19 nt, Artificial Sequence
  Description of Artificial Sequence: Synthetic oligonucleotide
ugguauugccgccauacgu

SEQ ID NO: 623615 - RNA, 19 nt, Artificial Sequence
  Description of Artificial Sequence: Synthetic oligonucleotide
agcgguaggauaguggcac

SEQ ID NO: 623616 - RNA, 19 nt, Artificial Sequence
  Description of Artificial Sequence: Synthetic oligonucleotide
ucugguauugccgccauac

SEQ ID NO: 623617 - RNA, 19 nt, Artificial Sequence
  Description of Artificial Sequence: Synthetic oligonucleotide
uguaaggcggaagucacca

SEQ ID NO: 623618 - RNA, 19 nt, Artificial Sequence
  Description of Artificial Sequence: Synthetic oligonucleotide
agaaaccuaagaccuuguc

SEQ ID NO: 623619 - RNA, 19 nt, Artificial Sequence
  Description of Artificial Sequence: Synthetic oligonucleotide
aagaacuguccuugcccac

SEQ ID NO: 623620 - RNA, 19 nt, Artificial Sequence
  Description of Artificial Sequence: Synthetic oligonucleotide
agaugagcuuauaagaucu

SEQ ID NO: 623621 - RNA, 19 nt, Artificial Sequence
  Description of Artificial Sequence: Synthetic oligonucleotide
uguuuagaugauucuuuac

SEQ ID NO: 623622 - RNA, 19 nt, Artificial Sequence
  Description of Artificial Sequence: Synthetic oligonucleotide
aaaacgcucuuggaaagcu

SEQ ID NO: 623623 - RNA, 19 nt, Artificial Sequence
  Description of Artificial Sequence: Synthetic oligonucleotide
agaucugagggaacaagac

SEQ ID NO: 623624 - RNA, 19 nt, Artificial Sequence
  Description of Artificial Sequence: Synthetic oligonucleotide
auuacgcugucuguaaaag

SEQ ID NO: 623625 - RNA, 19 nt, Artificial Sequence
  Description of Artificial Sequence: Synthetic oligonucleotide
ugguauguccacuaaugaa

SEQ ID NO: 623626 - RNA, 19 nt, Artificial Sequence
  Description of Artificial Sequence: Synthetic oligonucleotide
gccgcucugauguagaagg

SEQ ID NO: 623627 - RNA, 19 nt, Artificial Sequence
  Description of Artificial Sequence: Synthetic oligonucleotide
gaacauuuagcaggggccc

SEQ ID NO: 623628 - RNA, 19 nt, Artificial Sequence
  Description of Artificial Sequence: Synthetic oligonucleotide
guggaaauagggcaggguc

SEQ ID NO: 623629 - RNA, 19 nt, Artificial Sequence
  Description of Artificial Sequence: Synthetic oligonucleotide
cacguagaagaacagggac

SEQ ID NO: 623630 - RNA, 19 nt, Artificial Sequence
  Description of Artificial Sequence: Synthetic oligonucleotide
ugagcuguacugcuuuugu

SEQ ID NO: 623631 - RNA, 19 nt, Artificial Sequence
  Description of Artificial Sequence: Synthetic oligonucleotide
aaugaucgggaagguacuc

SEQ ID NO: 623632 - RNA, 19 nt, Artificial Sequence
  Description of Artificial Sequence: Synthetic oligonucleotide
uguaucaagaacuguccuu

SEQ ID NO: 623633 - RNA, 19 nt, Artificial Sequence
  Description of Artificial Sequence: Synthetic oligonucleotide
ucaugcucagaauuacgcu

SEQ ID NO: 623634 - RNA, 19 nt, Artificial Sequence
  Description of Artificial Sequence: Synthetic oligonucleotide
aagaucugagggaacaaga

SEQ ID NO: 623635 - RNA, 19 nt, Artificial Sequence
  Description of Artificial Sequence: Synthetic oligonucleotide
aaccuuguagggaccuucc

SEQ ID NO: 623636 - RNA, 19 nt, Artificial Sequence
  Description of Artificial Sequence: Synthetic oligonucleotide
aguguaaggcggaagucac

SEQ ID NO: 623637 - RNA, 19 nt, Artificial Sequence
  Description of Artificial Sequence: Synthetic oligonucleotide
uucaacuguccuuuggcuc

SEQ ID NO: 623638 - RNA, 19 nt, Artificial Sequence
  Description of Artificial Sequence: Synthetic oligonucleotide
gguauguccacuaaugaac

SEQ ID NO: 623639 - RNA, 19 nt, Artificial Sequence
  Description of Artificial Sequence: Synthetic oligonucleotide
aguugauauucaaccacac

SEQ ID NO: 623640 - RNA, 19 nt, Artificial Sequence
  Description of Artificial Sequence: Synthetic oligonucleotide
uuggaggaccagaagacau

SEQ ID NO: 623641 - RNA, 19 nt, Artificial Sequence
  Description of Artificial Sequence: Synthetic oligonucleotide
accaccuucuaacauuugu

SEQ ID NO: 623642 - RNA, 19 nt, Artificial Sequence
  Description of Artificial Sequence: Synthetic oligonucleotide
uguccauccguggaagggg

SEQ ID NO: 623643 - RNA, 19 nt, Artificial Sequence
  Description of Artificial Sequence: Synthetic oligonucleotide
augaucgggaagguacucc

SEQ ID NO: 623644 - RNA, 19 nt, Artificial Sequence
  Description of Artificial Sequence: Synthetic oligonucleotide
guugcacuaggaauucugg

SEQ ID NO: 623645 - RNA, 19 nt, Artificial Sequence
  Description of Artificial Sequence: Synthetic oligonucleotide
ucagaauuacgcugucugu

SEQ ID NO: 623646 - RNA, 19 nt, Artificial Sequence
  Description of Artificial Sequence: Synthetic oligonucleotide
uggacuugagcuguacugc

SEQ ID NO: 623647 - RNA, 19 nt, Artificial Sequence
  Description of Artificial Sequence: Synthetic oligonucleotide
gucaugcucagaauuacgc

SEQ ID NO: 623648 - RNA, 19 nt, Artificial Sequence
  Description of Artificial Sequence: Synthetic oligonucleotide
cugacagggagcguaaccc

SEQ ID NO: 623649 - RNA, 19 nt, Artificial Sequence
  Description of Artificial Sequence: Synthetic oligonucleotide
auauucaaccacacagcac

SEQ ID NO: 623650 - RNA, 19 nt, Artificial Sequence
  Description of Artificial Sequence: Synthetic oligonucleotide
cuaaccagcccuugaggag

SEQ ID NO: 623651 - RNA, 19 nt, Artificial Sequence
  Description of Artificial Sequence: Synthetic oligonucleotide
uuguccauccguggaaggg

SEQ ID NO: 623652 - RNA, 19 nt, Artificial Sequence
  Description of Artificial Sequence: Synthetic oligonucleotide
augggcuacacguugcacu

SEQ ID NO: 623653 - RNA, 19 nt, Artificial Sequence
  Description of Artificial Sequence: Synthetic oligonucleotide
uuauaagaucugagggaac

SEQ ID NO: 623654 - RNA, 19 nt, Artificial Sequence
  Description of Artificial Sequence: Synthetic oligonucleotide
agaauuacgcugucuguaa

SEQ ID NO: 623655 - RNA, 19 nt, Artificial Sequence
  Description of Artificial Sequence: Synthetic oligonucleotide
ugggauuaaguaggguagg

SEQ ID NO: 623656 - RNA, 19 nt, Artificial Sequence
  Description of Artificial Sequence: Synthetic oligonucleotide
uguacugcuuuuguguggu

SEQ ID NO: 623657 - RNA, 19 nt, Artificial Sequence
  Description of Artificial Sequence: Synthetic oligonucleotide
gcugaaaccagcuguuuag

SEQ ID NO: 623658 - RNA, 19 nt, Artificial Sequence
  Description of Artificial Sequence: Synthetic oligonucleotide
ucagagauccaggcaagcc

SEQ ID NO: 623659 - RNA, 19 nt, Artificial Sequence
  Description of Artificial Sequence: Synthetic oligonucleotide
gucagcuagaacauuuagc

SEQ ID NO: 623660 - RNA, 19 nt, Artificial Sequence
  Description of Artificial Sequence: Synthetic oligonucleotide
gaagguccucucaaaacgc

SEQ ID NO: 623661 - RNA, 19 nt, Artificial Sequence
  Description of Artificial Sequence: Synthetic oligonucleotide
aagguagcguucgggagag

SEQ ID NO: 623662 - RNA, 19 nt, Artificial Sequence
  Description of Artificial Sequence: Synthetic oligonucleotide
uuacgcugucuguaaaaga

SEQ ID NO: 623663 - RNA, 19 nt, Artificial Sequence
  Description of Artificial Sequence: Synthetic oligonucleotide
aaaccucgugggaagaaug

SEQ ID NO: 623664 - RNA, 19 nt, Artificial Sequence
  Description of Artificial Sequence: Synthetic oligonucleotide
ugcucacuacauuggcacg

SEQ ID NO: 623665 - RNA, 19 nt, Artificial Sequence
  Description of Artificial Sequence: Synthetic oligonucleotide
uguucugcaagcugugaua

SEQ ID NO: 623666 - RNA, 19 nt, Artificial Sequence
  Description of Artificial Sequence: Synthetic oligonucleotide
aauagacucuugaguucac

SEQ ID NO: 623667 - RNA, 19 nt, Artificial Sequence
  Description of Artificial Sequence: Synthetic oligonucleotide
agccuuucggaggaaggcc

SEQ ID NO: 623668 - RNA, 19 nt, Artificial Sequence
  Description of Artificial Sequence: Synthetic oligonucleotide
aacaccaaacccuguccau

SEQ ID NO: 623669 - RNA, 19 nt, Artificial Sequence
  Description of Artificial Sequence: Synthetic oligonucleotide
gccaaucccaccaaggagg

SEQ ID NO: 623670 - RNA, 19 nt, Artificial Sequence
  Description of Artificial Sequence: Synthetic oligonucleotide
ggggaaaagccuuucggag

SEQ ID NO: 623671 - RNA, 19 nt, Artificial Sequence
  Description of Artificial Sequence: Synthetic oligonucleotide
cacaugcccauaguggugg

SEQ ID NO: 623672 - RNA, 19 nt, Artificial Sequence
  Description of Artificial Sequence: Synthetic oligonucleotide
cacccagcaucgaaggucc

SEQ ID NO: 623673 - RNA, 19 nt, Artificial Sequence
  Description of Artificial Sequence: Synthetic oligonucleotide
agggucuacuuucugcuca

SEQ ID NO: 623674 - RNA, 19 nt, Artificial Sequence
  Description of Artificial Sequence: Synthetic oligonucleotide
aguaggguaggcaaagccu

SEQ ID NO: 623675 - RNA, 19 nt, Artificial Sequence
  Description of Artificial Sequence: Synthetic oligonucleotide
aaauagggcagggucuacu

SEQ ID NO: 623676 - RNA, 19 nt, Artificial Sequence
  Description of Artificial Sequence: Synthetic oligonucleotide
augcaggcggggaaaagcc

SEQ ID NO: 623677 - RNA, 19 nt, Artificial Sequence
  Description of Artificial Sequence: Synthetic oligonucleotide
uucacugguauguccacua

SEQ ID NO: 623678 - RNA, 19 nt, Artificial Sequence
  Description of Artificial Sequence: Synthetic oligonucleotide
caaggcuuguccauccgug

SEQ ID NO: 623679 - RNA, 19 nt, Artificial Sequence
  Description of Artificial Sequence: Synthetic oligonucleotide
augauagagcuugguggcc

SEQ ID NO: 623680 - RNA, 19 nt, Artificial Sequence
  Description of Artificial Sequence: Synthetic oligonucleotide
agauauagcccagggcauc

SEQ ID NO: 623681 - RNA, 19 nt, Artificial Sequence
  Description of Artificial Sequence: Synthetic oligonucleotide
uaacuggaagguccucuca

SEQ ID NO: 623682 - RNA, 19 nt, Artificial Sequence
  Description of Artificial Sequence: Synthetic oligonucleotide
guaggauaguggcacuggc

SEQ ID NO: 623683 - RNA, 19 nt, Artificial Sequence
  Description of Artificial Sequence: Synthetic oligonucleotide
caugcaggcggggaaaagc

SEQ ID NO: 623684 - RNA, 19 nt, Artificial Sequence
  Description of Artificial Sequence: Synthetic oligonucleotide
gacaaggcuuguccauccg

SEQ ID NO: 623685 - RNA, 19 nt, Artificial Sequence
  Description of Artificial Sequence: Synthetic oligonucleotide
gaugugaugcccuggggua

SEQ ID NO: 623686 - RNA, 19 nt, Artificial Sequence
  Description of Artificial Sequence: Synthetic oligonucleotide
gguaguugauauucaacca

SEQ ID NO: 623687 - RNA, 19 nt, Artificial Sequence
  Description of Artificial Sequence: Synthetic oligonucleotide
guauugccgccauacguug

SEQ ID NO: 623688 - RNA, 19 nt, Artificial Sequence
  Description of Artificial Sequence: Synthetic oligonucleotide
accuucuaacauuuguaau

SEQ ID NO: 623689 - RNA, 19 nt, Artificial Sequence
  Description of Artificial Sequence: Synthetic oligonucleotide
gaugacaaggagacaccug

SEQ ID NO: 623690 - RNA, 19 nt, Artificial Sequence
  Description of Artificial Sequence: Synthetic oligonucleotide
uagcguucgggagaggccc

SEQ ID NO: 623691 - RNA, 19 nt, Artificial Sequence
  Description of Artificial Sequence: Synthetic oligonucleotide
uuagcaugggcuacacguu

SEQ ID NO: 623692 - RNA, 19 nt, Artificial Sequence
  Description of Artificial Sequence: Synthetic oligonucleotide
uaccacccuaaccagcccu

SEQ ID NO: 623693 - RNA, 19 nt, Artificial Sequence
  Description of Artificial Sequence: Synthetic oligonucleotide
gaccacuagcuggugaaag

SEQ ID NO: 623694 - RNA, 19 nt, Artificial Sequence
  Description of Artificial Sequence: Synthetic oligonucleotide
auugccgccauacguugcu

SEQ ID NO: 623695 - RNA, 19 nt, Artificial Sequence
  Description of Artificial Sequence: Synthetic oligonucleotide
agggagcguaacccaaagg

SEQ ID NO: 623696 - RNA, 19 nt, Artificial Sequence
  Description of Artificial Sequence: Synthetic oligonucleotide
cugggguagucauccaggc

SEQ ID NO: 623697 - RNA, 19 nt, Artificial Sequence
  Description of Artificial Sequence: Synthetic oligonucleotide
uguagcugccaugcuuagg

SEQ ID NO: 623698 - RNA, 19 nt, Artificial Sequence
  Description of Artificial Sequence: Synthetic oligonucleotide
aucgggaagguacuccaga

SEQ ID NO: 623699 - RNA, 19 nt, Artificial Sequence
  Description of Artificial Sequence: Synthetic oligonucleotide
uauagcccagggcauccac

SEQ ID NO: 623700 - RNA, 19 nt, Artificial Sequence
  Description of Artificial Sequence: Synthetic oligonucleotide
ccaagugacacaaguggcc

SEQ ID NO: 623701 - RNA, 19 nt, Artificial Sequence
  Description of Artificial Sequence: Synthetic oligonucleotide
ugcccugggguagucaucc

SEQ ID NO: 623702 - RNA, 19 nt, Artificial Sequence
  Description of Artificial Sequence: Synthetic oligonucleotide
aggaugugaugcccugggg

SEQ ID NO: 623703 - RNA, 19 nt, Artificial Sequence
  Description of Artificial Sequence: Synthetic oligonucleotide
ucacuacauuggcacggag

SEQ ID NO: 623704 - RNA, 19 nt, Artificial Sequence
  Description of Artificial Sequence: Synthetic oligonucleotide
caaagacucccaguucagg

SEQ ID NO: 623705 - RNA, 19 nt, Artificial Sequence
  Description of Artificial Sequence: Synthetic oligonucleotide
ggagcguaacccaaagggg

SEQ ID NO: 623706 - RNA, 19 nt, Artificial Sequence
  Description of Artificial Sequence: Synthetic oligonucleotide
gggaagaaugaucgggaag

SEQ ID NO: 623707 - RNA, 19 nt, Artificial Sequence
  Description of Artificial Sequence: Synthetic oligonucleotide
ccagcgguaggauaguggc

SEQ ID NO: 623708 - RNA, 19 nt, Artificial Sequence
  Description of Artificial Sequence: Synthetic oligonucleotide
agcaucgaagguccaggug

SEQ ID NO: 623709 - RNA, 19 nt, Artificial Sequence
  Description of Artificial Sequence: Synthetic oligonucleotide
acaaggcuuguccauccgu

SEQ ID NO: 623710 - RNA, 19 nt, Artificial Sequence
  Description of Artificial Sequence: Synthetic oligonucleotide
gccagacucaaauaugaac

SEQ ID NO: 623711 - RNA, 19 nt, Artificial Sequence
  Description of Artificial Sequence: Synthetic oligonucleotide
caucuagauuccuggguuc

SEQ ID NO: 623712 - RNA, 19 nt, Artificial Sequence
  Description of Artificial Sequence: Synthetic oligonucleotide
ucucgagugagguggggau

SEQ ID NO: 623713 - RNA, 19 nt, Artificial Sequence
  Description of Artificial Sequence: Synthetic oligonucleotide
ugcuuagggacagugucuc

SEQ ID NO: 623714 - RNA, 19 nt, Artificial Sequence
  Description of Artificial Sequence: Synthetic oligonucleotide
ucccaguucaggagcccag

SEQ ID NO: 623715 - RNA, 19 nt, Artificial Sequence
  Description of Artificial Sequence: Synthetic oligonucleotide
gaugagcuuauaagaucug

SEQ ID NO: 623716 - RNA, 19 nt, Artificial Sequence
  Description of Artificial Sequence: Synthetic oligonucleotide
uccauccguggaaggggcg

SEQ ID NO: 623717 - RNA, 19 nt, Artificial Sequence
  Description of Artificial Sequence: Synthetic oligonucleotide
uggaggccggccuaccacc

SEQ ID NO: 623718 - RNA, 19 nt, Artificial Sequence
  Description of Artificial Sequence: Synthetic oligonucleotide
cugguauugccgccauacg

SEQ ID NO: 623719 - RNA, 19 nt, Artificial Sequence
  Description of Artificial Sequence: Synthetic oligonucleotide
ugggcuacacguugcacua

SEQ ID NO: 623720 - RNA, 19 nt, Artificial Sequence
  Description of Artificial Sequence: Synthetic oligonucleotide
gcuguaucaagaacugucc

SEQ ID NO: 623721 - RNA, 19 nt, Artificial Sequence
  Description of Artificial Sequence: Synthetic oligonucleotide
gaaguguaaggcggaaguc

SEQ ID NO: 623722 - RNA, 19 nt, Artificial Sequence
  Description of Artificial Sequence: Synthetic oligonucleotide
aaccucgugggaagaauga

SEQ ID NO: 623723 - RNA, 19 nt, Artificial Sequence
  Description of Artificial Sequence: Synthetic oligonucleotide
ucacuguacuguucccaca

SEQ ID NO: 623724 - RNA, 19 nt, Artificial Sequence
  Description of Artificial Sequence: Synthetic oligonucleotide
cagaaacccuguagucugg

SEQ ID NO: 623725 - RNA, 19 nt, Artificial Sequence
  Description of Artificial Sequence: Synthetic oligonucleotide
caccuucuaacauuuguaa

SEQ ID NO: 623726 - RNA, 19 nt, Artificial Sequence
  Description of Artificial Sequence: Synthetic oligonucleotide
cugguauguccacuaauga

SEQ ID NO: 623727 - RNA, 19 nt, Artificial Sequence
  Description of Artificial Sequence: Synthetic oligonucleotide
uuaccaugucugugagcag

SEQ ID NO: 623728 - RNA, 19 nt, Artificial Sequence
  Description of Artificial Sequence: Synthetic oligonucleotide
guagucugguauugccgcc

SEQ ID NO: 623729 - RNA, 19 nt, Artificial Sequence
  Description of Artificial Sequence: Synthetic oligonucleotide
ggcuacacguugcacuagg

SEQ ID NO: 623730 - RNA, 19 nt, Artificial Sequence
  Description of Artificial Sequence: Synthetic oligonucleotide
caagguagcguucgggaga

SEQ ID NO: 623731 - RNA, 19 nt, Artificial Sequence
  Description of Artificial Sequence: Synthetic oligonucleotide
gaauuacgcugucuguaaa

SEQ ID NO: 623732 - RNA, 19 nt, Artificial Sequence
  Description of Artificial Sequence: Synthetic oligonucleotide
agagcuguacgggaugaca

SEQ ID NO: 623733 - RNA, 19 nt, Artificial Sequence
  Description of Artificial Sequence: Synthetic oligonucleotide
aagguccucucaaaacgcu

SEQ ID NO: 623734 - RNA, 19 nt, Artificial Sequence
  Description of Artificial Sequence: Synthetic oligonucleotide
gcggggaaaagccuuucgg

SEQ ID NO: 623735 - RNA, 19 nt, Artificial Sequence
  Description of Artificial Sequence: Synthetic oligonucleotide
gaaccuuguagggaccuuc

SEQ ID NO: 623736 - RNA, 19 nt, Artificial Sequence
  Description of Artificial Sequence: Synthetic oligonucleotide
aggacucgggcacccaaug

SEQ ID NO: 623737 - RNA, 19 nt, Artificial Sequence
  Description of Artificial Sequence: Synthetic oligonucleotide
agaccuugucucugcauau

SEQ ID NO: 623738 - RNA, 19 nt, Artificial Sequence
  Description of Artificial Sequence: Synthetic oligonucleotide
agauuccuggguucuucca

SEQ ID NO: 623739 - RNA, 19 nt, Artificial Sequence
  Description of Artificial Sequence: Synthetic oligonucleotide
ugauaggacucgggcaccc

SEQ ID NO: 623740 - RNA, 19 nt, Artificial Sequence
  Description of Artificial Sequence: Synthetic oligonucleotide
auccguuaccacguagaag

SEQ ID NO: 623741 - RNA, 19 nt, Artificial Sequence
  Description of Artificial Sequence: Synthetic oligonucleotide
gcuguacgggaugacaagg

SEQ ID NO: 623742 - RNA, 19 nt, Artificial Sequence
  Description of Artificial Sequence: Synthetic oligonucleotide
cuucaguacucuucagcca

SEQ ID NO: 623743 - RNA, 19 nt, Artificial Sequence
  Description of Artificial Sequence: Synthetic oligonucleotide
uagucugguauugccgcca

SEQ ID NO: 623744 - RNA, 19 nt, Artificial Sequence
  Description of Artificial Sequence: Synthetic oligonucleotide
ugcaggcggggaaaagccu

SEQ ID NO: 623745 - RNA, 19 nt, Artificial Sequence
  Description of Artificial Sequence: Synthetic oligonucleotide
aagcuagguaguugauauu

SEQ ID NO: 623746 - RNA, 19 nt, Artificial Sequence
  Description of Artificial Sequence: Synthetic oligonucleotide
gguagcguucgggagaggc

SEQ ID NO: 623747 - RNA, 19 nt, Artificial Sequence
  Description of Artificial Sequence: Synthetic oligonucleotide
cagaaguguaaggcggaag

SEQ ID NO: 623748 - RNA, 19 nt, Artificial Sequence
  Description of Artificial Sequence: Synthetic oligonucleotide
auaggacucgggcacccaa

SEQ ID NO: 623749 - RNA, 19 nt, Artificial Sequence
  Description of Artificial Sequence: Synthetic oligonucleotide
auagacucuugaguucaca

SEQ ID NO: 623750 - RNA, 19 nt, Artificial Sequence
  Description of Artificial Sequence: Synthetic oligonucleotide
ugccgccauacguugcuca

SEQ ID NO: 623751 - RNA, 19 nt, Artificial Sequence
  Description of Artificial Sequence: Synthetic oligonucleotide
agguccucucaaaacgcuc

SEQ ID NO: 623752 - RNA, 19 nt, Artificial Sequence
  Description of Artificial Sequence: Synthetic oligonucleotide
auuuagcaggggccccaag

SEQ ID NO: 623753 - RNA, 19 nt, Artificial Sequence
  Description of Artificial Sequence: Synthetic oligonucleotide
guugcucacuacauuggca

SEQ ID NO: 623754 - RNA, 19 nt, Artificial Sequence
  Description of Artificial Sequence: Synthetic oligonucleotide
aacccuguccauagaaaua

SEQ ID NO: 623755 - RNA, 19 nt, Artificial Sequence
  Description of Artificial Sequence: Synthetic oligonucleotide
cugcauauuccaagugaca

SEQ ID NO: 623756 - RNA, 19 nt, Artificial Sequence
  Description of Artificial Sequence: Synthetic oligonucleotide
acuguacuguucccacaga

SEQ ID NO: 623757 - RNA, 19 nt, Artificial Sequence
  Description of Artificial Sequence: Synthetic oligonucleotide
cuguacgggaugacaagga

SEQ ID NO: 623758 - RNA, 19 nt, Artificial Sequence
  Description of Artificial Sequence: Synthetic oligonucleotide
uaacccaaaggggcuccag

SEQ ID NO: 623759 - RNA, 19 nt, Artificial Sequence
  Description of Artificial Sequence: Synthetic oligonucleotide
accuaagaccuugucucug

SEQ ID NO: 623760 - RNA, 19 nt, Artificial Sequence
  Description of Artificial Sequence: Synthetic oligonucleotide
caguguuuugggauuaagu

SEQ ID NO: 623761 - RNA, 19 nt, Artificial Sequence
  Description of Artificial Sequence: Synthetic oligonucleotide
cuacacguugcacuaggaa

SEQ ID NO: 623762 - RNA, 19 nt, Artificial Sequence
  Description of Artificial Sequence: Synthetic oligonucleotide
guagcguucgggagaggcc

SEQ ID NO: 623763 - RNA, 19 nt, Artificial Sequence
  Description of Artificial Sequence: Synthetic oligonucleotide
cagcaccccgccaguaagg

SEQ ID NO: 623764 - RNA, 19 nt, Artificial Sequence
  Description of Artificial Sequence: Synthetic oligonucleotide
ucgggcacccaaugccacc

SEQ ID NO: 623765 - RNA, 19 nt, Artificial Sequence
  Description of Artificial Sequence: Synthetic oligonucleotide
uaggacucgggcacccaau

SEQ ID NO: 623766 - RNA, 19 nt, Artificial Sequence
  Description of Artificial Sequence: Synthetic oligonucleotide
ggaacaagaccagaaaccu

SEQ ID NO: 623767 - RNA, 19 nt, Artificial Sequence
  Description of Artificial Sequence: Synthetic oligonucleotide
acauuuagcaggggcccca

SEQ ID NO: 623768 - RNA, 19 nt, Artificial Sequence
  Description of Artificial Sequence: Synthetic oligonucleotide
agcguaacccaaaggggcu

SEQ ID NO: 623769 - RNA, 19 nt, Artificial Sequence
  Description of Artificial Sequence: Synthetic oligonucleotide
aguaucugcucccgcccaa

SEQ ID NO: 623770 - RNA, 19 nt, Artificial Sequence
  Description of Artificial Sequence: Synthetic oligonucleotide
gucaguuggcugccuacca

SEQ ID NO: 623771 - RNA, 19 nt, Artificial Sequence
  Description of Artificial Sequence: Synthetic oligonucleotide
augcuuagggacagugucu

SEQ ID NO: 623772 - RNA, 19 nt, Artificial Sequence
  Description of Artificial Sequence: Synthetic oligonucleotide
uuggcacggaguucaugau

SEQ ID NO: 623773 - RNA, 19 nt, Artificial Sequence
  Description of Artificial Sequence: Synthetic oligonucleotide
cagaauuacgcugucugua

SEQ ID NO: 623774 - RNA, 19 nt, Artificial Sequence
  Description of Artificial Sequence: Synthetic oligonucleotide
ggauuaaguaggguaggca

SEQ ID NO: 623775 - RNA, 19 nt, Artificial Sequence
  Description of Artificial Sequence: Synthetic oligonucleotide
ccuaaccagcccuugagga

SEQ ID NO: 623776 - RNA, 19 nt, Artificial Sequence
  Description of Artificial Sequence: Synthetic oligonucleotide
ggcggggaaaagccuuucg

SEQ ID NO: 623777 - RNA, 19 nt, Artificial Sequence
  Description of Artificial Sequence: Synthetic oligonucleotide
auacuggcaagagcagggu

SEQ ID NO: 623778 - RNA, 19 nt, Artificial Sequence
  Description of Artificial Sequence: Synthetic oligonucleotide
gaaauagggcagggucuac

SEQ ID NO: 623779 - RNA, 19 nt, Artificial Sequence
  Description of Artificial Sequence: Synthetic oligonucleotide
cuccuuuaacuggaagguc

SEQ ID NO: 623780 - RNA, 19 nt, Artificial Sequence
  Description of Artificial Sequence: Synthetic oligonucleotide
cuaccacccuaaccagccc

SEQ ID NO: 623781 - RNA, 19 nt, Artificial Sequence
  Description of Artificial Sequence: Synthetic oligonucleotide
gaaugaucgggaagguacu

SEQ ID NO: 623782 - RNA, 19 nt, Artificial Sequence
  Description of Artificial Sequence: Synthetic oligonucleotide
ccaaucccaccaaggaggc

SEQ ID NO: 623783 - RNA, 19 nt, Artificial Sequence
  Description of Artificial Sequence: Synthetic oligonucleotide
ugccuaccaacugcccaag

SEQ ID NO: 623784 - RNA, 19 nt, Artificial Sequence
  Description of Artificial Sequence: Synthetic oligonucleotide
caucgcuggaccacuagcu

SEQ ID NO: 623785 - RNA, 19 nt, Artificial Sequence
  Description of Artificial Sequence: Synthetic oligonucleotide
ccaugaucaguaagacaag

SEQ ID NO: 623786 - RNA, 19 nt, Artificial Sequence
  Description of Artificial Sequence: Synthetic oligonucleotide
aggcaagccaagguagcgu

SEQ ID NO: 623787 - RNA, 19 nt, Artificial Sequence
  Description of Artificial Sequence: Synthetic oligonucleotide
agagggacagguggaaaua

SEQ ID NO: 623788 - RNA, 19 nt, Artificial Sequence
  Description of Artificial Sequence: Synthetic oligonucleotide
ccagcaucgaagguccagg

SEQ ID NO: 623789 - RNA, 19 nt, Artificial Sequence
  Description of Artificial Sequence: Synthetic oligonucleotide
cugccuaccaacugcccaa

SEQ ID NO: 623790 - RNA, 19 nt, Artificial Sequence
  Description of Artificial Sequence: Synthetic oligonucleotide
gacccuuccacgccagugu

SEQ ID NO: 623791 - RNA, 19 nt, Artificial Sequence
  Description of Artificial Sequence: Synthetic oligonucleotide
ucccgcccaauccauccau

SEQ ID NO: 623792 - RNA, 19 nt, Artificial Sequence
  Description of Artificial Sequence: Synthetic oligonucleotide
gccaagguagcguucggga

SEQ ID NO: 623793 - RNA, 19 nt, Artificial Sequence
  Description of Artificial Sequence: Synthetic oligonucleotide
cuuuaacuggaagguccuc

SEQ ID NO: 623794 - RNA, 19 nt, Artificial Sequence
  Description of Artificial Sequence: Synthetic oligonucleotide
acccuguagucugguauug

SEQ ID NO: 623795 - RNA, 19 nt, Artificial Sequence
  Description of Artificial Sequence: Synthetic oligonucleotide
cauccguuaccacguagaa

SEQ ID NO: 623796 - RNA, 19 nt, Artificial Sequence
  Description of Artificial Sequence: Synthetic oligonucleotide
cuuccacgccagugucugg

SEQ ID NO: 623797 - RNA, 19 nt, Artificial Sequence
  Description of Artificial Sequence: Synthetic oligonucleotide
caaagcuagguaguugaua

SEQ ID NO: 623798 - RNA, 19 nt, Artificial Sequence
  Description of Artificial Sequence: Synthetic oligonucleotide
caguaagacaaggcuuguc

SEQ ID NO: 623799 - RNA, 19 nt, Artificial Sequence
  Description of Artificial Sequence: Synthetic oligonucleotide
guguaaggcggaagucacc

SEQ ID NO: 623800 - RNA, 19 nt, Artificial Sequence
  Description of Artificial Sequence: Synthetic oligonucleotide
cccuaaccagcccuugagg

SEQ ID NO: 623801 - RNA, 19 nt, Artificial Sequence
  Description of Artificial Sequence: Synthetic oligonucleotide
cacugccagacucaaauau

SEQ ID NO: 623802 - RNA, 19 nt, Artificial Sequence
  Description of Artificial Sequence: Synthetic oligonucleotide
caugggcuacacguugcac

SEQ ID NO: 623803 - RNA, 19 nt, Artificial Sequence
  Description of Artificial Sequence: Synthetic oligonucleotide
gaacuguccuugcccacua

SEQ ID NO: 623804 - RNA, 19 nt, Artificial Sequence
  Description of Artificial Sequence: Synthetic oligonucleotide
ccauacguugcucacuaca

SEQ ID NO: 623805 - RNA, 19 nt, Artificial Sequence
  Description of Artificial Sequence: Synthetic oligonucleotide
gacagggagcguaacccaa

SEQ ID NO: 623806 - RNA, 19 nt, Artificial Sequence
  Description of Artificial Sequence: Synthetic oligonucleotide
cuacauuggcacggaguuc

SEQ ID NO: 623807 - RNA, 19 nt, Artificial Sequence
  Description of Artificial Sequence: Synthetic oligonucleotide
acucgggcacccaaugcca

SEQ ID NO: 623808 - RNA, 19 nt, Artificial Sequence
  Description of Artificial Sequence: Synthetic oligonucleotide
gcugccuaccaacugccca

SEQ ID NO: 623809 - RNA, 19 nt, Artificial Sequence
  Description of Artificial Sequence: Synthetic oligonucleotide
gcaaagacucccaguucag

SEQ ID NO: 623810 - RNA, 19 nt, Artificial Sequence
  Description of Artificial Sequence: Synthetic oligonucleotide
aagcggggugacugggguu

SEQ ID NO: 623811 - RNA, 19 nt, Artificial Sequence
  Description of Artificial Sequence: Synthetic oligonucleotide
cauccguggaaggggcggc

SEQ ID NO: 623812 - RNA, 19 nt, Artificial Sequence
  Description of Artificial Sequence: Synthetic oligonucleotide
ugccccgccagcgguagga

SEQ ID NO: 623813 - RNA, 19 nt, Artificial Sequence
  Description of Artificial Sequence: Synthetic oligonucleotide
gccagcgguaggauagugg

SEQ ID NO: 623814 - RNA, 19 nt, Artificial Sequence
  Description of Artificial Sequence: Synthetic oligonucleotide
gggaccuuccacaugccca

SEQ ID NO: 623815 - RNA, 19 nt, Artificial Sequence
  Description of Artificial Sequence: Synthetic oligonucleotide
gggcacucgggaucgggcc

SEQ ID NO: 623816 - RNA, 19 nt, Artificial Sequence
  Description of Artificial Sequence: Synthetic oligonucleotide
cucgggaucgggccucauc

SEQ ID NO: 623817 - RNA, 19 nt, Artificial Sequence
  Description of Artificial Sequence: Synthetic oligonucleotide
guggccuagcuuuccucca

SEQ ID NO: 623818 - RNA, 19 nt, Artificial Sequence
  Description of Artificial Sequence: Synthetic oligonucleotide
ucccugccccgccagcggu

SEQ ID NO: 623819 - RNA, 19 nt, Artificial Sequence
  Description of Artificial Sequence: Synthetic oligonucleotide
ccauccguuaccacguaga

SEQ ID NO: 623820 - RNA, 19 nt, Artificial Sequence
  Description of Artificial Sequence: Synthetic oligonucleotide
gcuuuugugugguucccaa

SEQ ID NO: 623821 - RNA, 19 nt, Artificial Sequence
  Description of Artificial Sequence: Synthetic oligonucleotide
gagauauagcccagggcau

SEQ ID NO: 623822 - RNA, 19 nt, Artificial Sequence
  Description of Artificial Sequence: Synthetic oligonucleotide
gaaaccucgugggaagaau

SEQ ID NO: 623823 - RNA, 19 nt, Artificial Sequence
  Description of Artificial Sequence: Synthetic oligonucleotide
gggucaugcucagaauuac

SEQ ID NO: 623824 - RNA, 19 nt, Artificial Sequence
  Description of Artificial Sequence: Synthetic oligonucleotide
accucgugggaagaaugau

SEQ ID NO: 623825 - RNA, 19 nt, Artificial Sequence
  Description of Artificial Sequence: Synthetic oligonucleotide
ccccaagcuguucugcaag

SEQ ID NO: 623826 - RNA, 19 nt, Artificial Sequence
  Description of Artificial Sequence: Synthetic oligonucleotide
auagagcuugguggccuga

SEQ ID NO: 623827 - RNA, 19 nt, Artificial Sequence
  Description of Artificial Sequence: Synthetic oligonucleotide
gccauccguuaccacguag

SEQ ID NO: 623828 - RNA, 19 nt, Artificial Sequence
  Description of Artificial Sequence: Synthetic oligonucleotide
ggaaauagggcagggucua

SEQ ID NO: 623829 - RNA, 19 nt, Artificial Sequence
  Description of Artificial Sequence: Synthetic oligonucleotide
aggcggggaaaagccuuuc

SEQ ID NO: 623830 - RNA, 19 nt, Artificial Sequence
  Description of Artificial Sequence: Synthetic oligonucleotide
cucucgagugaggugggga

SEQ ID NO: 623831 - RNA, 19 nt, Artificial Sequence
  Description of Artificial Sequence: Synthetic oligonucleotide
guaaggcggaagucaccaa

SEQ ID NO: 623832 - RNA, 19 nt, Artificial Sequence
  Description of Artificial Sequence: Synthetic oligonucleotide
ccacccagcaucgaagguc

SEQ ID NO: 623833 - RNA, 19 nt, Artificial Sequence
  Description of Artificial Sequence: Synthetic oligonucleotide
gguggggaucccaucgcug

SEQ ID NO: 623834 - RNA, 19 nt, Artificial Sequence
  Description of Artificial Sequence: Synthetic oligonucleotide
cggaguucaugauagagcu

SEQ ID NO: 623835 - RNA, 19 nt, Artificial Sequence
  Description of Artificial Sequence: Synthetic oligonucleotide
cagcgguaggauaguggca

SEQ ID NO: 623836 - RNA, 19 nt, Artificial Sequence
  Description of Artificial Sequence: Synthetic oligonucleotide
ccaccuucuaacauuugua

SEQ ID NO: 623837 - RNA, 19 nt, Artificial Sequence
  Description of Artificial Sequence: Synthetic oligonucleotide
ccggccuaccacccuaacc

SEQ ID NO: 623838 - RNA, 19 nt, Artificial Sequence
  Description of Artificial Sequence: Synthetic oligonucleotide
gugacacaaguggccuagc

SEQ ID NO: 623839 - RNA, 19 nt, Artificial Sequence
  Description of Artificial Sequence: Synthetic oligonucleotide
cacccuaaccagcccuuga

SEQ ID NO: 623840 - RNA, 19 nt, Artificial Sequence
  Description of Artificial Sequence: Synthetic oligonucleotide
ggacuugagcuguacugcu

SEQ ID NO: 623841 - RNA, 19 nt, Artificial Sequence
  Description of Artificial Sequence: Synthetic oligonucleotide
gguauugccgccauacguu

SEQ ID NO: 623842 - RNA, 19 nt, Artificial Sequence
  Description of Artificial Sequence: Synthetic oligonucleotide
gccuaccaacugcccaagg

SEQ ID NO: 623843 - RNA, 19 nt, Artificial Sequence
  Description of Artificial Sequence: Synthetic oligonucleotide
gccgugcugaaaccagcug

SEQ ID NO: 623844 - RNA, 19 nt, Artificial Sequence
  Description of Artificial Sequence: Synthetic oligonucleotide
gguccucucaaaacgcucu

SEQ ID NO: 623845 - RNA, 19 nt, Artificial Sequence
  Description of Artificial Sequence: Synthetic oligonucleotide
ggaugacaaggagacaccu

SEQ ID NO: 623846 - RNA, 19 nt, Artificial Sequence
  Description of Artificial Sequence: Synthetic oligonucleotide
agcccaugccccgcccauc

SEQ ID NO: 623847 - RNA, 19 nt, Artificial Sequence
  Description of Artificial Sequence: Synthetic oligonucleotide
guaacccaaaggggcucca

SEQ ID NO: 623848 - RNA, 19 nt, Artificial Sequence
  Description of Artificial Sequence: Synthetic oligonucleotide
gcaugggcuacacguugca

SEQ ID NO: 623849 - RNA, 19 nt, Artificial Sequence
  Description of Artificial Sequence: Synthetic oligonucleotide
cacugguauguccacuaau

SEQ ID NO: 623850 - RNA, 19 nt, Artificial Sequence
  Description of Artificial Sequence: Synthetic oligonucleotide
gcaaccugacccaaagccu

SEQ ID NO: 623851 - RNA, 19 nt, Artificial Sequence
  Description of Artificial Sequence: Synthetic oligonucleotide
ggaccuuccacaugcccau

SEQ ID NO: 623852 - RNA, 19 nt, Artificial Sequence
  Description of Artificial Sequence: Synthetic oligonucleotide
ggggcacucgggaucgggc

SEQ ID NO: 623853 - RNA, 19 nt, Artificial Sequence
  Description of Artificial Sequence: Synthetic oligonucleotide
ccuuuaacuggaagguccu

SEQ ID NO: 623854 - RNA, 19 nt, Artificial Sequence
  Description of Artificial Sequence: Synthetic oligonucleotide
cugaaccuuguagggaccu

SEQ ID NO: 623855 - RNA, 19 nt, Artificial Sequence
  Description of Artificial Sequence: Synthetic oligonucleotide
ccaugccccgcccauccug

SEQ ID NO: 623856 - RNA, 19 nt, Artificial Sequence
  Description of Artificial Sequence: Synthetic oligonucleotide
cagcaucgaagguccaggu

SEQ ID NO: 623857 - RNA, 19 nt, Artificial Sequence
  Description of Artificial Sequence: Synthetic oligonucleotide
ggcaagccaagguagcguu

SEQ ID NO: 623858 - RNA, 19 nt, Artificial Sequence
  Description of Artificial Sequence: Synthetic oligonucleotide
cucccgcccaauccaucca

SEQ ID NO: 623859 - RNA, 19 nt, Artificial Sequence
  Description of Artificial Sequence: Synthetic oligonucleotide
gcuacacguugcacuagga

SEQ ID NO: 623860 - RNA, 19 nt, Artificial Sequence
  Description of Artificial Sequence: Synthetic oligonucleotide
cauuuagcaggggccccaa

SEQ ID NO: 623861 - RNA, 19 nt, Artificial Sequence
  Description of Artificial Sequence: Synthetic oligonucleotide
gguggaaauagggcagggu

SEQ ID NO: 623862 - RNA, 19 nt, Artificial Sequence
  Description of Artificial Sequence: Synthetic oligonucleotide
ggaggccggccuaccaccc

SEQ ID NO: 623863 - RNA, 19 nt, Artificial Sequence
  Description of Artificial Sequence: Synthetic oligonucleotide
gacuugagcuguacugcuu

SEQ ID NO: 623864 - RNA, 19 nt, Artificial Sequence
  Description of Artificial Sequence: Synthetic oligonucleotide
aggcugacagggagcguaa

SEQ ID NO: 623865 - RNA, 19 nt, Artificial Sequence
  Description of Artificial Sequence: Synthetic oligonucleotide
gccauacguugcucacuac

SEQ ID NO: 623866 - RNA, 19 nt, Artificial Sequence
  Description of Artificial Sequence: Synthetic oligonucleotide
augccccgcccauccuggu

SEQ ID NO: 623867 - RNA, 19 nt, Artificial Sequence
  Description of Artificial Sequence: Synthetic oligonucleotide
gccucucgagugagguggg

SEQ ID NO: 623868 - RNA, 19 nt, Artificial Sequence
  Description of Artificial Sequence: Synthetic oligonucleotide
gggcuacacguugcacuag

SEQ ID NO: 623869 - RNA, 19 nt, Artificial Sequence
  Description of Artificial Sequence: Synthetic oligonucleotide
ggcugccuaccaacugccc

SEQ ID NO: 623870 - RNA, 19 nt, Artificial Sequence
  Description of Artificial Sequence: Synthetic oligonucleotide
gcguaacccaaaggggcuc

SEQ ID NO: 623871 - RNA, 19 nt, Artificial Sequence
  Description of Artificial Sequence: Synthetic oligonucleotide
cugccccgccagcgguagg

SEQ ID NO: 623872 - RNA, 19 nt, Artificial Sequence
  Description of Artificial Sequence: Synthetic oligonucleotide
cgggcacccaaugccaccc

SEQ ID NO: 623873 - RNA, 19 nt, Artificial Sequence
  Description of Artificial Sequence: Synthetic oligonucleotide
ggcacucgggaucgggccu

SEQ ID NO: 623874 - RNA, 19 nt, Artificial Sequence
  Description of Artificial Sequence: Synthetic oligonucleotide
ccaugcuuagggacagugu

SEQ ID NO: 623875 - RNA, 19 nt, Artificial Sequence
  Description of Artificial Sequence: Synthetic oligonucleotide
guaucugcucccgcccaau

SEQ ID NO: 623876 - RNA, 19 nt, Artificial Sequence
  Description of Artificial Sequence: Synthetic oligonucleotide
ccgcucugauguagaagga

SEQ ID NO: 623877 - RNA, 19 nt, Artificial Sequence
  Description of Artificial Sequence: Synthetic oligonucleotide
ccugccccgccagcgguag

SEQ ID NO: 623878 - RNA, 19 nt, Artificial Sequence
  Description of Artificial Sequence: Synthetic oligonucleotide
ccacccuaaccagcccuug

SEQ ID NO: 623879 - RNA, 19 nt, Artificial Sequence
  Description of Artificial Sequence: Synthetic oligonucleotide
cgccauacguugcucacua

SEQ ID NO: 623880 - RNA, 19 nt, Artificial Sequence
  Description of Artificial Sequence: Synthetic oligonucleotide
ggccgugcugaaaccagcu

SEQ ID NO: 623881 - RNA, 19 nt, Artificial Sequence
  Description of Artificial Sequence: Synthetic oligonucleotide
ccguuaccacguagaagaa

SEQ ID NO: 623882 - RNA, 19 nt, Artificial Sequence
  Description of Artificial Sequence: Synthetic oligonucleotide
gccggccuaccacccuaac

SEQ ID NO: 623883 - RNA, 19 nt, Artificial Sequence
  Description of Artificial Sequence: Synthetic oligonucleotide
gcaggcggggaaaagccuu

SEQ ID NO: 623884 - RNA, 19 nt, Artificial Sequence
  Description of Artificial Sequence: Synthetic oligonucleotide
gcgguaggauaguggcacu

SEQ ID NO: 623885 - RNA, 19 nt, Artificial Sequence
  Description of Artificial Sequence: Synthetic oligonucleotide
caccugagaugagcuuaua

SEQ ID NO: 623886 - RNA, 19 nt, Artificial Sequence
  Description of Artificial Sequence: Synthetic oligonucleotide
ggaguucaugauagagcuu

SEQ ID NO: 623887 - RNA, 19 nt, Artificial Sequence
  Description of Artificial Sequence: Synthetic oligonucleotide
ccacuagggccucucuccu

SEQ ID NO: 623888 - RNA, 19 nt, Artificial Sequence
  Description of Artificial Sequence: Synthetic oligonucleotide
ggcccgagggcaguguuuu

SEQ ID NO: 623889 - RNA, 19 nt, Artificial Sequence
  Description of Artificial Sequence: Synthetic oligonucleotide
acucgggaucgggccucau

SEQ ID NO: 623890 - RNA, 19 nt, Artificial Sequence
  Description of Artificial Sequence: Synthetic oligonucleotide
ggccauccguuaccacgua

SEQ ID NO: 623891 - RNA, 19 nt, Artificial Sequence
  Description of Artificial Sequence: Synthetic oligonucleotide
cgccagcgguaggauagug

SEQ ID NO: 623892 - RNA, 19 nt, Artificial Sequence
  Description of Artificial Sequence: Synthetic oligonucleotide
gcguucgggagaggccccu

SEQ ID NO: 623893 - RNA, 19 nt, Artificial Sequence
  Description of Artificial Sequence: Synthetic oligonucleotide
gccccgccagcgguaggau

SEQ ID NO: 623894 - RNA, 19 nt, Artificial Sequence
  Description of Artificial Sequence: Synthetic oligonucleotide
auauacaacaaucagaacc

SEQ ID NO: 623895 - RNA, 19 nt, Artificial Sequence
  Description of Artificial Sequence: Synthetic oligonucleotide
gaugcaacaaaacuuaggg

SEQ ID NO: 623896 - RNA, 19 nt, Artificial Sequence
  Description of Artificial Sequence: Synthetic oligonucleotide
uuuuaguuaauuaagcaga

SEQ ID NO: 623897 - RNA, 19 nt, Artificial Sequence
  Description of Artificial Sequence: Synthetic oligonucleotide
aaauauuaggauuaccugu

SEQ ID NO: 623898 - RNA, 19 nt, Artificial Sequence
  Description of Artificial Sequence: Synthetic oligonucleotide
uuaagcaaagcaaugagac

SEQ ID NO: 623899 - RNA, 19 nt, Artificial Sequence
  Description of Artificial Sequence: Synthetic oligonucleotide
aaagcaaugagacaaguau

SEQ ID NO: 623900 - RNA, 19 nt, Artificial Sequence
  Description of Artificial Sequence: Synthetic oligonucleotide
gaugcaacuaaauaucucc

SEQ ID NO: 623901 - RNA, 19 nt, Artificial Sequence
  Description of Artificial Sequence: Synthetic oligonucleotide
ucuaggaauguuaagaacu

SEQ ID NO: 623902 - RNA, 19 nt, Artificial Sequence
  Description of Artificial Sequence: Synthetic oligonucleotide
auagauuugaguaaaacag

SEQ ID NO: 623903 - RNA, 19 nt, Artificial Sequence
  Description of Artificial Sequence: Synthetic oligonucleotide
uguacaagugagaagagug

SEQ ID NO: 623904 - RNA, 19 nt, Artificial Sequence
  Description of Artificial Sequence: Synthetic oligonucleotide
aaaucaaugcaccaaccag

SEQ ID NO: 623905 - RNA, 19 nt, Artificial Sequence
  Description of Artificial Sequence: Synthetic oligonucleotide
ugcaacaaaacuuaggggu

SEQ ID NO: 623906 - RNA, 19 nt, Artificial Sequence
  Description of Artificial Sequence: Synthetic oligonucleotide
auauacaaaguguuggcgg

SEQ ID NO: 623907 - RNA, 19 nt, Artificial Sequence
  Description of Artificial Sequence: Synthetic oligonucleotide
aauauuaggauuaccuguc

SEQ ID NO: 623908 - RNA, 19 nt, Artificial Sequence
  Description of Artificial Sequence: Synthetic oligonucleotide
aaguguacaagugagaaga

SEQ ID NO: 623909 - RNA, 19 nt, Artificial Sequence
  Description of Artificial Sequence: Synthetic oligonucleotide
uaauuaagcagaccauugg

SEQ ID NO: 623910 - RNA, 19 nt, Artificial Sequence
  Description of Artificial Sequence: Synthetic oligonucleotide
uuaauuaagcagaccauug

SEQ ID NO: 623911 - RNA, 19 nt, Artificial Sequence
  Description of Artificial Sequence: Synthetic oligonucleotide
ugaagcuuuggaaauugcg

SEQ ID NO: 623912 - RNA, 19 nt, Artificial Sequence
  Description of Artificial Sequence: Synthetic oligonucleotide
uaaucaaacaaaacuugcc

SEQ ID NO: 623913 - RNA, 19 nt, Artificial Sequence
  Description of Artificial Sequence: Synthetic oligonucleotide
auuaagaguaaggagagag

SEQ ID NO: 623914 - RNA, 19 nt, Artificial Sequence
  Description of Artificial Sequence: Synthetic oligonucleotide
gaguaaaacagcugaaugc

SEQ ID NO: 623915 - RNA, 19 nt, Artificial Sequence
  Description of Artificial Sequence: Synthetic oligonucleotide
ugaguaaaacagcugaaug

SEQ ID NO: 623916 - RNA, 19 nt, Artificial Sequence
  Description of Artificial Sequence: Synthetic oligonucleotide
ucuugaugcaacuaaauau

SEQ ID NO: 623917 - RNA, 19 nt, Artificial Sequence
  Description of Artificial Sequence: Synthetic oligonucleotide
aauuaagcagaccauugga

SEQ ID NO: 623918 - RNA, 19 nt, Artificial Sequence
  Description of Artificial Sequence: Synthetic oligonucleotide
uuuccaauuagauuucagc

SEQ ID NO: 623919 - RNA, 19 nt, Artificial Sequence
  Description of Artificial Sequence: Synthetic oligonucleotide
aauuuggaaauauuaggau

SEQ ID NO: 623920 - RNA, 19 nt, Artificial Sequence
  Description of Artificial Sequence: Synthetic oligonucleotide
uaucaugagacuuccuagg

SEQ ID NO: 623921 - RNA, 19 nt, Artificial Sequence
  Description of Artificial Sequence: Synthetic oligonucleotide
ugaaaagcauuuuaguuaa

SEQ ID NO: 623922 - RNA, 19 nt, Artificial Sequence
  Description of Artificial Sequence: Synthetic oligonucleotide
uuggaaauugcgcuuaugu

SEQ ID NO: 623923 - RNA, 19 nt, Artificial Sequence
  Description of Artificial Sequence: Synthetic oligonucleotide
uuugcaggcauucaauugu

SEQ ID NO: 623924 - RNA, 19 nt, Artificial Sequence
  Description of Artificial Sequence: Synthetic oligonucleotide
uaaaucaaugcaccaacca

SEQ ID NO: 623925 - RNA, 19 nt, Artificial Sequence
  Description of Artificial Sequence: Synthetic oligonucleotide
ugucauauuuccaauuaga

SEQ ID NO: 623926 - RNA, 19 nt, Artificial Sequence
  Description of Artificial Sequence: Synthetic oligonucleotide
cuugaugcaacuaaauauc

SEQ ID NO: 623927 - RNA, 19 nt, Artificial Sequence
  Description of Artificial Sequence: Synthetic oligonucleotide
cuuaguuucuauuugaaaa

SEQ ID NO: 623928 - RNA, 19 nt, Artificial Sequence
  Description of Artificial Sequence: Synthetic oligonucleotide
auguuaagaacugagagca

SEQ ID NO: 623929 - RNA, 19 nt, Artificial Sequence
  Description of Artificial Sequence: Synthetic oligonucleotide
auagauagcuuuauuuggc

SEQ ID NO: 623930 - RNA, 19 nt, Artificial Sequence
  Description of Artificial Sequence: Synthetic oligonucleotide
uguguuccgauccaguagc

SEQ ID NO: 623931 - RNA, 19 nt, Artificial Sequence
  Description of Artificial Sequence: Synthetic oligonucleotide
aaugucauauuuccaauua

SEQ ID NO: 623932 - RNA, 19 nt, Artificial Sequence
  Description of Artificial Sequence: Synthetic oligonucleotide
uaaugcaguagacaggaac

SEQ ID NO: 623933 - RNA, 19 nt, Artificial Sequence
  Description of Artificial Sequence: Synthetic oligonucleotide
aagggagauaccccucugc

SEQ ID NO: 623934 - RNA, 19 nt, Artificial Sequence
  Description of Artificial Sequence: Synthetic oligonucleotide
gaagcuaaaucaaugcacc

SEQ ID NO: 623935 - RNA, 19 nt, Artificial Sequence
  Description of Artificial Sequence: Synthetic oligonucleotide
cuacauauagauuugagua

SEQ ID NO: 623936 - RNA, 19 nt, Artificial Sequence
  Description of Artificial Sequence: Synthetic oligonucleotide
uguugugaggcuuugcucu

SEQ ID NO: 623937 - RNA, 19 nt, Artificial Sequence
  Description of Artificial Sequence: Synthetic oligonucleotide
aucaauaccguguaaugca

SEQ ID NO: 623938 - RNA, 19 nt, Artificial Sequence
  Description of Artificial Sequence: Synthetic oligonucleotide
auuaaucaaacaaaacuug

SEQ ID NO: 623939 - RNA, 19 nt, Artificial Sequence
  Description of Artificial Sequence: Synthetic oligonucleotide
caucuaacugcucauaaac

SEQ ID NO: 623940 - RNA, 19 nt, Artificial Sequence
  Description of Artificial Sequence: Synthetic oligonucleotide
uuuaugugcuucuggagca

SEQ ID NO: 623941 - RNA, 19 nt, Artificial Sequence
  Description of Artificial Sequence: Synthetic oligonucleotide
uauuaggauuaccugucag

SEQ ID NO: 623942 - RNA, 19 nt, Artificial Sequence
  Description of Artificial Sequence: Synthetic oligonucleotide
uuaagcagaccauuggagu

SEQ ID NO: 623943 - RNA, 19 nt, Artificial Sequence
  Description of Artificial Sequence: Synthetic oligonucleotide
aaugcaguagacaggaacu

SEQ ID NO: 623944 - RNA, 19 nt, Artificial Sequence
  Description of Artificial Sequence: Synthetic oligonucleotide
uacuacauauagauuugag

SEQ ID NO: 623945 - RNA, 19 nt, Artificial Sequence
  Description of Artificial Sequence: Synthetic oligonucleotide
gaaugcucggcauauacca

SEQ ID NO: 623946 - RNA, 19 nt, Artificial Sequence
  Description of Artificial Sequence: Synthetic oligonucleotide
aaaguguuggcggagguca

SEQ ID NO: 623947 - RNA, 19 nt, Artificial Sequence
  Description of Artificial Sequence: Synthetic oligonucleotide
uccaaguaguuugagaagc

SEQ ID NO: 623948 - RNA, 19 nt, Artificial Sequence
  Description of Artificial Sequence: Synthetic oligonucleotide
aacacguggucauauacaa

SEQ ID NO: 623949 - RNA, 19 nt, Artificial Sequence
  Description of Artificial Sequence: Synthetic oligonucleotide
uuauacucugccuccacgc

SEQ ID NO: 623950 - RNA, 19 nt, Artificial Sequence
  Description of Artificial Sequence: Synthetic oligonucleotide
caugagacuuccuagggac

SEQ ID NO: 623951 - RNA, 19 nt, Artificial Sequence
  Description of Artificial Sequence: Synthetic oligonucleotide
ggaacaaacagagagucgg

SEQ ID NO: 623952 - RNA, 19 nt, Artificial Sequence
  Description of Artificial Sequence: Synthetic oligonucleotide
gaggggaugagagaaaacc

SEQ ID NO: 623953 - RNA, 19 nt, Artificial Sequence
  Description of Artificial Sequence: Synthetic oligonucleotide
cuaucaugagacuuccuag

SEQ ID NO: 623954 - RNA, 19 nt, Artificial Sequence
  Description of Artificial Sequence: Synthetic oligonucleotide
ucaauaccguguaaugcag

SEQ ID NO: 623955 - RNA, 19 nt, Artificial Sequence
  Description of Artificial Sequence: Synthetic oligonucleotide
aaugcaccaaccagaggcc

SEQ ID NO: 623956 - RNA, 19 nt, Artificial Sequence
  Description of Artificial Sequence: Synthetic oligonucleotide
aaucaaugcaccaaccaga

SEQ ID NO: 623957 - RNA, 19 nt, Artificial Sequence
  Description of Artificial Sequence: Synthetic oligonucleotide
uacauauagauuugaguaa

SEQ ID NO: 623958 - RNA, 19 nt, Artificial Sequence
  Description of Artificial Sequence: Synthetic oligonucleotide
gauuaccugucagucaucg

SEQ ID NO: 623959 - RNA, 19 nt, Artificial Sequence
  Description of Artificial Sequence: Synthetic oligonucleotide
uguaacugcuccugauugg

SEQ ID NO: 623960 - RNA, 19 nt, Artificial Sequence
  Description of Artificial Sequence: Synthetic oligonucleotide
uaagcaucgucucacugcu

SEQ ID NO: 623961 - RNA, 19 nt, Artificial Sequence
  Description of Artificial Sequence: Synthetic oligonucleotide
auuaggauuaccugucagu

SEQ ID NO: 623962 - RNA, 19 nt, Artificial Sequence
  Description of Artificial Sequence: Synthetic oligonucleotide
agcucuaccuguuugguca

SEQ ID NO: 623963 - RNA, 19 nt, Artificial Sequence
  Description of Artificial Sequence: Synthetic oligonucleotide
aaacagagagucggguacc

SEQ ID NO: 623964 - RNA, 19 nt, Artificial Sequence
  Description of Artificial Sequence: Synthetic oligonucleotide
augcagaagggagauaccc

SEQ ID NO: 623965 - RNA, 19 nt, Artificial Sequence
  Description of Artificial Sequence: Synthetic oligonucleotide
cauacuucacuuucagggc

SEQ ID NO: 623966 - RNA, 19 nt, Artificial Sequence
  Description of Artificial Sequence: Synthetic oligonucleotide
uggguuaccaguccuguca

SEQ ID NO: 623967 - RNA, 19 nt, Artificial Sequence
  Description of Artificial Sequence: Synthetic oligonucleotide
agaguguuuccacagucag

SEQ ID NO: 623968 - RNA, 19 nt, Artificial Sequence
  Description of Artificial Sequence: Synthetic oligonucleotide
guuccaaguaguuugagaa

SEQ ID NO: 623969 - RNA, 19 nt, Artificial Sequence
  Description of Artificial Sequence: Synthetic oligonucleotide
cuaaaucaaugcaccaacc

SEQ ID NO: 623970 - RNA, 19 nt, Artificial Sequence
  Description of Artificial Sequence: Synthetic oligonucleotide
agcuaggaacaucucuucc

SEQ ID NO: 623971 - RNA, 19 nt, Artificial Sequence
  Description of Artificial Sequence: Synthetic oligonucleotide
uggaaauugcgcuuaugug

SEQ ID NO: 623972 - RNA, 19 nt, Artificial Sequence
  Description of Artificial Sequence: Synthetic oligonucleotide
aacaucaauaccguguaau

SEQ ID NO: 623973 - RNA, 19 nt, Artificial Sequence
  Description of Artificial Sequence: Synthetic oligonucleotide
caaaacuugccauuucaac

SEQ ID NO: 623974 - RNA, 19 nt, Artificial Sequence
  Description of Artificial Sequence: Synthetic oligonucleotide
uaccguguaaugcaguaga

SEQ ID NO: 623975 - RNA, 19 nt, Artificial Sequence
  Description of Artificial Sequence: Synthetic oligonucleotide
uugaugcaacuaaauaucu

SEQ ID NO: 623976 - RNA, 19 nt, Artificial Sequence
  Description of Artificial Sequence: Synthetic oligonucleotide
acuuagggguuuaaggagc

SEQ ID NO: 623977 - RNA, 19 nt, Artificial Sequence
  Description of Artificial Sequence: Synthetic oligonucleotide
ugaaugcucggcauauacc

SEQ ID NO: 623978 - RNA, 19 nt, Artificial Sequence
  Description of Artificial Sequence: Synthetic oligonucleotide
uaccaguccugucaggucc

SEQ ID NO: 623979 - RNA, 19 nt, Artificial Sequence
  Description of Artificial Sequence: Synthetic oligonucleotide
aauaccguguaaugcagua

SEQ ID NO: 623980 - RNA, 19 nt, Artificial Sequence
  Description of Artificial Sequence: Synthetic oligonucleotide
guaucauuaagaguaagga

SEQ ID NO: 623981 - RNA, 19 nt, Artificial Sequence
  Description of Artificial Sequence: Synthetic oligonucleotide
acaucaauaccguguaaug

SEQ ID NO: 623982 - RNA, 19 nt, Artificial Sequence
  Description of Artificial Sequence: Synthetic oligonucleotide
agcaacuagcuucugguug

SEQ ID NO: 623983 - RNA, 19 nt, Artificial Sequence
  Description of Artificial Sequence: Synthetic oligonucleotide
uucuugaugcaacuaaaua

SEQ ID NO: 623984 - RNA, 19 nt, Artificial Sequence
  Description of Artificial Sequence: Synthetic oligonucleotide
cuaggaauguuaagaacug

SEQ ID NO: 623985 - RNA, 19 nt, Artificial Sequence
  Description of Artificial Sequence: Synthetic oligonucleotide
ucaacauuaucagccaucu

SEQ ID NO: 623986 - RNA, 19 nt, Artificial Sequence
  Description of Artificial Sequence: Synthetic oligonucleotide
uuugaguaaaacagcugaa

SEQ ID NO: 623987 - RNA, 19 nt, Artificial Sequence
  Description of Artificial Sequence: Synthetic oligonucleotide
augucauauuuccaauuag

SEQ ID NO: 623988 - RNA, 19 nt, Artificial Sequence
  Description of Artificial Sequence: Synthetic oligonucleotide
acuggcauucauuugaauu

SEQ ID NO: 623989 - RNA, 19 nt, Artificial Sequence
  Description of Artificial Sequence: Synthetic oligonucleotide
uccuugaaaggaacaaaca

SEQ ID NO: 623990 - RNA, 19 nt, Artificial Sequence
  Description of Artificial Sequence: Synthetic oligonucleotide
aauccuccaacucuguguu

SEQ ID NO: 623991 - RNA, 19 nt, Artificial Sequence
  Description of Artificial Sequence: Synthetic oligonucleotide
agucuaucaugagacuucc

SEQ ID NO: 623992 - RNA, 19 nt, Artificial Sequence
  Description of Artificial Sequence: Synthetic oligonucleotide
aacuccagugcucgggcuc

SEQ ID NO: 623993 - RNA, 19 nt, Artificial Sequence
  Description of Artificial Sequence: Synthetic oligonucleotide
ugaguguccacuucaugca

SEQ ID NO: 623994 - RNA, 19 nt, Artificial Sequence
  Description of Artificial Sequence: Synthetic oligonucleotide
uuaggauuaccugucaguc

SEQ ID NO: 623995 - RNA, 19 nt, Artificial Sequence
  Description of Artificial Sequence: Synthetic oligonucleotide
auuaagcagaccauuggag

SEQ ID NO: 623996 - RNA, 19 nt, Artificial Sequence
  Description of Artificial Sequence: Synthetic oligonucleotide
gguaucauuaagaguaagg

SEQ ID NO: 623997 - RNA, 19 nt, Artificial Sequence
  Description of Artificial Sequence: Synthetic oligonucleotide
uucauuugccguagaagcu

SEQ ID NO: 623998 - RNA, 19 nt, Artificial Sequence
  Description of Artificial Sequence: Synthetic oligonucleotide
cuuauacucugccuccacg

SEQ ID NO: 623999 - RNA, 19 nt, Artificial Sequence
  Description of Artificial Sequence: Synthetic oligonucleotide
uuucaggugcucauuuucu

SEQ ID NO: 624000 - RNA, 19 nt, Artificial Sequence
  Description of Artificial Sequence: Synthetic oligonucleotide
uacauucauagauagcuuu

SEQ ID NO: 624001 - RNA, 19 nt, Artificial Sequence
  Description of Artificial Sequence: Synthetic oligonucleotide
aguccugucaggucccugg

SEQ ID NO: 624002 - RNA, 19 nt, Artificial Sequence
  Description of Artificial Sequence: Synthetic oligonucleotide
cucggcauauaccaauagg

SEQ ID NO: 624003 - RNA, 19 nt, Artificial Sequence
  Description of Artificial Sequence: Synthetic oligonucleotide
cagaauacuacauauagau

SEQ ID NO: 624004 - RNA, 19 nt, Artificial Sequence
  Description of Artificial Sequence: Synthetic oligonucleotide
cucuaguucacaguucucc

SEQ ID NO: 624005 - RNA, 19 nt, Artificial Sequence
  Description of Artificial Sequence: Synthetic oligonucleotide
gaauggguguuucugaaaa

SEQ ID NO: 624006 - RNA, 19 nt, Artificial Sequence
  Description of Artificial Sequence: Synthetic oligonucleotide
ugguuggaagacuucagcu

SEQ ID NO: 624007 - RNA, 19 nt, Artificial Sequence
  Description of Artificial Sequence: Synthetic oligonucleotide
aggaauguuaagaacugag

SEQ ID NO: 624008 - RNA, 19 nt, Artificial Sequence
  Description of Artificial Sequence: Synthetic oligonucleotide
uugguuguguacaucugcu

SEQ ID NO: 624009 - RNA, 19 nt, Artificial Sequence
  Description of Artificial Sequence: Synthetic oligonucleotide
aggauuaccugucagucau

SEQ ID NO: 624010 - RNA, 19 nt, Artificial Sequence
  Description of Artificial Sequence: Synthetic oligonucleotide
uggguguuucugaaaagca

SEQ ID NO: 624011 - RNA, 19 nt, Artificial Sequence
  Description of Artificial Sequence: Synthetic oligonucleotide
aauuagauuucagcuuucu

SEQ ID NO: 624012 - RNA, 19 nt, Artificial Sequence
  Description of Artificial Sequence: Synthetic oligonucleotide
uuccaaguaguuugagaag

SEQ ID NO: 624013 - RNA, 19 nt, Artificial Sequence
  Description of Artificial Sequence: Synthetic oligonucleotide
caucaauaccguguaaugc

SEQ ID NO: 624014 - RNA, 19 nt, Artificial Sequence
  Description of Artificial Sequence: Synthetic oligonucleotide
agaccauuggaguuccaag

SEQ ID NO: 624015 - RNA, 19 nt, Artificial Sequence
  Description of Artificial Sequence: Synthetic oligonucleotide
caaacacguggucauauac

SEQ ID NO: 624016 - RNA, 19 nt, Artificial Sequence
  Description of Artificial Sequence: Synthetic oligonucleotide
aagcuaaaucaaugcacca

SEQ ID NO: 624017 - RNA, 19 nt, Artificial Sequence
  Description of Artificial Sequence: Synthetic oligonucleotide
ucacaguucuccuucagua

SEQ ID NO: 624018 - RNA, 19 nt, Artificial Sequence
  Description of Artificial Sequence: Synthetic oligonucleotide
ucuaguucacaguucuccu

SEQ ID NO: 624019 - RNA, 19 nt, Artificial Sequence
  Description of Artificial Sequence: Synthetic oligonucleotide
gaaauugcgcuuauguguc

SEQ ID NO: 624020 - RNA, 19 nt, Artificial Sequence
  Description of Artificial Sequence: Synthetic oligonucleotide
agucuaggaauguuaagaa

SEQ ID NO: 624021 - RNA, 19 nt, Artificial Sequence
  Description of Artificial Sequence: Synthetic oligonucleotide
guuugcaggcauucaauug

SEQ ID NO: 624022 - RNA, 19 nt, Artificial Sequence
  Description of Artificial Sequence: Synthetic oligonucleotide
uuaguuaauuaagcagacc

SEQ ID NO: 624023 - RNA, 19 nt, Artificial Sequence
  Description of Artificial Sequence: Synthetic oligonucleotide
ugucagucaucguucaacu

SEQ ID NO: 624024 - RNA, 19 nt, Artificial Sequence
  Description of Artificial Sequence: Synthetic oligonucleotide
uugugugacagugaguccu

SEQ ID NO: 624025 - RNA, 19 nt, Artificial Sequence
  Description of Artificial Sequence: Synthetic oligonucleotide
gagagagauggguauuuug

SEQ ID NO: 624026 - RNA, 19 nt, Artificial Sequence
  Description of Artificial Sequence: Synthetic oligonucleotide
cacaaaaggaugcucugac

SEQ ID NO: 624027 - RNA, 19 nt, Artificial Sequence
  Description of Artificial Sequence: Synthetic oligonucleotide
uagauagcuuuauuuggcu

SEQ ID NO: 624028 - RNA, 19 nt, Artificial Sequence
  Description of Artificial Sequence: Synthetic oligonucleotide
caccauucacaaaaggaug

SEQ ID NO: 624029 - RNA, 19 nt, Artificial Sequence
  Description of Artificial Sequence: Synthetic oligonucleotide
ccuagagucaacauuauca

SEQ ID NO: 624030 - RNA, 19 nt, Artificial Sequence
  Description of Artificial Sequence: Synthetic oligonucleotide
agaugcaacaaaacuuagg

SEQ ID NO: 624031 - RNA, 19 nt, Artificial Sequence
  Description of Artificial Sequence: Synthetic oligonucleotide
auucacaaaaggaugcucu

SEQ ID NO: 624032 - RNA, 19 nt, Artificial Sequence
  Description of Artificial Sequence: Synthetic oligonucleotide
ccuugaaaggaacaaacag

SEQ ID NO: 624033 - RNA, 19 nt, Artificial Sequence
  Description of Artificial Sequence: Synthetic oligonucleotide
uccgucaggcuuaugauuu

SEQ ID NO: 624034 - RNA, 19 nt, Artificial Sequence
  Description of Artificial Sequence: Synthetic oligonucleotide
uguuaagaacugagagcag

SEQ ID NO: 624035 - RNA, 19 nt, Artificial Sequence
  Description of Artificial Sequence: Synthetic oligonucleotide
auuaagcaaagcaaugaga

SEQ ID NO: 624036 - RNA, 19 nt, Artificial Sequence
  Description of Artificial Sequence: Synthetic oligonucleotide
uccuagggacccuagaguc

SEQ ID NO: 624037 - RNA, 19 nt, Artificial Sequence
  Description of Artificial Sequence: Synthetic oligonucleotide
agccuugugugacagugag

SEQ ID NO: 624038 - RNA, 19 nt, Artificial Sequence
  Description of Artificial Sequence: Synthetic oligonucleotide
ucagacuggguuaccaguc

SEQ ID NO: 624039 - RNA, 19 nt, Artificial Sequence
  Description of Artificial Sequence: Synthetic oligonucleotide
uacaaaguguuggcggagg

SEQ ID NO: 624040 - RNA, 19 nt, Artificial Sequence
  Description of Artificial Sequence: Synthetic oligonucleotide
ugcaaggaagugaucuucu

SEQ ID NO: 624041 - RNA, 19 nt, Artificial Sequence
  Description of Artificial Sequence: Synthetic oligonucleotide
ugccguagaagcucuaccu

SEQ ID NO: 624042 - RNA, 19 nt, Artificial Sequence
  Description of Artificial Sequence: Synthetic oligonucleotide
aaacacguggucauauaca

SEQ ID NO: 624043 - RNA, 19 nt, Artificial Sequence
  Description of Artificial Sequence: Synthetic oligonucleotide
cguguaaugcaguagacag

SEQ ID NO: 624044 - RNA, 19 nt, Artificial Sequence
  Description of Artificial Sequence: Synthetic oligonucleotide
ugcuucacagccuuagcuc

SEQ ID NO: 624045 - RNA, 19 nt, Artificial Sequence
  Description of Artificial Sequence: Synthetic oligonucleotide
gcaacuagcuucugguugg

SEQ ID NO: 624046 - RNA, 19 nt, Artificial Sequence
  Description of Artificial Sequence: Synthetic oligonucleotide
uuccuagggacccuagagu

SEQ ID NO: 624047 - RNA, 19 nt, Artificial Sequence
  Description of Artificial Sequence: Synthetic oligonucleotide
ucguucaacugguagcaga

SEQ ID NO: 624048 - RNA, 19 nt, Artificial Sequence
  Description of Artificial Sequence: Synthetic oligonucleotide
cauucauuugaauuuggaa

SEQ ID NO: 624049 - RNA, 19 nt, Artificial Sequence
  Description of Artificial Sequence: Synthetic oligonucleotide
aggucauacagcucuuuca

SEQ ID NO: 624050 - RNA, 19 nt, Artificial Sequence
  Description of Artificial Sequence: Synthetic oligonucleotide
uucaguaguucuucauacu

SEQ ID NO: 624051 - RNA, 19 nt, Artificial Sequence
  Description of Artificial Sequence: Synthetic oligonucleotide
guauucuggagguguagug

SEQ ID NO: 624052 - RNA, 19 nt, Artificial Sequence
  Description of Artificial Sequence: Synthetic oligonucleotide
gcuaaaucaaugcaccaac

SEQ ID NO: 624053 - RNA, 19 nt, Artificial Sequence
  Description of Artificial Sequence: Synthetic oligonucleotide
uugaguaaaacagcugaau

SEQ ID NO: 624054 - RNA, 19 nt, Artificial Sequence
  Description of Artificial Sequence: Synthetic oligonucleotide
acauucuuuggaaugggug

SEQ ID NO: 624055 - RNA, 19 nt, Artificial Sequence
  Description of Artificial Sequence: Synthetic oligonucleotide
uuguuuucuugaugcaacu

SEQ ID NO: 624056 - RNA, 19 nt, Artificial Sequence
  Description of Artificial Sequence: Synthetic oligonucleotide
aauugcgcuuaugugucug

SEQ ID NO: 624057 - RNA, 19 nt, Artificial Sequence
  Description of Artificial Sequence: Synthetic oligonucleotide
uugccguagaagcucuacc

SEQ ID NO: 624058 - RNA, 19 nt, Artificial Sequence
  Description of Artificial Sequence: Synthetic oligonucleotide
cuggccggcagcuuagagg

SEQ ID NO: 624059 - RNA, 19 nt, Artificial Sequence
  Description of Artificial Sequence: Synthetic oligonucleotide
uuuguuggcuuugcaagga

SEQ ID NO: 624060 - RNA, 19 nt, Artificial Sequence
  Description of Artificial Sequence: Synthetic oligonucleotide
acaccauucacaaaaggau

SEQ ID NO: 624061 - RNA, 19 nt, Artificial Sequence
  Description of Artificial Sequence: Synthetic oligonucleotide
uaggauuaccugucaguca

SEQ ID NO: 624062 - RNA, 19 nt, Artificial Sequence
  Description of Artificial Sequence: Synthetic oligonucleotide
uggaaauauuaggauuacc

SEQ ID NO: 624063 - RNA, 19 nt, Artificial Sequence
  Description of Artificial Sequence: Synthetic oligonucleotide
aacucuguguuccgaucca

SEQ ID NO: 624064 - RNA, 19 nt, Artificial Sequence
  Description of Artificial Sequence: Synthetic oligonucleotide
agauggguauuuuguucuc

SEQ ID NO: 624065 - RNA, 19 nt, Artificial Sequence
  Description of Artificial Sequence: Synthetic oligonucleotide
ggaaauugcgcuuaugugu

SEQ ID NO: 624066 - RNA, 19 nt, Artificial Sequence
  Description of Artificial Sequence: Synthetic oligonucleotide
uuuguauucuggaggugua

SEQ ID NO: 624067 - RNA, 19 nt, Artificial Sequence
  Description of Artificial Sequence: Synthetic oligonucleotide
ucauuugccguagaagcuc

SEQ ID NO: 624068 - RNA, 19 nt, Artificial Sequence
  Description of Artificial Sequence: Synthetic oligonucleotide
auauuaggauuaccuguca

SEQ ID NO: 624069 - RNA, 19 nt, Artificial Sequence
  Description of Artificial Sequence: Synthetic oligonucleotide
gucuaggaauguuaagaac

SEQ ID NO: 624070 - RNA, 19 nt, Artificial Sequence
  Description of Artificial Sequence: Synthetic oligonucleotide
uuccgauccaguagcgucu

SEQ ID NO: 624071 - RNA, 19 nt, Artificial Sequence
  Description of Artificial Sequence: Synthetic oligonucleotide
ggugaucaauguuuguuug

SEQ ID NO: 624072 - RNA, 19 nt, Artificial Sequence
  Description of Artificial Sequence: Synthetic oligonucleotide
gcuuaugugucugaauggg

SEQ ID NO: 624073 - RNA, 19 nt, Artificial Sequence
  Description of Artificial Sequence: Synthetic oligonucleotide
aagaguguuuccacaguca

SEQ ID NO: 624074 - RNA, 19 nt, Artificial Sequence
  Description of Artificial Sequence: Synthetic oligonucleotide
ucuguguuccgauccagua

SEQ ID NO: 624075 - RNA, 19 nt, Artificial Sequence
  Description of Artificial Sequence: Synthetic oligonucleotide
uaccugucagucaucguuc

SEQ ID NO: 624076 - RNA, 19 nt, Artificial Sequence
  Description of Artificial Sequence: Synthetic oligonucleotide
ugcucauucauuugccgua

SEQ ID NO: 624077 - RNA, 19 nt, Artificial Sequence
  Description of Artificial Sequence: Synthetic oligonucleotide
agggagauaccccucugcu

SEQ ID NO: 624078 - RNA, 19 nt, Artificial Sequence
  Description of Artificial Sequence: Synthetic oligonucleotide
uggcauucauuugaauuug

SEQ ID NO: 624079 - RNA, 19 nt, Artificial Sequence
  Description of Artificial Sequence: Synthetic oligonucleotide
cuguguuccgauccaguag

SEQ ID NO: 624080 - RNA, 19 nt, Artificial Sequence
  Description of Artificial Sequence: Synthetic oligonucleotide
uucauggcccuucacgaua

SEQ ID NO: 624081 - RNA, 19 nt, Artificial Sequence
  Description of Artificial Sequence: Synthetic oligonucleotide
ucacaccuuaacauuucuc

SEQ ID NO: 624082 - RNA, 19 nt, Artificial Sequence
  Description of Artificial Sequence: Synthetic oligonucleotide
gcuuuugccaauuaagcaa

SEQ ID NO: 624083 - RNA, 19 nt, Artificial Sequence
  Description of Artificial Sequence: Synthetic oligonucleotide
uuuccgucaggcuuaugau

SEQ ID NO: 624084 - RNA, 19 nt, Artificial Sequence
  Description of Artificial Sequence: Synthetic oligonucleotide
uugcaugcugcucauucau

SEQ ID NO: 624085 - RNA, 19 nt, Artificial Sequence
  Description of Artificial Sequence: Synthetic oligonucleotide
agcagaccauuggaguucc

SEQ ID NO: 624086 - RNA, 19 nt, Artificial Sequence
  Description of Artificial Sequence: Synthetic oligonucleotide
uacuucacuuucagggcac

SEQ ID NO: 624087 - RNA, 19 nt, Artificial Sequence
  Description of Artificial Sequence: Synthetic oligonucleotide
uguuuguuugcaggcauuc

SEQ ID NO: 624088 - RNA, 19 nt, Artificial Sequence
  Description of Artificial Sequence: Synthetic oligonucleotide
uuugcaaggaagugaucuu

SEQ ID NO: 624089 - RNA, 19 nt, Artificial Sequence
  Description of Artificial Sequence: Synthetic oligonucleotide
aaauugcgcuuaugugucu

SEQ ID NO: 624090 - RNA, 19 nt, Artificial Sequence
  Description of Artificial Sequence: Synthetic oligonucleotide
gcgcuuaugugucugaaug

SEQ ID NO: 624091 - RNA, 19 nt, Artificial Sequence
  Description of Artificial Sequence: Synthetic oligonucleotide
gagucaacauuaucagcca

SEQ ID NO: 624092 - RNA, 19 nt, Artificial Sequence
  Description of Artificial Sequence: Synthetic oligonucleotide
uccuuaaauagugcuuugu

SEQ ID NO: 624093 - RNA, 19 nt, Artificial Sequence
  Description of Artificial Sequence: Synthetic oligonucleotide
cacaguucuccuucaguac

SEQ ID NO: 624094 - RNA, 19 nt, Artificial Sequence
  Description of Artificial Sequence: Synthetic oligonucleotide
aguagcgucuuuccaaguu

SEQ ID NO: 624095 - RNA, 19 nt, Artificial Sequence
  Description of Artificial Sequence: Synthetic oligonucleotide
cuuaaauagugcuuuguau

SEQ ID NO: 624096 - RNA, 19 nt, Artificial Sequence
  Description of Artificial Sequence: Synthetic oligonucleotide
agugcucgggcucgguagg

SEQ ID NO: 624097 - RNA, 19 nt, Artificial Sequence
  Description of Artificial Sequence: Synthetic oligonucleotide
ucuuguuggaggucccggu

SEQ ID NO: 624098 - RNA, 19 nt, Artificial Sequence
  Description of Artificial Sequence: Synthetic oligonucleotide
acagaauacuacauauaga

SEQ ID NO: 624099 - RNA, 19 nt, Artificial Sequence
  Description of Artificial Sequence: Synthetic oligonucleotide
cugucagucaucguucaac

SEQ ID NO: 624100 - RNA, 19 nt, Artificial Sequence
  Description of Artificial Sequence: Synthetic oligonucleotide
aggccagucuaucaugaga

SEQ ID NO: 624101 - RNA, 19 nt, Artificial Sequence
  Description of Artificial Sequence: Synthetic oligonucleotide
agaucauaacuggagguau

SEQ ID NO: 624102 - RNA, 19 nt, Artificial Sequence
  Description of Artificial Sequence: Synthetic oligonucleotide
aguuaauuaagcagaccau

SEQ ID NO: 624103 - RNA, 19 nt, Artificial Sequence
  Description of Artificial Sequence: Synthetic oligonucleotide
gguaacaggaguggguucc

SEQ ID NO: 624104 - RNA, 19 nt, Artificial Sequence
  Description of Artificial Sequence: Synthetic oligonucleotide
accuuaacauuucuccuua

SEQ ID NO: 624105 - RNA, 19 nt, Artificial Sequence
  Description of Artificial Sequence: Synthetic oligonucleotide
agauagcuuuauuuggcuu

SEQ ID NO: 624106 - RNA, 19 nt, Artificial Sequence
  Description of Artificial Sequence: Synthetic oligonucleotide
guagcagaugcaacaaaac

SEQ ID NO: 624107 - RNA, 19 nt, Artificial Sequence
  Description of Artificial Sequence: Synthetic oligonucleotide
uugcaaggaagugaucuuc

SEQ ID NO: 624108 - RNA, 19 nt, Artificial Sequence
  Description of Artificial Sequence: Synthetic oligonucleotide
cuuguuggaggucccggug

SEQ ID NO: 624109 - RNA, 19 nt, Artificial Sequence
  Description of Artificial Sequence: Synthetic oligonucleotide
gaccauuggaguuccaagu

SEQ ID NO: 624110 - RNA, 19 nt, Artificial Sequence
  Description of Artificial Sequence: Synthetic oligonucleotide
gauugguuguguacaucug

SEQ ID NO: 624111 - RNA, 19 nt, Artificial Sequence
  Description of Artificial Sequence: Synthetic oligonucleotide
aggaacaaacagagagucg

SEQ ID NO: 624112 - RNA, 19 nt, Artificial Sequence
  Description of Artificial Sequence: Synthetic oligonucleotide
auacuacauauagauuuga

SEQ ID NO: 624113 - RNA, 19 nt, Artificial Sequence
  Description of Artificial Sequence: Synthetic oligonucleotide
uccucucuaggcucagcug

SEQ ID NO: 624114 - RNA, 19 nt, Artificial Sequence
  Description of Artificial Sequence: Synthetic oligonucleotide
ggggaugagagaaaaccag

SEQ ID NO: 624115 - RNA, 19 nt, Artificial Sequence
  Description of Artificial Sequence: Synthetic oligonucleotide
caucugccgcaucucagcc

SEQ ID NO: 624116 - RNA, 19 nt, Artificial Sequence
  Description of Artificial Sequence: Synthetic oligonucleotide
auacaaaguguuggcggag

SEQ ID NO: 624117 - RNA, 19 nt, Artificial Sequence
  Description of Artificial Sequence: Synthetic oligonucleotide
cagugcucgggcucgguag

SEQ ID NO: 624118 - RNA, 19 nt, Artificial Sequence
  Description of Artificial Sequence: Synthetic oligonucleotide
auaccguguaaugcaguag

SEQ ID NO: 624119 - RNA, 19 nt, Artificial Sequence
  Description of Artificial Sequence: Synthetic oligonucleotide
uucucccggucacaugucu

SEQ ID NO: 624120 - RNA, 19 nt, Artificial Sequence
  Description of Artificial Sequence: Synthetic oligonucleotide
cagacuggguuaccagucc

SEQ ID NO: 624121 - RNA, 19 nt, Artificial Sequence
  Description of Artificial Sequence: Synthetic oligonucleotide
agagagucggguaccagcu

SEQ ID NO: 624122 - RNA, 19 nt, Artificial Sequence
  Description of Artificial Sequence: Synthetic oligonucleotide
agccuuagcucuccugaug

SEQ ID NO: 624123 - RNA, 19 nt, Artificial Sequence
  Description of Artificial Sequence: Synthetic oligonucleotide
cccgcuuuugccaauuaag

SEQ ID NO: 624124 - RNA, 19 nt, Artificial Sequence
  Description of Artificial Sequence: Synthetic oligonucleotide
ccgcuuuugccaauuaagc

SEQ ID NO: 624125 - RNA, 19 nt, Artificial Sequence
  Description of Artificial Sequence: Synthetic oligonucleotide
gcugcucauucauuugccg

SEQ ID NO: 624126 - RNA, 19 nt, Artificial Sequence
  Description of Artificial Sequence: Synthetic oligonucleotide
ugcugcuaagcaucgucuc

SEQ ID NO: 624127 - RNA, 19 nt, Artificial Sequence
  Description of Artificial Sequence: Synthetic oligonucleotide
gucacaugucuucugccuc

SEQ ID NO: 624128 - RNA, 19 nt, Artificial Sequence
  Description of Artificial Sequence: Synthetic oligonucleotide
agacuggguuaccaguccu

SEQ ID NO: 624129 - RNA, 19 nt, Artificial Sequence
  Description of Artificial Sequence: Synthetic oligonucleotide
gaggccagucuaucaugag

SEQ ID NO: 624130 - RNA, 19 nt, Artificial Sequence
  Description of Artificial Sequence: Synthetic oligonucleotide
accguguaaugcaguagac

SEQ ID NO: 624131 - RNA, 19 nt, Artificial Sequence
  Description of Artificial Sequence: Synthetic oligonucleotide
uuguuggcuuugcaaggaa

SEQ ID NO: 624132 - RNA, 19 nt, Artificial Sequence
  Description of Artificial Sequence: Synthetic oligonucleotide
caucguucaacugguagca

SEQ ID NO: 624133 - RNA, 19 nt, Artificial Sequence
  Description of Artificial Sequence: Synthetic oligonucleotide
ucccgguggucguaccacg

SEQ ID NO: 624134 - RNA, 19 nt, Artificial Sequence
  Description of Artificial Sequence: Synthetic oligonucleotide
agaucacaccuuaacauuu

SEQ ID NO: 624135 - RNA, 19 nt, Artificial Sequence
  Description of Artificial Sequence: Synthetic oligonucleotide
gucagucaucguucaacug

SEQ ID NO: 624136 - RNA, 19 nt, Artificial Sequence
  Description of Artificial Sequence: Synthetic oligonucleotide
aguguacaagugagaagag

SEQ ID NO: 624137 - RNA, 19 nt, Artificial Sequence
  Description of Artificial Sequence: Synthetic oligonucleotide
gucagcgcagaucacaccu

SEQ ID NO: 624138 - RNA, 19 nt, Artificial Sequence
  Description of Artificial Sequence: Synthetic oligonucleotide
acuuccuagggacccuaga

SEQ ID NO: 624139 - RNA, 19 nt, Artificial Sequence
  Description of Artificial Sequence: Synthetic oligonucleotide
ucccgcuuuugccaauuaa

SEQ ID NO: 624140 - RNA, 19 nt, Artificial Sequence
  Description of Artificial Sequence: Synthetic oligonucleotide
ggccagucuaucaugagac

SEQ ID NO: 624141 - RNA, 19 nt, Artificial Sequence
  Description of Artificial Sequence: Synthetic oligonucleotide
cuuucagacaggagaagcu

SEQ ID NO: 624142 - RNA, 19 nt, Artificial Sequence
  Description of Artificial Sequence: Synthetic oligonucleotide
acuccagugcucgggcucg

SEQ ID NO: 624143 - RNA, 19 nt, Artificial Sequence
  Description of Artificial Sequence: Synthetic oligonucleotide
auuaccugucagucaucgu

SEQ ID NO: 624144 - RNA, 19 nt, Artificial Sequence
  Description of Artificial Sequence: Synthetic oligonucleotide
gggaugagagaaaaccagc

SEQ ID NO: 624145 - RNA, 19 nt, Artificial Sequence
  Description of Artificial Sequence: Synthetic oligonucleotide
uugcaggcauucaauuguu

SEQ ID NO: 624146 - RNA, 19 nt, Artificial Sequence
  Description of Artificial Sequence: Synthetic oligonucleotide
ugcuaagcaucgucucacu

SEQ ID NO: 624147 - RNA, 19 nt, Artificial Sequence
  Description of Artificial Sequence: Synthetic oligonucleotide
cuuuguauucuggaggugu

SEQ ID NO: 624148 - RNA, 19 nt, Artificial Sequence
  Description of Artificial Sequence: Synthetic oligonucleotide
agaaaaccagcagaucaua

SEQ ID NO: 624149 - RNA, 19 nt, Artificial Sequence
  Description of Artificial Sequence: Synthetic oligonucleotide
acauucauagauagcuuua

SEQ ID NO: 624150 - RNA, 19 nt, Artificial Sequence
  Description of Artificial Sequence: Synthetic oligonucleotide
ccauuggaguuccaaguag

SEQ ID NO: 624151 - RNA, 19 nt, Artificial Sequence
  Description of Artificial Sequence: Synthetic oligonucleotide
uguuccgauccaguagcgu

SEQ ID NO: 624152 - RNA, 19 nt, Artificial Sequence
  Description of Artificial Sequence: Synthetic oligonucleotide
gacuggguuaccaguccug

SEQ ID NO: 624153 - RNA, 19 nt, Artificial Sequence
  Description of Artificial Sequence: Synthetic oligonucleotide
ggcccuucacgauaucacc

SEQ ID NO: 624154 - RNA, 19 nt, Artificial Sequence
  Description of Artificial Sequence: Synthetic oligonucleotide
guugugaggcuuugcucuc

SEQ ID NO: 624155 - RNA, 19 nt, Artificial Sequence
  Description of Artificial Sequence: Synthetic oligonucleotide
cacgguucaucuucuaucu

SEQ ID NO: 624156 - RNA, 19 nt, Artificial Sequence
  Description of Artificial Sequence: Synthetic oligonucleotide
gcuaagcaucgucucacug

SEQ ID NO: 624157 - RNA, 19 nt, Artificial Sequence
  Description of Artificial Sequence: Synthetic oligonucleotide
gaaccaugguucucuuaaa

SEQ ID NO: 624158 - RNA, 19 nt, Artificial Sequence
  Description of Artificial Sequence: Synthetic oligonucleotide
gaguaaggagagagagaug

SEQ ID NO: 624159 - RNA, 19 nt, Artificial Sequence
  Description of Artificial Sequence: Synthetic oligonucleotide
ggguuaccaguccugucag

SEQ ID NO: 624160 - RNA, 19 nt, Artificial Sequence
  Description of Artificial Sequence: Synthetic oligonucleotide
cuuuggaggugaucaaugu

SEQ ID NO: 624161 - RNA, 19 nt, Artificial Sequence
  Description of Artificial Sequence: Synthetic oligonucleotide
caucgucucacugcugcug

SEQ ID NO: 624162 - RNA, 19 nt, Artificial Sequence
  Description of Artificial Sequence: Synthetic oligonucleotide
ucccuggccggcagcuuag

SEQ ID NO: 624163 - RNA, 19 nt, Artificial Sequence
  Description of Artificial Sequence: Synthetic oligonucleotide
augcugcuaagcaucgucu

SEQ ID NO: 624164 - RNA, 19 nt, Artificial Sequence
  Description of Artificial Sequence: Synthetic oligonucleotide
caaaguguuggcggagguc

SEQ ID NO: 624165 - RNA, 19 nt, Artificial Sequence
  Description of Artificial Sequence: Synthetic oligonucleotide
gcagaucacaccuuaacau

SEQ ID NO: 624166 - RNA, 19 nt, Artificial Sequence
  Description of Artificial Sequence: Synthetic oligonucleotide
cccuucacgauaucacccc

SEQ ID NO: 624167 - RNA, 19 nt, Artificial Sequence
  Description of Artificial Sequence: Synthetic oligonucleotide
cacagccuuagcucuccug

SEQ ID NO: 624168 - RNA, 19 nt, Artificial Sequence
  Description of Artificial Sequence: Synthetic oligonucleotide
ggcauauaccaauaggcau

SEQ ID NO: 624169 - RNA, 19 nt, Artificial Sequence
  Description of Artificial Sequence: Synthetic oligonucleotide
gaacaucaauaccguguaa

SEQ ID NO: 624170 - RNA, 19 nt, Artificial Sequence
  Description of Artificial Sequence: Synthetic oligonucleotide
cgucuuuccaaguucagca

SEQ ID NO: 624171 - RNA, 19 nt, Artificial Sequence
  Description of Artificial Sequence: Synthetic oligonucleotide
gccguagaagcucuaccug

SEQ ID NO: 624172 - RNA, 19 nt, Artificial Sequence
  Description of Artificial Sequence: Synthetic oligonucleotide
cuugugcugccaagugguc

SEQ ID NO: 624173 - RNA, 19 nt, Artificial Sequence
  Description of Artificial Sequence: Synthetic oligonucleotide
agggguuuaaggagcuugu

SEQ ID NO: 624174 - RNA, 19 nt, Artificial Sequence
  Description of Artificial Sequence: Synthetic oligonucleotide
accuguuuggucagauacu

SEQ ID NO: 624175 - RNA, 19 nt, Artificial Sequence
  Description of Artificial Sequence: Synthetic oligonucleotide
ucucccggucacaugucuu

SEQ ID NO: 624176 - RNA, 19 nt, Artificial Sequence
  Description of Artificial Sequence: Synthetic oligonucleotide
cgcuuaugugucugaaugg

SEQ ID NO: 624177 - RNA, 19 nt, Artificial Sequence
  Description of Artificial Sequence: Synthetic oligonucleotide
guguccacuucaugcagaa

SEQ ID NO: 624178 - RNA, 19 nt, Artificial Sequence
  Description of Artificial Sequence: Synthetic oligonucleotide
ggaugcucugacugcagca

SEQ ID NO: 624179 - RNA, 19 nt, Artificial Sequence
  Description of Artificial Sequence: Synthetic oligonucleotide
caaucagaaccaugguucu

SEQ ID NO: 624180 - RNA, 19 nt, Artificial Sequence
  Description of Artificial Sequence: Synthetic oligonucleotide
aucguucaacugguagcag

SEQ ID NO: 624181 - RNA, 19 nt, Artificial Sequence
  Description of Artificial Sequence: Synthetic oligonucleotide
cagaucauaacuggaggua

SEQ ID NO: 624182 - RNA, 19 nt, Artificial Sequence
  Description of Artificial Sequence: Synthetic oligonucleotide
uaacaggaguggguuccca

SEQ ID NO: 624183 - RNA, 19 nt, Artificial Sequence
  Description of Artificial Sequence: Synthetic oligonucleotide
gagguaucauuaagaguaa

SEQ ID NO: 624184 - RNA, 19 nt, Artificial Sequence
  Description of Artificial Sequence: Synthetic oligonucleotide
guguuccgauccaguagcg

SEQ ID NO: 624185 - RNA, 19 nt, Artificial Sequence
  Description of Artificial Sequence: Synthetic oligonucleotide
guaacugcuccugauuggu

SEQ ID NO: 624186 - RNA, 19 nt, Artificial Sequence
  Description of Artificial Sequence: Synthetic oligonucleotide
gugucugaaugggagggga

SEQ ID NO: 624187 - RNA, 19 nt, Artificial Sequence
  Description of Artificial Sequence: Synthetic oligonucleotide
guggucguaccacgguuca

SEQ ID NO: 624188 - RNA, 19 nt, Artificial Sequence
  Description of Artificial Sequence: Synthetic oligonucleotide
caacauuaucagccaucuc

SEQ ID NO: 624189 - RNA, 19 nt, Artificial Sequence
  Description of Artificial Sequence: Synthetic oligonucleotide
ggaguggguucccagccac

SEQ ID NO: 624190 - RNA, 19 nt, Artificial Sequence
  Description of Artificial Sequence: Synthetic oligonucleotide
gcucggcauauaccaauag

SEQ ID NO: 624191 - RNA, 19 nt, Artificial Sequence
  Description of Artificial Sequence: Synthetic oligonucleotide
gcagaucauaacuggaggu

SEQ ID NO: 624192 - RNA, 19 nt, Artificial Sequence
  Description of Artificial Sequence: Synthetic oligonucleotide
gcugcuaagcaucgucuca

SEQ ID NO: 624193 - RNA, 19 nt, Artificial Sequence
  Description of Artificial Sequence: Synthetic oligonucleotide
ggucagauacucaauuucu

SEQ ID NO: 624194 - RNA, 19 nt, Artificial Sequence
  Description of Artificial Sequence: Synthetic oligonucleotide
gaagcucuaccuguuuggu

SEQ ID NO: 624195 - RNA, 19 nt, Artificial Sequence
  Description of Artificial Sequence: Synthetic oligonucleotide
gcgcagaucacaccuuaac

SEQ ID NO: 624196 - RNA, 19 nt, Artificial Sequence
  Description of Artificial Sequence: Synthetic oligonucleotide
augcaguagacaggaacuu

SEQ ID NO: 624197 - RNA, 19 nt, Artificial Sequence
  Description of Artificial Sequence: Synthetic oligonucleotide
cagucaucguucaacuggu

SEQ ID NO: 624198 - RNA, 19 nt, Artificial Sequence
  Description of Artificial Sequence: Synthetic oligonucleotide
ggucguaccacgguucauc

SEQ ID NO: 624199 - RNA, 19 nt, Artificial Sequence
  Description of Artificial Sequence: Synthetic oligonucleotide
ccaugguucucuuaaauau

SEQ ID NO: 624200 - RNA, 19 nt, Artificial Sequence
  Description of Artificial Sequence: Synthetic oligonucleotide
ccaacuccagugcucgggc

SEQ ID NO: 624201 - RNA, 19 nt, Artificial Sequence
  Description of Artificial Sequence: Synthetic oligonucleotide
agucggguaccagcuucuc

SEQ ID NO: 624202 - RNA, 19 nt, Artificial Sequence
  Description of Artificial Sequence: Synthetic oligonucleotide
cauuaagaguaaggagaga

SEQ ID NO: 624203 - RNA, 19 nt, Artificial Sequence
  Description of Artificial Sequence: Synthetic oligonucleotide
ccuuaaauagugcuuugua

SEQ ID NO: 624204 - RNA, 19 nt, Artificial Sequence
  Description of Artificial Sequence: Synthetic oligonucleotide
ccggucacaugucuucugc

SEQ ID NO: 624205 - RNA, 19 nt, Artificial Sequence
  Description of Artificial Sequence: Synthetic oligonucleotide
agagagagauggguauuuu

SEQ ID NO: 624206 - RNA, 19 nt, Artificial Sequence
  Description of Artificial Sequence: Synthetic oligonucleotide
ucccggucacaugucuucu

SEQ ID NO: 624207 - RNA, 19 nt, Artificial Sequence
  Description of Artificial Sequence: Synthetic oligonucleotide
cauuugccguagaagcucu

SEQ ID NO: 624208 - RNA, 19 nt, Artificial Sequence
  Description of Artificial Sequence: Synthetic oligonucleotide
gcugccaaguggucagcgc

SEQ ID NO: 624209 - RNA, 19 nt, Artificial Sequence
  Description of Artificial Sequence: Synthetic oligonucleotide
gcaaggaagugaucuucuc

SEQ ID NO: 624210 - RNA, 19 nt, Artificial Sequence
  Description of Artificial Sequence: Synthetic oligonucleotide
ggucacaugucuucugccu

SEQ ID NO: 624211 - RNA, 19 nt, Artificial Sequence
  Description of Artificial Sequence: Synthetic oligonucleotide
augcaccaaccagaggcca

SEQ ID NO: 624212 - RNA, 19 nt, Artificial Sequence
  Description of Artificial Sequence: Synthetic oligonucleotide
cagccucagacuggguuac

SEQ ID NO: 624213 - RNA, 19 nt, Artificial Sequence
  Description of Artificial Sequence: Synthetic oligonucleotide
gcugcucuaguucacaguu

SEQ ID NO: 624214 - RNA, 19 nt, Artificial Sequence
  Description of Artificial Sequence: Synthetic oligonucleotide
gucguaccacgguucaucu

SEQ ID NO: 624215 - RNA, 19 nt, Artificial Sequence
  Description of Artificial Sequence: Synthetic oligonucleotide
agccucagacuggguuacc

SEQ ID NO: 624216 - RNA, 19 nt, Artificial Sequence
  Description of Artificial Sequence: Synthetic oligonucleotide
ggcucgguaggcaucugug

SEQ ID NO: 624217 - RNA, 19 nt, Artificial Sequence
  Description of Artificial Sequence: Synthetic oligonucleotide
caccuuaacauuucuccuu

SEQ ID NO: 624218 - RNA, 19 nt, Artificial Sequence
  Description of Artificial Sequence: Synthetic oligonucleotide
cauucauagauagcuuuau

SEQ ID NO: 624219 - RNA, 19 nt, Artificial Sequence
  Description of Artificial Sequence: Synthetic oligonucleotide
uucccgcuuuugccaauua

SEQ ID NO: 624220 - RNA, 19 nt, Artificial Sequence
  Description of Artificial Sequence: Synthetic oligonucleotide
caauuguuuccgucaggcu

SEQ ID NO: 624221 - RNA, 19 nt, Artificial Sequence
  Description of Artificial Sequence: Synthetic oligonucleotide
caauaccguguaaugcagu

SEQ ID NO: 624222 - RNA, 19 nt, Artificial Sequence
  Description of Artificial Sequence: Synthetic oligonucleotide
ucuucccgcuuuugccaau

SEQ ID NO: 624223 - RNA, 19 nt, Artificial Sequence
  Description of Artificial Sequence: Synthetic oligonucleotide
cgcuuuugccaauuaagca

SEQ ID NO: 624224 - RNA, 19 nt, Artificial Sequence
  Description of Artificial Sequence: Synthetic oligonucleotide
gagagagagauggguauuu

SEQ ID NO: 624225 - RNA, 19 nt, Artificial Sequence
  Description of Artificial Sequence: Synthetic oligonucleotide
gguggucguaccacgguuc

SEQ ID NO: 624226 - RNA, 19 nt, Artificial Sequence
  Description of Artificial Sequence: Synthetic oligonucleotide
ucguaccacgguucaucuu

SEQ ID NO: 624227 - RNA, 19 nt, Artificial Sequence
  Description of Artificial Sequence: Synthetic oligonucleotide
uuagggguuuaaggagcuu

SEQ ID NO: 624228 - RNA, 19 nt, Artificial Sequence
  Description of Artificial Sequence: Synthetic oligonucleotide
ccuuauacucugccuccac

SEQ ID NO: 624229 - RNA, 19 nt, Artificial Sequence
  Description of Artificial Sequence: Synthetic oligonucleotide
gcauauaccaauaggcauu

SEQ ID NO: 624230 - RNA, 19 nt, Artificial Sequence
  Description of Artificial Sequence: Synthetic oligonucleotide
cuaguucacaguucuccuu

SEQ ID NO: 624231 - RNA, 19 nt, Artificial Sequence
  Description of Artificial Sequence: Synthetic oligonucleotide
gucccgguggucguaccac

SEQ ID NO: 624232 - RNA, 19 nt, Artificial Sequence
  Description of Artificial Sequence: Synthetic oligonucleotide
cccgguggucguaccacgg

SEQ ID NO: 624233 - RNA, 19 nt, Artificial Sequence
  Description of Artificial Sequence: Synthetic oligonucleotide
cccuagagucaacauuauc

SEQ ID NO: 624234 - RNA, 19 nt, Artificial Sequence
  Description of Artificial Sequence: Synthetic oligonucleotide
auauaccaauaggcauuaa

SEQ ID NO: 624235 - RNA, 19 nt, Artificial Sequence
  Description of Artificial Sequence: Synthetic oligonucleotide
aguguuggcggaggucaua

SEQ ID NO: 624236 - RNA, 19 nt, Artificial Sequence
  Description of Artificial Sequence: Synthetic oligonucleotide
agacuuccuagggacccua

SEQ ID NO: 624237 - RNA, 19 nt, Artificial Sequence
  Description of Artificial Sequence: Synthetic oligonucleotide
ggacccuagagucaacauu

SEQ ID NO: 624238 - RNA, 19 nt, Artificial Sequence
  Description of Artificial Sequence: Synthetic oligonucleotide
cuucauggcccuucacgau

SEQ ID NO: 624239 - RNA, 19 nt, Artificial Sequence
  Description of Artificial Sequence: Synthetic oligonucleotide
cagaaccaugguucucuua

SEQ ID NO: 624240 - RNA, 19 nt, Artificial Sequence
  Description of Artificial Sequence: Synthetic oligonucleotide
cagcgcagaucacaccuua

SEQ ID NO: 624241 - RNA, 19 nt, Artificial Sequence
  Description of Artificial Sequence: Synthetic oligonucleotide
gcaaacacguggucauaua

SEQ ID NO: 624242 - RNA, 19 nt, Artificial Sequence
  Description of Artificial Sequence: Synthetic oligonucleotide
guaaugcaguagacaggaa

SEQ ID NO: 624243 - RNA, 19 nt, Artificial Sequence
  Description of Artificial Sequence: Synthetic oligonucleotide
gagucggguaccagcuucu

SEQ ID NO: 624244 - RNA, 19 nt, Artificial Sequence
  Description of Artificial Sequence: Synthetic oligonucleotide
agcgcagaucacaccuuaa

SEQ ID NO: 624245 - RNA, 19 nt, Artificial Sequence
  Description of Artificial Sequence: Synthetic oligonucleotide
caaguaucuuuagcaacau

SEQ ID NO: 624246 - RNA, 19 nt, Artificial Sequence
  Description of Artificial Sequence: Synthetic oligonucleotide
uggucguaccacgguucau

SEQ ID NO: 624247 - RNA, 19 nt, Artificial Sequence
  Description of Artificial Sequence: Synthetic oligonucleotide
ccguguaaugcaguagaca

SEQ ID NO: 624248 - RNA, 19 nt, Artificial Sequence
  Description of Artificial Sequence: Synthetic oligonucleotide
ggucccgguggucguacca

SEQ ID NO: 624249 - RNA, 19 nt, Artificial Sequence
  Description of Artificial Sequence: Synthetic oligonucleotide
gcaacaaaacuuagggguu

SEQ ID NO: 624250 - RNA, 19 nt, Artificial Sequence
  Description of Artificial Sequence: Synthetic oligonucleotide
caccaaccagaggccaguc

SEQ ID NO: 624251 - RNA, 19 nt, Artificial Sequence
  Description of Artificial Sequence: Synthetic oligonucleotide
gagacuuccuagggacccu

SEQ ID NO: 624252 - RNA, 19 nt, Artificial Sequence
  Description of Artificial Sequence: Synthetic oligonucleotide
ccguagaagcucuaccugu

SEQ ID NO: 624253 - RNA, 19 nt, Artificial Sequence
  Description of Artificial Sequence: Synthetic oligonucleotide
gccucagacuggguuacca

SEQ ID NO: 624254 - RNA, 19 nt, Artificial Sequence
  Description of Artificial Sequence: Synthetic oligonucleotide
cuccagugcucgggcucgg

SEQ ID NO: 624255 - RNA, 19 nt, Artificial Sequence
  Description of Artificial Sequence: Synthetic oligonucleotide
cccggucacaugucuucug

SEQ ID NO: 624256 - RNA, 19 nt, Artificial Sequence
  Description of Artificial Sequence: Synthetic oligonucleotide
auuugccguagaagcucua

SEQ ID NO: 624257 - RNA, 19 nt, Artificial Sequence
  Description of Artificial Sequence: Synthetic oligonucleotide
cagcaacuagcuucugguu

SEQ ID NO: 624258 - RNA, 19 nt, Artificial Sequence
  Description of Artificial Sequence: Synthetic oligonucleotide
cucuaccuguuuggucaga

SEQ ID NO: 624259 - RNA, 19 nt, Artificial Sequence
  Description of Artificial Sequence: Synthetic oligonucleotide
cgguaggcaucuguggcac

SEQ ID NO: 624260 - RNA, 19 nt, Artificial Sequence
  Description of Artificial Sequence: Synthetic oligonucleotide
cggguaccagcuucucaac

SEQ ID NO: 624261 - RNA, 19 nt, Artificial Sequence
  Description of Artificial Sequence: Synthetic oligonucleotide
ccacuuggcuuuggaggug

SEQ ID NO: 624262 - RNA, 19 nt, Artificial Sequence
  Description of Artificial Sequence: Synthetic oligonucleotide
cugcaagucuaggaauguu

SEQ ID NO: 624263 - RNA, 19 nt, Artificial Sequence
  Description of Artificial Sequence: Synthetic oligonucleotide
gggcucgguaggcaucugu

SEQ ID NO: 624264 - RNA, 19 nt, Artificial Sequence
  Description of Artificial Sequence: Synthetic oligonucleotide
caacuagcuucugguuggu

SEQ ID NO: 624265 - RNA, 19 nt, Artificial Sequence
  Description of Artificial Sequence: Synthetic oligonucleotide
ggaggucauacagcucuuu

SEQ ID NO: 624266 - RNA, 19 nt, Artificial Sequence
  Description of Artificial Sequence: Synthetic oligonucleotide
gcugcgcuugagugguuuu

SEQ ID NO: 624267 - RNA, 19 nt, Artificial Sequence
  Description of Artificial Sequence: Synthetic oligonucleotide
gccuugugugacagugagu

SEQ ID NO: 624268 - RNA, 19 nt, Artificial Sequence
  Description of Artificial Sequence: Synthetic oligonucleotide
gcagaccauuggaguucca

SEQ ID NO: 624269 - RNA, 19 nt, Artificial Sequence
  Description of Artificial Sequence: Synthetic oligonucleotide
ccgguggucguaccacggu

SEQ ID NO: 624270 - RNA, 19 nt, Artificial Sequence
  Description of Artificial Sequence: Synthetic oligonucleotide
ggccggcagcuuagagguc

SEQ ID NO: 624271 - RNA, 19 nt, Artificial Sequence
  Description of Artificial Sequence: Synthetic oligonucleotide
ccgucaggcuuaugauuuu

SEQ ID NO: 624272 - RNA, 19 nt, Artificial Sequence
  Description of Artificial Sequence: Synthetic oligonucleotide
cgguggucguaccacgguu

SEQ ID NO: 624273 - RNA, 19 nt, Artificial Sequence
  Description of Artificial Sequence: Synthetic oligonucleotide
cccuggccggcagcuuaga

SEQ ID NO: 624274 - RNA, 19 nt, Artificial Sequence
  Description of Artificial Sequence: Synthetic oligonucleotide
uuagguauagucuucuugg

SEQ ID NO: 624275 - RNA, 19 nt, Artificial Sequence
  Description of Artificial Sequence: Synthetic oligonucleotide
uuuggugaacuucagaacc

SEQ ID NO: 624276 - RNA, 19 nt, Artificial Sequence
  Description of Artificial Sequence: Synthetic oligonucleotide
uucggaauggggaagaugc

SEQ ID NO: 624277 - RNA, 19 nt, Artificial Sequence
  Description of Artificial Sequence: Synthetic oligonucleotide
aaacuugacagaauugacc

SEQ ID NO: 624278 - RNA, 19 nt, Artificial Sequence
  Description of Artificial Sequence: Synthetic oligonucleotide
aacacugaguuucuggguc

SEQ ID NO: 624279 - RNA, 19 nt, Artificial Sequence
  Description of Artificial Sequence: Synthetic oligonucleotide
uuagcagucaccuugggcu

SEQ ID NO: 624280 - RNA, 19 nt, Artificial Sequence
  Description of Artificial Sequence: Synthetic oligonucleotide
aaaggaauugucugcuacg

SEQ ID NO: 624281 - RNA, 19 nt, Artificial Sequence
  Description of Artificial Sequence: Synthetic oligonucleotide
aguaugaagacccacagaa

SEQ ID NO: 624282 - RNA, 19 nt, Artificial Sequence
  Description of Artificial Sequence: Synthetic oligonucleotide
aaaucauuuaauauaaaau

SEQ ID NO: 624283 - RNA, 19 nt, Artificial Sequence
  Description of Artificial Sequence: Synthetic oligonucleotide
uuuggaaauguguugggag

SEQ ID NO: 624284 - RNA, 19 nt, Artificial Sequence
  Description of Artificial Sequence: Synthetic oligonucleotide
uuuagguauagucuucuug

SEQ ID NO: 624285 - RNA, 19 nt, Artificial Sequence
  Description of Artificial Sequence: Synthetic oligonucleotide
cagaacuugaaucagacuc

SEQ ID NO: 624286 - RNA, 19 nt, Artificial Sequence
  Description of Artificial Sequence: Synthetic oligonucleotide
uggagcuuaacuuucuuag

SEQ ID NO: 624287 - RNA, 19 nt, Artificial Sequence
  Description of Artificial Sequence: Synthetic oligonucleotide
cuucucaguaugaagaccc

SEQ ID NO: 624288 - RNA, 19 nt, Artificial Sequence
  Description of Artificial Sequence: Synthetic oligonucleotide
uacgaaaucauuuaauaua

SEQ ID NO: 624289 - RNA, 19 nt, Artificial Sequence
  Description of Artificial Sequence: Synthetic oligonucleotide
acuugaaucagacucguca

SEQ ID NO: 624290 - RNA, 19 nt, Artificial Sequence
  Description of Artificial Sequence: Synthetic oligonucleotide
aaggaauugucugcuacgc

SEQ ID NO: 624291 - RNA, 19 nt, Artificial Sequence
  Description of Artificial Sequence: Synthetic oligonucleotide
uucgcuaagaugaccacag

SEQ ID NO: 624292 - RNA, 19 nt, Artificial Sequence
  Description of Artificial Sequence: Synthetic oligonucleotide
aacucuuuuggguaggggu

SEQ ID NO: 624293 - RNA, 19 nt, Artificial Sequence
  Description of Artificial Sequence: Synthetic oligonucleotide
cuaacacugaguuucuggg

SEQ ID NO: 624294 - RNA, 19 nt, Artificial Sequence
  Description of Artificial Sequence: Synthetic oligonucleotide
ucaaaucuacccuugcaag

SEQ ID NO: 624295 - RNA, 19 nt, Artificial Sequence
  Description of Artificial Sequence: Synthetic oligonucleotide
aaggacuugccuuugguga

SEQ ID NO: 624296 - RNA, 19 nt, Artificial Sequence
  Description of Artificial Sequence: Synthetic oligonucleotide
uauacgaaaucauuuaaua

SEQ ID NO: 624297 - RNA, 19 nt, Artificial Sequence
  Description of Artificial Sequence: Synthetic oligonucleotide
augaccacaggucacucgc

SEQ ID NO: 624298 - RNA, 19 nt, Artificial Sequence
  Description of Artificial Sequence: Synthetic oligonucleotide
ucaguaugaagacccacag

SEQ ID NO: 624299 - RNA, 19 nt, Artificial Sequence
  Description of Artificial Sequence: Synthetic oligonucleotide
ucgcugucaaacuugacag

SEQ ID NO: 624300 - RNA, 19 nt, Artificial Sequence
  Description of Artificial Sequence: Synthetic oligonucleotide
aacugcuuuagcuggagcu

SEQ ID NO: 624301 - RNA, 19 nt, Artificial Sequence
  Description of Artificial Sequence: Synthetic oligonucleotide
aaucuacccuugcaagacc

SEQ ID NO: 624302 - RNA, 19 nt, Artificial Sequence
  Description of Artificial Sequence: Synthetic oligonucleotide
ucaucucugaaaaucacaa

SEQ ID NO: 624303 - RNA, 19 nt, Artificial Sequence
  Description of Artificial Sequence: Synthetic oligonucleotide
aauugucugcuacgcgugc

SEQ ID NO: 624304 - RNA, 19 nt, Artificial Sequence
  Description of Artificial Sequence: Synthetic oligonucleotide
cuugacagaauugaccugg

SEQ ID NO: 624305 - RNA, 19 nt, Artificial Sequence
  Description of Artificial Sequence: Synthetic oligonucleotide
acuuucuuagcuugaggcg

SEQ ID NO: 624306 - RNA, 19 nt, Artificial Sequence
  Description of Artificial Sequence: Synthetic oligonucleotide
uaggucuuuaaucugugga

SEQ ID NO: 624307 - RNA, 19 nt, Artificial Sequence
  Description of Artificial Sequence: Synthetic oligonucleotide
auacaaacuucucaguaug

SEQ ID NO: 624308 - RNA, 19 nt, Artificial Sequence
  Description of Artificial Sequence: Synthetic oligonucleotide
ucuguuucuuuccuggcug

SEQ ID NO: 624309 - RNA, 19 nt, Artificial Sequence
  Description of Artificial Sequence: Synthetic oligonucleotide
ucuauacgaaaucauuuaa

SEQ ID NO: 624310 - RNA, 19 nt, Artificial Sequence
  Description of Artificial Sequence: Synthetic oligonucleotide
gaagacuccucacugcuag

SEQ ID NO: 624311 - RNA, 19 nt, Artificial Sequence
  Description of Artificial Sequence: Synthetic oligonucleotide
acuagaagacuccucacug

SEQ ID NO: 624312 - RNA, 19 nt, Artificial Sequence
  Description of Artificial Sequence: Synthetic oligonucleotide
gaauucaucucugaaaauc

SEQ ID NO: 624313 - RNA, 19 nt, Artificial Sequence
  Description of Artificial Sequence: Synthetic oligonucleotide
aaggcggugggacugaacu

SEQ ID NO: 624314 - RNA, 19 nt, Artificial Sequence
  Description of Artificial Sequence: Synthetic oligonucleotide
gacagaauugaccuggaca

SEQ ID NO: 624315 - RNA, 19 nt, Artificial Sequence
  Description of Artificial Sequence: Synthetic oligonucleotide
aacugucugagucggagcu

SEQ ID NO: 624316 - RNA, 19 nt, Artificial Sequence
  Description of Artificial Sequence: Synthetic oligonucleotide
aaaaucacaacaaucuaua

SEQ ID NO: 624317 - RNA, 19 nt, Artificial Sequence
  Description of Artificial Sequence: Synthetic oligonucleotide
uaacccuucggaaugggga

SEQ ID NO: 624318 - RNA, 19 nt, Artificial Sequence
  Description of Artificial Sequence: Synthetic oligonucleotide
caugcucccgguaaaacgc

SEQ ID NO: 624319 - RNA, 19 nt, Artificial Sequence
  Description of Artificial Sequence: Synthetic oligonucleotide
cagagcuugagucuugucc

SEQ ID NO: 624320 - RNA, 19 nt, Artificial Sequence
  Description of Artificial Sequence: Synthetic oligonucleotide
aacuguagggaccugguuu

SEQ ID NO: 624321 - RNA, 19 nt, Artificial Sequence
  Description of Artificial Sequence: Synthetic oligonucleotide
aaacgcgucacuaccgucg

SEQ ID NO: 624322 - RNA, 19 nt, Artificial Sequence
  Description of Artificial Sequence: Synthetic oligonucleotide
uuuucauggcggaaggacu

SEQ ID NO: 624323 - RNA, 19 nt, Artificial Sequence
  Description of Artificial Sequence: Synthetic oligonucleotide
auacgaaaucauuuaauau

SEQ ID NO: 624324 - RNA, 19 nt, Artificial Sequence
  Description of Artificial Sequence: Synthetic oligonucleotide
aaucagacucgucacugcu

SEQ ID NO: 624325 - RNA, 19 nt, Artificial Sequence
  Description of Artificial Sequence: Synthetic oligonucleotide
uccuucgcuaagaugacca

SEQ ID NO: 624326 - RNA, 19 nt, Artificial Sequence
  Description of Artificial Sequence: Synthetic oligonucleotide
aaucuauacgaaaucauuu

SEQ ID NO: 624327 - RNA, 19 nt, Artificial Sequence
  Description of Artificial Sequence: Synthetic oligonucleotide
ugaagacccacagaacagg

SEQ ID NO: 624328 - RNA, 19 nt, Artificial Sequence
  Description of Artificial Sequence: Synthetic oligonucleotide
ucaggaccugcucaaaucu

SEQ ID NO: 624329 - RNA, 19 nt, Artificial Sequence
  Description of Artificial Sequence: Synthetic oligonucleotide
aaaacgcgucacuaccguc

SEQ ID NO: 624330 - RNA, 19 nt, Artificial Sequence
  Description of Artificial Sequence: Synthetic oligonucleotide
cuugaaucagacucgucac

SEQ ID NO: 624331 - RNA, 19 nt, Artificial Sequence
  Description of Artificial Sequence: Synthetic oligonucleotide
uucagaaccugauuggcuc

SEQ ID NO: 624332 - RNA, 19 nt, Artificial Sequence
  Description of Artificial Sequence: Synthetic oligonucleotide
cucagaacuugaaucagac

SEQ ID NO: 624333 - RNA, 19 nt, Artificial Sequence
  Description of Artificial Sequence: Synthetic oligonucleotide
aucaucacccuuccuucgc

SEQ ID NO: 624334 - RNA, 19 nt, Artificial Sequence
  Description of Artificial Sequence: Synthetic oligonucleotide
aggcuuaggugucuucucc

SEQ ID NO: 624335 - RNA, 19 nt, Artificial Sequence
  Description of Artificial Sequence: Synthetic oligonucleotide
cugauuggcucucucaccc

SEQ ID NO: 624336 - RNA, 19 nt, Artificial Sequence
  Description of Artificial Sequence: Synthetic oligonucleotide
agggguggcagcuacuuuc

SEQ ID NO: 624337 - RNA, 19 nt, Artificial Sequence
  Description of Artificial Sequence: Synthetic oligonucleotide
uagaagacuccucacugcu

SEQ ID NO: 624338 - RNA, 19 nt, Artificial Sequence
  Description of Artificial Sequence: Synthetic oligonucleotide
agaauugaccuggacagag

SEQ ID NO: 624339 - RNA, 19 nt, Artificial Sequence
  Description of Artificial Sequence: Synthetic oligonucleotide
uguggaauucaucucugaa

SEQ ID NO: 624340 - RNA, 19 nt, Artificial Sequence
  Description of Artificial Sequence: Synthetic oligonucleotide
acacugaguuucugggucc

SEQ ID NO: 624341 - RNA, 19 nt, Artificial Sequence
  Description of Artificial Sequence: Synthetic oligonucleotide
ugcuagaacucuuuugggu

SEQ ID NO: 624342 - RNA, 19 nt, Artificial Sequence
  Description of Artificial Sequence: Synthetic oligonucleotide
uacgcgugcauccaccuca

SEQ ID NO: 624343 - RNA, 19 nt, Artificial Sequence
  Description of Artificial Sequence: Synthetic oligonucleotide
ucagacucgucacugcugu

SEQ ID NO: 624344 - RNA, 19 nt, Artificial Sequence
  Description of Artificial Sequence: Synthetic oligonucleotide
gguaaaacgcgucacuacc

SEQ ID NO: 624345 - RNA, 19 nt, Artificial Sequence
  Description of Artificial Sequence: Synthetic oligonucleotide
uuuaaucuguggaauucau

SEQ ID NO: 624346 - RNA, 19 nt, Artificial Sequence
  Description of Artificial Sequence: Synthetic oligonucleotide
agacucgucacugcugucc

SEQ ID NO: 624347 - RNA, 19 nt, Artificial Sequence
  Description of Artificial Sequence: Synthetic oligonucleotide
caaacuugacagaauugac

SEQ ID NO: 624348 - RNA, 19 nt, Artificial Sequence
  Description of Artificial Sequence: Synthetic oligonucleotide
cuagaacucuuuuggguag

SEQ ID NO: 624349 - RNA, 19 nt, Artificial Sequence
  Description of Artificial Sequence: Synthetic oligonucleotide
caaaggaauugucugcuac

SEQ ID NO: 624350 - RNA, 19 nt, Artificial Sequence
  Description of Artificial Sequence: Synthetic oligonucleotide
gaugaccacaggucacucg

SEQ ID NO: 624351 - RNA, 19 nt, Artificial Sequence
  Description of Artificial Sequence: Synthetic oligonucleotide
uuaaucuguggaauucauc

SEQ ID NO: 624352 - RNA, 19 nt, Artificial Sequence
  Description of Artificial Sequence: Synthetic oligonucleotide
aucuauacgaaaucauuua

SEQ ID NO: 624353 - RNA, 19 nt, Artificial Sequence
  Description of Artificial Sequence: Synthetic oligonucleotide
guucccaaggacuucuuug

SEQ ID NO: 624354 - RNA, 19 nt, Artificial Sequence
  Description of Artificial Sequence: Synthetic oligonucleotide
uaaaacgcgucacuaccgu

SEQ ID NO: 624355 - RNA, 19 nt, Artificial Sequence
  Description of Artificial Sequence: Synthetic oligonucleotide
cuagaagacuccucacugc

SEQ ID NO: 624356 - RNA, 19 nt, Artificial Sequence
  Description of Artificial Sequence: Synthetic oligonucleotide
cuaagaugaccacagguca

SEQ ID NO: 624357 - RNA, 19 nt, Artificial Sequence
  Description of Artificial Sequence: Synthetic oligonucleotide
ugucgcuuuugcaaacuug

SEQ ID NO: 624358 - RNA, 19 nt, Artificial Sequence
  Description of Artificial Sequence: Synthetic oligonucleotide
aauguguugggagucugga

SEQ ID NO: 624359 - RNA, 19 nt, Artificial Sequence
  Description of Artificial Sequence: Synthetic oligonucleotide
uacaaacuucucaguauga

SEQ ID NO: 624360 - RNA, 19 nt, Artificial Sequence
  Description of Artificial Sequence: Synthetic oligonucleotide
acuaccgucgcgcacgcug

SEQ ID NO: 624361 - RNA, 19 nt, Artificial Sequence
  Description of Artificial Sequence: Synthetic oligonucleotide
ucccuaacccuucggaaug

SEQ ID NO: 624362 - RNA, 19 nt, Artificial Sequence
  Description of Artificial Sequence: Synthetic oligonucleotide
gugggacugaacuguaggg

SEQ ID NO: 624363 - RNA, 19 nt, Artificial Sequence
  Description of Artificial Sequence: Synthetic oligonucleotide
guaaaacgcgucacuaccg

SEQ ID NO: 624364 - RNA, 19 nt, Artificial Sequence
  Description of Artificial Sequence: Synthetic oligonucleotide
uuuggcgggugucuuggag

SEQ ID NO: 624365 - RNA, 19 nt, Artificial Sequence
  Description of Artificial Sequence: Synthetic oligonucleotide
acgaaaucauuuaauauaa

SEQ ID NO: 624366 - RNA, 19 nt, Artificial Sequence
  Description of Artificial Sequence: Synthetic oligonucleotide
ucacucgcugucaaacuug

SEQ ID NO: 624367 - RNA, 19 nt, Artificial Sequence
  Description of Artificial Sequence: Synthetic oligonucleotide
gucacaguuuucuuugcug

SEQ ID NO: 624368 - RNA, 19 nt, Artificial Sequence
  Description of Artificial Sequence: Synthetic oligonucleotide
aaauguguugggagucugg

SEQ ID NO: 624369 - RNA, 19 nt, Artificial Sequence
  Description of Artificial Sequence: Synthetic oligonucleotide
uuuuggguagggguggcag

SEQ ID NO: 624370 - RNA, 19 nt, Artificial Sequence
  Description of Artificial Sequence: Synthetic oligonucleotide
uugaaucagacucgucacu

SEQ ID NO: 624371 - RNA, 19 nt, Artificial Sequence
  Description of Artificial Sequence: Synthetic oligonucleotide
aguuucuggguccauugga

SEQ ID NO: 624372 - RNA, 19 nt, Artificial Sequence
  Description of Artificial Sequence: Synthetic oligonucleotide
uuuggaagggguucucccu

SEQ ID NO: 624373 - RNA, 19 nt, Artificial Sequence
  Description of Artificial Sequence: Synthetic oligonucleotide
ugaacuguagggaccuggu

SEQ ID NO: 624374 - RNA, 19 nt, Artificial Sequence
  Description of Artificial Sequence: Synthetic oligonucleotide
cagagauggagccuccccg

SEQ ID NO: 624375 - RNA, 19 nt, Artificial Sequence
  Description of Artificial Sequence: Synthetic oligonucleotide
aggaauugucugcuacgcg

SEQ ID NO: 624376 - RNA, 19 nt, Artificial Sequence
  Description of Artificial Sequence: Synthetic oligonucleotide
auucaucucugaaaaucac

SEQ ID NO: 624377 - RNA, 19 nt, Artificial Sequence
  Description of Artificial Sequence: Synthetic oligonucleotide
cuaggucuuuaaucugugg

SEQ ID NO: 624378 - RNA, 19 nt, Artificial Sequence
  Description of Artificial Sequence: Synthetic oligonucleotide
aggucuuuaaucuguggaa

SEQ ID NO: 624379 - RNA, 19 nt, Artificial Sequence
  Description of Artificial Sequence: Synthetic oligonucleotide
aggucacucgcugucaaac

SEQ ID NO: 624380 - RNA, 19 nt, Artificial Sequence
  Description of Artificial Sequence: Synthetic oligonucleotide
ugcugucuccuccucacug

SEQ ID NO: 624381 - RNA, 19 nt, Artificial Sequence
  Description of Artificial Sequence: Synthetic oligonucleotide
agccugaggagccuguuug

SEQ ID NO: 624382 - RNA, 19 nt, Artificial Sequence
  Description of Artificial Sequence: Synthetic oligonucleotide
uuggcaucaaaggaauugu

SEQ ID NO: 624383 - RNA, 19 nt, Artificial Sequence
  Description of Artificial Sequence: Synthetic oligonucleotide
gucacuaccgucgcgcacg

SEQ ID NO: 624384 - RNA, 19 nt, Artificial Sequence
  Description of Artificial Sequence: Synthetic oligonucleotide
uucuggguccauuggaggu

SEQ ID NO: 624385 - RNA, 19 nt, Artificial Sequence
  Description of Artificial Sequence: Synthetic oligonucleotide
cuaacccuucggaaugggg

SEQ ID NO: 624386 - RNA, 19 nt, Artificial Sequence
  Description of Artificial Sequence: Synthetic oligonucleotide
caacaaucuauacgaaauc

SEQ ID NO: 624387 - RNA, 19 nt, Artificial Sequence
  Description of Artificial Sequence: Synthetic oligonucleotide
acccacagaacaggaaggc

SEQ ID NO: 624388 - RNA, 19 nt, Artificial Sequence
  Description of Artificial Sequence: Synthetic oligonucleotide
cuucgucuuggcuggaggc

SEQ ID NO: 624389 - RNA, 19 nt, Artificial Sequence
  Description of Artificial Sequence: Synthetic oligonucleotide
ccuaacacugaguuucugg

SEQ ID NO: 624390 - RNA, 19 nt, Artificial Sequence
  Description of Artificial Sequence: Synthetic oligonucleotide
gagcuuaacuuucuuagcu

SEQ ID NO: 624391 - RNA, 19 nt, Artificial Sequence
  Description of Artificial Sequence: Synthetic oligonucleotide
aacccuucggaauggggaa

SEQ ID NO: 624392 - RNA, 19 nt, Artificial Sequence
  Description of Artificial Sequence: Synthetic oligonucleotide
ugucucauuccgcuucugu

SEQ ID NO: 624393 - RNA, 19 nt, Artificial Sequence
  Description of Artificial Sequence: Synthetic oligonucleotide
ugcucaaaucuacccuugc

SEQ ID NO: 624394 - RNA, 19 nt, Artificial Sequence
  Description of Artificial Sequence: Synthetic oligonucleotide
cugcuagaacucuuuuggg

SEQ ID NO: 624395 - RNA, 19 nt, Artificial Sequence
  Description of Artificial Sequence: Synthetic oligonucleotide
gcuuaacuuucuuagcuug

SEQ ID NO: 624396 - RNA, 19 nt, Artificial Sequence
  Description of Artificial Sequence: Synthetic oligonucleotide
uguuuggcaggcagagaug

SEQ ID NO: 624397 - RNA, 19 nt, Artificial Sequence
  Description of Artificial Sequence: Synthetic oligonucleotide
ugagucuuguccucuuccu

SEQ ID NO: 624398 - RNA, 19 nt, Artificial Sequence
  Description of Artificial Sequence: Synthetic oligonucleotide
ucagaacuugaaucagacu

SEQ ID NO: 624399 - RNA, 19 nt, Artificial Sequence
  Description of Artificial Sequence: Synthetic oligonucleotide
uuagcuugaggcgucccug

SEQ ID NO: 624400 - RNA, 19 nt, Artificial Sequence
  Description of Artificial Sequence: Synthetic oligonucleotide
gaauugucugcuacgcgug

SEQ ID NO: 624401 - RNA, 19 nt, Artificial Sequence
  Description of Artificial Sequence: Synthetic oligonucleotide
ucucaccccagucuccagc

SEQ ID NO: 624402 - RNA, 19 nt, Artificial Sequence
  Description of Artificial Sequence: Synthetic oligonucleotide
cucaguaugaagacccaca

SEQ ID NO: 624403 - RNA, 19 nt, Artificial Sequence
  Description of Artificial Sequence: Synthetic oligonucleotide
caucaucacccuuccuucg

SEQ ID NO: 624404 - RNA, 19 nt, Artificial Sequence
  Description of Artificial Sequence: Synthetic oligonucleotide
caaaucuacccuugcaaga

SEQ ID NO: 624405 - RNA, 19 nt, Artificial Sequence
  Description of Artificial Sequence: Synthetic oligonucleotide
uccucccuaacccuucgga

SEQ ID NO: 624406 - RNA, 19 nt, Artificial Sequence
  Description of Artificial Sequence: Synthetic oligonucleotide
aggaccugcucaaaucuac

SEQ ID NO: 624407 - RNA, 19 nt, Artificial Sequence
  Description of Artificial Sequence: Synthetic oligonucleotide
accugcucaaaucuacccu

SEQ ID NO: 624408 - RNA, 19 nt, Artificial Sequence
  Description of Artificial Sequence: Synthetic oligonucleotide
uuuggguagggguggcagc

SEQ ID NO: 624409 - RNA, 19 nt, Artificial Sequence
  Description of Artificial Sequence: Synthetic oligonucleotide
gagauggugcugcuuuagc

SEQ ID NO: 624410 - RNA, 19 nt, Artificial Sequence
  Description of Artificial Sequence: Synthetic oligonucleotide
uuggcgggugucuuggaga

SEQ ID NO: 624411 - RNA, 19 nt, Artificial Sequence
  Description of Artificial Sequence: Synthetic oligonucleotide
acuguagggaccugguuuu

SEQ ID NO: 624412 - RNA, 19 nt, Artificial Sequence
  Description of Artificial Sequence: Synthetic oligonucleotide
gcuggaacugucugagucg

SEQ ID NO: 624413 - RNA, 19 nt, Artificial Sequence
  Description of Artificial Sequence: Synthetic oligonucleotide
cuggaacugucugagucgg

SEQ ID NO: 624414 - RNA, 19 nt, Artificial Sequence
  Description of Artificial Sequence: Synthetic oligonucleotide
cuuaacuuucuuagcuuga

SEQ ID NO: 624415 - RNA, 19 nt, Artificial Sequence
  Description of Artificial Sequence: Synthetic oligonucleotide
uucucaguaugaagaccca

SEQ ID NO: 624416 - RNA, 19 nt, Artificial Sequence
  Description of Artificial Sequence: Synthetic oligonucleotide
acuuucacuggugccuugg

SEQ ID NO: 624417 - RNA, 19 nt, Artificial Sequence
  Description of Artificial Sequence: Synthetic oligonucleotide
ugcuacgcgugcauccacc

SEQ ID NO: 624418 - RNA, 19 nt, Artificial Sequence
  Description of Artificial Sequence: Synthetic oligonucleotide
gaaauguguugggagucug

SEQ ID NO: 624419 - RNA, 19 nt, Artificial Sequence
  Description of Artificial Sequence: Synthetic oligonucleotide
auguguugggagucuggag

SEQ ID NO: 624420 - RNA, 19 nt, Artificial Sequence
  Description of Artificial Sequence: Synthetic oligonucleotide
uuggaagggguucucccuc

SEQ ID NO: 624421 - RNA, 19 nt, Artificial Sequence
  Description of Artificial Sequence: Synthetic oligonucleotide
gaacucuuuuggguagggg

SEQ ID NO: 624422 - RNA, 19 nt, Artificial Sequence
  Description of Artificial Sequence: Synthetic oligonucleotide
ucgcuaagaugaccacagg

SEQ ID NO: 624423 - RNA, 19 nt, Artificial Sequence
  Description of Artificial Sequence: Synthetic oligonucleotide
uggacagagauggagccuc

SEQ ID NO: 624424 - RNA, 19 nt, Artificial Sequence
  Description of Artificial Sequence: Synthetic oligonucleotide
ucacccuuccuucgcuaag

SEQ ID NO: 624425 - RNA, 19 nt, Artificial Sequence
  Description of Artificial Sequence: Synthetic oligonucleotide
cucuuuuggguaggggugg

SEQ ID NO: 624426 - RNA, 19 nt, Artificial Sequence
  Description of Artificial Sequence: Synthetic oligonucleotide
cucgcuuggcaucaaagga

SEQ ID NO: 624427 - RNA, 19 nt, Artificial Sequence
  Description of Artificial Sequence: Synthetic oligonucleotide
uugacagaauugaccugga

SEQ ID NO: 624428 - RNA, 19 nt, Artificial Sequence
  Description of Artificial Sequence: Synthetic oligonucleotide
agucuggagcuuaacuuuc

SEQ ID NO: 624429 - RNA, 19 nt, Artificial Sequence
  Description of Artificial Sequence: Synthetic oligonucleotide
uggaaauguguugggaguc

SEQ ID NO: 624430 - RNA, 19 nt, Artificial Sequence
  Description of Artificial Sequence: Synthetic oligonucleotide
gucugcuacgcgugcaucc

SEQ ID NO: 624431 - RNA, 19 nt, Artificial Sequence
  Description of Artificial Sequence: Synthetic oligonucleotide
agcuuaacuuucuuagcuu

SEQ ID NO: 624432 - RNA, 19 nt, Artificial Sequence
  Description of Artificial Sequence: Synthetic oligonucleotide
ucaucacccuuccuucgcu

SEQ ID NO: 624433 - RNA, 19 nt, Artificial Sequence
  Description of Artificial Sequence: Synthetic oligonucleotide
ucggaauggggaagaugcc

SEQ ID NO: 624434 - RNA, 19 nt, Artificial Sequence
  Description of Artificial Sequence: Synthetic oligonucleotide
uacccuugcaagacccucu

SEQ ID NO: 624435 - RNA, 19 nt, Artificial Sequence
  Description of Artificial Sequence: Synthetic oligonucleotide
ugacagaauugaccuggac

SEQ ID NO: 624436 - RNA, 19 nt, Artificial Sequence
  Description of Artificial Sequence: Synthetic oligonucleotide
agucaccuugggcuugggg

SEQ ID NO: 624437 - RNA, 19 nt, Artificial Sequence
  Description of Artificial Sequence: Synthetic oligonucleotide
gauuggcucucucacccca

SEQ ID NO: 624438 - RNA, 19 nt, Artificial Sequence
  Description of Artificial Sequence: Synthetic oligonucleotide
cucauuccgcuucuguuuc

SEQ ID NO: 624439 - RNA, 19 nt, Artificial Sequence
  Description of Artificial Sequence: Synthetic oligonucleotide
gaccacaggucacucgcug

SEQ ID NO: 624440 - RNA, 19 nt, Artificial Sequence
  Description of Artificial Sequence: Synthetic oligonucleotide
ggagcuuaacuuucuuagc

SEQ ID NO: 624441 - RNA, 19 nt, Artificial Sequence
  Description of Artificial Sequence: Synthetic oligonucleotide
agcuggagcuuucuucucu

SEQ ID NO: 624442 - RNA, 19 nt, Artificial Sequence
  Description of Artificial Sequence: Synthetic oligonucleotide
cuuuaaucuguggaauuca

SEQ ID NO: 624443 - RNA, 19 nt, Artificial Sequence
  Description of Artificial Sequence: Synthetic oligonucleotide
ugacuggccagccuuccau

SEQ ID NO: 624444 - RNA, 19 nt, Artificial Sequence
  Description of Artificial Sequence: Synthetic oligonucleotide
uuaggugucuucuccucuu

SEQ ID NO: 624445 - RNA, 19 nt, Artificial Sequence
  Description of Artificial Sequence: Synthetic oligonucleotide
aacuugaaucagacucguc

SEQ ID NO: 624446 - RNA, 19 nt, Artificial Sequence
  Description of Artificial Sequence: Synthetic oligonucleotide
agagauggugcugcuuuag

SEQ ID NO: 624447 - RNA, 19 nt, Artificial Sequence
  Description of Artificial Sequence: Synthetic oligonucleotide
agacccucuccuaacacug

SEQ ID NO: 624448 - RNA, 19 nt, Artificial Sequence
  Description of Artificial Sequence: Synthetic oligonucleotide
gcuaagaugaccacagguc

SEQ ID NO: 624449 - RNA, 19 nt, Artificial Sequence
  Description of Artificial Sequence: Synthetic oligonucleotide
aggcuguuucugcacagca

SEQ ID NO: 624450 - RNA, 19 nt, Artificial Sequence
  Description of Artificial Sequence: Synthetic oligonucleotide
ggaacugucugagucggag

SEQ ID NO: 624451 - RNA, 19 nt, Artificial Sequence
  Description of Artificial Sequence: Synthetic oligonucleotide
ugauuggcucucucacccc

SEQ ID NO: 624452 - RNA, 19 nt, Artificial Sequence
  Description of Artificial Sequence: Synthetic oligonucleotide
agcuaggucuuuaaucugu

SEQ ID NO: 624453 - RNA, 19 nt, Artificial Sequence
  Description of Artificial Sequence: Synthetic oligonucleotide
uuuuagguauagucuucuu

SEQ ID NO: 624454 - RNA, 19 nt, Artificial Sequence
  Description of Artificial Sequence: Synthetic oligonucleotide
cauggcggaaggacuugcc

SEQ ID NO: 624455 - RNA, 19 nt, Artificial Sequence
  Description of Artificial Sequence: Synthetic oligonucleotide
gagucggagcugcuguccc

SEQ ID NO: 624456 - RNA, 19 nt, Artificial Sequence
  Description of Artificial Sequence: Synthetic oligonucleotide
ggagagaacugcuuuagcu

SEQ ID NO: 624457 - RNA, 19 nt, Artificial Sequence
  Description of Artificial Sequence: Synthetic oligonucleotide
ucugcuacgcgugcaucca

SEQ ID NO: 624458 - RNA, 19 nt, Artificial Sequence
  Description of Artificial Sequence: Synthetic oligonucleotide
cuuccuucgcuaagaugac

SEQ ID NO: 624459 - RNA, 19 nt, Artificial Sequence
  Description of Artificial Sequence: Synthetic oligonucleotide
gacuccucacugcuagaac

SEQ ID NO: 624460 - RNA, 19 nt, Artificial Sequence
  Description of Artificial Sequence: Synthetic oligonucleotide
ccucgcuuggcaucaaagg

SEQ ID NO: 624461 - RNA, 19 nt, Artificial Sequence
  Description of Artificial Sequence: Synthetic oligonucleotide
ggaauugucugcuacgcgu

SEQ ID NO: 624462 - RNA, 19 nt, Artificial Sequence
  Description of Artificial Sequence: Synthetic oligonucleotide
cugccucgcuucuucuucg

SEQ ID NO: 624463 - RNA, 19 nt, Artificial Sequence
  Description of Artificial Sequence: Synthetic oligonucleotide
cugcucaaaucuacccuug

SEQ ID NO: 624464 - RNA, 19 nt, Artificial Sequence
  Description of Artificial Sequence: Synthetic oligonucleotide
cuaccgucgcgcacgcugc

SEQ ID NO: 624465 - RNA, 19 nt, Artificial Sequence
  Description of Artificial Sequence: Synthetic oligonucleotide
cauuggaggugacuggcca

SEQ ID NO: 624466 - RNA, 19 nt, Artificial Sequence
  Description of Artificial Sequence: Synthetic oligonucleotide
gugccuuggccacaacuug

SEQ ID NO: 624467 - RNA, 19 nt, Artificial Sequence
  Description of Artificial Sequence: Synthetic oligonucleotide
gaggcuuaggugucuucuc

SEQ ID NO: 624468 - RNA, 19 nt, Artificial Sequence
  Description of Artificial Sequence: Synthetic oligonucleotide
ugcaccucgcuuggcauca

SEQ ID NO: 624469 - RNA, 19 nt, Artificial Sequence
  Description of Artificial Sequence: Synthetic oligonucleotide
gcuagaacucuuuugggua

SEQ ID NO: 624470 - RNA, 19 nt, Artificial Sequence
  Description of Artificial Sequence: Synthetic oligonucleotide
agcugcaccucgcuuggca

SEQ ID NO: 624471 - RNA, 19 nt, Artificial Sequence
  Description of Artificial Sequence: Synthetic oligonucleotide
uucgucuuggcuggaggcu

SEQ ID NO: 624472 - RNA, 19 nt, Artificial Sequence
  Description of Artificial Sequence: Synthetic oligonucleotide
agaugaccacaggucacuc

SEQ ID NO: 624473 - RNA, 19 nt, Artificial Sequence
  Description of Artificial Sequence: Synthetic oligonucleotide
uggguucccaaggacuucu

SEQ ID NO: 624474 - RNA, 19 nt, Artificial Sequence
  Description of Artificial Sequence: Synthetic oligonucleotide
ucacugcuagaacucuuuu

SEQ ID NO: 624475 - RNA, 19 nt, Artificial Sequence
  Description of Artificial Sequence: Synthetic oligonucleotide
ucauggcggaaggacuugc

SEQ ID NO: 624476 - RNA, 19 nt, Artificial Sequence
  Description of Artificial Sequence: Synthetic oligonucleotide
cuugagucuuguccucuuc

SEQ ID NO: 624477 - RNA, 19 nt, Artificial Sequence
  Description of Artificial Sequence: Synthetic oligonucleotide
gguuuggcgggugucuugg

SEQ ID NO: 624478 - RNA, 19 nt, Artificial Sequence
  Description of Artificial Sequence: Synthetic oligonucleotide
uuccuucgcuaagaugacc

SEQ ID NO: 624479 - RNA, 19 nt, Artificial Sequence
  Description of Artificial Sequence: Synthetic oligonucleotide
auggagccuccccgguagc

SEQ ID NO: 624480 - RNA, 19 nt, Artificial Sequence
  Description of Artificial Sequence: Synthetic oligonucleotide
uguuucuuuccuggcugcu

SEQ ID NO: 624481 - RNA, 19 nt, Artificial Sequence
  Description of Artificial Sequence: Synthetic oligonucleotide
uucauggcggaaggacuug

SEQ ID NO: 624482 - RNA, 19 nt, Artificial Sequence
  Description of Artificial Sequence: Synthetic oligonucleotide
cuguuuggcaggcagagau

SEQ ID NO: 624483 - RNA, 19 nt, Artificial Sequence
  Description of Artificial Sequence: Synthetic oligonucleotide
cuucggaauggggaagaug

SEQ ID NO: 624484 - RNA, 19 nt, Artificial Sequence
  Description of Artificial Sequence: Synthetic oligonucleotide
accucgcuuggcaucaaag

SEQ ID NO: 624485 - RNA, 19 nt, Artificial Sequence
  Description of Artificial Sequence: Synthetic oligonucleotide
gaauugaccuggacagaga

SEQ ID NO: 624486 - RNA, 19 nt, Artificial Sequence
  Description of Artificial Sequence: Synthetic oligonucleotide
ucuuagcuugaggcguccc

SEQ ID NO: 624487 - RNA, 19 nt, Artificial Sequence
  Description of Artificial Sequence: Synthetic oligonucleotide
ucacuaccgucgcgcacgc

SEQ ID NO: 624488 - RNA, 19 nt, Artificial Sequence
  Description of Artificial Sequence: Synthetic oligonucleotide
auugucugcuacgcgugca

SEQ ID NO: 624489 - RNA, 19 nt, Artificial Sequence
  Description of Artificial Sequence: Synthetic oligonucleotide
acugcugcugcugcugcug

SEQ ID NO: 624490 - RNA, 19 nt, Artificial Sequence
  Description of Artificial Sequence: Synthetic oligonucleotide
aagacccacagaacaggaa

SEQ ID NO: 624491 - RNA, 19 nt, Artificial Sequence
  Description of Artificial Sequence: Synthetic oligonucleotide
cugaggagccuguuuggca

SEQ ID NO: 624492 - RNA, 19 nt, Artificial Sequence
  Description of Artificial Sequence: Synthetic oligonucleotide
ucgcuuuugcaaacuuguu

SEQ ID NO: 624493 - RNA, 19 nt, Artificial Sequence
  Description of Artificial Sequence: Synthetic oligonucleotide
ugcucccgguaaaacgcgu

SEQ ID NO: 624494 - RNA, 19 nt, Artificial Sequence
  Description of Artificial Sequence: Synthetic oligonucleotide
ucgcgcacgcugcacgacu

SEQ ID NO: 624495 - RNA, 19 nt, Artificial Sequence
  Description of Artificial Sequence: Synthetic oligonucleotide
ccaucaucacccuuccuuc

SEQ ID NO: 624496 - RNA, 19 nt, Artificial Sequence
  Description of Artificial Sequence: Synthetic oligonucleotide
cuucgcuaagaugaccaca

SEQ ID NO: 624497 - RNA, 19 nt, Artificial Sequence
  Description of Artificial Sequence: Synthetic oligonucleotide
cuccccgguagcugccucg

SEQ ID NO: 624498 - RNA, 19 nt, Artificial Sequence
  Description of Artificial Sequence: Synthetic oligonucleotide
aggcggugggacugaacug

SEQ ID NO: 624499 - RNA, 19 nt, Artificial Sequence
  Description of Artificial Sequence: Synthetic oligonucleotide
ucagagcuugagucuuguc

SEQ ID NO: 624500 - RNA, 19 nt, Artificial Sequence
  Description of Artificial Sequence: Synthetic oligonucleotide
ugaccuggacagagaugga

SEQ ID NO: 624501 - RNA, 19 nt, Artificial Sequence
  Description of Artificial Sequence: Synthetic oligonucleotide
ggaaccacgcggcgcaagc

SEQ ID NO: 624502 - RNA, 19 nt, Artificial Sequence
  Description of Artificial Sequence: Synthetic oligonucleotide
ccugauuggcucucucacc

SEQ ID NO: 624503 - RNA, 19 nt, Artificial Sequence
  Description of Artificial Sequence: Synthetic oligonucleotide
gacuggccagccuuccauc

SEQ ID NO: 624504 - RNA, 19 nt, Artificial Sequence
  Description of Artificial Sequence: Synthetic oligonucleotide
cuggagcuuaacuuucuua

SEQ ID NO: 624505 - RNA, 19 nt, Artificial Sequence
  Description of Artificial Sequence: Synthetic oligonucleotide
ucacagaggccgguuugga

SEQ ID NO: 624506 - RNA, 19 nt, Artificial Sequence
  Description of Artificial Sequence: Synthetic oligonucleotide
gaacuugaaucagacucgu

SEQ ID NO: 624507 - RNA, 19 nt, Artificial Sequence
  Description of Artificial Sequence: Synthetic oligonucleotide
gaaccacgcggcgcaagcc

SEQ ID NO: 624508 - RNA, 19 nt, Artificial Sequence
  Description of Artificial Sequence: Synthetic oligonucleotide
cugcugcugcugcugcugg

SEQ ID NO: 624509 - RNA, 19 nt, Artificial Sequence
  Description of Artificial Sequence: Synthetic oligonucleotide
ucccgguaaaacgcgucac

SEQ ID NO: 624510 - RNA, 19 nt, Artificial Sequence
  Description of Artificial Sequence: Synthetic oligonucleotide
gcucaaaucuacccuugca

SEQ ID NO: 624511 - RNA, 19 nt, Artificial Sequence
  Description of Artificial Sequence: Synthetic oligonucleotide
agggguucucccucccacu

SEQ ID NO: 624512 - RNA, 19 nt, Artificial Sequence
  Description of Artificial Sequence: Synthetic oligonucleotide
uggaacugucugagucgga

SEQ ID NO: 624513 - RNA, 19 nt, Artificial Sequence
  Description of Artificial Sequence: Synthetic oligonucleotide
cacucgcugucaaacuuga

SEQ ID NO: 624514 - RNA, 19 nt, Artificial Sequence
  Description of Artificial Sequence: Synthetic oligonucleotide
ugacaaccucaggaccugc

SEQ ID NO: 624515 - RNA, 19 nt, Artificial Sequence
  Description of Artificial Sequence: Synthetic oligonucleotide
agcuugagucuuguccucu

SEQ ID NO: 624516 - RNA, 19 nt, Artificial Sequence
  Description of Artificial Sequence: Synthetic oligonucleotide
cuugcaagacccucuccua

SEQ ID NO: 624517 - RNA, 19 nt, Artificial Sequence
  Description of Artificial Sequence: Synthetic oligonucleotide
uagcagucaccuugggcuu

SEQ ID NO: 624518 - RNA, 19 nt, Artificial Sequence
  Description of Artificial Sequence: Synthetic oligonucleotide
gcugcuuuagcagucaccu

SEQ ID NO: 624519 - RNA, 19 nt, Artificial Sequence
  Description of Artificial Sequence: Synthetic oligonucleotide
caagccgguauccgccaug

SEQ ID NO: 624520 - RNA, 19 nt, Artificial Sequence
  Description of Artificial Sequence: Synthetic oligonucleotide
cacuagaagacuccucacu

SEQ ID NO: 624521 - RNA, 19 nt, Artificial Sequence
  Description of Artificial Sequence: Synthetic oligonucleotide
ggacugaacuguagggacc

SEQ ID NO: 624522 - RNA, 19 nt, Artificial Sequence
  Description of Artificial Sequence: Synthetic oligonucleotide
agcuugaggcgucccugcu

SEQ ID NO: 624523 - RNA, 19 nt, Artificial Sequence
  Description of Artificial Sequence: Synthetic oligonucleotide
ggcgcaagccgguauccgc

SEQ ID NO: 624524 - RNA, 19 nt, Artificial Sequence
  Description of Artificial Sequence: Synthetic oligonucleotide
gccgguauccgccaugcuc

SEQ ID NO: 624525 - RNA, 19 nt, Artificial Sequence
  Description of Artificial Sequence: Synthetic oligonucleotide
ugcugcugcugcugcuggc

SEQ ID NO: 624526 - RNA, 19 nt, Artificial Sequence
  Description of Artificial Sequence: Synthetic oligonucleotide
gguuuggaagggguucucc

SEQ ID NO: 624527 - RNA, 19 nt, Artificial Sequence
  Description of Artificial Sequence: Synthetic oligonucleotide
ugaggcgucccugcuuccu

SEQ ID NO: 624528 - RNA, 19 nt, Artificial Sequence
  Description of Artificial Sequence: Synthetic oligonucleotide
cucccgguaaaacgcguca

SEQ ID NO: 624529 - RNA, 19 nt, Artificial Sequence
  Description of Artificial Sequence: Synthetic oligonucleotide
ccaaggacuucuuuggcaa

SEQ ID NO: 624530 - RNA, 19 nt, Artificial Sequence
  Description of Artificial Sequence: Synthetic oligonucleotide
gccuguuuggcaggcagag

SEQ ID NO: 624531 - RNA, 19 nt, Artificial Sequence
  Description of Artificial Sequence: Synthetic oligonucleotide
ugucugagucggagcugcu

SEQ ID NO: 624532 - RNA, 19 nt, Artificial Sequence
  Description of Artificial Sequence: Synthetic oligonucleotide
cugcugcugcugcugcugc

SEQ ID NO: 624533 - RNA, 19 nt, Artificial Sequence
  Description of Artificial Sequence: Synthetic oligonucleotide
cuccucccuaacccuucgg

SEQ ID NO: 624534 - RNA, 19 nt, Artificial Sequence
  Description of Artificial Sequence: Synthetic oligonucleotide
uggaggcuuaggugucuuc

SEQ ID NO: 624535 - RNA, 19 nt, Artificial Sequence
  Description of Artificial Sequence: Synthetic oligonucleotide
agaggccgguuuggaaggg

SEQ ID NO: 624536 - RNA, 19 nt, Artificial Sequence
  Description of Artificial Sequence: Synthetic oligonucleotide
ccucugcugucucauuccg

SEQ ID NO: 624537 - RNA, 19 nt, Artificial Sequence
  Description of Artificial Sequence: Synthetic oligonucleotide
gcuaggucuuuaaucugug

SEQ ID NO: 624538 - RNA, 19 nt, Artificial Sequence
  Description of Artificial Sequence: Synthetic oligonucleotide
cuuaggugucuucuccucu

SEQ ID NO: 624539 - RNA, 19 nt, Artificial Sequence
  Description of Artificial Sequence: Synthetic oligonucleotide
ggcaucaaaggaauugucu

SEQ ID NO: 624540 - RNA, 19 nt, Artificial Sequence
  Description of Artificial Sequence: Synthetic oligonucleotide
cugcaccucgcuuggcauc

SEQ ID NO: 624541 - RNA, 19 nt, Artificial Sequence
  Description of Artificial Sequence: Synthetic oligonucleotide
gaggcgucccugcuuccuc

SEQ ID NO: 624542 - RNA, 19 nt, Artificial Sequence
  Description of Artificial Sequence: Synthetic oligonucleotide
ggugcaguuggcuucuccu

SEQ ID NO: 624543 - RNA, 19 nt, Artificial Sequence
  Description of Artificial Sequence: Synthetic oligonucleotide
gcucucucaccccagucuc

SEQ ID NO: 624544 - RNA, 19 nt, Artificial Sequence
  Description of Artificial Sequence: Synthetic oligonucleotide
acccuucggaauggggaag

SEQ ID NO: 624545 - RNA, 19 nt, Artificial Sequence
  Description of Artificial Sequence: Synthetic oligonucleotide
gcuuaggugucuucuccuc

SEQ ID NO: 624546 - RNA, 19 nt, Artificial Sequence
  Description of Artificial Sequence: Synthetic oligonucleotide
gggguucucccucccacug

SEQ ID NO: 624547 - RNA, 19 nt, Artificial Sequence
  Description of Artificial Sequence: Synthetic oligonucleotide
cuuuggagacuggguuccc

SEQ ID NO: 624548 - RNA, 19 nt, Artificial Sequence
  Description of Artificial Sequence: Synthetic oligonucleotide
accacgcggcgcaagccgg

SEQ ID NO: 624549 - RNA, 19 nt, Artificial Sequence
  Description of Artificial Sequence: Synthetic oligonucleotide
ugucugcuacgcgugcauc

SEQ ID NO: 624550 - RNA, 19 nt, Artificial Sequence
  Description of Artificial Sequence: Synthetic oligonucleotide
ugcugcugcugcugcugcu

SEQ ID NO: 624551 - RNA, 19 nt, Artificial Sequence
  Description of Artificial Sequence: Synthetic oligonucleotide
ggaccugcucaaaucuacc

SEQ ID NO: 624552 - RNA, 19 nt, Artificial Sequence
  Description of Artificial Sequence: Synthetic oligonucleotide
guccccagccugaggagcc

SEQ ID NO: 624553 - RNA, 19 nt, Artificial Sequence
  Description of Artificial Sequence: Synthetic oligonucleotide
cuuagcuugaggcgucccu

SEQ ID NO: 624554 - RNA, 19 nt, Artificial Sequence
  Description of Artificial Sequence: Synthetic oligonucleotide
uagggguggcagcuacuuu

SEQ ID NO: 624555 - RNA, 19 nt, Artificial Sequence
  Description of Artificial Sequence: Synthetic oligonucleotide
ugccucgcuucuucuucgu

SEQ ID NO: 624556 - RNA, 19 nt, Artificial Sequence
  Description of Artificial Sequence: Synthetic oligonucleotide
gcaagacccucuccuaaca

SEQ ID NO: 624557 - RNA, 19 nt, Artificial Sequence
  Description of Artificial Sequence: Synthetic oligonucleotide
gcucccugcaggcuguuuc

SEQ ID NO: 624558 - RNA, 19 nt, Artificial Sequence
  Description of Artificial Sequence: Synthetic oligonucleotide
cacgcugcacgacuucaga

SEQ ID NO: 624559 - RNA, 19 nt, Artificial Sequence
  Description of Artificial Sequence: Synthetic oligonucleotide
uauccgccaugcucccggu

SEQ ID NO: 624560 - RNA, 19 nt, Artificial Sequence
  Description of Artificial Sequence: Synthetic oligonucleotide
cuacgcgugcauccaccuc

SEQ ID NO: 624561 - RNA, 19 nt, Artificial Sequence
  Description of Artificial Sequence: Synthetic oligonucleotide
cagaaccugauuggcucuc

SEQ ID NO: 624562 - RNA, 19 nt, Artificial Sequence
  Description of Artificial Sequence: Synthetic oligonucleotide
cucccuaacccuucggaau

SEQ ID NO: 624563 - RNA, 19 nt, Artificial Sequence
  Description of Artificial Sequence: Synthetic oligonucleotide
ugggagucuggagcuuaac

SEQ ID NO: 624564 - RNA, 19 nt, Artificial Sequence
  Description of Artificial Sequence: Synthetic oligonucleotide
cucucaccccagucuccag

SEQ ID NO: 624565 - RNA, 19 nt, Artificial Sequence
  Description of Artificial Sequence: Synthetic oligonucleotide
gucacucgcugucaaacuu

SEQ ID NO: 624566 - RNA, 19 nt, Artificial Sequence
  Description of Artificial Sequence: Synthetic oligonucleotide
uaccgucgcgcacgcugca

SEQ ID NO: 624567 - RNA, 19 nt, Artificial Sequence
  Description of Artificial Sequence: Synthetic oligonucleotide
ugggcggcggcugcuuucu

SEQ ID NO: 624568 - RNA, 19 nt, Artificial Sequence
  Description of Artificial Sequence: Synthetic oligonucleotide
ggaagggguucucccuccc

SEQ ID NO: 624569 - RNA, 19 nt, Artificial Sequence
  Description of Artificial Sequence: Synthetic oligonucleotide
ucgucacugcuguccccac

SEQ ID NO: 624570 - RNA, 19 nt, Artificial Sequence
  Description of Artificial Sequence: Synthetic oligonucleotide
cugcuacgcgugcauccac

SEQ ID NO: 624571 - RNA, 19 nt, Artificial Sequence
  Description of Artificial Sequence: Synthetic oligonucleotide
cccaaggacuucuuuggca

SEQ ID NO: 624572 - RNA, 19 nt, Artificial Sequence
  Description of Artificial Sequence: Synthetic oligonucleotide
cacagaggccgguuuggaa

SEQ ID NO: 624573 - RNA, 19 nt, Artificial Sequence
  Description of Artificial Sequence: Synthetic oligonucleotide
gaaggcggugggacugaac

SEQ ID NO: 624574 - RNA, 19 nt, Artificial Sequence
  Description of Artificial Sequence: Synthetic oligonucleotide
cgguaaaacgcgucacuac

SEQ ID NO: 624575 - RNA, 19 nt, Artificial Sequence
  Description of Artificial Sequence: Synthetic oligonucleotide
gggagucuggagcuuaacu

SEQ ID NO: 624576 - RNA, 19 nt, Artificial Sequence
  Description of Artificial Sequence: Synthetic oligonucleotide
ggguagggguggcagcuac

SEQ ID NO: 624577 - RNA, 19 nt, Artificial Sequence
  Description of Artificial Sequence: Synthetic oligonucleotide
ccuucgcuaagaugaccac

SEQ ID NO: 624578 - RNA, 19 nt, Artificial Sequence
  Description of Artificial Sequence: Synthetic oligonucleotide
cagaauugaccuggacaga

SEQ ID NO: 624579 - RNA, 19 nt, Artificial Sequence
  Description of Artificial Sequence: Synthetic oligonucleotide
aggccgguuuggaaggggu

SEQ ID NO: 624580 - RNA, 19 nt, Artificial Sequence
  Description of Artificial Sequence: Synthetic oligonucleotide
uguugggagucuggagcuu

SEQ ID NO: 624581 - RNA, 19 nt, Artificial Sequence
  Description of Artificial Sequence: Synthetic oligonucleotide
ucugggcggcggcugcuuu

SEQ ID NO: 624582 - RNA, 19 nt, Artificial Sequence
  Description of Artificial Sequence: Synthetic oligonucleotide
gacaaccucaggaccugcu

SEQ ID NO: 624583 - RNA, 19 nt, Artificial Sequence
  Description of Artificial Sequence: Synthetic oligonucleotide
gaacuguagggaccugguu

SEQ ID NO: 624584 - RNA, 19 nt, Artificial Sequence
  Description of Artificial Sequence: Synthetic oligonucleotide
caggaccugcucaaaucua

SEQ ID NO: 624585 - RNA, 19 nt, Artificial Sequence
  Description of Artificial Sequence: Synthetic oligonucleotide
gcagucaccuugggcuugg

SEQ ID NO: 624586 - RNA, 19 nt, Artificial Sequence
  Description of Artificial Sequence: Synthetic oligonucleotide
cagacucgucacugcuguc

SEQ ID NO: 624587 - RNA, 19 nt, Artificial Sequence
  Description of Artificial Sequence: Synthetic oligonucleotide
cugggcggcggcugcuuuc

SEQ ID NO: 624588 - RNA, 19 nt, Artificial Sequence
  Description of Artificial Sequence: Synthetic oligonucleotide
ggcucucucaccccagucu

SEQ ID NO: 624589 - RNA, 19 nt, Artificial Sequence
  Description of Artificial Sequence: Synthetic oligonucleotide
gcugcugcugcugcugcug

SEQ ID NO: 624590 - RNA, 19 nt, Artificial Sequence
  Description of Artificial Sequence: Synthetic oligonucleotide
gcgggugucuuggagagaa

SEQ ID NO: 624591 - RNA, 19 nt, Artificial Sequence
  Description of Artificial Sequence: Synthetic oligonucleotide
ggaauucaucucugaaaau

SEQ ID NO: 624592 - RNA, 19 nt, Artificial Sequence
  Description of Artificial Sequence: Synthetic oligonucleotide
ggaggcuuaggugucuucu

SEQ ID NO: 624593 - RNA, 19 nt, Artificial Sequence
  Description of Artificial Sequence: Synthetic oligonucleotide
guuuggcgggugucuugga

SEQ ID NO: 624594 - RNA, 19 nt, Artificial Sequence
  Description of Artificial Sequence: Synthetic oligonucleotide
cacugaguuucugggucca

SEQ ID NO: 624595 - RNA, 19 nt, Artificial Sequence
  Description of Artificial Sequence: Synthetic oligonucleotide
cuuuuggguagggguggca

SEQ ID NO: 624596 - RNA, 19 nt, Artificial Sequence
  Description of Artificial Sequence: Synthetic oligonucleotide
gcgcaagccgguauccgcc

SEQ ID NO: 624597 - RNA, 19 nt, Artificial Sequence
  Description of Artificial Sequence: Synthetic oligonucleotide
ggugcugcuuuagcaguca

SEQ ID NO: 624598 - RNA, 19 nt, Artificial Sequence
  Description of Artificial Sequence: Synthetic oligonucleotide
ccgguagcugccucgcuuc

SEQ ID NO: 624599 - RNA, 19 nt, Artificial Sequence
  Description of Artificial Sequence: Synthetic oligonucleotide
caucacccuuccuucgcua

SEQ ID NO: 624600 - RNA, 19 nt, Artificial Sequence
  Description of Artificial Sequence: Synthetic oligonucleotide
gccgguuuggaagggguuc

SEQ ID NO: 624601 - RNA, 19 nt, Artificial Sequence
  Description of Artificial Sequence: Synthetic oligonucleotide
cgcgucacuaccgucgcgc

SEQ ID NO: 624602 - RNA, 19 nt, Artificial Sequence
  Description of Artificial Sequence: Synthetic oligonucleotide
ggcuuaggugucuucuccu

SEQ ID NO: 624603 - RNA, 19 nt, Artificial Sequence
  Description of Artificial Sequence: Synthetic oligonucleotide
ccuccucccuaacccuucg

SEQ ID NO: 624604 - RNA, 19 nt, Artificial Sequence
  Description of Artificial Sequence: Synthetic oligonucleotide
ccgucgcgcacgcugcacg

SEQ ID NO: 624605 - RNA, 19 nt, Artificial Sequence
  Description of Artificial Sequence: Synthetic oligonucleotide
ggaaauguguugggagucu

SEQ ID NO: 624606 - RNA, 19 nt, Artificial Sequence
  Description of Artificial Sequence: Synthetic oligonucleotide
cuccuaacacugaguuucu

SEQ ID NO: 624607 - RNA, 19 nt, Artificial Sequence
  Description of Artificial Sequence: Synthetic oligonucleotide
cugucucauuccgcuucug

SEQ ID NO: 624608 - RNA, 19 nt, Artificial Sequence
  Description of Artificial Sequence: Synthetic oligonucleotide
cccuaacccuucggaaugg

SEQ ID NO: 624609 - RNA, 19 nt, Artificial Sequence
  Description of Artificial Sequence: Synthetic oligonucleotide
agccgguauccgccaugcu

SEQ ID NO: 624610 - RNA, 19 nt, Artificial Sequence
  Description of Artificial Sequence: Synthetic oligonucleotide
gcacgcugcacgacuucag

SEQ ID NO: 624611 - RNA, 19 nt, Artificial Sequence
  Description of Artificial Sequence: Synthetic oligonucleotide
gggguggcagcuacuuuca

SEQ ID NO: 624612 - RNA, 19 nt, Artificial Sequence
  Description of Artificial Sequence: Synthetic oligonucleotide
guagggguggcagcuacuu

SEQ ID NO: 624613 - RNA, 19 nt, Artificial Sequence
  Description of Artificial Sequence: Synthetic oligonucleotide
accucaggaccugcucaaa

SEQ ID NO: 624614 - RNA, 19 nt, Artificial Sequence
  Description of Artificial Sequence: Synthetic oligonucleotide
ggcgucccugcuuccucug

SEQ ID NO: 624615 - RNA, 19 nt, Artificial Sequence
  Description of Artificial Sequence: Synthetic oligonucleotide
acgcggcgcaagccgguau

SEQ ID NO: 624616 - RNA, 19 nt, Artificial Sequence
  Description of Artificial Sequence: Synthetic oligonucleotide
ccucuccuaacacugaguu

SEQ ID NO: 624617 - RNA, 19 nt, Artificial Sequence
  Description of Artificial Sequence: Synthetic oligonucleotide
ggcggaaggacuugccuuu

SEQ ID NO: 624618 - RNA, 19 nt, Artificial Sequence
  Description of Artificial Sequence: Synthetic oligonucleotide
cucagagcuugagucuugu

SEQ ID NO: 624619 - RNA, 19 nt, Artificial Sequence
  Description of Artificial Sequence: Synthetic oligonucleotide
cgcuaagaugaccacaggu

SEQ ID NO: 624620 - RNA, 19 nt, Artificial Sequence
  Description of Artificial Sequence: Synthetic oligonucleotide
gcuacgcgugcauccaccu

SEQ ID NO: 624621 - RNA, 19 nt, Artificial Sequence
  Description of Artificial Sequence: Synthetic oligonucleotide
cuggacagagauggagccu

SEQ ID NO: 624622 - RNA, 19 nt, Artificial Sequence
  Description of Artificial Sequence: Synthetic oligonucleotide
auccgccaugcucccggua

SEQ ID NO: 624623 - RNA, 19 nt, Artificial Sequence
  Description of Artificial Sequence: Synthetic oligonucleotide
gucgcgcacgcugcacgac

SEQ ID NO: 624624 - RNA, 19 nt, Artificial Sequence
  Description of Artificial Sequence: Synthetic oligonucleotide
gcucccgguaaaacgcguc

SEQ ID NO: 624625 - RNA, 19 nt, Artificial Sequence
  Description of Artificial Sequence: Synthetic oligonucleotide
gcgucccugcuuccucugc

SEQ ID NO: 624626 - RNA, 19 nt, Artificial Sequence
  Description of Artificial Sequence: Synthetic oligonucleotide
gccuucgucuuggcuggag

SEQ ID NO: 624627 - RNA, 19 nt, Artificial Sequence
  Description of Artificial Sequence: Synthetic oligonucleotide
cuacuuucacuggugccuu

SEQ ID NO: 624628 - RNA, 19 nt, Artificial Sequence
  Description of Artificial Sequence: Synthetic oligonucleotide
gcggcgcaagccgguaucc

SEQ ID NO: 624629 - RNA, 19 nt, Artificial Sequence
  Description of Artificial Sequence: Synthetic oligonucleotide
gcggaaggacuugccuuug

SEQ ID NO: 624630 - RNA, 19 nt, Artificial Sequence
  Description of Artificial Sequence: Synthetic oligonucleotide
gcgucacuaccgucgcgca

SEQ ID NO: 624631 - RNA, 19 nt, Artificial Sequence
  Description of Artificial Sequence: Synthetic oligonucleotide
cagagucaucacugcugcu

SEQ ID NO: 624632 - RNA, 19 nt, Artificial Sequence
  Description of Artificial Sequence: Synthetic oligonucleotide
ugccuucgucuuggcugga

SEQ ID NO: 624633 - RNA, 19 nt, Artificial Sequence
  Description of Artificial Sequence: Synthetic oligonucleotide
caccucgcuuggcaucaaa

SEQ ID NO: 624634 - RNA, 19 nt, Artificial Sequence
  Description of Artificial Sequence: Synthetic oligonucleotide
gcugguuuggcgggugucu

SEQ ID NO: 624635 - RNA, 19 nt, Artificial Sequence
  Description of Artificial Sequence: Synthetic oligonucleotide
ccgguaaaacgcgucacua

SEQ ID NO: 624636 - RNA, 19 nt, Artificial Sequence
  Description of Artificial Sequence: Synthetic oligonucleotide
cacugccuucgucuuggcu

SEQ ID NO: 624637 - RNA, 19 nt, Artificial Sequence
  Description of Artificial Sequence: Synthetic oligonucleotide
acgcgugcauccaccucaa

SEQ ID NO: 624638 - RNA, 19 nt, Artificial Sequence
  Description of Artificial Sequence: Synthetic oligonucleotide
cuggugccuuggccacaac

SEQ ID NO: 624639 - RNA, 19 nt, Artificial Sequence
  Description of Artificial Sequence: Synthetic oligonucleotide
gcugcaccucgcuuggcau

SEQ ID NO: 624640 - RNA, 19 nt, Artificial Sequence
  Description of Artificial Sequence: Synthetic oligonucleotide
cauuccgcuucuguuucuu

SEQ ID NO: 624641 - RNA, 19 nt, Artificial Sequence
  Description of Artificial Sequence: Synthetic oligonucleotide
cacugcugcugcugcugcu

SEQ ID NO: 624642 - RNA, 19 nt, Artificial Sequence
  Description of Artificial Sequence: Synthetic oligonucleotide
cgucacuaccgucgcgcac

SEQ ID NO: 624643 - RNA, 19 nt, Artificial Sequence
  Description of Artificial Sequence: Synthetic oligonucleotide
cccuucggaauggggaaga

SEQ ID NO: 624644 - RNA, 19 nt, Artificial Sequence
  Description of Artificial Sequence: Synthetic oligonucleotide
cacuggugccuuggccaca

SEQ ID NO: 624645 - RNA, 19 nt, Artificial Sequence
  Description of Artificial Sequence: Synthetic oligonucleotide
cccgguaaaacgcgucacu

SEQ ID NO: 624646 - RNA, 19 nt, Artificial Sequence
  Description of Artificial Sequence: Synthetic oligonucleotide
ggagccuguuuggcaggca

SEQ ID NO: 624647 - RNA, 19 nt, Artificial Sequence
  Description of Artificial Sequence: Synthetic oligonucleotide
gcuugagucuuguccucuu

SEQ ID NO: 624648 - RNA, 19 nt, Artificial Sequence
  Description of Artificial Sequence: Synthetic oligonucleotide
gcgcacgcugcacgacuuc

SEQ ID NO: 624649 - RNA, 19 nt, Artificial Sequence
  Description of Artificial Sequence: Synthetic oligonucleotide
gcuugaggcgucccugcuu

SEQ ID NO: 624650 - RNA, 19 nt, Artificial Sequence
  Description of Artificial Sequence: Synthetic oligonucleotide
cgcggcgcaagccgguauc

SEQ ID NO: 624651 - RNA, 19 nt, Artificial Sequence
  Description of Artificial Sequence: Synthetic oligonucleotide
gguagggguggcagcuacu

SEQ ID NO: 624652 - RNA, 19 nt, Artificial Sequence
  Description of Artificial Sequence: Synthetic oligonucleotide
ccucaggaccugcucaaau

SEQ ID NO: 624653 - RNA, 19 nt, Artificial Sequence
  Description of Artificial Sequence: Synthetic oligonucleotide
cggcgcaagccgguauccg

SEQ ID NO: 624654 - RNA, 19 nt, Artificial Sequence
  Description of Artificial Sequence: Synthetic oligonucleotide
cgcaagccgguauccgcca

SEQ ID NO: 624655 - RNA, 19 nt, Artificial Sequence
  Description of Artificial Sequence: Synthetic oligonucleotide
cgucgcgcacgcugcacga

SEQ ID NO: 624656 - RNA, 19 nt, Artificial Sequence
  Description of Artificial Sequence: Synthetic oligonucleotide
ccucacugcuagaacucuu

SEQ ID NO: 624657 - RNA, 19 nt, Artificial Sequence
  Description of Artificial Sequence: Synthetic oligonucleotide
ccgguuuggaagggguucu

SEQ ID NO: 624658 - RNA, 19 nt, Artificial Sequence
  Description of Artificial Sequence: Synthetic oligonucleotide
cacgcggcgcaagccggua

SEQ ID NO: 624659 - RNA, 19 nt, Artificial Sequence
  Description of Artificial Sequence: Synthetic oligonucleotide
gcaagccgguauccgccau

SEQ ID NO: 624660 - RNA, 19 nt, Artificial Sequence
  Description of Artificial Sequence: Synthetic oligonucleotide
ccgccaugcucccgguaaa

SEQ ID NO: 624661 - RNA, 19 nt, Artificial Sequence
  Description of Artificial Sequence: Synthetic oligonucleotide
cccgguagcugccucgcuu

SEQ ID NO: 624662 - RNA, 19 nt, Artificial Sequence
  Description of Artificial Sequence: Synthetic oligonucleotide
cgucuuggcuggaggcuua

SEQ ID NO: 624663 - RNA, 19 nt, Artificial Sequence
  Description of Artificial Sequence: Synthetic oligonucleotide
gccucgcuucuucuucguu

SEQ ID NO: 624664 - RNA, 19 nt, Artificial Sequence
  Description of Artificial Sequence: Synthetic oligonucleotide
cgucccugcuuccucugcu

SEQ ID NO: 624665 - RNA, 19 nt, Artificial Sequence
  Description of Artificial Sequence: Synthetic oligonucleotide
ggccgguuuggaagggguu

SEQ ID NO: 624666 - RNA, 19 nt, Artificial Sequence
  Description of Artificial Sequence: Synthetic oligonucleotide
cucugggcggcggcugcuu

SEQ ID NO: 624667 - RNA, 19 nt, Artificial Sequence
  Description of Artificial Sequence: Synthetic oligonucleotide
ccuucggaauggggaagau

SEQ ID NO: 624668 - RNA, 19 nt, Artificial Sequence
  Description of Artificial Sequence: Synthetic oligonucleotide
ggguucccaaggacuucuu

SEQ ID NO: 624669 - RNA, 19 nt, Artificial Sequence
  Description of Artificial Sequence: Synthetic oligonucleotide
cacuaccgucgcgcacgcu

SEQ ID NO: 624670 - RNA, 19 nt, Artificial Sequence
  Description of Artificial Sequence: Synthetic oligonucleotide
cgcgcacgcugcacgacuu

SEQ ID NO: 624671 - RNA, 19 nt, Artificial Sequence
  Description of Artificial Sequence: Synthetic oligonucleotide
cgcgugcauccaccucaau

SEQ ID NO: 624672 - RNA, 19 nt, Artificial Sequence
  Description of Artificial Sequence: Synthetic oligonucleotide
uuaaacaucucaaaggaag

SEQ ID NO: 624673 - RNA, 19 nt, Artificial Sequence
  Description of Artificial Sequence: Synthetic oligonucleotide
aaugcuauugaccuuauca

SEQ ID NO: 624674 - RNA, 19 nt, Artificial Sequence
  Description of Artificial Sequence: Synthetic oligonucleotide
ugugauguaacugagaucc

SEQ ID NO: 624675 - RNA, 19 nt, Artificial Sequence
  Description of Artificial Sequence: Synthetic oligonucleotide
aauugauuaagcccaaauc

SEQ ID NO: 624676 - RNA, 19 nt, Artificial Sequence
  Description of Artificial Sequence: Synthetic oligonucleotide
uuuaauaaagcugugaugu

SEQ ID NO: 624677 - RNA, 19 nt, Artificial Sequence
  Description of Artificial Sequence: Synthetic oligonucleotide
uguguauagagcuuaaaag

SEQ ID NO: 624678 - RNA, 19 nt, Artificial Sequence
  Description of Artificial Sequence: Synthetic oligonucleotide
agaaaugugaucugggugg

SEQ ID NO: 624679 - RNA, 19 nt, Artificial Sequence
  Description of Artificial Sequence: Synthetic oligonucleotide
ucauaaucaaucaagugug

SEQ ID NO: 624680 - RNA, 19 nt, Artificial Sequence
  Description of Artificial Sequence: Synthetic oligonucleotide
cuuacuaaugcuauugacc

SEQ ID NO: 624681 - RNA, 19 nt, Artificial Sequence
  Description of Artificial Sequence: Synthetic oligonucleotide
uguauagagcuuaaaagug

SEQ ID NO: 624682 - RNA, 19 nt, Artificial Sequence
  Description of Artificial Sequence: Synthetic oligonucleotide
aguuguucacauuagaugu

SEQ ID NO: 624683 - RNA, 19 nt, Artificial Sequence
  Description of Artificial Sequence: Synthetic oligonucleotide
uuacuaaugcuauugaccu

SEQ ID NO: 624684 - RNA, 19 nt, Artificial Sequence
  Description of Artificial Sequence: Synthetic oligonucleotide
cauuagaugugcaaaauug

SEQ ID NO: 624685 - RNA, 19 nt, Artificial Sequence
  Description of Artificial Sequence: Synthetic oligonucleotide
aaucaaucaaguguguauc

SEQ ID NO: 624686 - RNA, 19 nt, Artificial Sequence
  Description of Artificial Sequence: Synthetic oligonucleotide
acaauagacaaccucacug

SEQ ID NO: 624687 - RNA, 19 nt, Artificial Sequence
  Description of Artificial Sequence: Synthetic oligonucleotide
uuaaaagugcuguuaaaca

SEQ ID NO: 624688 - RNA, 19 nt, Artificial Sequence
  Description of Artificial Sequence: Synthetic oligonucleotide
aacuuuuaaaacaccgccc

SEQ ID NO: 624689 - RNA, 19 nt, Artificial Sequence
  Description of Artificial Sequence: Synthetic oligonucleotide
uaaaacaccgcccuuuuca

SEQ ID NO: 624690 - RNA, 19 nt, Artificial Sequence
  Description of Artificial Sequence: Synthetic oligonucleotide
guaacacucaucuauaaac

SEQ ID NO: 624691 - RNA, 19 nt, Artificial Sequence
  Description of Artificial Sequence: Synthetic oligonucleotide
aacgcaguccagcuguugc

SEQ ID NO: 624692 - RNA, 19 nt, Artificial Sequence
  Description of Artificial Sequence: Synthetic oligonucleotide
ugaccuguuagaaaguuca

SEQ ID NO: 624693 - RNA, 19 nt, Artificial Sequence
  Description of Artificial Sequence: Synthetic oligonucleotide
aagacaggaagacacccuc

SEQ ID NO: 624694 - RNA, 19 nt, Artificial Sequence
  Description of Artificial Sequence: Synthetic oligonucleotide
agucaauggguuuuaguac

SEQ ID NO: 624695 - RNA, 19 nt, Artificial Sequence
  Description of Artificial Sequence: Synthetic oligonucleotide
uaacacucaucuauaaacc

SEQ ID NO: 624696 - RNA, 19 nt, Artificial Sequence
  Description of Artificial Sequence: Synthetic oligonucleotide
uaacuauguguauagagcu

SEQ ID NO: 624697 - RNA, 19 nt, Artificial Sequence
  Description of Artificial Sequence: Synthetic oligonucleotide
cagaauacuuuaaugcugg

SEQ ID NO: 624698 - RNA, 19 nt, Artificial Sequence
  Description of Artificial Sequence: Synthetic oligonucleotide
uugaccuuaucacaguacc

SEQ ID NO: 624699 - RNA, 19 nt, Artificial Sequence
  Description of Artificial Sequence: Synthetic oligonucleotide
agaugugcaaaauugauua

SEQ ID NO: 624700 - RNA, 19 nt, Artificial Sequence
  Description of Artificial Sequence: Synthetic oligonucleotide
uacaauuaucuugauagag

SEQ ID NO: 624701 - RNA, 19 nt, Artificial Sequence
  Description of Artificial Sequence: Synthetic oligonucleotide
ucuaagagugcuugaacag

SEQ ID NO: 624702 - RNA, 19 nt, Artificial Sequence
  Description of Artificial Sequence: Synthetic oligonucleotide
caaucuaacauggaguucc

SEQ ID NO: 624703 - RNA, 19 nt, Artificial Sequence
  Description of Artificial Sequence: Synthetic oligonucleotide
ugacaaaguacacuggacu

SEQ ID NO: 624704 - RNA, 19 nt, Artificial Sequence
  Description of Artificial Sequence: Synthetic oligonucleotide
uguucuggcaguaaacgca

SEQ ID NO: 624705 - RNA, 19 nt, Artificial Sequence
  Description of Artificial Sequence: Synthetic oligonucleotide
uugauuaagcccaaaucac

SEQ ID NO: 624706 - RNA, 19 nt, Artificial Sequence
  Description of Artificial Sequence: Synthetic oligonucleotide
aacauggaguuccaaaccu

SEQ ID NO: 624707 - RNA, 19 nt, Artificial Sequence
  Description of Artificial Sequence: Synthetic oligonucleotide
gaguaguucagacaaugcc

SEQ ID NO: 624708 - RNA, 19 nt, Artificial Sequence
  Description of Artificial Sequence: Synthetic oligonucleotide
caguugaccuguuagaaag

SEQ ID NO: 624709 - RNA, 19 nt, Artificial Sequence
  Description of Artificial Sequence: Synthetic oligonucleotide
uaaaagugcuguuaaacau

SEQ ID NO: 624710 - RNA, 19 nt, Artificial Sequence
  Description of Artificial Sequence: Synthetic oligonucleotide
acaaaugacugagaugccc

SEQ ID NO: 624711 - RNA, 19 nt, Artificial Sequence
  Description of Artificial Sequence: Synthetic oligonucleotide
caauagacaaccucacugc

SEQ ID NO: 624712 - RNA, 19 nt, Artificial Sequence
  Description of Artificial Sequence: Synthetic oligonucleotide
gauagaguaagaauuagaa

SEQ ID NO: 624713 - RNA, 19 nt, Artificial Sequence
  Description of Artificial Sequence: Synthetic oligonucleotide
ugauagaguaagaauuaga

SEQ ID NO: 624714 - RNA, 19 nt, Artificial Sequence
  Description of Artificial Sequence: Synthetic oligonucleotide
ucuaccucuaagagcagag

SEQ ID NO: 624715 - RNA, 19 nt, Artificial Sequence
  Description of Artificial Sequence: Synthetic oligonucleotide
guaacuauguguauagagc

SEQ ID NO: 624716 - RNA, 19 nt, Artificial Sequence
  Description of Artificial Sequence: Synthetic oligonucleotide
aauugccuugacaaaguac

SEQ ID NO: 624717 - RNA, 19 nt, Artificial Sequence
  Description of Artificial Sequence: Synthetic oligonucleotide
gaucuuacuaaugcuauug

SEQ ID NO: 624718 - RNA, 19 nt, Artificial Sequence
  Description of Artificial Sequence: Synthetic oligonucleotide
uuagaugugcaaaauugau

SEQ ID NO: 624719 - RNA, 19 nt, Artificial Sequence
  Description of Artificial Sequence: Synthetic oligonucleotide
ugauuaagcccaaaucacu

SEQ ID NO: 624720 - RNA, 19 nt, Artificial Sequence
  Description of Artificial Sequence: Synthetic oligonucleotide
uuaguacaggcuuaucccc

SEQ ID NO: 624721 - RNA, 19 nt, Artificial Sequence
  Description of Artificial Sequence: Synthetic oligonucleotide
aaauuaacacuggcaugcc

SEQ ID NO: 624722 - RNA, 19 nt, Artificial Sequence
  Description of Artificial Sequence: Synthetic oligonucleotide
aucaaucaaguguguaucg

SEQ ID NO: 624723 - RNA, 19 nt, Artificial Sequence
  Description of Artificial Sequence: Synthetic oligonucleotide
auuccauaaaaggugcugg

SEQ ID NO: 624724 - RNA, 19 nt, Artificial Sequence
  Description of Artificial Sequence: Synthetic oligonucleotide
uggggauugagucuuuggc

SEQ ID NO: 624725 - RNA, 19 nt, Artificial Sequence
  Description of Artificial Sequence: Synthetic oligonucleotide
auugccuugacaaaguaca

SEQ ID NO: 624726 - RNA, 19 nt, Artificial Sequence
  Description of Artificial Sequence: Synthetic oligonucleotide
aacaccgcccuuuucauaa

SEQ ID NO: 624727 - RNA, 19 nt, Artificial Sequence
  Description of Artificial Sequence: Synthetic oligonucleotide
aguaacccaagcuaauaug

SEQ ID NO: 624728 - RNA, 19 nt, Artificial Sequence
  Description of Artificial Sequence: Synthetic oligonucleotide
uguaucggcagcucgguca

SEQ ID NO: 624729 - RNA, 19 nt, Artificial Sequence
  Description of Artificial Sequence: Synthetic oligonucleotide
auaagaaagccagucaaug

SEQ ID NO: 624730 - RNA, 19 nt, Artificial Sequence
  Description of Artificial Sequence: Synthetic oligonucleotide
caugcaguugaccuguuag

SEQ ID NO: 624731 - RNA, 19 nt, Artificial Sequence
  Description of Artificial Sequence: Synthetic oligonucleotide
aaccucacugcacaaucag

SEQ ID NO: 624732 - RNA, 19 nt, Artificial Sequence
  Description of Artificial Sequence: Synthetic oligonucleotide
uguuagaguguuauuuuaa

SEQ ID NO: 624733 - RNA, 19 nt, Artificial Sequence
  Description of Artificial Sequence: Synthetic oligonucleotide
aacaucucaaaggaaguga

SEQ ID NO: 624734 - RNA, 19 nt, Artificial Sequence
  Description of Artificial Sequence: Synthetic oligonucleotide
aacugagauccaugcauag

SEQ ID NO: 624735 - RNA, 19 nt, Artificial Sequence
  Description of Artificial Sequence: Synthetic oligonucleotide
ucaaucaaguguguaucgg

SEQ ID NO: 624736 - RNA, 19 nt, Artificial Sequence
  Description of Artificial Sequence: Synthetic oligonucleotide
uuagaguguuauuuuaaaa

SEQ ID NO: 624737 - RNA, 19 nt, Artificial Sequence
  Description of Artificial Sequence: Synthetic oligonucleotide
acacucaucuauaaacccc

SEQ ID NO: 624738 - RNA, 19 nt, Artificial Sequence
  Description of Artificial Sequence: Synthetic oligonucleotide
guuaucgucagcaugaaaa

SEQ ID NO: 624739 - RNA, 19 nt, Artificial Sequence
  Description of Artificial Sequence: Synthetic oligonucleotide
ucccaaucuaacauggagu

SEQ ID NO: 624740 - RNA, 19 nt, Artificial Sequence
  Description of Artificial Sequence: Synthetic oligonucleotide
aacaauagacaaccucacu

SEQ ID NO: 624741 - RNA, 19 nt, Artificial Sequence
  Description of Artificial Sequence: Synthetic oligonucleotide
caugcauaggaaaggacug

SEQ ID NO: 624742 - RNA, 19 nt, Artificial Sequence
  Description of Artificial Sequence: Synthetic oligonucleotide
guaacccaagcuaauaugc

SEQ ID NO: 624743 - RNA, 19 nt, Artificial Sequence
  Description of Artificial Sequence: Synthetic oligonucleotide
uuaaugcuggucauaaauu

SEQ ID NO: 624744 - RNA, 19 nt, Artificial Sequence
  Description of Artificial Sequence: Synthetic oligonucleotide
ucagacaaugccugagucc

SEQ ID NO: 624745 - RNA, 19 nt, Artificial Sequence
  Description of Artificial Sequence: Synthetic oligonucleotide
ucaaguguguaucggcagc

SEQ ID NO: 624746 - RNA, 19 nt, Artificial Sequence
  Description of Artificial Sequence: Synthetic oligonucleotide
uccaaguuaucacacacuu

SEQ ID NO: 624747 - RNA, 19 nt, Artificial Sequence
  Description of Artificial Sequence: Synthetic oligonucleotide
cuaauaugccuucauagga

SEQ ID NO: 624748 - RNA, 19 nt, Artificial Sequence
  Description of Artificial Sequence: Synthetic oligonucleotide
caaucaaguguguaucggc

SEQ ID NO: 624749 - RNA, 19 nt, Artificial Sequence
  Description of Artificial Sequence: Synthetic oligonucleotide
uggguuuuaguacaggcuu

SEQ ID NO: 624750 - RNA, 19 nt, Artificial Sequence
  Description of Artificial Sequence: Synthetic oligonucleotide
aaagugcuguuaaacaucu

SEQ ID NO: 624751 - RNA, 19 nt, Artificial Sequence
  Description of Artificial Sequence: Synthetic oligonucleotide
ugugcacuugccaaguggu

SEQ ID NO: 624752 - RNA, 19 nt, Artificial Sequence
  Description of Artificial Sequence: Synthetic oligonucleotide
ugcuauugaccuuaucaca

SEQ ID NO: 624753 - RNA, 19 nt, Artificial Sequence
  Description of Artificial Sequence: Synthetic oligonucleotide
aguguguaucggcagcucg

SEQ ID NO: 624754 - RNA, 19 nt, Artificial Sequence
  Description of Artificial Sequence: Synthetic oligonucleotide
aauuaacacuggcaugcca

SEQ ID NO: 624755 - RNA, 19 nt, Artificial Sequence
  Description of Artificial Sequence: Synthetic oligonucleotide
uaagagugcuugaacaguc

SEQ ID NO: 624756 - RNA, 19 nt, Artificial Sequence
  Description of Artificial Sequence: Synthetic oligonucleotide
ucaguuuuguuuucggcuc

SEQ ID NO: 624757 - RNA, 19 nt, Artificial Sequence
  Description of Artificial Sequence: Synthetic oligonucleotide
auagaguaagaauuagaaa

SEQ ID NO: 624758 - RNA, 19 nt, Artificial Sequence
  Description of Artificial Sequence: Synthetic oligonucleotide
uaacccaagcuaauaugcc

SEQ ID NO: 624759 - RNA, 19 nt, Artificial Sequence
  Description of Artificial Sequence: Synthetic oligonucleotide
aaacaucucaaaggaagug

SEQ ID NO: 624760 - RNA, 19 nt, Artificial Sequence
  Description of Artificial Sequence: Synthetic oligonucleotide
ugaaccucccaaucuaaca

SEQ ID NO: 624761 - RNA, 19 nt, Artificial Sequence
  Description of Artificial Sequence: Synthetic oligonucleotide
aaucccagguaacuaugug

SEQ ID NO: 624762 - RNA, 19 nt, Artificial Sequence
  Description of Artificial Sequence: Synthetic oligonucleotide
uagagcuuaaaagugcugu

SEQ ID NO: 624763 - RNA, 19 nt, Artificial Sequence
  Description of Artificial Sequence: Synthetic oligonucleotide
cacuucgaaaaguaugccc

SEQ ID NO: 624764 - RNA, 19 nt, Artificial Sequence
  Description of Artificial Sequence: Synthetic oligonucleotide
uauuccauaaaaggugcug

SEQ ID NO: 624765 - RNA, 19 nt, Artificial Sequence
  Description of Artificial Sequence: Synthetic oligonucleotide
uugauagaguaagaauuag

SEQ ID NO: 624766 - RNA, 19 nt, Artificial Sequence
  Description of Artificial Sequence: Synthetic oligonucleotide
cauaggaaaggacugccug

SEQ ID NO: 624767 - RNA, 19 nt, Artificial Sequence
  Description of Artificial Sequence: Synthetic oligonucleotide
aggguuuucgcaaacuggg

SEQ ID NO: 624768 - RNA, 19 nt, Artificial Sequence
  Description of Artificial Sequence: Synthetic oligonucleotide
ucacaguaacccaagcuaa

SEQ ID NO: 624769 - RNA, 19 nt, Artificial Sequence
  Description of Artificial Sequence: Synthetic oligonucleotide
uucuuugguucccagggac

SEQ ID NO: 624770 - RNA, 19 nt, Artificial Sequence
  Description of Artificial Sequence: Synthetic oligonucleotide
uuuucggcuccucugugug

SEQ ID NO: 624771 - RNA, 19 nt, Artificial Sequence
  Description of Artificial Sequence: Synthetic oligonucleotide
uugaucugcaaaagcagaa

SEQ ID NO: 624772 - RNA, 19 nt, Artificial Sequence
  Description of Artificial Sequence: Synthetic oligonucleotide
aguaguucagacaaugccu

SEQ ID NO: 624773 - RNA, 19 nt, Artificial Sequence
  Description of Artificial Sequence: Synthetic oligonucleotide
guauagagcuuaaaagugc

SEQ ID NO: 624774 - RNA, 19 nt, Artificial Sequence
  Description of Artificial Sequence: Synthetic oligonucleotide
cugcaucaaacauuauucc

SEQ ID NO: 624775 - RNA, 19 nt, Artificial Sequence
  Description of Artificial Sequence: Synthetic oligonucleotide
ucaauggguuuuaguacag

SEQ ID NO: 624776 - RNA, 19 nt, Artificial Sequence
  Description of Artificial Sequence: Synthetic oligonucleotide
cacgaaaguguaaacauga

SEQ ID NO: 624777 - RNA, 19 nt, Artificial Sequence
  Description of Artificial Sequence: Synthetic oligonucleotide
uggcaguaaacgcagucca

SEQ ID NO: 624778 - RNA, 19 nt, Artificial Sequence
  Description of Artificial Sequence: Synthetic oligonucleotide
uugcuaaacagaauacuuu

SEQ ID NO: 624779 - RNA, 19 nt, Artificial Sequence
  Description of Artificial Sequence: Synthetic oligonucleotide
agaguaguucagacaaugc

SEQ ID NO: 624780 - RNA, 19 nt, Artificial Sequence
  Description of Artificial Sequence: Synthetic oligonucleotide
ucucugaaccucccaaucu

SEQ ID NO: 624781 - RNA, 19 nt, Artificial Sequence
  Description of Artificial Sequence: Synthetic oligonucleotide
cucccaaucuaacauggag

SEQ ID NO: 624782 - RNA, 19 nt, Artificial Sequence
  Description of Artificial Sequence: Synthetic oligonucleotide
agugguuagggaguuguuc

SEQ ID NO: 624783 - RNA, 19 nt, Artificial Sequence
  Description of Artificial Sequence: Synthetic oligonucleotide
gucaauggguuuuaguaca

SEQ ID NO: 624784 - RNA, 19 nt, Artificial Sequence
  Description of Artificial Sequence: Synthetic oligonucleotide
uucagacaaugccugaguc

SEQ ID NO: 624785 - RNA, 19 nt, Artificial Sequence
  Description of Artificial Sequence: Synthetic oligonucleotide
acaauuaucuugauagagu

SEQ ID NO: 624786 - RNA, 19 nt, Artificial Sequence
  Description of Artificial Sequence: Synthetic oligonucleotide
aaaccuacucuauuuucuu

SEQ ID NO: 624787 - RNA, 19 nt, Artificial Sequence
  Description of Artificial Sequence: Synthetic oligonucleotide
ugcuaacgcugucaucugg

SEQ ID NO: 624788 - RNA, 19 nt, Artificial Sequence
  Description of Artificial Sequence: Synthetic oligonucleotide
agaauuagaaacacuuggu

SEQ ID NO: 624789 - RNA, 19 nt, Artificial Sequence
  Description of Artificial Sequence: Synthetic oligonucleotide
ugagcuguaagagggugcc

SEQ ID NO: 624790 - RNA, 19 nt, Artificial Sequence
  Description of Artificial Sequence: Synthetic oligonucleotide
gaccuuaucacaguaccac

SEQ ID NO: 624791 - RNA, 19 nt, Artificial Sequence
  Description of Artificial Sequence: Synthetic oligonucleotide
auuagaugugcaaaauuga

SEQ ID NO: 624792 - RNA, 19 nt, Artificial Sequence
  Description of Artificial Sequence: Synthetic oligonucleotide
agcuuaaaagugcuguuaa

SEQ ID NO: 624793 - RNA, 19 nt, Artificial Sequence
  Description of Artificial Sequence: Synthetic oligonucleotide
auacaauuaucuugauaga

SEQ ID NO: 624794 - RNA, 19 nt, Artificial Sequence
  Description of Artificial Sequence: Synthetic oligonucleotide
uguaagagggugccaucug

SEQ ID NO: 624795 - RNA, 19 nt, Artificial Sequence
  Description of Artificial Sequence: Synthetic oligonucleotide
ugaccuuaucacaguacca

SEQ ID NO: 624796 - RNA, 19 nt, Artificial Sequence
  Description of Artificial Sequence: Synthetic oligonucleotide
augcauaggaaaggacugc

SEQ ID NO: 624797 - RNA, 19 nt, Artificial Sequence
  Description of Artificial Sequence: Synthetic oligonucleotide
guaguucagacaaugccug

SEQ ID NO: 624798 - RNA, 19 nt, Artificial Sequence
  Description of Artificial Sequence: Synthetic oligonucleotide
aguaaacgcaguccagcug

SEQ ID NO: 624799 - RNA, 19 nt, Artificial Sequence
  Description of Artificial Sequence: Synthetic oligonucleotide
cagguuaucgucagcauga

SEQ ID NO: 624800 - RNA, 19 nt, Artificial Sequence
  Description of Artificial Sequence: Synthetic oligonucleotide
ugcauaggaaaggacugcc

SEQ ID NO: 624801 - RNA, 19 nt, Artificial Sequence
  Description of Artificial Sequence: Synthetic oligonucleotide
acuaaugcuauugaccuua

SEQ ID NO: 624802 - RNA, 19 nt, Artificial Sequence
  Description of Artificial Sequence: Synthetic oligonucleotide
uuguuagaguguuauuuua

SEQ ID NO: 624803 - RNA, 19 nt, Artificial Sequence
  Description of Artificial Sequence: Synthetic oligonucleotide
cauacaaauugccuugaca

SEQ ID NO: 624804 - RNA, 19 nt, Artificial Sequence
  Description of Artificial Sequence: Synthetic oligonucleotide
gucccuaggcguuuguucc

SEQ ID NO: 624805 - RNA, 19 nt, Artificial Sequence
  Description of Artificial Sequence: Synthetic oligonucleotide
ucccucauuacacuuggua

SEQ ID NO: 624806 - RNA, 19 nt, Artificial Sequence
  Description of Artificial Sequence: Synthetic oligonucleotide
acuuuaaugcuggucauaa

SEQ ID NO: 624807 - RNA, 19 nt, Artificial Sequence
  Description of Artificial Sequence: Synthetic oligonucleotide
gcuauugaccuuaucacag

SEQ ID NO: 624808 - RNA, 19 nt, Artificial Sequence
  Description of Artificial Sequence: Synthetic oligonucleotide
uaacugagauccaugcaua

SEQ ID NO: 624809 - RNA, 19 nt, Artificial Sequence
  Description of Artificial Sequence: Synthetic oligonucleotide
cuugguaacaaucuuugcu

SEQ ID NO: 624810 - RNA, 19 nt, Artificial Sequence
  Description of Artificial Sequence: Synthetic oligonucleotide
gaagugagguagucccuag

SEQ ID NO: 624811 - RNA, 19 nt, Artificial Sequence
  Description of Artificial Sequence: Synthetic oligonucleotide
uuagaaacacuugguacau

SEQ ID NO: 624812 - RNA, 19 nt, Artificial Sequence
  Description of Artificial Sequence: Synthetic oligonucleotide
auuaacacuggcaugccaa

SEQ ID NO: 624813 - RNA, 19 nt, Artificial Sequence
  Description of Artificial Sequence: Synthetic oligonucleotide
aguacaggcuuauccccag

SEQ ID NO: 624814 - RNA, 19 nt, Artificial Sequence
  Description of Artificial Sequence: Synthetic oligonucleotide
uccauaaaaggugcuggca

SEQ ID NO: 624815 - RNA, 19 nt, Artificial Sequence
  Description of Artificial Sequence: Synthetic oligonucleotide
uuaauaaagcugugaugua

SEQ ID NO: 624816 - RNA, 19 nt, Artificial Sequence
  Description of Artificial Sequence: Synthetic oligonucleotide
aguucagacaaugccugag

SEQ ID NO: 624817 - RNA, 19 nt, Artificial Sequence
  Description of Artificial Sequence: Synthetic oligonucleotide
cacccucaaaccaagucug

SEQ ID NO: 624818 - RNA, 19 nt, Artificial Sequence
  Description of Artificial Sequence: Synthetic oligonucleotide
guaacugagauccaugcau

SEQ ID NO: 624819 - RNA, 19 nt, Artificial Sequence
  Description of Artificial Sequence: Synthetic oligonucleotide
acagccagaucuuacuaau

SEQ ID NO: 624820 - RNA, 19 nt, Artificial Sequence
  Description of Artificial Sequence: Synthetic oligonucleotide
uccaaggguugaaaugaga

SEQ ID NO: 624821 - RNA, 19 nt, Artificial Sequence
  Description of Artificial Sequence: Synthetic oligonucleotide
uugaccuguuagaaaguuc

SEQ ID NO: 624822 - RNA, 19 nt, Artificial Sequence
  Description of Artificial Sequence: Synthetic oligonucleotide
gaaggagcuuccccgaauc

SEQ ID NO: 624823 - RNA, 19 nt, Artificial Sequence
  Description of Artificial Sequence: Synthetic oligonucleotide
gauccauccaugaugcuaa

SEQ ID NO: 624824 - RNA, 19 nt, Artificial Sequence
  Description of Artificial Sequence: Synthetic oligonucleotide
aacugggguagaaauguga

SEQ ID NO: 624825 - RNA, 19 nt, Artificial Sequence
  Description of Artificial Sequence: Synthetic oligonucleotide
ucuugguugccuccauacu

SEQ ID NO: 624826 - RNA, 19 nt, Artificial Sequence
  Description of Artificial Sequence: Synthetic oligonucleotide
ggcacuucgaaaaguaugc

SEQ ID NO: 624827 - RNA, 19 nt, Artificial Sequence
  Description of Artificial Sequence: Synthetic oligonucleotide
guaaacgcaguccagcugu

SEQ ID NO: 624828 - RNA, 19 nt, Artificial Sequence
  Description of Artificial Sequence: Synthetic oligonucleotide
ugccaauuacauacaaauu

SEQ ID NO: 624829 - RNA, 19 nt, Artificial Sequence
  Description of Artificial Sequence: Synthetic oligonucleotide
acuauguguauagagcuua

SEQ ID NO: 624830 - RNA, 19 nt, Artificial Sequence
  Description of Artificial Sequence: Synthetic oligonucleotide
uaacgcugucaucugggac

SEQ ID NO: 624831 - RNA, 19 nt, Artificial Sequence
  Description of Artificial Sequence: Synthetic oligonucleotide
gauuaagcccaaaucacua

SEQ ID NO: 624832 - RNA, 19 nt, Artificial Sequence
  Description of Artificial Sequence: Synthetic oligonucleotide
accucccaaucuaacaugg

SEQ ID NO: 624833 - RNA, 19 nt, Artificial Sequence
  Description of Artificial Sequence: Synthetic oligonucleotide
ugcuguuuucugcacgaaa

SEQ ID NO: 624834 - RNA, 19 nt, Artificial Sequence
  Description of Artificial Sequence: Synthetic oligonucleotide
uugauugaaaggagcuuuu

SEQ ID NO: 624835 - RNA, 19 nt, Artificial Sequence
  Description of Artificial Sequence: Synthetic oligonucleotide
ugauguaacugagauccau

SEQ ID NO: 624836 - RNA, 19 nt, Artificial Sequence
  Description of Artificial Sequence: Synthetic oligonucleotide
cucauaagaaagccaguca

SEQ ID NO: 624837 - RNA, 19 nt, Artificial Sequence
  Description of Artificial Sequence: Synthetic oligonucleotide
ucaauccaaaucccaggua

SEQ ID NO: 624838 - RNA, 19 nt, Artificial Sequence
  Description of Artificial Sequence: Synthetic oligonucleotide
aaggagcuuccccgaaucu

SEQ ID NO: 624839 - RNA, 19 nt, Artificial Sequence
  Description of Artificial Sequence: Synthetic oligonucleotide
accuuaucacaguaccaca

SEQ ID NO: 624840 - RNA, 19 nt, Artificial Sequence
  Description of Artificial Sequence: Synthetic oligonucleotide
augaugcuaacgcugucau

SEQ ID NO: 624841 - RNA, 19 nt, Artificial Sequence
  Description of Artificial Sequence: Synthetic oligonucleotide
ugggacuaggaaaggugac

SEQ ID NO: 624842 - RNA, 19 nt, Artificial Sequence
  Description of Artificial Sequence: Synthetic oligonucleotide
uuaacacuggcaugccaau

SEQ ID NO: 624843 - RNA, 19 nt, Artificial Sequence
  Description of Artificial Sequence: Synthetic oligonucleotide
aggcacuucgaaaaguaug

SEQ ID NO: 624844 - RNA, 19 nt, Artificial Sequence
  Description of Artificial Sequence: Synthetic oligonucleotide
ggaaccauucaaaggaaug

SEQ ID NO: 624845 - RNA, 19 nt, Artificial Sequence
  Description of Artificial Sequence: Synthetic oligonucleotide
aaguguguaucggcagcuc

SEQ ID NO: 624846 - RNA, 19 nt, Artificial Sequence
  Description of Artificial Sequence: Synthetic oligonucleotide
agagcuuaaaagugcuguu

SEQ ID NO: 624847 - RNA, 19 nt, Artificial Sequence
  Description of Artificial Sequence: Synthetic oligonucleotide
gggauugagucuuuggcca

SEQ ID NO: 624848 - RNA, 19 nt, Artificial Sequence
  Description of Artificial Sequence: Synthetic oligonucleotide
ugcccucucccucauuaca

SEQ ID NO: 624849 - RNA, 19 nt, Artificial Sequence
  Description of Artificial Sequence: Synthetic oligonucleotide
aggagcuuccccgaaucuc

SEQ ID NO: 624850 - RNA, 19 nt, Artificial Sequence
  Description of Artificial Sequence: Synthetic oligonucleotide
guguguaucggcagcucgg

SEQ ID NO: 624851 - RNA, 19 nt, Artificial Sequence
  Description of Artificial Sequence: Synthetic oligonucleotide
auaaucaaucaagugugua

SEQ ID NO: 624852 - RNA, 19 nt, Artificial Sequence
  Description of Artificial Sequence: Synthetic oligonucleotide
gucaaggguccccauaguc

SEQ ID NO: 624853 - RNA, 19 nt, Artificial Sequence
  Description of Artificial Sequence: Synthetic oligonucleotide
aggaaaggacugccugagg

SEQ ID NO: 624854 - RNA, 19 nt, Artificial Sequence
  Description of Artificial Sequence: Synthetic oligonucleotide
gaauccgaguuccagugcu

SEQ ID NO: 624855 - RNA, 19 nt, Artificial Sequence
  Description of Artificial Sequence: Synthetic oligonucleotide
cugggacuaggaaagguga

SEQ ID NO: 624856 - RNA, 19 nt, Artificial Sequence
  Description of Artificial Sequence: Synthetic oligonucleotide
cugaaccucccaaucuaac

SEQ ID NO: 624857 - RNA, 19 nt, Artificial Sequence
  Description of Artificial Sequence: Synthetic oligonucleotide
agaauacuuuaaugcuggu

SEQ ID NO: 624858 - RNA, 19 nt, Artificial Sequence
  Description of Artificial Sequence: Synthetic oligonucleotide
acuaggcucaagggguaac

SEQ ID NO: 624859 - RNA, 19 nt, Artificial Sequence
  Description of Artificial Sequence: Synthetic oligonucleotide
aggcguuuguuccaggguu

SEQ ID NO: 624860 - RNA, 19 nt, Artificial Sequence
  Description of Artificial Sequence: Synthetic oligonucleotide
acaggcuuauccccagagu

SEQ ID NO: 624861 - RNA, 19 nt, Artificial Sequence
  Description of Artificial Sequence: Synthetic oligonucleotide
aguaguaggagaaggcgua

SEQ ID NO: 624862 - RNA, 19 nt, Artificial Sequence
  Description of Artificial Sequence: Synthetic oligonucleotide
aaucuaacauggaguucca

SEQ ID NO: 624863 - RNA, 19 nt, Artificial Sequence
  Description of Artificial Sequence: Synthetic oligonucleotide
gccaacacagguuaucguc

SEQ ID NO: 624864 - RNA, 19 nt, Artificial Sequence
  Description of Artificial Sequence: Synthetic oligonucleotide
cugccgaggccucaggaac

SEQ ID NO: 624865 - RNA, 19 nt, Artificial Sequence
  Description of Artificial Sequence: Synthetic oligonucleotide
aggcguagaaggagcuucc

SEQ ID NO: 624866 - RNA, 19 nt, Artificial Sequence
  Description of Artificial Sequence: Synthetic oligonucleotide
gcucggucauaguaguagg

SEQ ID NO: 624867 - RNA, 19 nt, Artificial Sequence
  Description of Artificial Sequence: Synthetic oligonucleotide
uguguaucggcagcucggu

SEQ ID NO: 624868 - RNA, 19 nt, Artificial Sequence
  Description of Artificial Sequence: Synthetic oligonucleotide
aacuauguguauagagcuu

SEQ ID NO: 624869 - RNA, 19 nt, Artificial Sequence
  Description of Artificial Sequence: Synthetic oligonucleotide
gcuaacgcugucaucuggg

SEQ ID NO: 624870 - RNA, 19 nt, Artificial Sequence
  Description of Artificial Sequence: Synthetic oligonucleotide
cuaccucuaagagcagagc

SEQ ID NO: 624871 - RNA, 19 nt, Artificial Sequence
  Description of Artificial Sequence: Synthetic oligonucleotide
ugccaacacagguuaucgu

SEQ ID NO: 624872 - RNA, 19 nt, Artificial Sequence
  Description of Artificial Sequence: Synthetic oligonucleotide
aaacaccgcccuuuucaua

SEQ ID NO: 624873 - RNA, 19 nt, Artificial Sequence
  Description of Artificial Sequence: Synthetic oligonucleotide
guaguaggagaaggcguag

SEQ ID NO: 624874 - RNA, 19 nt, Artificial Sequence
  Description of Artificial Sequence: Synthetic oligonucleotide
gaaaugugaucugggugga

SEQ ID NO: 624875 - RNA, 19 nt, Artificial Sequence
  Description of Artificial Sequence: Synthetic oligonucleotide
uagaaggagcuuccccgaa

SEQ ID NO: 624876 - RNA, 19 nt, Artificial Sequence
  Description of Artificial Sequence: Synthetic oligonucleotide
aauccgaguuccagugcug

SEQ ID NO: 624877 - RNA, 19 nt, Artificial Sequence
  Description of Artificial Sequence: Synthetic oligonucleotide
auccauccaugaugcuaac

SEQ ID NO: 624878 - RNA, 19 nt, Artificial Sequence
  Description of Artificial Sequence: Synthetic oligonucleotide
cugccugcaucaaacauua

SEQ ID NO: 624879 - RNA, 19 nt, Artificial Sequence
  Description of Artificial Sequence: Synthetic oligonucleotide
aaacgcaguccagcuguug

SEQ ID NO: 624880 - RNA, 19 nt, Artificial Sequence
  Description of Artificial Sequence: Synthetic oligonucleotide
uacccucagcacuucugca

SEQ ID NO: 624881 - RNA, 19 nt, Artificial Sequence
  Description of Artificial Sequence: Synthetic oligonucleotide
gaccguucucugaaccucc

SEQ ID NO: 624882 - RNA, 19 nt, Artificial Sequence
  Description of Artificial Sequence: Synthetic oligonucleotide
ggcucaagggguaacacuc

SEQ ID NO: 624883 - RNA, 19 nt, Artificial Sequence
  Description of Artificial Sequence: Synthetic oligonucleotide
cugagaugcccucucccuc

SEQ ID NO: 624884 - RNA, 19 nt, Artificial Sequence
  Description of Artificial Sequence: Synthetic oligonucleotide
ucacuaggcucaaggggua

SEQ ID NO: 624885 - RNA, 19 nt, Artificial Sequence
  Description of Artificial Sequence: Synthetic oligonucleotide
gcauagcagggcucgaagc

SEQ ID NO: 624886 - RNA, 19 nt, Artificial Sequence
  Description of Artificial Sequence: Synthetic oligonucleotide
uacuaaugcuauugaccuu

SEQ ID NO: 624887 - RNA, 19 nt, Artificial Sequence
  Description of Artificial Sequence: Synthetic oligonucleotide
uuucggcuccucuguguga

SEQ ID NO: 624888 - RNA, 19 nt, Artificial Sequence
  Description of Artificial Sequence: Synthetic oligonucleotide
caaauugccuugacaaagu

SEQ ID NO: 624889 - RNA, 19 nt, Artificial Sequence
  Description of Artificial Sequence: Synthetic oligonucleotide
uucgcaaacugggguagaa

SEQ ID NO: 624890 - RNA, 19 nt, Artificial Sequence
  Description of Artificial Sequence: Synthetic oligonucleotide
cucggucauaguaguagga

SEQ ID NO: 624891 - RNA, 19 nt, Artificial Sequence
  Description of Artificial Sequence: Synthetic oligonucleotide
uuagggaguuguucacauu

SEQ ID NO: 624892 - RNA, 19 nt, Artificial Sequence
  Description of Artificial Sequence: Synthetic oligonucleotide
cucaccguggccaugcagu

SEQ ID NO: 624893 - RNA, 19 nt, Artificial Sequence
  Description of Artificial Sequence: Synthetic oligonucleotide
guuagggaguuguucacau

SEQ ID NO: 624894 - RNA, 19 nt, Artificial Sequence
  Description of Artificial Sequence: Synthetic oligonucleotide
ucccuaggcguuuguucca

SEQ ID NO: 624895 - RNA, 19 nt, Artificial Sequence
  Description of Artificial Sequence: Synthetic oligonucleotide
accguucucugaaccuccc

SEQ ID NO: 624896 - RNA, 19 nt, Artificial Sequence
  Description of Artificial Sequence: Synthetic oligonucleotide
cuaacgcugucaucuggga

SEQ ID NO: 624897 - RNA, 19 nt, Artificial Sequence
  Description of Artificial Sequence: Synthetic oligonucleotide
cuuccccgaaucucuucug

SEQ ID NO: 624898 - RNA, 19 nt, Artificial Sequence
  Description of Artificial Sequence: Synthetic oligonucleotide
cuauguguauagagcuuaa

SEQ ID NO: 624899 - RNA, 19 nt, Artificial Sequence
  Description of Artificial Sequence: Synthetic oligonucleotide
ugguugccuccauacuggu

SEQ ID NO: 624900 - RNA, 19 nt, Artificial Sequence
  Description of Artificial Sequence: Synthetic oligonucleotide
guucagacaaugccugagu

SEQ ID NO: 624901 - RNA, 19 nt, Artificial Sequence
  Description of Artificial Sequence: Synthetic oligonucleotide
gguuuucgcaaacuggggu

SEQ ID NO: 624902 - RNA, 19 nt, Artificial Sequence
  Description of Artificial Sequence: Synthetic oligonucleotide
aguugaccuguuagaaagu

SEQ ID NO: 624903 - RNA, 19 nt, Artificial Sequence
  Description of Artificial Sequence: Synthetic oligonucleotide
gcacgaaaguguaaacaug

SEQ ID NO: 624904 - RNA, 19 nt, Artificial Sequence
  Description of Artificial Sequence: Synthetic oligonucleotide
ggguuuucgcaaacugggg

SEQ ID NO: 624905 - RNA, 19 nt, Artificial Sequence
  Description of Artificial Sequence: Synthetic oligonucleotide
cuguuagaaaguucacagu

SEQ ID NO: 624906 - RNA, 19 nt, Artificial Sequence
  Description of Artificial Sequence: Synthetic oligonucleotide
accgcccuuuucauaauca

SEQ ID NO: 624907 - RNA, 19 nt, Artificial Sequence
  Description of Artificial Sequence: Synthetic oligonucleotide
uaaacgcaguccagcuguu

SEQ ID NO: 624908 - RNA, 19 nt, Artificial Sequence
  Description of Artificial Sequence: Synthetic oligonucleotide
ggauugagucuuuggccac

SEQ ID NO: 624909 - RNA, 19 nt, Artificial Sequence
  Description of Artificial Sequence: Synthetic oligonucleotide
aggacaugcuuagccucag

SEQ ID NO: 624910 - RNA, 19 nt, Artificial Sequence
  Description of Artificial Sequence: Synthetic oligonucleotide
acccaagcuaauaugccuu

SEQ ID NO: 624911 - RNA, 19 nt, Artificial Sequence
  Description of Artificial Sequence: Synthetic oligonucleotide
cuaagagugcuugaacagu

SEQ ID NO: 624912 - RNA, 19 nt, Artificial Sequence
  Description of Artificial Sequence: Synthetic oligonucleotide
ccaacacagguuaucguca

SEQ ID NO: 624913 - RNA, 19 nt, Artificial Sequence
  Description of Artificial Sequence: Synthetic oligonucleotide
gggaguuguucacauuaga

SEQ ID NO: 624914 - RNA, 19 nt, Artificial Sequence
  Description of Artificial Sequence: Synthetic oligonucleotide
ucgcaaacugggguagaaa

SEQ ID NO: 624915 - RNA, 19 nt, Artificial Sequence
  Description of Artificial Sequence: Synthetic oligonucleotide
ccucuaagagugcuugaac

SEQ ID NO: 624916 - RNA, 19 nt, Artificial Sequence
  Description of Artificial Sequence: Synthetic oligonucleotide
auggaguuccaaaccuacu

SEQ ID NO: 624917 - RNA, 19 nt, Artificial Sequence
  Description of Artificial Sequence: Synthetic oligonucleotide
acgaaaguguaaacaugaa

SEQ ID NO: 624918 - RNA, 19 nt, Artificial Sequence
  Description of Artificial Sequence: Synthetic oligonucleotide
cuaggcucaagggguaaca

SEQ ID NO: 624919 - RNA, 19 nt, Artificial Sequence
  Description of Artificial Sequence: Synthetic oligonucleotide
ucaccguggccaugcaguu

SEQ ID NO: 624920 - RNA, 19 nt, Artificial Sequence
  Description of Artificial Sequence: Synthetic oligonucleotide
caguaaacgcaguccagcu

SEQ ID NO: 624921 - RNA, 19 nt, Artificial Sequence
  Description of Artificial Sequence: Synthetic oligonucleotide
agugacuucuggggauuga

SEQ ID NO: 624922 - RNA, 19 nt, Artificial Sequence
  Description of Artificial Sequence: Synthetic oligonucleotide
caagugguuagggaguugu

SEQ ID NO: 624923 - RNA, 19 nt, Artificial Sequence
  Description of Artificial Sequence: Synthetic oligonucleotide
gcuuaaaagugcuguuaaa

SEQ ID NO: 624924 - RNA, 19 nt, Artificial Sequence
  Description of Artificial Sequence: Synthetic oligonucleotide
ucugcauagcagggcucga

SEQ ID NO: 624925 - RNA, 19 nt, Artificial Sequence
  Description of Artificial Sequence: Synthetic oligonucleotide
caguaacccaagcuaauau

SEQ ID NO: 624926 - RNA, 19 nt, Artificial Sequence
  Description of Artificial Sequence: Synthetic oligonucleotide
gcuaaacagaauacuuuaa

SEQ ID NO: 624927 - RNA, 19 nt, Artificial Sequence
  Description of Artificial Sequence: Synthetic oligonucleotide
cucuaccucuaagagcaga

SEQ ID NO: 624928 - RNA, 19 nt, Artificial Sequence
  Description of Artificial Sequence: Synthetic oligonucleotide
gggacuaggaaaggugaca

SEQ ID NO: 624929 - RNA, 19 nt, Artificial Sequence
  Description of Artificial Sequence: Synthetic oligonucleotide
cauaggauccauccaugau

SEQ ID NO: 624930 - RNA, 19 nt, Artificial Sequence
  Description of Artificial Sequence: Synthetic oligonucleotide
aggaagugagguagucccu

SEQ ID NO: 624931 - RNA, 19 nt, Artificial Sequence
  Description of Artificial Sequence: Synthetic oligonucleotide
caccgcccuuuucauaauc

SEQ ID NO: 624932 - RNA, 19 nt, Artificial Sequence
  Description of Artificial Sequence: Synthetic oligonucleotide
cuggcaugccaauuacaua

SEQ ID NO: 624933 - RNA, 19 nt, Artificial Sequence
  Description of Artificial Sequence: Synthetic oligonucleotide
uaugcccaucagucccuuc

SEQ ID NO: 624934 - RNA, 19 nt, Artificial Sequence
  Description of Artificial Sequence: Synthetic oligonucleotide
caaggguugaaaugagauu

SEQ ID NO: 624935 - RNA, 19 nt, Artificial Sequence
  Description of Artificial Sequence: Synthetic oligonucleotide
gcacuucgaaaaguaugcc

SEQ ID NO: 624936 - RNA, 19 nt, Artificial Sequence
  Description of Artificial Sequence: Synthetic oligonucleotide
uagaaacacuugguacauu

SEQ ID NO: 624937 - RNA, 19 nt, Artificial Sequence
  Description of Artificial Sequence: Synthetic oligonucleotide
cagcccgucucuauguugu

SEQ ID NO: 624938 - RNA, 19 nt, Artificial Sequence
  Description of Artificial Sequence: Synthetic oligonucleotide
aaggacugccugaggugaa

SEQ ID NO: 624939 - RNA, 19 nt, Artificial Sequence
  Description of Artificial Sequence: Synthetic oligonucleotide
cuguaagagggugccaucu

SEQ ID NO: 624940 - RNA, 19 nt, Artificial Sequence
  Description of Artificial Sequence: Synthetic oligonucleotide
cccaagcuaauaugccuuc

SEQ ID NO: 624941 - RNA, 19 nt, Artificial Sequence
  Description of Artificial Sequence: Synthetic oligonucleotide
ggaccguucucugaaccuc

SEQ ID NO: 624942 - RNA, 19 nt, Artificial Sequence
  Description of Artificial Sequence: Synthetic oligonucleotide
ucggcagcucggucauagu

SEQ ID NO: 624943 - RNA, 19 nt, Artificial Sequence
  Description of Artificial Sequence: Synthetic oligonucleotide
uccucaccguggccaugca

SEQ ID NO: 624944 - RNA, 19 nt, Artificial Sequence
  Description of Artificial Sequence: Synthetic oligonucleotide
ucggcuccucugugugaug

SEQ ID NO: 624945 - RNA, 19 nt, Artificial Sequence
  Description of Artificial Sequence: Synthetic oligonucleotide
guguaucggcagcucgguc

SEQ ID NO: 624946 - RNA, 19 nt, Artificial Sequence
  Description of Artificial Sequence: Synthetic oligonucleotide
augcuuagccucagcugga

SEQ ID NO: 624947 - RNA, 19 nt, Artificial Sequence
  Description of Artificial Sequence: Synthetic oligonucleotide
ggacaugcuuagccucagc

SEQ ID NO: 624948 - RNA, 19 nt, Artificial Sequence
  Description of Artificial Sequence: Synthetic oligonucleotide
agguuaucgucagcaugaa

SEQ ID NO: 624949 - RNA, 19 nt, Artificial Sequence
  Description of Artificial Sequence: Synthetic oligonucleotide
caccucuaagagugcuuga

SEQ ID NO: 624950 - RNA, 19 nt, Artificial Sequence
  Description of Artificial Sequence: Synthetic oligonucleotide
gaggcacuccaaggguuga

SEQ ID NO: 624951 - RNA, 19 nt, Artificial Sequence
  Description of Artificial Sequence: Synthetic oligonucleotide
ggacugccugaggugaagc

SEQ ID NO: 624952 - RNA, 19 nt, Artificial Sequence
  Description of Artificial Sequence: Synthetic oligonucleotide
guaucggcagcucggucau

SEQ ID NO: 624953 - RNA, 19 nt, Artificial Sequence
  Description of Artificial Sequence: Synthetic oligonucleotide
gguuaucgucagcaugaaa

SEQ ID NO: 624954 - RNA, 19 nt, Artificial Sequence
  Description of Artificial Sequence: Synthetic oligonucleotide
acaccgcccuuuucauaau

SEQ ID NO: 624955 - RNA, 19 nt, Artificial Sequence
  Description of Artificial Sequence: Synthetic oligonucleotide
ggacuaggaaaggugacau

SEQ ID NO: 624956 - RNA, 19 nt, Artificial Sequence
  Description of Artificial Sequence: Synthetic oligonucleotide
cccaaucuaacauggaguu

SEQ ID NO: 624957 - RNA, 19 nt, Artificial Sequence
  Description of Artificial Sequence: Synthetic oligonucleotide
ccaaucuaacauggaguuc

SEQ ID NO: 624958 - RNA, 19 nt, Artificial Sequence
  Description of Artificial Sequence: Synthetic oligonucleotide
ggcguagaaggagcuuccc

SEQ ID NO: 624959 - RNA, 19 nt, Artificial Sequence
  Description of Artificial Sequence: Synthetic oligonucleotide
cucaagggguaacacucau

SEQ ID NO: 624960 - RNA, 19 nt, Artificial Sequence
  Description of Artificial Sequence: Synthetic oligonucleotide
acgcugucaucugggacua

SEQ ID NO: 624961 - RNA, 19 nt, Artificial Sequence
  Description of Artificial Sequence: Synthetic oligonucleotide
gagcuguaagagggugcca

SEQ ID NO: 624962 - RNA, 19 nt, Artificial Sequence
  Description of Artificial Sequence: Synthetic oligonucleotide
caggucaaggguccccaua

SEQ ID NO: 624963 - RNA, 19 nt, Artificial Sequence
  Description of Artificial Sequence: Synthetic oligonucleotide
gagguagucccuaggcguu

SEQ ID NO: 624964 - RNA, 19 nt, Artificial Sequence
  Description of Artificial Sequence: Synthetic oligonucleotide
gcuuagccucagcuggaga

SEQ ID NO: 624965 - RNA, 19 nt, Artificial Sequence
  Description of Artificial Sequence: Synthetic oligonucleotide
cacagguuaucgucagcau

SEQ ID NO: 624966 - RNA, 19 nt, Artificial Sequence
  Description of Artificial Sequence: Synthetic oligonucleotide
ggguuuuaguacaggcuua

SEQ ID NO: 624967 - RNA, 19 nt, Artificial Sequence
  Description of Artificial Sequence: Synthetic oligonucleotide
cugcauagcagggcucgaa

SEQ ID NO: 624968 - RNA, 19 nt, Artificial Sequence
  Description of Artificial Sequence: Synthetic oligonucleotide
ccucaccguggccaugcag

SEQ ID NO: 624969 - RNA, 19 nt, Artificial Sequence
  Description of Artificial Sequence: Synthetic oligonucleotide
gcucaagggguaacacuca

SEQ ID NO: 624970 - RNA, 19 nt, Artificial Sequence
  Description of Artificial Sequence: Synthetic oligonucleotide
ggcacuccaaggguugaaa

SEQ ID NO: 624971 - RNA, 19 nt, Artificial Sequence
  Description of Artificial Sequence: Synthetic oligonucleotide
guagucccuaggcguuugu

SEQ ID NO: 624972 - RNA, 19 nt, Artificial Sequence
  Description of Artificial Sequence: Synthetic oligonucleotide
cacaggacucugugacaua

SEQ ID NO: 624973 - RNA, 19 nt, Artificial Sequence
  Description of Artificial Sequence: Synthetic oligonucleotide
cccuaggcguuuguuccag

SEQ ID NO: 624974 - RNA, 19 nt, Artificial Sequence
  Description of Artificial Sequence: Synthetic oligonucleotide
gcacuccaaggguugaaau

SEQ ID NO: 624975 - RNA, 19 nt, Artificial Sequence
  Description of Artificial Sequence: Synthetic oligonucleotide
ccaagcuaauaugccuuca

SEQ ID NO: 624976 - RNA, 19 nt, Artificial Sequence
  Description of Artificial Sequence: Synthetic oligonucleotide
cacuaggcucaagggguaa

SEQ ID NO: 624977 - RNA, 19 nt, Artificial Sequence
  Description of Artificial Sequence: Synthetic oligonucleotide
gcauaggaaaggacugccu

SEQ ID NO: 624978 - RNA, 19 nt, Artificial Sequence
  Description of Artificial Sequence: Synthetic oligonucleotide
ccgcccuuuucauaaucaa

SEQ ID NO: 624979 - RNA, 19 nt, Artificial Sequence
  Description of Artificial Sequence: Synthetic oligonucleotide
cacuacccucagcacuucu

SEQ ID NO: 624980 - RNA, 19 nt, Artificial Sequence
  Description of Artificial Sequence: Synthetic oligonucleotide
cccucauaagaaagccagu

SEQ ID NO: 624981 - RNA, 19 nt, Artificial Sequence
  Description of Artificial Sequence: Synthetic oligonucleotide
gagcuuccccgaaucucuu

SEQ ID NO: 624982 - RNA, 19 nt, Artificial Sequence
  Description of Artificial Sequence: Synthetic oligonucleotide
ggcguuuguuccaggguuu

SEQ ID NO: 624983 - RNA, 19 nt, Artificial Sequence
  Description of Artificial Sequence: Synthetic oligonucleotide
gcacuacccucagcacuuc

SEQ ID NO: 624984 - RNA, 19 nt, Artificial Sequence
  Description of Artificial Sequence: Synthetic oligonucleotide
ccucucccucauuacacuu

SEQ ID NO: 624985 - RNA, 19 nt, Artificial Sequence
  Description of Artificial Sequence: Synthetic oligonucleotide
cgcugucaucugggacuag

SEQ ID NO: 624986 - RNA, 19 nt, Artificial Sequence
  Description of Artificial Sequence: Synthetic oligonucleotide
cgcaguccagcuguugcuu

SEQ ID NO: 624987 - RNA, 19 nt, Artificial Sequence
  Description of Artificial Sequence: Synthetic oligonucleotide
aacuacuucccuuauaugc

SEQ ID NO: 624988 - RNA, 19 nt, Artificial Sequence
  Description of Artificial Sequence: Synthetic oligonucleotide
aauaaaaccgauuaugcga

SEQ ID NO: 624989 - RNA, 19 nt, Artificial Sequence
  Description of Artificial Sequence: Synthetic oligonucleotide
guaaacaggaacuagaugc

SEQ ID NO: 624990 - RNA, 19 nt, Artificial Sequence
  Description of Artificial Sequence: Synthetic oligonucleotide
uauaugaacaccaagauuu

SEQ ID NO: 624991 - RNA, 19 nt, Artificial Sequence
  Description of Artificial Sequence: Synthetic oligonucleotide
agagcuauaauuuugagaa

SEQ ID NO: 624992 - RNA, 19 nt, Artificial Sequence
  Description of Artificial Sequence: Synthetic oligonucleotide
uauaugauuaaacauuuga

SEQ ID NO: 624993 - RNA, 19 nt, Artificial Sequence
  Description of Artificial Sequence: Synthetic oligonucleotide
ucuugaaacauuaaguugu

SEQ ID NO: 624994 - RNA, 19 nt, Artificial Sequence
  Description of Artificial Sequence: Synthetic oligonucleotide
uuuguaauagcuauugucu

SEQ ID NO: 624995 - RNA, 19 nt, Artificial Sequence
  Description of Artificial Sequence: Synthetic oligonucleotide
ucuuaaugugaacaaaagg

SEQ ID NO: 624996 - RNA, 19 nt, Artificial Sequence
  Description of Artificial Sequence: Synthetic oligonucleotide
auuucuaugaauuccagca

SEQ ID NO: 624997 - RNA, 19 nt, Artificial Sequence
  Description of Artificial Sequence: Synthetic oligonucleotide
gauuagaaaucauuggucc

SEQ ID NO: 624998 - RNA, 19 nt, Artificial Sequence
  Description of Artificial Sequence: Synthetic oligonucleotide
uaaaugguauauuuguggg

SEQ ID NO: 624999 - RNA, 19 nt, Artificial Sequence
  Description of Artificial Sequence: Synthetic oligonucleotide
aaggauuagaaaucauugg

SEQ ID NO: 625000 - RNA, 19 nt, Artificial Sequence
  Description of Artificial Sequence: Synthetic oligonucleotide
aucugaugcaaauaaacac

SEQ ID NO: 625001 - RNA, 19 nt, Artificial Sequence
  Description of Artificial Sequence: Synthetic oligonucleotide
acaauuacugucauaaacc

SEQ ID NO: 625002 - RNA, 19 nt, Artificial Sequence
  Description of Artificial Sequence: Synthetic oligonucleotide
aacaugauaacuacuuccc

SEQ ID NO: 625003 - RNA, 19 nt, Artificial Sequence
  Description of Artificial Sequence: Synthetic oligonucleotide
agaaguauuacuaacauga

SEQ ID NO: 625004 - RNA, 19 nt, Artificial Sequence
  Description of Artificial Sequence: Synthetic oligonucleotide
uuuccuauaagaccgggag

SEQ ID NO: 625005 - RNA, 19 nt, Artificial Sequence
  Description of Artificial Sequence: Synthetic oligonucleotide
gaauaaaaccgauuaugcg

SEQ ID NO: 625006 - RNA, 19 nt, Artificial Sequence
  Description of Artificial Sequence: Synthetic oligonucleotide
aauaugagcaaagcugccc

SEQ ID NO: 625007 - RNA, 19 nt, Artificial Sequence
  Description of Artificial Sequence: Synthetic oligonucleotide
uuuacauucuauuuauaug

SEQ ID NO: 625008 - RNA, 19 nt, Artificial Sequence
  Description of Artificial Sequence: Synthetic oligonucleotide
ucugaugcaaauaaacaca

SEQ ID NO: 625009 - RNA, 19 nt, Artificial Sequence
  Description of Artificial Sequence: Synthetic oligonucleotide
uaugauuaaacauuugauc

SEQ ID NO: 625010 - RNA, 19 nt, Artificial Sequence
  Description of Artificial Sequence: Synthetic oligonucleotide
auaugcaaacauuagagcu

SEQ ID NO: 625011 - RNA, 19 nt, Artificial Sequence
  Description of Artificial Sequence: Synthetic oligonucleotide
agaguuguuucuuugcuac

SEQ ID NO: 625012 - RNA, 19 nt, Artificial Sequence
  Description of Artificial Sequence: Synthetic oligonucleotide
uuucccauaaacccauugg

SEQ ID NO: 625013 - RNA, 19 nt, Artificial Sequence
  Description of Artificial Sequence: Synthetic oligonucleotide
ugugcauuucccauaaacc

SEQ ID NO: 625014 - RNA, 19 nt, Artificial Sequence
  Description of Artificial Sequence: Synthetic oligonucleotide
uguacaguaacauccaggu

SEQ ID NO: 625015 - RNA, 19 nt, Artificial Sequence
  Description of Artificial Sequence: Synthetic oligonucleotide
uguuaagcacaucauaaca

SEQ ID NO: 625016 - RNA, 19 nt, Artificial Sequence
  Description of Artificial Sequence: Synthetic oligonucleotide
aguauuacuaacaugauaa

SEQ ID NO: 625017 - RNA, 19 nt, Artificial Sequence
  Description of Artificial Sequence: Synthetic oligonucleotide
ugguuuaugacaucauggg

SEQ ID NO: 625018 - RNA, 19 nt, Artificial Sequence
  Description of Artificial Sequence: Synthetic oligonucleotide
uccuguaccauacagagau

SEQ ID NO: 625019 - RNA, 19 nt, Artificial Sequence
  Description of Artificial Sequence: Synthetic oligonucleotide
aacauuaaguuguacagua

SEQ ID NO: 625020 - RNA, 19 nt, Artificial Sequence
  Description of Artificial Sequence: Synthetic oligonucleotide
gauuaugcgaguuaacuga

SEQ ID NO: 625021 - RNA, 19 nt, Artificial Sequence
  Description of Artificial Sequence: Synthetic oligonucleotide
cauugaucuagauugacug

SEQ ID NO: 625022 - RNA, 19 nt, Artificial Sequence
  Description of Artificial Sequence: Synthetic oligonucleotide
uuauuuguaauagcuauug

SEQ ID NO: 625023 - RNA, 19 nt, Artificial Sequence
  Description of Artificial Sequence: Synthetic oligonucleotide
aacauuugaucauacagua

SEQ ID NO: 625024 - RNA, 19 nt, Artificial Sequence
  Description of Artificial Sequence: Synthetic oligonucleotide
ucuagauugacugacuuga

SEQ ID NO: 625025 - RNA, 19 nt, Artificial Sequence
  Description of Artificial Sequence: Synthetic oligonucleotide
gagaauaaaaccgauuaug

SEQ ID NO: 625026 - RNA, 19 nt, Artificial Sequence
  Description of Artificial Sequence: Synthetic oligonucleotide
caugcuaguauucuguccc

SEQ ID NO: 625027 - RNA, 19 nt, Artificial Sequence
  Description of Artificial Sequence: Synthetic oligonucleotide
auaacuacuucccuuauau

SEQ ID NO: 625028 - RNA, 19 nt, Artificial Sequence
  Description of Artificial Sequence: Synthetic oligonucleotide
uuaauauuagcacuaugua

SEQ ID NO: 625029 - RNA, 19 nt, Artificial Sequence
  Description of Artificial Sequence: Synthetic oligonucleotide
ugaucauacaguaccuucc

SEQ ID NO: 625030 - RNA, 19 nt, Artificial Sequence
  Description of Artificial Sequence: Synthetic oligonucleotide
uauaccuucaaggauuaag

SEQ ID NO: 625031 - RNA, 19 nt, Artificial Sequence
  Description of Artificial Sequence: Synthetic oligonucleotide
uaugcgaguuaacugagca

SEQ ID NO: 625032 - RNA, 19 nt, Artificial Sequence
  Description of Artificial Sequence: Synthetic oligonucleotide
agcacaucauaacaacagc

SEQ ID NO: 625033 - RNA, 19 nt, Artificial Sequence
  Description of Artificial Sequence: Synthetic oligonucleotide
aggauuagaaaucauuggu

SEQ ID NO: 625034 - RNA, 19 nt, Artificial Sequence
  Description of Artificial Sequence: Synthetic oligonucleotide
uaaacaggaacuagaugcc

SEQ ID NO: 625035 - RNA, 19 nt, Artificial Sequence
  Description of Artificial Sequence: Synthetic oligonucleotide
aacauuagagcuauaauuu

SEQ ID NO: 625036 - RNA, 19 nt, Artificial Sequence
  Description of Artificial Sequence: Synthetic oligonucleotide
uucagugauacauuuacau

SEQ ID NO: 625037 - RNA, 19 nt, Artificial Sequence
  Description of Artificial Sequence: Synthetic oligonucleotide
agccuugaaaugcagucgc

SEQ ID NO: 625038 - RNA, 19 nt, Artificial Sequence
  Description of Artificial Sequence: Synthetic oligonucleotide
ugacuuuguaguuugcuca

SEQ ID NO: 625039 - RNA, 19 nt, Artificial Sequence
  Description of Artificial Sequence: Synthetic oligonucleotide
acaucugaugcaaauaaac

SEQ ID NO: 625040 - RNA, 19 nt, Artificial Sequence
  Description of Artificial Sequence: Synthetic oligonucleotide
ugugguuuaugacaucaug

SEQ ID NO: 625041 - RNA, 19 nt, Artificial Sequence
  Description of Artificial Sequence: Synthetic oligonucleotide
aggauuacuggcuaauuug

SEQ ID NO: 625042 - RNA, 19 nt, Artificial Sequence
  Description of Artificial Sequence: Synthetic oligonucleotide
caucauauuuccuauaaga

SEQ ID NO: 625043 - RNA, 19 nt, Artificial Sequence
  Description of Artificial Sequence: Synthetic oligonucleotide
ugugagagauuccacugag

SEQ ID NO: 625044 - RNA, 19 nt, Artificial Sequence
  Description of Artificial Sequence: Synthetic oligonucleotide
accaucaaguccuaaaaga

SEQ ID NO: 625045 - RNA, 19 nt, Artificial Sequence
  Description of Artificial Sequence: Synthetic oligonucleotide
ccuucaaggauuaagagug

SEQ ID NO: 625046 - RNA, 19 nt, Artificial Sequence
  Description of Artificial Sequence: Synthetic oligonucleotide
ucaaugugguuuaugacau

SEQ ID NO: 625047 - RNA, 19 nt, Artificial Sequence
  Description of Artificial Sequence: Synthetic oligonucleotide
cuggaugcaacucugcugc

SEQ ID NO: 625048 - RNA, 19 nt, Artificial Sequence
  Description of Artificial Sequence: Synthetic oligonucleotide
aagcacaucauaacaacag

SEQ ID NO: 625049 - RNA, 19 nt, Artificial Sequence
  Description of Artificial Sequence: Synthetic oligonucleotide
caaacuuacucuguggugc

SEQ ID NO: 625050 - RNA, 19 nt, Artificial Sequence
  Description of Artificial Sequence: Synthetic oligonucleotide
uuuuaguuacccugugugc

SEQ ID NO: 625051 - RNA, 19 nt, Artificial Sequence
  Description of Artificial Sequence: Synthetic oligonucleotide
uuuaguuacccugugugca

SEQ ID NO: 625052 - RNA, 19 nt, Artificial Sequence
  Description of Artificial Sequence: Synthetic oligonucleotide
uuaaucagcacagaccaac

SEQ ID NO: 625053 - RNA, 19 nt, Artificial Sequence
  Description of Artificial Sequence: Synthetic oligonucleotide
cauuagagcuauaauuuug

SEQ ID NO: 625054 - RNA, 19 nt, Artificial Sequence
  Description of Artificial Sequence: Synthetic oligonucleotide
ugcgaguuaacugagcagc

SEQ ID NO: 625055 - RNA, 19 nt, Artificial Sequence
  Description of Artificial Sequence: Synthetic oligonucleotide
uacuaggcaccauaaaaug

SEQ ID NO: 625056 - RNA, 19 nt, Artificial Sequence
  Description of Artificial Sequence: Synthetic oligonucleotide
uagauugacugacuugacc

SEQ ID NO: 625057 - RNA, 19 nt, Artificial Sequence
  Description of Artificial Sequence: Synthetic oligonucleotide
gguguuacaguagacaggg

SEQ ID NO: 625058 - RNA, 19 nt, Artificial Sequence
  Description of Artificial Sequence: Synthetic oligonucleotide
auaaaaccgauuaugcgag

SEQ ID NO: 625059 - RNA, 19 nt, Artificial Sequence
  Description of Artificial Sequence: Synthetic oligonucleotide
aaugucagguguugguucu

SEQ ID NO: 625060 - RNA, 19 nt, Artificial Sequence
  Description of Artificial Sequence: Synthetic oligonucleotide
uuagcgaggaaugucaggu

SEQ ID NO: 625061 - RNA, 19 nt, Artificial Sequence
  Description of Artificial Sequence: Synthetic oligonucleotide
uuacugagacucaugccag

SEQ ID NO: 625062 - RNA, 19 nt, Artificial Sequence
  Description of Artificial Sequence: Synthetic oligonucleotide
uuauaugauuaaacauuug

SEQ ID NO: 625063 - RNA, 19 nt, Artificial Sequence
  Description of Artificial Sequence: Synthetic oligonucleotide
uuuaugacaucaugggaaa

SEQ ID NO: 625064 - RNA, 19 nt, Artificial Sequence
  Description of Artificial Sequence: Synthetic oligonucleotide
uccuauaagaccgggagcu

SEQ ID NO: 625065 - RNA, 19 nt, Artificial Sequence
  Description of Artificial Sequence: Synthetic oligonucleotide
cugaugcaaauaaacacac

SEQ ID NO: 625066 - RNA, 19 nt, Artificial Sequence
  Description of Artificial Sequence: Synthetic oligonucleotide
augguauauuugugggucc

SEQ ID NO: 625067 - RNA, 19 nt, Artificial Sequence
  Description of Artificial Sequence: Synthetic oligonucleotide
uuuagcgaggaaugucagg

SEQ ID NO: 625068 - RNA, 19 nt, Artificial Sequence
  Description of Artificial Sequence: Synthetic oligonucleotide
agguuuaucuccuuucacu

SEQ ID NO: 625069 - RNA, 19 nt, Artificial Sequence
  Description of Artificial Sequence: Synthetic oligonucleotide
uuuuagcgaggaaugucag

SEQ ID NO: 625070 - RNA, 19 nt, Artificial Sequence
  Description of Artificial Sequence: Synthetic oligonucleotide
gaauuugauacacuagaaa

SEQ ID NO: 625071 - RNA, 19 nt, Artificial Sequence
  Description of Artificial Sequence: Synthetic oligonucleotide
gguuuuauacuguuagaag

SEQ ID NO: 625072 - RNA, 19 nt, Artificial Sequence
  Description of Artificial Sequence: Synthetic oligonucleotide
ucgaaaguuuucuggaaga

SEQ ID NO: 625073 - RNA, 19 nt, Artificial Sequence
  Description of Artificial Sequence: Synthetic oligonucleotide
ccuggauauaccuucaagg

SEQ ID NO: 625074 - RNA, 19 nt, Artificial Sequence
  Description of Artificial Sequence: Synthetic oligonucleotide
gaugacuaaaagaauuuga

SEQ ID NO: 625075 - RNA, 19 nt, Artificial Sequence
  Description of Artificial Sequence: Synthetic oligonucleotide
uguaccauacagagauaag

SEQ ID NO: 625076 - RNA, 19 nt, Artificial Sequence
  Description of Artificial Sequence: Synthetic oligonucleotide
cauaacuccagucugugca

SEQ ID NO: 625077 - RNA, 19 nt, Artificial Sequence
  Description of Artificial Sequence: Synthetic oligonucleotide
uuuugagaauaaaaccgau

SEQ ID NO: 625078 - RNA, 19 nt, Artificial Sequence
  Description of Artificial Sequence: Synthetic oligonucleotide
aagauuggcuucauaaagu

SEQ ID NO: 625079 - RNA, 19 nt, Artificial Sequence
  Description of Artificial Sequence: Synthetic oligonucleotide
ugaccaaaaccugcggucg

SEQ ID NO: 625080 - RNA, 19 nt, Artificial Sequence
  Description of Artificial Sequence: Synthetic oligonucleotide
gaugcaacucugcugcagc

SEQ ID NO: 625081 - RNA, 19 nt, Artificial Sequence
  Description of Artificial Sequence: Synthetic oligonucleotide
uauuuguaauagcuauugu

SEQ ID NO: 625082 - RNA, 19 nt, Artificial Sequence
  Description of Artificial Sequence: Synthetic oligonucleotide
ucggguucacauuacugag

SEQ ID NO: 625083 - RNA, 19 nt, Artificial Sequence
  Description of Artificial Sequence: Synthetic oligonucleotide
agcacagaccaacacgguc

SEQ ID NO: 625084 - RNA, 19 nt, Artificial Sequence
  Description of Artificial Sequence: Synthetic oligonucleotide
aguagucuugcuuuaguau

SEQ ID NO: 625085 - RNA, 19 nt, Artificial Sequence
  Description of Artificial Sequence: Synthetic oligonucleotide
uggauauaccuucaaggau

SEQ ID NO: 625086 - RNA, 19 nt, Artificial Sequence
  Description of Artificial Sequence: Synthetic oligonucleotide
uucucaaccugcuuucaca

SEQ ID NO: 625087 - RNA, 19 nt, Artificial Sequence
  Description of Artificial Sequence: Synthetic oligonucleotide
gauuacuggcuaauuuggg

SEQ ID NO: 625088 - RNA, 19 nt, Artificial Sequence
  Description of Artificial Sequence: Synthetic oligonucleotide
uuugcugauucaucuguga

SEQ ID NO: 625089 - RNA, 19 nt, Artificial Sequence
  Description of Artificial Sequence: Synthetic oligonucleotide
uugacugacuugacccugg

SEQ ID NO: 625090 - RNA, 19 nt, Artificial Sequence
  Description of Artificial Sequence: Synthetic oligonucleotide
ugugggucccauaaacaca

SEQ ID NO: 625091 - RNA, 19 nt, Artificial Sequence
  Description of Artificial Sequence: Synthetic oligonucleotide
cugugcauuucccauaaac

SEQ ID NO: 625092 - RNA, 19 nt, Artificial Sequence
  Description of Artificial Sequence: Synthetic oligonucleotide
auauagggaaauaacauuu

SEQ ID NO: 625093 - RNA, 19 nt, Artificial Sequence
  Description of Artificial Sequence: Synthetic oligonucleotide
acugguacacccauggaag

SEQ ID NO: 625094 - RNA, 19 nt, Artificial Sequence
  Description of Artificial Sequence: Synthetic oligonucleotide
aguaacauccagguuuauc

SEQ ID NO: 625095 - RNA, 19 nt, Artificial Sequence
  Description of Artificial Sequence: Synthetic oligonucleotide
ucccauaaacacaccagga

SEQ ID NO: 625096 - RNA, 19 nt, Artificial Sequence
  Description of Artificial Sequence: Synthetic oligonucleotide
ugcugauucaucugugaga

SEQ ID NO: 625097 - RNA, 19 nt, Artificial Sequence
  Description of Artificial Sequence: Synthetic oligonucleotide
auauaugaacaccaagauu

SEQ ID NO: 625098 - RNA, 19 nt, Artificial Sequence
  Description of Artificial Sequence: Synthetic oligonucleotide
agaggauguccccugagcu

SEQ ID NO: 625099 - RNA, 19 nt, Artificial Sequence
  Description of Artificial Sequence: Synthetic oligonucleotide
aaguagucuugcuuuagua

SEQ ID NO: 625100 - RNA, 19 nt, Artificial Sequence
  Description of Artificial Sequence: Synthetic oligonucleotide
aaacuuacucuguggugca

SEQ ID NO: 625101 - RNA, 19 nt, Artificial Sequence
  Description of Artificial Sequence: Synthetic oligonucleotide
auuagagcuauaauuuuga

SEQ ID NO: 625102 - RNA, 19 nt, Artificial Sequence
  Description of Artificial Sequence: Synthetic oligonucleotide
cuggauauaccuucaagga

SEQ ID NO: 625103 - RNA, 19 nt, Artificial Sequence
  Description of Artificial Sequence: Synthetic oligonucleotide
agagcgugucgccaugucg

SEQ ID NO: 625104 - RNA, 19 nt, Artificial Sequence
  Description of Artificial Sequence: Synthetic oligonucleotide
cuucugacuuuguaguuug

SEQ ID NO: 625105 - RNA, 19 nt, Artificial Sequence
  Description of Artificial Sequence: Synthetic oligonucleotide
agugaugacuaaaagaauu

SEQ ID NO: 625106 - RNA, 19 nt, Artificial Sequence
  Description of Artificial Sequence: Synthetic oligonucleotide
uuccuauaagaccgggagc

SEQ ID NO: 625107 - RNA, 19 nt, Artificial Sequence
  Description of Artificial Sequence: Synthetic oligonucleotide
cuguuaagcacaucauaac

SEQ ID NO: 625108 - RNA, 19 nt, Artificial Sequence
  Description of Artificial Sequence: Synthetic oligonucleotide
guaauagcuauugucugug

SEQ ID NO: 625109 - RNA, 19 nt, Artificial Sequence
  Description of Artificial Sequence: Synthetic oligonucleotide
aucuagauugacugacuug

SEQ ID NO: 625110 - RNA, 19 nt, Artificial Sequence
  Description of Artificial Sequence: Synthetic oligonucleotide
caucuguuuaauauaggga

SEQ ID NO: 625111 - RNA, 19 nt, Artificial Sequence
  Description of Artificial Sequence: Synthetic oligonucleotide
gaaugucagguguugguuc

SEQ ID NO: 625112 - RNA, 19 nt, Artificial Sequence
  Description of Artificial Sequence: Synthetic oligonucleotide
auaccuucaaggauuaaga

SEQ ID NO: 625113 - RNA, 19 nt, Artificial Sequence
  Description of Artificial Sequence: Synthetic oligonucleotide
aacccauugggcaugggca

SEQ ID NO: 625114 - RNA, 19 nt, Artificial Sequence
  Description of Artificial Sequence: Synthetic oligonucleotide
uucaaggauuaagaguggc

SEQ ID NO: 625115 - RNA, 19 nt, Artificial Sequence
  Description of Artificial Sequence: Synthetic oligonucleotide
augacuaaaagaauuugau

SEQ ID NO: 625116 - RNA, 19 nt, Artificial Sequence
  Description of Artificial Sequence: Synthetic oligonucleotide
gagcgugucgccaugucgg

SEQ ID NO: 625117 - RNA, 19 nt, Artificial Sequence
  Description of Artificial Sequence: Synthetic oligonucleotide
uucacauuacugagacuca

SEQ ID NO: 625118 - RNA, 19 nt, Artificial Sequence
  Description of Artificial Sequence: Synthetic oligonucleotide
ugagacucaugccagccau

SEQ ID NO: 625119 - RNA, 19 nt, Artificial Sequence
  Description of Artificial Sequence: Synthetic oligonucleotide
agcuauaauuuugagaaua

SEQ ID NO: 625120 - RNA, 19 nt, Artificial Sequence
  Description of Artificial Sequence: Synthetic oligonucleotide
agagucugccccgaugagc

SEQ ID NO: 625121 - RNA, 19 nt, Artificial Sequence
  Description of Artificial Sequence: Synthetic oligonucleotide
guaccauacagagauaaga

SEQ ID NO: 625122 - RNA, 19 nt, Artificial Sequence
  Description of Artificial Sequence: Synthetic oligonucleotide
agcaggaccaucaaguccu

SEQ ID NO: 625123 - RNA, 19 nt, Artificial Sequence
  Description of Artificial Sequence: Synthetic oligonucleotide
ugaucuagauugacugacu

SEQ ID NO: 625124 - RNA, 19 nt, Artificial Sequence
  Description of Artificial Sequence: Synthetic oligonucleotide
cugacuuuguaguuugcuc

SEQ ID NO: 625125 - RNA, 19 nt, Artificial Sequence
  Description of Artificial Sequence: Synthetic oligonucleotide
agcaguuuggacaggauga

SEQ ID NO: 625126 - RNA, 19 nt, Artificial Sequence
  Description of Artificial Sequence: Synthetic oligonucleotide
cuaguauucugucccauca

SEQ ID NO: 625127 - RNA, 19 nt, Artificial Sequence
  Description of Artificial Sequence: Synthetic oligonucleotide
cuuacucuguggugcaccc

SEQ ID NO: 625128 - RNA, 19 nt, Artificial Sequence
  Description of Artificial Sequence: Synthetic oligonucleotide
uuaugcgaguuaacugagc

SEQ ID NO: 625129 - RNA, 19 nt, Artificial Sequence
  Description of Artificial Sequence: Synthetic oligonucleotide
ggauuacuggcuaauuugg

SEQ ID NO: 625130 - RNA, 19 nt, Artificial Sequence
  Description of Artificial Sequence: Synthetic oligonucleotide
caccaauauuccaggaagc

SEQ ID NO: 625131 - RNA, 19 nt, Artificial Sequence
  Description of Artificial Sequence: Synthetic oligonucleotide
uggucuucgaaaguuuucu

SEQ ID NO: 625132 - RNA, 19 nt, Artificial Sequence
  Description of Artificial Sequence: Synthetic oligonucleotide
cuucaaggauuaagagugg

SEQ ID NO: 625133 - RNA, 19 nt, Artificial Sequence
  Description of Artificial Sequence: Synthetic oligonucleotide
aaaccgauuaugcgaguua

SEQ ID NO: 625134 - RNA, 19 nt, Artificial Sequence
  Description of Artificial Sequence: Synthetic oligonucleotide
uuuggccucgcagucggcg

SEQ ID NO: 625135 - RNA, 19 nt, Artificial Sequence
  Description of Artificial Sequence: Synthetic oligonucleotide
cuguguuccuguaccauac

SEQ ID NO: 625136 - RNA, 19 nt, Artificial Sequence
  Description of Artificial Sequence: Synthetic oligonucleotide
ucugacuuuguaguuugcu

SEQ ID NO: 625137 - RNA, 19 nt, Artificial Sequence
  Description of Artificial Sequence: Synthetic oligonucleotide
cuauaagaccgggagcugc

SEQ ID NO: 625138 - RNA, 19 nt, Artificial Sequence
  Description of Artificial Sequence: Synthetic oligonucleotide
uuucacuaaccacguuccc

SEQ ID NO: 625139 - RNA, 19 nt, Artificial Sequence
  Description of Artificial Sequence: Synthetic oligonucleotide
aagagcgugucgccauguc

SEQ ID NO: 625140 - RNA, 19 nt, Artificial Sequence
  Description of Artificial Sequence: Synthetic oligonucleotide
acaugauaacuacuucccu

SEQ ID NO: 625141 - RNA, 19 nt, Artificial Sequence
  Description of Artificial Sequence: Synthetic oligonucleotide
uaacuacuucccuuauaug

SEQ ID NO: 625142 - RNA, 19 nt, Artificial Sequence
  Description of Artificial Sequence: Synthetic oligonucleotide
uguccuaccauuccuccuu

SEQ ID NO: 625143 - RNA, 19 nt, Artificial Sequence
  Description of Artificial Sequence: Synthetic oligonucleotide
agugauacauuuacauucu

SEQ ID NO: 625144 - RNA, 19 nt, Artificial Sequence
  Description of Artificial Sequence: Synthetic oligonucleotide
acuacuucccuuauaugca

SEQ ID NO: 625145 - RNA, 19 nt, Artificial Sequence
  Description of Artificial Sequence: Synthetic oligonucleotide
ucucaaccugcuuucacau

SEQ ID NO: 625146 - RNA, 19 nt, Artificial Sequence
  Description of Artificial Sequence: Synthetic oligonucleotide
aggauuaagaguggcuuug

SEQ ID NO: 625147 - RNA, 19 nt, Artificial Sequence
  Description of Artificial Sequence: Synthetic oligonucleotide
auuaugcgaguuaacugag

SEQ ID NO: 625148 - RNA, 19 nt, Artificial Sequence
  Description of Artificial Sequence: Synthetic oligonucleotide
aaaaccgauuaugcgaguu

SEQ ID NO: 625149 - RNA, 19 nt, Artificial Sequence
  Description of Artificial Sequence: Synthetic oligonucleotide
aaccgauuaugcgaguuaa

SEQ ID NO: 625150 - RNA, 19 nt, Artificial Sequence
  Description of Artificial Sequence: Synthetic oligonucleotide
aagugagugaugacuaaaa

SEQ ID NO: 625151 - RNA, 19 nt, Artificial Sequence
  Description of Artificial Sequence: Synthetic oligonucleotide
ugcuuuaguauuucccaua

SEQ ID NO: 625152 - RNA, 19 nt, Artificial Sequence
  Description of Artificial Sequence: Synthetic oligonucleotide
uacucuguggugcacccau

SEQ ID NO: 625153 - RNA, 19 nt, Artificial Sequence
  Description of Artificial Sequence: Synthetic oligonucleotide
augcgaguuaacugagcag

SEQ ID NO: 625154 - RNA, 19 nt, Artificial Sequence
  Description of Artificial Sequence: Synthetic oligonucleotide
cuggcguccauugaucuag

SEQ ID NO: 625155 - RNA, 19 nt, Artificial Sequence
  Description of Artificial Sequence: Synthetic oligonucleotide
uuagugguuuggcaggcuu

SEQ ID NO: 625156 - RNA, 19 nt, Artificial Sequence
  Description of Artificial Sequence: Synthetic oligonucleotide
gaccaaaaccugcggucgg

SEQ ID NO: 625157 - RNA, 19 nt, Artificial Sequence
  Description of Artificial Sequence: Synthetic oligonucleotide
uagucuugcuuuaguauuu

SEQ ID NO: 625158 - RNA, 19 nt, Artificial Sequence
  Description of Artificial Sequence: Synthetic oligonucleotide
ugcauaacuccagucugug

SEQ ID NO: 625159 - RNA, 19 nt, Artificial Sequence
  Description of Artificial Sequence: Synthetic oligonucleotide
ugagauuguggcaggccaa

SEQ ID NO: 625160 - RNA, 19 nt, Artificial Sequence
  Description of Artificial Sequence: Synthetic oligonucleotide
uacccugugugcauauagu

SEQ ID NO: 625161 - RNA, 19 nt, Artificial Sequence
  Description of Artificial Sequence: Synthetic oligonucleotide
uuaguuacccugugugcau

SEQ ID NO: 625162 - RNA, 19 nt, Artificial Sequence
  Description of Artificial Sequence: Synthetic oligonucleotide
agauaagauggagucuuug

SEQ ID NO: 625163 - RNA, 19 nt, Artificial Sequence
  Description of Artificial Sequence: Synthetic oligonucleotide
gguaaaggauuagaaauca

SEQ ID NO: 625164 - RNA, 19 nt, Artificial Sequence
  Description of Artificial Sequence: Synthetic oligonucleotide
ggguucacauuacugagac

SEQ ID NO: 625165 - RNA, 19 nt, Artificial Sequence
  Description of Artificial Sequence: Synthetic oligonucleotide
ugaagugagugaugacuaa

SEQ ID NO: 625166 - RNA, 19 nt, Artificial Sequence
  Description of Artificial Sequence: Synthetic oligonucleotide
acuaggcaccauaaaaugu

SEQ ID NO: 625167 - RNA, 19 nt, Artificial Sequence
  Description of Artificial Sequence: Synthetic oligonucleotide
uucuggcguccauugaucu

SEQ ID NO: 625168 - RNA, 19 nt, Artificial Sequence
  Description of Artificial Sequence: Synthetic oligonucleotide
aacuuacucuguggugcac

SEQ ID NO: 625169 - RNA, 19 nt, Artificial Sequence
  Description of Artificial Sequence: Synthetic oligonucleotide
ugcggucggguucacauua

SEQ ID NO: 625170 - RNA, 19 nt, Artificial Sequence
  Description of Artificial Sequence: Synthetic oligonucleotide
uugcagguaaaggauuaga

SEQ ID NO: 625171 - RNA, 19 nt, Artificial Sequence
  Description of Artificial Sequence: Synthetic oligonucleotide
auugacugacuugacccug

SEQ ID NO: 625172 - RNA, 19 nt, Artificial Sequence
  Description of Artificial Sequence: Synthetic oligonucleotide
cuagauugacugacuugac

SEQ ID NO: 625173 - RNA, 19 nt, Artificial Sequence
  Description of Artificial Sequence: Synthetic oligonucleotide
aguuugcucagugaacaga

SEQ ID NO: 625174 - RNA, 19 nt, Artificial Sequence
  Description of Artificial Sequence: Synthetic oligonucleotide
agcgugucgccaugucggc

SEQ ID NO: 625175 - RNA, 19 nt, Artificial Sequence
  Description of Artificial Sequence: Synthetic oligonucleotide
uccauugaucuagauugac

SEQ ID NO: 625176 - RNA, 19 nt, Artificial Sequence
  Description of Artificial Sequence: Synthetic oligonucleotide
acggucaaucagguaauuc

SEQ ID NO: 625177 - RNA, 19 nt, Artificial Sequence
  Description of Artificial Sequence: Synthetic oligonucleotide
acccauuuguccuaccauu

SEQ ID NO: 625178 - RNA, 19 nt, Artificial Sequence
  Description of Artificial Sequence: Synthetic oligonucleotide
gguuuaugacaucauggga

SEQ ID NO: 625179 - RNA, 19 nt, Artificial Sequence
  Description of Artificial Sequence: Synthetic oligonucleotide
cugagauuguggcaggcca

SEQ ID NO: 625180 - RNA, 19 nt, Artificial Sequence
  Description of Artificial Sequence: Synthetic oligonucleotide
auaaacccauugggcaugg

SEQ ID NO: 625181 - RNA, 19 nt, Artificial Sequence
  Description of Artificial Sequence: Synthetic oligonucleotide
cacguucccuguuaagcac

SEQ ID NO: 625182 - RNA, 19 nt, Artificial Sequence
  Description of Artificial Sequence: Synthetic oligonucleotide
ggaaguugcauaacuccag

SEQ ID NO: 625183 - RNA, 19 nt, Artificial Sequence
  Description of Artificial Sequence: Synthetic oligonucleotide
gauuguggcaggccaaacu

SEQ ID NO: 625184 - RNA, 19 nt, Artificial Sequence
  Description of Artificial Sequence: Synthetic oligonucleotide
cuguuagaaguauuacuaa

SEQ ID NO: 625185 - RNA, 19 nt, Artificial Sequence
  Description of Artificial Sequence: Synthetic oligonucleotide
aucgucauucagggguggc

SEQ ID NO: 625186 - RNA, 19 nt, Artificial Sequence
  Description of Artificial Sequence: Synthetic oligonucleotide
cagguuuaucuccuuucac

SEQ ID NO: 625187 - RNA, 19 nt, Artificial Sequence
  Description of Artificial Sequence: Synthetic oligonucleotide
gaagugagugaugacuaaa

SEQ ID NO: 625188 - RNA, 19 nt, Artificial Sequence
  Description of Artificial Sequence: Synthetic oligonucleotide
ucacauuacugagacucau

SEQ ID NO: 625189 - RNA, 19 nt, Artificial Sequence
  Description of Artificial Sequence: Synthetic oligonucleotide
uuguccuaccauuccuccu

SEQ ID NO: 625190 - RNA, 19 nt, Artificial Sequence
  Description of Artificial Sequence: Synthetic oligonucleotide
uacaggauuacuggcuaau

SEQ ID NO: 625191 - RNA, 19 nt, Artificial Sequence
  Description of Artificial Sequence: Synthetic oligonucleotide
uaaaaccgauuaugcgagu

SEQ ID NO: 625192 - RNA, 19 nt, Artificial Sequence
  Description of Artificial Sequence: Synthetic oligonucleotide
gucggcgcaguacuuguug

SEQ ID NO: 625193 - RNA, 19 nt, Artificial Sequence
  Description of Artificial Sequence: Synthetic oligonucleotide
agauccccggguguuacag

SEQ ID NO: 625194 - RNA, 19 nt, Artificial Sequence
  Description of Artificial Sequence: Synthetic oligonucleotide
guccaaauuacaagagaca

SEQ ID NO: 625195 - RNA, 19 nt, Artificial Sequence
  Description of Artificial Sequence: Synthetic oligonucleotide
guugcagguaaaggauuag

SEQ ID NO: 625196 - RNA, 19 nt, Artificial Sequence
  Description of Artificial Sequence: Synthetic oligonucleotide
accaaaaccugcggucggg

SEQ ID NO: 625197 - RNA, 19 nt, Artificial Sequence
  Description of Artificial Sequence: Synthetic oligonucleotide
cuuuaguauuucccauauc

SEQ ID NO: 625198 - RNA, 19 nt, Artificial Sequence
  Description of Artificial Sequence: Synthetic oligonucleotide
gauugacugacuugacccu

SEQ ID NO: 625199 - RNA, 19 nt, Artificial Sequence
  Description of Artificial Sequence: Synthetic oligonucleotide
caucaugcuaguauucugu

SEQ ID NO: 625200 - RNA, 19 nt, Artificial Sequence
  Description of Artificial Sequence: Synthetic oligonucleotide
gguuucucaaccugcuuuc

SEQ ID NO: 625201 - RNA, 19 nt, Artificial Sequence
  Description of Artificial Sequence: Synthetic oligonucleotide
guagucuugcuuuaguauu

SEQ ID NO: 625202 - RNA, 19 nt, Artificial Sequence
  Description of Artificial Sequence: Synthetic oligonucleotide
agaagagguccaaauuaca

SEQ ID NO: 625203 - RNA, 19 nt, Artificial Sequence
  Description of Artificial Sequence: Synthetic oligonucleotide
uacuucccuuauaugcaaa

SEQ ID NO: 625204 - RNA, 19 nt, Artificial Sequence
  Description of Artificial Sequence: Synthetic oligonucleotide
uagcgaggaaugucaggug

SEQ ID NO: 625205 - RNA, 19 nt, Artificial Sequence
  Description of Artificial Sequence: Synthetic oligonucleotide
acacaccaauauuccagga

SEQ ID NO: 625206 - RNA, 19 nt, Artificial Sequence
  Description of Artificial Sequence: Synthetic oligonucleotide
uugugcucccauuggucac

SEQ ID NO: 625207 - RNA, 19 nt, Artificial Sequence
  Description of Artificial Sequence: Synthetic oligonucleotide
caguuguuagugguuuggc

SEQ ID NO: 625208 - RNA, 19 nt, Artificial Sequence
  Description of Artificial Sequence: Synthetic oligonucleotide
cuugugagguaaaugguau

SEQ ID NO: 625209 - RNA, 19 nt, Artificial Sequence
  Description of Artificial Sequence: Synthetic oligonucleotide
ggggugggguuuuauacug

SEQ ID NO: 625210 - RNA, 19 nt, Artificial Sequence
  Description of Artificial Sequence: Synthetic oligonucleotide
gaucgucauucaggggugg

SEQ ID NO: 625211 - RNA, 19 nt, Artificial Sequence
  Description of Artificial Sequence: Synthetic oligonucleotide
uucgggcuggugcuuuucu

SEQ ID NO: 625212 - RNA, 19 nt, Artificial Sequence
  Description of Artificial Sequence: Synthetic oligonucleotide
auucagggguggcacugug

SEQ ID NO: 625213 - RNA, 19 nt, Artificial Sequence
  Description of Artificial Sequence: Synthetic oligonucleotide
acaagagcgugucgccaug

SEQ ID NO: 625214 - RNA, 19 nt, Artificial Sequence
  Description of Artificial Sequence: Synthetic oligonucleotide
acacaauuacugucauaaa

SEQ ID NO: 625215 - RNA, 19 nt, Artificial Sequence
  Description of Artificial Sequence: Synthetic oligonucleotide
gggaccuuuggccucgcag

SEQ ID NO: 625216 - RNA, 19 nt, Artificial Sequence
  Description of Artificial Sequence: Synthetic oligonucleotide
ucgucauucagggguggca

SEQ ID NO: 625217 - RNA, 19 nt, Artificial Sequence
  Description of Artificial Sequence: Synthetic oligonucleotide
ggggcaugacaguugcagg

SEQ ID NO: 625218 - RNA, 19 nt, Artificial Sequence
  Description of Artificial Sequence: Synthetic oligonucleotide
ucggcgcaguacuuguugu

SEQ ID NO: 625219 - RNA, 19 nt, Artificial Sequence
  Description of Artificial Sequence: Synthetic oligonucleotide
caugagaagagguccaaau

SEQ ID NO: 625220 - RNA, 19 nt, Artificial Sequence
  Description of Artificial Sequence: Synthetic oligonucleotide
accgauuaugcgaguuaac

SEQ ID NO: 625221 - RNA, 19 nt, Artificial Sequence
  Description of Artificial Sequence: Synthetic oligonucleotide
gacucaugccagccauuug

SEQ ID NO: 625222 - RNA, 19 nt, Artificial Sequence
  Description of Artificial Sequence: Synthetic oligonucleotide
caugauaacuacuucccuu

SEQ ID NO: 625223 - RNA, 19 nt, Artificial Sequence
  Description of Artificial Sequence: Synthetic oligonucleotide
augcuaguauucuguccca

SEQ ID NO: 625224 - RNA, 19 nt, Artificial Sequence
  Description of Artificial Sequence: Synthetic oligonucleotide
gaccuuuggccucgcaguc

SEQ ID NO: 625225 - RNA, 19 nt, Artificial Sequence
  Description of Artificial Sequence: Synthetic oligonucleotide
aagcccaucgggaccuuug

SEQ ID NO: 625226 - RNA, 19 nt, Artificial Sequence
  Description of Artificial Sequence: Synthetic oligonucleotide
ggguguuacaguagacagg

SEQ ID NO: 625227 - RNA, 19 nt, Artificial Sequence
  Description of Artificial Sequence: Synthetic oligonucleotide
ugucauaaaccuggauaua

SEQ ID NO: 625228 - RNA, 19 nt, Artificial Sequence
  Description of Artificial Sequence: Synthetic oligonucleotide
cgauuaugcgaguuaacug

SEQ ID NO: 625229 - RNA, 19 nt, Artificial Sequence
  Description of Artificial Sequence: Synthetic oligonucleotide
augugaacaaaaggaggaa

SEQ ID NO: 625230 - RNA, 19 nt, Artificial Sequence
  Description of Artificial Sequence: Synthetic oligonucleotide
ucccgacaagagcgugucg

SEQ ID NO: 625231 - RNA, 19 nt, Artificial Sequence
  Description of Artificial Sequence: Synthetic oligonucleotide
ugccccgaugagcuuccag

SEQ ID NO: 625232 - RNA, 19 nt, Artificial Sequence
  Description of Artificial Sequence: Synthetic oligonucleotide
aguugcagguaaaggauua

SEQ ID NO: 625233 - RNA, 19 nt, Artificial Sequence
  Description of Artificial Sequence: Synthetic oligonucleotide
cuuuucuuaggcuccaauu

SEQ ID NO: 625234 - RNA, 19 nt, Artificial Sequence
  Description of Artificial Sequence: Synthetic oligonucleotide
ccaaacuuacucuguggug

SEQ ID NO: 625235 - RNA, 19 nt, Artificial Sequence
  Description of Artificial Sequence: Synthetic oligonucleotide
cggguguuacaguagacag

SEQ ID NO: 625236 - RNA, 19 nt, Artificial Sequence
  Description of Artificial Sequence: Synthetic oligonucleotide
cauggaaggaaagccuuga

SEQ ID NO: 625237 - RNA, 19 nt, Artificial Sequence
  Description of Artificial Sequence: Synthetic oligonucleotide
auccccggguguuacagua

SEQ ID NO: 625238 - RNA, 19 nt, Artificial Sequence
  Description of Artificial Sequence: Synthetic oligonucleotide
cuacuucccuuauaugcaa

SEQ ID NO: 625239 - RNA, 19 nt, Artificial Sequence
  Description of Artificial Sequence: Synthetic oligonucleotide
ucuggcguccauugaucua

SEQ ID NO: 625240 - RNA, 19 nt, Artificial Sequence
  Description of Artificial Sequence: Synthetic oligonucleotide
cuaaccacguucccuguua

SEQ ID NO: 625241 - RNA, 19 nt, Artificial Sequence
  Description of Artificial Sequence: Synthetic oligonucleotide
cucaaccugcuuucacauc

SEQ ID NO: 625242 - RNA, 19 nt, Artificial Sequence
  Description of Artificial Sequence: Synthetic oligonucleotide
cugacuugacccuggauau

SEQ ID NO: 625243 - RNA, 19 nt, Artificial Sequence
  Description of Artificial Sequence: Synthetic oligonucleotide
ggucuuaauauuagcacua

SEQ ID NO: 625244 - RNA, 19 nt, Artificial Sequence
  Description of Artificial Sequence: Synthetic oligonucleotide
gauguccccugagcugggg

SEQ ID NO: 625245 - RNA, 19 nt, Artificial Sequence
  Description of Artificial Sequence: Synthetic oligonucleotide
caaugugguuuaugacauc

SEQ ID NO: 625246 - RNA, 19 nt, Artificial Sequence
  Description of Artificial Sequence: Synthetic oligonucleotide
ucccaucauauuuccuaua

SEQ ID NO: 625247 - RNA, 19 nt, Artificial Sequence
  Description of Artificial Sequence: Synthetic oligonucleotide
acuaaccacguucccuguu

SEQ ID NO: 625248 - RNA, 19 nt, Artificial Sequence
  Description of Artificial Sequence: Synthetic oligonucleotide
gcugcuugugagguaaaug

SEQ ID NO: 625249 - RNA, 19 nt, Artificial Sequence
  Description of Artificial Sequence: Synthetic oligonucleotide
gcacagaccaacacgguca

SEQ ID NO: 625250 - RNA, 19 nt, Artificial Sequence
  Description of Artificial Sequence: Synthetic oligonucleotide
ugggucccauaaacacacc

SEQ ID NO: 625251 - RNA, 19 nt, Artificial Sequence
  Description of Artificial Sequence: Synthetic oligonucleotide
ggauauaccuucaaggauu

SEQ ID NO: 625252 - RNA, 19 nt, Artificial Sequence
  Description of Artificial Sequence: Synthetic oligonucleotide
uucucccgacaagagcgug

SEQ ID NO: 625253 - RNA, 19 nt, Artificial Sequence
  Description of Artificial Sequence: Synthetic oligonucleotide
cuguuuaauauagggaaau

SEQ ID NO: 625254 - RNA, 19 nt, Artificial Sequence
  Description of Artificial Sequence: Synthetic oligonucleotide
cucgcagucggcgcaguac

SEQ ID NO: 625255 - RNA, 19 nt, Artificial Sequence
  Description of Artificial Sequence: Synthetic oligonucleotide
uggccucgcagucggcgca

SEQ ID NO: 625256 - RNA, 19 nt, Artificial Sequence
  Description of Artificial Sequence: Synthetic oligonucleotide
ugcuguguuccuguaccau

SEQ ID NO: 625257 - RNA, 19 nt, Artificial Sequence
  Description of Artificial Sequence: Synthetic oligonucleotide
ugcuaguauucugucccau

SEQ ID NO: 625258 - RNA, 19 nt, Artificial Sequence
  Description of Artificial Sequence: Synthetic oligonucleotide
gcuaguauucugucccauc

SEQ ID NO: 625259 - RNA, 19 nt, Artificial Sequence
  Description of Artificial Sequence: Synthetic oligonucleotide
gauuaagaguggcuuuguu

SEQ ID NO: 625260 - RNA, 19 nt, Artificial Sequence
  Description of Artificial Sequence: Synthetic oligonucleotide
ggucggguucacauuacug

SEQ ID NO: 625261 - RNA, 19 nt, Artificial Sequence
  Description of Artificial Sequence: Synthetic oligonucleotide
gacaagagcgugucgccau

SEQ ID NO: 625262 - RNA, 19 nt, Artificial Sequence
  Description of Artificial Sequence: Synthetic oligonucleotide
gagauuguggcaggccaaa

SEQ ID NO: 625263 - RNA, 19 nt, Artificial Sequence
  Description of Artificial Sequence: Synthetic oligonucleotide
gucgcugcuugugagguaa

SEQ ID NO: 625264 - RNA, 19 nt, Artificial Sequence
  Description of Artificial Sequence: Synthetic oligonucleotide
cgugucgccaugucggcgg

SEQ ID NO: 625265 - RNA, 19 nt, Artificial Sequence
  Description of Artificial Sequence: Synthetic oligonucleotide
cuccaauuguugaucuucu

SEQ ID NO: 625266 - RNA, 19 nt, Artificial Sequence
  Description of Artificial Sequence: Synthetic oligonucleotide
ggccaacaacauucugagg

SEQ ID NO: 625267 - RNA, 19 nt, Artificial Sequence
  Description of Artificial Sequence: Synthetic oligonucleotide
gauccagauccccgggugu

SEQ ID NO: 625268 - RNA, 19 nt, Artificial Sequence
  Description of Artificial Sequence: Synthetic oligonucleotide
cagcuuuucaguuguuagu

SEQ ID NO: 625269 - RNA, 19 nt, Artificial Sequence
  Description of Artificial Sequence: Synthetic oligonucleotide
ugcacccauuuguccuacc

SEQ ID NO: 625270 - RNA, 19 nt, Artificial Sequence
  Description of Artificial Sequence: Synthetic oligonucleotide
uggcguccauugaucuaga

SEQ ID NO: 625271 - RNA, 19 nt, Artificial Sequence
  Description of Artificial Sequence: Synthetic oligonucleotide
ccauaaacacaccaggagu

SEQ ID NO: 625272 - RNA, 19 nt, Artificial Sequence
  Description of Artificial Sequence: Synthetic oligonucleotide
cuacaggauuacuggcuaa

SEQ ID NO: 625273 - RNA, 19 nt, Artificial Sequence
  Description of Artificial Sequence: Synthetic oligonucleotide
ccauggaaggaaagccuug

SEQ ID NO: 625274 - RNA, 19 nt, Artificial Sequence
  Description of Artificial Sequence: Synthetic oligonucleotide
uaguuacccugugugcaua

SEQ ID NO: 625275 - RNA, 19 nt, Artificial Sequence
  Description of Artificial Sequence: Synthetic oligonucleotide
gugauacauuuacauucua

SEQ ID NO: 625276 - RNA, 19 nt, Artificial Sequence
  Description of Artificial Sequence: Synthetic oligonucleotide
uaccuuccuacaggauuac

SEQ ID NO: 625277 - RNA, 19 nt, Artificial Sequence
  Description of Artificial Sequence: Synthetic oligonucleotide
guaucuguucuggcgucca

SEQ ID NO: 625278 - RNA, 19 nt, Artificial Sequence
  Description of Artificial Sequence: Synthetic oligonucleotide
uccuuucacuaaccacguu

SEQ ID NO: 625279 - RNA, 19 nt, Artificial Sequence
  Description of Artificial Sequence: Synthetic oligonucleotide
ggaccuuuggccucgcagu

SEQ ID NO: 625280 - RNA, 19 nt, Artificial Sequence
  Description of Artificial Sequence: Synthetic oligonucleotide
gagcuauaauuuugagaau

SEQ ID NO: 625281 - RNA, 19 nt, Artificial Sequence
  Description of Artificial Sequence: Synthetic oligonucleotide
uaacuccagucugugcauu

SEQ ID NO: 625282 - RNA, 19 nt, Artificial Sequence
  Description of Artificial Sequence: Synthetic oligonucleotide
ccgacaagagcgugucgcc

SEQ ID NO: 625283 - RNA, 19 nt, Artificial Sequence
  Description of Artificial Sequence: Synthetic oligonucleotide
gguacacccauggaaggaa

SEQ ID NO: 625284 - RNA, 19 nt, Artificial Sequence
  Description of Artificial Sequence: Synthetic oligonucleotide
caggauuacuggcuaauuu

SEQ ID NO: 625285 - RNA, 19 nt, Artificial Sequence
  Description of Artificial Sequence: Synthetic oligonucleotide
cuccuuucacuaaccacgu

SEQ ID NO: 625286 - RNA, 19 nt, Artificial Sequence
  Description of Artificial Sequence: Synthetic oligonucleotide
ugacuugacccuggauaua

SEQ ID NO: 625287 - RNA, 19 nt, Artificial Sequence
  Description of Artificial Sequence: Synthetic oligonucleotide
cuuuggccucgcagucggc

SEQ ID NO: 625288 - RNA, 19 nt, Artificial Sequence
  Description of Artificial Sequence: Synthetic oligonucleotide
ccaucaaguccuaaaagau

SEQ ID NO: 625289 - RNA, 19 nt, Artificial Sequence
  Description of Artificial Sequence: Synthetic oligonucleotide
uuucgggcuggugcuuuuc

SEQ ID NO: 625290 - RNA, 19 nt, Artificial Sequence
  Description of Artificial Sequence: Synthetic oligonucleotide
ccacguucccuguuaagca

SEQ ID NO: 625291 - RNA, 19 nt, Artificial Sequence
  Description of Artificial Sequence: Synthetic oligonucleotide
gaguggcuuuguuuuaguu

SEQ ID NO: 625292 - RNA, 19 nt, Artificial Sequence
  Description of Artificial Sequence: Synthetic oligonucleotide
aggcaccauaaaauguaaa

SEQ ID NO: 625293 - RNA, 19 nt, Artificial Sequence
  Description of Artificial Sequence: Synthetic oligonucleotide
cacagaccaacacggucaa

SEQ ID NO: 625294 - RNA, 19 nt, Artificial Sequence
  Description of Artificial Sequence: Synthetic oligonucleotide
cauugggcaugggcaugcc

SEQ ID NO: 625295 - RNA, 19 nt, Artificial Sequence
  Description of Artificial Sequence: Synthetic oligonucleotide
gguacagaggauguccccu

SEQ ID NO: 625296 - RNA, 19 nt, Artificial Sequence
  Description of Artificial Sequence: Synthetic oligonucleotide
auauaccuucaaggauuaa

SEQ ID NO: 625297 - RNA, 19 nt, Artificial Sequence
  Description of Artificial Sequence: Synthetic oligonucleotide
gcagucggcgcaguacuug

SEQ ID NO: 625298 - RNA, 19 nt, Artificial Sequence
  Description of Artificial Sequence: Synthetic oligonucleotide
ccauugaucuagauugacu

SEQ ID NO: 625299 - RNA, 19 nt, Artificial Sequence
  Description of Artificial Sequence: Synthetic oligonucleotide
guacacccauggaaggaaa

SEQ ID NO: 625300 - RNA, 19 nt, Artificial Sequence
  Description of Artificial Sequence: Synthetic oligonucleotide
gugucgccaugucggcggc

SEQ ID NO: 625301 - RNA, 19 nt, Artificial Sequence
  Description of Artificial Sequence: Synthetic oligonucleotide
ccuacaggauuacuggcua

SEQ ID NO: 625302 - RNA, 19 nt, Artificial Sequence
  Description of Artificial Sequence: Synthetic oligonucleotide
ggagugcuuugcuguguuc

SEQ ID NO: 625303 - RNA, 19 nt, Artificial Sequence
  Description of Artificial Sequence: Synthetic oligonucleotide
ccgauuaugcgaguuaacu

SEQ ID NO: 625304 - RNA, 19 nt, Artificial Sequence
  Description of Artificial Sequence: Synthetic oligonucleotide
gauccccggguguuacagu

SEQ ID NO: 625305 - RNA, 19 nt, Artificial Sequence
  Description of Artificial Sequence: Synthetic oligonucleotide
ccuauaagaccgggagcug

SEQ ID NO: 625306 - RNA, 19 nt, Artificial Sequence
  Description of Artificial Sequence: Synthetic oligonucleotide
gugcacccauuuguccuac

SEQ ID NO: 625307 - RNA, 19 nt, Artificial Sequence
  Description of Artificial Sequence: Synthetic oligonucleotide
gugagguaaaugguauauu

SEQ ID NO: 625308 - RNA, 19 nt, Artificial Sequence
  Description of Artificial Sequence: Synthetic oligonucleotide
ccggguguuacaguagaca

SEQ ID NO: 625309 - RNA, 19 nt, Artificial Sequence
  Description of Artificial Sequence: Synthetic oligonucleotide
cagucggcgcaguacuugu

SEQ ID NO: 625310 - RNA, 19 nt, Artificial Sequence
  Description of Artificial Sequence: Synthetic oligonucleotide
ggaaugucagguguugguu

SEQ ID NO: 625311 - RNA, 19 nt, Artificial Sequence
  Description of Artificial Sequence: Synthetic oligonucleotide
gagauaagauggagucuuu

SEQ ID NO: 625312 - RNA, 19 nt, Artificial Sequence
  Description of Artificial Sequence: Synthetic oligonucleotide
cuguggucuucgaaaguuu

SEQ ID NO: 625313 - RNA, 19 nt, Artificial Sequence
  Description of Artificial Sequence: Synthetic oligonucleotide
caacacggucaaucaggua

SEQ ID NO: 625314 - RNA, 19 nt, Artificial Sequence
  Description of Artificial Sequence: Synthetic oligonucleotide
gcgugucgccaugucggcg

SEQ ID NO: 625315 - RNA, 19 nt, Artificial Sequence
  Description of Artificial Sequence: Synthetic oligonucleotide
cagauccccggguguuaca

SEQ ID NO: 625316 - RNA, 19 nt, Artificial Sequence
  Description of Artificial Sequence: Synthetic oligonucleotide
ggauuaagaguggcuuugu

SEQ ID NO: 625317 - RNA, 19 nt, Artificial Sequence
  Description of Artificial Sequence: Synthetic oligonucleotide
guuagugguuuggcaggcu

SEQ ID NO: 625318 - RNA, 19 nt, Artificial Sequence
  Description of Artificial Sequence: Synthetic oligonucleotide
cccggguguuacaguagac

SEQ ID NO: 625319 - RNA, 19 nt, Artificial Sequence
  Description of Artificial Sequence: Synthetic oligonucleotide
gguguugguucuggaugca

SEQ ID NO: 625320 - RNA, 19 nt, Artificial Sequence
  Description of Artificial Sequence: Synthetic oligonucleotide
ccaucgggaccuuuggccu

SEQ ID NO: 625321 - RNA, 19 nt, Artificial Sequence
  Description of Artificial Sequence: Synthetic oligonucleotide
acagaccaacacggucaau

SEQ ID NO: 625322 - RNA, 19 nt, Artificial Sequence
  Description of Artificial Sequence: Synthetic oligonucleotide
ccugcggucggguucacau

SEQ ID NO: 625323 - RNA, 19 nt, Artificial Sequence
  Description of Artificial Sequence: Synthetic oligonucleotide
cagcacagaccaacacggu

SEQ ID NO: 625324 - RNA, 19 nt, Artificial Sequence
  Description of Artificial Sequence: Synthetic oligonucleotide
cggguucacauuacugaga

SEQ ID NO: 625325 - RNA, 19 nt, Artificial Sequence
  Description of Artificial Sequence: Synthetic oligonucleotide
gcgcaguacuuguuguccu

SEQ ID NO: 625326 - RNA, 19 nt, Artificial Sequence
  Description of Artificial Sequence: Synthetic oligonucleotide
caagagcgugucgccaugu

SEQ ID NO: 625327 - RNA, 19 nt, Artificial Sequence
  Description of Artificial Sequence: Synthetic oligonucleotide
ccccggguguuacaguaga

SEQ ID NO: 625328 - RNA, 19 nt, Artificial Sequence
  Description of Artificial Sequence: Synthetic oligonucleotide
gcgaguuaacugagcagcu

SEQ ID NO: 625329 - RNA, 19 nt, Artificial Sequence
  Description of Artificial Sequence: Synthetic oligonucleotide
gagacucaugccagccauu

SEQ ID NO: 625330 - RNA, 19 nt, Artificial Sequence
  Description of Artificial Sequence: Synthetic oligonucleotide
caguaccuuccuacaggau

SEQ ID NO: 625331 - RNA, 19 nt, Artificial Sequence
  Description of Artificial Sequence: Synthetic oligonucleotide
accugcggucggguucaca

SEQ ID NO: 625332 - RNA, 19 nt, Artificial Sequence
  Description of Artificial Sequence: Synthetic oligonucleotide
ggccucgcagucggcgcag

SEQ ID NO: 625333 - RNA, 19 nt, Artificial Sequence
  Description of Artificial Sequence: Synthetic oligonucleotide
guguuacaguagacagggu

SEQ ID NO: 625334 - RNA, 19 nt, Artificial Sequence
  Description of Artificial Sequence: Synthetic oligonucleotide
cggcgcaguacuuguuguc

SEQ ID NO: 625335 - RNA, 19 nt, Artificial Sequence
  Description of Artificial Sequence: Synthetic oligonucleotide
gcggucggguucacauuac

SEQ ID NO: 625336 - RNA, 19 nt, Artificial Sequence
  Description of Artificial Sequence: Synthetic oligonucleotide
ccuguaccauacagagaua

SEQ ID NO: 625337 - RNA, 19 nt, Artificial Sequence
  Description of Artificial Sequence: Synthetic oligonucleotide
cugcggucggguucacauu

SEQ ID NO: 625338 - RNA, 19 nt, Artificial Sequence
  Description of Artificial Sequence: Synthetic oligonucleotide
ccaaaaccugcggucgggu

SEQ ID NO: 625339 - RNA, 19 nt, Artificial Sequence
  Description of Artificial Sequence: Synthetic oligonucleotide
cgaguuaacugagcagcuu

SEQ ID NO: 625340 - RNA, 19 nt, Artificial Sequence
  Description of Artificial Sequence: Synthetic oligonucleotide
cggucggguucacauuacu

SEQ ID NO: 625341 - RNA, 19 nt, Artificial Sequence
  Description of Artificial Sequence: Synthetic oligonucleotide
gcccuccacagaagauggu

SEQ ID NO: 625342 - RNA, 19 nt, Artificial Sequence
  Description of Artificial Sequence: Synthetic oligonucleotide
cgcugcuugugagguaaau

SEQ ID NO: 625343 - RNA, 19 nt, Artificial Sequence
  Description of Artificial Sequence: Synthetic oligonucleotide
gccucgcagucggcgcagu

SEQ ID NO: 625344 - RNA, 19 nt, Artificial Sequence
  Description of Artificial Sequence: Synthetic oligonucleotide
aauagucaguaucaauggc

SEQ ID NO: 625345 - RNA, 19 nt, Artificial Sequence
  Description of Artificial Sequence: Synthetic oligonucleotide
aagcgcauaagacugcugc

SEQ ID NO: 625346 - RNA, 19 nt, Artificial Sequence
  Description of Artificial Sequence: Synthetic oligonucleotide
gaguguaggaaauaggccg

SEQ ID NO: 625347 - RNA, 19 nt, Artificial Sequence
  Description of Artificial Sequence: Synthetic oligonucleotide
ucuagagucacuuggaaug

SEQ ID NO: 625348 - RNA, 19 nt, Artificial Sequence
  Description of Artificial Sequence: Synthetic oligonucleotide
ucuuugauacccuggaggg

SEQ ID NO: 625349 - RNA, 19 nt, Artificial Sequence
  Description of Artificial Sequence: Synthetic oligonucleotide
aacguuuguccucagguuc

SEQ ID NO: 625350 - RNA, 19 nt, Artificial Sequence
  Description of Artificial Sequence: Synthetic oligonucleotide
ugagaagcgcauaagacug

SEQ ID NO: 625351 - RNA, 19 nt, Artificial Sequence
  Description of Artificial Sequence: Synthetic oligonucleotide
uaugucagaguaaauauuc

SEQ ID NO: 625352 - RNA, 19 nt, Artificial Sequence
  Description of Artificial Sequence: Synthetic oligonucleotide
auagucacucaucaugacc

SEQ ID NO: 625353 - RNA, 19 nt, Artificial Sequence
  Description of Artificial Sequence: Synthetic oligonucleotide
uuagaaucgaaauaagguc

SEQ ID NO: 625354 - RNA, 19 nt, Artificial Sequence
  Description of Artificial Sequence: Synthetic oligonucleotide
aaaugcguuaaugaaaugu

SEQ ID NO: 625355 - RNA, 19 nt, Artificial Sequence
  Description of Artificial Sequence: Synthetic oligonucleotide
uuacaauccuaauacagca

SEQ ID NO: 625356 - RNA, 19 nt, Artificial Sequence
  Description of Artificial Sequence: Synthetic oligonucleotide
auaucggcgggguagaaac

SEQ ID NO: 625357 - RNA, 19 nt, Artificial Sequence
  Description of Artificial Sequence: Synthetic oligonucleotide
agaaagcugucguuggucc

SEQ ID NO: 625358 - RNA, 19 nt, Artificial Sequence
  Description of Artificial Sequence: Synthetic oligonucleotide
gacucuacuucacagcacg

SEQ ID NO: 625359 - RNA, 19 nt, Artificial Sequence
  Description of Artificial Sequence: Synthetic oligonucleotide
cacuacgccacccagaucc

SEQ ID NO: 625360 - RNA, 19 nt, Artificial Sequence
  Description of Artificial Sequence: Synthetic oligonucleotide
gaguaaauauucuuguuca

SEQ ID NO: 625361 - RNA, 19 nt, Artificial Sequence
  Description of Artificial Sequence: Synthetic oligonucleotide
auaucccugcuauaaacac

SEQ ID NO: 625362 - RNA, 19 nt, Artificial Sequence
  Description of Artificial Sequence: Synthetic oligonucleotide
uuuacaagaccauugcauc

SEQ ID NO: 625363 - RNA, 19 nt, Artificial Sequence
  Description of Artificial Sequence: Synthetic oligonucleotide
ucuguaagaaagcugucgu

SEQ ID NO: 625364 - RNA, 19 nt, Artificial Sequence
  Description of Artificial Sequence: Synthetic oligonucleotide
augcggagaucauugauac

SEQ ID NO: 625365 - RNA, 19 nt, Artificial Sequence
  Description of Artificial Sequence: Synthetic oligonucleotide
aaauaaaugacuggaccga

SEQ ID NO: 625366 - RNA, 19 nt, Artificial Sequence
  Description of Artificial Sequence: Synthetic oligonucleotide
aacaaugcggagaucauug

SEQ ID NO: 625367 - RNA, 19 nt, Artificial Sequence
  Description of Artificial Sequence: Synthetic oligonucleotide
auaaaaucgaaucuauaua

SEQ ID NO: 625368 - RNA, 19 nt, Artificial Sequence
  Description of Artificial Sequence: Synthetic oligonucleotide
gaauaucccugcuauaaac

SEQ ID NO: 625369 - RNA, 19 nt, Artificial Sequence
  Description of Artificial Sequence: Synthetic oligonucleotide
cagagacacaucuaaauac

SEQ ID NO: 625370 - RNA, 19 nt, Artificial Sequence
  Description of Artificial Sequence: Synthetic oligonucleotide
aacuucguaauuggggaac

SEQ ID NO: 625371 - RNA, 19 nt, Artificial Sequence
  Description of Artificial Sequence: Synthetic oligonucleotide
aaucaugcuaacaggauga

SEQ ID NO: 625372 - RNA, 19 nt, Artificial Sequence
  Description of Artificial Sequence: Synthetic oligonucleotide
ucuacuucacagcacgcug

SEQ ID NO: 625373 - RNA, 19 nt, Artificial Sequence
  Description of Artificial Sequence: Synthetic oligonucleotide
uuuggagcuacacuacaca

SEQ ID NO: 625374 - RNA, 19 nt, Artificial Sequence
  Description of Artificial Sequence: Synthetic oligonucleotide
gguguauggacucaaacug

SEQ ID NO: 625375 - RNA, 19 nt, Artificial Sequence
  Description of Artificial Sequence: Synthetic oligonucleotide
gucaauaacuucguaauug

SEQ ID NO: 625376 - RNA, 19 nt, Artificial Sequence
  Description of Artificial Sequence: Synthetic oligonucleotide
ggagcuacacuacacacgg

SEQ ID NO: 625377 - RNA, 19 nt, Artificial Sequence
  Description of Artificial Sequence: Synthetic oligonucleotide
auaauuccuauuccuucgg

SEQ ID NO: 625378 - RNA, 19 nt, Artificial Sequence
  Description of Artificial Sequence: Synthetic oligonucleotide
cuuagaaucgaaauaaggu

SEQ ID NO: 625379 - RNA, 19 nt, Artificial Sequence
  Description of Artificial Sequence: Synthetic oligonucleotide
aucaucuuacggcagagga

SEQ ID NO: 625380 - RNA, 19 nt, Artificial Sequence
  Description of Artificial Sequence: Synthetic oligonucleotide
agagacacaucuaaauacg

SEQ ID NO: 625381 - RNA, 19 nt, Artificial Sequence
  Description of Artificial Sequence: Synthetic oligonucleotide
gguacagucgguuaggaac

SEQ ID NO: 625382 - RNA, 19 nt, Artificial Sequence
  Description of Artificial Sequence: Synthetic oligonucleotide
aagaaagcugucguugguc

SEQ ID NO: 625383 - RNA, 19 nt, Artificial Sequence
  Description of Artificial Sequence: Synthetic oligonucleotide
uaggguucucuacacauac

SEQ ID NO: 625384 - RNA, 19 nt, Artificial Sequence
  Description of Artificial Sequence: Synthetic oligonucleotide
uuacaagaccauugcauca

SEQ ID NO: 625385 - RNA, 19 nt, Artificial Sequence
  Description of Artificial Sequence: Synthetic oligonucleotide
aauaucccugcuauaaaca

SEQ ID NO: 625386 - RNA, 19 nt, Artificial Sequence
  Description of Artificial Sequence: Synthetic oligonucleotide
aucgaaauaaggucucugu

SEQ ID NO: 625387 - RNA, 19 nt, Artificial Sequence
  Description of Artificial Sequence: Synthetic oligonucleotide
cauugauacccucucuagg

SEQ ID NO: 625388 - RNA, 19 nt, Artificial Sequence
  Description of Artificial Sequence: Synthetic oligonucleotide
uggaaagacaaggaucgag

SEQ ID NO: 625389 - RNA, 19 nt, Artificial Sequence
  Description of Artificial Sequence: Synthetic oligonucleotide
aaucgaaauaaggucucug

SEQ ID NO: 625390 - RNA, 19 nt, Artificial Sequence
  Description of Artificial Sequence: Synthetic oligonucleotide
gauggccgagccuucaaag

SEQ ID NO: 625391 - RNA, 19 nt, Artificial Sequence
  Description of Artificial Sequence: Synthetic oligonucleotide
uccaugcauagacucgggg

SEQ ID NO: 625392 - RNA, 19 nt, Artificial Sequence
  Description of Artificial Sequence: Synthetic oligonucleotide
caggguaauagucaguauc

SEQ ID NO: 625393 - RNA, 19 nt, Artificial Sequence
  Description of Artificial Sequence: Synthetic oligonucleotide
aucuaaauacgaaaagaug

SEQ ID NO: 625394 - RNA, 19 nt, Artificial Sequence
  Description of Artificial Sequence: Synthetic oligonucleotide
aaucuaguggaggaauugu

SEQ ID NO: 625395 - RNA, 19 nt, Artificial Sequence
  Description of Artificial Sequence: Synthetic oligonucleotide
uaauuccuauuccuucggc

SEQ ID NO: 625396 - RNA, 19 nt, Artificial Sequence
  Description of Artificial Sequence: Synthetic oligonucleotide
uaaugauaguuuucaguaa

SEQ ID NO: 625397 - RNA, 19 nt, Artificial Sequence
  Description of Artificial Sequence: Synthetic oligonucleotide
aaggaucgagauccaccac

SEQ ID NO: 625398 - RNA, 19 nt, Artificial Sequence
  Description of Artificial Sequence: Synthetic oligonucleotide
ucgaaauaaggucucugua

SEQ ID NO: 625399 - RNA, 19 nt, Artificial Sequence
  Description of Artificial Sequence: Synthetic oligonucleotide
uuucuagagucacuuggaa

SEQ ID NO: 625400 - RNA, 19 nt, Artificial Sequence
  Description of Artificial Sequence: Synthetic oligonucleotide
uuggagcuacacuacacac

SEQ ID NO: 625401 - RNA, 19 nt, Artificial Sequence
  Description of Artificial Sequence: Synthetic oligonucleotide
acagagacacaucuaaaua

SEQ ID NO: 625402 - RNA, 19 nt, Artificial Sequence
  Description of Artificial Sequence: Synthetic oligonucleotide
agaaucgaaauaaggucuc

SEQ ID NO: 625403 - RNA, 19 nt, Artificial Sequence
  Description of Artificial Sequence: Synthetic oligonucleotide
aaacccugguuacauuaga

SEQ ID NO: 625404 - RNA, 19 nt, Artificial Sequence
  Description of Artificial Sequence: Synthetic oligonucleotide
agacauaucggcgggguag

SEQ ID NO: 625405 - RNA, 19 nt, Artificial Sequence
  Description of Artificial Sequence: Synthetic oligonucleotide
ugcagcucacugagaagcg

SEQ ID NO: 625406 - RNA, 19 nt, Artificial Sequence
  Description of Artificial Sequence: Synthetic oligonucleotide
ggauccgccgaguacaggg

SEQ ID NO: 625407 - RNA, 19 nt, Artificial Sequence
  Description of Artificial Sequence: Synthetic oligonucleotide
uggguguauggacucaaac

SEQ ID NO: 625408 - RNA, 19 nt, Artificial Sequence
  Description of Artificial Sequence: Synthetic oligonucleotide
auaagacugcugcaaagaa

SEQ ID NO: 625409 - RNA, 19 nt, Artificial Sequence
  Description of Artificial Sequence: Synthetic oligonucleotide
ggucgcugaauucuggagg

SEQ ID NO: 625410 - RNA, 19 nt, Artificial Sequence
  Description of Artificial Sequence: Synthetic oligonucleotide
augaaucaugcuaacagga

SEQ ID NO: 625411 - RNA, 19 nt, Artificial Sequence
  Description of Artificial Sequence: Synthetic oligonucleotide
ugucaagauuguuucuaga

SEQ ID NO: 625412 - RNA, 19 nt, Artificial Sequence
  Description of Artificial Sequence: Synthetic oligonucleotide
uucacagcacgcugacacg

SEQ ID NO: 625413 - RNA, 19 nt, Artificial Sequence
  Description of Artificial Sequence: Synthetic oligonucleotide
uacaauccuaauacagcaa

SEQ ID NO: 625414 - RNA, 19 nt, Artificial Sequence
  Description of Artificial Sequence: Synthetic oligonucleotide
gcauguuuucgacaguggg

SEQ ID NO: 625415 - RNA, 19 nt, Artificial Sequence
  Description of Artificial Sequence: Synthetic oligonucleotide
uuucgguuucauuauuuua

SEQ ID NO: 625416 - RNA, 19 nt, Artificial Sequence
  Description of Artificial Sequence: Synthetic oligonucleotide
ucucuacacauacuguuuu

SEQ ID NO: 625417 - RNA, 19 nt, Artificial Sequence
  Description of Artificial Sequence: Synthetic oligonucleotide
uguaugucuggcaggggaa

SEQ ID NO: 625418 - RNA, 19 nt, Artificial Sequence
  Description of Artificial Sequence: Synthetic oligonucleotide
aaugcggagaucauugaua

SEQ ID NO: 625419 - RNA, 19 nt, Artificial Sequence
  Description of Artificial Sequence: Synthetic oligonucleotide
acgcugacacgucagagca

SEQ ID NO: 625420 - RNA, 19 nt, Artificial Sequence
  Description of Artificial Sequence: Synthetic oligonucleotide
uggcauuuggauccgccga

SEQ ID NO: 625421 - RNA, 19 nt, Artificial Sequence
  Description of Artificial Sequence: Synthetic oligonucleotide
uucucuacacauacuguuu

SEQ ID NO: 625422 - RNA, 19 nt, Artificial Sequence
  Description of Artificial Sequence: Synthetic oligonucleotide
ucaagaggcgugugauucc

SEQ ID NO: 625423 - RNA, 19 nt, Artificial Sequence
  Description of Artificial Sequence: Synthetic oligonucleotide
uguucagcuuagaaucgaa

SEQ ID NO: 625424 - RNA, 19 nt, Artificial Sequence
  Description of Artificial Sequence: Synthetic oligonucleotide
cucgucaauaacuucguaa

SEQ ID NO: 625425 - RNA, 19 nt, Artificial Sequence
  Description of Artificial Sequence: Synthetic oligonucleotide
uggucgcugaauucuggag

SEQ ID NO: 625426 - RNA, 19 nt, Artificial Sequence
  Description of Artificial Sequence: Synthetic oligonucleotide
gaaagcugucguugguccc

SEQ ID NO: 625427 - RNA, 19 nt, Artificial Sequence
  Description of Artificial Sequence: Synthetic oligonucleotide
caucuuacggcagaggaca

SEQ ID NO: 625428 - RNA, 19 nt, Artificial Sequence
  Description of Artificial Sequence: Synthetic oligonucleotide
aaccccucagguacagucg

SEQ ID NO: 625429 - RNA, 19 nt, Artificial Sequence
  Description of Artificial Sequence: Synthetic oligonucleotide
gaucaucuuacggcagagg

SEQ ID NO: 625430 - RNA, 19 nt, Artificial Sequence
  Description of Artificial Sequence: Synthetic oligonucleotide
agacaugggcauguuuucg

SEQ ID NO: 625431 - RNA, 19 nt, Artificial Sequence
  Description of Artificial Sequence: Synthetic oligonucleotide
gaacucuuguaugucuggc

SEQ ID NO: 625432 - RNA, 19 nt, Artificial Sequence
  Description of Artificial Sequence: Synthetic oligonucleotide
guaggaaauaggccggaca

SEQ ID NO: 625433 - RNA, 19 nt, Artificial Sequence
  Description of Artificial Sequence: Synthetic oligonucleotide
acaggacugauuucgguuu

SEQ ID NO: 625434 - RNA, 19 nt, Artificial Sequence
  Description of Artificial Sequence: Synthetic oligonucleotide
ucguaauuggggaacucuu

SEQ ID NO: 625435 - RNA, 19 nt, Artificial Sequence
  Description of Artificial Sequence: Synthetic oligonucleotide
guacagcuagaaauaaaug

SEQ ID NO: 625436 - RNA, 19 nt, Artificial Sequence
  Description of Artificial Sequence: Synthetic oligonucleotide
cuacacuacacacggccac

SEQ ID NO: 625437 - RNA, 19 nt, Artificial Sequence
  Description of Artificial Sequence: Synthetic oligonucleotide
gauacccuggaggguacgg

SEQ ID NO: 625438 - RNA, 19 nt, Artificial Sequence
  Description of Artificial Sequence: Synthetic oligonucleotide
cacaauaauuccuauuccu

SEQ ID NO: 625439 - RNA, 19 nt, Artificial Sequence
  Description of Artificial Sequence: Synthetic oligonucleotide
agaggcgugugauuccgug

SEQ ID NO: 625440 - RNA, 19 nt, Artificial Sequence
  Description of Artificial Sequence: Synthetic oligonucleotide
uaacuucguaauuggggaa

SEQ ID NO: 625441 - RNA, 19 nt, Artificial Sequence
  Description of Artificial Sequence: Synthetic oligonucleotide
auagucaaagucccagcua

SEQ ID NO: 625442 - RNA, 19 nt, Artificial Sequence
  Description of Artificial Sequence: Synthetic oligonucleotide
ucguuggucccaaacguuu

SEQ ID NO: 625443 - RNA, 19 nt, Artificial Sequence
  Description of Artificial Sequence: Synthetic oligonucleotide
uuacggcagaggacaaaca

SEQ ID NO: 625444 - RNA, 19 nt, Artificial Sequence
  Description of Artificial Sequence: Synthetic oligonucleotide
aggcgugugauuccgugca

SEQ ID NO: 625445 - RNA, 19 nt, Artificial Sequence
  Description of Artificial Sequence: Synthetic oligonucleotide
ucugagugucacacuucug

SEQ ID NO: 625446 - RNA, 19 nt, Artificial Sequence
  Description of Artificial Sequence: Synthetic oligonucleotide
aggccggacaggcaccugg

SEQ ID NO: 625447 - RNA, 19 nt, Artificial Sequence
  Description of Artificial Sequence: Synthetic oligonucleotide
acggacgacacuacgccac

SEQ ID NO: 625448 - RNA, 19 nt, Artificial Sequence
  Description of Artificial Sequence: Synthetic oligonucleotide
aaggcuggcuaaugauagu

SEQ ID NO: 625449 - RNA, 19 nt, Artificial Sequence
  Description of Artificial Sequence: Synthetic oligonucleotide
aucaugcuaacaggaugac

SEQ ID NO: 625450 - RNA, 19 nt, Artificial Sequence
  Description of Artificial Sequence: Synthetic oligonucleotide
uccggcugaucaucuuacg

SEQ ID NO: 625451 - RNA, 19 nt, Artificial Sequence
  Description of Artificial Sequence: Synthetic oligonucleotide
caaacguuuguccucaggu

SEQ ID NO: 625452 - RNA, 19 nt, Artificial Sequence
  Description of Artificial Sequence: Synthetic oligonucleotide
uacgccacccagauccaga

SEQ ID NO: 625453 - RNA, 19 nt, Artificial Sequence
  Description of Artificial Sequence: Synthetic oligonucleotide
acgacacuacgccacccag

SEQ ID NO: 625454 - RNA, 19 nt, Artificial Sequence
  Description of Artificial Sequence: Synthetic oligonucleotide
gauuccgugcagccaugcc

SEQ ID NO: 625455 - RNA, 19 nt, Artificial Sequence
  Description of Artificial Sequence: Synthetic oligonucleotide
uaggcgacggacgacacua

SEQ ID NO: 625456 - RNA, 19 nt, Artificial Sequence
  Description of Artificial Sequence: Synthetic oligonucleotide
cguuaaugaaaugucauac

SEQ ID NO: 625457 - RNA, 19 nt, Artificial Sequence
  Description of Artificial Sequence: Synthetic oligonucleotide
ucgccacucucauagucac

SEQ ID NO: 625458 - RNA, 19 nt, Artificial Sequence
  Description of Artificial Sequence: Synthetic oligonucleotide
agcuuagaaucgaaauaag

SEQ ID NO: 625459 - RNA, 19 nt, Artificial Sequence
  Description of Artificial Sequence: Synthetic oligonucleotide
acaaugcggagaucauuga

SEQ ID NO: 625460 - RNA, 19 nt, Artificial Sequence
  Description of Artificial Sequence: Synthetic oligonucleotide
agcgcauaagacugcugca

SEQ ID NO: 625461 - RNA, 19 nt, Artificial Sequence
  Description of Artificial Sequence: Synthetic oligonucleotide
acucuacuucacagcacgc

SEQ ID NO: 625462 - RNA, 19 nt, Artificial Sequence
  Description of Artificial Sequence: Synthetic oligonucleotide
augcguuaaugaaauguca

SEQ ID NO: 625463 - RNA, 19 nt, Artificial Sequence
  Description of Artificial Sequence: Synthetic oligonucleotide
uaugucuggcaggggaaca

SEQ ID NO: 625464 - RNA, 19 nt, Artificial Sequence
  Description of Artificial Sequence: Synthetic oligonucleotide
gauccgccgaguacagggg

SEQ ID NO: 625465 - RNA, 19 nt, Artificial Sequence
  Description of Artificial Sequence: Synthetic oligonucleotide
aacccugguuacauuagaa

SEQ ID NO: 625466 - RNA, 19 nt, Artificial Sequence
  Description of Artificial Sequence: Synthetic oligonucleotide
acaaugcguucugaaaaca

SEQ ID NO: 625467 - RNA, 19 nt, Artificial Sequence
  Description of Artificial Sequence: Synthetic oligonucleotide
acagcacgcugacacguca

SEQ ID NO: 625468 - RNA, 19 nt, Artificial Sequence
  Description of Artificial Sequence: Synthetic oligonucleotide
aacuggucgcugaauucug

SEQ ID NO: 625469 - RNA, 19 nt, Artificial Sequence
  Description of Artificial Sequence: Synthetic oligonucleotide
agacucuacuucacagcac

SEQ ID NO: 625470 - RNA, 19 nt, Artificial Sequence
  Description of Artificial Sequence: Synthetic oligonucleotide
gaccauugcaucacaaaua

SEQ ID NO: 625471 - RNA, 19 nt, Artificial Sequence
  Description of Artificial Sequence: Synthetic oligonucleotide
caugucaagaggcguguga

SEQ ID NO: 625472 - RNA, 19 nt, Artificial Sequence
  Description of Artificial Sequence: Synthetic oligonucleotide
agaagcgcauaagacugcu

SEQ ID NO: 625473 - RNA, 19 nt, Artificial Sequence
  Description of Artificial Sequence: Synthetic oligonucleotide
cuguaugcuguugggaauc

SEQ ID NO: 625474 - RNA, 19 nt, Artificial Sequence
  Description of Artificial Sequence: Synthetic oligonucleotide
uggcaggggaacacucggc

SEQ ID NO: 625475 - RNA, 19 nt, Artificial Sequence
  Description of Artificial Sequence: Synthetic oligonucleotide
gacgacacuacgccaccca

SEQ ID NO: 625476 - RNA, 19 nt, Artificial Sequence
  Description of Artificial Sequence: Synthetic oligonucleotide
cauaggguucucuacacau

SEQ ID NO: 625477 - RNA, 19 nt, Artificial Sequence
  Description of Artificial Sequence: Synthetic oligonucleotide
cucgucaggcgcagggaag

SEQ ID NO: 625478 - RNA, 19 nt, Artificial Sequence
  Description of Artificial Sequence: Synthetic oligonucleotide
ggcgaugagaaccccucag

SEQ ID NO: 625479 - RNA, 19 nt, Artificial Sequence
  Description of Artificial Sequence: Synthetic oligonucleotide
uguaugcuguugggaaucu

SEQ ID NO: 625480 - RNA, 19 nt, Artificial Sequence
  Description of Artificial Sequence: Synthetic oligonucleotide
acuucguaauuggggaacu

SEQ ID NO: 625481 - RNA, 19 nt, Artificial Sequence
  Description of Artificial Sequence: Synthetic oligonucleotide
gagaagcgcauaagacugc

SEQ ID NO: 625482 - RNA, 19 nt, Artificial Sequence
  Description of Artificial Sequence: Synthetic oligonucleotide
ugauacccuggaggguacg

SEQ ID NO: 625483 - RNA, 19 nt, Artificial Sequence
  Description of Artificial Sequence: Synthetic oligonucleotide
ugauuccgugcagccaugc

SEQ ID NO: 625484 - RNA, 19 nt, Artificial Sequence
  Description of Artificial Sequence: Synthetic oligonucleotide
gacaggacugauuucgguu

SEQ ID NO: 625485 - RNA, 19 nt, Artificial Sequence
  Description of Artificial Sequence: Synthetic oligonucleotide
uggaccgaaaugcguuaau

SEQ ID NO: 625486 - RNA, 19 nt, Artificial Sequence
  Description of Artificial Sequence: Synthetic oligonucleotide
uaucggcgggguagaaacu

SEQ ID NO: 625487 - RNA, 19 nt, Artificial Sequence
  Description of Artificial Sequence: Synthetic oligonucleotide
agauacugauucagguuga

SEQ ID NO: 625488 - RNA, 19 nt, Artificial Sequence
  Description of Artificial Sequence: Synthetic oligonucleotide
ucgucaggcgcagggaagu

SEQ ID NO: 625489 - RNA, 19 nt, Artificial Sequence
  Description of Artificial Sequence: Synthetic oligonucleotide
ugucaagaggcgugugauu

SEQ ID NO: 625490 - RNA, 19 nt, Artificial Sequence
  Description of Artificial Sequence: Synthetic oligonucleotide
gacggacgacacuacgcca

SEQ ID NO: 625491 - RNA, 19 nt, Artificial Sequence
  Description of Artificial Sequence: Synthetic oligonucleotide
ggcaaauuuggagcuacac

SEQ ID NO: 625492 - RNA, 19 nt, Artificial Sequence
  Description of Artificial Sequence: Synthetic oligonucleotide
acuggaccgaaaugcguua

SEQ ID NO: 625493 - RNA, 19 nt, Artificial Sequence
  Description of Artificial Sequence: Synthetic oligonucleotide
ggaccgaaaugcguuaaug

SEQ ID NO: 625494 - RNA, 19 nt, Artificial Sequence
  Description of Artificial Sequence: Synthetic oligonucleotide
cuucgaaguuucuuugaua

SEQ ID NO: 625495 - RNA, 19 nt, Artificial Sequence
  Description of Artificial Sequence: Synthetic oligonucleotide
ccggcugaucaucuuacgg

SEQ ID NO: 625496 - RNA, 19 nt, Artificial Sequence
  Description of Artificial Sequence: Synthetic oligonucleotide
uugaaccucugccgacuuc

SEQ ID NO: 625497 - RNA, 19 nt, Artificial Sequence
  Description of Artificial Sequence: Synthetic oligonucleotide
aucagggugcuaggcgacg

SEQ ID NO: 625498 - RNA, 19 nt, Artificial Sequence
  Description of Artificial Sequence: Synthetic oligonucleotide
agcacgcugacacgucaga

SEQ ID NO: 625499 - RNA, 19 nt, Artificial Sequence
  Description of Artificial Sequence: Synthetic oligonucleotide
gaagcgcauaagacugcug

SEQ ID NO: 625500 - RNA, 19 nt, Artificial Sequence
  Description of Artificial Sequence: Synthetic oligonucleotide
acguuuguccucagguuca

SEQ ID NO: 625501 - RNA, 19 nt, Artificial Sequence
  Description of Artificial Sequence: Synthetic oligonucleotide
agcuagguuucuguaugga

SEQ ID NO: 625502 - RNA, 19 nt, Artificial Sequence
  Description of Artificial Sequence: Synthetic oligonucleotide
gacauaucggcgggguaga

SEQ ID NO: 625503 - RNA, 19 nt, Artificial Sequence
  Description of Artificial Sequence: Synthetic oligonucleotide
guaugucuggcaggggaac

SEQ ID NO: 625504 - RNA, 19 nt, Artificial Sequence
  Description of Artificial Sequence: Synthetic oligonucleotide
gauacugauucagguugaa

SEQ ID NO: 625505 - RNA, 19 nt, Artificial Sequence
  Description of Artificial Sequence: Synthetic oligonucleotide
cagcacgcugacacgucag

SEQ ID NO: 625506 - RNA, 19 nt, Artificial Sequence
  Description of Artificial Sequence: Synthetic oligonucleotide
acugugucauggugguuuu

SEQ ID NO: 625507 - RNA, 19 nt, Artificial Sequence
  Description of Artificial Sequence: Synthetic oligonucleotide
caagaccauugcaucacaa

SEQ ID NO: 625508 - RNA, 19 nt, Artificial Sequence
  Description of Artificial Sequence: Synthetic oligonucleotide
ucuuacggcagaggacaaa

SEQ ID NO: 625509 - RNA, 19 nt, Artificial Sequence
  Description of Artificial Sequence: Synthetic oligonucleotide
uacagucgguuaggaacug

SEQ ID NO: 625510 - RNA, 19 nt, Artificial Sequence
  Description of Artificial Sequence: Synthetic oligonucleotide
ggcgacggacgacacuacg

SEQ ID NO: 625511 - RNA, 19 nt, Artificial Sequence
  Description of Artificial Sequence: Synthetic oligonucleotide
auccgccgaguacaggggu

SEQ ID NO: 625512 - RNA, 19 nt, Artificial Sequence
  Description of Artificial Sequence: Synthetic oligonucleotide
ugcgagggcuucuccucca

SEQ ID NO: 625513 - RNA, 19 nt, Artificial Sequence
  Description of Artificial Sequence: Synthetic oligonucleotide
caggacugauuucgguuuc

SEQ ID NO: 625514 - RNA, 19 nt, Artificial Sequence
  Description of Artificial Sequence: Synthetic oligonucleotide
gauacccucucuagguucu

SEQ ID NO: 625515 - RNA, 19 nt, Artificial Sequence
  Description of Artificial Sequence: Synthetic oligonucleotide
guacagucgguuaggaacu

SEQ ID NO: 625516 - RNA, 19 nt, Artificial Sequence
  Description of Artificial Sequence: Synthetic oligonucleotide
ucccagcuagguuucugua

SEQ ID NO: 625517 - RNA, 19 nt, Artificial Sequence
  Description of Artificial Sequence: Synthetic oligonucleotide
cuggucgcugaauucugga

SEQ ID NO: 625518 - RNA, 19 nt, Artificial Sequence
  Description of Artificial Sequence: Synthetic oligonucleotide
cguaauuggggaacucuug

SEQ ID NO: 625519 - RNA, 19 nt, Artificial Sequence
  Description of Artificial Sequence: Synthetic oligonucleotide
caugcauagacucgggguu

SEQ ID NO: 625520 - RNA, 19 nt, Artificial Sequence
  Description of Artificial Sequence: Synthetic oligonucleotide
gguggcggaggcaaauuug

SEQ ID NO: 625521 - RNA, 19 nt, Artificial Sequence
  Description of Artificial Sequence: Synthetic oligonucleotide
ggggcauaggguucucuac

SEQ ID NO: 625522 - RNA, 19 nt, Artificial Sequence
  Description of Artificial Sequence: Synthetic oligonucleotide
ccgaaaugcguuaaugaaa

SEQ ID NO: 625523 - RNA, 19 nt, Artificial Sequence
  Description of Artificial Sequence: Synthetic oligonucleotide
cuucguaauuggggaacuc

SEQ ID NO: 625524 - RNA, 19 nt, Artificial Sequence
  Description of Artificial Sequence: Synthetic oligonucleotide
gcguuaaugaaaugucaua

SEQ ID NO: 625525 - RNA, 19 nt, Artificial Sequence
  Description of Artificial Sequence: Synthetic oligonucleotide
auaggguucucuacacaua

SEQ ID NO: 625526 - RNA, 19 nt, Artificial Sequence
  Description of Artificial Sequence: Synthetic oligonucleotide
cacagcacgcugacacguc

SEQ ID NO: 625527 - RNA, 19 nt, Artificial Sequence
  Description of Artificial Sequence: Synthetic oligonucleotide
cgacggacgacacuacgcc

SEQ ID NO: 625528 - RNA, 19 nt, Artificial Sequence
  Description of Artificial Sequence: Synthetic oligonucleotide
uacaggggugugugcucgu

SEQ ID NO: 625529 - RNA, 19 nt, Artificial Sequence
  Description of Artificial Sequence: Synthetic oligonucleotide
gacuggaccgaaaugcguu

SEQ ID NO: 625530 - RNA, 19 nt, Artificial Sequence
  Description of Artificial Sequence: Synthetic oligonucleotide
gcgacggacgacacuacgc

SEQ ID NO: 625531 - RNA, 19 nt, Artificial Sequence
  Description of Artificial Sequence: Synthetic oligonucleotide
gcacaggcgaugagaaccc

SEQ ID NO: 625532 - RNA, 19 nt, Artificial Sequence
  Description of Artificial Sequence: Synthetic oligonucleotide
cgaaaugcguuaaugaaau

SEQ ID NO: 625533 - RNA, 19 nt, Artificial Sequence
  Description of Artificial Sequence: Synthetic oligonucleotide
cuacgccacccagauccag

SEQ ID NO: 625534 - RNA, 19 nt, Artificial Sequence
  Description of Artificial Sequence: Synthetic oligonucleotide
guguaggaaauaggccgga

SEQ ID NO: 625535 - RNA, 19 nt, Artificial Sequence
  Description of Artificial Sequence: Synthetic oligonucleotide
cacaggcgaugagaacccc

SEQ ID NO: 625536 - RNA, 19 nt, Artificial Sequence
  Description of Artificial Sequence: Synthetic oligonucleotide
ggacucaaacuggucgcug

SEQ ID NO: 625537 - RNA, 19 nt, Artificial Sequence
  Description of Artificial Sequence: Synthetic oligonucleotide
cauaucggcgggguagaaa

SEQ ID NO: 625538 - RNA, 19 nt, Artificial Sequence
  Description of Artificial Sequence: Synthetic oligonucleotide
cacucggcauccagucuga

SEQ ID NO: 625539 - RNA, 19 nt, Artificial Sequence
  Description of Artificial Sequence: Synthetic oligonucleotide
ccaugcauagacucggggu

SEQ ID NO: 625540 - RNA, 19 nt, Artificial Sequence
  Description of Artificial Sequence: Synthetic oligonucleotide
ggaggguacggggcauagg

SEQ ID NO: 625541 - RNA, 19 nt, Artificial Sequence
  Description of Artificial Sequence: Synthetic oligonucleotide
gcgugugauuccgugcagc

SEQ ID NO: 625542 - RNA, 19 nt, Artificial Sequence
  Description of Artificial Sequence: Synthetic oligonucleotide
acuacgccacccagaucca

SEQ ID NO: 625543 - RNA, 19 nt, Artificial Sequence
  Description of Artificial Sequence: Synthetic oligonucleotide
cugacacgucagagcagga

SEQ ID NO: 625544 - RNA, 19 nt, Artificial Sequence
  Description of Artificial Sequence: Synthetic oligonucleotide
ggauggccgagccuucaaa

SEQ ID NO: 625545 - RNA, 19 nt, Artificial Sequence
  Description of Artificial Sequence: Synthetic oligonucleotide
cuuugauacccuggagggu

SEQ ID NO: 625546 - RNA, 19 nt, Artificial Sequence
  Description of Artificial Sequence: Synthetic oligonucleotide
aucuuacggcagaggacaa

SEQ ID NO: 625547 - RNA, 19 nt, Artificial Sequence
  Description of Artificial Sequence: Synthetic oligonucleotide
gcgcauaagacugcugcaa

SEQ ID NO: 625548 - RNA, 19 nt, Artificial Sequence
  Description of Artificial Sequence: Synthetic oligonucleotide
cuggaccgaaaugcguuaa

SEQ ID NO: 625549 - RNA, 19 nt, Artificial Sequence
  Description of Artificial Sequence: Synthetic oligonucleotide
ggacgacacuacgccaccc

SEQ ID NO: 625550 - RNA, 19 nt, Artificial Sequence
  Description of Artificial Sequence: Synthetic oligonucleotide
acauaucggcgggguagaa

SEQ ID NO: 625551 - RNA, 19 nt, Artificial Sequence
  Description of Artificial Sequence: Synthetic oligonucleotide
guugaaccucugccgacuu

SEQ ID NO: 625552 - RNA, 19 nt, Artificial Sequence
  Description of Artificial Sequence: Synthetic oligonucleotide
gguggguguauggacucaa

SEQ ID NO: 625553 - RNA, 19 nt, Artificial Sequence
  Description of Artificial Sequence: Synthetic oligonucleotide
gguugaaccucugccgacu

SEQ ID NO: 625554 - RNA, 19 nt, Artificial Sequence
  Description of Artificial Sequence: Synthetic oligonucleotide
acggggcauaggguucucu

SEQ ID NO: 625555 - RNA, 19 nt, Artificial Sequence
  Description of Artificial Sequence: Synthetic oligonucleotide
cuuccucaccuuguaugua

SEQ ID NO: 625556 - RNA, 19 nt, Artificial Sequence
  Description of Artificial Sequence: Synthetic oligonucleotide
gcaugucaagaggcgugug

SEQ ID NO: 625557 - RNA, 19 nt, Artificial Sequence
  Description of Artificial Sequence: Synthetic oligonucleotide
ggcugcgagggcuucuccu

SEQ ID NO: 625558 - RNA, 19 nt, Artificial Sequence
  Description of Artificial Sequence: Synthetic oligonucleotide
cggacgacacuacgccacc

SEQ ID NO: 625559 - RNA, 19 nt, Artificial Sequence
  Description of Artificial Sequence: Synthetic oligonucleotide
cgcauaagacugcugcaaa

SEQ ID NO: 625560 - RNA, 19 nt, Artificial Sequence
  Description of Artificial Sequence: Synthetic oligonucleotide
gcucgucaauaacuucgua

SEQ ID NO: 625561 - RNA, 19 nt, Artificial Sequence
  Description of Artificial Sequence: Synthetic oligonucleotide
ccucagguacagucgguua

SEQ ID NO: 625562 - RNA, 19 nt, Artificial Sequence
  Description of Artificial Sequence: Synthetic oligonucleotide
cacgucagagcaggaugcu

SEQ ID NO: 625563 - RNA, 19 nt, Artificial Sequence
  Description of Artificial Sequence: Synthetic oligonucleotide
cuucggccaggccaauauu

SEQ ID NO: 625564 - RNA, 19 nt, Artificial Sequence
  Description of Artificial Sequence: Synthetic oligonucleotide
ccuucggccaggccaauau

SEQ ID NO: 625565 - RNA, 19 nt, Artificial Sequence
  Description of Artificial Sequence: Synthetic oligonucleotide
ggcuggcuaaugauaguuu

SEQ ID NO: 625566 - RNA, 19 nt, Artificial Sequence
  Description of Artificial Sequence: Synthetic oligonucleotide
cggggcauaggguucucua

SEQ ID NO: 625567 - RNA, 19 nt, Artificial Sequence
  Description of Artificial Sequence: Synthetic oligonucleotide
cagguucagccugggguuu

SEQ ID NO: 625568 - RNA, 19 nt, Artificial Sequence
  Description of Artificial Sequence: Synthetic oligonucleotide
cgucaggcgcagggaaguc

SEQ ID NO: 625569 - RNA, 19 nt, Artificial Sequence
  Description of Artificial Sequence: Synthetic oligonucleotide
caccuccgacaggcucuca

SEQ ID NO: 625570 - RNA, 19 nt, Artificial Sequence
  Description of Artificial Sequence: Synthetic oligonucleotide
ccgccgaguacaggggugu

SEQ ID NO: 625571 - RNA, 19 nt, Artificial Sequence
  Description of Artificial Sequence: Synthetic oligonucleotide
ccgugcagccaugcccacu

SEQ ID NO: 625572 - RNA, 19 nt, Artificial Sequence
  Description of Artificial Sequence: Synthetic oligonucleotide
auuucuaugaaccccaugg

SEQ ID NO: 625573 - RNA, 19 nt, Artificial Sequence
  Description of Artificial Sequence: Synthetic oligonucleotide
uuaauggucacucuagggg

SEQ ID NO: 625574 - RNA, 19 nt, Artificial Sequence
  Description of Artificial Sequence: Synthetic oligonucleotide
uguucuugagcaaauaaag

SEQ ID NO: 625575 - RNA, 19 nt, Artificial Sequence
  Description of Artificial Sequence: Synthetic oligonucleotide
ucguacauuguucagaacc

SEQ ID NO: 625576 - RNA, 19 nt, Artificial Sequence
  Description of Artificial Sequence: Synthetic oligonucleotide
aacgucugggccuucaccc

SEQ ID NO: 625577 - RNA, 19 nt, Artificial Sequence
  Description of Artificial Sequence: Synthetic oligonucleotide
uguugcaugcucauggucg

SEQ ID NO: 625578 - RNA, 19 nt, Artificial Sequence
  Description of Artificial Sequence: Synthetic oligonucleotide
uguaacuaguagcagagug

SEQ ID NO: 625579 - RNA, 19 nt, Artificial Sequence
  Description of Artificial Sequence: Synthetic oligonucleotide
cuuguaaggagucaugagg

SEQ ID NO: 625580 - RNA, 19 nt, Artificial Sequence
  Description of Artificial Sequence: Synthetic oligonucleotide
uucaaauuguuucaggggu

SEQ ID NO: 625581 - RNA, 19 nt, Artificial Sequence
  Description of Artificial Sequence: Synthetic oligonucleotide
ugcuuaacuaguuaacuag

SEQ ID NO: 625582 - RNA, 19 nt, Artificial Sequence
  Description of Artificial Sequence: Synthetic oligonucleotide
acuaguuaacuaguaaugc

SEQ ID NO: 625583 - RNA, 19 nt, Artificial Sequence
  Description of Artificial Sequence: Synthetic oligonucleotide
uaguuaacuaguaaugcug

SEQ ID NO: 625584 - RNA, 19 nt, Artificial Sequence
  Description of Artificial Sequence: Synthetic oligonucleotide
aagguaaccuuguaaggag

SEQ ID NO: 625585 - RNA, 19 nt, Artificial Sequence
  Description of Artificial Sequence: Synthetic oligonucleotide
auauggaugacauucggcu

SEQ ID NO: 625586 - RNA, 19 nt, Artificial Sequence
  Description of Artificial Sequence: Synthetic oligonucleotide
ucugaaauagcuucucccc

SEQ ID NO: 625587 - RNA, 19 nt, Artificial Sequence
  Description of Artificial Sequence: Synthetic oligonucleotide
agauuuggccaguauagac

SEQ ID NO: 625588 - RNA, 19 nt, Artificial Sequence
  Description of Artificial Sequence: Synthetic oligonucleotide
cugaauaccgcuugcauag

SEQ ID NO: 625589 - RNA, 19 nt, Artificial Sequence
  Description of Artificial Sequence: Synthetic oligonucleotide
ccaacuauguacaagagag

SEQ ID NO: 625590 - RNA, 19 nt, Artificial Sequence
  Description of Artificial Sequence: Synthetic oligonucleotide
aaaguaagcaagggguuac

SEQ ID NO: 625591 - RNA, 19 nt, Artificial Sequence
  Description of Artificial Sequence: Synthetic oligonucleotide
aauugcacuuauuucuaug

SEQ ID NO: 625592 - RNA, 19 nt, Artificial Sequence
  Description of Artificial Sequence: Synthetic oligonucleotide
uccauaggcgguaaagccg

SEQ ID NO: 625593 - RNA, 19 nt, Artificial Sequence
  Description of Artificial Sequence: Synthetic oligonucleotide
aacaucgucagacacucga

SEQ ID NO: 625594 - RNA, 19 nt, Artificial Sequence
  Description of Artificial Sequence: Synthetic oligonucleotide
cuucaaauuguuucagggg

SEQ ID NO: 625595 - RNA, 19 nt, Artificial Sequence
  Description of Artificial Sequence: Synthetic oligonucleotide
aguuaacuaguaaugcugc

SEQ ID NO: 625596 - RNA, 19 nt, Artificial Sequence
  Description of Artificial Sequence: Synthetic oligonucleotide
uguacaagagagcccaccc

SEQ ID NO: 625597 - RNA, 19 nt, Artificial Sequence
  Description of Artificial Sequence: Synthetic oligonucleotide
agugucggcuuucauaggg

SEQ ID NO: 625598 - RNA, 19 nt, Artificial Sequence
  Description of Artificial Sequence: Synthetic oligonucleotide
ugcuggugaucaaauacgg

SEQ ID NO: 625599 - RNA, 19 nt, Artificial Sequence
  Description of Artificial Sequence: Synthetic oligonucleotide
uggugaucaaauacggcag

SEQ ID NO: 625600 - RNA, 19 nt, Artificial Sequence
  Description of Artificial Sequence: Synthetic oligonucleotide
cacucgaucaacacuauac

SEQ ID NO: 625601 - RNA, 19 nt, Artificial Sequence
  Description of Artificial Sequence: Synthetic oligonucleotide
ucgaucaacacuauacauc

SEQ ID NO: 625602 - RNA, 19 nt, Artificial Sequence
  Description of Artificial Sequence: Synthetic oligonucleotide
uauacauccucuccagaug

SEQ ID NO: 625603 - RNA, 19 nt, Artificial Sequence
  Description of Artificial Sequence: Synthetic oligonucleotide
aguuuugagugcuggcggc

SEQ ID NO: 625604 - RNA, 19 nt, Artificial Sequence
  Description of Artificial Sequence: Synthetic oligonucleotide
ugguucuaggugcaagugg

SEQ ID NO: 625605 - RNA, 19 nt, Artificial Sequence
  Description of Artificial Sequence: Synthetic oligonucleotide
uccagaucaagacugggaa

SEQ ID NO: 625606 - RNA, 19 nt, Artificial Sequence
  Description of Artificial Sequence: Synthetic oligonucleotide
ucauggucguagaggaugg

SEQ ID NO: 625607 - RNA, 19 nt, Artificial Sequence
  Description of Artificial Sequence: Synthetic oligonucleotide
guuuaauggucacucuagg

SEQ ID NO: 625608 - RNA, 19 nt, Artificial Sequence
  Description of Artificial Sequence: Synthetic oligonucleotide
acuaguaaugcugcuuccc

SEQ ID NO: 625609 - RNA, 19 nt, Artificial Sequence
  Description of Artificial Sequence: Synthetic oligonucleotide
ugcacuuauuucuaugaac

SEQ ID NO: 625610 - RNA, 19 nt, Artificial Sequence
  Description of Artificial Sequence: Synthetic oligonucleotide
uauagaccgggccaggcca

SEQ ID NO: 625611 - RNA, 19 nt, Artificial Sequence
  Description of Artificial Sequence: Synthetic oligonucleotide
uccaacuauguacaagaga

SEQ ID NO: 625612 - RNA, 19 nt, Artificial Sequence
  Description of Artificial Sequence: Synthetic oligonucleotide
gauguacucggcuuuuggc

SEQ ID NO: 625613 - RNA, 19 nt, Artificial Sequence
  Description of Artificial Sequence: Synthetic oligonucleotide
cuuauuucuaugaacccca

SEQ ID NO: 625614 - RNA, 19 nt, Artificial Sequence
  Description of Artificial Sequence: Synthetic oligonucleotide
aguagcagagugcuuaacu

SEQ ID NO: 625615 - RNA, 19 nt, Artificial Sequence
  Description of Artificial Sequence: Synthetic oligonucleotide
gauaucguacauuguucag

SEQ ID NO: 625616 - RNA, 19 nt, Artificial Sequence
  Description of Artificial Sequence: Synthetic oligonucleotide
gugacagacagaucuaggc

SEQ ID NO: 625617 - RNA, 19 nt, Artificial Sequence
  Description of Artificial Sequence: Synthetic oligonucleotide
gaaucauucucccguuucc

SEQ ID NO: 625618 - RNA, 19 nt, Artificial Sequence
  Description of Artificial Sequence: Synthetic oligonucleotide
aauguccucaaauguugca

SEQ ID NO: 625619 - RNA, 19 nt, Artificial Sequence
  Description of Artificial Sequence: Synthetic oligonucleotide
aaguaggucucaaucaucu

SEQ ID NO: 625620 - RNA, 19 nt, Artificial Sequence
  Description of Artificial Sequence: Synthetic oligonucleotide
aauccuaacuccccuuggu

SEQ ID NO: 625621 - RNA, 19 nt, Artificial Sequence
  Description of Artificial Sequence: Synthetic oligonucleotide
ucaacacuauacauccucu

SEQ ID NO: 625622 - RNA, 19 nt, Artificial Sequence
  Description of Artificial Sequence: Synthetic oligonucleotide
ugaagcuccguucgcgccg

SEQ ID NO: 625623 - RNA, 19 nt, Artificial Sequence
  Description of Artificial Sequence: Synthetic oligonucleotide
uuucuaugaaccccaugga

SEQ ID NO: 625624 - RNA, 19 nt, Artificial Sequence
  Description of Artificial Sequence: Synthetic oligonucleotide
ugauagauguucaguuucu

SEQ ID NO: 625625 - RNA, 19 nt, Artificial Sequence
  Description of Artificial Sequence: Synthetic oligonucleotide
acuguaacuaguagcagag

SEQ ID NO: 625626 - RNA, 19 nt, Artificial Sequence
  Description of Artificial Sequence: Synthetic oligonucleotide
ucuuccauaggcgguaaag

SEQ ID NO: 625627 - RNA, 19 nt, Artificial Sequence
  Description of Artificial Sequence: Synthetic oligonucleotide
aguuuaauggucacucuag

SEQ ID NO: 625628 - RNA, 19 nt, Artificial Sequence
  Description of Artificial Sequence: Synthetic oligonucleotide
ucaaauacggcagggcuga

SEQ ID NO: 625629 - RNA, 19 nt, Artificial Sequence
  Description of Artificial Sequence: Synthetic oligonucleotide
uaacuaguagcagagugcu

SEQ ID NO: 625630 - RNA, 19 nt, Artificial Sequence
  Description of Artificial Sequence: Synthetic oligonucleotide
ucggcuuuuggcaccuugg

SEQ ID NO: 625631 - RNA, 19 nt, Artificial Sequence
  Description of Artificial Sequence: Synthetic oligonucleotide
agagugcuuaacuaguuaa

SEQ ID NO: 625632 - RNA, 19 nt, Artificial Sequence
  Description of Artificial Sequence: Synthetic oligonucleotide
ugacauucggcucuggguu

SEQ ID NO: 625633 - RNA, 19 nt, Artificial Sequence
  Description of Artificial Sequence: Synthetic oligonucleotide
gauauggaugacauucggc

SEQ ID NO: 625634 - RNA, 19 nt, Artificial Sequence
  Description of Artificial Sequence: Synthetic oligonucleotide
cucuggauuacagacgcgg

SEQ ID NO: 625635 - RNA, 19 nt, Artificial Sequence
  Description of Artificial Sequence: Synthetic oligonucleotide
gucacucuaggggauaucg

SEQ ID NO: 625636 - RNA, 19 nt, Artificial Sequence
  Description of Artificial Sequence: Synthetic oligonucleotide
agucaugaggguccugagg

SEQ ID NO: 625637 - RNA, 19 nt, Artificial Sequence
  Description of Artificial Sequence: Synthetic oligonucleotide
aauaccgcuugcauaguug

SEQ ID NO: 625638 - RNA, 19 nt, Artificial Sequence
  Description of Artificial Sequence: Synthetic oligonucleotide
aucgucagacacucgauca

SEQ ID NO: 625639 - RNA, 19 nt, Artificial Sequence
  Description of Artificial Sequence: Synthetic oligonucleotide
auucucccguuuccgacgc

SEQ ID NO: 625640 - RNA, 19 nt, Artificial Sequence
  Description of Artificial Sequence: Synthetic oligonucleotide
ugagcucaacagcagcaag

SEQ ID NO: 625641 - RNA, 19 nt, Artificial Sequence
  Description of Artificial Sequence: Synthetic oligonucleotide
acucgaucaacacuauaca

SEQ ID NO: 625642 - RNA, 19 nt, Artificial Sequence
  Description of Artificial Sequence: Synthetic oligonucleotide
uucuaggugcaaguggcgg

SEQ ID NO: 625643 - RNA, 19 nt, Artificial Sequence
  Description of Artificial Sequence: Synthetic oligonucleotide
ugcauaguugugguugccg

SEQ ID NO: 625644 - RNA, 19 nt, Artificial Sequence
  Description of Artificial Sequence: Synthetic oligonucleotide
accgcuugcauaguugugg

SEQ ID NO: 625645 - RNA, 19 nt, Artificial Sequence
  Description of Artificial Sequence: Synthetic oligonucleotide
ucuaggugcaaguggcggc

SEQ ID NO: 625646 - RNA, 19 nt, Artificial Sequence
  Description of Artificial Sequence: Synthetic oligonucleotide
agugcuuaacuaguuaacu

SEQ ID NO: 625647 - RNA, 19 nt, Artificial Sequence
  Description of Artificial Sequence: Synthetic oligonucleotide
aaggggaaugaguaggcuu

SEQ ID NO: 625648 - RNA, 19 nt, Artificial Sequence
  Description of Artificial Sequence: Synthetic oligonucleotide
caguuuugagugcuggcgg

SEQ ID NO: 625649 - RNA, 19 nt, Artificial Sequence
  Description of Artificial Sequence: Synthetic oligonucleotide
cuugcauaguugugguugc

SEQ ID NO: 625650 - RNA, 19 nt, Artificial Sequence
  Description of Artificial Sequence: Synthetic oligonucleotide
augacauucggcucugggu

SEQ ID NO: 625651 - RNA, 19 nt, Artificial Sequence
  Description of Artificial Sequence: Synthetic oligonucleotide
acuacaguguuggugaggu

SEQ ID NO: 625652 - RNA, 19 nt, Artificial Sequence
  Description of Artificial Sequence: Synthetic oligonucleotide
accagguacggaugggaac

SEQ ID NO: 625653 - RNA, 19 nt, Artificial Sequence
  Description of Artificial Sequence: Synthetic oligonucleotide
aaauacggcagggcugagg

SEQ ID NO: 625654 - RNA, 19 nt, Artificial Sequence
  Description of Artificial Sequence: Synthetic oligonucleotide
uguucagaacccaauccua

SEQ ID NO: 625655 - RNA, 19 nt, Artificial Sequence
  Description of Artificial Sequence: Synthetic oligonucleotide
uccaggggugacucaaagg

SEQ ID NO: 625656 - RNA, 19 nt, Artificial Sequence
  Description of Artificial Sequence: Synthetic oligonucleotide
gugguugccgucuggaagc

SEQ ID NO: 625657 - RNA, 19 nt, Artificial Sequence
  Description of Artificial Sequence: Synthetic oligonucleotide
cauucucccguuuccgacg

SEQ ID NO: 625658 - RNA, 19 nt, Artificial Sequence
  Description of Artificial Sequence: Synthetic oligonucleotide
ugaucaaauacggcagggc

SEQ ID NO: 625659 - RNA, 19 nt, Artificial Sequence
  Description of Artificial Sequence: Synthetic oligonucleotide
acaggacgucaucaaaguc

SEQ ID NO: 625660 - RNA, 19 nt, Artificial Sequence
  Description of Artificial Sequence: Synthetic oligonucleotide
caagcuccaacuauguaca

SEQ ID NO: 625661 - RNA, 19 nt, Artificial Sequence
  Description of Artificial Sequence: Synthetic oligonucleotide
ggugcuggugaucaaauac

SEQ ID NO: 625662 - RNA, 19 nt, Artificial Sequence
  Description of Artificial Sequence: Synthetic oligonucleotide
ucuggauuacagacgcgga

SEQ ID NO: 625663 - RNA, 19 nt, Artificial Sequence
  Description of Artificial Sequence: Synthetic oligonucleotide
agacgcggaaucauucucc

SEQ ID NO: 625664 - RNA, 19 nt, Artificial Sequence
  Description of Artificial Sequence: Synthetic oligonucleotide
caaguggcggcccagcccc

SEQ ID NO: 625665 - RNA, 19 nt, Artificial Sequence
  Description of Artificial Sequence: Synthetic oligonucleotide
aagacugggaaaagcugag

SEQ ID NO: 625666 - RNA, 19 nt, Artificial Sequence
  Description of Artificial Sequence: Synthetic oligonucleotide
uccugagguucugaaauag

SEQ ID NO: 625667 - RNA, 19 nt, Artificial Sequence
  Description of Artificial Sequence: Synthetic oligonucleotide
aaugucugagggucccuga

SEQ ID NO: 625668 - RNA, 19 nt, Artificial Sequence
  Description of Artificial Sequence: Synthetic oligonucleotide
ccaagcuccaacuauguac

SEQ ID NO: 625669 - RNA, 19 nt, Artificial Sequence
  Description of Artificial Sequence: Synthetic oligonucleotide
uuuccgacgcuuccucucc

SEQ ID NO: 625670 - RNA, 19 nt, Artificial Sequence
  Description of Artificial Sequence: Synthetic oligonucleotide
auaucguacauuguucaga

SEQ ID NO: 625671 - RNA, 19 nt, Artificial Sequence
  Description of Artificial Sequence: Synthetic oligonucleotide
acuaguagcagagugcuua

SEQ ID NO: 625672 - RNA, 19 nt, Artificial Sequence
  Description of Artificial Sequence: Synthetic oligonucleotide
agucgugggaagugucggc

SEQ ID NO: 625673 - RNA, 19 nt, Artificial Sequence
  Description of Artificial Sequence: Synthetic oligonucleotide
gguacggaugggaacaucg

SEQ ID NO: 625674 - RNA, 19 nt, Artificial Sequence
  Description of Artificial Sequence: Synthetic oligonucleotide
cuuccauaggcgguaaagc

SEQ ID NO: 625675 - RNA, 19 nt, Artificial Sequence
  Description of Artificial Sequence: Synthetic oligonucleotide
uacagacgcggaaucauuc

SEQ ID NO: 625676 - RNA, 19 nt, Artificial Sequence
  Description of Artificial Sequence: Synthetic oligonucleotide
auaccgcuugcauaguugu

SEQ ID NO: 625677 - RNA, 19 nt, Artificial Sequence
  Description of Artificial Sequence: Synthetic oligonucleotide
acucuaggggauaucguac

SEQ ID NO: 625678 - RNA, 19 nt, Artificial Sequence
  Description of Artificial Sequence: Synthetic oligonucleotide
gcuacuugacuuucuagcc

SEQ ID NO: 625679 - RNA, 19 nt, Artificial Sequence
  Description of Artificial Sequence: Synthetic oligonucleotide
uucagaacccaauccuaac

SEQ ID NO: 625680 - RNA, 19 nt, Artificial Sequence
  Description of Artificial Sequence: Synthetic oligonucleotide
caagccucauccagggugc

SEQ ID NO: 625681 - RNA, 19 nt, Artificial Sequence
  Description of Artificial Sequence: Synthetic oligonucleotide
cucaucaggcggcucaacc

SEQ ID NO: 625682 - RNA, 19 nt, Artificial Sequence
  Description of Artificial Sequence: Synthetic oligonucleotide
guaaagccggaagucaaag

SEQ ID NO: 625683 - RNA, 19 nt, Artificial Sequence
  Description of Artificial Sequence: Synthetic oligonucleotide
uugcacuuauuucuaugaa

SEQ ID NO: 625684 - RNA, 19 nt, Artificial Sequence
  Description of Artificial Sequence: Synthetic oligonucleotide
aagugucggcuuucauagg

SEQ ID NO: 625685 - RNA, 19 nt, Artificial Sequence
  Description of Artificial Sequence: Synthetic oligonucleotide
cacccuggcagaaaaucag

SEQ ID NO: 625686 - RNA, 19 nt, Artificial Sequence
  Description of Artificial Sequence: Synthetic oligonucleotide
gugaucaaauacggcaggg

SEQ ID NO: 625687 - RNA, 19 nt, Artificial Sequence
  Description of Artificial Sequence: Synthetic oligonucleotide
ggugaucaaauacggcagg

SEQ ID NO: 625688 - RNA, 19 nt, Artificial Sequence
  Description of Artificial Sequence: Synthetic oligonucleotide
gacgcggaaucauucuccc

SEQ ID NO: 625689 - RNA, 19 nt, Artificial Sequence
  Description of Artificial Sequence: Synthetic oligonucleotide
ugcgagaaccugagcaaug

SEQ ID NO: 625690 - RNA, 19 nt, Artificial Sequence
  Description of Artificial Sequence: Synthetic oligonucleotide
uccgcguagccccugaaua

SEQ ID NO: 625691 - RNA, 19 nt, Artificial Sequence
  Description of Artificial Sequence: Synthetic oligonucleotide
ugucuacacuguaacuagu

SEQ ID NO: 625692 - RNA, 19 nt, Artificial Sequence
  Description of Artificial Sequence: Synthetic oligonucleotide
gaacgucugggccuucacc

SEQ ID NO: 625693 - RNA, 19 nt, Artificial Sequence
  Description of Artificial Sequence: Synthetic oligonucleotide
caauccuaacuccccuugg

SEQ ID NO: 625694 - RNA, 19 nt, Artificial Sequence
  Description of Artificial Sequence: Synthetic oligonucleotide
gguucuaggugcaaguggc

SEQ ID NO: 625695 - RNA, 19 nt, Artificial Sequence
  Description of Artificial Sequence: Synthetic oligonucleotide
ggauaucguacauuguuca

SEQ ID NO: 625696 - RNA, 19 nt, Artificial Sequence
  Description of Artificial Sequence: Synthetic oligonucleotide
cuuuuggcaccuuggagga

SEQ ID NO: 625697 - RNA, 19 nt, Artificial Sequence
  Description of Artificial Sequence: Synthetic oligonucleotide
uggauuacagacgcggaau

SEQ ID NO: 625698 - RNA, 19 nt, Artificial Sequence
  Description of Artificial Sequence: Synthetic oligonucleotide
cuuaacuaguuaacuagua

SEQ ID NO: 625699 - RNA, 19 nt, Artificial Sequence
  Description of Artificial Sequence: Synthetic oligonucleotide
gagucgugggaagugucgg

SEQ ID NO: 625700 - RNA, 19 nt, Artificial Sequence
  Description of Artificial Sequence: Synthetic oligonucleotide
gcuugcauaguugugguug

SEQ ID NO: 625701 - RNA, 19 nt, Artificial Sequence
  Description of Artificial Sequence: Synthetic oligonucleotide
gaccccaggcucuacauaa

SEQ ID NO: 625702 - RNA, 19 nt, Artificial Sequence
  Description of Artificial Sequence: Synthetic oligonucleotide
ugucggcuuucauaggggu

SEQ ID NO: 625703 - RNA, 19 nt, Artificial Sequence
  Description of Artificial Sequence: Synthetic oligonucleotide
ggauguacucggcuuuugg

SEQ ID NO: 625704 - RNA, 19 nt, Artificial Sequence
  Description of Artificial Sequence: Synthetic oligonucleotide
cuccaacuauguacaagag

SEQ ID NO: 625705 - RNA, 19 nt, Artificial Sequence
  Description of Artificial Sequence: Synthetic oligonucleotide
acagacgcggaaucauucu

SEQ ID NO: 625706 - RNA, 19 nt, Artificial Sequence
  Description of Artificial Sequence: Synthetic oligonucleotide
agggccacgugguucuagg

SEQ ID NO: 625707 - RNA, 19 nt, Artificial Sequence
  Description of Artificial Sequence: Synthetic oligonucleotide
ccauaggcgguaaagccgg

SEQ ID NO: 625708 - RNA, 19 nt, Artificial Sequence
  Description of Artificial Sequence: Synthetic oligonucleotide
gccggccccacauagacgg

SEQ ID NO: 625709 - RNA, 19 nt, Artificial Sequence
  Description of Artificial Sequence: Synthetic oligonucleotide
ucuaggggauaucguacau

SEQ ID NO: 625710 - RNA, 19 nt, Artificial Sequence
  Description of Artificial Sequence: Synthetic oligonucleotide
gacccaugcuucucacagg

SEQ ID NO: 625711 - RNA, 19 nt, Artificial Sequence
  Description of Artificial Sequence: Synthetic oligonucleotide
gagugcuuaacuaguuaac

SEQ ID NO: 625712 - RNA, 19 nt, Artificial Sequence
  Description of Artificial Sequence: Synthetic oligonucleotide
gauggaggggucaucccug

SEQ ID NO: 625713 - RNA, 19 nt, Artificial Sequence
  Description of Artificial Sequence: Synthetic oligonucleotide
guuugcggaaguuccucug

SEQ ID NO: 625714 - RNA, 19 nt, Artificial Sequence
  Description of Artificial Sequence: Synthetic oligonucleotide
guagcagagugcuuaacua

SEQ ID NO: 625715 - RNA, 19 nt, Artificial Sequence
  Description of Artificial Sequence: Synthetic oligonucleotide
auuacagacgcggaaucau

SEQ ID NO: 625716 - RNA, 19 nt, Artificial Sequence
  Description of Artificial Sequence: Synthetic oligonucleotide
ucacucuaggggauaucgu

SEQ ID NO: 625717 - RNA, 19 nt, Artificial Sequence
  Description of Artificial Sequence: Synthetic oligonucleotide
gauuacagacgcggaauca

SEQ ID NO: 625718 - RNA, 19 nt, Artificial Sequence
  Description of Artificial Sequence: Synthetic oligonucleotide
ggcaagacugugaagggag

SEQ ID NO: 625719 - RNA, 19 nt, Artificial Sequence
  Description of Artificial Sequence: Synthetic oligonucleotide
ucgucagacacucgaucaa

SEQ ID NO: 625720 - RNA, 19 nt, Artificial Sequence
  Description of Artificial Sequence: Synthetic oligonucleotide
accaugcgcagguguuugc

SEQ ID NO: 625721 - RNA, 19 nt, Artificial Sequence
  Description of Artificial Sequence: Synthetic oligonucleotide
guaaggagucaugaggguc

SEQ ID NO: 625722 - RNA, 19 nt, Artificial Sequence
  Description of Artificial Sequence: Synthetic oligonucleotide
uaugaaccccauggagggg

SEQ ID NO: 625723 - RNA, 19 nt, Artificial Sequence
  Description of Artificial Sequence: Synthetic oligonucleotide
uuacagacgcggaaucauu

SEQ ID NO: 625724 - RNA, 19 nt, Artificial Sequence
  Description of Artificial Sequence: Synthetic oligonucleotide
ccgggcaagacugugaagg

SEQ ID NO: 625725 - RNA, 19 nt, Artificial Sequence
  Description of Artificial Sequence: Synthetic oligonucleotide
cguacauuguucagaaccc

SEQ ID NO: 625726 - RNA, 19 nt, Artificial Sequence
  Description of Artificial Sequence: Synthetic oligonucleotide
gagucauggggacuucaca

SEQ ID NO: 625727 - RNA, 19 nt, Artificial Sequence
  Description of Artificial Sequence: Synthetic oligonucleotide
aggcgguaaagccggaagu

SEQ ID NO: 625728 - RNA, 19 nt, Artificial Sequence
  Description of Artificial Sequence: Synthetic oligonucleotide
caucgucagacacucgauc

SEQ ID NO: 625729 - RNA, 19 nt, Artificial Sequence
  Description of Artificial Sequence: Synthetic oligonucleotide
ugucucgggagucguggga

SEQ ID NO: 625730 - RNA, 19 nt, Artificial Sequence
  Description of Artificial Sequence: Synthetic oligonucleotide
uagggauguacucggcuuu

SEQ ID NO: 625731 - RNA, 19 nt, Artificial Sequence
  Description of Artificial Sequence: Synthetic oligonucleotide
ggaacaucgucagacacuc

SEQ ID NO: 625732 - RNA, 19 nt, Artificial Sequence
  Description of Artificial Sequence: Synthetic oligonucleotide
caucaggcggcucaaccuc

SEQ ID NO: 625733 - RNA, 19 nt, Artificial Sequence
  Description of Artificial Sequence: Synthetic oligonucleotide
uuccgacgcuuccucuccg

SEQ ID NO: 625734 - RNA, 19 nt, Artificial Sequence
  Description of Artificial Sequence: Synthetic oligonucleotide
cuauacauccucuccagau

SEQ ID NO: 625735 - RNA, 19 nt, Artificial Sequence
  Description of Artificial Sequence: Synthetic oligonucleotide
ugaaccccauggaggggcc

SEQ ID NO: 625736 - RNA, 19 nt, Artificial Sequence
  Description of Artificial Sequence: Synthetic oligonucleotide
aauggucacucuaggggau

SEQ ID NO: 625737 - RNA, 19 nt, Artificial Sequence
  Description of Artificial Sequence: Synthetic oligonucleotide
uguggcggccagaagccuc

SEQ ID NO: 625738 - RNA, 19 nt, Artificial Sequence
  Description of Artificial Sequence: Synthetic oligonucleotide
guucuaggugcaaguggcg

SEQ ID NO: 625739 - RNA, 19 nt, Artificial Sequence
  Description of Artificial Sequence: Synthetic oligonucleotide
caugacccaugcuucucac

SEQ ID NO: 625740 - RNA, 19 nt, Artificial Sequence
  Description of Artificial Sequence: Synthetic oligonucleotide
ggcuuuuggcaccuuggag

SEQ ID NO: 625741 - RNA, 19 nt, Artificial Sequence
  Description of Artificial Sequence: Synthetic oligonucleotide
gacauucggcucuggguuc

SEQ ID NO: 625742 - RNA, 19 nt, Artificial Sequence
  Description of Artificial Sequence: Synthetic oligonucleotide
cucuaggggauaucguaca

SEQ ID NO: 625743 - RNA, 19 nt, Artificial Sequence
  Description of Artificial Sequence: Synthetic oligonucleotide
ucucgggagucgugggaag

SEQ ID NO: 625744 - RNA, 19 nt, Artificial Sequence
  Description of Artificial Sequence: Synthetic oligonucleotide
uaccgcuugcauaguugug

SEQ ID NO: 625745 - RNA, 19 nt, Artificial Sequence
  Description of Artificial Sequence: Synthetic oligonucleotide
aggggugacucaaagguaa

SEQ ID NO: 625746 - RNA, 19 nt, Artificial Sequence
  Description of Artificial Sequence: Synthetic oligonucleotide
guugccgucuggaagcuga

SEQ ID NO: 625747 - RNA, 19 nt, Artificial Sequence
  Description of Artificial Sequence: Synthetic oligonucleotide
ggugacagacagaucuagg

SEQ ID NO: 625748 - RNA, 19 nt, Artificial Sequence
  Description of Artificial Sequence: Synthetic oligonucleotide
acccugcuagaccccgggc

SEQ ID NO: 625749 - RNA, 19 nt, Artificial Sequence
  Description of Artificial Sequence: Synthetic oligonucleotide
acgcggaaucauucucccg

SEQ ID NO: 625750 - RNA, 19 nt, Artificial Sequence
  Description of Artificial Sequence: Synthetic oligonucleotide
auagacgggccauccuggu

SEQ ID NO: 625751 - RNA, 19 nt, Artificial Sequence
  Description of Artificial Sequence: Synthetic oligonucleotide
cacucuaggggauaucgua

SEQ ID NO: 625752 - RNA, 19 nt, Artificial Sequence
  Description of Artificial Sequence: Synthetic oligonucleotide
gggccgguugucuacacug

SEQ ID NO: 625753 - RNA, 19 nt, Artificial Sequence
  Description of Artificial Sequence: Synthetic oligonucleotide
cagacgcggaaucauucuc

SEQ ID NO: 625754 - RNA, 19 nt, Artificial Sequence
  Description of Artificial Sequence: Synthetic oligonucleotide
ggcgaggcaugacaggcag

SEQ ID NO: 625755 - RNA, 19 nt, Artificial Sequence
  Description of Artificial Sequence: Synthetic oligonucleotide
ccuaacuccccuuggucag

SEQ ID NO: 625756 - RNA, 19 nt, Artificial Sequence
  Description of Artificial Sequence: Synthetic oligonucleotide
uuuugagugcuggcggcuc

SEQ ID NO: 625757 - RNA, 19 nt, Artificial Sequence
  Description of Artificial Sequence: Synthetic oligonucleotide
guaaccuuguaaggaguca

SEQ ID NO: 625758 - RNA, 19 nt, Artificial Sequence
  Description of Artificial Sequence: Synthetic oligonucleotide
cugucucgggagucguggg

SEQ ID NO: 625759 - RNA, 19 nt, Artificial Sequence
  Description of Artificial Sequence: Synthetic oligonucleotide
cccaggcucuacauaaggg

SEQ ID NO: 625760 - RNA, 19 nt, Artificial Sequence
  Description of Artificial Sequence: Synthetic oligonucleotide
ggauuacagacgcggaauc

SEQ ID NO: 625761 - RNA, 19 nt, Artificial Sequence
  Description of Artificial Sequence: Synthetic oligonucleotide
guucgcgccgcucagcgaa

SEQ ID NO: 625762 - RNA, 19 nt, Artificial Sequence
  Description of Artificial Sequence: Synthetic oligonucleotide
cucggcuuuuggcaccuug

SEQ ID NO: 625763 - RNA, 19 nt, Artificial Sequence
  Description of Artificial Sequence: Synthetic oligonucleotide
cacccugcuagaccccggg

SEQ ID NO: 625764 - RNA, 19 nt, Artificial Sequence
  Description of Artificial Sequence: Synthetic oligonucleotide
cuaguaaugcugcuucccu

SEQ ID NO: 625765 - RNA, 19 nt, Artificial Sequence
  Description of Artificial Sequence: Synthetic oligonucleotide
ggucaaguuuaauggucac

SEQ ID NO: 625766 - RNA, 19 nt, Artificial Sequence
  Description of Artificial Sequence: Synthetic oligonucleotide
gucguagaggauggggaug

SEQ ID NO: 625767 - RNA, 19 nt, Artificial Sequence
  Description of Artificial Sequence: Synthetic oligonucleotide
uugcauaguugugguugcc

SEQ ID NO: 625768 - RNA, 19 nt, Artificial Sequence
  Description of Artificial Sequence: Synthetic oligonucleotide
cuggauuacagacgcggaa

SEQ ID NO: 625769 - RNA, 19 nt, Artificial Sequence
  Description of Artificial Sequence: Synthetic oligonucleotide
gaaguagcugugggcaaga

SEQ ID NO: 625770 - RNA, 19 nt, Artificial Sequence
  Description of Artificial Sequence: Synthetic oligonucleotide
gggauaucguacauuguuc

SEQ ID NO: 625771 - RNA, 19 nt, Artificial Sequence
  Description of Artificial Sequence: Synthetic oligonucleotide
ggcucaaccucuuccagaa

SEQ ID NO: 625772 - RNA, 19 nt, Artificial Sequence
  Description of Artificial Sequence: Synthetic oligonucleotide
agguaaccuuguaaggagu

SEQ ID NO: 625773 - RNA, 19 nt, Artificial Sequence
  Description of Artificial Sequence: Synthetic oligonucleotide
ccggcugaagcuccguucg

SEQ ID NO: 625774 - RNA, 19 nt, Artificial Sequence
  Description of Artificial Sequence: Synthetic oligonucleotide
ggccaguauagaccgggcc

SEQ ID NO: 625775 - RNA, 19 nt, Artificial Sequence
  Description of Artificial Sequence: Synthetic oligonucleotide
ugcuagaccccgggcaaga

SEQ ID NO: 625776 - RNA, 19 nt, Artificial Sequence
  Description of Artificial Sequence: Synthetic oligonucleotide
cucgaucaacacuauacau

SEQ ID NO: 625777 - RNA, 19 nt, Artificial Sequence
  Description of Artificial Sequence: Synthetic oligonucleotide
cuacuugacuuucuagccu

SEQ ID NO: 625778 - RNA, 19 nt, Artificial Sequence
  Description of Artificial Sequence: Synthetic oligonucleotide
ugaauaccgcuugcauagu

SEQ ID NO: 625779 - RNA, 19 nt, Artificial Sequence
  Description of Artificial Sequence: Synthetic oligonucleotide
ugggccgguugucuacacu

SEQ ID NO: 625780 - RNA, 19 nt, Artificial Sequence
  Description of Artificial Sequence: Synthetic oligonucleotide
gaagcuccguucgcgccgc

SEQ ID NO: 625781 - RNA, 19 nt, Artificial Sequence
  Description of Artificial Sequence: Synthetic oligonucleotide
agcgaggaccagacccugc

SEQ ID NO: 625782 - RNA, 19 nt, Artificial Sequence
  Description of Artificial Sequence: Synthetic oligonucleotide
uccccuuggucagggacac

SEQ ID NO: 625783 - RNA, 19 nt, Artificial Sequence
  Description of Artificial Sequence: Synthetic oligonucleotide
ccaauccuaacuccccuug

SEQ ID NO: 625784 - RNA, 19 nt, Artificial Sequence
  Description of Artificial Sequence: Synthetic oligonucleotide
cacaggacgucaucaaagu

SEQ ID NO: 625785 - RNA, 19 nt, Artificial Sequence
  Description of Artificial Sequence: Synthetic oligonucleotide
gucggcuuucauaggggug

SEQ ID NO: 625786 - RNA, 19 nt, Artificial Sequence
  Description of Artificial Sequence: Synthetic oligonucleotide
acacucgaucaacacuaua

SEQ ID NO: 625787 - RNA, 19 nt, Artificial Sequence
  Description of Artificial Sequence: Synthetic oligonucleotide
ggugacucaaagguaaccu

SEQ ID NO: 625788 - RNA, 19 nt, Artificial Sequence
  Description of Artificial Sequence: Synthetic oligonucleotide
cccuaagccucugugcugg

SEQ ID NO: 625789 - RNA, 19 nt, Artificial Sequence
  Description of Artificial Sequence: Synthetic oligonucleotide
cagccccuaagccucugug

SEQ ID NO: 625790 - RNA, 19 nt, Artificial Sequence
  Description of Artificial Sequence: Synthetic oligonucleotide
cauggucguagaggauggg

SEQ ID NO: 625791 - RNA, 19 nt, Artificial Sequence
  Description of Artificial Sequence: Synthetic oligonucleotide
agguacggaugggaacauc

SEQ ID NO: 625792 - RNA, 19 nt, Artificial Sequence
  Description of Artificial Sequence: Synthetic oligonucleotide
uagccccugaauaccgcuu

SEQ ID NO: 625793 - RNA, 19 nt, Artificial Sequence
  Description of Artificial Sequence: Synthetic oligonucleotide
ggggauaucguacauuguu

SEQ ID NO: 625794 - RNA, 19 nt, Artificial Sequence
  Description of Artificial Sequence: Synthetic oligonucleotide
ccaguauagaccgggccag

SEQ ID NO: 625795 - RNA, 19 nt, Artificial Sequence
  Description of Artificial Sequence: Synthetic oligonucleotide
guacaagagagcccacccu

SEQ ID NO: 625796 - RNA, 19 nt, Artificial Sequence
  Description of Artificial Sequence: Synthetic oligonucleotide
gcaaguggcggcccagccc

SEQ ID NO: 625797 - RNA, 19 nt, Artificial Sequence
  Description of Artificial Sequence: Synthetic oligonucleotide
gaccagacccugcgagaac

SEQ ID NO: 625798 - RNA, 19 nt, Artificial Sequence
  Description of Artificial Sequence: Synthetic oligonucleotide
aacuccccuuggucaggga

SEQ ID NO: 625799 - RNA, 19 nt, Artificial Sequence
  Description of Artificial Sequence: Synthetic oligonucleotide
auagaccgggccaggccag

SEQ ID NO: 625800 - RNA, 19 nt, Artificial Sequence
  Description of Artificial Sequence: Synthetic oligonucleotide
cagagugcuuaacuaguua

SEQ ID NO: 625801 - RNA, 19 nt, Artificial Sequence
  Description of Artificial Sequence: Synthetic oligonucleotide
gaauaccgcuugcauaguu

SEQ ID NO: 625802 - RNA, 19 nt, Artificial Sequence
  Description of Artificial Sequence: Synthetic oligonucleotide
uggcggcccagccccaagu

SEQ ID NO: 625803 - RNA, 19 nt, Artificial Sequence
  Description of Artificial Sequence: Synthetic oligonucleotide
uagaccgggccaggccagg

SEQ ID NO: 625804 - RNA, 19 nt, Artificial Sequence
  Description of Artificial Sequence: Synthetic oligonucleotide
acaucgucagacacucgau

SEQ ID NO: 625805 - RNA, 19 nt, Artificial Sequence
  Description of Artificial Sequence: Synthetic oligonucleotide
uuugcucaucaggcggcuc

SEQ ID NO: 625806 - RNA, 19 nt, Artificial Sequence
  Description of Artificial Sequence: Synthetic oligonucleotide
agaccccaggcucuacaua

SEQ ID NO: 625807 - RNA, 19 nt, Artificial Sequence
  Description of Artificial Sequence: Synthetic oligonucleotide
ggcgguaaagccggaaguc

SEQ ID NO: 625808 - RNA, 19 nt, Artificial Sequence
  Description of Artificial Sequence: Synthetic oligonucleotide
guagccccugaauaccgcu

SEQ ID NO: 625809 - RNA, 19 nt, Artificial Sequence
  Description of Artificial Sequence: Synthetic oligonucleotide
cacccgccgacugccaacc

SEQ ID NO: 625810 - RNA, 19 nt, Artificial Sequence
  Description of Artificial Sequence: Synthetic oligonucleotide
ggggucaucccugcggaug

SEQ ID NO: 625811 - RNA, 19 nt, Artificial Sequence
  Description of Artificial Sequence: Synthetic oligonucleotide
aacuaguagcagagugcuu

SEQ ID NO: 625812 - RNA, 19 nt, Artificial Sequence
  Description of Artificial Sequence: Synthetic oligonucleotide
auaggcgguaaagccggaa

SEQ ID NO: 625813 - RNA, 19 nt, Artificial Sequence
  Description of Artificial Sequence: Synthetic oligonucleotide
cgguugucuacacuguaac

SEQ ID NO: 625814 - RNA, 19 nt, Artificial Sequence
  Description of Artificial Sequence: Synthetic oligonucleotide
gauagauguucaguuucuu

SEQ ID NO: 625815 - RNA, 19 nt, Artificial Sequence
  Description of Artificial Sequence: Synthetic oligonucleotide
gggucaucccugcggauga

SEQ ID NO: 625816 - RNA, 19 nt, Artificial Sequence
  Description of Artificial Sequence: Synthetic oligonucleotide
ggagucauggggacuucac

SEQ ID NO: 625817 - RNA, 19 nt, Artificial Sequence
  Description of Artificial Sequence: Synthetic oligonucleotide
gguagggauguacucggcu

SEQ ID NO: 625818 - RNA, 19 nt, Artificial Sequence
  Description of Artificial Sequence: Synthetic oligonucleotide
gcguagccccugaauaccg

SEQ ID NO: 625819 - RNA, 19 nt, Artificial Sequence
  Description of Artificial Sequence: Synthetic oligonucleotide
ccagguacggaugggaaca

SEQ ID NO: 625820 - RNA, 19 nt, Artificial Sequence
  Description of Artificial Sequence: Synthetic oligonucleotide
acugggccgguugucuaca

SEQ ID NO: 625821 - RNA, 19 nt, Artificial Sequence
  Description of Artificial Sequence: Synthetic oligonucleotide
ccauggaggggccccaaug

SEQ ID NO: 625822 - RNA, 19 nt, Artificial Sequence
  Description of Artificial Sequence: Synthetic oligonucleotide
gcuuaacuaguuaacuagu

SEQ ID NO: 625823 - RNA, 19 nt, Artificial Sequence
  Description of Artificial Sequence: Synthetic oligonucleotide
aggggauaucguacauugu

SEQ ID NO: 625824 - RNA, 19 nt, Artificial Sequence
  Description of Artificial Sequence: Synthetic oligonucleotide
ugguugccgucuggaagcu

SEQ ID NO: 625825 - RNA, 19 nt, Artificial Sequence
  Description of Artificial Sequence: Synthetic oligonucleotide
gccgacugccaaccaugcg

SEQ ID NO: 625826 - RNA, 19 nt, Artificial Sequence
  Description of Artificial Sequence: Synthetic oligonucleotide
cugcuagaccccgggcaag

SEQ ID NO: 625827 - RNA, 19 nt, Artificial Sequence
  Description of Artificial Sequence: Synthetic oligonucleotide
gggaaugaguaggcuugag

SEQ ID NO: 625828 - RNA, 19 nt, Artificial Sequence
  Description of Artificial Sequence: Synthetic oligonucleotide
ccuucacccgccgacugcc

SEQ ID NO: 625829 - RNA, 19 nt, Artificial Sequence
  Description of Artificial Sequence: Synthetic oligonucleotide
cuccguucgcgccgcucag

SEQ ID NO: 625830 - RNA, 19 nt, Artificial Sequence
  Description of Artificial Sequence: Synthetic oligonucleotide
ggaccacccuggcagaaaa

SEQ ID NO: 625831 - RNA, 19 nt, Artificial Sequence
  Description of Artificial Sequence: Synthetic oligonucleotide
ccgcguagccccugaauac

SEQ ID NO: 625832 - RNA, 19 nt, Artificial Sequence
  Description of Artificial Sequence: Synthetic oligonucleotide
agcuccguucgcgccgcuc

SEQ ID NO: 625833 - RNA, 19 nt, Artificial Sequence
  Description of Artificial Sequence: Synthetic oligonucleotide
accccaggcucuacauaag

SEQ ID NO: 625834 - RNA, 19 nt, Artificial Sequence
  Description of Artificial Sequence: Synthetic oligonucleotide
gcgguaaagccggaaguca

SEQ ID NO: 625835 - RNA, 19 nt, Artificial Sequence
  Description of Artificial Sequence: Synthetic oligonucleotide
guuuugagugcuggcggcu

SEQ ID NO: 625836 - RNA, 19 nt, Artificial Sequence
  Description of Artificial Sequence: Synthetic oligonucleotide
agggauguacucggcuuuu

SEQ ID NO: 625837 - RNA, 19 nt, Artificial Sequence
  Description of Artificial Sequence: Synthetic oligonucleotide
gcucagcgaacgucugggc

SEQ ID NO: 625838 - RNA, 19 nt, Artificial Sequence
  Description of Artificial Sequence: Synthetic oligonucleotide
cugggccgguugucuacac

SEQ ID NO: 625839 - RNA, 19 nt, Artificial Sequence
  Description of Artificial Sequence: Synthetic oligonucleotide
agugccggccccacauaga

SEQ ID NO: 625840 - RNA, 19 nt, Artificial Sequence
  Description of Artificial Sequence: Synthetic oligonucleotide
ccgccgacugccaaccaug

SEQ ID NO: 625841 - RNA, 19 nt, Artificial Sequence
  Description of Artificial Sequence: Synthetic oligonucleotide
gcuccguucgcgccgcuca

SEQ ID NO: 625842 - RNA, 19 nt, Artificial Sequence
  Description of Artificial Sequence: Synthetic oligonucleotide
ccugcgagaaccugagcaa

SEQ ID NO: 625843 - RNA, 19 nt, Artificial Sequence
  Description of Artificial Sequence: Synthetic oligonucleotide
gucgugggaagugucggcu

SEQ ID NO: 625844 - RNA, 19 nt, Artificial Sequence
  Description of Artificial Sequence: Synthetic oligonucleotide
cgcucagcgaacgucuggg

SEQ ID NO: 625845 - RNA, 19 nt, Artificial Sequence
  Description of Artificial Sequence: Synthetic oligonucleotide
ccccuugccaagaugaggu

SEQ ID NO: 625846 - RNA, 19 nt, Artificial Sequence
  Description of Artificial Sequence: Synthetic oligonucleotide
caaauacggcagggcugag

SEQ ID NO: 625847 - RNA, 19 nt, Artificial Sequence
  Description of Artificial Sequence: Synthetic oligonucleotide
cuagaccccgggcaagacu

SEQ ID NO: 625848 - RNA, 19 nt, Artificial Sequence
  Description of Artificial Sequence: Synthetic oligonucleotide
guggcggccagaagccuca

SEQ ID NO: 625849 - RNA, 19 nt, Artificial Sequence
  Description of Artificial Sequence: Synthetic oligonucleotide
ugcuggcggcucuuccaua

SEQ ID NO: 625850 - RNA, 19 nt, Artificial Sequence
  Description of Artificial Sequence: Synthetic oligonucleotide
cagggccacgugguucuag

SEQ ID NO: 625851 - RNA, 19 nt, Artificial Sequence
  Description of Artificial Sequence: Synthetic oligonucleotide
guacggaugggaacaucgu

SEQ ID NO: 625852 - RNA, 19 nt, Artificial Sequence
  Description of Artificial Sequence: Synthetic oligonucleotide
ggaccagacccugcgagaa

SEQ ID NO: 625853 - RNA, 19 nt, Artificial Sequence
  Description of Artificial Sequence: Synthetic oligonucleotide
gccuucacccgccgacugc

SEQ ID NO: 625854 - RNA, 19 nt, Artificial Sequence
  Description of Artificial Sequence: Synthetic oligonucleotide
cauaggcgguaaagccgga

SEQ ID NO: 625855 - RNA, 19 nt, Artificial Sequence
  Description of Artificial Sequence: Synthetic oligonucleotide
gggaacaucgucagacacu

SEQ ID NO: 625856 - RNA, 19 nt, Artificial Sequence
  Description of Artificial Sequence: Synthetic oligonucleotide
gggauguacucggcuuuug

SEQ ID NO: 625857 - RNA, 19 nt, Artificial Sequence
  Description of Artificial Sequence: Synthetic oligonucleotide
ggaugggaacaucgucaga

SEQ ID NO: 625858 - RNA, 19 nt, Artificial Sequence
  Description of Artificial Sequence: Synthetic oligonucleotide
cggaaguuccucuggauua

SEQ ID NO: 625859 - RNA, 19 nt, Artificial Sequence
  Description of Artificial Sequence: Synthetic oligonucleotide
cccugcuagaccccgggca

SEQ ID NO: 625860 - RNA, 19 nt, Artificial Sequence
  Description of Artificial Sequence: Synthetic oligonucleotide
ccuaagccucugugcuggg

SEQ ID NO: 625861 - RNA, 19 nt, Artificial Sequence
  Description of Artificial Sequence: Synthetic oligonucleotide
cacauagacgggccauccu

SEQ ID NO: 625862 - RNA, 19 nt, Artificial Sequence
  Description of Artificial Sequence: Synthetic oligonucleotide
ccgcucagcgaacgucugg

SEQ ID NO: 625863 - RNA, 19 nt, Artificial Sequence
  Description of Artificial Sequence: Synthetic oligonucleotide
cccugcggaugaugguagg

SEQ ID NO: 625864 - RNA, 19 nt, Artificial Sequence
  Description of Artificial Sequence: Synthetic oligonucleotide
cuucacccgccgacugcca

SEQ ID NO: 625865 - RNA, 19 nt, Artificial Sequence
  Description of Artificial Sequence: Synthetic oligonucleotide
ccgguugucuacacuguaa

SEQ ID NO: 625866 - RNA, 19 nt, Artificial Sequence
  Description of Artificial Sequence: Synthetic oligonucleotide
cgcguagccccugaauacc

SEQ ID NO: 625867 - RNA, 19 nt, Artificial Sequence
  Description of Artificial Sequence: Synthetic oligonucleotide
cauucggcucuggguucac

SEQ ID NO: 625868 - RNA, 19 nt, Artificial Sequence
  Description of Artificial Sequence: Synthetic oligonucleotide
ccguuuccgacgcuuccuc

SEQ ID NO: 625869 - RNA, 19 nt, Artificial Sequence
  Description of Artificial Sequence: Synthetic oligonucleotide
cuaggggauaucguacauu

SEQ ID NO: 625870 - RNA, 19 nt, Artificial Sequence
  Description of Artificial Sequence: Synthetic oligonucleotide
cccaugcuucucacaggac

SEQ ID NO: 625871 - RNA, 19 nt, Artificial Sequence
  Description of Artificial Sequence: Synthetic oligonucleotide
gcggaaguuccucuggauu

SEQ ID NO: 625872 - RNA, 19 nt, Artificial Sequence
  Description of Artificial Sequence: Synthetic oligonucleotide
cuguaacuaguagcagagu

SEQ ID NO: 625873 - RNA, 19 nt, Artificial Sequence
  Description of Artificial Sequence: Synthetic oligonucleotide
cgcggaaucauucucccgu

SEQ ID NO: 625874 - RNA, 19 nt, Artificial Sequence
  Description of Artificial Sequence: Synthetic oligonucleotide
gcgagaaccugagcaaugu

SEQ ID NO: 625875 - RNA, 19 nt, Artificial Sequence
  Description of Artificial Sequence: Synthetic oligonucleotide
ccacccugcuagaccccgg

SEQ ID NO: 625876 - RNA, 19 nt, Artificial Sequence
  Description of Artificial Sequence: Synthetic oligonucleotide
cgccgacugccaaccaugc

SEQ ID NO: 625877 - RNA, 19 nt, Artificial Sequence
  Description of Artificial Sequence: Synthetic oligonucleotide
gaacacacacugggccggu

SEQ ID NO: 625878 - RNA, 19 nt, Artificial Sequence
  Description of Artificial Sequence: Synthetic oligonucleotide
cccuugccaagaugagguc

SEQ ID NO: 625879 - RNA, 19 nt, Artificial Sequence
  Description of Artificial Sequence: Synthetic oligonucleotide
aaguggcggcccagcccca

SEQ ID NO: 625880 - RNA, 19 nt, Artificial Sequence
  Description of Artificial Sequence: Synthetic oligonucleotide
cgguaaagccggaagucaa

SEQ ID NO: 625881 - RNA, 19 nt, Artificial Sequence
  Description of Artificial Sequence: Synthetic oligonucleotide
gccgguugucuacacugua

SEQ ID NO: 625882 - RNA, 19 nt, Artificial Sequence
  Description of Artificial Sequence: Synthetic oligonucleotide
cccacauagacgggccauc

SEQ ID NO: 625883 - RNA, 19 nt, Artificial Sequence
  Description of Artificial Sequence: Synthetic oligonucleotide
cccgggcaagacugugaag

SEQ ID NO: 625884 - RNA, 19 nt, Artificial Sequence
  Description of Artificial Sequence: Synthetic oligonucleotide
cugcgagaaccugagcaau

SEQ ID NO: 625885 - RNA, 19 nt, Artificial Sequence
  Description of Artificial Sequence: Synthetic oligonucleotide
acccgccgacugccaacca

SEQ ID NO: 625886 - RNA, 19 nt, Artificial Sequence
  Description of Artificial Sequence: Synthetic oligonucleotide
gcuagaccccgggcaagac

SEQ ID NO: 625887 - RNA, 19 nt, Artificial Sequence
  Description of Artificial Sequence: Synthetic oligonucleotide
ggugaggcucuucccuccu

SEQ ID NO: 625888 - RNA, 19 nt, Artificial Sequence
  Description of Artificial Sequence: Synthetic oligonucleotide
gguugccgucuggaagcug

SEQ ID NO: 625889 - RNA, 19 nt, Artificial Sequence
  Description of Artificial Sequence: Synthetic oligonucleotide
gggucgcuccaggaccggc

SEQ ID NO: 625890 - RNA, 19 nt, Artificial Sequence
  Description of Artificial Sequence: Synthetic oligonucleotide
gcaagacugugaagggagu

SEQ ID NO: 625891 - RNA, 19 nt, Artificial Sequence
  Description of Artificial Sequence: Synthetic oligonucleotide
gccgcucagcgaacgucug

SEQ ID NO: 625892 - RNA, 19 nt, Artificial Sequence
  Description of Artificial Sequence: Synthetic oligonucleotide
ccggccccacauagacggg

SEQ ID NO: 625893 - RNA, 19 nt, Artificial Sequence
  Description of Artificial Sequence: Synthetic oligonucleotide
cggcucaaccucuuccaga

SEQ ID NO: 625894 - RNA, 19 nt, Artificial Sequence
  Description of Artificial Sequence: Synthetic oligonucleotide
cacgugguucuaggugcaa

SEQ ID NO: 625895 - RNA, 19 nt, Artificial Sequence
  Description of Artificial Sequence: Synthetic oligonucleotide
gaccacccuggcagaaaau

SEQ ID NO: 625896 - RNA, 19 nt, Artificial Sequence
  Description of Artificial Sequence: Synthetic oligonucleotide
gcgaacgucugggccuuca

SEQ ID NO: 625897 - RNA, 19 nt, Artificial Sequence
  Description of Artificial Sequence: Synthetic oligonucleotide
caaccaugcgcagguguuu

SEQ ID NO: 625898 - RNA, 19 nt, Artificial Sequence
  Description of Artificial Sequence: Synthetic oligonucleotide
cccugaauaccgcuugcau

SEQ ID NO: 625899 - RNA, 19 nt, Artificial Sequence
  Description of Artificial Sequence: Synthetic oligonucleotide
ccccugaauaccgcuugca

SEQ ID NO: 625900 - RNA, 19 nt, Artificial Sequence
  Description of Artificial Sequence: Synthetic oligonucleotide
ccgcuugcauaguuguggu

SEQ ID NO: 625901 - RNA, 19 nt, Artificial Sequence
  Description of Artificial Sequence: Synthetic oligonucleotide
gcggaaucauucucccguu

SEQ ID NO: 625902 - RNA, 19 nt, Artificial Sequence
  Description of Artificial Sequence: Synthetic oligonucleotide
cggcugaagcuccguucgc

SEQ ID NO: 625903 - RNA, 19 nt, Artificial Sequence
  Description of Artificial Sequence: Synthetic oligonucleotide
cagguacggaugggaacau

SEQ ID NO: 625904 - RNA, 19 nt, Artificial Sequence
  Description of Artificial Sequence: Synthetic oligonucleotide
cccaauccuaacuccccuu

SEQ ID NO: 625905 - RNA, 19 nt, Artificial Sequence
  Description of Artificial Sequence: Synthetic oligonucleotide
ggcggcccagccccaaguu

SEQ ID NO: 625906 - RNA, 19 nt, Artificial Sequence
  Description of Artificial Sequence: Synthetic oligonucleotide
cgugggaagugucggcuuu

SEQ ID NO: 625907 - RNA, 19 nt, Artificial Sequence
  Description of Artificial Sequence: Synthetic oligonucleotide
ccagccccuaagccucugu

SEQ ID NO: 625908 - RNA, 19 nt, Artificial Sequence
  Description of Artificial Sequence: Synthetic oligonucleotide
cgcuugcauaguugugguu

SEQ ID NO: 625909 - RNA, 19 nt, Artificial Sequence
  Description of Artificial Sequence: Synthetic oligonucleotide
aauagguugcuuuacaugg

SEQ ID NO: 625910 - RNA, 19 nt, Artificial Sequence
  Description of Artificial Sequence: Synthetic oligonucleotide
aauuaaucacuucacaacg

SEQ ID NO: 625911 - RNA, 19 nt, Artificial Sequence
  Description of Artificial Sequence: Synthetic oligonucleotide
guaauaaucaucuuuagcc

SEQ ID NO: 625912 - RNA, 19 nt, Artificial Sequence
  Description of Artificial Sequence: Synthetic oligonucleotide
aaggacguauuucagaacc

SEQ ID NO: 625913 - RNA, 19 nt, Artificial Sequence
  Description of Artificial Sequence: Synthetic oligonucleotide
aacgugugcagcuuaaggc

SEQ ID NO: 625914 - RNA, 19 nt, Artificial Sequence
  Description of Artificial Sequence: Synthetic oligonucleotide
ucuaguuuccaguugaccg

SEQ ID NO: 625915 - RNA, 19 nt, Artificial Sequence
  Description of Artificial Sequence: Synthetic oligonucleotide
gagcuauugaaauaaagag

SEQ ID NO: 625916 - RNA, 19 nt, Artificial Sequence
  Description of Artificial Sequence: Synthetic oligonucleotide
aguagaucaucuuauuuac

SEQ ID NO: 625917 - RNA, 19 nt, Artificial Sequence
  Description of Artificial Sequence: Synthetic oligonucleotide
auuuccauuagcccaaagg

SEQ ID NO: 625918 - RNA, 19 nt, Artificial Sequence
  Description of Artificial Sequence: Synthetic oligonucleotide
aaauagguugcuuuacaug

SEQ ID NO: 625919 - RNA, 19 nt, Artificial Sequence
  Description of Artificial Sequence: Synthetic oligonucleotide
aggauauuuccauuagccc

SEQ ID NO: 625920 - RNA, 19 nt, Artificial Sequence
  Description of Artificial Sequence: Synthetic oligonucleotide
aacgcaucacaaaagggcc

SEQ ID NO: 625921 - RNA, 19 nt, Artificial Sequence
  Description of Artificial Sequence: Synthetic oligonucleotide
uugagagggaaauuaauca

SEQ ID NO: 625922 - RNA, 19 nt, Artificial Sequence
  Description of Artificial Sequence: Synthetic oligonucleotide
aaagggccuguauugauag

SEQ ID NO: 625923 - RNA, 19 nt, Artificial Sequence
  Description of Artificial Sequence: Synthetic oligonucleotide
uggaacgcaucacaaaagg

SEQ ID NO: 625924 - RNA, 19 nt, Artificial Sequence
  Description of Artificial Sequence: Synthetic oligonucleotide
caggauauuuccauuagcc

SEQ ID NO: 625925 - RNA, 19 nt, Artificial Sequence
  Description of Artificial Sequence: Synthetic oligonucleotide
ugauaauaggcuuucuuga

SEQ ID NO: 625926 - RNA, 19 nt, Artificial Sequence
  Description of Artificial Sequence: Synthetic oligonucleotide
uuuaagcuuaagcacggcc

SEQ ID NO: 625927 - RNA, 19 nt, Artificial Sequence
  Description of Artificial Sequence: Synthetic oligonucleotide
aauguaguggucaccauag

SEQ ID NO: 625928 - RNA, 19 nt, Artificial Sequence
  Description of Artificial Sequence: Synthetic oligonucleotide
ugaccuucuaugcagagac

SEQ ID NO: 625929 - RNA, 19 nt, Artificial Sequence
  Description of Artificial Sequence: Synthetic oligonucleotide
uuaagcuuaagcacggccu

SEQ ID NO: 625930 - RNA, 19 nt, Artificial Sequence
  Description of Artificial Sequence: Synthetic oligonucleotide
agaaacugcaacaugcuac

SEQ ID NO: 625931 - RNA, 19 nt, Artificial Sequence
  Description of Artificial Sequence: Synthetic oligonucleotide
ugaucuaguuuccaguuga

SEQ ID NO: 625932 - RNA, 19 nt, Artificial Sequence
  Description of Artificial Sequence: Synthetic oligonucleotide
agacaagcgaaucuucugg

SEQ ID NO: 625933 - RNA, 19 nt, Artificial Sequence
  Description of Artificial Sequence: Synthetic oligonucleotide
acuaccuaagggcagucac

SEQ ID NO: 625934 - RNA, 19 nt, Artificial Sequence
  Description of Artificial Sequence: Synthetic oligonucleotide
uacagaaucacuuuacauu

SEQ ID NO: 625935 - RNA, 19 nt, Artificial Sequence
  Description of Artificial Sequence: Synthetic oligonucleotide
agccauaagcaucauauug

SEQ ID NO: 625936 - RNA, 19 nt, Artificial Sequence
  Description of Artificial Sequence: Synthetic oligonucleotide
agcuauugaaauaaagagg

SEQ ID NO: 625937 - RNA, 19 nt, Artificial Sequence
  Description of Artificial Sequence: Synthetic oligonucleotide
gaguugugaugauagagcc

SEQ ID NO: 625938 - RNA, 19 nt, Artificial Sequence
  Description of Artificial Sequence: Synthetic oligonucleotide
uguggaacgcaucacaaaa

SEQ ID NO: 625939 - RNA, 19 nt, Artificial Sequence
  Description of Artificial Sequence: Synthetic oligonucleotide
agugcugcaccuugguucc

SEQ ID NO: 625940 - RNA, 19 nt, Artificial Sequence
  Description of Artificial Sequence: Synthetic oligonucleotide
gaacgcaucacaaaagggc

SEQ ID NO: 625941 - RNA, 19 nt, Artificial Sequence
  Description of Artificial Sequence: Synthetic oligonucleotide
uuaagcacggccuuuaauu

SEQ ID NO: 625942 - RNA, 19 nt, Artificial Sequence
  Description of Artificial Sequence: Synthetic oligonucleotide
guugugaugauagagcccc

SEQ ID NO: 625943 - RNA, 19 nt, Artificial Sequence
  Description of Artificial Sequence: Synthetic oligonucleotide
aggcugaucgaacacaguc

SEQ ID NO: 625944 - RNA, 19 nt, Artificial Sequence
  Description of Artificial Sequence: Synthetic oligonucleotide
uccucugcaaaccacacaa

SEQ ID NO: 625945 - RNA, 19 nt, Artificial Sequence
  Description of Artificial Sequence: Synthetic oligonucleotide
uaguagaucaucuuauuua

SEQ ID NO: 625946 - RNA, 19 nt, Artificial Sequence
  Description of Artificial Sequence: Synthetic oligonucleotide
ugauguauuccugaggcug

SEQ ID NO: 625947 - RNA, 19 nt, Artificial Sequence
  Description of Artificial Sequence: Synthetic oligonucleotide
ugauacagaaucacuuuac

SEQ ID NO: 625948 - RNA, 19 nt, Artificial Sequence
  Description of Artificial Sequence: Synthetic oligonucleotide
ucugaucuugaugugaaug

SEQ ID NO: 625949 - RNA, 19 nt, Artificial Sequence
  Description of Artificial Sequence: Synthetic oligonucleotide
ugagagggaaauuaaucac

SEQ ID NO: 625950 - RNA, 19 nt, Artificial Sequence
  Description of Artificial Sequence: Synthetic oligonucleotide
uugauaucuuucuggcugg

SEQ ID NO: 625951 - RNA, 19 nt, Artificial Sequence
  Description of Artificial Sequence: Synthetic oligonucleotide
acagaaucacuuuacauua

SEQ ID NO: 625952 - RNA, 19 nt, Artificial Sequence
  Description of Artificial Sequence: Synthetic oligonucleotide
uggcaagcugauaauaggc

SEQ ID NO: 625953 - RNA, 19 nt, Artificial Sequence
  Description of Artificial Sequence: Synthetic oligonucleotide
agauaaguguucuucauua

SEQ ID NO: 625954 - RNA, 19 nt, Artificial Sequence
  Description of Artificial Sequence: Synthetic oligonucleotide
auaucuuuuguaguagauc

SEQ ID NO: 625955 - RNA, 19 nt, Artificial Sequence
  Description of Artificial Sequence: Synthetic oligonucleotide
uuuugcgguugguaggugg

SEQ ID NO: 625956 - RNA, 19 nt, Artificial Sequence
  Description of Artificial Sequence: Synthetic oligonucleotide
gauaaguguucuucauuag

SEQ ID NO: 625957 - RNA, 19 nt, Artificial Sequence
  Description of Artificial Sequence: Synthetic oligonucleotide
ucaucacguaguuuugcgg

SEQ ID NO: 625958 - RNA, 19 nt, Artificial Sequence
  Description of Artificial Sequence: Synthetic oligonucleotide
cacugccugagcuagaagc

SEQ ID NO: 625959 - RNA, 19 nt, Artificial Sequence
  Description of Artificial Sequence: Synthetic oligonucleotide
cauccuuacagucugacca

SEQ ID NO: 625960 - RNA, 19 nt, Artificial Sequence
  Description of Artificial Sequence: Synthetic oligonucleotide
gggaucgucacauugacug

SEQ ID NO: 625961 - RNA, 19 nt, Artificial Sequence
  Description of Artificial Sequence: Synthetic oligonucleotide
gacccaacgauguugccag

SEQ ID NO: 625962 - RNA, 19 nt, Artificial Sequence
  Description of Artificial Sequence: Synthetic oligonucleotide
uuuguugagagggaaauua

SEQ ID NO: 625963 - RNA, 19 nt, Artificial Sequence
  Description of Artificial Sequence: Synthetic oligonucleotide
agcaagucaccuaaggugg

SEQ ID NO: 625964 - RNA, 19 nt, Artificial Sequence
  Description of Artificial Sequence: Synthetic oligonucleotide
uucaucacucaacaccuca

SEQ ID NO: 625965 - RNA, 19 nt, Artificial Sequence
  Description of Artificial Sequence: Synthetic oligonucleotide
ugaggcugaucgaacacag

SEQ ID NO: 625966 - RNA, 19 nt, Artificial Sequence
  Description of Artificial Sequence: Synthetic oligonucleotide
uacugguuagccucuuugg

SEQ ID NO: 625967 - RNA, 19 nt, Artificial Sequence
  Description of Artificial Sequence: Synthetic oligonucleotide
uaguuuugcgguugguagg

SEQ ID NO: 625968 - RNA, 19 nt, Artificial Sequence
  Description of Artificial Sequence: Synthetic oligonucleotide
agcccgaaggcagagacgc

SEQ ID NO: 625969 - RNA, 19 nt, Artificial Sequence
  Description of Artificial Sequence: Synthetic oligonucleotide
ugaugagaacuccccaaag

SEQ ID NO: 625970 - RNA, 19 nt, Artificial Sequence
  Description of Artificial Sequence: Synthetic oligonucleotide
ucuccaaaagaagaugaug

SEQ ID NO: 625971 - RNA, 19 nt, Artificial Sequence
  Description of Artificial Sequence: Synthetic oligonucleotide
cuuaaggcuucauuuuaag

SEQ ID NO: 625972 - RNA, 19 nt, Artificial Sequence
  Description of Artificial Sequence: Synthetic oligonucleotide
uuuggaacucugaucuuga

SEQ ID NO: 625973 - RNA, 19 nt, Artificial Sequence
  Description of Artificial Sequence: Synthetic oligonucleotide
aauaaagaggucggaguga

SEQ ID NO: 625974 - RNA, 19 nt, Artificial Sequence
  Description of Artificial Sequence: Synthetic oligonucleotide
uaaucaucuuuagccaagg

SEQ ID NO: 625975 - RNA, 19 nt, Artificial Sequence
  Description of Artificial Sequence: Synthetic oligonucleotide
uugaccguuuuccagugcu

SEQ ID NO: 625976 - RNA, 19 nt, Artificial Sequence
  Description of Artificial Sequence: Synthetic oligonucleotide
gaugagaacuccccaaaga

SEQ ID NO: 625977 - RNA, 19 nt, Artificial Sequence
  Description of Artificial Sequence: Synthetic oligonucleotide
uacuccuaauaucugguaa

SEQ ID NO: 625978 - RNA, 19 nt, Artificial Sequence
  Description of Artificial Sequence: Synthetic oligonucleotide
acuacaugcgauuccagau

SEQ ID NO: 625979 - RNA, 19 nt, Artificial Sequence
  Description of Artificial Sequence: Synthetic oligonucleotide
gucaucacguaguuuugcg

SEQ ID NO: 625980 - RNA, 19 nt, Artificial Sequence
  Description of Artificial Sequence: Synthetic oligonucleotide
ggauauuuccauuagccca

SEQ ID NO: 625981 - RNA, 19 nt, Artificial Sequence
  Description of Artificial Sequence: Synthetic oligonucleotide
gaagaugaugagaacuccc

SEQ ID NO: 625982 - RNA, 19 nt, Artificial Sequence
  Description of Artificial Sequence: Synthetic oligonucleotide
aucagucucauccucggca

SEQ ID NO: 625983 - RNA, 19 nt, Artificial Sequence
  Description of Artificial Sequence: Synthetic oligonucleotide
aucuaguuuccaguugacc

SEQ ID NO: 625984 - RNA, 19 nt, Artificial Sequence
  Description of Artificial Sequence: Synthetic oligonucleotide
aaugucugcgccgucccuc

SEQ ID NO: 625985 - RNA, 19 nt, Artificial Sequence
  Description of Artificial Sequence: Synthetic oligonucleotide
cucggcauagcucaggauc

SEQ ID NO: 625986 - RNA, 19 nt, Artificial Sequence
  Description of Artificial Sequence: Synthetic oligonucleotide
ugcgauuccagauuauuuu

SEQ ID NO: 625987 - RNA, 19 nt, Artificial Sequence
  Description of Artificial Sequence: Synthetic oligonucleotide
aauaucuuuuguaguagau

SEQ ID NO: 625988 - RNA, 19 nt, Artificial Sequence
  Description of Artificial Sequence: Synthetic oligonucleotide
cacacaucacuaccuaagg

SEQ ID NO: 625989 - RNA, 19 nt, Artificial Sequence
  Description of Artificial Sequence: Synthetic oligonucleotide
cauagcuauuaauccgggg

SEQ ID NO: 625990 - RNA, 19 nt, Artificial Sequence
  Description of Artificial Sequence: Synthetic oligonucleotide
acaagcgaaucuucugguc

SEQ ID NO: 625991 - RNA, 19 nt, Artificial Sequence
  Description of Artificial Sequence: Synthetic oligonucleotide
caacgugugcagcuuaagg

SEQ ID NO: 625992 - RNA, 19 nt, Artificial Sequence
  Description of Artificial Sequence: Synthetic oligonucleotide
ugacaaagauuucucguuu

SEQ ID NO: 625993 - RNA, 19 nt, Artificial Sequence
  Description of Artificial Sequence: Synthetic oligonucleotide
ugcgacccaacgauguugc

SEQ ID NO: 625994 - RNA, 19 nt, Artificial Sequence
  Description of Artificial Sequence: Synthetic oligonucleotide
aguugugaugauagagccc

SEQ ID NO: 625995 - RNA, 19 nt, Artificial Sequence
  Description of Artificial Sequence: Synthetic oligonucleotide
ugucaauuccaugauguau

SEQ ID NO: 625996 - RNA, 19 nt, Artificial Sequence
  Description of Artificial Sequence: Synthetic oligonucleotide
uacaugcgauuccagauua

SEQ ID NO: 625997 - RNA, 19 nt, Artificial Sequence
  Description of Artificial Sequence: Synthetic oligonucleotide
aacucugaucuugauguga

SEQ ID NO: 625998 - RNA, 19 nt, Artificial Sequence
  Description of Artificial Sequence: Synthetic oligonucleotide
uuuacaugguggagagucu

SEQ ID NO: 625999 - RNA, 19 nt, Artificial Sequence
  Description of Artificial Sequence: Synthetic oligonucleotide
gucggagugaaugucugcg

SEQ ID NO: 626000 - RNA, 19 nt, Artificial Sequence
  Description of Artificial Sequence: Synthetic oligonucleotide
agacgcucggcuugcgacc

SEQ ID NO: 626001 - RNA, 19 nt, Artificial Sequence
  Description of Artificial Sequence: Synthetic oligonucleotide
uucgggguacuccuaauau

SEQ ID NO: 626002 - RNA, 19 nt, Artificial Sequence
  Description of Artificial Sequence: Synthetic oligonucleotide
uugcuuuacaugguggaga

SEQ ID NO: 626003 - RNA, 19 nt, Artificial Sequence
  Description of Artificial Sequence: Synthetic oligonucleotide
ccugucuuacacuagcucc

SEQ ID NO: 626004 - RNA, 19 nt, Artificial Sequence
  Description of Artificial Sequence: Synthetic oligonucleotide
acugguuagccucuuugga

SEQ ID NO: 626005 - RNA, 19 nt, Artificial Sequence
  Description of Artificial Sequence: Synthetic oligonucleotide
cuaccuaagggcagucacc

SEQ ID NO: 626006 - RNA, 19 nt, Artificial Sequence
  Description of Artificial Sequence: Synthetic oligonucleotide
uuugcgguugguagguggu

SEQ ID NO: 626007 - RNA, 19 nt, Artificial Sequence
  Description of Artificial Sequence: Synthetic oligonucleotide
cuuuggaacucugaucuug

SEQ ID NO: 626008 - RNA, 19 nt, Artificial Sequence
  Description of Artificial Sequence: Synthetic oligonucleotide
agggauugucacucgcuuc

SEQ ID NO: 626009 - RNA, 19 nt, Artificial Sequence
  Description of Artificial Sequence: Synthetic oligonucleotide
acuagcaaccagcgugggg

SEQ ID NO: 626010 - RNA, 19 nt, Artificial Sequence
  Description of Artificial Sequence: Synthetic oligonucleotide
cuacugguuagccucuuug

SEQ ID NO: 626011 - RNA, 19 nt, Artificial Sequence
  Description of Artificial Sequence: Synthetic oligonucleotide
uaagcuuaagcacggccuu

SEQ ID NO: 626012 - RNA, 19 nt, Artificial Sequence
  Description of Artificial Sequence: Synthetic oligonucleotide
ugugucagacgcccuggcc

SEQ ID NO: 626013 - RNA, 19 nt, Artificial Sequence
  Description of Artificial Sequence: Synthetic oligonucleotide
guaguggucaccauagcca

SEQ ID NO: 626014 - RNA, 19 nt, Artificial Sequence
  Description of Artificial Sequence: Synthetic oligonucleotide
ggguacuccuaauaucugg

SEQ ID NO: 626015 - RNA, 19 nt, Artificial Sequence
  Description of Artificial Sequence: Synthetic oligonucleotide
augucugcgccgucccucc

SEQ ID NO: 626016 - RNA, 19 nt, Artificial Sequence
  Description of Artificial Sequence: Synthetic oligonucleotide
ugagcgcccauggaaagcc

SEQ ID NO: 626017 - RNA, 19 nt, Artificial Sequence
  Description of Artificial Sequence: Synthetic oligonucleotide
auccuuauuuguguccggg

SEQ ID NO: 626018 - RNA, 19 nt, Artificial Sequence
  Description of Artificial Sequence: Synthetic oligonucleotide
ucggcuugcgacccaacga

SEQ ID NO: 626019 - RNA, 19 nt, Artificial Sequence
  Description of Artificial Sequence: Synthetic oligonucleotide
cuuauuuguguccggguga

SEQ ID NO: 626020 - RNA, 19 nt, Artificial Sequence
  Description of Artificial Sequence: Synthetic oligonucleotide
uaagcacggccuuuaauuu

SEQ ID NO: 626021 - RNA, 19 nt, Artificial Sequence
  Description of Artificial Sequence: Synthetic oligonucleotide
uaugcagagacgugucauc

SEQ ID NO: 626022 - RNA, 19 nt, Artificial Sequence
  Description of Artificial Sequence: Synthetic oligonucleotide
ugugaauguaguggucacc

SEQ ID NO: 626023 - RNA, 19 nt, Artificial Sequence
  Description of Artificial Sequence: Synthetic oligonucleotide
aguugaccguuuuccagug

SEQ ID NO: 626024 - RNA, 19 nt, Artificial Sequence
  Description of Artificial Sequence: Synthetic oligonucleotide
ucggggucaacagagggac

SEQ ID NO: 626025 - RNA, 19 nt, Artificial Sequence
  Description of Artificial Sequence: Synthetic oligonucleotide
accuucuaugcagagacgu

SEQ ID NO: 626026 - RNA, 19 nt, Artificial Sequence
  Description of Artificial Sequence: Synthetic oligonucleotide
gagacgcucggcuugcgac

SEQ ID NO: 626027 - RNA, 19 nt, Artificial Sequence
  Description of Artificial Sequence: Synthetic oligonucleotide
uccgacauguggaacgcau

SEQ ID NO: 626028 - RNA, 19 nt, Artificial Sequence
  Description of Artificial Sequence: Synthetic oligonucleotide
cagacaagcgaaucuucug

SEQ ID NO: 626029 - RNA, 19 nt, Artificial Sequence
  Description of Artificial Sequence: Synthetic oligonucleotide
gauuucucguuuucccaca

SEQ ID NO: 626030 - RNA, 19 nt, Artificial Sequence
  Description of Artificial Sequence: Synthetic oligonucleotide
gccauaagcaucauauugc

SEQ ID NO: 626031 - RNA, 19 nt, Artificial Sequence
  Description of Artificial Sequence: Synthetic oligonucleotide
ugucaucacguaguuuugc

SEQ ID NO: 626032 - RNA, 19 nt, Artificial Sequence
  Description of Artificial Sequence: Synthetic oligonucleotide
guugcuuuacaugguggag

SEQ ID NO: 626033 - RNA, 19 nt, Artificial Sequence
  Description of Artificial Sequence: Synthetic oligonucleotide
gaaggacguauuucagaac

SEQ ID NO: 626034 - RNA, 19 nt, Artificial Sequence
  Description of Artificial Sequence: Synthetic oligonucleotide
caggcauccuuacagucug

SEQ ID NO: 626035 - RNA, 19 nt, Artificial Sequence
  Description of Artificial Sequence: Synthetic oligonucleotide
gccauagcuauuaauccgg

SEQ ID NO: 626036 - RNA, 19 nt, Artificial Sequence
  Description of Artificial Sequence: Synthetic oligonucleotide
agucaccuaaggugggcag

SEQ ID NO: 626037 - RNA, 19 nt, Artificial Sequence
  Description of Artificial Sequence: Synthetic oligonucleotide
uuucgggguacuccuaaua

SEQ ID NO: 626038 - RNA, 19 nt, Artificial Sequence
  Description of Artificial Sequence: Synthetic oligonucleotide
agaggucggagugaauguc

SEQ ID NO: 626039 - RNA, 19 nt, Artificial Sequence
  Description of Artificial Sequence: Synthetic oligonucleotide
ucggagugaaugucugcgc

SEQ ID NO: 626040 - RNA, 19 nt, Artificial Sequence
  Description of Artificial Sequence: Synthetic oligonucleotide
cuucaacuccugcaggcac

SEQ ID NO: 626041 - RNA, 19 nt, Artificial Sequence
  Description of Artificial Sequence: Synthetic oligonucleotide
uccuuauuuguguccgggu

SEQ ID NO: 626042 - RNA, 19 nt, Artificial Sequence
  Description of Artificial Sequence: Synthetic oligonucleotide
ugucuuacacuagcuccag

SEQ ID NO: 626043 - RNA, 19 nt, Artificial Sequence
  Description of Artificial Sequence: Synthetic oligonucleotide
aagcacggccuuuaauuuu

SEQ ID NO: 626044 - RNA, 19 nt, Artificial Sequence
  Description of Artificial Sequence: Synthetic oligonucleotide
cugaucuaguuuccaguug

SEQ ID NO: 626045 - RNA, 19 nt, Artificial Sequence
  Description of Artificial Sequence: Synthetic oligonucleotide
cuguguggcggacacccgg

SEQ ID NO: 626046 - RNA, 19 nt, Artificial Sequence
  Description of Artificial Sequence: Synthetic oligonucleotide
agcucuacuacaugcgauu

SEQ ID NO: 626047 - RNA, 19 nt, Artificial Sequence
  Description of Artificial Sequence: Synthetic oligonucleotide
cugucuuacacuagcucca

SEQ ID NO: 626048 - RNA, 19 nt, Artificial Sequence
  Description of Artificial Sequence: Synthetic oligonucleotide
ggaacgcaucacaaaaggg

SEQ ID NO: 626049 - RNA, 19 nt, Artificial Sequence
  Description of Artificial Sequence: Synthetic oligonucleotide
uuauuuguguccgggugau

SEQ ID NO: 626050 - RNA, 19 nt, Artificial Sequence
  Description of Artificial Sequence: Synthetic oligonucleotide
aaaagggccuguauugaua

SEQ ID NO: 626051 - RNA, 19 nt, Artificial Sequence
  Description of Artificial Sequence: Synthetic oligonucleotide
ucacguaguuuugcgguug

SEQ ID NO: 626052 - RNA, 19 nt, Artificial Sequence
  Description of Artificial Sequence: Synthetic oligonucleotide
uuuguuccuguguggcgga

SEQ ID NO: 626053 - RNA, 19 nt, Artificial Sequence
  Description of Artificial Sequence: Synthetic oligonucleotide
gaccguuuuccagugcuug

SEQ ID NO: 626054 - RNA, 19 nt, Artificial Sequence
  Description of Artificial Sequence: Synthetic oligonucleotide
ucgggguacuccuaauauc

SEQ ID NO: 626055 - RNA, 19 nt, Artificial Sequence
  Description of Artificial Sequence: Synthetic oligonucleotide
cccauggaaagcccgaagg

SEQ ID NO: 626056 - RNA, 19 nt, Artificial Sequence
  Description of Artificial Sequence: Synthetic oligonucleotide
cacccggucucaaugucag

SEQ ID NO: 626057 - RNA, 19 nt, Artificial Sequence
  Description of Artificial Sequence: Synthetic oligonucleotide
ccacacaucacuaccuaag

SEQ ID NO: 626058 - RNA, 19 nt, Artificial Sequence
  Description of Artificial Sequence: Synthetic oligonucleotide
agaagaguccaaguguuuu

SEQ ID NO: 626059 - RNA, 19 nt, Artificial Sequence
  Description of Artificial Sequence: Synthetic oligonucleotide
agacgugucaucacguagu

SEQ ID NO: 626060 - RNA, 19 nt, Artificial Sequence
  Description of Artificial Sequence: Synthetic oligonucleotide
uuuagccaaggaagcacuu

SEQ ID NO: 626061 - RNA, 19 nt, Artificial Sequence
  Description of Artificial Sequence: Synthetic oligonucleotide
agguugcuuuacauggugg

SEQ ID NO: 626062 - RNA, 19 nt, Artificial Sequence
  Description of Artificial Sequence: Synthetic oligonucleotide
ggaaauagguugcuuuaca

SEQ ID NO: 626063 - RNA, 19 nt, Artificial Sequence
  Description of Artificial Sequence: Synthetic oligonucleotide
uugcgacccaacgauguug

SEQ ID NO: 626064 - RNA, 19 nt, Artificial Sequence
  Description of Artificial Sequence: Synthetic oligonucleotide
cauccuuauuuguguccgg

SEQ ID NO: 626065 - RNA, 19 nt, Artificial Sequence
  Description of Artificial Sequence: Synthetic oligonucleotide
ucaccuaaggugggcagga

SEQ ID NO: 626066 - RNA, 19 nt, Artificial Sequence
  Description of Artificial Sequence: Synthetic oligonucleotide
uuucccagacaagcgaauc

SEQ ID NO: 626067 - RNA, 19 nt, Artificial Sequence
  Description of Artificial Sequence: Synthetic oligonucleotide
uuagugcugcaagaagagu

SEQ ID NO: 626068 - RNA, 19 nt, Artificial Sequence
  Description of Artificial Sequence: Synthetic oligonucleotide
cagggaucgucacauugac

SEQ ID NO: 626069 - RNA, 19 nt, Artificial Sequence
  Description of Artificial Sequence: Synthetic oligonucleotide
gggaaauuaaucacuucac

SEQ ID NO: 626070 - RNA, 19 nt, Artificial Sequence
  Description of Artificial Sequence: Synthetic oligonucleotide
cacguaguuuugcgguugg

SEQ ID NO: 626071 - RNA, 19 nt, Artificial Sequence
  Description of Artificial Sequence: Synthetic oligonucleotide
cacagggauugucacucgc

SEQ ID NO: 626072 - RNA, 19 nt, Artificial Sequence
  Description of Artificial Sequence: Synthetic oligonucleotide
aucuuuagccaaggaagca

SEQ ID NO: 626073 - RNA, 19 nt, Artificial Sequence
  Description of Artificial Sequence: Synthetic oligonucleotide
cauguggaacgcaucacaa

SEQ ID NO: 626074 - RNA, 19 nt, Artificial Sequence
  Description of Artificial Sequence: Synthetic oligonucleotide
cuacuacaugcgauuccag

SEQ ID NO: 626075 - RNA, 19 nt, Artificial Sequence
  Description of Artificial Sequence: Synthetic oligonucleotide
gucaccuaaggugggcagg

SEQ ID NO: 626076 - RNA, 19 nt, Artificial Sequence
  Description of Artificial Sequence: Synthetic oligonucleotide
ugcgccgucccuccggaac

SEQ ID NO: 626077 - RNA, 19 nt, Artificial Sequence
  Description of Artificial Sequence: Synthetic oligonucleotide
agcuugauugaaugucaau

SEQ ID NO: 626078 - RNA, 19 nt, Artificial Sequence
  Description of Artificial Sequence: Synthetic oligonucleotide
ugacacccuuggcagcuug

SEQ ID NO: 626079 - RNA, 19 nt, Artificial Sequence
  Description of Artificial Sequence: Synthetic oligonucleotide
auguggaacgcaucacaaa

SEQ ID NO: 626080 - RNA, 19 nt, Artificial Sequence
  Description of Artificial Sequence: Synthetic oligonucleotide
cagcguggggaacaccgcg

SEQ ID NO: 626081 - RNA, 19 nt, Artificial Sequence
  Description of Artificial Sequence: Synthetic oligonucleotide
caucacguaguuuugcggu

SEQ ID NO: 626082 - RNA, 19 nt, Artificial Sequence
  Description of Artificial Sequence: Synthetic oligonucleotide
aaagcccgcagagccauaa

SEQ ID NO: 626083 - RNA, 19 nt, Artificial Sequence
  Description of Artificial Sequence: Synthetic oligonucleotide
aagcucuacuacaugcgau

SEQ ID NO: 626084 - RNA, 19 nt, Artificial Sequence
  Description of Artificial Sequence: Synthetic oligonucleotide
agcguggggaacaccgcgc

SEQ ID NO: 626085 - RNA, 19 nt, Artificial Sequence
  Description of Artificial Sequence: Synthetic oligonucleotide
accguuuuccagugcuugu

SEQ ID NO: 626086 - RNA, 19 nt, Artificial Sequence
  Description of Artificial Sequence: Synthetic oligonucleotide
ccuaagggcagucaccaug

SEQ ID NO: 626087 - RNA, 19 nt, Artificial Sequence
  Description of Artificial Sequence: Synthetic oligonucleotide
aagcccgcagagccauaag

SEQ ID NO: 626088 - RNA, 19 nt, Artificial Sequence
  Description of Artificial Sequence: Synthetic oligonucleotide
ugauaucuuucuggcuggc

SEQ ID NO: 626089 - RNA, 19 nt, Artificial Sequence
  Description of Artificial Sequence: Synthetic oligonucleotide
gacauguggaacgcaucac

SEQ ID NO: 626090 - RNA, 19 nt, Artificial Sequence
  Description of Artificial Sequence: Synthetic oligonucleotide
aagcccgaaggcagagacg

SEQ ID NO: 626091 - RNA, 19 nt, Artificial Sequence
  Description of Artificial Sequence: Synthetic oligonucleotide
uguguccgggugauauuuc

SEQ ID NO: 626092 - RNA, 19 nt, Artificial Sequence
  Description of Artificial Sequence: Synthetic oligonucleotide
ccaugagguuuguugagag

SEQ ID NO: 626093 - RNA, 19 nt, Artificial Sequence
  Description of Artificial Sequence: Synthetic oligonucleotide
gaucuaguuuccaguugac

SEQ ID NO: 626094 - RNA, 19 nt, Artificial Sequence
  Description of Artificial Sequence: Synthetic oligonucleotide
ccacuagcaaccagcgugg

SEQ ID NO: 626095 - RNA, 19 nt, Artificial Sequence
  Description of Artificial Sequence: Synthetic oligonucleotide
guaguagaucaucuuauuu

SEQ ID NO: 626096 - RNA, 19 nt, Artificial Sequence
  Description of Artificial Sequence: Synthetic oligonucleotide
ucaccgaugcugucaggaa

SEQ ID NO: 626097 - RNA, 19 nt, Artificial Sequence
  Description of Artificial Sequence: Synthetic oligonucleotide
caagcgaaucuucuggucu

SEQ ID NO: 626098 - RNA, 19 nt, Artificial Sequence
  Description of Artificial Sequence: Synthetic oligonucleotide
gagauaaguguucuucauu

SEQ ID NO: 626099 - RNA, 19 nt, Artificial Sequence
  Description of Artificial Sequence: Synthetic oligonucleotide
ccaguugaccguuuuccag

SEQ ID NO: 626100 - RNA, 19 nt, Artificial Sequence
  Description of Artificial Sequence: Synthetic oligonucleotide
agagacgugucaucacgua

SEQ ID NO: 626101 - RNA, 19 nt, Artificial Sequence
  Description of Artificial Sequence: Synthetic oligonucleotide
gugacaaagauuucucguu

SEQ ID NO: 626102 - RNA, 19 nt, Artificial Sequence
  Description of Artificial Sequence: Synthetic oligonucleotide
aucacguaguuuugcgguu

SEQ ID NO: 626103 - RNA, 19 nt, Artificial Sequence
  Description of Artificial Sequence: Synthetic oligonucleotide
ccauagcuauuaauccggg

SEQ ID NO: 626104 - RNA, 19 nt, Artificial Sequence
  Description of Artificial Sequence: Synthetic oligonucleotide
aagaauagcuugagcuauu

SEQ ID NO: 626105 - RNA, 19 nt, Artificial Sequence
  Description of Artificial Sequence: Synthetic oligonucleotide
ugcugcaccuugguuccag

SEQ ID NO: 626106 - RNA, 19 nt, Artificial Sequence
  Description of Artificial Sequence: Synthetic oligonucleotide
gaacacagucuggaaaucu

SEQ ID NO: 626107 - RNA, 19 nt, Artificial Sequence
  Description of Artificial Sequence: Synthetic oligonucleotide
guugaccguuuuccagugc

SEQ ID NO: 626108 - RNA, 19 nt, Artificial Sequence
  Description of Artificial Sequence: Synthetic oligonucleotide
acagggauugucacucgcu

SEQ ID NO: 626109 - RNA, 19 nt, Artificial Sequence
  Description of Artificial Sequence: Synthetic oligonucleotide
ugcugccuacugguuagcc

SEQ ID NO: 626110 - RNA, 19 nt, Artificial Sequence
  Description of Artificial Sequence: Synthetic oligonucleotide
aggugguucagagggcucu

SEQ ID NO: 626111 - RNA, 19 nt, Artificial Sequence
  Description of Artificial Sequence: Synthetic oligonucleotide
acccggucucaaugucagc

SEQ ID NO: 626112 - RNA, 19 nt, Artificial Sequence
  Description of Artificial Sequence: Synthetic oligonucleotide
agagacgcucggcuugcga

SEQ ID NO: 626113 - RNA, 19 nt, Artificial Sequence
  Description of Artificial Sequence: Synthetic oligonucleotide
uucacaacgugugcagcuu

SEQ ID NO: 626114 - RNA, 19 nt, Artificial Sequence
  Description of Artificial Sequence: Synthetic oligonucleotide
agcgcccauggaaagcccg

SEQ ID NO: 626115 - RNA, 19 nt, Artificial Sequence
  Description of Artificial Sequence: Synthetic oligonucleotide
cuucacaacgugugcagcu

SEQ ID NO: 626116 - RNA, 19 nt, Artificial Sequence
  Description of Artificial Sequence: Synthetic oligonucleotide
cucggggucaacagaggga

SEQ ID NO: 626117 - RNA, 19 nt, Artificial Sequence
  Description of Artificial Sequence: Synthetic oligonucleotide
gacgcucggcuugcgaccc

SEQ ID NO: 626118 - RNA, 19 nt, Artificial Sequence
  Description of Artificial Sequence: Synthetic oligonucleotide
cucauacaagcccugggcu

SEQ ID NO: 626119 - RNA, 19 nt, Artificial Sequence
  Description of Artificial Sequence: Synthetic oligonucleotide
gucugcgccgucccuccgg

SEQ ID NO: 626120 - RNA, 19 nt, Artificial Sequence
  Description of Artificial Sequence: Synthetic oligonucleotide
ugaccguuuuccagugcuu

SEQ ID NO: 626121 - RNA, 19 nt, Artificial Sequence
  Description of Artificial Sequence: Synthetic oligonucleotide
augcgauuccagauuauuu

SEQ ID NO: 626122 - RNA, 19 nt, Artificial Sequence
  Description of Artificial Sequence: Synthetic oligonucleotide
ugucugcgccgucccuccg

SEQ ID NO: 626123 - RNA, 19 nt, Artificial Sequence
  Description of Artificial Sequence: Synthetic oligonucleotide
aggacguauuucagaaccu

SEQ ID NO: 626124 - RNA, 19 nt, Artificial Sequence
  Description of Artificial Sequence: Synthetic oligonucleotide
uaguuuccaguugaccguu

SEQ ID NO: 626125 - RNA, 19 nt, Artificial Sequence
  Description of Artificial Sequence: Synthetic oligonucleotide
caguugaccguuuuccagu

SEQ ID NO: 626126 - RNA, 19 nt, Artificial Sequence
  Description of Artificial Sequence: Synthetic oligonucleotide
ccucggggucaacagaggg

SEQ ID NO: 626127 - RNA, 19 nt, Artificial Sequence
  Description of Artificial Sequence: Synthetic oligonucleotide
guacuccuaauaucuggua

SEQ ID NO: 626128 - RNA, 19 nt, Artificial Sequence
  Description of Artificial Sequence: Synthetic oligonucleotide
agcaaccagcguggggaac

SEQ ID NO: 626129 - RNA, 19 nt, Artificial Sequence
  Description of Artificial Sequence: Synthetic oligonucleotide
caccacaucuccgacaugu

SEQ ID NO: 626130 - RNA, 19 nt, Artificial Sequence
  Description of Artificial Sequence: Synthetic oligonucleotide
gcuugucugggugacacca

SEQ ID NO: 626131 - RNA, 19 nt, Artificial Sequence
  Description of Artificial Sequence: Synthetic oligonucleotide
ccaacgauguugccaguac

SEQ ID NO: 626132 - RNA, 19 nt, Artificial Sequence
  Description of Artificial Sequence: Synthetic oligonucleotide
ccuucuaugcagagacgug

SEQ ID NO: 626133 - RNA, 19 nt, Artificial Sequence
  Description of Artificial Sequence: Synthetic oligonucleotide
ccuaauaucugguaauaau

SEQ ID NO: 626134 - RNA, 19 nt, Artificial Sequence
  Description of Artificial Sequence: Synthetic oligonucleotide
ggacguauuucagaaccuc

SEQ ID NO: 626135 - RNA, 19 nt, Artificial Sequence
  Description of Artificial Sequence: Synthetic oligonucleotide
gccgccacuagcaaccagc

SEQ ID NO: 626136 - RNA, 19 nt, Artificial Sequence
  Description of Artificial Sequence: Synthetic oligonucleotide
gugagcgcccauggaaagc

SEQ ID NO: 626137 - RNA, 19 nt, Artificial Sequence
  Description of Artificial Sequence: Synthetic oligonucleotide
ggaaagcccgaaggcagag

SEQ ID NO: 626138 - RNA, 19 nt, Artificial Sequence
  Description of Artificial Sequence: Synthetic oligonucleotide
guugacacccuuggcagcu

SEQ ID NO: 626139 - RNA, 19 nt, Artificial Sequence
  Description of Artificial Sequence: Synthetic oligonucleotide
gagugaaugucugcgccgu

SEQ ID NO: 626140 - RNA, 19 nt, Artificial Sequence
  Description of Artificial Sequence: Synthetic oligonucleotide
cuuacacuagcuccaggau

SEQ ID NO: 626141 - RNA, 19 nt, Artificial Sequence
  Description of Artificial Sequence: Synthetic oligonucleotide
cauccucggcauagcucag

SEQ ID NO: 626142 - RNA, 19 nt, Artificial Sequence
  Description of Artificial Sequence: Synthetic oligonucleotide
acgcaucacaaaagggccu

SEQ ID NO: 626143 - RNA, 19 nt, Artificial Sequence
  Description of Artificial Sequence: Synthetic oligonucleotide
ggcauuucgggguacuccu

SEQ ID NO: 626144 - RNA, 19 nt, Artificial Sequence
  Description of Artificial Sequence: Synthetic oligonucleotide
caccgaugcugucaggaaa

SEQ ID NO: 626145 - RNA, 19 nt, Artificial Sequence
  Description of Artificial Sequence: Synthetic oligonucleotide
gcuagaagcaagucaccua

SEQ ID NO: 626146 - RNA, 19 nt, Artificial Sequence
  Description of Artificial Sequence: Synthetic oligonucleotide
caggcucauuccccuugcc

SEQ ID NO: 626147 - RNA, 19 nt, Artificial Sequence
  Description of Artificial Sequence: Synthetic oligonucleotide
gcaagucaccuaagguggg

SEQ ID NO: 626148 - RNA, 19 nt, Artificial Sequence
  Description of Artificial Sequence: Synthetic oligonucleotide
caucuccgacauguggaac

SEQ ID NO: 626149 - RNA, 19 nt, Artificial Sequence
  Description of Artificial Sequence: Synthetic oligonucleotide
gaaagcccgaaggcagaga

SEQ ID NO: 626150 - RNA, 19 nt, Artificial Sequence
  Description of Artificial Sequence: Synthetic oligonucleotide
cggagugaaugucugcgcc

SEQ ID NO: 626151 - RNA, 19 nt, Artificial Sequence
  Description of Artificial Sequence: Synthetic oligonucleotide
agcgaaucuucuggucugu

SEQ ID NO: 626152 - RNA, 19 nt, Artificial Sequence
  Description of Artificial Sequence: Synthetic oligonucleotide
ucacuaccuaagggcaguc

SEQ ID NO: 626153 - RNA, 19 nt, Artificial Sequence
  Description of Artificial Sequence: Synthetic oligonucleotide
cacagcgcucacagguguc

SEQ ID NO: 626154 - RNA, 19 nt, Artificial Sequence
  Description of Artificial Sequence: Synthetic oligonucleotide
cuccuaauaucugguaaua

SEQ ID NO: 626155 - RNA, 19 nt, Artificial Sequence
  Description of Artificial Sequence: Synthetic oligonucleotide
gaggucggagugaaugucu

SEQ ID NO: 626156 - RNA, 19 nt, Artificial Sequence
  Description of Artificial Sequence: Synthetic oligonucleotide
ccgccacuagcaaccagcg

SEQ ID NO: 626157 - RNA, 19 nt, Artificial Sequence
  Description of Artificial Sequence: Synthetic oligonucleotide
cacuagcaaccagcguggg

SEQ ID NO: 626158 - RNA, 19 nt, Artificial Sequence
  Description of Artificial Sequence: Synthetic oligonucleotide
gggccgugagcgcccaugg

SEQ ID NO: 626159 - RNA, 19 nt, Artificial Sequence
  Description of Artificial Sequence: Synthetic oligonucleotide
gggacugcuguuccugauc

SEQ ID NO: 626160 - RNA, 19 nt, Artificial Sequence
  Description of Artificial Sequence: Synthetic oligonucleotide
caaaagggccuguauugau

SEQ ID NO: 626161 - RNA, 19 nt, Artificial Sequence
  Description of Artificial Sequence: Synthetic oligonucleotide
gcaucauauugcuuccucu

SEQ ID NO: 626162 - RNA, 19 nt, Artificial Sequence
  Description of Artificial Sequence: Synthetic oligonucleotide
auacaagcccugggcuuug

SEQ ID NO: 626163 - RNA, 19 nt, Artificial Sequence
  Description of Artificial Sequence: Synthetic oligonucleotide
ccggucucaaugucagcag

SEQ ID NO: 626164 - RNA, 19 nt, Artificial Sequence
  Description of Artificial Sequence: Synthetic oligonucleotide
ggcauccuuacagucugac

SEQ ID NO: 626165 - RNA, 19 nt, Artificial Sequence
  Description of Artificial Sequence: Synthetic oligonucleotide
cuacaugcgauuccagauu

SEQ ID NO: 626166 - RNA, 19 nt, Artificial Sequence
  Description of Artificial Sequence: Synthetic oligonucleotide
caacgauguugccaguacu

SEQ ID NO: 626167 - RNA, 19 nt, Artificial Sequence
  Description of Artificial Sequence: Synthetic oligonucleotide
cuuaagcacggccuuuaau

SEQ ID NO: 626168 - RNA, 19 nt, Artificial Sequence
  Description of Artificial Sequence: Synthetic oligonucleotide
auauuuccauuagcccaaa

SEQ ID NO: 626169 - RNA, 19 nt, Artificial Sequence
  Description of Artificial Sequence: Synthetic oligonucleotide
guuuugcgguugguaggug

SEQ ID NO: 626170 - RNA, 19 nt, Artificial Sequence
  Description of Artificial Sequence: Synthetic oligonucleotide
gcccauggaaagcccgaag

SEQ ID NO: 626171 - RNA, 19 nt, Artificial Sequence
  Description of Artificial Sequence: Synthetic oligonucleotide
cagagacgugucaucacgu

SEQ ID NO: 626172 - RNA, 19 nt, Artificial Sequence
  Description of Artificial Sequence: Synthetic oligonucleotide
gacgugucaucacguaguu

SEQ ID NO: 626173 - RNA, 19 nt, Artificial Sequence
  Description of Artificial Sequence: Synthetic oligonucleotide
agcgucccggggccgugag

SEQ ID NO: 626174 - RNA, 19 nt, Artificial Sequence
  Description of Artificial Sequence: Synthetic oligonucleotide
gccgugagcgcccauggaa

SEQ ID NO: 626175 - RNA, 19 nt, Artificial Sequence
  Description of Artificial Sequence: Synthetic oligonucleotide
accuaagggcagucaccau

SEQ ID NO: 626176 - RNA, 19 nt, Artificial Sequence
  Description of Artificial Sequence: Synthetic oligonucleotide
cagcuuaaggcuucauuuu

SEQ ID NO: 626177 - RNA, 19 nt, Artificial Sequence
  Description of Artificial Sequence: Synthetic oligonucleotide
gcucuacuacaugcgauuc

SEQ ID NO: 626178 - RNA, 19 nt, Artificial Sequence
  Description of Artificial Sequence: Synthetic oligonucleotide
guggagagucuucaccgau

SEQ ID NO: 626179 - RNA, 19 nt, Artificial Sequence
  Description of Artificial Sequence: Synthetic oligonucleotide
guccccgccgccacuagca

SEQ ID NO: 626180 - RNA, 19 nt, Artificial Sequence
  Description of Artificial Sequence: Synthetic oligonucleotide
gggguacuccuaauaucug

SEQ ID NO: 626181 - RNA, 19 nt, Artificial Sequence
  Description of Artificial Sequence: Synthetic oligonucleotide
caaccagcguggggaacac

SEQ ID NO: 626182 - RNA, 19 nt, Artificial Sequence
  Description of Artificial Sequence: Synthetic oligonucleotide
cuuacagucugaccaucuu

SEQ ID NO: 626183 - RNA, 19 nt, Artificial Sequence
  Description of Artificial Sequence: Synthetic oligonucleotide
gaaugucugcgccgucccu

SEQ ID NO: 626184 - RNA, 19 nt, Artificial Sequence
  Description of Artificial Sequence: Synthetic oligonucleotide
gagcgcccauggaaagccc

SEQ ID NO: 626185 - RNA, 19 nt, Artificial Sequence
  Description of Artificial Sequence: Synthetic oligonucleotide
guuuccaguugaccguuuu

SEQ ID NO: 626186 - RNA, 19 nt, Artificial Sequence
  Description of Artificial Sequence: Synthetic oligonucleotide
cauuagcccaaaggccaca

SEQ ID NO: 626187 - RNA, 19 nt, Artificial Sequence
  Description of Artificial Sequence: Synthetic oligonucleotide
acguaguuuugcgguuggu

SEQ ID NO: 626188 - RNA, 19 nt, Artificial Sequence
  Description of Artificial Sequence: Synthetic oligonucleotide
cuuucccagacaagcgaau

SEQ ID NO: 626189 - RNA, 19 nt, Artificial Sequence
  Description of Artificial Sequence: Synthetic oligonucleotide
ggcuuuucugcacccugaa

SEQ ID NO: 626190 - RNA, 19 nt, Artificial Sequence
  Description of Artificial Sequence: Synthetic oligonucleotide
cccaaaggccacacaucac

SEQ ID NO: 626191 - RNA, 19 nt, Artificial Sequence
  Description of Artificial Sequence: Synthetic oligonucleotide
gcgguugguaggugguuca

SEQ ID NO: 626192 - RNA, 19 nt, Artificial Sequence
  Description of Artificial Sequence: Synthetic oligonucleotide
gguugguaggugguucaga

SEQ ID NO: 626193 - RNA, 19 nt, Artificial Sequence
  Description of Artificial Sequence: Synthetic oligonucleotide
ccgacauguggaacgcauc

SEQ ID NO: 626194 - RNA, 19 nt, Artificial Sequence
  Description of Artificial Sequence: Synthetic oligonucleotide
cacuaccuaagggcaguca

SEQ ID NO: 626195 - RNA, 19 nt, Artificial Sequence
  Description of Artificial Sequence: Synthetic oligonucleotide
caucacaaaagggccugua

SEQ ID NO: 626196 - RNA, 19 nt, Artificial Sequence
  Description of Artificial Sequence: Synthetic oligonucleotide
ggugguucagagggcucug

SEQ ID NO: 626197 - RNA, 19 nt, Artificial Sequence
  Description of Artificial Sequence: Synthetic oligonucleotide
caugcgauuccagauuauu

SEQ ID NO: 626198 - RNA, 19 nt, Artificial Sequence
  Description of Artificial Sequence: Synthetic oligonucleotide
ggcugaucgaacacagucu

SEQ ID NO: 626199 - RNA, 19 nt, Artificial Sequence
  Description of Artificial Sequence: Synthetic oligonucleotide
gcagagacgcucggcuugc

SEQ ID NO: 626200 - RNA, 19 nt, Artificial Sequence
  Description of Artificial Sequence: Synthetic oligonucleotide
cgggguacuccuaauaucu

SEQ ID NO: 626201 - RNA, 19 nt, Artificial Sequence
  Description of Artificial Sequence: Synthetic oligonucleotide
uugcgguugguaggugguu

SEQ ID NO: 626202 - RNA, 19 nt, Artificial Sequence
  Description of Artificial Sequence: Synthetic oligonucleotide
acccaacgauguugccagu

SEQ ID NO: 626203 - RNA, 19 nt, Artificial Sequence
  Description of Artificial Sequence: Synthetic oligonucleotide
ccagacaagcgaaucuucu

SEQ ID NO: 626204 - RNA, 19 nt, Artificial Sequence
  Description of Artificial Sequence: Synthetic oligonucleotide
ggaucgucacauugacugu

SEQ ID NO: 626205 - RNA, 19 nt, Artificial Sequence
  Description of Artificial Sequence: Synthetic oligonucleotide
cauacaagcccugggcuuu

SEQ ID NO: 626206 - RNA, 19 nt, Artificial Sequence
  Description of Artificial Sequence: Synthetic oligonucleotide
cagagacgcucggcuugcg

SEQ ID NO: 626207 - RNA, 19 nt, Artificial Sequence
  Description of Artificial Sequence: Synthetic oligonucleotide
cgucacauugacugucuca

SEQ ID NO: 626208 - RNA, 19 nt, Artificial Sequence
  Description of Artificial Sequence: Synthetic oligonucleotide
gccgcaguaguggcagugc

SEQ ID NO: 626209 - RNA, 19 nt, Artificial Sequence
  Description of Artificial Sequence: Synthetic oligonucleotide
ccguuuuccagugcuuguc

SEQ ID NO: 626210 - RNA, 19 nt, Artificial Sequence
  Description of Artificial Sequence: Synthetic oligonucleotide
cgcaucacaaaagggccug

SEQ ID NO: 626211 - RNA, 19 nt, Artificial Sequence
  Description of Artificial Sequence: Synthetic oligonucleotide
cagggauugucacucgcuu

SEQ ID NO: 626212 - RNA, 19 nt, Artificial Sequence
  Description of Artificial Sequence: Synthetic oligonucleotide
gcugccuacugguuagccu

SEQ ID NO: 626213 - RNA, 19 nt, Artificial Sequence
  Description of Artificial Sequence: Synthetic oligonucleotide
uccggaacacagggcuuuu

SEQ ID NO: 626214 - RNA, 19 nt, Artificial Sequence
  Description of Artificial Sequence: Synthetic oligonucleotide
ggcuugcgacccaacgaug

SEQ ID NO: 626215 - RNA, 19 nt, Artificial Sequence
  Description of Artificial Sequence: Synthetic oligonucleotide
ggacacccggucucaaugu

SEQ ID NO: 626216 - RNA, 19 nt, Artificial Sequence
  Description of Artificial Sequence: Synthetic oligonucleotide
acgugucaucacguaguuu

SEQ ID NO: 626217 - RNA, 19 nt, Artificial Sequence
  Description of Artificial Sequence: Synthetic oligonucleotide
gcuugcgacccaacgaugu

SEQ ID NO: 626218 - RNA, 19 nt, Artificial Sequence
  Description of Artificial Sequence: Synthetic oligonucleotide
gcgcucacagguguccaug

SEQ ID NO: 626219 - RNA, 19 nt, Artificial Sequence
  Description of Artificial Sequence: Synthetic oligonucleotide
uugacacccuuggcagcuu

SEQ ID NO: 626220 - RNA, 19 nt, Artificial Sequence
  Description of Artificial Sequence: Synthetic oligonucleotide
aguuuccaguugaccguuu

SEQ ID NO: 626221 - RNA, 19 nt, Artificial Sequence
  Description of Artificial Sequence: Synthetic oligonucleotide
gaggcugaucgaacacagu

SEQ ID NO: 626222 - RNA, 19 nt, Artificial Sequence
  Description of Artificial Sequence: Synthetic oligonucleotide
ugcuggccccaggaucaaa

SEQ ID NO: 626223 - RNA, 19 nt, Artificial Sequence
  Description of Artificial Sequence: Synthetic oligonucleotide
ggggccgugagcgcccaug

SEQ ID NO: 626224 - RNA, 19 nt, Artificial Sequence
  Description of Artificial Sequence: Synthetic oligonucleotide
gcgacccaacgauguugcc

SEQ ID NO: 626225 - RNA, 19 nt, Artificial Sequence
  Description of Artificial Sequence: Synthetic oligonucleotide
cuugcgacccaacgauguu

SEQ ID NO: 626226 - RNA, 19 nt, Artificial Sequence
  Description of Artificial Sequence: Synthetic oligonucleotide
gcgccgucccuccggaaca

SEQ ID NO: 626227 - RNA, 19 nt, Artificial Sequence
  Description of Artificial Sequence: Synthetic oligonucleotide
caccauagccauagcuauu

SEQ ID NO: 626228 - RNA, 19 nt, Artificial Sequence
  Description of Artificial Sequence: Synthetic oligonucleotide
cacaaggaguugugaugau

SEQ ID NO: 626229 - RNA, 19 nt, Artificial Sequence
  Description of Artificial Sequence: Synthetic oligonucleotide
cagcgcucacaggugucca

SEQ ID NO: 626230 - RNA, 19 nt, Artificial Sequence
  Description of Artificial Sequence: Synthetic oligonucleotide
cuccgacauguggaacgca

SEQ ID NO: 626231 - RNA, 19 nt, Artificial Sequence
  Description of Artificial Sequence: Synthetic oligonucleotide
cgaacacagucuggaaauc

SEQ ID NO: 626232 - RNA, 19 nt, Artificial Sequence
  Description of Artificial Sequence: Synthetic oligonucleotide
cgacccaacgauguugcca

SEQ ID NO: 626233 - RNA, 19 nt, Artificial Sequence
  Description of Artificial Sequence: Synthetic oligonucleotide
gugguucagagggcucugu

SEQ ID NO: 626234 - RNA, 19 nt, Artificial Sequence
  Description of Artificial Sequence: Synthetic oligonucleotide
cguggggaacaccgcgcag

SEQ ID NO: 626235 - RNA, 19 nt, Artificial Sequence
  Description of Artificial Sequence: Synthetic oligonucleotide
ccccgccgccacuagcaac

SEQ ID NO: 626236 - RNA, 19 nt, Artificial Sequence
  Description of Artificial Sequence: Synthetic oligonucleotide
ggccgugagcgcccaugga

SEQ ID NO: 626237 - RNA, 19 nt, Artificial Sequence
  Description of Artificial Sequence: Synthetic oligonucleotide
ccccaggaucaaagcccgc

SEQ ID NO: 626238 - RNA, 19 nt, Artificial Sequence
  Description of Artificial Sequence: Synthetic oligonucleotide
caaagcccgcagagccaua

SEQ ID NO: 626239 - RNA, 19 nt, Artificial Sequence
  Description of Artificial Sequence: Synthetic oligonucleotide
gcgcccauggaaagcccga

SEQ ID NO: 626240 - RNA, 19 nt, Artificial Sequence
  Description of Artificial Sequence: Synthetic oligonucleotide
cccaacgauguugccagua

SEQ ID NO: 626241 - RNA, 19 nt, Artificial Sequence
  Description of Artificial Sequence: Synthetic oligonucleotide
gggccuguauugauaguuu

SEQ ID NO: 626242 - RNA, 19 nt, Artificial Sequence
  Description of Artificial Sequence: Synthetic oligonucleotide
cgguugguaggugguucag

SEQ ID NO: 626243 - RNA, 19 nt, Artificial Sequence
  Description of Artificial Sequence: Synthetic oligonucleotide
gaaucccagcagggaucgu

SEQ ID NO: 626244 - RNA, 19 nt, Artificial Sequence
  Description of Artificial Sequence: Synthetic oligonucleotide
gcgucccggggccgugagc

SEQ ID NO: 626245 - RNA, 19 nt, Artificial Sequence
  Description of Artificial Sequence: Synthetic oligonucleotide
gugcugcaccuugguucca

SEQ ID NO: 626246 - RNA, 19 nt, Artificial Sequence
  Description of Artificial Sequence: Synthetic oligonucleotide
cccuugccaucacagcgcu

SEQ ID NO: 626247 - RNA, 19 nt, Artificial Sequence
  Description of Artificial Sequence: Synthetic oligonucleotide
ccgcaguaguggcagugcu

SEQ ID NO: 626248 - RNA, 19 nt, Artificial Sequence
  Description of Artificial Sequence: Synthetic oligonucleotide
cggcuugcgacccaacgau

SEQ ID NO: 626249 - RNA, 19 nt, Artificial Sequence
  Description of Artificial Sequence: Synthetic oligonucleotide
cagcgucccggggccguga

SEQ ID NO: 626250 - RNA, 19 nt, Artificial Sequence
  Description of Artificial Sequence: Synthetic oligonucleotide
gcggacacccggucucaau

SEQ ID NO: 626251 - RNA, 19 nt, Artificial Sequence
  Description of Artificial Sequence: Synthetic oligonucleotide
cgccgccacuagcaaccag

SEQ ID NO: 626252 - RNA, 19 nt, Artificial Sequence
  Description of Artificial Sequence: Synthetic oligonucleotide
ggcggacacccggucucaa

SEQ ID NO: 626253 - RNA, 19 nt, Artificial Sequence
  Description of Artificial Sequence: Synthetic oligonucleotide
cgccgucccuccggaacac

SEQ ID NO: 626254 - RNA, 19 nt, Artificial Sequence
  Description of Artificial Sequence: Synthetic oligonucleotide
cggggccgugagcgcccau

SEQ ID NO: 626255 - RNA, 19 nt, Artificial Sequence
  Description of Artificial Sequence: Synthetic oligonucleotide
ugaaaggccagucugaaca

SEQ ID NO: 626256 - RNA, 19 nt, Artificial Sequence
  Description of Artificial Sequence: Synthetic oligonucleotide
cuuucuuugucuuaguggc

SEQ ID NO: 626257 - RNA, 19 nt, Artificial Sequence
  Description of Artificial Sequence: Synthetic oligonucleotide
auguccuuuaauugcaggc

SEQ ID NO: 626258 - RNA, 19 nt, Artificial Sequence
  Description of Artificial Sequence: Synthetic oligonucleotide
ucuaggauacugcuaaacc

SEQ ID NO: 626259 - RNA, 19 nt, Artificial Sequence
  Description of Artificial Sequence: Synthetic oligonucleotide
uuuagaugucgaaaucagg

SEQ ID NO: 626260 - RNA, 19 nt, Artificial Sequence
  Description of Artificial Sequence: Synthetic oligonucleotide
ugucagugggccuucaugg

SEQ ID NO: 626261 - RNA, 19 nt, Artificial Sequence
  Description of Artificial Sequence: Synthetic oligonucleotide
cuaggauacugcuaaaccc

SEQ ID NO: 626262 - RNA, 19 nt, Artificial Sequence
  Description of Artificial Sequence: Synthetic oligonucleotide
aaaaccggggauguggugg

SEQ ID NO: 626263 - RNA, 19 nt, Artificial Sequence
  Description of Artificial Sequence: Synthetic oligonucleotide
uccucaaugagguagccgc

SEQ ID NO: 626264 - RNA, 19 nt, Artificial Sequence
  Description of Artificial Sequence: Synthetic oligonucleotide
ucaaccucgaccuuuagau

SEQ ID NO: 626265 - RNA, 19 nt, Artificial Sequence
  Description of Artificial Sequence: Synthetic oligonucleotide
aaccucgaccuuuagaugu

SEQ ID NO: 626266 - RNA, 19 nt, Artificial Sequence
  Description of Artificial Sequence: Synthetic oligonucleotide
aggugagucaaguccaggc

SEQ ID NO: 626267 - RNA, 19 nt, Artificial Sequence
  Description of Artificial Sequence: Synthetic oligonucleotide
ugaggauacgcuccguccg

SEQ ID NO: 626268 - RNA, 19 nt, Artificial Sequence
  Description of Artificial Sequence: Synthetic oligonucleotide
uucucuucaugaaaggcca

SEQ ID NO: 626269 - RNA, 19 nt, Artificial Sequence
  Description of Artificial Sequence: Synthetic oligonucleotide
ugacauagaaagcuuugug

SEQ ID NO: 626270 - RNA, 19 nt, Artificial Sequence
  Description of Artificial Sequence: Synthetic oligonucleotide
cuuuagaugucgaaaucag

SEQ ID NO: 626271 - RNA, 19 nt, Artificial Sequence
  Description of Artificial Sequence: Synthetic oligonucleotide
ucuaaggcaaaugacuggc

SEQ ID NO: 626272 - RNA, 19 nt, Artificial Sequence
  Description of Artificial Sequence: Synthetic oligonucleotide
uuucaucaagcgaucgagg

SEQ ID NO: 626273 - RNA, 19 nt, Artificial Sequence
  Description of Artificial Sequence: Synthetic oligonucleotide
aagcgaucgaggaauaggg

SEQ ID NO: 626274 - RNA, 19 nt, Artificial Sequence
  Description of Artificial Sequence: Synthetic oligonucleotide
acauagaaagcuuugugau

SEQ ID NO: 626275 - RNA, 19 nt, Artificial Sequence
  Description of Artificial Sequence: Synthetic oligonucleotide
uuuaauugcaggcgccggc

SEQ ID NO: 626276 - RNA, 19 nt, Artificial Sequence
  Description of Artificial Sequence: Synthetic oligonucleotide
gucgcgaacagcuugguug

SEQ ID NO: 626277 - RNA, 19 nt, Artificial Sequence
  Description of Artificial Sequence: Synthetic oligonucleotide
agcacguggaccucgacag

SEQ ID NO: 626278 - RNA, 19 nt, Artificial Sequence
  Description of Artificial Sequence: Synthetic oligonucleotide
acucgcucagcauaggguc

SEQ ID NO: 626279 - RNA, 19 nt, Artificial Sequence
  Description of Artificial Sequence: Synthetic oligonucleotide
uucaucaagcgaucgagga

SEQ ID NO: 626280 - RNA, 19 nt, Artificial Sequence
  Description of Artificial Sequence: Synthetic oligonucleotide
uccauucaggguauaaaac

SEQ ID NO: 626281 - RNA, 19 nt, Artificial Sequence
  Description of Artificial Sequence: Synthetic oligonucleotide
cagcacaucgccaaucucc

SEQ ID NO: 626282 - RNA, 19 nt, Artificial Sequence
  Description of Artificial Sequence: Synthetic oligonucleotide
accucgacagccuugucuc

SEQ ID NO: 626283 - RNA, 19 nt, Artificial Sequence
  Description of Artificial Sequence: Synthetic oligonucleotide
uugucuuaguggcucaucu

SEQ ID NO: 626284 - RNA, 19 nt, Artificial Sequence
  Description of Artificial Sequence: Synthetic oligonucleotide
aucgaaccgggccagcagc

SEQ ID NO: 626285 - RNA, 19 nt, Artificial Sequence
  Description of Artificial Sequence: Synthetic oligonucleotide
gaaaucaggagcagguggc

SEQ ID NO: 626286 - RNA, 19 nt, Artificial Sequence
  Description of Artificial Sequence: Synthetic oligonucleotide
uucaggguauaaaaccaga

SEQ ID NO: 626287 - RNA, 19 nt, Artificial Sequence
  Description of Artificial Sequence: Synthetic oligonucleotide
cugaaaaccggggaugugg

SEQ ID NO: 626288 - RNA, 19 nt, Artificial Sequence
  Description of Artificial Sequence: Synthetic oligonucleotide
uuacccgccaugucagugg

SEQ ID NO: 626289 - RNA, 19 nt, Artificial Sequence
  Description of Artificial Sequence: Synthetic oligonucleotide
ugagucaaguccaggcgcc

SEQ ID NO: 626290 - RNA, 19 nt, Artificial Sequence
  Description of Artificial Sequence: Synthetic oligonucleotide
auagggucacugcucugcc

SEQ ID NO: 626291 - RNA, 19 nt, Artificial Sequence
  Description of Artificial Sequence: Synthetic oligonucleotide
ucgggaggagaucuucugg

SEQ ID NO: 626292 - RNA, 19 nt, Artificial Sequence
  Description of Artificial Sequence: Synthetic oligonucleotide
ucucaggcggcaaaauucu

SEQ ID NO: 626293 - RNA, 19 nt, Artificial Sequence
  Description of Artificial Sequence: Synthetic oligonucleotide
accuuuagaugucgaaauc

SEQ ID NO: 626294 - RNA, 19 nt, Artificial Sequence
  Description of Artificial Sequence: Synthetic oligonucleotide
ucgccaaucuccucaauga

SEQ ID NO: 626295 - RNA, 19 nt, Artificial Sequence
  Description of Artificial Sequence: Synthetic oligonucleotide
agcaguaacaggucgucca

SEQ ID NO: 626296 - RNA, 19 nt, Artificial Sequence
  Description of Artificial Sequence: Synthetic oligonucleotide
aguaacaggucguccagca

SEQ ID NO: 626297 - RNA, 19 nt, Artificial Sequence
  Description of Artificial Sequence: Synthetic oligonucleotide
cuuaguggcucaucugacc

SEQ ID NO: 626298 - RNA, 19 nt, Artificial Sequence
  Description of Artificial Sequence: Synthetic oligonucleotide
ccauucaggguauaaaacc

SEQ ID NO: 626299 - RNA, 19 nt, Artificial Sequence
  Description of Artificial Sequence: Synthetic oligonucleotide
cauucaggguauaaaacca

SEQ ID NO: 626300 - RNA, 19 nt, Artificial Sequence
  Description of Artificial Sequence: Synthetic oligonucleotide
ucuugcgcucugaugaugu

SEQ ID NO: 626301 - RNA, 19 nt, Artificial Sequence
  Description of Artificial Sequence: Synthetic oligonucleotide
cauguccuuuaauugcagg

SEQ ID NO: 626302 - RNA, 19 nt, Artificial Sequence
  Description of Artificial Sequence: Synthetic oligonucleotide
uguguucugcccaaugcuc

SEQ ID NO: 626303 - RNA, 19 nt, Artificial Sequence
  Description of Artificial Sequence: Synthetic oligonucleotide
caugucgcgaacagcuugg

SEQ ID NO: 626304 - RNA, 19 nt, Artificial Sequence
  Description of Artificial Sequence: Synthetic oligonucleotide
ucuccguuucaucaagcga

SEQ ID NO: 626305 - RNA, 19 nt, Artificial Sequence
  Description of Artificial Sequence: Synthetic oligonucleotide
cugguaauccuugagccgc

SEQ ID NO: 626306 - RNA, 19 nt, Artificial Sequence
  Description of Artificial Sequence: Synthetic oligonucleotide
uccuuuaauugcaggcgcc

SEQ ID NO: 626307 - RNA, 19 nt, Artificial Sequence
  Description of Artificial Sequence: Synthetic oligonucleotide
aucgccaaucuccucaaug

SEQ ID NO: 626308 - RNA, 19 nt, Artificial Sequence
  Description of Artificial Sequence: Synthetic oligonucleotide
agggagugcaccucaauga

SEQ ID NO: 626309 - RNA, 19 nt, Artificial Sequence
  Description of Artificial Sequence: Synthetic oligonucleotide
caggcggcaaaauucuucc

SEQ ID NO: 626310 - RNA, 19 nt, Artificial Sequence
  Description of Artificial Sequence: Synthetic oligonucleotide
aaugacuggcggcugcaga

SEQ ID NO: 626311 - RNA, 19 nt, Artificial Sequence
  Description of Artificial Sequence: Synthetic oligonucleotide
cuugucucucguuacccgc

SEQ ID NO: 626312 - RNA, 19 nt, Artificial Sequence
  Description of Artificial Sequence: Synthetic oligonucleotide
caagcgaucgaggaauagg

SEQ ID NO: 626313 - RNA, 19 nt, Artificial Sequence
  Description of Artificial Sequence: Synthetic oligonucleotide
guauaaaaccagagcaaag

SEQ ID NO: 626314 - RNA, 19 nt, Artificial Sequence
  Description of Artificial Sequence: Synthetic oligonucleotide
ucguuacccgccaugucag

SEQ ID NO: 626315 - RNA, 19 nt, Artificial Sequence
  Description of Artificial Sequence: Synthetic oligonucleotide
cauagaaagcuuugugauc

SEQ ID NO: 626316 - RNA, 19 nt, Artificial Sequence
  Description of Artificial Sequence: Synthetic oligonucleotide
agcucauauaucugggccu

SEQ ID NO: 626317 - RNA, 19 nt, Artificial Sequence
  Description of Artificial Sequence: Synthetic oligonucleotide
agcagggauucucgggugc

SEQ ID NO: 626318 - RNA, 19 nt, Artificial Sequence
  Description of Artificial Sequence: Synthetic oligonucleotide
ucuuaguggcucaucugac

SEQ ID NO: 626319 - RNA, 19 nt, Artificial Sequence
  Description of Artificial Sequence: Synthetic oligonucleotide
cucccuuccggucuguagg

SEQ ID NO: 626320 - RNA, 19 nt, Artificial Sequence
  Description of Artificial Sequence: Synthetic oligonucleotide
cuaaggcaaaugacuggcg

SEQ ID NO: 626321 - RNA, 19 nt, Artificial Sequence
  Description of Artificial Sequence: Synthetic oligonucleotide
aaggcauacccaggccucc

SEQ ID NO: 626322 - RNA, 19 nt, Artificial Sequence
  Description of Artificial Sequence: Synthetic oligonucleotide
ucaggcggcaaaauucuuc

SEQ ID NO: 626323 - RNA, 19 nt, Artificial Sequence
  Description of Artificial Sequence: Synthetic oligonucleotide
ggugagucaaguccaggcg

SEQ ID NO: 626324 - RNA, 19 nt, Artificial Sequence
  Description of Artificial Sequence: Synthetic oligonucleotide
ucaucaagcgaucgaggaa

SEQ ID NO: 626325 - RNA, 19 nt, Artificial Sequence
  Description of Artificial Sequence: Synthetic oligonucleotide
uaggcaauacugacauggc

SEQ ID NO: 626326 - RNA, 19 nt, Artificial Sequence
  Description of Artificial Sequence: Synthetic oligonucleotide
ggccagucugaacagagcg

SEQ ID NO: 626327 - RNA, 19 nt, Artificial Sequence
  Description of Artificial Sequence: Synthetic oligonucleotide
gucuuaguggcucaucuga

SEQ ID NO: 626328 - RNA, 19 nt, Artificial Sequence
  Description of Artificial Sequence: Synthetic oligonucleotide
gaggaauagggagugcacc

SEQ ID NO: 626329 - RNA, 19 nt, Artificial Sequence
  Description of Artificial Sequence: Synthetic oligonucleotide
aaucaggagcagguggcuc

SEQ ID NO: 626330 - RNA, 19 nt, Artificial Sequence
  Description of Artificial Sequence: Synthetic oligonucleotide
gguaaggcggagcacaggc

SEQ ID NO: 626331 - RNA, 19 nt, Artificial Sequence
  Description of Artificial Sequence: Synthetic oligonucleotide
aauacugacauggccugaa

SEQ ID NO: 626332 - RNA, 19 nt, Artificial Sequence
  Description of Artificial Sequence: Synthetic oligonucleotide
agaaucucccggcagcacu

SEQ ID NO: 626333 - RNA, 19 nt, Artificial Sequence
  Description of Artificial Sequence: Synthetic oligonucleotide
caccucaaugagcucaucc

SEQ ID NO: 626334 - RNA, 19 nt, Artificial Sequence
  Description of Artificial Sequence: Synthetic oligonucleotide
gauucucgggugcugcuug

SEQ ID NO: 626335 - RNA, 19 nt, Artificial Sequence
  Description of Artificial Sequence: Synthetic oligonucleotide
uugguugacauggugcaga

SEQ ID NO: 626336 - RNA, 19 nt, Artificial Sequence
  Description of Artificial Sequence: Synthetic oligonucleotide
ugaaucugcacugggccug

SEQ ID NO: 626337 - RNA, 19 nt, Artificial Sequence
  Description of Artificial Sequence: Synthetic oligonucleotide
cucagcauagggucacugc

SEQ ID NO: 626338 - RNA, 19 nt, Artificial Sequence
  Description of Artificial Sequence: Synthetic oligonucleotide
augucagugggccuucaug

SEQ ID NO: 626339 - RNA, 19 nt, Artificial Sequence
  Description of Artificial Sequence: Synthetic oligonucleotide
cagagcaaaggcacuuggg

SEQ ID NO: 626340 - RNA, 19 nt, Artificial Sequence
  Description of Artificial Sequence: Synthetic oligonucleotide
uagaaggcauacccaggcc

SEQ ID NO: 626341 - RNA, 19 nt, Artificial Sequence
  Description of Artificial Sequence: Synthetic oligonucleotide
uuaauugcaggcgccggca

SEQ ID NO: 626342 - RNA, 19 nt, Artificial Sequence
  Description of Artificial Sequence: Synthetic oligonucleotide
ugucuuaguggcucaucug

SEQ ID NO: 626343 - RNA, 19 nt, Artificial Sequence
  Description of Artificial Sequence: Synthetic oligonucleotide
ugcccaaugcucugcagca

SEQ ID NO: 626344 - RNA, 19 nt, Artificial Sequence
  Description of Artificial Sequence: Synthetic oligonucleotide
ucgaggaauagggagugca

SEQ ID NO: 626345 - RNA, 19 nt, Artificial Sequence
  Description of Artificial Sequence: Synthetic oligonucleotide
ucgacagccuugucucucg

SEQ ID NO: 626346 - RNA, 19 nt, Artificial Sequence
  Description of Artificial Sequence: Synthetic oligonucleotide
gaucaguggccaccucucg

SEQ ID NO: 626347 - RNA, 19 nt, Artificial Sequence
  Description of Artificial Sequence: Synthetic oligonucleotide
ugaucaguggccaccucuc

SEQ ID NO: 626348 - RNA, 19 nt, Artificial Sequence
  Description of Artificial Sequence: Synthetic oligonucleotide
aacagagcgcuccggggca

SEQ ID NO: 626349 - RNA, 19 nt, Artificial Sequence
  Description of Artificial Sequence: Synthetic oligonucleotide
caccauaggcaauacugac

SEQ ID NO: 626350 - RNA, 19 nt, Artificial Sequence
  Description of Artificial Sequence: Synthetic oligonucleotide
ugaguguccggcuguguga

SEQ ID NO: 626351 - RNA, 19 nt, Artificial Sequence
  Description of Artificial Sequence: Synthetic oligonucleotide
cuuuaauugcaggcgccgg

SEQ ID NO: 626352 - RNA, 19 nt, Artificial Sequence
  Description of Artificial Sequence: Synthetic oligonucleotide
caucucucggccuccagug

SEQ ID NO: 626353 - RNA, 19 nt, Artificial Sequence
  Description of Artificial Sequence: Synthetic oligonucleotide
uacuuggugagccgcugca

SEQ ID NO: 626354 - RNA, 19 nt, Artificial Sequence
  Description of Artificial Sequence: Synthetic oligonucleotide
ucgcgaacagcuugguuga

SEQ ID NO: 626355 - RNA, 19 nt, Artificial Sequence
  Description of Artificial Sequence: Synthetic oligonucleotide
gcagucucagugaugaggg

SEQ ID NO: 626356 - RNA, 19 nt, Artificial Sequence
  Description of Artificial Sequence: Synthetic oligonucleotide
gauacgcuccguccgggug

SEQ ID NO: 626357 - RNA, 19 nt, Artificial Sequence
  Description of Artificial Sequence: Synthetic oligonucleotide
cuugagccgcagcaggucc

SEQ ID NO: 626358 - RNA, 19 nt, Artificial Sequence
  Description of Artificial Sequence: Synthetic oligonucleotide
gcgaucgaggaauagggag

SEQ ID NO: 626359 - RNA, 19 nt, Artificial Sequence
  Description of Artificial Sequence: Synthetic oligonucleotide
ucuucaugaaaggccaguc

SEQ ID NO: 626360 - RNA, 19 nt, Artificial Sequence
  Description of Artificial Sequence: Synthetic oligonucleotide
cugcccaaugcucugcagc

SEQ ID NO: 626361 - RNA, 19 nt, Artificial Sequence
  Description of Artificial Sequence: Synthetic oligonucleotide
uacccgccaugucaguggg

SEQ ID NO: 626362 - RNA, 19 nt, Artificial Sequence
  Description of Artificial Sequence: Synthetic oligonucleotide
ucccuuccggucuguaggg

SEQ ID NO: 626363 - RNA, 19 nt, Artificial Sequence
  Description of Artificial Sequence: Synthetic oligonucleotide
acagaaccgaggcuccuug

SEQ ID NO: 626364 - RNA, 19 nt, Artificial Sequence
  Description of Artificial Sequence: Synthetic oligonucleotide
ucuuugucuuaguggcuca

SEQ ID NO: 626365 - RNA, 19 nt, Artificial Sequence
  Description of Artificial Sequence: Synthetic oligonucleotide
aacucgcucagcauagggu

SEQ ID NO: 626366 - RNA, 19 nt, Artificial Sequence
  Description of Artificial Sequence: Synthetic oligonucleotide
cucguuacccgccauguca

SEQ ID NO: 626367 - RNA, 19 nt, Artificial Sequence
  Description of Artificial Sequence: Synthetic oligonucleotide
acagccuugucucucguua

SEQ ID NO: 626368 - RNA, 19 nt, Artificial Sequence
  Description of Artificial Sequence: Synthetic oligonucleotide
ucagugggccuucauggau

SEQ ID NO: 626369 - RNA, 19 nt, Artificial Sequence
  Description of Artificial Sequence: Synthetic oligonucleotide
auggccugaaaaccgggga

SEQ ID NO: 626370 - RNA, 19 nt, Artificial Sequence
  Description of Artificial Sequence: Synthetic oligonucleotide
ucuaggcugagcagguuuu

SEQ ID NO: 626371 - RNA, 19 nt, Artificial Sequence
  Description of Artificial Sequence: Synthetic oligonucleotide
ucgaccuuuagaugucgaa

SEQ ID NO: 626372 - RNA, 19 nt, Artificial Sequence
  Description of Artificial Sequence: Synthetic oligonucleotide
ccguaggugagucaagucc

SEQ ID NO: 626373 - RNA, 19 nt, Artificial Sequence
  Description of Artificial Sequence: Synthetic oligonucleotide
ucgaaaucaggagcaggug

SEQ ID NO: 626374 - RNA, 19 nt, Artificial Sequence
  Description of Artificial Sequence: Synthetic oligonucleotide
aaaugacuggcggcugcag

SEQ ID NO: 626375 - RNA, 19 nt, Artificial Sequence
  Description of Artificial Sequence: Synthetic oligonucleotide
gaccuuuagaugucgaaau

SEQ ID NO: 626376 - RNA, 19 nt, Artificial Sequence
  Description of Artificial Sequence: Synthetic oligonucleotide
gaaaaccggggauguggug

SEQ ID NO: 626377 - RNA, 19 nt, Artificial Sequence
  Description of Artificial Sequence: Synthetic oligonucleotide
ucaagcgaucgaggaauag

SEQ ID NO: 626378 - RNA, 19 nt, Artificial Sequence
  Description of Artificial Sequence: Synthetic oligonucleotide
agucaaguccaggcgccgc

SEQ ID NO: 626379 - RNA, 19 nt, Artificial Sequence
  Description of Artificial Sequence: Synthetic oligonucleotide
uucccgguggucagggcug

SEQ ID NO: 626380 - RNA, 19 nt, Artificial Sequence
  Description of Artificial Sequence: Synthetic oligonucleotide
gccgcugcaucucaguggg

SEQ ID NO: 626381 - RNA, 19 nt, Artificial Sequence
  Description of Artificial Sequence: Synthetic oligonucleotide
ucucgggucauggcagagg

SEQ ID NO: 626382 - RNA, 19 nt, Artificial Sequence
  Description of Artificial Sequence: Synthetic oligonucleotide
gucgcugaggauacgcucc

SEQ ID NO: 626383 - RNA, 19 nt, Artificial Sequence
  Description of Artificial Sequence: Synthetic oligonucleotide
aaucgggaggagaucuucu

SEQ ID NO: 626384 - RNA, 19 nt, Artificial Sequence
  Description of Artificial Sequence: Synthetic oligonucleotide
gguauaaaaccagagcaaa

SEQ ID NO: 626385 - RNA, 19 nt, Artificial Sequence
  Description of Artificial Sequence: Synthetic oligonucleotide
ccaagcgaaggcaggaggg

SEQ ID NO: 626386 - RNA, 19 nt, Artificial Sequence
  Description of Artificial Sequence: Synthetic oligonucleotide
uccguuucaucaagcgauc

SEQ ID NO: 626387 - RNA, 19 nt, Artificial Sequence
  Description of Artificial Sequence: Synthetic oligonucleotide
cacguggaccucgacagcc

SEQ ID NO: 626388 - RNA, 19 nt, Artificial Sequence
  Description of Artificial Sequence: Synthetic oligonucleotide
cgaaaucaggagcaggugg

SEQ ID NO: 626389 - RNA, 19 nt, Artificial Sequence
  Description of Artificial Sequence: Synthetic oligonucleotide
gaggucgcugaggauacgc

SEQ ID NO: 626390 - RNA, 19 nt, Artificial Sequence
  Description of Artificial Sequence: Synthetic oligonucleotide
uuucucccguuccgcaggc

SEQ ID NO: 626391 - RNA, 19 nt, Artificial Sequence
  Description of Artificial Sequence: Synthetic oligonucleotide
auacgcuccguccgggugu

SEQ ID NO: 626392 - RNA, 19 nt, Artificial Sequence
  Description of Artificial Sequence: Synthetic oligonucleotide
ugucucuagaaggcauacc

SEQ ID NO: 626393 - RNA, 19 nt, Artificial Sequence
  Description of Artificial Sequence: Synthetic oligonucleotide
ugucucucguuacccgcca

SEQ ID NO: 626394 - RNA, 19 nt, Artificial Sequence
  Description of Artificial Sequence: Synthetic oligonucleotide
uaauugcaggcgccggcac

SEQ ID NO: 626395 - RNA, 19 nt, Artificial Sequence
  Description of Artificial Sequence: Synthetic oligonucleotide
gcucuaaggcaaaugacug

SEQ ID NO: 626396 - RNA, 19 nt, Artificial Sequence
  Description of Artificial Sequence: Synthetic oligonucleotide
aggaggucgcugaggauac

SEQ ID NO: 626397 - RNA, 19 nt, Artificial Sequence
  Description of Artificial Sequence: Synthetic oligonucleotide
ugaugagggcacaccaguu

SEQ ID NO: 626398 - RNA, 19 nt, Artificial Sequence
  Description of Artificial Sequence: Synthetic oligonucleotide
ccgggugucagcuggaggc

SEQ ID NO: 626399 - RNA, 19 nt, Artificial Sequence
  Description of Artificial Sequence: Synthetic oligonucleotide
cuccaugucgcgaacagcu

SEQ ID NO: 626400 - RNA, 19 nt, Artificial Sequence
  Description of Artificial Sequence: Synthetic oligonucleotide
cuccguuucaucaagcgau

SEQ ID NO: 626401 - RNA, 19 nt, Artificial Sequence
  Description of Artificial Sequence: Synthetic oligonucleotide
gaaggcauacccaggccuc

SEQ ID NO: 626402 - RNA, 19 nt, Artificial Sequence
  Description of Artificial Sequence: Synthetic oligonucleotide
ggcagguccccuaugagug

SEQ ID NO: 626403 - RNA, 19 nt, Artificial Sequence
  Description of Artificial Sequence: Synthetic oligonucleotide
gguuccagcgagcaggguc

SEQ ID NO: 626404 - RNA, 19 nt, Artificial Sequence
  Description of Artificial Sequence: Synthetic oligonucleotide
cagcuggaggcaucucucg

SEQ ID NO: 626405 - RNA, 19 nt, Artificial Sequence
  Description of Artificial Sequence: Synthetic oligonucleotide
ugguaauccuugagccgca

SEQ ID NO: 626406 - RNA, 19 nt, Artificial Sequence
  Description of Artificial Sequence: Synthetic oligonucleotide
aagcuggggaagauauucu

SEQ ID NO: 626407 - RNA, 19 nt, Artificial Sequence
  Description of Artificial Sequence: Synthetic oligonucleotide
gaaucgggaggagaucuuc

SEQ ID NO: 626408 - RNA, 19 nt, Artificial Sequence
  Description of Artificial Sequence: Synthetic oligonucleotide
uugcgcucugaugaugucu

SEQ ID NO: 626409 - RNA, 19 nt, Artificial Sequence
  Description of Artificial Sequence: Synthetic oligonucleotide
uuugucuuaguggcucauc

SEQ ID NO: 626410 - RNA, 19 nt, Artificial Sequence
  Description of Artificial Sequence: Synthetic oligonucleotide
uugugaucaguggccaccu

SEQ ID NO: 626411 - RNA, 19 nt, Artificial Sequence
  Description of Artificial Sequence: Synthetic oligonucleotide
guuacccgccaugucagug

SEQ ID NO: 626412 - RNA, 19 nt, Artificial Sequence
  Description of Artificial Sequence: Synthetic oligonucleotide
uggucuugccgucgggcgu

SEQ ID NO: 626413 - RNA, 19 nt, Artificial Sequence
  Description of Artificial Sequence: Synthetic oligonucleotide
guacuuggugagccgcugc

SEQ ID NO: 626414 - RNA, 19 nt, Artificial Sequence
  Description of Artificial Sequence: Synthetic oligonucleotide
uggaccucgacagccuugu

SEQ ID NO: 626415 - RNA, 19 nt, Artificial Sequence
  Description of Artificial Sequence: Synthetic oligonucleotide
gagcagggauucucgggug

SEQ ID NO: 626416 - RNA, 19 nt, Artificial Sequence
  Description of Artificial Sequence: Synthetic oligonucleotide
ucggccuccagugccauuc

SEQ ID NO: 626417 - RNA, 19 nt, Artificial Sequence
  Description of Artificial Sequence: Synthetic oligonucleotide
ugccguaggugagucaagu

SEQ ID NO: 626418 - RNA, 19 nt, Artificial Sequence
  Description of Artificial Sequence: Synthetic oligonucleotide
cagugggccuucauggauc

SEQ ID NO: 626419 - RNA, 19 nt, Artificial Sequence
  Description of Artificial Sequence: Synthetic oligonucleotide
caucgaaccgggccagcag

SEQ ID NO: 626420 - RNA, 19 nt, Artificial Sequence
  Description of Artificial Sequence: Synthetic oligonucleotide
agcgcuccggggcagccag

SEQ ID NO: 626421 - RNA, 19 nt, Artificial Sequence
  Description of Artificial Sequence: Synthetic oligonucleotide
ugacuuugagcugcucuaa

SEQ ID NO: 626422 - RNA, 19 nt, Artificial Sequence
  Description of Artificial Sequence: Synthetic oligonucleotide
cagugaugagggcacacca

SEQ ID NO: 626423 - RNA, 19 nt, Artificial Sequence
  Description of Artificial Sequence: Synthetic oligonucleotide
gagucaaguccaggcgccg

SEQ ID NO: 626424 - RNA, 19 nt, Artificial Sequence
  Description of Artificial Sequence: Synthetic oligonucleotide
agcucucugucucugcauu

SEQ ID NO: 626425 - RNA, 19 nt, Artificial Sequence
  Description of Artificial Sequence: Synthetic oligonucleotide
gcagaagggcaggaggucg

SEQ ID NO: 626426 - RNA, 19 nt, Artificial Sequence
  Description of Artificial Sequence: Synthetic oligonucleotide
cugucucuagaaggcauac

SEQ ID NO: 626427 - RNA, 19 nt, Artificial Sequence
  Description of Artificial Sequence: Synthetic oligonucleotide
uccuugcgcuguuugacuu

SEQ ID NO: 626428 - RNA, 19 nt, Artificial Sequence
  Description of Artificial Sequence: Synthetic oligonucleotide
acauggccugaaaaccggg

SEQ ID NO: 626429 - RNA, 19 nt, Artificial Sequence
  Description of Artificial Sequence: Synthetic oligonucleotide
acagcacguggaccucgac

SEQ ID NO: 626430 - RNA, 19 nt, Artificial Sequence
  Description of Artificial Sequence: Synthetic oligonucleotide
auagggagugcaccucaau

SEQ ID NO: 626431 - RNA, 19 nt, Artificial Sequence
  Description of Artificial Sequence: Synthetic oligonucleotide
uucucgggugcugcuuggg

SEQ ID NO: 626432 - RNA, 19 nt, Artificial Sequence
  Description of Artificial Sequence: Synthetic oligonucleotide
gcagagguaaggcggagca

SEQ ID NO: 626433 - RNA, 19 nt, Artificial Sequence
  Description of Artificial Sequence: Synthetic oligonucleotide
gaguguccggcugugugac

SEQ ID NO: 626434 - RNA, 19 nt, Artificial Sequence
  Description of Artificial Sequence: Synthetic oligonucleotide
augucgaaaucaggagcag

SEQ ID NO: 626435 - RNA, 19 nt, Artificial Sequence
  Description of Artificial Sequence: Synthetic oligonucleotide
gaaccccauccccauccug

SEQ ID NO: 626436 - RNA, 19 nt, Artificial Sequence
  Description of Artificial Sequence: Synthetic oligonucleotide
cauaggcaauacugacaug

SEQ ID NO: 626437 - RNA, 19 nt, Artificial Sequence
  Description of Artificial Sequence: Synthetic oligonucleotide
ucucguuacccgccauguc

SEQ ID NO: 626438 - RNA, 19 nt, Artificial Sequence
  Description of Artificial Sequence: Synthetic oligonucleotide
ccuuuaauugcaggcgccg

SEQ ID NO: 626439 - RNA, 19 nt, Artificial Sequence
  Description of Artificial Sequence: Synthetic oligonucleotide
cagaaccgaggcuccuugc

SEQ ID NO: 626440 - RNA, 19 nt, Artificial Sequence
  Description of Artificial Sequence: Synthetic oligonucleotide
aaaccuccauucaggguau

SEQ ID NO: 626441 - RNA, 19 nt, Artificial Sequence
  Description of Artificial Sequence: Synthetic oligonucleotide
cccucagcaccaucgaacc

SEQ ID NO: 626442 - RNA, 19 nt, Artificial Sequence
  Description of Artificial Sequence: Synthetic oligonucleotide
aggcauacccaggccuccc

SEQ ID NO: 626443 - RNA, 19 nt, Artificial Sequence
  Description of Artificial Sequence: Synthetic oligonucleotide
cuggcggcugcagaaucgg

SEQ ID NO: 626444 - RNA, 19 nt, Artificial Sequence
  Description of Artificial Sequence: Synthetic oligonucleotide
agcacucagcugccagcuc

SEQ ID NO: 626445 - RNA, 19 nt, Artificial Sequence
  Description of Artificial Sequence: Synthetic oligonucleotide
gugaucaguggccaccucu

SEQ ID NO: 626446 - RNA, 19 nt, Artificial Sequence
  Description of Artificial Sequence: Synthetic oligonucleotide
ccuugucucucguuacccg

SEQ ID NO: 626447 - RNA, 19 nt, Artificial Sequence
  Description of Artificial Sequence: Synthetic oligonucleotide
cuuccugcacaaaggcaca

SEQ ID NO: 626448 - RNA, 19 nt, Artificial Sequence
  Description of Artificial Sequence: Synthetic oligonucleotide
cccgguuccagcgagcagg

SEQ ID NO: 626449 - RNA, 19 nt, Artificial Sequence
  Description of Artificial Sequence: Synthetic oligonucleotide
gcggcugcagaaucgggag

SEQ ID NO: 626450 - RNA, 19 nt, Artificial Sequence
  Description of Artificial Sequence: Synthetic oligonucleotide
ccuuuagaugucgaaauca

SEQ ID NO: 626451 - RNA, 19 nt, Artificial Sequence
  Description of Artificial Sequence: Synthetic oligonucleotide
guaaggcggagcacaggcc

SEQ ID NO: 626452 - RNA, 19 nt, Artificial Sequence
  Description of Artificial Sequence: Synthetic oligonucleotide
cuaaacccuuucuuugucu

SEQ ID NO: 626453 - RNA, 19 nt, Artificial Sequence
  Description of Artificial Sequence: Synthetic oligonucleotide
agguucccgguggucaggg

SEQ ID NO: 626454 - RNA, 19 nt, Artificial Sequence
  Description of Artificial Sequence: Synthetic oligonucleotide
aggauacgcuccguccggg

SEQ ID NO: 626455 - RNA, 19 nt, Artificial Sequence
  Description of Artificial Sequence: Synthetic oligonucleotide
uguccggcugugugacuug

SEQ ID NO: 626456 - RNA, 19 nt, Artificial Sequence
  Description of Artificial Sequence: Synthetic oligonucleotide
cagccagacugggugacag

SEQ ID NO: 626457 - RNA, 19 nt, Artificial Sequence
  Description of Artificial Sequence: Synthetic oligonucleotide
ggcaaaauucuuccucuaa

SEQ ID NO: 626458 - RNA, 19 nt, Artificial Sequence
  Description of Artificial Sequence: Synthetic oligonucleotide
accucgaccuuuagauguc

SEQ ID NO: 626459 - RNA, 19 nt, Artificial Sequence
  Description of Artificial Sequence: Synthetic oligonucleotide
agguaaggcggagcacagg

SEQ ID NO: 626460 - RNA, 19 nt, Artificial Sequence
  Description of Artificial Sequence: Synthetic oligonucleotide
uccaugucgcgaacagcuu

SEQ ID NO: 626461 - RNA, 19 nt, Artificial Sequence
  Description of Artificial Sequence: Synthetic oligonucleotide
ugugugacuugagcagcaa

SEQ ID NO: 626462 - RNA, 19 nt, Artificial Sequence
  Description of Artificial Sequence: Synthetic oligonucleotide
gcuaaacccuuucuuuguc

SEQ ID NO: 626463 - RNA, 19 nt, Artificial Sequence
  Description of Artificial Sequence: Synthetic oligonucleotide
agguagccgcucucuuguc

SEQ ID NO: 626464 - RNA, 19 nt, Artificial Sequence
  Description of Artificial Sequence: Synthetic oligonucleotide
gucagugggccuucaugga

SEQ ID NO: 626465 - RNA, 19 nt, Artificial Sequence
  Description of Artificial Sequence: Synthetic oligonucleotide
agagcgcuccggggcagcc

SEQ ID NO: 626466 - RNA, 19 nt, Artificial Sequence
  Description of Artificial Sequence: Synthetic oligonucleotide
cccaagcgaaggcaggagg

SEQ ID NO: 626467 - RNA, 19 nt, Artificial Sequence
  Description of Artificial Sequence: Synthetic oligonucleotide
ggguauaaaaccagagcaa

SEQ ID NO: 626468 - RNA, 19 nt, Artificial Sequence
  Description of Artificial Sequence: Synthetic oligonucleotide
ugugaucaguggccaccuc

SEQ ID NO: 626469 - RNA, 19 nt, Artificial Sequence
  Description of Artificial Sequence: Synthetic oligonucleotide
caugaaaggccagucugaa

SEQ ID NO: 626470 - RNA, 19 nt, Artificial Sequence
  Description of Artificial Sequence: Synthetic oligonucleotide
ugucgcgaacagcuugguu

SEQ ID NO: 626471 - RNA, 19 nt, Artificial Sequence
  Description of Artificial Sequence: Synthetic oligonucleotide
ucgcucagcauagggucac

SEQ ID NO: 626472 - RNA, 19 nt, Artificial Sequence
  Description of Artificial Sequence: Synthetic oligonucleotide
ucccgguuccagcgagcag

SEQ ID NO: 626473 - RNA, 19 nt, Artificial Sequence
  Description of Artificial Sequence: Synthetic oligonucleotide
ugcucugccguaggugagu

SEQ ID NO: 626474 - RNA, 19 nt, Artificial Sequence
  Description of Artificial Sequence: Synthetic oligonucleotide
cagcacguggaccucgaca

SEQ ID NO: 626475 - RNA, 19 nt, Artificial Sequence
  Description of Artificial Sequence: Synthetic oligonucleotide
cuugcgcucugaugauguc

SEQ ID NO: 626476 - RNA, 19 nt, Artificial Sequence
  Description of Artificial Sequence: Synthetic oligonucleotide
ccaugucgcgaacagcuug

SEQ ID NO: 626477 - RNA, 19 nt, Artificial Sequence
  Description of Artificial Sequence: Synthetic oligonucleotide
cucgcucagcauaggguca

SEQ ID NO: 626478 - RNA, 19 nt, Artificial Sequence
  Description of Artificial Sequence: Synthetic oligonucleotide
ggucgcugaggauacgcuc

SEQ ID NO: 626479 - RNA, 19 nt, Artificial Sequence
  Description of Artificial Sequence: Synthetic oligonucleotide
cucgacagccuugucucuc

SEQ ID NO: 626480 - RNA, 19 nt, Artificial Sequence
  Description of Artificial Sequence: Synthetic oligonucleotide
augagguagccgcucucuu

SEQ ID NO: 626481 - RNA, 19 nt, Artificial Sequence
  Description of Artificial Sequence: Synthetic oligonucleotide
guccccuaugaguguggcc

SEQ ID NO: 626482 - RNA, 19 nt, Artificial Sequence
  Description of Artificial Sequence: Synthetic oligonucleotide
agcgaucgaggaauaggga

SEQ ID NO: 626483 - RNA, 19 nt, Artificial Sequence
  Description of Artificial Sequence: Synthetic oligonucleotide
gggugaugcccugaguccc

SEQ ID NO: 626484 - RNA, 19 nt, Artificial Sequence
  Description of Artificial Sequence: Synthetic oligonucleotide
ggagugcaccucaaugagc

SEQ ID NO: 626485 - RNA, 19 nt, Artificial Sequence
  Description of Artificial Sequence: Synthetic oligonucleotide
gcgagcagggucuaggaua

SEQ ID NO: 626486 - RNA, 19 nt, Artificial Sequence
  Description of Artificial Sequence: Synthetic oligonucleotide
cugccguaggugagucaag

SEQ ID NO: 626487 - RNA, 19 nt, Artificial Sequence
  Description of Artificial Sequence: Synthetic oligonucleotide
cucgaccuuuagaugucga

SEQ ID NO: 626488 - RNA, 19 nt, Artificial Sequence
  Description of Artificial Sequence: Synthetic oligonucleotide
guuccagcgagcagggucu

SEQ ID NO: 626489 - RNA, 19 nt, Artificial Sequence
  Description of Artificial Sequence: Synthetic oligonucleotide
cuuggggcgggaggcgggg

SEQ ID NO: 626490 - RNA, 19 nt, Artificial Sequence
  Description of Artificial Sequence: Synthetic oligonucleotide
cagucugaacagagcgcuc

SEQ ID NO: 626491 - RNA, 19 nt, Artificial Sequence
  Description of Artificial Sequence: Synthetic oligonucleotide
agccgcucucuugucuccg

SEQ ID NO: 626492 - RNA, 19 nt, Artificial Sequence
  Description of Artificial Sequence: Synthetic oligonucleotide
ccggcugugugacuugagc

SEQ ID NO: 626493 - RNA, 19 nt, Artificial Sequence
  Description of Artificial Sequence: Synthetic oligonucleotide
ggccugaaaaccggggaug

SEQ ID NO: 626494 - RNA, 19 nt, Artificial Sequence
  Description of Artificial Sequence: Synthetic oligonucleotide
cuaggcugagcagguuuuc

SEQ ID NO: 626495 - RNA, 19 nt, Artificial Sequence
  Description of Artificial Sequence: Synthetic oligonucleotide
aggggucucaggcggcaaa

SEQ ID NO: 626496 - RNA, 19 nt, Artificial Sequence
  Description of Artificial Sequence: Synthetic oligonucleotide
ccagcgagcagggucuagg

SEQ ID NO: 626497 - RNA, 19 nt, Artificial Sequence
  Description of Artificial Sequence: Synthetic oligonucleotide
agccagacugggugacaga

SEQ ID NO: 626498 - RNA, 19 nt, Artificial Sequence
  Description of Artificial Sequence: Synthetic oligonucleotide
aggauacugcuaaacccuu

SEQ ID NO: 626499 - RNA, 19 nt, Artificial Sequence
  Description of Artificial Sequence: Synthetic oligonucleotide
ggaauagggagugcaccuc

SEQ ID NO: 626500 - RNA, 19 nt, Artificial Sequence
  Description of Artificial Sequence: Synthetic oligonucleotide
agguccccuaugagugugg

SEQ ID NO: 626501 - RNA, 19 nt, Artificial Sequence
  Description of Artificial Sequence: Synthetic oligonucleotide
ccguccgggugucagcugg

SEQ ID NO: 626502 - RNA, 19 nt, Artificial Sequence
  Description of Artificial Sequence: Synthetic oligonucleotide
gcuccuugcgcuguuugac

SEQ ID NO: 626503 - RNA, 19 nt, Artificial Sequence
  Description of Artificial Sequence: Synthetic oligonucleotide
gcggcaaaauucuuccucu

SEQ ID NO: 626504 - RNA, 19 nt, Artificial Sequence
  Description of Artificial Sequence: Synthetic oligonucleotide
gcccucagcaccaucgaac

SEQ ID NO: 626505 - RNA, 19 nt, Artificial Sequence
  Description of Artificial Sequence: Synthetic oligonucleotide
gccagucugaacagagcgc

SEQ ID NO: 626506 - RNA, 19 nt, Artificial Sequence
  Description of Artificial Sequence: Synthetic oligonucleotide
uccagcgagcagggucuag

SEQ ID NO: 626507 - RNA, 19 nt, Artificial Sequence
  Description of Artificial Sequence: Synthetic oligonucleotide
cucucgggucauggcagag

SEQ ID NO: 626508 - RNA, 19 nt, Artificial Sequence
  Description of Artificial Sequence: Synthetic oligonucleotide
uccguccgggugucagcug

SEQ ID NO: 626509 - RNA, 19 nt, Artificial Sequence
  Description of Artificial Sequence: Synthetic oligonucleotide
gguaauccuugagccgcag

SEQ ID NO: 626510 - RNA, 19 nt, Artificial Sequence
  Description of Artificial Sequence: Synthetic oligonucleotide
cagcgagcagggucuagga

SEQ ID NO: 626511 - RNA, 19 nt, Artificial Sequence
  Description of Artificial Sequence: Synthetic oligonucleotide
aguguccggcugugugacu

SEQ ID NO: 626512 - RNA, 19 nt, Artificial Sequence
  Description of Artificial Sequence: Synthetic oligonucleotide
cgaggaauagggagugcac

SEQ ID NO: 626513 - RNA, 19 nt, Artificial Sequence
  Description of Artificial Sequence: Synthetic oligonucleotide
ccguuucaucaagcgaucg

SEQ ID NO: 626514 - RNA, 19 nt, Artificial Sequence
  Description of Artificial Sequence: Synthetic oligonucleotide
ucaaggccucuggggugag

SEQ ID NO: 626515 - RNA, 19 nt, Artificial Sequence
  Description of Artificial Sequence: Synthetic oligonucleotide
cuuccggucuguagggccu

SEQ ID NO: 626516 - RNA, 19 nt, Artificial Sequence
  Description of Artificial Sequence: Synthetic oligonucleotide
ggugaugcccugagucccc

SEQ ID NO: 626517 - RNA, 19 nt, Artificial Sequence
  Description of Artificial Sequence: Synthetic oligonucleotide
auccaagcuggggaagaua

SEQ ID NO: 626518 - RNA, 19 nt, Artificial Sequence
  Description of Artificial Sequence: Synthetic oligonucleotide
ucccggcagguccccuaug

SEQ ID NO: 626519 - RNA, 19 nt, Artificial Sequence
  Description of Artificial Sequence: Synthetic oligonucleotide
ccgguuccagcgagcaggg

SEQ ID NO: 626520 - RNA, 19 nt, Artificial Sequence
  Description of Artificial Sequence: Synthetic oligonucleotide
agaaucgggaggagaucuu

SEQ ID NO: 626521 - RNA, 19 nt, Artificial Sequence
  Description of Artificial Sequence: Synthetic oligonucleotide
gguccccuaugaguguggc

SEQ ID NO: 626522 - RNA, 19 nt, Artificial Sequence
  Description of Artificial Sequence: Synthetic oligonucleotide
ucuugccgucgggcguggg

SEQ ID NO: 626523 - RNA, 19 nt, Artificial Sequence
  Description of Artificial Sequence: Synthetic oligonucleotide
ucccggcagcacucagcug

SEQ ID NO: 626524 - RNA, 19 nt, Artificial Sequence
  Description of Artificial Sequence: Synthetic oligonucleotide
cuccuugcgcuguuugacu

SEQ ID NO: 626525 - RNA, 19 nt, Artificial Sequence
  Description of Artificial Sequence: Synthetic oligonucleotide
guccgggugucagcuggag

SEQ ID NO: 626526 - RNA, 19 nt, Artificial Sequence
  Description of Artificial Sequence: Synthetic oligonucleotide
augucgcgaacagcuuggu

SEQ ID NO: 626527 - RNA, 19 nt, Artificial Sequence
  Description of Artificial Sequence: Synthetic oligonucleotide
ccucgaccuuuagaugucg

SEQ ID NO: 626528 - RNA, 19 nt, Artificial Sequence
  Description of Artificial Sequence: Synthetic oligonucleotide
gccguaggugagucaaguc

SEQ ID NO: 626529 - RNA, 19 nt, Artificial Sequence
  Description of Artificial Sequence: Synthetic oligonucleotide
gcggccggcucucagcuuc

SEQ ID NO: 626530 - RNA, 19 nt, Artificial Sequence
  Description of Artificial Sequence: Synthetic oligonucleotide
cucucguuacccgccaugu

SEQ ID NO: 626531 - RNA, 19 nt, Artificial Sequence
  Description of Artificial Sequence: Synthetic oligonucleotide
uacgcuccguccggguguc

SEQ ID NO: 626532 - RNA, 19 nt, Artificial Sequence
  Description of Artificial Sequence: Synthetic oligonucleotide
acguggaccucgacagccu

SEQ ID NO: 626533 - RNA, 19 nt, Artificial Sequence
  Description of Artificial Sequence: Synthetic oligonucleotide
gguagccgcucucuugucu

SEQ ID NO: 626534 - RNA, 19 nt, Artificial Sequence
  Description of Artificial Sequence: Synthetic oligonucleotide
uccaggcgccgcugguaau

SEQ ID NO: 626535 - RNA, 19 nt, Artificial Sequence
  Description of Artificial Sequence: Synthetic oligonucleotide
cguuucaucaagcgaucga

SEQ ID NO: 626536 - RNA, 19 nt, Artificial Sequence
  Description of Artificial Sequence: Synthetic oligonucleotide
ggucuaggauacugcuaaa

SEQ ID NO: 626537 - RNA, 19 nt, Artificial Sequence
  Description of Artificial Sequence: Synthetic oligonucleotide
gccgcagcauggucuugcc

SEQ ID NO: 626538 - RNA, 19 nt, Artificial Sequence
  Description of Artificial Sequence: Synthetic oligonucleotide
gcgaacagcuugguugaca

SEQ ID NO: 626539 - RNA, 19 nt, Artificial Sequence
  Description of Artificial Sequence: Synthetic oligonucleotide
cucugccguaggugaguca

SEQ ID NO: 626540 - RNA, 19 nt, Artificial Sequence
  Description of Artificial Sequence: Synthetic oligonucleotide
aggcgccgcugguaauccu

SEQ ID NO: 626541 - RNA, 19 nt, Artificial Sequence
  Description of Artificial Sequence: Synthetic oligonucleotide
ccccaagcugagacaggag

SEQ ID NO: 626542 - RNA, 19 nt, Artificial Sequence
  Description of Artificial Sequence: Synthetic oligonucleotide
caggcaacaagagcuguuu

SEQ ID NO: 626543 - RNA, 19 nt, Artificial Sequence
  Description of Artificial Sequence: Synthetic oligonucleotide
ccugucucuagaaggcaua

SEQ ID NO: 626544 - RNA, 19 nt, Artificial Sequence
  Description of Artificial Sequence: Synthetic oligonucleotide
ggucucaggcggcaaaauu

SEQ ID NO: 626545 - RNA, 19 nt, Artificial Sequence
  Description of Artificial Sequence: Synthetic oligonucleotide
gguucccgguggucagggc

SEQ ID NO: 626546 - RNA, 19 nt, Artificial Sequence
  Description of Artificial Sequence: Synthetic oligonucleotide
gggguauccacaccagguu

SEQ ID NO: 626547 - RNA, 19 nt, Artificial Sequence
  Description of Artificial Sequence: Synthetic oligonucleotide
ccggcagguccccuaugag

SEQ ID NO: 626548 - RNA, 19 nt, Artificial Sequence
  Description of Artificial Sequence: Synthetic oligonucleotide
ggaggucgcugaggauacg

SEQ ID NO: 626549 - RNA, 19 nt, Artificial Sequence
  Description of Artificial Sequence: Synthetic oligonucleotide
ccugaaaaccggggaugug

SEQ ID NO: 626550 - RNA, 19 nt, Artificial Sequence
  Description of Artificial Sequence: Synthetic oligonucleotide
cagagcgcuccggggcagc

SEQ ID NO: 626551 - RNA, 19 nt, Artificial Sequence
  Description of Artificial Sequence: Synthetic oligonucleotide
ccuccauucaggguauaaa

SEQ ID NO: 626552 - RNA, 19 nt, Artificial Sequence
  Description of Artificial Sequence: Synthetic oligonucleotide
caccgcggccggcucucag

SEQ ID NO: 626553 - RNA, 19 nt, Artificial Sequence
  Description of Artificial Sequence: Synthetic oligonucleotide
cgaucgaggaauagggagu

SEQ ID NO: 626554 - RNA, 19 nt, Artificial Sequence
  Description of Artificial Sequence: Synthetic oligonucleotide
aaccuccauucaggguaua

SEQ ID NO: 626555 - RNA, 19 nt, Artificial Sequence
  Description of Artificial Sequence: Synthetic oligonucleotide
cgaccuuuagaugucgaaa

SEQ ID NO: 626556 - RNA, 19 nt, Artificial Sequence
  Description of Artificial Sequence: Synthetic oligonucleotide
guguccggcugugugacuu

SEQ ID NO: 626557 - RNA, 19 nt, Artificial Sequence
  Description of Artificial Sequence: Synthetic oligonucleotide
aaccggggaugugguggua

SEQ ID NO: 626558 - RNA, 19 nt, Artificial Sequence
  Description of Artificial Sequence: Synthetic oligonucleotide
cuuugucuuaguggcucau

SEQ ID NO: 626559 - RNA, 19 nt, Artificial Sequence
  Description of Artificial Sequence: Synthetic oligonucleotide
gcccugugggagcgugucc

SEQ ID NO: 626560 - RNA, 19 nt, Artificial Sequence
  Description of Artificial Sequence: Synthetic oligonucleotide
cccggcagguccccuauga

SEQ ID NO: 626561 - RNA, 19 nt, Artificial Sequence
  Description of Artificial Sequence: Synthetic oligonucleotide
gcucugccguaggugaguc

SEQ ID NO: 626562 - RNA, 19 nt, Artificial Sequence
  Description of Artificial Sequence: Synthetic oligonucleotide
ccccaagcgaaggcaggag

SEQ ID NO: 626563 - RNA, 19 nt, Artificial Sequence
  Description of Artificial Sequence: Synthetic oligonucleotide
cuccguccgggugucagcu

SEQ ID NO: 626564 - RNA, 19 nt, Artificial Sequence
  Description of Artificial Sequence: Synthetic oligonucleotide
ggauacgcuccguccgggu

SEQ ID NO: 626565 - RNA, 19 nt, Artificial Sequence
  Description of Artificial Sequence: Synthetic oligonucleotide
gccaucaaccucgaccuuu

SEQ ID NO: 626566 - RNA, 19 nt, Artificial Sequence
  Description of Artificial Sequence: Synthetic oligonucleotide
ccaucgaaccgggccagca

SEQ ID NO: 626567 - RNA, 19 nt, Artificial Sequence
  Description of Artificial Sequence: Synthetic oligonucleotide
cucaggcggcaaaauucuu

SEQ ID NO: 626568 - RNA, 19 nt, Artificial Sequence
  Description of Artificial Sequence: Synthetic oligonucleotide
ggucccggcagguccccua

SEQ ID NO: 626569 - RNA, 19 nt, Artificial Sequence
  Description of Artificial Sequence: Synthetic oligonucleotide
gagcugcucuaaggcaaau

SEQ ID NO: 626570 - RNA, 19 nt, Artificial Sequence
  Description of Artificial Sequence: Synthetic oligonucleotide
gucccggcagguccccuau

SEQ ID NO: 626571 - RNA, 19 nt, Artificial Sequence
  Description of Artificial Sequence: Synthetic oligonucleotide
ggauacugcuaaacccuuu

SEQ ID NO: 626572 - RNA, 19 nt, Artificial Sequence
  Description of Artificial Sequence: Synthetic oligonucleotide
caaggccucuggggugaga

SEQ ID NO: 626573 - RNA, 19 nt, Artificial Sequence
  Description of Artificial Sequence: Synthetic oligonucleotide
ccgcugcaucucagugggg

SEQ ID NO: 626574 - RNA, 19 nt, Artificial Sequence
  Description of Artificial Sequence: Synthetic oligonucleotide
cacagaaccgaggcuccuu

SEQ ID NO: 626575 - RNA, 19 nt, Artificial Sequence
  Description of Artificial Sequence: Synthetic oligonucleotide
ggguacuuggugagccgcu

SEQ ID NO: 626576 - RNA, 19 nt, Artificial Sequence
  Description of Artificial Sequence: Synthetic oligonucleotide
cucuggggugagagacgcu

SEQ ID NO: 626577 - RNA, 19 nt, Artificial Sequence
  Description of Artificial Sequence: Synthetic oligonucleotide
ggcaccgcggccggcucuc

SEQ ID NO: 626578 - RNA, 19 nt, Artificial Sequence
  Description of Artificial Sequence: Synthetic oligonucleotide
ggauucucgggugcugcuu

SEQ ID NO: 626579 - RNA, 19 nt, Artificial Sequence
  Description of Artificial Sequence: Synthetic oligonucleotide
cgaaccgggccagcagcac

SEQ ID NO: 626580 - RNA, 19 nt, Artificial Sequence
  Description of Artificial Sequence: Synthetic oligonucleotide
cggcaaaauucuuccucua

SEQ ID NO: 626581 - RNA, 19 nt, Artificial Sequence
  Description of Artificial Sequence: Synthetic oligonucleotide
gaggcuccuugcgcuguuu

SEQ ID NO: 626582 - RNA, 19 nt, Artificial Sequence
  Description of Artificial Sequence: Synthetic oligonucleotide
cgucgggcgugggugugag

SEQ ID NO: 626583 - RNA, 19 nt, Artificial Sequence
  Description of Artificial Sequence: Synthetic oligonucleotide
cggggauguggugguacuc

SEQ ID NO: 626584 - RNA, 19 nt, Artificial Sequence
  Description of Artificial Sequence: Synthetic oligonucleotide
gggucucaggcggcaaaau

SEQ ID NO: 626585 - RNA, 19 nt, Artificial Sequence
  Description of Artificial Sequence: Synthetic oligonucleotide
gucgggcgugggugugagu

SEQ ID NO: 626586 - RNA, 19 nt, Artificial Sequence
  Description of Artificial Sequence: Synthetic oligonucleotide
ccuugcgcuguuugacuuu

SEQ ID NO: 626587 - RNA, 19 nt, Artificial Sequence
  Description of Artificial Sequence: Synthetic oligonucleotide
ccucgacagccuugucucu

SEQ ID NO: 626588 - RNA, 19 nt, Artificial Sequence
  Description of Artificial Sequence: Synthetic oligonucleotide
cgggugucagcuggaggca

SEQ ID NO: 626589 - RNA, 19 nt, Artificial Sequence
  Description of Artificial Sequence: Synthetic oligonucleotide
ccagcagcacaucgccaau

SEQ ID NO: 626590 - RNA, 19 nt, Artificial Sequence
  Description of Artificial Sequence: Synthetic oligonucleotide
cguccgggugucagcugga

SEQ ID NO: 626591 - RNA, 19 nt, Artificial Sequence
  Description of Artificial Sequence: Synthetic oligonucleotide
cgcgaacagcuugguugac

SEQ ID NO: 626592 - RNA, 19 nt, Artificial Sequence
  Description of Artificial Sequence: Synthetic oligonucleotide
cgcccaccauaggcaauac

SEQ ID NO: 626593 - RNA, 19 nt, Artificial Sequence
  Description of Artificial Sequence: Synthetic oligonucleotide
cguuacccgccaugucagu

SEQ ID NO: 626594 - RNA, 19 nt, Artificial Sequence
  Description of Artificial Sequence: Synthetic oligonucleotide
ccgcaggcucuucuguguu

SEQ ID NO: 626595 - RNA, 19 nt, Artificial Sequence
  Description of Artificial Sequence: Synthetic oligonucleotide
ccgaggcuccuugcgcugu

SEQ ID NO: 626596 - RNA, 19 nt, Artificial Sequence
  Description of Artificial Sequence: Synthetic oligonucleotide
cccgguggucagggcuguc

SEQ ID NO: 626597 - RNA, 19 nt, Artificial Sequence
  Description of Artificial Sequence: Synthetic oligonucleotide
ccgcucucuugucuccguu

SEQ ID NO: 626598 - RNA, 19 nt, Artificial Sequence
  Description of Artificial Sequence: Synthetic oligonucleotide
gcaccgcggccggcucuca

SEQ ID NO: 626599 - RNA, 19 nt, Artificial Sequence
  Description of Artificial Sequence: Synthetic oligonucleotide
ggccucccuuccggucugu

SEQ ID NO: 626600 - RNA, 19 nt, Artificial Sequence
  Description of Artificial Sequence: Synthetic oligonucleotide
cgcugaggauacgcuccgu

SEQ ID NO: 626601 - RNA, 19 nt, Artificial Sequence
  Description of Artificial Sequence: Synthetic oligonucleotide
cgccggcaccgcggccggc

SEQ ID NO: 626602 - RNA, 19 nt, Artificial Sequence
  Description of Artificial Sequence: Synthetic oligonucleotide
cgguuccagcgagcagggu

SEQ ID NO: 626603 - RNA, 19 nt, Artificial Sequence
  Description of Artificial Sequence: Synthetic oligonucleotide
aaagauucggaagacgucc

SEQ ID NO: 626604 - RNA, 19 nt, Artificial Sequence
  Description of Artificial Sequence: Synthetic oligonucleotide
ucuuuaaccagaauggacc

SEQ ID NO: 626605 - RNA, 19 nt, Artificial Sequence
  Description of Artificial Sequence: Synthetic oligonucleotide
uuugguacaagccaccagg

SEQ ID NO: 626606 - RNA, 19 nt, Artificial Sequence
  Description of Artificial Sequence: Synthetic oligonucleotide
aaucuggcccuucacaucc

SEQ ID NO: 626607 - RNA, 19 nt, Artificial Sequence
  Description of Artificial Sequence: Synthetic oligonucleotide
ucauauaagaagcgcaugg

SEQ ID NO: 626608 - RNA, 19 nt, Artificial Sequence
  Description of Artificial Sequence: Synthetic oligonucleotide
aacuugaacacucauauaa

SEQ ID NO: 626609 - RNA, 19 nt, Artificial Sequence
  Description of Artificial Sequence: Synthetic oligonucleotide
gauggugucaccuugauga

SEQ ID NO: 626610 - RNA, 19 nt, Artificial Sequence
  Description of Artificial Sequence: Synthetic oligonucleotide
uccaauguagcccugcagg

SEQ ID NO: 626611 - RNA, 19 nt, Artificial Sequence
  Description of Artificial Sequence: Synthetic oligonucleotide
agagguagaaccccuaaac

SEQ ID NO: 626612 - RNA, 19 nt, Artificial Sequence
  Description of Artificial Sequence: Synthetic oligonucleotide
aaccagaauggaccgaagc

SEQ ID NO: 626613 - RNA, 19 nt, Artificial Sequence
  Description of Artificial Sequence: Synthetic oligonucleotide
aagaggcggguauugaggc

SEQ ID NO: 626614 - RNA, 19 nt, Artificial Sequence
  Description of Artificial Sequence: Synthetic oligonucleotide
gaagucaucccagacaugg

SEQ ID NO: 626615 - RNA, 19 nt, Artificial Sequence
  Description of Artificial Sequence: Synthetic oligonucleotide
uacaucaccaguauacgag

SEQ ID NO: 626616 - RNA, 19 nt, Artificial Sequence
  Description of Artificial Sequence: Synthetic oligonucleotide
ucaaagauucggaagacgu

SEQ ID NO: 626617 - RNA, 19 nt, Artificial Sequence
  Description of Artificial Sequence: Synthetic oligonucleotide
agaacuugaacacucauau

SEQ ID NO: 626618 - RNA, 19 nt, Artificial Sequence
  Description of Artificial Sequence: Synthetic oligonucleotide
uugggagaagacaucaggg

SEQ ID NO: 626619 - RNA, 19 nt, Artificial Sequence
  Description of Artificial Sequence: Synthetic oligonucleotide
ugucccauggaacagggcc

SEQ ID NO: 626620 - RNA, 19 nt, Artificial Sequence
  Description of Artificial Sequence: Synthetic oligonucleotide
ucaccaguauacgagaugg

SEQ ID NO: 626621 - RNA, 19 nt, Artificial Sequence
  Description of Artificial Sequence: Synthetic oligonucleotide
agacauggagucuacugcc

SEQ ID NO: 626622 - RNA, 19 nt, Artificial Sequence
  Description of Artificial Sequence: Synthetic oligonucleotide
auaagaagcgcauggcaac

SEQ ID NO: 626623 - RNA, 19 nt, Artificial Sequence
  Description of Artificial Sequence: Synthetic oligonucleotide
auucggaagacguccauac

SEQ ID NO: 626624 - RNA, 19 nt, Artificial Sequence
  Description of Artificial Sequence: Synthetic oligonucleotide
ugugaagucuuugaauugg

SEQ ID NO: 626625 - RNA, 19 nt, Artificial Sequence
  Description of Artificial Sequence: Synthetic oligonucleotide
aaaucuguugcggagggag

SEQ ID NO: 626626 - RNA, 19 nt, Artificial Sequence
  Description of Artificial Sequence: Synthetic oligonucleotide
uauaagaagcgcauggcaa

SEQ ID NO: 626627 - RNA, 19 nt, Artificial Sequence
  Description of Artificial Sequence: Synthetic oligonucleotide
agcuuguugaaguuguggg

SEQ ID NO: 626628 - RNA, 19 nt, Artificial Sequence
  Description of Artificial Sequence: Synthetic oligonucleotide
ugguuauuuggcaagagau

SEQ ID NO: 626629 - RNA, 19 nt, Artificial Sequence
  Description of Artificial Sequence: Synthetic oligonucleotide
gaacacucauauaagaagc

SEQ ID NO: 626630 - RNA, 19 nt, Artificial Sequence
  Description of Artificial Sequence: Synthetic oligonucleotide
aguucaaagaaaaccugcc

SEQ ID NO: 626631 - RNA, 19 nt, Artificial Sequence
  Description of Artificial Sequence: Synthetic oligonucleotide
augugcagagucuugcccc

SEQ ID NO: 626632 - RNA, 19 nt, Artificial Sequence
  Description of Artificial Sequence: Synthetic oligonucleotide
uguagucuccaacaaggag

SEQ ID NO: 626633 - RNA, 19 nt, Artificial Sequence
  Description of Artificial Sequence: Synthetic oligonucleotide
auggguauggaugugcagc

SEQ ID NO: 626634 - RNA, 19 nt, Artificial Sequence
  Description of Artificial Sequence: Synthetic oligonucleotide
cauggcaacaucaaaugug

SEQ ID NO: 626635 - RNA, 19 nt, Artificial Sequence
  Description of Artificial Sequence: Synthetic oligonucleotide
agcuacaucaccaguauac

SEQ ID NO: 626636 - RNA, 19 nt, Artificial Sequence
  Description of Artificial Sequence: Synthetic oligonucleotide
ugaguugccagacuucaug

SEQ ID NO: 626637 - RNA, 19 nt, Artificial Sequence
  Description of Artificial Sequence: Synthetic oligonucleotide
ucggaagacguccauacca

SEQ ID NO: 626638 - RNA, 19 nt, Artificial Sequence
  Description of Artificial Sequence: Synthetic oligonucleotide
auguccuuaaugcauagga

SEQ ID NO: 626639 - RNA, 19 nt, Artificial Sequence
  Description of Artificial Sequence: Synthetic oligonucleotide
gaguaugugagcaacugcc

SEQ ID NO: 626640 - RNA, 19 nt, Artificial Sequence
  Description of Artificial Sequence: Synthetic oligonucleotide
aacacucauauaagaagcg

SEQ ID NO: 626641 - RNA, 19 nt, Artificial Sequence
  Description of Artificial Sequence: Synthetic oligonucleotide
aggaccugcaaauuagguc

SEQ ID NO: 626642 - RNA, 19 nt, Artificial Sequence
  Description of Artificial Sequence: Synthetic oligonucleotide
ucuaggauaaggucaucgc

SEQ ID NO: 626643 - RNA, 19 nt, Artificial Sequence
  Description of Artificial Sequence: Synthetic oligonucleotide
ugcaccaugaacugggcca

SEQ ID NO: 626644 - RNA, 19 nt, Artificial Sequence
  Description of Artificial Sequence: Synthetic oligonucleotide
guccuuaaugcauaggaug

SEQ ID NO: 626645 - RNA, 19 nt, Artificial Sequence
  Description of Artificial Sequence: Synthetic oligonucleotide
cuaggauaaggucaucgcc

SEQ ID NO: 626646 - RNA, 19 nt, Artificial Sequence
  Description of Artificial Sequence: Synthetic oligonucleotide
ugugcacaggccagcaugg

SEQ ID NO: 626647 - RNA, 19 nt, Artificial Sequence
  Description of Artificial Sequence: Synthetic oligonucleotide
agaucacucgaucucuagg

SEQ ID NO: 626648 - RNA, 19 nt, Artificial Sequence
  Description of Artificial Sequence: Synthetic oligonucleotide
gagguagaaccccuaaacc

SEQ ID NO: 626649 - RNA, 19 nt, Artificial Sequence
  Description of Artificial Sequence: Synthetic oligonucleotide
auuuugugcgacugggguc

SEQ ID NO: 626650 - RNA, 19 nt, Artificial Sequence
  Description of Artificial Sequence: Synthetic oligonucleotide
agcaccuuagagcggaagg

SEQ ID NO: 626651 - RNA, 19 nt, Artificial Sequence
  Description of Artificial Sequence: Synthetic oligonucleotide
aagacguccauaccauucu

SEQ ID NO: 626652 - RNA, 19 nt, Artificial Sequence
  Description of Artificial Sequence: Synthetic oligonucleotide
acacucauauaagaagcgc

SEQ ID NO: 626653 - RNA, 19 nt, Artificial Sequence
  Description of Artificial Sequence: Synthetic oligonucleotide
ugaguaugugagcaacugc

SEQ ID NO: 626654 - RNA, 19 nt, Artificial Sequence
  Description of Artificial Sequence: Synthetic oligonucleotide
uggguauggaugugcagcg

SEQ ID NO: 626655 - RNA, 19 nt, Artificial Sequence
  Description of Artificial Sequence: Synthetic oligonucleotide
uguguguugucccauggaa

SEQ ID NO: 626656 - RNA, 19 nt, Artificial Sequence
  Description of Artificial Sequence: Synthetic oligonucleotide
caguauacgagauggcagc

SEQ ID NO: 626657 - RNA, 19 nt, Artificial Sequence
  Description of Artificial Sequence: Synthetic oligonucleotide
ucgaucucuaggauaaggu

SEQ ID NO: 626658 - RNA, 19 nt, Artificial Sequence
  Description of Artificial Sequence: Synthetic oligonucleotide
guccauaccauucuccuug

SEQ ID NO: 626659 - RNA, 19 nt, Artificial Sequence
  Description of Artificial Sequence: Synthetic oligonucleotide
aagaucacucgaucucuag

SEQ ID NO: 626660 - RNA, 19 nt, Artificial Sequence
  Description of Artificial Sequence: Synthetic oligonucleotide
gaucacucgaucucuagga

SEQ ID NO: 626661 - RNA, 19 nt, Artificial Sequence
  Description of Artificial Sequence: Synthetic oligonucleotide
aauggaccgaagcugccca

SEQ ID NO: 626662 - RNA, 19 nt, Artificial Sequence
  Description of Artificial Sequence: Synthetic oligonucleotide
agagaugaguaugugagca

SEQ ID NO: 626663 - RNA, 19 nt, Artificial Sequence
  Description of Artificial Sequence: Synthetic oligonucleotide
gaucucuaggauaagguca

SEQ ID NO: 626664 - RNA, 19 nt, Artificial Sequence
  Description of Artificial Sequence: Synthetic oligonucleotide
ucuaugaccuucccaggca

SEQ ID NO: 626665 - RNA, 19 nt, Artificial Sequence
  Description of Artificial Sequence: Synthetic oligonucleotide
ccuguagucuccaacaagg

SEQ ID NO: 626666 - RNA, 19 nt, Artificial Sequence
  Description of Artificial Sequence: Synthetic oligonucleotide
uuuugugcgacugggguca

SEQ ID NO: 626667 - RNA, 19 nt, Artificial Sequence
  Description of Artificial Sequence: Synthetic oligonucleotide
ucggcuuaacccauucugc

SEQ ID NO: 626668 - RNA, 19 nt, Artificial Sequence
  Description of Artificial Sequence: Synthetic oligonucleotide
gaagacaucaggguacaug

SEQ ID NO: 626669 - RNA, 19 nt, Artificial Sequence
  Description of Artificial Sequence: Synthetic oligonucleotide
cauaggggccccaaucugg

SEQ ID NO: 626670 - RNA, 19 nt, Artificial Sequence
  Description of Artificial Sequence: Synthetic oligonucleotide
uacuccagcgaguauuuug

SEQ ID NO: 626671 - RNA, 19 nt, Artificial Sequence
  Description of Artificial Sequence: Synthetic oligonucleotide
gaguauuuugugcgacugg

SEQ ID NO: 626672 - RNA, 19 nt, Artificial Sequence
  Description of Artificial Sequence: Synthetic oligonucleotide
uaaugcauaggaugugggu

SEQ ID NO: 626673 - RNA, 19 nt, Artificial Sequence
  Description of Artificial Sequence: Synthetic oligonucleotide
uccagcgaguauuuugugc

SEQ ID NO: 626674 - RNA, 19 nt, Artificial Sequence
  Description of Artificial Sequence: Synthetic oligonucleotide
agucccuuugguacaagcc

SEQ ID NO: 626675 - RNA, 19 nt, Artificial Sequence
  Description of Artificial Sequence: Synthetic oligonucleotide
cucuaggauaaggucaucg

SEQ ID NO: 626676 - RNA, 19 nt, Artificial Sequence
  Description of Artificial Sequence: Synthetic oligonucleotide
ugugugcgcacucgagugg

SEQ ID NO: 626677 - RNA, 19 nt, Artificial Sequence
  Description of Artificial Sequence: Synthetic oligonucleotide
acgugaaccuugcggaugg

SEQ ID NO: 626678 - RNA, 19 nt, Artificial Sequence
  Description of Artificial Sequence: Synthetic oligonucleotide
caccuugaugucuaugacc

SEQ ID NO: 626679 - RNA, 19 nt, Artificial Sequence
  Description of Artificial Sequence: Synthetic oligonucleotide
ugugcagagucuugccccg

SEQ ID NO: 626680 - RNA, 19 nt, Artificial Sequence
  Description of Artificial Sequence: Synthetic oligonucleotide
gucaaacacacgcuccagg

SEQ ID NO: 626681 - RNA, 19 nt, Artificial Sequence
  Description of Artificial Sequence: Synthetic oligonucleotide
uuaaccagaauggaccgaa

SEQ ID NO: 626682 - RNA, 19 nt, Artificial Sequence
  Description of Artificial Sequence: Synthetic oligonucleotide
ugucuaugaccuucccagg

SEQ ID NO: 626683 - RNA, 19 nt, Artificial Sequence
  Description of Artificial Sequence: Synthetic oligonucleotide
cucggcuuaacccauucug

SEQ ID NO: 626684 - RNA, 19 nt, Artificial Sequence
  Description of Artificial Sequence: Synthetic oligonucleotide
ucugaguugccagacuuca

SEQ ID NO: 626685 - RNA, 19 nt, Artificial Sequence
  Description of Artificial Sequence: Synthetic oligonucleotide
aggaaugggccacugcaag

SEQ ID NO: 626686 - RNA, 19 nt, Artificial Sequence
  Description of Artificial Sequence: Synthetic oligonucleotide
accccuaaaccaucucccc

SEQ ID NO: 626687 - RNA, 19 nt, Artificial Sequence
  Description of Artificial Sequence: Synthetic oligonucleotide
ugcgacuggggucagcuac

SEQ ID NO: 626688 - RNA, 19 nt, Artificial Sequence
  Description of Artificial Sequence: Synthetic oligonucleotide
agucuacugccacauccac

SEQ ID NO: 626689 - RNA, 19 nt, Artificial Sequence
  Description of Artificial Sequence: Synthetic oligonucleotide
uguugucccauggaacagg

SEQ ID NO: 626690 - RNA, 19 nt, Artificial Sequence
  Description of Artificial Sequence: Synthetic oligonucleotide
aauggcugacaggaauggg

SEQ ID NO: 626691 - RNA, 19 nt, Artificial Sequence
  Description of Artificial Sequence: Synthetic oligonucleotide
ggucacgugaaccuugcgg

SEQ ID NO: 626692 - RNA, 19 nt, Artificial Sequence
  Description of Artificial Sequence: Synthetic oligonucleotide
ccagcgaguauuuugugcg

SEQ ID NO: 626693 - RNA, 19 nt, Artificial Sequence
  Description of Artificial Sequence: Synthetic oligonucleotide
caaauuucccaggaccugc

SEQ ID NO: 626694 - RNA, 19 nt, Artificial Sequence
  Description of Artificial Sequence: Synthetic oligonucleotide
acaaucuuggaggauggug

SEQ ID NO: 626695 - RNA, 19 nt, Artificial Sequence
  Description of Artificial Sequence: Synthetic oligonucleotide
augugugcgcacucgagug

SEQ ID NO: 626696 - RNA, 19 nt, Artificial Sequence
  Description of Artificial Sequence: Synthetic oligonucleotide
aaugggccacugcaaguug

SEQ ID NO: 626697 - RNA, 19 nt, Artificial Sequence
  Description of Artificial Sequence: Synthetic oligonucleotide
cugcaaauuaggucuuccc

SEQ ID NO: 626698 - RNA, 19 nt, Artificial Sequence
  Description of Artificial Sequence: Synthetic oligonucleotide
cauugaguucaaagaaaac

SEQ ID NO: 626699 - RNA, 19 nt, Artificial Sequence
  Description of Artificial Sequence: Synthetic oligonucleotide
guauucacuguagucaaac

SEQ ID NO: 626700 - RNA, 19 nt, Artificial Sequence
  Description of Artificial Sequence: Synthetic oligonucleotide
acaucaccaguauacgaga

SEQ ID NO: 626701 - RNA, 19 nt, Artificial Sequence
  Description of Artificial Sequence: Synthetic oligonucleotide
acuugaacacucauauaag

SEQ ID NO: 626702 - RNA, 19 nt, Artificial Sequence
  Description of Artificial Sequence: Synthetic oligonucleotide
cacucauauaagaagcgca

SEQ ID NO: 626703 - RNA, 19 nt, Artificial Sequence
  Description of Artificial Sequence: Synthetic oligonucleotide
aggcauaggggccccaauc

SEQ ID NO: 626704 - RNA, 19 nt, Artificial Sequence
  Description of Artificial Sequence: Synthetic oligonucleotide
uugcggagggagcugacca

SEQ ID NO: 626705 - RNA, 19 nt, Artificial Sequence
  Description of Artificial Sequence: Synthetic oligonucleotide
ugucuuuaaccagaaugga

SEQ ID NO: 626706 - RNA, 19 nt, Artificial Sequence
  Description of Artificial Sequence: Synthetic oligonucleotide
agaucaugugugcgcacuc

SEQ ID NO: 626707 - RNA, 19 nt, Artificial Sequence
  Description of Artificial Sequence: Synthetic oligonucleotide
gucuaugaccuucccaggc

SEQ ID NO: 626708 - RNA, 19 nt, Artificial Sequence
  Description of Artificial Sequence: Synthetic oligonucleotide
gaucaugugugcgcacucg

SEQ ID NO: 626709 - RNA, 19 nt, Artificial Sequence
  Description of Artificial Sequence: Synthetic oligonucleotide
uccauaccauucuccuugg

SEQ ID NO: 626710 - RNA, 19 nt, Artificial Sequence
  Description of Artificial Sequence: Synthetic oligonucleotide
aucaccaguauacgagaug

SEQ ID NO: 626711 - RNA, 19 nt, Artificial Sequence
  Description of Artificial Sequence: Synthetic oligonucleotide
uguaguacuccagcgagua

SEQ ID NO: 626712 - RNA, 19 nt, Artificial Sequence
  Description of Artificial Sequence: Synthetic oligonucleotide
agaagcgcauggcaacauc

SEQ ID NO: 626713 - RNA, 19 nt, Artificial Sequence
  Description of Artificial Sequence: Synthetic oligonucleotide
ggaaaucuguugcggaggg

SEQ ID NO: 626714 - RNA, 19 nt, Artificial Sequence
  Description of Artificial Sequence: Synthetic oligonucleotide
gaagacguccauaccauuc

SEQ ID NO: 626715 - RNA, 19 nt, Artificial Sequence
  Description of Artificial Sequence: Synthetic oligonucleotide
gggaauuccaauguagccc

SEQ ID NO: 626716 - RNA, 19 nt, Artificial Sequence
  Description of Artificial Sequence: Synthetic oligonucleotide
gaugguuauuuggcaagag

SEQ ID NO: 626717 - RNA, 19 nt, Artificial Sequence
  Description of Artificial Sequence: Synthetic oligonucleotide
ggaugugggugccagcucg

SEQ ID NO: 626718 - RNA, 19 nt, Artificial Sequence
  Description of Artificial Sequence: Synthetic oligonucleotide
caaagauucggaagacguc

SEQ ID NO: 626719 - RNA, 19 nt, Artificial Sequence
  Description of Artificial Sequence: Synthetic oligonucleotide
uccccucuacucuuggcag

SEQ ID NO: 626720 - RNA, 19 nt, Artificial Sequence
  Description of Artificial Sequence: Synthetic oligonucleotide
cuuggucacgugaaccuug

SEQ ID NO: 626721 - RNA, 19 nt, Artificial Sequence
  Description of Artificial Sequence: Synthetic oligonucleotide
guucagaggagucccuuug

SEQ ID NO: 626722 - RNA, 19 nt, Artificial Sequence
  Description of Artificial Sequence: Synthetic oligonucleotide
cauacaggccccgagcccc

SEQ ID NO: 626723 - RNA, 19 nt, Artificial Sequence
  Description of Artificial Sequence: Synthetic oligonucleotide
gcuuaacccauucugcacc

SEQ ID NO: 626724 - RNA, 19 nt, Artificial Sequence
  Description of Artificial Sequence: Synthetic oligonucleotide
ccagucugaagcaagauca

SEQ ID NO: 626725 - RNA, 19 nt, Artificial Sequence
  Description of Artificial Sequence: Synthetic oligonucleotide
ugugugucgugugugugug

SEQ ID NO: 626726 - RNA, 19 nt, Artificial Sequence
  Description of Artificial Sequence: Synthetic oligonucleotide
gcaacugccugccaguaag

SEQ ID NO: 626727 - RNA, 19 nt, Artificial Sequence
  Description of Artificial Sequence: Synthetic oligonucleotide
uucggaagacguccauacc

SEQ ID NO: 626728 - RNA, 19 nt, Artificial Sequence
  Description of Artificial Sequence: Synthetic oligonucleotide
aaguugugggcaacauagg

SEQ ID NO: 626729 - RNA, 19 nt, Artificial Sequence
  Description of Artificial Sequence: Synthetic oligonucleotide
ucgaguggccaguagugac

SEQ ID NO: 626730 - RNA, 19 nt, Artificial Sequence
  Description of Artificial Sequence: Synthetic oligonucleotide
ugcaaguugugugugucgu

SEQ ID NO: 626731 - RNA, 19 nt, Artificial Sequence
  Description of Artificial Sequence: Synthetic oligonucleotide
ucguguguguguguugucc

SEQ ID NO: 626732 - RNA, 19 nt, Artificial Sequence
  Description of Artificial Sequence: Synthetic oligonucleotide
gagucccuuugguacaagc

SEQ ID NO: 626733 - RNA, 19 nt, Artificial Sequence
  Description of Artificial Sequence: Synthetic oligonucleotide
uaagaagcgcauggcaaca

SEQ ID NO: 626734 - RNA, 19 nt, Artificial Sequence
  Description of Artificial Sequence: Synthetic oligonucleotide
agcgaguauuuugugcgac

SEQ ID NO: 626735 - RNA, 19 nt, Artificial Sequence
  Description of Artificial Sequence: Synthetic oligonucleotide
uaaccagaauggaccgaag

SEQ ID NO: 626736 - RNA, 19 nt, Artificial Sequence
  Description of Artificial Sequence: Synthetic oligonucleotide
agaaccccuaaaccaucuc

SEQ ID NO: 626737 - RNA, 19 nt, Artificial Sequence
  Description of Artificial Sequence: Synthetic oligonucleotide
cuuugguacaagccaccag

SEQ ID NO: 626738 - RNA, 19 nt, Artificial Sequence
  Description of Artificial Sequence: Synthetic oligonucleotide
ugucguguguguguguugu

SEQ ID NO: 626739 - RNA, 19 nt, Artificial Sequence
  Description of Artificial Sequence: Synthetic oligonucleotide
auaggggccccaaucuggc

SEQ ID NO: 626740 - RNA, 19 nt, Artificial Sequence
  Description of Artificial Sequence: Synthetic oligonucleotide
caacaucagccccagcuug

SEQ ID NO: 626741 - RNA, 19 nt, Artificial Sequence
  Description of Artificial Sequence: Synthetic oligonucleotide
aaggccgcauacaggcccc

SEQ ID NO: 626742 - RNA, 19 nt, Artificial Sequence
  Description of Artificial Sequence: Synthetic oligonucleotide
cauguuuggcaaguaguug

SEQ ID NO: 626743 - RNA, 19 nt, Artificial Sequence
  Description of Artificial Sequence: Synthetic oligonucleotide
cacucgaucucuaggauaa

SEQ ID NO: 626744 - RNA, 19 nt, Artificial Sequence
  Description of Artificial Sequence: Synthetic oligonucleotide
uaguacuccagcgaguauu

SEQ ID NO: 626745 - RNA, 19 nt, Artificial Sequence
  Description of Artificial Sequence: Synthetic oligonucleotide
auacacaucugaguugcca

SEQ ID NO: 626746 - RNA, 19 nt, Artificial Sequence
  Description of Artificial Sequence: Synthetic oligonucleotide
acgagauggcagcuuccac

SEQ ID NO: 626747 - RNA, 19 nt, Artificial Sequence
  Description of Artificial Sequence: Synthetic oligonucleotide
caaucuuggaggauggugu

SEQ ID NO: 626748 - RNA, 19 nt, Artificial Sequence
  Description of Artificial Sequence: Synthetic oligonucleotide
ucacucgaucucuaggaua

SEQ ID NO: 626749 - RNA, 19 nt, Artificial Sequence
  Description of Artificial Sequence: Synthetic oligonucleotide
guguagguugguguacugg

SEQ ID NO: 626750 - RNA, 19 nt, Artificial Sequence
  Description of Artificial Sequence: Synthetic oligonucleotide
uggugucaccuugaugagg

SEQ ID NO: 626751 - RNA, 19 nt, Artificial Sequence
  Description of Artificial Sequence: Synthetic oligonucleotide
acucauauaagaagcgcau

SEQ ID NO: 626752 - RNA, 19 nt, Artificial Sequence
  Description of Artificial Sequence: Synthetic oligonucleotide
gguuauuuggcaagagaug

SEQ ID NO: 626753 - RNA, 19 nt, Artificial Sequence
  Description of Artificial Sequence: Synthetic oligonucleotide
ugagaacacagaggggcug

SEQ ID NO: 626754 - RNA, 19 nt, Artificial Sequence
  Description of Artificial Sequence: Synthetic oligonucleotide
cuacaucaccaguauacga

SEQ ID NO: 626755 - RNA, 19 nt, Artificial Sequence
  Description of Artificial Sequence: Synthetic oligonucleotide
aucaugugugcgcacucga

SEQ ID NO: 626756 - RNA, 19 nt, Artificial Sequence
  Description of Artificial Sequence: Synthetic oligonucleotide
aacaaggagcagaugguua

SEQ ID NO: 626757 - RNA, 19 nt, Artificial Sequence
  Description of Artificial Sequence: Synthetic oligonucleotide
augguagccgugcagucaa

SEQ ID NO: 626758 - RNA, 19 nt, Artificial Sequence
  Description of Artificial Sequence: Synthetic oligonucleotide
uacgagauggcagcuucca

SEQ ID NO: 626759 - RNA, 19 nt, Artificial Sequence
  Description of Artificial Sequence: Synthetic oligonucleotide
gacaggaaugggccacugc

SEQ ID NO: 626760 - RNA, 19 nt, Artificial Sequence
  Description of Artificial Sequence: Synthetic oligonucleotide
acuccagcgaguauuuugu

SEQ ID NO: 626761 - RNA, 19 nt, Artificial Sequence
  Description of Artificial Sequence: Synthetic oligonucleotide
cauggguauggaugugcag

SEQ ID NO: 626762 - RNA, 19 nt, Artificial Sequence
  Description of Artificial Sequence: Synthetic oligonucleotide
auacgagauggcagcuucc

SEQ ID NO: 626763 - RNA, 19 nt, Artificial Sequence
  Description of Artificial Sequence: Synthetic oligonucleotide
uugugugugucgugugugu

SEQ ID NO: 626764 - RNA, 19 nt, Artificial Sequence
  Description of Artificial Sequence: Synthetic oligonucleotide
ggagaagacaucaggguac

SEQ ID NO: 626765 - RNA, 19 nt, Artificial Sequence
  Description of Artificial Sequence: Synthetic oligonucleotide
ccuugaagaaagaggcggg

SEQ ID NO: 626766 - RNA, 19 nt, Artificial Sequence
  Description of Artificial Sequence: Synthetic oligonucleotide
ugugugugucgugugugug

SEQ ID NO: 626767 - RNA, 19 nt, Artificial Sequence
  Description of Artificial Sequence: Synthetic oligonucleotide
agagcgagggaaggacagc

SEQ ID NO: 626768 - RNA, 19 nt, Artificial Sequence
  Description of Artificial Sequence: Synthetic oligonucleotide
aagauucggaagacgucca

SEQ ID NO: 626769 - RNA, 19 nt, Artificial Sequence
  Description of Artificial Sequence: Synthetic oligonucleotide
agacaucaggguacauggc

SEQ ID NO: 626770 - RNA, 19 nt, Artificial Sequence
  Description of Artificial Sequence: Synthetic oligonucleotide
guugugugugucgugugug

SEQ ID NO: 626771 - RNA, 19 nt, Artificial Sequence
  Description of Artificial Sequence: Synthetic oligonucleotide
ugccagacuucaugguagc

SEQ ID NO: 626772 - RNA, 19 nt, Artificial Sequence
  Description of Artificial Sequence: Synthetic oligonucleotide
cauguccuuaaugcauagg

SEQ ID NO: 626773 - RNA, 19 nt, Artificial Sequence
  Description of Artificial Sequence: Synthetic oligonucleotide
agaacacagaggggcuggc

SEQ ID NO: 626774 - RNA, 19 nt, Artificial Sequence
  Description of Artificial Sequence: Synthetic oligonucleotide
caguagcccggccaugucc

SEQ ID NO: 626775 - RNA, 19 nt, Artificial Sequence
  Description of Artificial Sequence: Synthetic oligonucleotide
ucccaggaccugcaaauua

SEQ ID NO: 626776 - RNA, 19 nt, Artificial Sequence
  Description of Artificial Sequence: Synthetic oligonucleotide
ucugcucggcuuaacccau

SEQ ID NO: 626777 - RNA, 19 nt, Artificial Sequence
  Description of Artificial Sequence: Synthetic oligonucleotide
gguuagccuccacauaggc

SEQ ID NO: 626778 - RNA, 19 nt, Artificial Sequence
  Description of Artificial Sequence: Synthetic oligonucleotide
guccuugaagaaagaggcg

SEQ ID NO: 626779 - RNA, 19 nt, Artificial Sequence
  Description of Artificial Sequence: Synthetic oligonucleotide
aucacucgaucucuaggau

SEQ ID NO: 626780 - RNA, 19 nt, Artificial Sequence
  Description of Artificial Sequence: Synthetic oligonucleotide
aggauaaggucaucgccuu

SEQ ID NO: 626781 - RNA, 19 nt, Artificial Sequence
  Description of Artificial Sequence: Synthetic oligonucleotide
ugcggagggagcugaccag

SEQ ID NO: 626782 - RNA, 19 nt, Artificial Sequence
  Description of Artificial Sequence: Synthetic oligonucleotide
cagagaggacauccucugg

SEQ ID NO: 626783 - RNA, 19 nt, Artificial Sequence
  Description of Artificial Sequence: Synthetic oligonucleotide
agaugguuauuuggcaaga

SEQ ID NO: 626784 - RNA, 19 nt, Artificial Sequence
  Description of Artificial Sequence: Synthetic oligonucleotide
ccagacauggagucuacug

SEQ ID NO: 626785 - RNA, 19 nt, Artificial Sequence
  Description of Artificial Sequence: Synthetic oligonucleotide
agcgguaggucaggaaauc

SEQ ID NO: 626786 - RNA, 19 nt, Artificial Sequence
  Description of Artificial Sequence: Synthetic oligonucleotide
gcaagagaugaguauguga

SEQ ID NO: 626787 - RNA, 19 nt, Artificial Sequence
  Description of Artificial Sequence: Synthetic oligonucleotide
aguauacgagauggcagcu

SEQ ID NO: 626788 - RNA, 19 nt, Artificial Sequence
  Description of Artificial Sequence: Synthetic oligonucleotide
ugugggugccagcucgcac

SEQ ID NO: 626789 - RNA, 19 nt, Artificial Sequence
  Description of Artificial Sequence: Synthetic oligonucleotide
acucgaguggccaguagug

SEQ ID NO: 626790 - RNA, 19 nt, Artificial Sequence
  Description of Artificial Sequence: Synthetic oligonucleotide
ucacucacugccagggcuu

SEQ ID NO: 626791 - RNA, 19 nt, Artificial Sequence
  Description of Artificial Sequence: Synthetic oligonucleotide
caaucuggcccuucacauc

SEQ ID NO: 626792 - RNA, 19 nt, Artificial Sequence
  Description of Artificial Sequence: Synthetic oligonucleotide
guagguugguguacuggcc

SEQ ID NO: 626793 - RNA, 19 nt, Artificial Sequence
  Description of Artificial Sequence: Synthetic oligonucleotide
ggagcugaccagcauggug

SEQ ID NO: 626794 - RNA, 19 nt, Artificial Sequence
  Description of Artificial Sequence: Synthetic oligonucleotide
uccuugaacuuggagccaa

SEQ ID NO: 626795 - RNA, 19 nt, Artificial Sequence
  Description of Artificial Sequence: Synthetic oligonucleotide
caucugguuagccuccaca

SEQ ID NO: 626796 - RNA, 19 nt, Artificial Sequence
  Description of Artificial Sequence: Synthetic oligonucleotide
ugugucguguguguguguu

SEQ ID NO: 626797 - RNA, 19 nt, Artificial Sequence
  Description of Artificial Sequence: Synthetic oligonucleotide
gcaccuuagagcggaaggg

SEQ ID NO: 626798 - RNA, 19 nt, Artificial Sequence
  Description of Artificial Sequence: Synthetic oligonucleotide
gagaagacaucaggguaca

SEQ ID NO: 626799 - RNA, 19 nt, Artificial Sequence
  Description of Artificial Sequence: Synthetic oligonucleotide
caccaguauacgagauggc

SEQ ID NO: 626800 - RNA, 19 nt, Artificial Sequence
  Description of Artificial Sequence: Synthetic oligonucleotide
ugcucggcuuaacccauuc

SEQ ID NO: 626801 - RNA, 19 nt, Artificial Sequence
  Description of Artificial Sequence: Synthetic oligonucleotide
agcccgauucaggucacuc

SEQ ID NO: 626802 - RNA, 19 nt, Artificial Sequence
  Description of Artificial Sequence: Synthetic oligonucleotide
ggccuggaaguguagguug

SEQ ID NO: 626803 - RNA, 19 nt, Artificial Sequence
  Description of Artificial Sequence: Synthetic oligonucleotide
guugaaguugugggcaaca

SEQ ID NO: 626804 - RNA, 19 nt, Artificial Sequence
  Description of Artificial Sequence: Synthetic oligonucleotide
cccaggaccugcaaauuag

SEQ ID NO: 626805 - RNA, 19 nt, Artificial Sequence
  Description of Artificial Sequence: Synthetic oligonucleotide
ucaucgccuuccaguguca

SEQ ID NO: 626806 - RNA, 19 nt, Artificial Sequence
  Description of Artificial Sequence: Synthetic oligonucleotide
ugcagucaaaggccgcaua

SEQ ID NO: 626807 - RNA, 19 nt, Artificial Sequence
  Description of Artificial Sequence: Synthetic oligonucleotide
cugaagcaagaucacucga

SEQ ID NO: 626808 - RNA, 19 nt, Artificial Sequence
  Description of Artificial Sequence: Synthetic oligonucleotide
ggcuuaacccauucugcac

SEQ ID NO: 626809 - RNA, 19 nt, Artificial Sequence
  Description of Artificial Sequence: Synthetic oligonucleotide
aagaagcgcauggcaacau

SEQ ID NO: 626810 - RNA, 19 nt, Artificial Sequence
  Description of Artificial Sequence: Synthetic oligonucleotide
aacacacgcuccaggggca

SEQ ID NO: 626811 - RNA, 19 nt, Artificial Sequence
  Description of Artificial Sequence: Synthetic oligonucleotide
ugugcgcacucgaguggcc

SEQ ID NO: 626812 - RNA, 19 nt, Artificial Sequence
  Description of Artificial Sequence: Synthetic oligonucleotide
ggcaacauagggcgcaauc

SEQ ID NO: 626813 - RNA, 19 nt, Artificial Sequence
  Description of Artificial Sequence: Synthetic oligonucleotide
aggcuucaguagcccggcc

SEQ ID NO: 626814 - RNA, 19 nt, Artificial Sequence
  Description of Artificial Sequence: Synthetic oligonucleotide
ggaaguguagguuggugua

SEQ ID NO: 626815 - RNA, 19 nt, Artificial Sequence
  Description of Artificial Sequence: Synthetic oligonucleotide
accuuagagcggaagggcu

SEQ ID NO: 626816 - RNA, 19 nt, Artificial Sequence
  Description of Artificial Sequence: Synthetic oligonucleotide
caagcccauguaguacucc

SEQ ID NO: 626817 - RNA, 19 nt, Artificial Sequence
  Description of Artificial Sequence: Synthetic oligonucleotide
gcccauugaguucaaagaa

SEQ ID NO: 626818 - RNA, 19 nt, Artificial Sequence
  Description of Artificial Sequence: Synthetic oligonucleotide
guguugucccauggaacag

SEQ ID NO: 626819 - RNA, 19 nt, Artificial Sequence
  Description of Artificial Sequence: Synthetic oligonucleotide
aagucaucccagacaugga

SEQ ID NO: 626820 - RNA, 19 nt, Artificial Sequence
  Description of Artificial Sequence: Synthetic oligonucleotide
gaugugggugccagcucgc

SEQ ID NO: 626821 - RNA, 19 nt, Artificial Sequence
  Description of Artificial Sequence: Synthetic oligonucleotide
cuuagagcggaagggcuca

SEQ ID NO: 626822 - RNA, 19 nt, Artificial Sequence
  Description of Artificial Sequence: Synthetic oligonucleotide
ccaggaccugcaaauuagg

SEQ ID NO: 626823 - RNA, 19 nt, Artificial Sequence
  Description of Artificial Sequence: Synthetic oligonucleotide
agcugaccagcauggugca

SEQ ID NO: 626824 - RNA, 19 nt, Artificial Sequence
  Description of Artificial Sequence: Synthetic oligonucleotide
gcagcgguaggucaggaaa

SEQ ID NO: 626825 - RNA, 19 nt, Artificial Sequence
  Description of Artificial Sequence: Synthetic oligonucleotide
gcagaugguuauuuggcaa

SEQ ID NO: 626826 - RNA, 19 nt, Artificial Sequence
  Description of Artificial Sequence: Synthetic oligonucleotide
guagaaccccuaaaccauc

SEQ ID NO: 626827 - RNA, 19 nt, Artificial Sequence
  Description of Artificial Sequence: Synthetic oligonucleotide
agugggccgaagguggcug

SEQ ID NO: 626828 - RNA, 19 nt, Artificial Sequence
  Description of Artificial Sequence: Synthetic oligonucleotide
cagacuucaugguagccgu

SEQ ID NO: 626829 - RNA, 19 nt, Artificial Sequence
  Description of Artificial Sequence: Synthetic oligonucleotide
gauucggaagacguccaua

SEQ ID NO: 626830 - RNA, 19 nt, Artificial Sequence
  Description of Artificial Sequence: Synthetic oligonucleotide
ucaguagcccggccauguc

SEQ ID NO: 626831 - RNA, 19 nt, Artificial Sequence
  Description of Artificial Sequence: Synthetic oligonucleotide
uguagcccugcaggaauuc

SEQ ID NO: 626832 - RNA, 19 nt, Artificial Sequence
  Description of Artificial Sequence: Synthetic oligonucleotide
ccugccgccaccuugaugu

SEQ ID NO: 626833 - RNA, 19 nt, Artificial Sequence
  Description of Artificial Sequence: Synthetic oligonucleotide
guagcccugcaggaauucc

SEQ ID NO: 626834 - RNA, 19 nt, Artificial Sequence
  Description of Artificial Sequence: Synthetic oligonucleotide
cagugucauguccuugguc

SEQ ID NO: 626835 - RNA, 19 nt, Artificial Sequence
  Description of Artificial Sequence: Synthetic oligonucleotide
uguugcggagggagcugac

SEQ ID NO: 626836 - RNA, 19 nt, Artificial Sequence
  Description of Artificial Sequence: Synthetic oligonucleotide
ugacaggaaugggccacug

SEQ ID NO: 626837 - RNA, 19 nt, Artificial Sequence
  Description of Artificial Sequence: Synthetic oligonucleotide
guugcggagggagcugacc

SEQ ID NO: 626838 - RNA, 19 nt, Artificial Sequence
  Description of Artificial Sequence: Synthetic oligonucleotide
gugugcgcacucgaguggc

SEQ ID NO: 626839 - RNA, 19 nt, Artificial Sequence
  Description of Artificial Sequence: Synthetic oligonucleotide
guguguguguguuguccca

SEQ ID NO: 626840 - RNA, 19 nt, Artificial Sequence
  Description of Artificial Sequence: Synthetic oligonucleotide
caggcuucaguagcccggc

SEQ ID NO: 626841 - RNA, 19 nt, Artificial Sequence
  Description of Artificial Sequence: Synthetic oligonucleotide
agccaagccccaugcugug

SEQ ID NO: 626842 - RNA, 19 nt, Artificial Sequence
  Description of Artificial Sequence: Synthetic oligonucleotide
acauagggcgcaaucuuuu

SEQ ID NO: 626843 - RNA, 19 nt, Artificial Sequence
  Description of Artificial Sequence: Synthetic oligonucleotide
ggaccgaagcugcccauug

SEQ ID NO: 626844 - RNA, 19 nt, Artificial Sequence
  Description of Artificial Sequence: Synthetic oligonucleotide
gugucguguguguguguug

SEQ ID NO: 626845 - RNA, 19 nt, Artificial Sequence
  Description of Artificial Sequence: Synthetic oligonucleotide
agcaacugccugccaguaa

SEQ ID NO: 626846 - RNA, 19 nt, Artificial Sequence
  Description of Artificial Sequence: Synthetic oligonucleotide
cgaucucuaggauaagguc

SEQ ID NO: 626847 - RNA, 19 nt, Artificial Sequence
  Description of Artificial Sequence: Synthetic oligonucleotide
agcgagggaaggacagcuc

SEQ ID NO: 626848 - RNA, 19 nt, Artificial Sequence
  Description of Artificial Sequence: Synthetic oligonucleotide
gcauaggggccccaaucug

SEQ ID NO: 626849 - RNA, 19 nt, Artificial Sequence
  Description of Artificial Sequence: Synthetic oligonucleotide
gaaaucuguugcggaggga

SEQ ID NO: 626850 - RNA, 19 nt, Artificial Sequence
  Description of Artificial Sequence: Synthetic oligonucleotide
auguaguacuccagcgagu

SEQ ID NO: 626851 - RNA, 19 nt, Artificial Sequence
  Description of Artificial Sequence: Synthetic oligonucleotide
ccccaugccgcucaaucag

SEQ ID NO: 626852 - RNA, 19 nt, Artificial Sequence
  Description of Artificial Sequence: Synthetic oligonucleotide
caugugugcgcacucgagu

SEQ ID NO: 626853 - RNA, 19 nt, Artificial Sequence
  Description of Artificial Sequence: Synthetic oligonucleotide
gugggcaacauagggcgca

SEQ ID NO: 626854 - RNA, 19 nt, Artificial Sequence
  Description of Artificial Sequence: Synthetic oligonucleotide
cagagguagaaccccuaaa

SEQ ID NO: 626855 - RNA, 19 nt, Artificial Sequence
  Description of Artificial Sequence: Synthetic oligonucleotide
cugcaggaauuccaccaca

SEQ ID NO: 626856 - RNA, 19 nt, Artificial Sequence
  Description of Artificial Sequence: Synthetic oligonucleotide
ccuuagagcggaagggcuc

SEQ ID NO: 626857 - RNA, 19 nt, Artificial Sequence
  Description of Artificial Sequence: Synthetic oligonucleotide
gguauggaugugcagcggu

SEQ ID NO: 626858 - RNA, 19 nt, Artificial Sequence
  Description of Artificial Sequence: Synthetic oligonucleotide
gaaugggccacugcaaguu

SEQ ID NO: 626859 - RNA, 19 nt, Artificial Sequence
  Description of Artificial Sequence: Synthetic oligonucleotide
ccauguccuuaaugcauag

SEQ ID NO: 626860 - RNA, 19 nt, Artificial Sequence
  Description of Artificial Sequence: Synthetic oligonucleotide
cguguguguguguuguccc

SEQ ID NO: 626861 - RNA, 19 nt, Artificial Sequence
  Description of Artificial Sequence: Synthetic oligonucleotide
ugccagucugaagcaagau

SEQ ID NO: 626862 - RNA, 19 nt, Artificial Sequence
  Description of Artificial Sequence: Synthetic oligonucleotide
gguagaaccccuaaaccau

SEQ ID NO: 626863 - RNA, 19 nt, Artificial Sequence
  Description of Artificial Sequence: Synthetic oligonucleotide
gcaaguaguugagggaguc

SEQ ID NO: 626864 - RNA, 19 nt, Artificial Sequence
  Description of Artificial Sequence: Synthetic oligonucleotide
cugaugugucauggguaug

SEQ ID NO: 626865 - RNA, 19 nt, Artificial Sequence
  Description of Artificial Sequence: Synthetic oligonucleotide
uuugugcgacuggggucag

SEQ ID NO: 626866 - RNA, 19 nt, Artificial Sequence
  Description of Artificial Sequence: Synthetic oligonucleotide
gugugugucgugugugugu

SEQ ID NO: 626867 - RNA, 19 nt, Artificial Sequence
  Description of Artificial Sequence: Synthetic oligonucleotide
cgguaggucaggaaaucug

SEQ ID NO: 626868 - RNA, 19 nt, Artificial Sequence
  Description of Artificial Sequence: Synthetic oligonucleotide
gaagaaagaggcggguauu

SEQ ID NO: 626869 - RNA, 19 nt, Artificial Sequence
  Description of Artificial Sequence: Synthetic oligonucleotide
caggaccugcaaauuaggu

SEQ ID NO: 626870 - RNA, 19 nt, Artificial Sequence
  Description of Artificial Sequence: Synthetic oligonucleotide
cuugaagaaagaggcgggu

SEQ ID NO: 626871 - RNA, 19 nt, Artificial Sequence
  Description of Artificial Sequence: Synthetic oligonucleotide
gaauuccaccacagagcga

SEQ ID NO: 626872 - RNA, 19 nt, Artificial Sequence
  Description of Artificial Sequence: Synthetic oligonucleotide
cccaugccgcucaaucagg

SEQ ID NO: 626873 - RNA, 19 nt, Artificial Sequence
  Description of Artificial Sequence: Synthetic oligonucleotide
cacucgaguggccaguagu

SEQ ID NO: 626874 - RNA, 19 nt, Artificial Sequence
  Description of Artificial Sequence: Synthetic oligonucleotide
cagcgaguauuuugugcga

SEQ ID NO: 626875 - RNA, 19 nt, Artificial Sequence
  Description of Artificial Sequence: Synthetic oligonucleotide
ggcauaggggccccaaucu

SEQ ID NO: 626876 - RNA, 19 nt, Artificial Sequence
  Description of Artificial Sequence: Synthetic oligonucleotide
acacgcuccaggggcaccu

SEQ ID NO: 626877 - RNA, 19 nt, Artificial Sequence
  Description of Artificial Sequence: Synthetic oligonucleotide
gccgcauacaggccccgag

SEQ ID NO: 626878 - RNA, 19 nt, Artificial Sequence
  Description of Artificial Sequence: Synthetic oligonucleotide
cgaguauuuugugcgacug

SEQ ID NO: 626879 - RNA, 19 nt, Artificial Sequence
  Description of Artificial Sequence: Synthetic oligonucleotide
gccacugcaaguugugugu

SEQ ID NO: 626880 - RNA, 19 nt, Artificial Sequence
  Description of Artificial Sequence: Synthetic oligonucleotide
cucgaguggccaguaguga

SEQ ID NO: 626881 - RNA, 19 nt, Artificial Sequence
  Description of Artificial Sequence: Synthetic oligonucleotide
cuucaguagcccggccaug

SEQ ID NO: 626882 - RNA, 19 nt, Artificial Sequence
  Description of Artificial Sequence: Synthetic oligonucleotide
auggaccgaagcugcccau

SEQ ID NO: 626883 - RNA, 19 nt, Artificial Sequence
  Description of Artificial Sequence: Synthetic oligonucleotide
uucccaggaccugcaaauu

SEQ ID NO: 626884 - RNA, 19 nt, Artificial Sequence
  Description of Artificial Sequence: Synthetic oligonucleotide
ugccgccaccuugaugucu

SEQ ID NO: 626885 - RNA, 19 nt, Artificial Sequence
  Description of Artificial Sequence: Synthetic oligonucleotide
caacauagggcgcaaucuu

SEQ ID NO: 626886 - RNA, 19 nt, Artificial Sequence
  Description of Artificial Sequence: Synthetic oligonucleotide
guauggaugugcagcggua

SEQ ID NO: 626887 - RNA, 19 nt, Artificial Sequence
  Description of Artificial Sequence: Synthetic oligonucleotide
ccccucuacucuuggcagg

SEQ ID NO: 626888 - RNA, 19 nt, Artificial Sequence
  Description of Artificial Sequence: Synthetic oligonucleotide
cagccaagcccauguagua

SEQ ID NO: 626889 - RNA, 19 nt, Artificial Sequence
  Description of Artificial Sequence: Synthetic oligonucleotide
ggauaaggucaucgccuuc

SEQ ID NO: 626890 - RNA, 19 nt, Artificial Sequence
  Description of Artificial Sequence: Synthetic oligonucleotide
ugggcaacauagggcgcaa

SEQ ID NO: 626891 - RNA, 19 nt, Artificial Sequence
  Description of Artificial Sequence: Synthetic oligonucleotide
ccgcauacaggccccgagc

SEQ ID NO: 626892 - RNA, 19 nt, Artificial Sequence
  Description of Artificial Sequence: Synthetic oligonucleotide
uggaccgaagcugcccauu

SEQ ID NO: 626893 - RNA, 19 nt, Artificial Sequence
  Description of Artificial Sequence: Synthetic oligonucleotide
ugccccguuccaguuccac

SEQ ID NO: 626894 - RNA, 19 nt, Artificial Sequence
  Description of Artificial Sequence: Synthetic oligonucleotide
gccaagcccauguaguacu

SEQ ID NO: 626895 - RNA, 19 nt, Artificial Sequence
  Description of Artificial Sequence: Synthetic oligonucleotide
gcggguauugaggcugucc

SEQ ID NO: 626896 - RNA, 19 nt, Artificial Sequence
  Description of Artificial Sequence: Synthetic oligonucleotide
cuaugaccuucccaggcau

SEQ ID NO: 626897 - RNA, 19 nt, Artificial Sequence
  Description of Artificial Sequence: Synthetic oligonucleotide
gccccugaugugucauggg

SEQ ID NO: 626898 - RNA, 19 nt, Artificial Sequence
  Description of Artificial Sequence: Synthetic oligonucleotide
caucaccaguauacgagau

SEQ ID NO: 626899 - RNA, 19 nt, Artificial Sequence
  Description of Artificial Sequence: Synthetic oligonucleotide
gucguguguguguguuguc

SEQ ID NO: 626900 - RNA, 19 nt, Artificial Sequence
  Description of Artificial Sequence: Synthetic oligonucleotide
cccaaucuggcccuucaca

SEQ ID NO: 626901 - RNA, 19 nt, Artificial Sequence
  Description of Artificial Sequence: Synthetic oligonucleotide
gcccgauucaggucacuca

SEQ ID NO: 626902 - RNA, 19 nt, Artificial Sequence
  Description of Artificial Sequence: Synthetic oligonucleotide
accugccccugauguguca

SEQ ID NO: 626903 - RNA, 19 nt, Artificial Sequence
  Description of Artificial Sequence: Synthetic oligonucleotide
gccccguuccaguuccacc

SEQ ID NO: 626904 - RNA, 19 nt, Artificial Sequence
  Description of Artificial Sequence: Synthetic oligonucleotide
ugguagccgugcagucaaa

SEQ ID NO: 626905 - RNA, 19 nt, Artificial Sequence
  Description of Artificial Sequence: Synthetic oligonucleotide
agccucugcucggcuuaac

SEQ ID NO: 626906 - RNA, 19 nt, Artificial Sequence
  Description of Artificial Sequence: Synthetic oligonucleotide
gcgagggaaggacagcucu

SEQ ID NO: 626907 - RNA, 19 nt, Artificial Sequence
  Description of Artificial Sequence: Synthetic oligonucleotide
gccagcucgcaccaguucu

SEQ ID NO: 626908 - RNA, 19 nt, Artificial Sequence
  Description of Artificial Sequence: Synthetic oligonucleotide
accuugucuccugccgcca

SEQ ID NO: 626909 - RNA, 19 nt, Artificial Sequence
  Description of Artificial Sequence: Synthetic oligonucleotide
cugggaucucauucucaua

SEQ ID NO: 626910 - RNA, 19 nt, Artificial Sequence
  Description of Artificial Sequence: Synthetic oligonucleotide
cggguauugaggcugucca

SEQ ID NO: 626911 - RNA, 19 nt, Artificial Sequence
  Description of Artificial Sequence: Synthetic oligonucleotide
uugugcgacuggggucagc

SEQ ID NO: 626912 - RNA, 19 nt, Artificial Sequence
  Description of Artificial Sequence: Synthetic oligonucleotide
gcggagggagcugaccagc

SEQ ID NO: 626913 - RNA, 19 nt, Artificial Sequence
  Description of Artificial Sequence: Synthetic oligonucleotide
caggggcaccucuguguuc

SEQ ID NO: 626914 - RNA, 19 nt, Artificial Sequence
  Description of Artificial Sequence: Synthetic oligonucleotide
gccagacuucaugguagcc

SEQ ID NO: 626915 - RNA, 19 nt, Artificial Sequence
  Description of Artificial Sequence: Synthetic oligonucleotide
ggcccuuaaccaccuuguc

SEQ ID NO: 626916 - RNA, 19 nt, Artificial Sequence
  Description of Artificial Sequence: Synthetic oligonucleotide
ccaagcccauguaguacuc

SEQ ID NO: 626917 - RNA, 19 nt, Artificial Sequence
  Description of Artificial Sequence: Synthetic oligonucleotide
ccauaccauucuccuuggc

SEQ ID NO: 626918 - RNA, 19 nt, Artificial Sequence
  Description of Artificial Sequence: Synthetic oligonucleotide
cagcgguaggucaggaaau

SEQ ID NO: 626919 - RNA, 19 nt, Artificial Sequence
  Description of Artificial Sequence: Synthetic oligonucleotide
aggccgcauacaggccccg

SEQ ID NO: 626920 - RNA, 19 nt, Artificial Sequence
  Description of Artificial Sequence: Synthetic oligonucleotide
ggucagcuacaucaccagu

SEQ ID NO: 626921 - RNA, 19 nt, Artificial Sequence
  Description of Artificial Sequence: Synthetic oligonucleotide
guaguacuccagcgaguau

SEQ ID NO: 626922 - RNA, 19 nt, Artificial Sequence
  Description of Artificial Sequence: Synthetic oligonucleotide
ggacagcucuucugccuga

SEQ ID NO: 626923 - RNA, 19 nt, Artificial Sequence
  Description of Artificial Sequence: Synthetic oligonucleotide
gcgaguauuuugugcgacu

SEQ ID NO: 626924 - RNA, 19 nt, Artificial Sequence
  Description of Artificial Sequence: Synthetic oligonucleotide
gcgcauggcaacaucaaau

SEQ ID NO: 626925 - RNA, 19 nt, Artificial Sequence
  Description of Artificial Sequence: Synthetic oligonucleotide
cucuggccagcccgauuca

SEQ ID NO: 626926 - RNA, 19 nt, Artificial Sequence
  Description of Artificial Sequence: Synthetic oligonucleotide
guauacgagauggcagcuu

SEQ ID NO: 626927 - RNA, 19 nt, Artificial Sequence
  Description of Artificial Sequence: Synthetic oligonucleotide
ccgugcagucaaaggccgc

SEQ ID NO: 626928 - RNA, 19 nt, Artificial Sequence
  Description of Artificial Sequence: Synthetic oligonucleotide
ccagagguagaaccccuaa

SEQ ID NO: 626929 - RNA, 19 nt, Artificial Sequence
  Description of Artificial Sequence: Synthetic oligonucleotide
ggagucccuuugguacaag

SEQ ID NO: 626930 - RNA, 19 nt, Artificial Sequence
  Description of Artificial Sequence: Synthetic oligonucleotide
cagguccuuuagcaccuua

SEQ ID NO: 626931 - RNA, 19 nt, Artificial Sequence
  Description of Artificial Sequence: Synthetic oligonucleotide
cugaguugccagacuucau

SEQ ID NO: 626932 - RNA, 19 nt, Artificial Sequence
  Description of Artificial Sequence: Synthetic oligonucleotide
cucugcaauuuuggguccu

SEQ ID NO: 626933 - RNA, 19 nt, Artificial Sequence
  Description of Artificial Sequence: Synthetic oligonucleotide
ggaagacguccauaccauu

SEQ ID NO: 626934 - RNA, 19 nt, Artificial Sequence
  Description of Artificial Sequence: Synthetic oligonucleotide
gcgacuggggucagcuaca

SEQ ID NO: 626935 - RNA, 19 nt, Artificial Sequence
  Description of Artificial Sequence: Synthetic oligonucleotide
gugcagcgguaggucagga

SEQ ID NO: 626936 - RNA, 19 nt, Artificial Sequence
  Description of Artificial Sequence: Synthetic oligonucleotide
gugugucgugugugugugu

SEQ ID NO: 626937 - RNA, 19 nt, Artificial Sequence
  Description of Artificial Sequence: Synthetic oligonucleotide
ggcaaguaguugagggagu

SEQ ID NO: 626938 - RNA, 19 nt, Artificial Sequence
  Description of Artificial Sequence: Synthetic oligonucleotide
caccugcuggacaccugua

SEQ ID NO: 626939 - RNA, 19 nt, Artificial Sequence
  Description of Artificial Sequence: Synthetic oligonucleotide
cgcaccaguucuucagcca

SEQ ID NO: 626940 - RNA, 19 nt, Artificial Sequence
  Description of Artificial Sequence: Synthetic oligonucleotide
ccccugaugugucaugggu

SEQ ID NO: 626941 - RNA, 19 nt, Artificial Sequence
  Description of Artificial Sequence: Synthetic oligonucleotide
gugcgacuggggucagcua

SEQ ID NO: 626942 - RNA, 19 nt, Artificial Sequence
  Description of Artificial Sequence: Synthetic oligonucleotide
cggccauguccuuaaugca

SEQ ID NO: 626943 - RNA, 19 nt, Artificial Sequence
  Description of Artificial Sequence: Synthetic oligonucleotide
gcucggcuuaacccauucu

SEQ ID NO: 626944 - RNA, 19 nt, Artificial Sequence
  Description of Artificial Sequence: Synthetic oligonucleotide
gcgguaggucaggaaaucu

SEQ ID NO: 626945 - RNA, 19 nt, Artificial Sequence
  Description of Artificial Sequence: Synthetic oligonucleotide
gccgccaccuugaugucua

SEQ ID NO: 626946 - RNA, 19 nt, Artificial Sequence
  Description of Artificial Sequence: Synthetic oligonucleotide
ccgaagcugcccauugagu

SEQ ID NO: 626947 - RNA, 19 nt, Artificial Sequence
  Description of Artificial Sequence: Synthetic oligonucleotide
cggaagacguccauaccau

SEQ ID NO: 626948 - RNA, 19 nt, Artificial Sequence
  Description of Artificial Sequence: Synthetic oligonucleotide
caucgccuuccagugucau

SEQ ID NO: 626949 - RNA, 19 nt, Artificial Sequence
  Description of Artificial Sequence: Synthetic oligonucleotide
ggaagccuccauggggaau

SEQ ID NO: 626950 - RNA, 19 nt, Artificial Sequence
  Description of Artificial Sequence: Synthetic oligonucleotide
guacuccagcgaguauuuu

SEQ ID NO: 626951 - RNA, 19 nt, Artificial Sequence
  Description of Artificial Sequence: Synthetic oligonucleotide
gugccagcucgcaccaguu

SEQ ID NO: 626952 - RNA, 19 nt, Artificial Sequence
  Description of Artificial Sequence: Synthetic oligonucleotide
ggcggguauugaggcuguc

SEQ ID NO: 626953 - RNA, 19 nt, Artificial Sequence
  Description of Artificial Sequence: Synthetic oligonucleotide
ggccgcauacaggccccga

SEQ ID NO: 626954 - RNA, 19 nt, Artificial Sequence
  Description of Artificial Sequence: Synthetic oligonucleotide
ggccccaaucuggcccuuc

SEQ ID NO: 626955 - RNA, 19 nt, Artificial Sequence
  Description of Artificial Sequence: Synthetic oligonucleotide
cgccuuccagugucauguc

SEQ ID NO: 626956 - RNA, 19 nt, Artificial Sequence
  Description of Artificial Sequence: Synthetic oligonucleotide
ccaugcugugggccuggaa

SEQ ID NO: 626957 - RNA, 19 nt, Artificial Sequence
  Description of Artificial Sequence: Synthetic oligonucleotide
cugcucggcuuaacccauu

SEQ ID NO: 626958 - RNA, 19 nt, Artificial Sequence
  Description of Artificial Sequence: Synthetic oligonucleotide
ccagcucgcaccaguucuu

SEQ ID NO: 626959 - RNA, 19 nt, Artificial Sequence
  Description of Artificial Sequence: Synthetic oligonucleotide
cccgagccccuucccagua

SEQ ID NO: 626960 - RNA, 19 nt, Artificial Sequence
  Description of Artificial Sequence: Synthetic oligonucleotide
ccuuggucacgugaaccuu

SEQ ID NO: 626961 - RNA, 19 nt, Artificial Sequence
  Description of Artificial Sequence: Synthetic oligonucleotide
gggcaacauagggcgcaau

SEQ ID NO: 626962 - RNA, 19 nt, Artificial Sequence
  Description of Artificial Sequence: Synthetic oligonucleotide
cccaugcugugggccugga

SEQ ID NO: 626963 - RNA, 19 nt, Artificial Sequence
  Description of Artificial Sequence: Synthetic oligonucleotide
cgcacucgaguggccagua

SEQ ID NO: 626964 - RNA, 19 nt, Artificial Sequence
  Description of Artificial Sequence: Synthetic oligonucleotide
ccgagccccuucccaguau

SEQ ID NO: 626965 - RNA, 19 nt, Artificial Sequence
  Description of Artificial Sequence: Synthetic oligonucleotide
ccccacaaucuuggaggau

SEQ ID NO: 626966 - RNA, 19 nt, Artificial Sequence
  Description of Artificial Sequence: Synthetic oligonucleotide
cgugaaccuugcggauggu

SEQ ID NO: 626967 - RNA, 19 nt, Artificial Sequence
  Description of Artificial Sequence: Synthetic oligonucleotide
aacuugaugaaaugcaggc

SEQ ID NO: 626968 - RNA, 19 nt, Artificial Sequence
  Description of Artificial Sequence: Synthetic oligonucleotide
uuaucugcgaaaauuaagg

SEQ ID NO: 626969 - RNA, 19 nt, Artificial Sequence
  Description of Artificial Sequence: Synthetic oligonucleotide
aaaguugcaccccuuaauc

SEQ ID NO: 626970 - RNA, 19 nt, Artificial Sequence
  Description of Artificial Sequence: Synthetic oligonucleotide
aauguguucugccacaaug

SEQ ID NO: 626971 - RNA, 19 nt, Artificial Sequence
  Description of Artificial Sequence: Synthetic oligonucleotide
ucugcgaaaauuaaggcac

SEQ ID NO: 626972 - RNA, 19 nt, Artificial Sequence
  Description of Artificial Sequence: Synthetic oligonucleotide
augagauugccacuuagcc

SEQ ID NO: 626973 - RNA, 19 nt, Artificial Sequence
  Description of Artificial Sequence: Synthetic oligonucleotide
aaaaugaugucuauuccac

SEQ ID NO: 626974 - RNA, 19 nt, Artificial Sequence
  Description of Artificial Sequence: Synthetic oligonucleotide
uucgcaguaaaucauauuc

SEQ ID NO: 626975 - RNA, 19 nt, Artificial Sequence
  Description of Artificial Sequence: Synthetic oligonucleotide
aaguuaaugcuguagguga

SEQ ID NO: 626976 - RNA, 19 nt, Artificial Sequence
  Description of Artificial Sequence: Synthetic oligonucleotide
aaucauauucccgacgagg

SEQ ID NO: 626977 - RNA, 19 nt, Artificial Sequence
  Description of Artificial Sequence: Synthetic oligonucleotide
gaauccacgagccagggcc

SEQ ID NO: 626978 - RNA, 19 nt, Artificial Sequence
  Description of Artificial Sequence: Synthetic oligonucleotide
ugucccauaagcaaagggc

SEQ ID NO: 626979 - RNA, 19 nt, Artificial Sequence
  Description of Artificial Sequence: Synthetic oligonucleotide
aagaguagcucccugacaa

SEQ ID NO: 626980 - RNA, 19 nt, Artificial Sequence
  Description of Artificial Sequence: Synthetic oligonucleotide
aaguagacucuguccaagc

SEQ ID NO: 626981 - RNA, 19 nt, Artificial Sequence
  Description of Artificial Sequence: Synthetic oligonucleotide
uuuaccuuggaguagggau

SEQ ID NO: 626982 - RNA, 19 nt, Artificial Sequence
  Description of Artificial Sequence: Synthetic oligonucleotide
ugaacuucgcccuuggaga

SEQ ID NO: 626983 - RNA, 19 nt, Artificial Sequence
  Description of Artificial Sequence: Synthetic oligonucleotide
uacuccaauacuucugccg

SEQ ID NO: 626984 - RNA, 19 nt, Artificial Sequence
  Description of Artificial Sequence: Synthetic oligonucleotide
aaccucuggagccacuugg

SEQ ID NO: 626985 - RNA, 19 nt, Artificial Sequence
  Description of Artificial Sequence: Synthetic oligonucleotide
aaaaugccccgauggcucc

SEQ ID NO: 626986 - RNA, 19 nt, Artificial Sequence
  Description of Artificial Sequence: Synthetic oligonucleotide
uguaccagcaugucgacgu

SEQ ID NO: 626987 - RNA, 19 nt, Artificial Sequence
  Description of Artificial Sequence: Synthetic oligonucleotide
augucugaaaucgaaacuc

SEQ ID NO: 626988 - RNA, 19 nt, Artificial Sequence
  Description of Artificial Sequence: Synthetic oligonucleotide
agcaucgucggugaggucc

SEQ ID NO: 626989 - RNA, 19 nt, Artificial Sequence
  Description of Artificial Sequence: Synthetic oligonucleotide
cuugguguaggaauccacg

SEQ ID NO: 626990 - RNA, 19 nt, Artificial Sequence
  Description of Artificial Sequence: Synthetic oligonucleotide
uugagucgggcacagcucg

SEQ ID NO: 626991 - RNA, 19 nt, Artificial Sequence
  Description of Artificial Sequence: Synthetic oligonucleotide
aagugagccaguauuggcg

SEQ ID NO: 626992 - RNA, 19 nt, Artificial Sequence
  Description of Artificial Sequence: Synthetic oligonucleotide
cuuacuccaauacuucugc

SEQ ID NO: 626993 - RNA, 19 nt, Artificial Sequence
  Description of Artificial Sequence: Synthetic oligonucleotide
ucauugcugaucaugugca

SEQ ID NO: 626994 - RNA, 19 nt, Artificial Sequence
  Description of Artificial Sequence: Synthetic oligonucleotide
ucaaaugugccgcuccuug

SEQ ID NO: 626995 - RNA, 19 nt, Artificial Sequence
  Description of Artificial Sequence: Synthetic oligonucleotide
guaaaucauauucccgacg

SEQ ID NO: 626996 - RNA, 19 nt, Artificial Sequence
  Description of Artificial Sequence: Synthetic oligonucleotide
aagccaugaagcuuggcgu

SEQ ID NO: 626997 - RNA, 19 nt, Artificial Sequence
  Description of Artificial Sequence: Synthetic oligonucleotide
ugacauagguucuucgcag

SEQ ID NO: 626998 - RNA, 19 nt, Artificial Sequence
  Description of Artificial Sequence: Synthetic oligonucleotide
uauggauucuggcuggcug

SEQ ID NO: 626999 - RNA, 19 nt, Artificial Sequence
  Description of Artificial Sequence: Synthetic oligonucleotide
agaguggaugucuuacucg

SEQ ID NO: 627000 - RNA, 19 nt, Artificial Sequence
  Description of Artificial Sequence: Synthetic oligonucleotide
gaaguuaaugcuguaggug

SEQ ID NO: 627001 - RNA, 19 nt, Artificial Sequence
  Description of Artificial Sequence: Synthetic oligonucleotide
guaaguauucucaaacuug

SEQ ID NO: 627002 - RNA, 19 nt, Artificial Sequence
  Description of Artificial Sequence: Synthetic oligonucleotide
uaucugcgaaaauuaaggc

SEQ ID NO: 627003 - RNA, 19 nt, Artificial Sequence
  Description of Artificial Sequence: Synthetic oligonucleotide
ucgcaguaaaucauauucc

SEQ ID NO: 627004 - RNA, 19 nt, Artificial Sequence
  Description of Artificial Sequence: Synthetic oligonucleotide
aagaugacgcugaagagcu

SEQ ID NO: 627005 - RNA, 19 nt, Artificial Sequence
  Description of Artificial Sequence: Synthetic oligonucleotide
uguguucugccacaaugag

SEQ ID NO: 627006 - RNA, 19 nt, Artificial Sequence
  Description of Artificial Sequence: Synthetic oligonucleotide
agcuguacugguuaggacu

SEQ ID NO: 627007 - RNA, 19 nt, Artificial Sequence
  Description of Artificial Sequence: Synthetic oligonucleotide
cuaacgaguccagugagcg

SEQ ID NO: 627008 - RNA, 19 nt, Artificial Sequence
  Description of Artificial Sequence: Synthetic oligonucleotide
gucauugcugaucaugugc

SEQ ID NO: 627009 - RNA, 19 nt, Artificial Sequence
  Description of Artificial Sequence: Synthetic oligonucleotide
aacgaguccagugagcgug

SEQ ID NO: 627010 - RNA, 19 nt, Artificial Sequence
  Description of Artificial Sequence: Synthetic oligonucleotide
aagcuuggcguagagacag

SEQ ID NO: 627011 - RNA, 19 nt, Artificial Sequence
  Description of Artificial Sequence: Synthetic oligonucleotide
uggaguagggaucuggaaa

SEQ ID NO: 627012 - RNA, 19 nt, Artificial Sequence
  Description of Artificial Sequence: Synthetic oligonucleotide
agugagccaguauuggcgg

SEQ ID NO: 627013 - RNA, 19 nt, Artificial Sequence
  Description of Artificial Sequence: Synthetic oligonucleotide
uaaagaguagcucccugac

SEQ ID NO: 627014 - RNA, 19 nt, Artificial Sequence
  Description of Artificial Sequence: Synthetic oligonucleotide
uccucaaagcaagugagcc

SEQ ID NO: 627015 - RNA, 19 nt, Artificial Sequence
  Description of Artificial Sequence: Synthetic oligonucleotide
agcacuuuagggcgaggcc

SEQ ID NO: 627016 - RNA, 19 nt, Artificial Sequence
  Description of Artificial Sequence: Synthetic oligonucleotide
cagucagugucccauaagc

SEQ ID NO: 627017 - RNA, 19 nt, Artificial Sequence
  Description of Artificial Sequence: Synthetic oligonucleotide
cagguacguaggaagaugg

SEQ ID NO: 627018 - RNA, 19 nt, Artificial Sequence
  Description of Artificial Sequence: Synthetic oligonucleotide
aaguugcaccccuuaauca

SEQ ID NO: 627019 - RNA, 19 nt, Artificial Sequence
  Description of Artificial Sequence: Synthetic oligonucleotide
uugaugaaaugcaggcgag

SEQ ID NO: 627020 - RNA, 19 nt, Artificial Sequence
  Description of Artificial Sequence: Synthetic oligonucleotide
agacauucccagcuaacag

SEQ ID NO: 627021 - RNA, 19 nt, Artificial Sequence
  Description of Artificial Sequence: Synthetic oligonucleotide
caaaaugaugucuauucca

SEQ ID NO: 627022 - RNA, 19 nt, Artificial Sequence
  Description of Artificial Sequence: Synthetic oligonucleotide
guuaucugcgaaaauuaag

SEQ ID NO: 627023 - RNA, 19 nt, Artificial Sequence
  Description of Artificial Sequence: Synthetic oligonucleotide
ugguguaggaauccacgag

SEQ ID NO: 627024 - RNA, 19 nt, Artificial Sequence
  Description of Artificial Sequence: Synthetic oligonucleotide
uguuaucugcgaaaauuaa

SEQ ID NO: 627025 - RNA, 19 nt, Artificial Sequence
  Description of Artificial Sequence: Synthetic oligonucleotide
caccaauccacucgaaccg

SEQ ID NO: 627026 - RNA, 19 nt, Artificial Sequence
  Description of Artificial Sequence: Synthetic oligonucleotide
acgagggacaggcagguag

SEQ ID NO: 627027 - RNA, 19 nt, Artificial Sequence
  Description of Artificial Sequence: Synthetic oligonucleotide
agucgaagacauucccagc

SEQ ID NO: 627028 - RNA, 19 nt, Artificial Sequence
  Description of Artificial Sequence: Synthetic oligonucleotide
caugccaagaugaccuccg

SEQ ID NO: 627029 - RNA, 19 nt, Artificial Sequence
  Description of Artificial Sequence: Synthetic oligonucleotide
gaugagauugccacuuagc

SEQ ID NO: 627030 - RNA, 19 nt, Artificial Sequence
  Description of Artificial Sequence: Synthetic oligonucleotide
caguaggucaaaugugccg

SEQ ID NO: 627031 - RNA, 19 nt, Artificial Sequence
  Description of Artificial Sequence: Synthetic oligonucleotide
uuaccuuggaguagggauc

SEQ ID NO: 627032 - RNA, 19 nt, Artificial Sequence
  Description of Artificial Sequence: Synthetic oligonucleotide
guauuggcgggccagagca

SEQ ID NO: 627033 - RNA, 19 nt, Artificial Sequence
  Description of Artificial Sequence: Synthetic oligonucleotide
gauucaaggacaucagaua

SEQ ID NO: 627034 - RNA, 19 nt, Artificial Sequence
  Description of Artificial Sequence: Synthetic oligonucleotide
agugccugaacuucgcccu

SEQ ID NO: 627035 - RNA, 19 nt, Artificial Sequence
  Description of Artificial Sequence: Synthetic oligonucleotide
aaucgggagccuuccacca

SEQ ID NO: 627036 - RNA, 19 nt, Artificial Sequence
  Description of Artificial Sequence: Synthetic oligonucleotide
caagugagccaguauuggc

SEQ ID NO: 627037 - RNA, 19 nt, Artificial Sequence
  Description of Artificial Sequence: Synthetic oligonucleotide
gguguaggaauccacgagc

SEQ ID NO: 627038 - RNA, 19 nt, Artificial Sequence
  Description of Artificial Sequence: Synthetic oligonucleotide
uugguguaggaauccacga

SEQ ID NO: 627039 - RNA, 19 nt, Artificial Sequence
  Description of Artificial Sequence: Synthetic oligonucleotide
uagggcgaggccauuuucc

SEQ ID NO: 627040 - RNA, 19 nt, Artificial Sequence
  Description of Artificial Sequence: Synthetic oligonucleotide
augauaguugguguggaug

SEQ ID NO: 627041 - RNA, 19 nt, Artificial Sequence
  Description of Artificial Sequence: Synthetic oligonucleotide
agcuaacagccccuucacc

SEQ ID NO: 627042 - RNA, 19 nt, Artificial Sequence
  Description of Artificial Sequence: Synthetic oligonucleotide
agagugccugaacuucgcc

SEQ ID NO: 627043 - RNA, 19 nt, Artificial Sequence
  Description of Artificial Sequence: Synthetic oligonucleotide
agaucuaggcacggggagc

SEQ ID NO: 627044 - RNA, 19 nt, Artificial Sequence
  Description of Artificial Sequence: Synthetic oligonucleotide
acugguuaggacugucuug

SEQ ID NO: 627045 - RNA, 19 nt, Artificial Sequence
  Description of Artificial Sequence: Synthetic oligonucleotide
gagugccugaacuucgccc

SEQ ID NO: 627046 - RNA, 19 nt, Artificial Sequence
  Description of Artificial Sequence: Synthetic oligonucleotide
augaccuuggucucugugu

SEQ ID NO: 627047 - RNA, 19 nt, Artificial Sequence
  Description of Artificial Sequence: Synthetic oligonucleotide
guugguguggauggcacgg

SEQ ID NO: 627048 - RNA, 19 nt, Artificial Sequence
  Description of Artificial Sequence: Synthetic oligonucleotide
aguugcaccccuuaaucaa

SEQ ID NO: 627049 - RNA, 19 nt, Artificial Sequence
  Description of Artificial Sequence: Synthetic oligonucleotide
ucuauuccacuguuaucug

SEQ ID NO: 627050 - RNA, 19 nt, Artificial Sequence
  Description of Artificial Sequence: Synthetic oligonucleotide
cauauucccgacgagggac

SEQ ID NO: 627051 - RNA, 19 nt, Artificial Sequence
  Description of Artificial Sequence: Synthetic oligonucleotide
uccaccaauccacucgaac

SEQ ID NO: 627052 - RNA, 19 nt, Artificial Sequence
  Description of Artificial Sequence: Synthetic oligonucleotide
caugucucaggaagagugc

SEQ ID NO: 627053 - RNA, 19 nt, Artificial Sequence
  Description of Artificial Sequence: Synthetic oligonucleotide
cuaacagccccuucaccag

SEQ ID NO: 627054 - RNA, 19 nt, Artificial Sequence
  Description of Artificial Sequence: Synthetic oligonucleotide
caccaccccaucuagggcc

SEQ ID NO: 627055 - RNA, 19 nt, Artificial Sequence
  Description of Artificial Sequence: Synthetic oligonucleotide
caaucgggagccuuccacc

SEQ ID NO: 627056 - RNA, 19 nt, Artificial Sequence
  Description of Artificial Sequence: Synthetic oligonucleotide
ucuucgcaguaaaucauau

SEQ ID NO: 627057 - RNA, 19 nt, Artificial Sequence
  Description of Artificial Sequence: Synthetic oligonucleotide
ggagaugugcucaucagcc

SEQ ID NO: 627058 - RNA, 19 nt, Artificial Sequence
  Description of Artificial Sequence: Synthetic oligonucleotide
uguaggaauccacgagcca

SEQ ID NO: 627059 - RNA, 19 nt, Artificial Sequence
  Description of Artificial Sequence: Synthetic oligonucleotide
guggaugucuuacucggug

SEQ ID NO: 627060 - RNA, 19 nt, Artificial Sequence
  Description of Artificial Sequence: Synthetic oligonucleotide
acucccgugugacauaggu

SEQ ID NO: 627061 - RNA, 19 nt, Artificial Sequence
  Description of Artificial Sequence: Synthetic oligonucleotide
uucccgacgagggacaggc

SEQ ID NO: 627062 - RNA, 19 nt, Artificial Sequence
  Description of Artificial Sequence: Synthetic oligonucleotide
gugagcagagccccaagcc

SEQ ID NO: 627063 - RNA, 19 nt, Artificial Sequence
  Description of Artificial Sequence: Synthetic oligonucleotide
agcuuacuccaauacuucu

SEQ ID NO: 627064 - RNA, 19 nt, Artificial Sequence
  Description of Artificial Sequence: Synthetic oligonucleotide
ucuaggcacggggagcugg

SEQ ID NO: 627065 - RNA, 19 nt, Artificial Sequence
  Description of Artificial Sequence: Synthetic oligonucleotide
uucuucgcaguaaaucaua

SEQ ID NO: 627066 - RNA, 19 nt, Artificial Sequence
  Description of Artificial Sequence: Synthetic oligonucleotide
uggccccggaugaagaagc

SEQ ID NO: 627067 - RNA, 19 nt, Artificial Sequence
  Description of Artificial Sequence: Synthetic oligonucleotide
uuaggacugucuugcucag

SEQ ID NO: 627068 - RNA, 19 nt, Artificial Sequence
  Description of Artificial Sequence: Synthetic oligonucleotide
gugugacauagguucuucg

SEQ ID NO: 627069 - RNA, 19 nt, Artificial Sequence
  Description of Artificial Sequence: Synthetic oligonucleotide
agccuaacgaguccaguga

SEQ ID NO: 627070 - RNA, 19 nt, Artificial Sequence
  Description of Artificial Sequence: Synthetic oligonucleotide
ucgucggugagguccacug

SEQ ID NO: 627071 - RNA, 19 nt, Artificial Sequence
  Description of Artificial Sequence: Synthetic oligonucleotide
ccaccaauccacucgaacc

SEQ ID NO: 627072 - RNA, 19 nt, Artificial Sequence
  Description of Artificial Sequence: Synthetic oligonucleotide
caggcgagcugugauaucc

SEQ ID NO: 627073 - RNA, 19 nt, Artificial Sequence
  Description of Artificial Sequence: Synthetic oligonucleotide
uugcaccccuuaaucaagc

SEQ ID NO: 627074 - RNA, 19 nt, Artificial Sequence
  Description of Artificial Sequence: Synthetic oligonucleotide
ugagggacucacuguaggu

SEQ ID NO: 627075 - RNA, 19 nt, Artificial Sequence
  Description of Artificial Sequence: Synthetic oligonucleotide
uugacuagguggucucuga

SEQ ID NO: 627076 - RNA, 19 nt, Artificial Sequence
  Description of Artificial Sequence: Synthetic oligonucleotide
gauucuggcuggcuggcca

SEQ ID NO: 627077 - RNA, 19 nt, Artificial Sequence
  Description of Artificial Sequence: Synthetic oligonucleotide
ggggaagacucccaaaaug

SEQ ID NO: 627078 - RNA, 19 nt, Artificial Sequence
  Description of Artificial Sequence: Synthetic oligonucleotide
caugccggccucuggaggc

SEQ ID NO: 627079 - RNA, 19 nt, Artificial Sequence
  Description of Artificial Sequence: Synthetic oligonucleotide
ucgacguuggcaugccggc

SEQ ID NO: 627080 - RNA, 19 nt, Artificial Sequence
  Description of Artificial Sequence: Synthetic oligonucleotide
ugggccccgccauagaugu

SEQ ID NO: 627081 - RNA, 19 nt, Artificial Sequence
  Description of Artificial Sequence: Synthetic oligonucleotide
uuacucggugggaaccuca

SEQ ID NO: 627082 - RNA, 19 nt, Artificial Sequence
  Description of Artificial Sequence: Synthetic oligonucleotide
aauccacgagccagggccg

SEQ ID NO: 627083 - RNA, 19 nt, Artificial Sequence
  Description of Artificial Sequence: Synthetic oligonucleotide
caugucgacguuggcaugc

SEQ ID NO: 627084 - RNA, 19 nt, Artificial Sequence
  Description of Artificial Sequence: Synthetic oligonucleotide
cagccuaacgaguccagug

SEQ ID NO: 627085 - RNA, 19 nt, Artificial Sequence
  Description of Artificial Sequence: Synthetic oligonucleotide
gucgacguuggcaugccgg

SEQ ID NO: 627086 - RNA, 19 nt, Artificial Sequence
  Description of Artificial Sequence: Synthetic oligonucleotide
aaaugccccgauggcuccc

SEQ ID NO: 627087 - RNA, 19 nt, Artificial Sequence
  Description of Artificial Sequence: Synthetic oligonucleotide
ggaucuggaaaguugaacu

SEQ ID NO: 627088 - RNA, 19 nt, Artificial Sequence
  Description of Artificial Sequence: Synthetic oligonucleotide
cacagcucgcuucaccacc

SEQ ID NO: 627089 - RNA, 19 nt, Artificial Sequence
  Description of Artificial Sequence: Synthetic oligonucleotide
cucauuuaaacagugcucu

SEQ ID NO: 627090 - RNA, 19 nt, Artificial Sequence
  Description of Artificial Sequence: Synthetic oligonucleotide
guguaggaauccacgagcc

SEQ ID NO: 627091 - RNA, 19 nt, Artificial Sequence
  Description of Artificial Sequence: Synthetic oligonucleotide
gcggcugagaucuaggcac

SEQ ID NO: 627092 - RNA, 19 nt, Artificial Sequence
  Description of Artificial Sequence: Synthetic oligonucleotide
ucgggcacagcucgggaga

SEQ ID NO: 627093 - RNA, 19 nt, Artificial Sequence
  Description of Artificial Sequence: Synthetic oligonucleotide
ugucuuacucggugggaac

SEQ ID NO: 627094 - RNA, 19 nt, Artificial Sequence
  Description of Artificial Sequence: Synthetic oligonucleotide
ugcccguugagucgggcac

SEQ ID NO: 627095 - RNA, 19 nt, Artificial Sequence
  Description of Artificial Sequence: Synthetic oligonucleotide
aggcguucuucaccacugc

SEQ ID NO: 627096 - RNA, 19 nt, Artificial Sequence
  Description of Artificial Sequence: Synthetic oligonucleotide
guguccaacaggcugcgca

SEQ ID NO: 627097 - RNA, 19 nt, Artificial Sequence
  Description of Artificial Sequence: Synthetic oligonucleotide
guaguucucgccccagcug

SEQ ID NO: 627098 - RNA, 19 nt, Artificial Sequence
  Description of Artificial Sequence: Synthetic oligonucleotide
aauacucccgugugacaua

SEQ ID NO: 627099 - RNA, 19 nt, Artificial Sequence
  Description of Artificial Sequence: Synthetic oligonucleotide
cauggucacaggguggccc

SEQ ID NO: 627100 - RNA, 19 nt, Artificial Sequence
  Description of Artificial Sequence: Synthetic oligonucleotide
gagacaggcgagcugucca

SEQ ID NO: 627101 - RNA, 19 nt, Artificial Sequence
  Description of Artificial Sequence: Synthetic oligonucleotide
gugagcgugucacacucug

SEQ ID NO: 627102 - RNA, 19 nt, Artificial Sequence
  Description of Artificial Sequence: Synthetic oligonucleotide
caccuagccgcucugccag

SEQ ID NO: 627103 - RNA, 19 nt, Artificial Sequence
  Description of Artificial Sequence: Synthetic oligonucleotide
gauaguugguguggauggc

SEQ ID NO: 627104 - RNA, 19 nt, Artificial Sequence
  Description of Artificial Sequence: Synthetic oligonucleotide
uuuagggcgaggccauuuu

SEQ ID NO: 627105 - RNA, 19 nt, Artificial Sequence
  Description of Artificial Sequence: Synthetic oligonucleotide
aaggccucaugagggaugu

SEQ ID NO: 627106 - RNA, 19 nt, Artificial Sequence
  Description of Artificial Sequence: Synthetic oligonucleotide
ugagucgggcacagcucgg

SEQ ID NO: 627107 - RNA, 19 nt, Artificial Sequence
  Description of Artificial Sequence: Synthetic oligonucleotide
uggcaugccggccucugga

SEQ ID NO: 627108 - RNA, 19 nt, Artificial Sequence
  Description of Artificial Sequence: Synthetic oligonucleotide
uuccacuguuaucugcgaa

SEQ ID NO: 627109 - RNA, 19 nt, Artificial Sequence
  Description of Artificial Sequence: Synthetic oligonucleotide
guugcaccccuuaaucaag

SEQ ID NO: 627110 - RNA, 19 nt, Artificial Sequence
  Description of Artificial Sequence: Synthetic oligonucleotide
cagguagccuucaugucuc

SEQ ID NO: 627111 - RNA, 19 nt, Artificial Sequence
  Description of Artificial Sequence: Synthetic oligonucleotide
caugaagcuuggcguagag

SEQ ID NO: 627112 - RNA, 19 nt, Artificial Sequence
  Description of Artificial Sequence: Synthetic oligonucleotide
auuggcgggccagagcauc

SEQ ID NO: 627113 - RNA, 19 nt, Artificial Sequence
  Description of Artificial Sequence: Synthetic oligonucleotide
auguguucugccacaauga

SEQ ID NO: 627114 - RNA, 19 nt, Artificial Sequence
  Description of Artificial Sequence: Synthetic oligonucleotide
ugugucagguacguaggaa

SEQ ID NO: 627115 - RNA, 19 nt, Artificial Sequence
  Description of Artificial Sequence: Synthetic oligonucleotide
ugucgacguuggcaugccg

SEQ ID NO: 627116 - RNA, 19 nt, Artificial Sequence
  Description of Artificial Sequence: Synthetic oligonucleotide
cagugagcgugucacacuc

SEQ ID NO: 627117 - RNA, 19 nt, Artificial Sequence
  Description of Artificial Sequence: Synthetic oligonucleotide
ugcgaugagauugccacuu

SEQ ID NO: 627118 - RNA, 19 nt, Artificial Sequence
  Description of Artificial Sequence: Synthetic oligonucleotide
gccccuuuaaccucuggag

SEQ ID NO: 627119 - RNA, 19 nt, Artificial Sequence
  Description of Artificial Sequence: Synthetic oligonucleotide
gacgaggggccucucuagc

SEQ ID NO: 627120 - RNA, 19 nt, Artificial Sequence
  Description of Artificial Sequence: Synthetic oligonucleotide
uccgucccucuaaagagua

SEQ ID NO: 627121 - RNA, 19 nt, Artificial Sequence
  Description of Artificial Sequence: Synthetic oligonucleotide
ggcacggggagcuggaacc

SEQ ID NO: 627122 - RNA, 19 nt, Artificial Sequence
  Description of Artificial Sequence: Synthetic oligonucleotide
cugcgcacagucagugucc

SEQ ID NO: 627123 - RNA, 19 nt, Artificial Sequence
  Description of Artificial Sequence: Synthetic oligonucleotide
ucuuacucggugggaaccu

SEQ ID NO: 627124 - RNA, 19 nt, Artificial Sequence
  Description of Artificial Sequence: Synthetic oligonucleotide
aguccagacaggcuuccau

SEQ ID NO: 627125 - RNA, 19 nt, Artificial Sequence
  Description of Artificial Sequence: Synthetic oligonucleotide
gggagaugugcucaucagc

SEQ ID NO: 627126 - RNA, 19 nt, Artificial Sequence
  Description of Artificial Sequence: Synthetic oligonucleotide
ugccaagaugaccuccguc

SEQ ID NO: 627127 - RNA, 19 nt, Artificial Sequence
  Description of Artificial Sequence: Synthetic oligonucleotide
uguaggcuccaccccuugu

SEQ ID NO: 627128 - RNA, 19 nt, Artificial Sequence
  Description of Artificial Sequence: Synthetic oligonucleotide
gucuuacucggugggaacc

SEQ ID NO: 627129 - RNA, 19 nt, Artificial Sequence
  Description of Artificial Sequence: Synthetic oligonucleotide
uucgcccuuggagaagaag

SEQ ID NO: 627130 - RNA, 19 nt, Artificial Sequence
  Description of Artificial Sequence: Synthetic oligonucleotide
ccuccgucccucuaaagag

SEQ ID NO: 627131 - RNA, 19 nt, Artificial Sequence
  Description of Artificial Sequence: Synthetic oligonucleotide
cucgaaccgauccucuguc

SEQ ID NO: 627132 - RNA, 19 nt, Artificial Sequence
  Description of Artificial Sequence: Synthetic oligonucleotide
guugacuagguggucucug

SEQ ID NO: 627133 - RNA, 19 nt, Artificial Sequence
  Description of Artificial Sequence: Synthetic oligonucleotide
agggcgaggccauuuuccu

SEQ ID NO: 627134 - RNA, 19 nt, Artificial Sequence
  Description of Artificial Sequence: Synthetic oligonucleotide
uccacucgaaccgauccuc

SEQ ID NO: 627135 - RNA, 19 nt, Artificial Sequence
  Description of Artificial Sequence: Synthetic oligonucleotide
gaacuucgcccuuggagaa

SEQ ID NO: 627136 - RNA, 19 nt, Artificial Sequence
  Description of Artificial Sequence: Synthetic oligonucleotide
acauagguucuucgcagua

SEQ ID NO: 627137 - RNA, 19 nt, Artificial Sequence
  Description of Artificial Sequence: Synthetic oligonucleotide
aacuucgcccuuggagaag

SEQ ID NO: 627138 - RNA, 19 nt, Artificial Sequence
  Description of Artificial Sequence: Synthetic oligonucleotide
gaacucucugucggcagug

SEQ ID NO: 627139 - RNA, 19 nt, Artificial Sequence
  Description of Artificial Sequence: Synthetic oligonucleotide
gucuaggcggcugagaucu

SEQ ID NO: 627140 - RNA, 19 nt, Artificial Sequence
  Description of Artificial Sequence: Synthetic oligonucleotide
ugcaggcgagcugugauau

SEQ ID NO: 627141 - RNA, 19 nt, Artificial Sequence
  Description of Artificial Sequence: Synthetic oligonucleotide
caugucugaaaucgaaacu

SEQ ID NO: 627142 - RNA, 19 nt, Artificial Sequence
  Description of Artificial Sequence: Synthetic oligonucleotide
aggggaagacucccaaaau

SEQ ID NO: 627143 - RNA, 19 nt, Artificial Sequence
  Description of Artificial Sequence: Synthetic oligonucleotide
uugcccguugagucgggca

SEQ ID NO: 627144 - RNA, 19 nt, Artificial Sequence
  Description of Artificial Sequence: Synthetic oligonucleotide
agauacggccuuggcuccc

SEQ ID NO: 627145 - RNA, 19 nt, Artificial Sequence
  Description of Artificial Sequence: Synthetic oligonucleotide
augucgacguuggcaugcc

SEQ ID NO: 627146 - RNA, 19 nt, Artificial Sequence
  Description of Artificial Sequence: Synthetic oligonucleotide
ugccgcagugucugaagcu

SEQ ID NO: 627147 - RNA, 19 nt, Artificial Sequence
  Description of Artificial Sequence: Synthetic oligonucleotide
gugagccaguauuggcggg

SEQ ID NO: 627148 - RNA, 19 nt, Artificial Sequence
  Description of Artificial Sequence: Synthetic oligonucleotide
uaacgaguccagugagcgu

SEQ ID NO: 627149 - RNA, 19 nt, Artificial Sequence
  Description of Artificial Sequence: Synthetic oligonucleotide
agggccugaguugcaugcc

SEQ ID NO: 627150 - RNA, 19 nt, Artificial Sequence
  Description of Artificial Sequence: Synthetic oligonucleotide
agccccuugucuaggcggc

SEQ ID NO: 627151 - RNA, 19 nt, Artificial Sequence
  Description of Artificial Sequence: Synthetic oligonucleotide
ucgcuucaccaccccaucu

SEQ ID NO: 627152 - RNA, 19 nt, Artificial Sequence
  Description of Artificial Sequence: Synthetic oligonucleotide
ugcgaaaauuaaggcacau

SEQ ID NO: 627153 - RNA, 19 nt, Artificial Sequence
  Description of Artificial Sequence: Synthetic oligonucleotide
caauccacucgaaccgauc

SEQ ID NO: 627154 - RNA, 19 nt, Artificial Sequence
  Description of Artificial Sequence: Synthetic oligonucleotide
gacaucagauacggccuug

SEQ ID NO: 627155 - RNA, 19 nt, Artificial Sequence
  Description of Artificial Sequence: Synthetic oligonucleotide
gagucgggcacagcucggg

SEQ ID NO: 627156 - RNA, 19 nt, Artificial Sequence
  Description of Artificial Sequence: Synthetic oligonucleotide
agguacguaggaagauggg

SEQ ID NO: 627157 - RNA, 19 nt, Artificial Sequence
  Description of Artificial Sequence: Synthetic oligonucleotide
ggcugcguaguucucgccc

SEQ ID NO: 627158 - RNA, 19 nt, Artificial Sequence
  Description of Artificial Sequence: Synthetic oligonucleotide
ugaccuccgucccucuaaa

SEQ ID NO: 627159 - RNA, 19 nt, Artificial Sequence
  Description of Artificial Sequence: Synthetic oligonucleotide
ccaguaggucaaaugugcc

SEQ ID NO: 627160 - RNA, 19 nt, Artificial Sequence
  Description of Artificial Sequence: Synthetic oligonucleotide
gaugucuuacucgguggga

SEQ ID NO: 627161 - RNA, 19 nt, Artificial Sequence
  Description of Artificial Sequence: Synthetic oligonucleotide
ucgaaccgauccucugucu

SEQ ID NO: 627162 - RNA, 19 nt, Artificial Sequence
  Description of Artificial Sequence: Synthetic oligonucleotide
gcuuacuccaauacuucug

SEQ ID NO: 627163 - RNA, 19 nt, Artificial Sequence
  Description of Artificial Sequence: Synthetic oligonucleotide
agccaugaagcuuggcgua

SEQ ID NO: 627164 - RNA, 19 nt, Artificial Sequence
  Description of Artificial Sequence: Synthetic oligonucleotide
acuucgcccuuggagaaga

SEQ ID NO: 627165 - RNA, 19 nt, Artificial Sequence
  Description of Artificial Sequence: Synthetic oligonucleotide
uccaaucgggagccuucca

SEQ ID NO: 627166 - RNA, 19 nt, Artificial Sequence
  Description of Artificial Sequence: Synthetic oligonucleotide
uguugacuagguggucucu

SEQ ID NO: 627167 - RNA, 19 nt, Artificial Sequence
  Description of Artificial Sequence: Synthetic oligonucleotide
ugcgcacagucaguguccc

SEQ ID NO: 627168 - RNA, 19 nt, Artificial Sequence
  Description of Artificial Sequence: Synthetic oligonucleotide
cuaggcggcugagaucuag

SEQ ID NO: 627169 - RNA, 19 nt, Artificial Sequence
  Description of Artificial Sequence: Synthetic oligonucleotide
ucccaaaaugaugucuauu

SEQ ID NO: 627170 - RNA, 19 nt, Artificial Sequence
  Description of Artificial Sequence: Synthetic oligonucleotide
gccuaacgaguccagugag

SEQ ID NO: 627171 - RNA, 19 nt, Artificial Sequence
  Description of Artificial Sequence: Synthetic oligonucleotide
cacucgaaccgauccucug

SEQ ID NO: 627172 - RNA, 19 nt, Artificial Sequence
  Description of Artificial Sequence: Synthetic oligonucleotide
gacauagguucuucgcagu

SEQ ID NO: 627173 - RNA, 19 nt, Artificial Sequence
  Description of Artificial Sequence: Synthetic oligonucleotide
ccccuuuaaccucuggagc

SEQ ID NO: 627174 - RNA, 19 nt, Artificial Sequence
  Description of Artificial Sequence: Synthetic oligonucleotide
cuguaggugauggugcgca

SEQ ID NO: 627175 - RNA, 19 nt, Artificial Sequence
  Description of Artificial Sequence: Synthetic oligonucleotide
uacucccgugugacauagg

SEQ ID NO: 627176 - RNA, 19 nt, Artificial Sequence
  Description of Artificial Sequence: Synthetic oligonucleotide
cuguaccagcaugucgacg

SEQ ID NO: 627177 - RNA, 19 nt, Artificial Sequence
  Description of Artificial Sequence: Synthetic oligonucleotide
acggccuuggcuccccagu

SEQ ID NO: 627178 - RNA, 19 nt, Artificial Sequence
  Description of Artificial Sequence: Synthetic oligonucleotide
ccuaacgaguccagugagc

SEQ ID NO: 627179 - RNA, 19 nt, Artificial Sequence
  Description of Artificial Sequence: Synthetic oligonucleotide
gcucuucccagccuaacga

SEQ ID NO: 627180 - RNA, 19 nt, Artificial Sequence
  Description of Artificial Sequence: Synthetic oligonucleotide
gauacggccuuggcucccc

SEQ ID NO: 627181 - RNA, 19 nt, Artificial Sequence
  Description of Artificial Sequence: Synthetic oligonucleotide
cucggugggaaccucauau

SEQ ID NO: 627182 - RNA, 19 nt, Artificial Sequence
  Description of Artificial Sequence: Synthetic oligonucleotide
gaccuccgucccucuaaag

SEQ ID NO: 627183 - RNA, 19 nt, Artificial Sequence
  Description of Artificial Sequence: Synthetic oligonucleotide
gcugcguaguucucgcccc

SEQ ID NO: 627184 - RNA, 19 nt, Artificial Sequence
  Description of Artificial Sequence: Synthetic oligonucleotide
agcgugucacacucugaaa

SEQ ID NO: 627185 - RNA, 19 nt, Artificial Sequence
  Description of Artificial Sequence: Synthetic oligonucleotide
cugcgaaaauuaaggcaca

SEQ ID NO: 627186 - RNA, 19 nt, Artificial Sequence
  Description of Artificial Sequence: Synthetic oligonucleotide
guugagucgggcacagcuc

SEQ ID NO: 627187 - RNA, 19 nt, Artificial Sequence
  Description of Artificial Sequence: Synthetic oligonucleotide
gaucuaggcacggggagcu

SEQ ID NO: 627188 - RNA, 19 nt, Artificial Sequence
  Description of Artificial Sequence: Synthetic oligonucleotide
ugccgcucuucccagccua

SEQ ID NO: 627189 - RNA, 19 nt, Artificial Sequence
  Description of Artificial Sequence: Synthetic oligonucleotide
cuccaaucgggagccuucc

SEQ ID NO: 627190 - RNA, 19 nt, Artificial Sequence
  Description of Artificial Sequence: Synthetic oligonucleotide
aaugccccgauggcuccca

SEQ ID NO: 627191 - RNA, 19 nt, Artificial Sequence
  Description of Artificial Sequence: Synthetic oligonucleotide
uacggccuuggcuccccag

SEQ ID NO: 627192 - RNA, 19 nt, Artificial Sequence
  Description of Artificial Sequence: Synthetic oligonucleotide
ugcguaguucucgccccag

SEQ ID NO: 627193 - RNA, 19 nt, Artificial Sequence
  Description of Artificial Sequence: Synthetic oligonucleotide
ccuuggaguagggaucugg

SEQ ID NO: 627194 - RNA, 19 nt, Artificial Sequence
  Description of Artificial Sequence: Synthetic oligonucleotide
accaauccacucgaaccga

SEQ ID NO: 627195 - RNA, 19 nt, Artificial Sequence
  Description of Artificial Sequence: Synthetic oligonucleotide
uaggucaaaugugccgcuc

SEQ ID NO: 627196 - RNA, 19 nt, Artificial Sequence
  Description of Artificial Sequence: Synthetic oligonucleotide
caaaguugcaccccuuaau

SEQ ID NO: 627197 - RNA, 19 nt, Artificial Sequence
  Description of Artificial Sequence: Synthetic oligonucleotide
ccaaucgggagccuuccac

SEQ ID NO: 627198 - RNA, 19 nt, Artificial Sequence
  Description of Artificial Sequence: Synthetic oligonucleotide
gguggucucugaugaaguc

SEQ ID NO: 627199 - RNA, 19 nt, Artificial Sequence
  Description of Artificial Sequence: Synthetic oligonucleotide
cucgcuucaccaccccauc

SEQ ID NO: 627200 - RNA, 19 nt, Artificial Sequence
  Description of Artificial Sequence: Synthetic oligonucleotide
accccuuaaucaagcaggu

SEQ ID NO: 627201 - RNA, 19 nt, Artificial Sequence
  Description of Artificial Sequence: Synthetic oligonucleotide
cuuuaccuuggaguaggga

SEQ ID NO: 627202 - RNA, 19 nt, Artificial Sequence
  Description of Artificial Sequence: Synthetic oligonucleotide
cauagguucuucgcaguaa

SEQ ID NO: 627203 - RNA, 19 nt, Artificial Sequence
  Description of Artificial Sequence: Synthetic oligonucleotide
gcugagaucuaggcacggg

SEQ ID NO: 627204 - RNA, 19 nt, Artificial Sequence
  Description of Artificial Sequence: Synthetic oligonucleotide
cccgacgagggacaggcag

SEQ ID NO: 627205 - RNA, 19 nt, Artificial Sequence
  Description of Artificial Sequence: Synthetic oligonucleotide
ggccccgccauagaugucc

SEQ ID NO: 627206 - RNA, 19 nt, Artificial Sequence
  Description of Artificial Sequence: Synthetic oligonucleotide
augcaggcgagcugugaua

SEQ ID NO: 627207 - RNA, 19 nt, Artificial Sequence
  Description of Artificial Sequence: Synthetic oligonucleotide
gucacacucugaaagcacu

SEQ ID NO: 627208 - RNA, 19 nt, Artificial Sequence
  Description of Artificial Sequence: Synthetic oligonucleotide
ucgaaacucugggucugaa

SEQ ID NO: 627209 - RNA, 19 nt, Artificial Sequence
  Description of Artificial Sequence: Synthetic oligonucleotide
ggccucaugagggauguuc

SEQ ID NO: 627210 - RNA, 19 nt, Artificial Sequence
  Description of Artificial Sequence: Synthetic oligonucleotide
acguaggaagaugggucca

SEQ ID NO: 627211 - RNA, 19 nt, Artificial Sequence
  Description of Artificial Sequence: Synthetic oligonucleotide
cugaguugcaugccaagau

SEQ ID NO: 627212 - RNA, 19 nt, Artificial Sequence
  Description of Artificial Sequence: Synthetic oligonucleotide
acggcccauucccucgaug

SEQ ID NO: 627213 - RNA, 19 nt, Artificial Sequence
  Description of Artificial Sequence: Synthetic oligonucleotide
cuuacucggugggaaccuc

SEQ ID NO: 627214 - RNA, 19 nt, Artificial Sequence
  Description of Artificial Sequence: Synthetic oligonucleotide
guuggcaugccggccucug

SEQ ID NO: 627215 - RNA, 19 nt, Artificial Sequence
  Description of Artificial Sequence: Synthetic oligonucleotide
ucacaggguggccccggau

SEQ ID NO: 627216 - RNA, 19 nt, Artificial Sequence
  Description of Artificial Sequence: Synthetic oligonucleotide
gccaguauuggcgggccag

SEQ ID NO: 627217 - RNA, 19 nt, Artificial Sequence
  Description of Artificial Sequence: Synthetic oligonucleotide
ggaauccacgagccagggc

SEQ ID NO: 627218 - RNA, 19 nt, Artificial Sequence
  Description of Artificial Sequence: Synthetic oligonucleotide
ggggucugauucaaggaca

SEQ ID NO: 627219 - RNA, 19 nt, Artificial Sequence
  Description of Artificial Sequence: Synthetic oligonucleotide
aucguucagggcagggccu

SEQ ID NO: 627220 - RNA, 19 nt, Artificial Sequence
  Description of Artificial Sequence: Synthetic oligonucleotide
ggcaugccggccucuggag

SEQ ID NO: 627221 - RNA, 19 nt, Artificial Sequence
  Description of Artificial Sequence: Synthetic oligonucleotide
cgaugagauugccacuuag

SEQ ID NO: 627222 - RNA, 19 nt, Artificial Sequence
  Description of Artificial Sequence: Synthetic oligonucleotide
aucgaaacucugggucuga

SEQ ID NO: 627223 - RNA, 19 nt, Artificial Sequence
  Description of Artificial Sequence: Synthetic oligonucleotide
cuaggcacggggagcugga

SEQ ID NO: 627224 - RNA, 19 nt, Artificial Sequence
  Description of Artificial Sequence: Synthetic oligonucleotide
gcaugccaagaugaccucc

SEQ ID NO: 627225 - RNA, 19 nt, Artificial Sequence
  Description of Artificial Sequence: Synthetic oligonucleotide
ccguucuugcaauuuucuc

SEQ ID NO: 627226 - RNA, 19 nt, Artificial Sequence
  Description of Artificial Sequence: Synthetic oligonucleotide
ggcugacuuuccaaagcug

SEQ ID NO: 627227 - RNA, 19 nt, Artificial Sequence
  Description of Artificial Sequence: Synthetic oligonucleotide
ggcguagagacaggcgagc

SEQ ID NO: 627228 - RNA, 19 nt, Artificial Sequence
  Description of Artificial Sequence: Synthetic oligonucleotide
guaggucaaaugugccgcu

SEQ ID NO: 627229 - RNA, 19 nt, Artificial Sequence
  Description of Artificial Sequence: Synthetic oligonucleotide
ccagucgaagacauuccca

SEQ ID NO: 627230 - RNA, 19 nt, Artificial Sequence
  Description of Artificial Sequence: Synthetic oligonucleotide
gccaccuagccgcucugcc

SEQ ID NO: 627231 - RNA, 19 nt, Artificial Sequence
  Description of Artificial Sequence: Synthetic oligonucleotide
cuugcccguugagucgggc

SEQ ID NO: 627232 - RNA, 19 nt, Artificial Sequence
  Description of Artificial Sequence: Synthetic oligonucleotide
agccaguauuggcgggcca

SEQ ID NO: 627233 - RNA, 19 nt, Artificial Sequence
  Description of Artificial Sequence: Synthetic oligonucleotide
uggugggccccgccauaga

SEQ ID NO: 627234 - RNA, 19 nt, Artificial Sequence
  Description of Artificial Sequence: Synthetic oligonucleotide
cuagguggucucugaugaa

SEQ ID NO: 627235 - RNA, 19 nt, Artificial Sequence
  Description of Artificial Sequence: Synthetic oligonucleotide
agcuuggcguagagacagg

SEQ ID NO: 627236 - RNA, 19 nt, Artificial Sequence
  Description of Artificial Sequence: Synthetic oligonucleotide
gcagaugaugggguccaug

SEQ ID NO: 627237 - RNA, 19 nt, Artificial Sequence
  Description of Artificial Sequence: Synthetic oligonucleotide
cgcucuucccagccuaacg

SEQ ID NO: 627238 - RNA, 19 nt, Artificial Sequence
  Description of Artificial Sequence: Synthetic oligonucleotide
ccuccaaucgggagccuuc

SEQ ID NO: 627239 - RNA, 19 nt, Artificial Sequence
  Description of Artificial Sequence: Synthetic oligonucleotide
acucggugggaaccucaua

SEQ ID NO: 627240 - RNA, 19 nt, Artificial Sequence
  Description of Artificial Sequence: Synthetic oligonucleotide
caugauaguugguguggau

SEQ ID NO: 627241 - RNA, 19 nt, Artificial Sequence
  Description of Artificial Sequence: Synthetic oligonucleotide
gcaugauaguuggugugga

SEQ ID NO: 627242 - RNA, 19 nt, Artificial Sequence
  Description of Artificial Sequence: Synthetic oligonucleotide
agggccguucuugcaauuu

SEQ ID NO: 627243 - RNA, 19 nt, Artificial Sequence
  Description of Artificial Sequence: Synthetic oligonucleotide
ccgauccucugucuccacc

SEQ ID NO: 627244 - RNA, 19 nt, Artificial Sequence
  Description of Artificial Sequence: Synthetic oligonucleotide
ucccgacgagggacaggca

SEQ ID NO: 627245 - RNA, 19 nt, Artificial Sequence
  Description of Artificial Sequence: Synthetic oligonucleotide
agggucuggugggccccgc

SEQ ID NO: 627246 - RNA, 19 nt, Artificial Sequence
  Description of Artificial Sequence: Synthetic oligonucleotide
gaguagggaucuggaaagu

SEQ ID NO: 627247 - RNA, 19 nt, Artificial Sequence
  Description of Artificial Sequence: Synthetic oligonucleotide
ggguccauggcugcaaugu

SEQ ID NO: 627248 - RNA, 19 nt, Artificial Sequence
  Description of Artificial Sequence: Synthetic oligonucleotide
caggcgagcuguccaaugu

SEQ ID NO: 627249 - RNA, 19 nt, Artificial Sequence
  Description of Artificial Sequence: Synthetic oligonucleotide
cacuguaggucacaucguu

SEQ ID NO: 627250 - RNA, 19 nt, Artificial Sequence
  Description of Artificial Sequence: Synthetic oligonucleotide
gcaugucgacguuggcaug

SEQ ID NO: 627251 - RNA, 19 nt, Artificial Sequence
  Description of Artificial Sequence: Synthetic oligonucleotide
cuucgcaguaaaucauauu

SEQ ID NO: 627252 - RNA, 19 nt, Artificial Sequence
  Description of Artificial Sequence: Synthetic oligonucleotide
cuccgucccucuaaagagu

SEQ ID NO: 627253 - RNA, 19 nt, Artificial Sequence
  Description of Artificial Sequence: Synthetic oligonucleotide
ggucaaaugugccgcuccu

SEQ ID NO: 627254 - RNA, 19 nt, Artificial Sequence
  Description of Artificial Sequence: Synthetic oligonucleotide
ccuuaaucaagcaggucau

SEQ ID NO: 627255 - RNA, 19 nt, Artificial Sequence
  Description of Artificial Sequence: Synthetic oligonucleotide
auacggccuuggcucccca

SEQ ID NO: 627256 - RNA, 19 nt, Artificial Sequence
  Description of Artificial Sequence: Synthetic oligonucleotide
cacuuuagggcgaggccau

SEQ ID NO: 627257 - RNA, 19 nt, Artificial Sequence
  Description of Artificial Sequence: Synthetic oligonucleotide
cucuaaagaguagcucccu

SEQ ID NO: 627258 - RNA, 19 nt, Artificial Sequence
  Description of Artificial Sequence: Synthetic oligonucleotide
acgaguccagugagcgugu

SEQ ID NO: 627259 - RNA, 19 nt, Artificial Sequence
  Description of Artificial Sequence: Synthetic oligonucleotide
gucagguacguaggaagau

SEQ ID NO: 627260 - RNA, 19 nt, Artificial Sequence
  Description of Artificial Sequence: Synthetic oligonucleotide
gucacaggguggccccgga

SEQ ID NO: 627261 - RNA, 19 nt, Artificial Sequence
  Description of Artificial Sequence: Synthetic oligonucleotide
cugccacaaugagggacuc

SEQ ID NO: 627262 - RNA, 19 nt, Artificial Sequence
  Description of Artificial Sequence: Synthetic oligonucleotide
cugcguaguucucgcccca

SEQ ID NO: 627263 - RNA, 19 nt, Artificial Sequence
  Description of Artificial Sequence: Synthetic oligonucleotide
cucccaaaaugaugucuau

SEQ ID NO: 627264 - RNA, 19 nt, Artificial Sequence
  Description of Artificial Sequence: Synthetic oligonucleotide
cccagccuaacgaguccag

SEQ ID NO: 627265 - RNA, 19 nt, Artificial Sequence
  Description of Artificial Sequence: Synthetic oligonucleotide
cguaggaagauggguccag

SEQ ID NO: 627266 - RNA, 19 nt, Artificial Sequence
  Description of Artificial Sequence: Synthetic oligonucleotide
accccaucuagggccuccu

SEQ ID NO: 627267 - RNA, 19 nt, Artificial Sequence
  Description of Artificial Sequence: Synthetic oligonucleotide
uaggcacggggagcuggaa

SEQ ID NO: 627268 - RNA, 19 nt, Artificial Sequence
  Description of Artificial Sequence: Synthetic oligonucleotide
cucugucggcaguggcuga

SEQ ID NO: 627269 - RNA, 19 nt, Artificial Sequence
  Description of Artificial Sequence: Synthetic oligonucleotide
ccgucccucuaaagaguag

SEQ ID NO: 627270 - RNA, 19 nt, Artificial Sequence
  Description of Artificial Sequence: Synthetic oligonucleotide
gccccggaugaagaagccc

SEQ ID NO: 627271 - RNA, 19 nt, Artificial Sequence
  Description of Artificial Sequence: Synthetic oligonucleotide
cguugagucgggcacagcu

SEQ ID NO: 627272 - RNA, 19 nt, Artificial Sequence
  Description of Artificial Sequence: Synthetic oligonucleotide
cuuguaggcuccaccccuu

SEQ ID NO: 627273 - RNA, 19 nt, Artificial Sequence
  Description of Artificial Sequence: Synthetic oligonucleotide
ccccagcuguacugguuag

SEQ ID NO: 627274 - RNA, 19 nt, Artificial Sequence
  Description of Artificial Sequence: Synthetic oligonucleotide
gccuuccaccaauccacuc

SEQ ID NO: 627275 - RNA, 19 nt, Artificial Sequence
  Description of Artificial Sequence: Synthetic oligonucleotide
gccccgauggcucccaggu

SEQ ID NO: 627276 - RNA, 19 nt, Artificial Sequence
  Description of Artificial Sequence: Synthetic oligonucleotide
ccaccuagccgcucugcca

SEQ ID NO: 627277 - RNA, 19 nt, Artificial Sequence
  Description of Artificial Sequence: Synthetic oligonucleotide
acuuuagggcgaggccauu

SEQ ID NO: 627278 - RNA, 19 nt, Artificial Sequence
  Description of Artificial Sequence: Synthetic oligonucleotide
gggucuggugggccccgcc

SEQ ID NO: 627279 - RNA, 19 nt, Artificial Sequence
  Description of Artificial Sequence: Synthetic oligonucleotide
cgugugacauagguucuuc

SEQ ID NO: 627280 - RNA, 19 nt, Artificial Sequence
  Description of Artificial Sequence: Synthetic oligonucleotide
ggcuccccagucgaagaca

SEQ ID NO: 627281 - RNA, 19 nt, Artificial Sequence
  Description of Artificial Sequence: Synthetic oligonucleotide
cuuuagggcgaggccauuu

SEQ ID NO: 627282 - RNA, 19 nt, Artificial Sequence
  Description of Artificial Sequence: Synthetic oligonucleotide
ccagagcaucgucggugag

SEQ ID NO: 627283 - RNA, 19 nt, Artificial Sequence
  Description of Artificial Sequence: Synthetic oligonucleotide
ggccccggaugaagaagcc

SEQ ID NO: 627284 - RNA, 19 nt, Artificial Sequence
  Description of Artificial Sequence: Synthetic oligonucleotide
caccacgcucccgcaccag

SEQ ID NO: 627285 - RNA, 19 nt, Artificial Sequence
  Description of Artificial Sequence: Synthetic oligonucleotide
gccguucuugcaauuuucu

SEQ ID NO: 627286 - RNA, 19 nt, Artificial Sequence
  Description of Artificial Sequence: Synthetic oligonucleotide
cucccgugugacauagguu

SEQ ID NO: 627287 - RNA, 19 nt, Artificial Sequence
  Description of Artificial Sequence: Synthetic oligonucleotide
acgagccagggccguucuu

SEQ ID NO: 627288 - RNA, 19 nt, Artificial Sequence
  Description of Artificial Sequence: Synthetic oligonucleotide
ggugggccccgccauagau

SEQ ID NO: 627289 - RNA, 19 nt, Artificial Sequence
  Description of Artificial Sequence: Synthetic oligonucleotide
cccguugagucgggcacag

SEQ ID NO: 627290 - RNA, 19 nt, Artificial Sequence
  Description of Artificial Sequence: Synthetic oligonucleotide
gcauggucacaggguggcc

SEQ ID NO: 627291 - RNA, 19 nt, Artificial Sequence
  Description of Artificial Sequence: Synthetic oligonucleotide
gacaggcgagcuguccaau

SEQ ID NO: 627292 - RNA, 19 nt, Artificial Sequence
  Description of Artificial Sequence: Synthetic oligonucleotide
gucaaaugugccgcuccuu

SEQ ID NO: 627293 - RNA, 19 nt, Artificial Sequence
  Description of Artificial Sequence: Synthetic oligonucleotide
ggccaccuagccgcucugc

SEQ ID NO: 627294 - RNA, 19 nt, Artificial Sequence
  Description of Artificial Sequence: Synthetic oligonucleotide
gggucugauucaaggacau

SEQ ID NO: 627295 - RNA, 19 nt, Artificial Sequence
  Description of Artificial Sequence: Synthetic oligonucleotide
ccaagccaugaagcuuggc

SEQ ID NO: 627296 - RNA, 19 nt, Artificial Sequence
  Description of Artificial Sequence: Synthetic oligonucleotide
ggacaucagauacggccuu

SEQ ID NO: 627297 - RNA, 19 nt, Artificial Sequence
  Description of Artificial Sequence: Synthetic oligonucleotide
ccuugcccguugagucggg

SEQ ID NO: 627298 - RNA, 19 nt, Artificial Sequence
  Description of Artificial Sequence: Synthetic oligonucleotide
guaccagcaugucgacguu

SEQ ID NO: 627299 - RNA, 19 nt, Artificial Sequence
  Description of Artificial Sequence: Synthetic oligonucleotide
gcgaaaauuaaggcacauu

SEQ ID NO: 627300 - RNA, 19 nt, Artificial Sequence
  Description of Artificial Sequence: Synthetic oligonucleotide
caucgucggugagguccac

SEQ ID NO: 627301 - RNA, 19 nt, Artificial Sequence
  Description of Artificial Sequence: Synthetic oligonucleotide
gcgaugagauugccacuua

SEQ ID NO: 627302 - RNA, 19 nt, Artificial Sequence
  Description of Artificial Sequence: Synthetic oligonucleotide
ccccuuaaucaagcagguc

SEQ ID NO: 627303 - RNA, 19 nt, Artificial Sequence
  Description of Artificial Sequence: Synthetic oligonucleotide
ccaugaagcuuggcguaga

SEQ ID NO: 627304 - RNA, 19 nt, Artificial Sequence
  Description of Artificial Sequence: Synthetic oligonucleotide
ccaguauuggcgggccaga

SEQ ID NO: 627305 - RNA, 19 nt, Artificial Sequence
  Description of Artificial Sequence: Synthetic oligonucleotide
ccccuugucuaggcggcug

SEQ ID NO: 627306 - RNA, 19 nt, Artificial Sequence
  Description of Artificial Sequence: Synthetic oligonucleotide
ccgcucugccagccaggcg

SEQ ID NO: 627307 - RNA, 19 nt, Artificial Sequence
  Description of Artificial Sequence: Synthetic oligonucleotide
cacgagccagggccguucu

SEQ ID NO: 627308 - RNA, 19 nt, Artificial Sequence
  Description of Artificial Sequence: Synthetic oligonucleotide
cgacguuggcaugccggcc

SEQ ID NO: 627309 - RNA, 19 nt, Artificial Sequence
  Description of Artificial Sequence: Synthetic oligonucleotide
ccacgagccagggccguuc

SEQ ID NO: 627310 - RNA, 19 nt, Artificial Sequence
  Description of Artificial Sequence: Synthetic oligonucleotide
cuguacugguuaggacugu

SEQ ID NO: 627311 - RNA, 19 nt, Artificial Sequence
  Description of Artificial Sequence: Synthetic oligonucleotide
gcccguugagucgggcaca

SEQ ID NO: 627312 - RNA, 19 nt, Artificial Sequence
  Description of Artificial Sequence: Synthetic oligonucleotide
ccacucgaaccgauccucu

SEQ ID NO: 627313 - RNA, 19 nt, Artificial Sequence
  Description of Artificial Sequence: Synthetic oligonucleotide
ccaauccacucgaaccgau

SEQ ID NO: 627314 - RNA, 19 nt, Artificial Sequence
  Description of Artificial Sequence: Synthetic oligonucleotide
cccgugugacauagguucu

SEQ ID NO: 627315 - RNA, 19 nt, Artificial Sequence
  Description of Artificial Sequence: Synthetic oligonucleotide
ccgcuccuugcccguugag

SEQ ID NO: 627316 - RNA, 19 nt, Artificial Sequence
  Description of Artificial Sequence: Synthetic oligonucleotide
gcgcacagucaguguccca

SEQ ID NO: 627317 - RNA, 19 nt, Artificial Sequence
  Description of Artificial Sequence: Synthetic oligonucleotide
ccgcucuucccagccuaac

SEQ ID NO: 627318 - RNA, 19 nt, Artificial Sequence
  Description of Artificial Sequence: Synthetic oligonucleotide
ccccaucuagggccuccuc

SEQ ID NO: 627319 - RNA, 19 nt, Artificial Sequence
  Description of Artificial Sequence: Synthetic oligonucleotide
ccccgccauagauguccug

SEQ ID NO: 627320 - RNA, 19 nt, Artificial Sequence
  Description of Artificial Sequence: Synthetic oligonucleotide
gguugacgaggggccucuc

SEQ ID NO: 627321 - RNA, 19 nt, Artificial Sequence
  Description of Artificial Sequence: Synthetic oligonucleotide
ggggccccuuuaaccucug

SEQ ID NO: 627322 - RNA, 19 nt, Artificial Sequence
  Description of Artificial Sequence: Synthetic oligonucleotide
gggcgaggccauuuuccuu

SEQ ID NO: 627323 - RNA, 19 nt, Artificial Sequence
  Description of Artificial Sequence: Synthetic oligonucleotide
aggccucaugagggauguu

SEQ ID NO: 627324 - RNA, 19 nt, Artificial Sequence
  Description of Artificial Sequence: Synthetic oligonucleotide
ccguugagucgggcacagc

SEQ ID NO: 627325 - RNA, 19 nt, Artificial Sequence
  Description of Artificial Sequence: Synthetic oligonucleotide
ccggccucuggaggccagc

SEQ ID NO: 627326 - RNA, 19 nt, Artificial Sequence
  Description of Artificial Sequence: Synthetic oligonucleotide
cagggccguucuugcaauu

SEQ ID NO: 627327 - RNA, 19 nt, Artificial Sequence
  Description of Artificial Sequence: Synthetic oligonucleotide
gccgcucuucccagccuaa

SEQ ID NO: 627328 - RNA, 19 nt, Artificial Sequence
  Description of Artificial Sequence: Synthetic oligonucleotide
ccagccuaacgaguccagu

SEQ ID NO: 627329 - RNA, 19 nt, Artificial Sequence
  Description of Artificial Sequence: Synthetic oligonucleotide
cgucggugagguccacugu

SEQ ID NO: 627330 - RNA, 19 nt, Artificial Sequence
  Description of Artificial Sequence: Synthetic oligonucleotide
ccccgauggcucccaggua

SEQ ID NO: 627331 - RNA, 19 nt, Artificial Sequence
  Description of Artificial Sequence: Synthetic oligonucleotide
gggccccgccauagauguc

SEQ ID NO: 627332 - RNA, 19 nt, Artificial Sequence
  Description of Artificial Sequence: Synthetic oligonucleotide
gccccgccauagauguccu

SEQ ID NO: 627333 - RNA, 19 nt, Artificial Sequence
  Description of Artificial Sequence: Synthetic oligonucleotide
ccacugugucagguacgua

SEQ ID NO: 627334 - RNA, 19 nt, Artificial Sequence
  Description of Artificial Sequence: Synthetic oligonucleotide
ccgugugacauagguucuu

SEQ ID NO: 627335 - RNA, 19 nt, Artificial Sequence
  Description of Artificial Sequence: Synthetic oligonucleotide
gccccuugucuaggcggcu

SEQ ID NO: 627336 - RNA, 19 nt, Artificial Sequence
  Description of Artificial Sequence: Synthetic oligonucleotide
aauagcaaaucccaggugg

SEQ ID NO: 627337 - RNA, 19 nt, Artificial Sequence
  Description of Artificial Sequence: Synthetic oligonucleotide
aauuaaagcugucaacagc

SEQ ID NO: 627338 - RNA, 19 nt, Artificial Sequence
  Description of Artificial Sequence: Synthetic oligonucleotide
aagacacggauacauaccc

SEQ ID NO: 627339 - RNA, 19 nt, Artificial Sequence
  Description of Artificial Sequence: Synthetic oligonucleotide
aauuggauuguaaucaccc

SEQ ID NO: 627340 - RNA, 19 nt, Artificial Sequence
  Description of Artificial Sequence: Synthetic oligonucleotide
ucaacaauagguaauugga

SEQ ID NO: 627341 - RNA, 19 nt, Artificial Sequence
  Description of Artificial Sequence: Synthetic oligonucleotide
uuauccuugauucugagau

SEQ ID NO: 627342 - RNA, 19 nt, Artificial Sequence
  Description of Artificial Sequence: Synthetic oligonucleotide
uguaagguaguguugaccc

SEQ ID NO: 627343 - RNA, 19 nt, Artificial Sequence
  Description of Artificial Sequence: Synthetic oligonucleotide
uggaaugauggccaaaagg

SEQ ID NO: 627344 - RNA, 19 nt, Artificial Sequence
  Description of Artificial Sequence: Synthetic oligonucleotide
auuguaaucacccgccugg

SEQ ID NO: 627345 - RNA, 19 nt, Artificial Sequence
  Description of Artificial Sequence: Synthetic oligonucleotide
auugauuucgggaagugcc

SEQ ID NO: 627346 - RNA, 19 nt, Artificial Sequence
  Description of Artificial Sequence: Synthetic oligonucleotide
auuaguagggccucuacag

SEQ ID NO: 627347 - RNA, 19 nt, Artificial Sequence
  Description of Artificial Sequence: Synthetic oligonucleotide
aaagggugcauugauuggc

SEQ ID NO: 627348 - RNA, 19 nt, Artificial Sequence
  Description of Artificial Sequence: Synthetic oligonucleotide
uguuguaguucuuaguagc

SEQ ID NO: 627349 - RNA, 19 nt, Artificial Sequence
  Description of Artificial Sequence: Synthetic oligonucleotide
ugaaacaauagcucuggag

SEQ ID NO: 627350 - RNA, 19 nt, Artificial Sequence
  Description of Artificial Sequence: Synthetic oligonucleotide
ucaccuaagacacggauac

SEQ ID NO: 627351 - RNA, 19 nt, Artificial Sequence
  Description of Artificial Sequence: Synthetic oligonucleotide
gucaacaauagguaauugg

SEQ ID NO: 627352 - RNA, 19 nt, Artificial Sequence
  Description of Artificial Sequence: Synthetic oligonucleotide
aaacacuuguuguaguucu

SEQ ID NO: 627353 - RNA, 19 nt, Artificial Sequence
  Description of Artificial Sequence: Synthetic oligonucleotide
ugcagaucaccuaagacac

SEQ ID NO: 627354 - RNA, 19 nt, Artificial Sequence
  Description of Artificial Sequence: Synthetic oligonucleotide
aguauuuacuguucugggg

SEQ ID NO: 627355 - RNA, 19 nt, Artificial Sequence
  Description of Artificial Sequence: Synthetic oligonucleotide
agauucaauagcaaauccc

SEQ ID NO: 627356 - RNA, 19 nt, Artificial Sequence
  Description of Artificial Sequence: Synthetic oligonucleotide
aaaucccagguggagagcc

SEQ ID NO: 627357 - RNA, 19 nt, Artificial Sequence
  Description of Artificial Sequence: Synthetic oligonucleotide
aguaaucucuucucagccc

SEQ ID NO: 627358 - RNA, 19 nt, Artificial Sequence
  Description of Artificial Sequence: Synthetic oligonucleotide
acggauacauaccccaugc

SEQ ID NO: 627359 - RNA, 19 nt, Artificial Sequence
  Description of Artificial Sequence: Synthetic oligonucleotide
gaaggagacagucaaucag

SEQ ID NO: 627360 - RNA, 19 nt, Artificial Sequence
  Description of Artificial Sequence: Synthetic oligonucleotide
aacaauagcucuggagacc

SEQ ID NO: 627361 - RNA, 19 nt, Artificial Sequence
  Description of Artificial Sequence: Synthetic oligonucleotide
uaauuaaagcugucaacag

SEQ ID NO: 627362 - RNA, 19 nt, Artificial Sequence
  Description of Artificial Sequence: Synthetic oligonucleotide
uuaauuguagggcucugca

SEQ ID NO: 627363 - RNA, 19 nt, Artificial Sequence
  Description of Artificial Sequence: Synthetic oligonucleotide
uaucuaggcacaauagccc

SEQ ID NO: 627364 - RNA, 19 nt, Artificial Sequence
  Description of Artificial Sequence: Synthetic oligonucleotide
uuggauuguaaucacccgc

SEQ ID NO: 627365 - RNA, 19 nt, Artificial Sequence
  Description of Artificial Sequence: Synthetic oligonucleotide
agcaagaagucgcucaaac

SEQ ID NO: 627366 - RNA, 19 nt, Artificial Sequence
  Description of Artificial Sequence: Synthetic oligonucleotide
aagauugggagugggaauc

SEQ ID NO: 627367 - RNA, 19 nt, Artificial Sequence
  Description of Artificial Sequence: Synthetic oligonucleotide
uaguaaucucuucucagcc

SEQ ID NO: 627368 - RNA, 19 nt, Artificial Sequence
  Description of Artificial Sequence: Synthetic oligonucleotide
uauuggauuaguagggccu

SEQ ID NO: 627369 - RNA, 19 nt, Artificial Sequence
  Description of Artificial Sequence: Synthetic oligonucleotide
ucuuaggaacguuugaagu

SEQ ID NO: 627370 - RNA, 19 nt, Artificial Sequence
  Description of Artificial Sequence: Synthetic oligonucleotide
uguacuguacuccaaucgu

SEQ ID NO: 627371 - RNA, 19 nt, Artificial Sequence
  Description of Artificial Sequence: Synthetic oligonucleotide
uuaucaagcagggacucgg

SEQ ID NO: 627372 - RNA, 19 nt, Artificial Sequence
  Description of Artificial Sequence: Synthetic oligonucleotide
uggauuguaaucacccgcc

SEQ ID NO: 627373 - RNA, 19 nt, Artificial Sequence
  Description of Artificial Sequence: Synthetic oligonucleotide
aaacgaacuucuccagagg

SEQ ID NO: 627374 - RNA, 19 nt, Artificial Sequence
  Description of Artificial Sequence: Synthetic oligonucleotide
uguaguucuuaguagccug

SEQ ID NO: 627375 - RNA, 19 nt, Artificial Sequence
  Description of Artificial Sequence: Synthetic oligonucleotide
ucaccagugacagauaucu

SEQ ID NO: 627376 - RNA, 19 nt, Artificial Sequence
  Description of Artificial Sequence: Synthetic oligonucleotide
uaagacacggauacauacc

SEQ ID NO: 627377 - RNA, 19 nt, Artificial Sequence
  Description of Artificial Sequence: Synthetic oligonucleotide
cuaauuaaagcugucaaca

SEQ ID NO: 627378 - RNA, 19 nt, Artificial Sequence
  Description of Artificial Sequence: Synthetic oligonucleotide
caaacgaacuucuccagag

SEQ ID NO: 627379 - RNA, 19 nt, Artificial Sequence
  Description of Artificial Sequence: Synthetic oligonucleotide
agaggcaaggaacggauag

SEQ ID NO: 627380 - RNA, 19 nt, Artificial Sequence
  Description of Artificial Sequence: Synthetic oligonucleotide
gugacagauaucuaggcac

SEQ ID NO: 627381 - RNA, 19 nt, Artificial Sequence
  Description of Artificial Sequence: Synthetic oligonucleotide
gagugguugcuauacaggc

SEQ ID NO: 627382 - RNA, 19 nt, Artificial Sequence
  Description of Artificial Sequence: Synthetic oligonucleotide
ccuguauuggauuaguagg

SEQ ID NO: 627383 - RNA, 19 nt, Artificial Sequence
  Description of Artificial Sequence: Synthetic oligonucleotide
ugcgaggucugccagagca

SEQ ID NO: 627384 - RNA, 19 nt, Artificial Sequence
  Description of Artificial Sequence: Synthetic oligonucleotide
uccgcauuggccuggagcc

SEQ ID NO: 627385 - RNA, 19 nt, Artificial Sequence
  Description of Artificial Sequence: Synthetic oligonucleotide
uaauuggauuguaaucacc

SEQ ID NO: 627386 - RNA, 19 nt, Artificial Sequence
  Description of Artificial Sequence: Synthetic oligonucleotide
ucaaagagcugugaggagc

SEQ ID NO: 627387 - RNA, 19 nt, Artificial Sequence
  Description of Artificial Sequence: Synthetic oligonucleotide
ugauguguuacaaguuggc

SEQ ID NO: 627388 - RNA, 19 nt, Artificial Sequence
  Description of Artificial Sequence: Synthetic oligonucleotide
ucuacuuagggagucaggu

SEQ ID NO: 627389 - RNA, 19 nt, Artificial Sequence
  Description of Artificial Sequence: Synthetic oligonucleotide
agugggaaucaguuugcgc

SEQ ID NO: 627390 - RNA, 19 nt, Artificial Sequence
  Description of Artificial Sequence: Synthetic oligonucleotide
ucguaagagaaagucagcc

SEQ ID NO: 627391 - RNA, 19 nt, Artificial Sequence
  Description of Artificial Sequence: Synthetic oligonucleotide
acaauagcccaccucuuuc

SEQ ID NO: 627392 - RNA, 19 nt, Artificial Sequence
  Description of Artificial Sequence: Synthetic oligonucleotide
cuuccaugagccauugggg

SEQ ID NO: 627393 - RNA, 19 nt, Artificial Sequence
  Description of Artificial Sequence: Synthetic oligonucleotide
caagaagucgcucaaacga

SEQ ID NO: 627394 - RNA, 19 nt, Artificial Sequence
  Description of Artificial Sequence: Synthetic oligonucleotide
guaguaaucucuucucagc

SEQ ID NO: 627395 - RNA, 19 nt, Artificial Sequence
  Description of Artificial Sequence: Synthetic oligonucleotide
cuguacuguacuccaaucg

SEQ ID NO: 627396 - RNA, 19 nt, Artificial Sequence
  Description of Artificial Sequence: Synthetic oligonucleotide
cucauucccgucuuaauug

SEQ ID NO: 627397 - RNA, 19 nt, Artificial Sequence
  Description of Artificial Sequence: Synthetic oligonucleotide
ucugguugcagugucagga

SEQ ID NO: 627398 - RNA, 19 nt, Artificial Sequence
  Description of Artificial Sequence: Synthetic oligonucleotide
guuugugcaagcguguccg

SEQ ID NO: 627399 - RNA, 19 nt, Artificial Sequence
  Description of Artificial Sequence: Synthetic oligonucleotide
auuguaaagcuggaaaaug

SEQ ID NO: 627400 - RNA, 19 nt, Artificial Sequence
  Description of Artificial Sequence: Synthetic oligonucleotide
caugccucccuaauuaaag

SEQ ID NO: 627401 - RNA, 19 nt, Artificial Sequence
  Description of Artificial Sequence: Synthetic oligonucleotide
uccgaaucaagaugucggg

SEQ ID NO: 627402 - RNA, 19 nt, Artificial Sequence
  Description of Artificial Sequence: Synthetic oligonucleotide
ugugcaagcguguccggcg

SEQ ID NO: 627403 - RNA, 19 nt, Artificial Sequence
  Description of Artificial Sequence: Synthetic oligonucleotide
augccucccuaauuaaagc

SEQ ID NO: 627404 - RNA, 19 nt, Artificial Sequence
  Description of Artificial Sequence: Synthetic oligonucleotide
agaaagucagccaggacuc

SEQ ID NO: 627405 - RNA, 19 nt, Artificial Sequence
  Description of Artificial Sequence: Synthetic oligonucleotide
ucucucacggcguugguga

SEQ ID NO: 627406 - RNA, 19 nt, Artificial Sequence
  Description of Artificial Sequence: Synthetic oligonucleotide
uuggcggagaguuugugca

SEQ ID NO: 627407 - RNA, 19 nt, Artificial Sequence
  Description of Artificial Sequence: Synthetic oligonucleotide
uuuuauccuugauucugag

SEQ ID NO: 627408 - RNA, 19 nt, Artificial Sequence
  Description of Artificial Sequence: Synthetic oligonucleotide
ucaaacgaacuucuccaga

SEQ ID NO: 627409 - RNA, 19 nt, Artificial Sequence
  Description of Artificial Sequence: Synthetic oligonucleotide
uaguagggccucuacaggc

SEQ ID NO: 627410 - RNA, 19 nt, Artificial Sequence
  Description of Artificial Sequence: Synthetic oligonucleotide
agucagcccguuuaaguuc

SEQ ID NO: 627411 - RNA, 19 nt, Artificial Sequence
  Description of Artificial Sequence: Synthetic oligonucleotide
guucuuaguagccuggaca

SEQ ID NO: 627412 - RNA, 19 nt, Artificial Sequence
  Description of Artificial Sequence: Synthetic oligonucleotide
cucuuaggaacguuugaag

SEQ ID NO: 627413 - RNA, 19 nt, Artificial Sequence
  Description of Artificial Sequence: Synthetic oligonucleotide
uaccccaugcuucuguagc

SEQ ID NO: 627414 - RNA, 19 nt, Artificial Sequence
  Description of Artificial Sequence: Synthetic oligonucleotide
guauuggauuaguagggcc

SEQ ID NO: 627415 - RNA, 19 nt, Artificial Sequence
  Description of Artificial Sequence: Synthetic oligonucleotide
gauuguaaucacccgccug

SEQ ID NO: 627416 - RNA, 19 nt, Artificial Sequence
  Description of Artificial Sequence: Synthetic oligonucleotide
uguugacccucacaggcug

SEQ ID NO: 627417 - RNA, 19 nt, Artificial Sequence
  Description of Artificial Sequence: Synthetic oligonucleotide
uuaggaacguuugaaguuc

SEQ ID NO: 627418 - RNA, 19 nt, Artificial Sequence
  Description of Artificial Sequence: Synthetic oligonucleotide
uguacucuggccacagaac

SEQ ID NO: 627419 - RNA, 19 nt, Artificial Sequence
  Description of Artificial Sequence: Synthetic oligonucleotide
ucccgucuuaauuguaggg

SEQ ID NO: 627420 - RNA, 19 nt, Artificial Sequence
  Description of Artificial Sequence: Synthetic oligonucleotide
aggagagugguugcuauac

SEQ ID NO: 627421 - RNA, 19 nt, Artificial Sequence
  Description of Artificial Sequence: Synthetic oligonucleotide
uuuggcggagaguuugugc

SEQ ID NO: 627422 - RNA, 19 nt, Artificial Sequence
  Description of Artificial Sequence: Synthetic oligonucleotide
augaugagaguaaauuguc

SEQ ID NO: 627423 - RNA, 19 nt, Artificial Sequence
  Description of Artificial Sequence: Synthetic oligonucleotide
uugauuucgggaagugcca

SEQ ID NO: 627424 - RNA, 19 nt, Artificial Sequence
  Description of Artificial Sequence: Synthetic oligonucleotide
ucucauucccgucuuaauu

SEQ ID NO: 627425 - RNA, 19 nt, Artificial Sequence
  Description of Artificial Sequence: Synthetic oligonucleotide
aaccucacucuuaggaacg

SEQ ID NO: 627426 - RNA, 19 nt, Artificial Sequence
  Description of Artificial Sequence: Synthetic oligonucleotide
uucccgucuuaauuguagg

SEQ ID NO: 627427 - RNA, 19 nt, Artificial Sequence
  Description of Artificial Sequence: Synthetic oligonucleotide
gacacggauacauacccca

SEQ ID NO: 627428 - RNA, 19 nt, Artificial Sequence
  Description of Artificial Sequence: Synthetic oligonucleotide
gcacuuaucaagcagggac

SEQ ID NO: 627429 - RNA, 19 nt, Artificial Sequence
  Description of Artificial Sequence: Synthetic oligonucleotide
agccucauuguaaagcugg

SEQ ID NO: 627430 - RNA, 19 nt, Artificial Sequence
  Description of Artificial Sequence: Synthetic oligonucleotide
gauuaguagggccucuaca

SEQ ID NO: 627431 - RNA, 19 nt, Artificial Sequence
  Description of Artificial Sequence: Synthetic oligonucleotide
agauaucuaggcacaauag

SEQ ID NO: 627432 - RNA, 19 nt, Artificial Sequence
  Description of Artificial Sequence: Synthetic oligonucleotide
uaaucaccuguacuguacu

SEQ ID NO: 627433 - RNA, 19 nt, Artificial Sequence
  Description of Artificial Sequence: Synthetic oligonucleotide
gauuucgggaagugccagg

SEQ ID NO: 627434 - RNA, 19 nt, Artificial Sequence
  Description of Artificial Sequence: Synthetic oligonucleotide
ugcaccuuucccagaauac

SEQ ID NO: 627435 - RNA, 19 nt, Artificial Sequence
  Description of Artificial Sequence: Synthetic oligonucleotide
gauugauuucgggaagugc

SEQ ID NO: 627436 - RNA, 19 nt, Artificial Sequence
  Description of Artificial Sequence: Synthetic oligonucleotide
gauaggaucuugucucuuc

SEQ ID NO: 627437 - RNA, 19 nt, Artificial Sequence
  Description of Artificial Sequence: Synthetic oligonucleotide
gaacguuugaaguucucaa

SEQ ID NO: 627438 - RNA, 19 nt, Artificial Sequence
  Description of Artificial Sequence: Synthetic oligonucleotide
ucuccauuaaucaccugua

SEQ ID NO: 627439 - RNA, 19 nt, Artificial Sequence
  Description of Artificial Sequence: Synthetic oligonucleotide
cuccaaucguaagagaaag

SEQ ID NO: 627440 - RNA, 19 nt, Artificial Sequence
  Description of Artificial Sequence: Synthetic oligonucleotide
caugaugagaguaaauugu

SEQ ID NO: 627441 - RNA, 19 nt, Artificial Sequence
  Description of Artificial Sequence: Synthetic oligonucleotide
agucgcucaaacgaacuuc

SEQ ID NO: 627442 - RNA, 19 nt, Artificial Sequence
  Description of Artificial Sequence: Synthetic oligonucleotide
aguggcauuugaucggugu

SEQ ID NO: 627443 - RNA, 19 nt, Artificial Sequence
  Description of Artificial Sequence: Synthetic oligonucleotide
agagaaagucagccaggac

SEQ ID NO: 627444 - RNA, 19 nt, Artificial Sequence
  Description of Artificial Sequence: Synthetic oligonucleotide
uugcuauacaggcacuuau

SEQ ID NO: 627445 - RNA, 19 nt, Artificial Sequence
  Description of Artificial Sequence: Synthetic oligonucleotide
agagugguugcuauacagg

SEQ ID NO: 627446 - RNA, 19 nt, Artificial Sequence
  Description of Artificial Sequence: Synthetic oligonucleotide
auuggauuaguagggccuc

SEQ ID NO: 627447 - RNA, 19 nt, Artificial Sequence
  Description of Artificial Sequence: Synthetic oligonucleotide
acuuaucaagcagggacuc

SEQ ID NO: 627448 - RNA, 19 nt, Artificial Sequence
  Description of Artificial Sequence: Synthetic oligonucleotide
ugccucccuaauuaaagcu

SEQ ID NO: 627449 - RNA, 19 nt, Artificial Sequence
  Description of Artificial Sequence: Synthetic oligonucleotide
agugcuucguucuguucag

SEQ ID NO: 627450 - RNA, 19 nt, Artificial Sequence
  Description of Artificial Sequence: Synthetic oligonucleotide
caaucguaagagaaaguca

SEQ ID NO: 627451 - RNA, 19 nt, Artificial Sequence
  Description of Artificial Sequence: Synthetic oligonucleotide
gugggaaucaguuugcgcu

SEQ ID NO: 627452 - RNA, 19 nt, Artificial Sequence
  Description of Artificial Sequence: Synthetic oligonucleotide
cagugacagauaucuaggc

SEQ ID NO: 627453 - RNA, 19 nt, Artificial Sequence
  Description of Artificial Sequence: Synthetic oligonucleotide
gaucuacuuagggagucag

SEQ ID NO: 627454 - RNA, 19 nt, Artificial Sequence
  Description of Artificial Sequence: Synthetic oligonucleotide
cucaaacgaacuucuccag

SEQ ID NO: 627455 - RNA, 19 nt, Artificial Sequence
  Description of Artificial Sequence: Synthetic oligonucleotide
gccuguauuggauuaguag

SEQ ID NO: 627456 - RNA, 19 nt, Artificial Sequence
  Description of Artificial Sequence: Synthetic oligonucleotide
ucucaugacgggaugugua

SEQ ID NO: 627457 - RNA, 19 nt, Artificial Sequence
  Description of Artificial Sequence: Synthetic oligonucleotide
ucauucccgucuuaauugu

SEQ ID NO: 627458 - RNA, 19 nt, Artificial Sequence
  Description of Artificial Sequence: Synthetic oligonucleotide
agaagucgcucaaacgaac

SEQ ID NO: 627459 - RNA, 19 nt, Artificial Sequence
  Description of Artificial Sequence: Synthetic oligonucleotide
ucccuaauuaaagcuguca

SEQ ID NO: 627460 - RNA, 19 nt, Artificial Sequence
  Description of Artificial Sequence: Synthetic oligonucleotide
caguuugcgcuggugaugg

SEQ ID NO: 627461 - RNA, 19 nt, Artificial Sequence
  Description of Artificial Sequence: Synthetic oligonucleotide
cacgaaaagaaaaggaagu

SEQ ID NO: 627462 - RNA, 19 nt, Artificial Sequence
  Description of Artificial Sequence: Synthetic oligonucleotide
uccguuugcugccuccagc

SEQ ID NO: 627463 - RNA, 19 nt, Artificial Sequence
  Description of Artificial Sequence: Synthetic oligonucleotide
auggaaugauggccaaaag

SEQ ID NO: 627464 - RNA, 19 nt, Artificial Sequence
  Description of Artificial Sequence: Synthetic oligonucleotide
ucucauuggggaguggagu

SEQ ID NO: 627465 - RNA, 19 nt, Artificial Sequence
  Description of Artificial Sequence: Synthetic oligonucleotide
uccaaucguaagagaaagu

SEQ ID NO: 627466 - RNA, 19 nt, Artificial Sequence
  Description of Artificial Sequence: Synthetic oligonucleotide
auucccgucuuaauuguag

SEQ ID NO: 627467 - RNA, 19 nt, Artificial Sequence
  Description of Artificial Sequence: Synthetic oligonucleotide
uaauuguagggcucugcau

SEQ ID NO: 627468 - RNA, 19 nt, Artificial Sequence
  Description of Artificial Sequence: Synthetic oligonucleotide
uguccggcggaguugggca

SEQ ID NO: 627469 - RNA, 19 nt, Artificial Sequence
  Description of Artificial Sequence: Synthetic oligonucleotide
caaggaacggauaggaucu

SEQ ID NO: 627470 - RNA, 19 nt, Artificial Sequence
  Description of Artificial Sequence: Synthetic oligonucleotide
cucccgacgagccuccucc

SEQ ID NO: 627471 - RNA, 19 nt, Artificial Sequence
  Description of Artificial Sequence: Synthetic oligonucleotide
ucaugccucccuaauuaaa

SEQ ID NO: 627472 - RNA, 19 nt, Artificial Sequence
  Description of Artificial Sequence: Synthetic oligonucleotide
aauagguaauuggauugua

SEQ ID NO: 627473 - RNA, 19 nt, Artificial Sequence
  Description of Artificial Sequence: Synthetic oligonucleotide
guaaauugucuccggaucu

SEQ ID NO: 627474 - RNA, 19 nt, Artificial Sequence
  Description of Artificial Sequence: Synthetic oligonucleotide
guagggcucugcauuauag

SEQ ID NO: 627475 - RNA, 19 nt, Artificial Sequence
  Description of Artificial Sequence: Synthetic oligonucleotide
accuaagacacggauacau

SEQ ID NO: 627476 - RNA, 19 nt, Artificial Sequence
  Description of Artificial Sequence: Synthetic oligonucleotide
uuugugcaagcguguccgg

SEQ ID NO: 627477 - RNA, 19 nt, Artificial Sequence
  Description of Artificial Sequence: Synthetic oligonucleotide
uguaaucacccgccuggcu

SEQ ID NO: 627478 - RNA, 19 nt, Artificial Sequence
  Description of Artificial Sequence: Synthetic oligonucleotide
aagucgcucaaacgaacuu

SEQ ID NO: 627479 - RNA, 19 nt, Artificial Sequence
  Description of Artificial Sequence: Synthetic oligonucleotide
ggcaaauuuucuuccugcc

SEQ ID NO: 627480 - RNA, 19 nt, Artificial Sequence
  Description of Artificial Sequence: Synthetic oligonucleotide
gcucaaacgaacuucucca

SEQ ID NO: 627481 - RNA, 19 nt, Artificial Sequence
  Description of Artificial Sequence: Synthetic oligonucleotide
agagcaagaagucgcucaa

SEQ ID NO: 627482 - RNA, 19 nt, Artificial Sequence
  Description of Artificial Sequence: Synthetic oligonucleotide
acgggauguguaugcaaag

SEQ ID NO: 627483 - RNA, 19 nt, Artificial Sequence
  Description of Artificial Sequence: Synthetic oligonucleotide
cuacaggcccuucugcuac

SEQ ID NO: 627484 - RNA, 19 nt, Artificial Sequence
  Description of Artificial Sequence: Synthetic oligonucleotide
uaggaacguuugaaguucu

SEQ ID NO: 627485 - RNA, 19 nt, Artificial Sequence
  Description of Artificial Sequence: Synthetic oligonucleotide
agacacggauacauacccc

SEQ ID NO: 627486 - RNA, 19 nt, Artificial Sequence
  Description of Artificial Sequence: Synthetic oligonucleotide
agagguuccagaaugugua

SEQ ID NO: 627487 - RNA, 19 nt, Artificial Sequence
  Description of Artificial Sequence: Synthetic oligonucleotide
cagggauugauuucgggaa

SEQ ID NO: 627488 - RNA, 19 nt, Artificial Sequence
  Description of Artificial Sequence: Synthetic oligonucleotide
acucuuaggaacguuugaa

SEQ ID NO: 627489 - RNA, 19 nt, Artificial Sequence
  Description of Artificial Sequence: Synthetic oligonucleotide
agaccuugcucuacucccc

SEQ ID NO: 627490 - RNA, 19 nt, Artificial Sequence
  Description of Artificial Sequence: Synthetic oligonucleotide
cagagcaagaagucgcuca

SEQ ID NO: 627491 - RNA, 19 nt, Artificial Sequence
  Description of Artificial Sequence: Synthetic oligonucleotide
ggcgcugagccuuucagug

SEQ ID NO: 627492 - RNA, 19 nt, Artificial Sequence
  Description of Artificial Sequence: Synthetic oligonucleotide
cagauaucuaggcacaaua

SEQ ID NO: 627493 - RNA, 19 nt, Artificial Sequence
  Description of Artificial Sequence: Synthetic oligonucleotide
cacuuaggcaggugcagug

SEQ ID NO: 627494 - RNA, 19 nt, Artificial Sequence
  Description of Artificial Sequence: Synthetic oligonucleotide
ccaaucguaagagaaaguc

SEQ ID NO: 627495 - RNA, 19 nt, Artificial Sequence
  Description of Artificial Sequence: Synthetic oligonucleotide
auuucgggaagugccaggu

SEQ ID NO: 627496 - RNA, 19 nt, Artificial Sequence
  Description of Artificial Sequence: Synthetic oligonucleotide
uagcaaaucccagguggag

SEQ ID NO: 627497 - RNA, 19 nt, Artificial Sequence
  Description of Artificial Sequence: Synthetic oligonucleotide
uggcuaguauuuacuguuc

SEQ ID NO: 627498 - RNA, 19 nt, Artificial Sequence
  Description of Artificial Sequence: Synthetic oligonucleotide
uugcucuacuccccaggcc

SEQ ID NO: 627499 - RNA, 19 nt, Artificial Sequence
  Description of Artificial Sequence: Synthetic oligonucleotide
caacaaaugcagaucaccu

SEQ ID NO: 627500 - RNA, 19 nt, Artificial Sequence
  Description of Artificial Sequence: Synthetic oligonucleotide
gagugggaaucaguuugcg

SEQ ID NO: 627501 - RNA, 19 nt, Artificial Sequence
  Description of Artificial Sequence: Synthetic oligonucleotide
aagggguucacaagacaga

SEQ ID NO: 627502 - RNA, 19 nt, Artificial Sequence
  Description of Artificial Sequence: Synthetic oligonucleotide
ugucgggcuagguccagca

SEQ ID NO: 627503 - RNA, 19 nt, Artificial Sequence
  Description of Artificial Sequence: Synthetic oligonucleotide
ugccagggauugauuucgg

SEQ ID NO: 627504 - RNA, 19 nt, Artificial Sequence
  Description of Artificial Sequence: Synthetic oligonucleotide
cugagucaacaauagguaa

SEQ ID NO: 627505 - RNA, 19 nt, Artificial Sequence
  Description of Artificial Sequence: Synthetic oligonucleotide
ccguuuaaguuccaaggcc

SEQ ID NO: 627506 - RNA, 19 nt, Artificial Sequence
  Description of Artificial Sequence: Synthetic oligonucleotide
ucuuaauuguagggcucug

SEQ ID NO: 627507 - RNA, 19 nt, Artificial Sequence
  Description of Artificial Sequence: Synthetic oligonucleotide
guaagggguucacaagaca

SEQ ID NO: 627508 - RNA, 19 nt, Artificial Sequence
  Description of Artificial Sequence: Synthetic oligonucleotide
agucaacaauagguaauug

SEQ ID NO: 627509 - RNA, 19 nt, Artificial Sequence
  Description of Artificial Sequence: Synthetic oligonucleotide
gcuucguucuguucagucc

SEQ ID NO: 627510 - RNA, 19 nt, Artificial Sequence
  Description of Artificial Sequence: Synthetic oligonucleotide
auagguaauuggauuguaa

SEQ ID NO: 627511 - RNA, 19 nt, Artificial Sequence
  Description of Artificial Sequence: Synthetic oligonucleotide
gguccgaaucaagaugucg

SEQ ID NO: 627512 - RNA, 19 nt, Artificial Sequence
  Description of Artificial Sequence: Synthetic oligonucleotide
uggccaguagccagccuca

SEQ ID NO: 627513 - RNA, 19 nt, Artificial Sequence
  Description of Artificial Sequence: Synthetic oligonucleotide
cacggauacauaccccaug

SEQ ID NO: 627514 - RNA, 19 nt, Artificial Sequence
  Description of Artificial Sequence: Synthetic oligonucleotide
acgaacuucuccagagguc

SEQ ID NO: 627515 - RNA, 19 nt, Artificial Sequence
  Description of Artificial Sequence: Synthetic oligonucleotide
gaaucaguuugcgcuggug

SEQ ID NO: 627516 - RNA, 19 nt, Artificial Sequence
  Description of Artificial Sequence: Synthetic oligonucleotide
uguaugcaaagcagacauu

SEQ ID NO: 627517 - RNA, 19 nt, Artificial Sequence
  Description of Artificial Sequence: Synthetic oligonucleotide
gagguccgaaucaagaugu

SEQ ID NO: 627518 - RNA, 19 nt, Artificial Sequence
  Description of Artificial Sequence: Synthetic oligonucleotide
cauaauucaugccucccua

SEQ ID NO: 627519 - RNA, 19 nt, Artificial Sequence
  Description of Artificial Sequence: Synthetic oligonucleotide
ggcacaauagcccaccucu

SEQ ID NO: 627520 - RNA, 19 nt, Artificial Sequence
  Description of Artificial Sequence: Synthetic oligonucleotide
agcccgucaaccucacucu

SEQ ID NO: 627521 - RNA, 19 nt, Artificial Sequence
  Description of Artificial Sequence: Synthetic oligonucleotide
uuaguagccuggacagcau

SEQ ID NO: 627522 - RNA, 19 nt, Artificial Sequence
  Description of Artificial Sequence: Synthetic oligonucleotide
auagcaaaucccaggugga

SEQ ID NO: 627523 - RNA, 19 nt, Artificial Sequence
  Description of Artificial Sequence: Synthetic oligonucleotide
uuggccuguauuggauuag

SEQ ID NO: 627524 - RNA, 19 nt, Artificial Sequence
  Description of Artificial Sequence: Synthetic oligonucleotide
uuguaaucacccgccuggc

SEQ ID NO: 627525 - RNA, 19 nt, Artificial Sequence
  Description of Artificial Sequence: Synthetic oligonucleotide
uguagggcucugcauuaua

SEQ ID NO: 627526 - RNA, 19 nt, Artificial Sequence
  Description of Artificial Sequence: Synthetic oligonucleotide
uugugcaagcguguccggc

SEQ ID NO: 627527 - RNA, 19 nt, Artificial Sequence
  Description of Artificial Sequence: Synthetic oligonucleotide
ugacgggauguguaugcaa

SEQ ID NO: 627528 - RNA, 19 nt, Artificial Sequence
  Description of Artificial Sequence: Synthetic oligonucleotide
ucgggaugaggagaguggu

SEQ ID NO: 627529 - RNA, 19 nt, Artificial Sequence
  Description of Artificial Sequence: Synthetic oligonucleotide
cccguuuaaguuccaaggc

SEQ ID NO: 627530 - RNA, 19 nt, Artificial Sequence
  Description of Artificial Sequence: Synthetic oligonucleotide
uugacccucacaggcugag

SEQ ID NO: 627531 - RNA, 19 nt, Artificial Sequence
  Description of Artificial Sequence: Synthetic oligonucleotide
aucuacuuagggagucagg

SEQ ID NO: 627532 - RNA, 19 nt, Artificial Sequence
  Description of Artificial Sequence: Synthetic oligonucleotide
gugcaagcguguccggcgg

SEQ ID NO: 627533 - RNA, 19 nt, Artificial Sequence
  Description of Artificial Sequence: Synthetic oligonucleotide
gacgggauguguaugcaaa

SEQ ID NO: 627534 - RNA, 19 nt, Artificial Sequence
  Description of Artificial Sequence: Synthetic oligonucleotide
gaucaccuaagacacggau

SEQ ID NO: 627535 - RNA, 19 nt, Artificial Sequence
  Description of Artificial Sequence: Synthetic oligonucleotide
cuuaggaacguuugaaguu

SEQ ID NO: 627536 - RNA, 19 nt, Artificial Sequence
  Description of Artificial Sequence: Synthetic oligonucleotide
cuucccguuuggcggagag

SEQ ID NO: 627537 - RNA, 19 nt, Artificial Sequence
  Description of Artificial Sequence: Synthetic oligonucleotide
agggguucacaagacagaa

SEQ ID NO: 627538 - RNA, 19 nt, Artificial Sequence
  Description of Artificial Sequence: Synthetic oligonucleotide
cuuucagugagcagugggu

SEQ ID NO: 627539 - RNA, 19 nt, Artificial Sequence
  Description of Artificial Sequence: Synthetic oligonucleotide
gaaugcgaggucugccaga

SEQ ID NO: 627540 - RNA, 19 nt, Artificial Sequence
  Description of Artificial Sequence: Synthetic oligonucleotide
ggaaugcgaggucugccag

SEQ ID NO: 627541 - RNA, 19 nt, Artificial Sequence
  Description of Artificial Sequence: Synthetic oligonucleotide
ggaaggagacagucaauca

SEQ ID NO: 627542 - RNA, 19 nt, Artificial Sequence
  Description of Artificial Sequence: Synthetic oligonucleotide
ugcuacccugucuguagcu

SEQ ID NO: 627543 - RNA, 19 nt, Artificial Sequence
  Description of Artificial Sequence: Synthetic oligonucleotide
cuucguucuguucaguccu

SEQ ID NO: 627544 - RNA, 19 nt, Artificial Sequence
  Description of Artificial Sequence: Synthetic oligonucleotide
agguaguguugacccucac

SEQ ID NO: 627545 - RNA, 19 nt, Artificial Sequence
  Description of Artificial Sequence: Synthetic oligonucleotide
accccaugcuucuguagcu

SEQ ID NO: 627546 - RNA, 19 nt, Artificial Sequence
  Description of Artificial Sequence: Synthetic oligonucleotide
aagcguguccggcggaguu

SEQ ID NO: 627547 - RNA, 19 nt, Artificial Sequence
  Description of Artificial Sequence: Synthetic oligonucleotide
ggcugagucaacaauaggu

SEQ ID NO: 627548 - RNA, 19 nt, Artificial Sequence
  Description of Artificial Sequence: Synthetic oligonucleotide
ugguugcagugucaggauu

SEQ ID NO: 627549 - RNA, 19 nt, Artificial Sequence
  Description of Artificial Sequence: Synthetic oligonucleotide
guuggccuguauuggauua

SEQ ID NO: 627550 - RNA, 19 nt, Artificial Sequence
  Description of Artificial Sequence: Synthetic oligonucleotide
acuccaaucguaagagaaa

SEQ ID NO: 627551 - RNA, 19 nt, Artificial Sequence
  Description of Artificial Sequence: Synthetic oligonucleotide
aggagacagucaaucagga

SEQ ID NO: 627552 - RNA, 19 nt, Artificial Sequence
  Description of Artificial Sequence: Synthetic oligonucleotide
cacuuaucaagcagggacu

SEQ ID NO: 627553 - RNA, 19 nt, Artificial Sequence
  Description of Artificial Sequence: Synthetic oligonucleotide
cugcuacccugucuguagc

SEQ ID NO: 627554 - RNA, 19 nt, Artificial Sequence
  Description of Artificial Sequence: Synthetic oligonucleotide
acagauaucuaggcacaau

SEQ ID NO: 627555 - RNA, 19 nt, Artificial Sequence
  Description of Artificial Sequence: Synthetic oligonucleotide
cuggcuaguauuuacuguu

SEQ ID NO: 627556 - RNA, 19 nt, Artificial Sequence
  Description of Artificial Sequence: Synthetic oligonucleotide
cauuggggaguggagucug

SEQ ID NO: 627557 - RNA, 19 nt, Artificial Sequence
  Description of Artificial Sequence: Synthetic oligonucleotide
ggaacguuugaaguucuca

SEQ ID NO: 627558 - RNA, 19 nt, Artificial Sequence
  Description of Artificial Sequence: Synthetic oligonucleotide
cccgucuuaauuguagggc

SEQ ID NO: 627559 - RNA, 19 nt, Artificial Sequence
  Description of Artificial Sequence: Synthetic oligonucleotide
guaaucacccgccuggcuu

SEQ ID NO: 627560 - RNA, 19 nt, Artificial Sequence
  Description of Artificial Sequence: Synthetic oligonucleotide
aggaagugcuucguucugu

SEQ ID NO: 627561 - RNA, 19 nt, Artificial Sequence
  Description of Artificial Sequence: Synthetic oligonucleotide
gaacaggcuggaacaccag

SEQ ID NO: 627562 - RNA, 19 nt, Artificial Sequence
  Description of Artificial Sequence: Synthetic oligonucleotide
cccacgaaaagaaaaggaa

SEQ ID NO: 627563 - RNA, 19 nt, Artificial Sequence
  Description of Artificial Sequence: Synthetic oligonucleotide
aucaccuaagacacggaua

SEQ ID NO: 627564 - RNA, 19 nt, Artificial Sequence
  Description of Artificial Sequence: Synthetic oligonucleotide
cucccuaauuaaagcuguc

SEQ ID NO: 627565 - RNA, 19 nt, Artificial Sequence
  Description of Artificial Sequence: Synthetic oligonucleotide
ggauuaguagggccucuac

SEQ ID NO: 627566 - RNA, 19 nt, Artificial Sequence
  Description of Artificial Sequence: Synthetic oligonucleotide
aggaacggauaggaucuug

SEQ ID NO: 627567 - RNA, 19 nt, Artificial Sequence
  Description of Artificial Sequence: Synthetic oligonucleotide
acagaaugagaaagccaga

SEQ ID NO: 627568 - RNA, 19 nt, Artificial Sequence
  Description of Artificial Sequence: Synthetic oligonucleotide
cguuggugaucucaugacg

SEQ ID NO: 627569 - RNA, 19 nt, Artificial Sequence
  Description of Artificial Sequence: Synthetic oligonucleotide
ccguuugcugccuccagcc

SEQ ID NO: 627570 - RNA, 19 nt, Artificial Sequence
  Description of Artificial Sequence: Synthetic oligonucleotide
cacucuuaggaacguuuga

SEQ ID NO: 627571 - RNA, 19 nt, Artificial Sequence
  Description of Artificial Sequence: Synthetic oligonucleotide
uuggauuaguagggccucu

SEQ ID NO: 627572 - RNA, 19 nt, Artificial Sequence
  Description of Artificial Sequence: Synthetic oligonucleotide
cucuuaccgcuccucagca

SEQ ID NO: 627573 - RNA, 19 nt, Artificial Sequence
  Description of Artificial Sequence: Synthetic oligonucleotide
uggccuguauuggauuagu

SEQ ID NO: 627574 - RNA, 19 nt, Artificial Sequence
  Description of Artificial Sequence: Synthetic oligonucleotide
gggcugagucaacaauagg

SEQ ID NO: 627575 - RNA, 19 nt, Artificial Sequence
  Description of Artificial Sequence: Synthetic oligonucleotide
gggagucaggucaaagagc

SEQ ID NO: 627576 - RNA, 19 nt, Artificial Sequence
  Description of Artificial Sequence: Synthetic oligonucleotide
gaagucgcucaaacgaacu

SEQ ID NO: 627577 - RNA, 19 nt, Artificial Sequence
  Description of Artificial Sequence: Synthetic oligonucleotide
gguaagggguucacaagac

SEQ ID NO: 627578 - RNA, 19 nt, Artificial Sequence
  Description of Artificial Sequence: Synthetic oligonucleotide
augcgaggucugccagagc

SEQ ID NO: 627579 - RNA, 19 nt, Artificial Sequence
  Description of Artificial Sequence: Synthetic oligonucleotide
ccagggauugauuucggga

SEQ ID NO: 627580 - RNA, 19 nt, Artificial Sequence
  Description of Artificial Sequence: Synthetic oligonucleotide
gggugcauugauuggcuuc

SEQ ID NO: 627581 - RNA, 19 nt, Artificial Sequence
  Description of Artificial Sequence: Synthetic oligonucleotide
gucuccggaucuacuuagg

SEQ ID NO: 627582 - RNA, 19 nt, Artificial Sequence
  Description of Artificial Sequence: Synthetic oligonucleotide
aggaacguuugaaguucuc

SEQ ID NO: 627583 - RNA, 19 nt, Artificial Sequence
  Description of Artificial Sequence: Synthetic oligonucleotide
gccagggauugauuucggg

SEQ ID NO: 627584 - RNA, 19 nt, Artificial Sequence
  Description of Artificial Sequence: Synthetic oligonucleotide
gagucaacaauagguaauu

SEQ ID NO: 627585 - RNA, 19 nt, Artificial Sequence
  Description of Artificial Sequence: Synthetic oligonucleotide
ggguggagauucaauagca

SEQ ID NO: 627586 - RNA, 19 nt, Artificial Sequence
  Description of Artificial Sequence: Synthetic oligonucleotide
ucuuaccgcuccucagcau

SEQ ID NO: 627587 - RNA, 19 nt, Artificial Sequence
  Description of Artificial Sequence: Synthetic oligonucleotide
ugcaagcguguccggcgga

SEQ ID NO: 627588 - RNA, 19 nt, Artificial Sequence
  Description of Artificial Sequence: Synthetic oligonucleotide
agggacucggagacaucac

SEQ ID NO: 627589 - RNA, 19 nt, Artificial Sequence
  Description of Artificial Sequence: Synthetic oligonucleotide
ggauugauuucgggaagug

SEQ ID NO: 627590 - RNA, 19 nt, Artificial Sequence
  Description of Artificial Sequence: Synthetic oligonucleotide
ggaguaaguucugccauga

SEQ ID NO: 627591 - RNA, 19 nt, Artificial Sequence
  Description of Artificial Sequence: Synthetic oligonucleotide
gggaaucaguuugcgcugg

SEQ ID NO: 627592 - RNA, 19 nt, Artificial Sequence
  Description of Artificial Sequence: Synthetic oligonucleotide
guuuggcggagaguuugug

SEQ ID NO: 627593 - RNA, 19 nt, Artificial Sequence
  Description of Artificial Sequence: Synthetic oligonucleotide
uggauuaguagggccucua

SEQ ID NO: 627594 - RNA, 19 nt, Artificial Sequence
  Description of Artificial Sequence: Synthetic oligonucleotide
ggauacauaccccaugcuu

SEQ ID NO: 627595 - RNA, 19 nt, Artificial Sequence
  Description of Artificial Sequence: Synthetic oligonucleotide
ccagagguccgaaucaaga

SEQ ID NO: 627596 - RNA, 19 nt, Artificial Sequence
  Description of Artificial Sequence: Synthetic oligonucleotide
gcugagucaacaauaggua

SEQ ID NO: 627597 - RNA, 19 nt, Artificial Sequence
  Description of Artificial Sequence: Synthetic oligonucleotide
cccuaauuaaagcugucaa

SEQ ID NO: 627598 - RNA, 19 nt, Artificial Sequence
  Description of Artificial Sequence: Synthetic oligonucleotide
gucgggcuagguccagcag

SEQ ID NO: 627599 - RNA, 19 nt, Artificial Sequence
  Description of Artificial Sequence: Synthetic oligonucleotide
gcauuauagccacauaauu

SEQ ID NO: 627600 - RNA, 19 nt, Artificial Sequence
  Description of Artificial Sequence: Synthetic oligonucleotide
cucacucuuaggaacguuu

SEQ ID NO: 627601 - RNA, 19 nt, Artificial Sequence
  Description of Artificial Sequence: Synthetic oligonucleotide
guugcuauacaggcacuua

SEQ ID NO: 627602 - RNA, 19 nt, Artificial Sequence
  Description of Artificial Sequence: Synthetic oligonucleotide
agccagucagcccguuuaa

SEQ ID NO: 627603 - RNA, 19 nt, Artificial Sequence
  Description of Artificial Sequence: Synthetic oligonucleotide
guaagguaguguugacccu

SEQ ID NO: 627604 - RNA, 19 nt, Artificial Sequence
  Description of Artificial Sequence: Synthetic oligonucleotide
ggcggagaguuugugcaag

SEQ ID NO: 627605 - RNA, 19 nt, Artificial Sequence
  Description of Artificial Sequence: Synthetic oligonucleotide
cucggagacaucacugggu

SEQ ID NO: 627606 - RNA, 19 nt, Artificial Sequence
  Description of Artificial Sequence: Synthetic oligonucleotide
gucgcucaaacgaacuucu

SEQ ID NO: 627607 - RNA, 19 nt, Artificial Sequence
  Description of Artificial Sequence: Synthetic oligonucleotide
ucugucgggcuagguccag

SEQ ID NO: 627608 - RNA, 19 nt, Artificial Sequence
  Description of Artificial Sequence: Synthetic oligonucleotide
agguccgaaucaagauguc

SEQ ID NO: 627609 - RNA, 19 nt, Artificial Sequence
  Description of Artificial Sequence: Synthetic oligonucleotide
agauggaaugauggccaaa

SEQ ID NO: 627610 - RNA, 19 nt, Artificial Sequence
  Description of Artificial Sequence: Synthetic oligonucleotide
guguccggcggaguugggc

SEQ ID NO: 627611 - RNA, 19 nt, Artificial Sequence
  Description of Artificial Sequence: Synthetic oligonucleotide
cucaugacgggauguguau

SEQ ID NO: 627612 - RNA, 19 nt, Artificial Sequence
  Description of Artificial Sequence: Synthetic oligonucleotide
cagagguccgaaucaagau

SEQ ID NO: 627613 - RNA, 19 nt, Artificial Sequence
  Description of Artificial Sequence: Synthetic oligonucleotide
agaucaccuaagacacgga

SEQ ID NO: 627614 - RNA, 19 nt, Artificial Sequence
  Description of Artificial Sequence: Synthetic oligonucleotide
ccuauggagaggcaaggaa

SEQ ID NO: 627615 - RNA, 19 nt, Artificial Sequence
  Description of Artificial Sequence: Synthetic oligonucleotide
ucgguguuccuggcuagua

SEQ ID NO: 627616 - RNA, 19 nt, Artificial Sequence
  Description of Artificial Sequence: Synthetic oligonucleotide
agcguguccggcggaguug

SEQ ID NO: 627617 - RNA, 19 nt, Artificial Sequence
  Description of Artificial Sequence: Synthetic oligonucleotide
ggugcauugauuggcuucu

SEQ ID NO: 627618 - RNA, 19 nt, Artificial Sequence
  Description of Artificial Sequence: Synthetic oligonucleotide
cacggcguuggugaucuca

SEQ ID NO: 627619 - RNA, 19 nt, Artificial Sequence
  Description of Artificial Sequence: Synthetic oligonucleotide
aaggaacggauaggaucuu

SEQ ID NO: 627620 - RNA, 19 nt, Artificial Sequence
  Description of Artificial Sequence: Synthetic oligonucleotide
ggguugggucucauugggg

SEQ ID NO: 627621 - RNA, 19 nt, Artificial Sequence
  Description of Artificial Sequence: Synthetic oligonucleotide
accucacucuuaggaacgu

SEQ ID NO: 627622 - RNA, 19 nt, Artificial Sequence
  Description of Artificial Sequence: Synthetic oligonucleotide
ggagacagucaaucaggaa

SEQ ID NO: 627623 - RNA, 19 nt, Artificial Sequence
  Description of Artificial Sequence: Synthetic oligonucleotide
cacagagguuccagaaugu

SEQ ID NO: 627624 - RNA, 19 nt, Artificial Sequence
  Description of Artificial Sequence: Synthetic oligonucleotide
gaguggcauuugaucggug

SEQ ID NO: 627625 - RNA, 19 nt, Artificial Sequence
  Description of Artificial Sequence: Synthetic oligonucleotide
aucgguguuccuggcuagu

SEQ ID NO: 627626 - RNA, 19 nt, Artificial Sequence
  Description of Artificial Sequence: Synthetic oligonucleotide
gugucaggauuuuauccuu

SEQ ID NO: 627627 - RNA, 19 nt, Artificial Sequence
  Description of Artificial Sequence: Synthetic oligonucleotide
cucacggcguuggugaucu

SEQ ID NO: 627628 - RNA, 19 nt, Artificial Sequence
  Description of Artificial Sequence: Synthetic oligonucleotide
cguuuaaguuccaaggccu

SEQ ID NO: 627629 - RNA, 19 nt, Artificial Sequence
  Description of Artificial Sequence: Synthetic oligonucleotide
cgucuuaauuguagggcuc

SEQ ID NO: 627630 - RNA, 19 nt, Artificial Sequence
  Description of Artificial Sequence: Synthetic oligonucleotide
caguccugauguguuacaa

SEQ ID NO: 627631 - RNA, 19 nt, Artificial Sequence
  Description of Artificial Sequence: Synthetic oligonucleotide
cauucccgucuuaauugua

SEQ ID NO: 627632 - RNA, 19 nt, Artificial Sequence
  Description of Artificial Sequence: Synthetic oligonucleotide
aguuugcgcuggugaugga

SEQ ID NO: 627633 - RNA, 19 nt, Artificial Sequence
  Description of Artificial Sequence: Synthetic oligonucleotide
gcguguccggcggaguugg

SEQ ID NO: 627634 - RNA, 19 nt, Artificial Sequence
  Description of Artificial Sequence: Synthetic oligonucleotide
ggucaccagugacagauau

SEQ ID NO: 627635 - RNA, 19 nt, Artificial Sequence
  Description of Artificial Sequence: Synthetic oligonucleotide
gagcaagaagucgcucaaa

SEQ ID NO: 627636 - RNA, 19 nt, Artificial Sequence
  Description of Artificial Sequence: Synthetic oligonucleotide
ggaucuacuuagggaguca

SEQ ID NO: 627637 - RNA, 19 nt, Artificial Sequence
  Description of Artificial Sequence: Synthetic oligonucleotide
cuguucaguccugaugugu

SEQ ID NO: 627638 - RNA, 19 nt, Artificial Sequence
  Description of Artificial Sequence: Synthetic oligonucleotide
cugucgggcuagguccagc

SEQ ID NO: 627639 - RNA, 19 nt, Artificial Sequence
  Description of Artificial Sequence: Synthetic oligonucleotide
ggaacggauaggaucuugu

SEQ ID NO: 627640 - RNA, 19 nt, Artificial Sequence
  Description of Artificial Sequence: Synthetic oligonucleotide
gguguuccuggcuaguauu

SEQ ID NO: 627641 - RNA, 19 nt, Artificial Sequence
  Description of Artificial Sequence: Synthetic oligonucleotide
cugccaugaugagaguaaa

SEQ ID NO: 627642 - RNA, 19 nt, Artificial Sequence
  Description of Artificial Sequence: Synthetic oligonucleotide
guugacccucacaggcuga

SEQ ID NO: 627643 - RNA, 19 nt, Artificial Sequence
  Description of Artificial Sequence: Synthetic oligonucleotide
gggacucggagacaucacu

SEQ ID NO: 627644 - RNA, 19 nt, Artificial Sequence
  Description of Artificial Sequence: Synthetic oligonucleotide
ccgucuuaauuguagggcu

SEQ ID NO: 627645 - RNA, 19 nt, Artificial Sequence
  Description of Artificial Sequence: Synthetic oligonucleotide
ggauuguaaucacccgccu

SEQ ID NO: 627646 - RNA, 19 nt, Artificial Sequence
  Description of Artificial Sequence: Synthetic oligonucleotide
cacaauagcccaccucuuu

SEQ ID NO: 627647 - RNA, 19 nt, Artificial Sequence
  Description of Artificial Sequence: Synthetic oligonucleotide
gaguaaguucugccaugau

SEQ ID NO: 627648 - RNA, 19 nt, Artificial Sequence
  Description of Artificial Sequence: Synthetic oligonucleotide
ucuucccguuuggcggaga

SEQ ID NO: 627649 - RNA, 19 nt, Artificial Sequence
  Description of Artificial Sequence: Synthetic oligonucleotide
gcaagcguguccggcggag

SEQ ID NO: 627650 - RNA, 19 nt, Artificial Sequence
  Description of Artificial Sequence: Synthetic oligonucleotide
ccuaagacacggauacaua

SEQ ID NO: 627651 - RNA, 19 nt, Artificial Sequence
  Description of Artificial Sequence: Synthetic oligonucleotide
gggccuugccaaagggugc

SEQ ID NO: 627652 - RNA, 19 nt, Artificial Sequence
  Description of Artificial Sequence: Synthetic oligonucleotide
ccucccuaauuaaagcugu

SEQ ID NO: 627653 - RNA, 19 nt, Artificial Sequence
  Description of Artificial Sequence: Synthetic oligonucleotide
ggugaucucaugacgggau

SEQ ID NO: 627654 - RNA, 19 nt, Artificial Sequence
  Description of Artificial Sequence: Synthetic oligonucleotide
cucucauucccgucuuaau

SEQ ID NO: 627655 - RNA, 19 nt, Artificial Sequence
  Description of Artificial Sequence: Synthetic oligonucleotide
gcggaguugggcauccgca

SEQ ID NO: 627656 - RNA, 19 nt, Artificial Sequence
  Description of Artificial Sequence: Synthetic oligonucleotide
ggcacuuaucaagcaggga

SEQ ID NO: 627657 - RNA, 19 nt, Artificial Sequence
  Description of Artificial Sequence: Synthetic oligonucleotide
ccagucagcccguuuaagu

SEQ ID NO: 627658 - RNA, 19 nt, Artificial Sequence
  Description of Artificial Sequence: Synthetic oligonucleotide
gguugcagugucaggauuu

SEQ ID NO: 627659 - RNA, 19 nt, Artificial Sequence
  Description of Artificial Sequence: Synthetic oligonucleotide
gggauugauuucgggaagu

SEQ ID NO: 627660 - RNA, 19 nt, Artificial Sequence
  Description of Artificial Sequence: Synthetic oligonucleotide
gcgcugagccuuucaguga

SEQ ID NO: 627661 - RNA, 19 nt, Artificial Sequence
  Description of Artificial Sequence: Synthetic oligonucleotide
ccgaaucaagaugucggga

SEQ ID NO: 627662 - RNA, 19 nt, Artificial Sequence
  Description of Artificial Sequence: Synthetic oligonucleotide
cggaucuacuuagggaguc

SEQ ID NO: 627663 - RNA, 19 nt, Artificial Sequence
  Description of Artificial Sequence: Synthetic oligonucleotide
gggcgcugagccuuucagu

SEQ ID NO: 627664 - RNA, 19 nt, Artificial Sequence
  Description of Artificial Sequence: Synthetic oligonucleotide
ggccuguauuggauuagua

SEQ ID NO: 627665 - RNA, 19 nt, Artificial Sequence
  Description of Artificial Sequence: Synthetic oligonucleotide
aucacccgccuggcuucca

SEQ ID NO: 627666 - RNA, 19 nt, Artificial Sequence
  Description of Artificial Sequence: Synthetic oligonucleotide
ucacggcguuggugaucuc

SEQ ID NO: 627667 - RNA, 19 nt, Artificial Sequence
  Description of Artificial Sequence: Synthetic oligonucleotide
cccgucaaccucacucuua

SEQ ID NO: 627668 - RNA, 19 nt, Artificial Sequence
  Description of Artificial Sequence: Synthetic oligonucleotide
ccgcauuggccuggagccc

SEQ ID NO: 627669 - RNA, 19 nt, Artificial Sequence
  Description of Artificial Sequence: Synthetic oligonucleotide
ggccaguagccagccucac

SEQ ID NO: 627670 - RNA, 19 nt, Artificial Sequence
  Description of Artificial Sequence: Synthetic oligonucleotide
guccggcggaguugggcau

SEQ ID NO: 627671 - RNA, 19 nt, Artificial Sequence
  Description of Artificial Sequence: Synthetic oligonucleotide
ccggaucuacuuagggagu

SEQ ID NO: 627672 - RNA, 19 nt, Artificial Sequence
  Description of Artificial Sequence: Synthetic oligonucleotide
gccaaagggugcauugauu

SEQ ID NO: 627673 - RNA, 19 nt, Artificial Sequence
  Description of Artificial Sequence: Synthetic oligonucleotide
caagcguguccggcggagu

SEQ ID NO: 627674 - RNA, 19 nt, Artificial Sequence
  Description of Artificial Sequence: Synthetic oligonucleotide
caugcuugcugggcagauu

SEQ ID NO: 627675 - RNA, 19 nt, Artificial Sequence
  Description of Artificial Sequence: Synthetic oligonucleotide
gggguucacaagacagaau

SEQ ID NO: 627676 - RNA, 19 nt, Artificial Sequence
  Description of Artificial Sequence: Synthetic oligonucleotide
cguguccggcggaguuggg

SEQ ID NO: 627677 - RNA, 19 nt, Artificial Sequence
  Description of Artificial Sequence: Synthetic oligonucleotide
gcacaauagcccaccucuu

SEQ ID NO: 627678 - RNA, 19 nt, Artificial Sequence
  Description of Artificial Sequence: Synthetic oligonucleotide
cggauacauaccccaugcu

SEQ ID NO: 627679 - RNA, 19 nt, Artificial Sequence
  Description of Artificial Sequence: Synthetic oligonucleotide
cguuuggcggagaguuugu

SEQ ID NO: 627680 - RNA, 19 nt, Artificial Sequence
  Description of Artificial Sequence: Synthetic oligonucleotide
gcccgucaaccucacucuu

SEQ ID NO: 627681 - RNA, 19 nt, Artificial Sequence
  Description of Artificial Sequence: Synthetic oligonucleotide
cguuugcugccuccagccu

SEQ ID NO: 627682 - RNA, 19 nt, Artificial Sequence
  Description of Artificial Sequence: Synthetic oligonucleotide
ccucacucuuaggaacguu

SEQ ID NO: 627683 - RNA, 19 nt, Artificial Sequence
  Description of Artificial Sequence: Synthetic oligonucleotide
ggauggccucacagagguu

SEQ ID NO: 627684 - RNA, 19 nt, Artificial Sequence
  Description of Artificial Sequence: Synthetic oligonucleotide
cgggaagugccagguguau

SEQ ID NO: 627685 - RNA, 19 nt, Artificial Sequence
  Description of Artificial Sequence: Synthetic oligonucleotide
uuuacaguaaauaacgcgu

SEQ ID NO: 627686 - RNA, 19 nt, Artificial Sequence
  Description of Artificial Sequence: Synthetic oligonucleotide
uacucaaccagcauguugg

SEQ ID NO: 627687 - RNA, 19 nt, Artificial Sequence
  Description of Artificial Sequence: Synthetic oligonucleotide
guaaauaacgcguauuucc

SEQ ID NO: 627688 - RNA, 19 nt, Artificial Sequence
  Description of Artificial Sequence: Synthetic oligonucleotide
uuugguuaaguccuaaaac

SEQ ID NO: 627689 - RNA, 19 nt, Artificial Sequence
  Description of Artificial Sequence: Synthetic oligonucleotide
aauaacgcguauuucccuc

SEQ ID NO: 627690 - RNA, 19 nt, Artificial Sequence
  Description of Artificial Sequence: Synthetic oligonucleotide
uuuauagucaacaggugac

SEQ ID NO: 627691 - RNA, 19 nt, Artificial Sequence
  Description of Artificial Sequence: Synthetic oligonucleotide
uaaauaacgcguauuuccc

SEQ ID NO: 627692 - RNA, 19 nt, Artificial Sequence
  Description of Artificial Sequence: Synthetic oligonucleotide
acagacuacagcuggggcc

SEQ ID NO: 627693 - RNA, 19 nt, Artificial Sequence
  Description of Artificial Sequence: Synthetic oligonucleotide
auugugggugaucugaagg

SEQ ID NO: 627694 - RNA, 19 nt, Artificial Sequence
  Description of Artificial Sequence: Synthetic oligonucleotide
gacaugaaaaucuacggca

SEQ ID NO: 627695 - RNA, 19 nt, Artificial Sequence
  Description of Artificial Sequence: Synthetic oligonucleotide
caugauugcaaaacgacac

SEQ ID NO: 627696 - RNA, 19 nt, Artificial Sequence
  Description of Artificial Sequence: Synthetic oligonucleotide
ucugaaggaacacgguugg

SEQ ID NO: 627697 - RNA, 19 nt, Artificial Sequence
  Description of Artificial Sequence: Synthetic oligonucleotide
ugguuauuugguuaagucc

SEQ ID NO: 627698 - RNA, 19 nt, Artificial Sequence
  Description of Artificial Sequence: Synthetic oligonucleotide
aagaaacccgaucucaucu

SEQ ID NO: 627699 - RNA, 19 nt, Artificial Sequence
  Description of Artificial Sequence: Synthetic oligonucleotide
aacgacacuguguccaaac

SEQ ID NO: 627700 - RNA, 19 nt, Artificial Sequence
  Description of Artificial Sequence: Synthetic oligonucleotide
uuugguggcacaccgaaga

SEQ ID NO: 627701 - RNA, 19 nt, Artificial Sequence
  Description of Artificial Sequence: Synthetic oligonucleotide
ucccaugcaagauagaggu

SEQ ID NO: 627702 - RNA, 19 nt, Artificial Sequence
  Description of Artificial Sequence: Synthetic oligonucleotide
cuugccaccguccacagcc

SEQ ID NO: 627703 - RNA, 19 nt, Artificial Sequence
  Description of Artificial Sequence: Synthetic oligonucleotide
guuuggauccaucaaacug

SEQ ID NO: 627704 - RNA, 19 nt, Artificial Sequence
  Description of Artificial Sequence: Synthetic oligonucleotide
aaaagcuacucgcucagga

SEQ ID NO: 627705 - RNA, 19 nt, Artificial Sequence
  Description of Artificial Sequence: Synthetic oligonucleotide
gauaucgagacucacaaua

SEQ ID NO: 627706 - RNA, 19 nt, Artificial Sequence
  Description of Artificial Sequence: Synthetic oligonucleotide
aacggacgagcccacagac

SEQ ID NO: 627707 - RNA, 19 nt, Artificial Sequence
  Description of Artificial Sequence: Synthetic oligonucleotide
aaaucccucacccaguaaa

SEQ ID NO: 627708 - RNA, 19 nt, Artificial Sequence
  Description of Artificial Sequence: Synthetic oligonucleotide
aaagcuacucgcucaggag

SEQ ID NO: 627709 - RNA, 19 nt, Artificial Sequence
  Description of Artificial Sequence: Synthetic oligonucleotide
uaucugugguaauggaugg

SEQ ID NO: 627710 - RNA, 19 nt, Artificial Sequence
  Description of Artificial Sequence: Synthetic oligonucleotide
uacguuguaaagaccacca

SEQ ID NO: 627711 - RNA, 19 nt, Artificial Sequence
  Description of Artificial Sequence: Synthetic oligonucleotide
auauuaucugugguaaugg

SEQ ID NO: 627712 - RNA, 19 nt, Artificial Sequence
  Description of Artificial Sequence: Synthetic oligonucleotide
aagaggguccgguacaucu

SEQ ID NO: 627713 - RNA, 19 nt, Artificial Sequence
  Description of Artificial Sequence: Synthetic oligonucleotide
caggaagugauaucgagac

SEQ ID NO: 627714 - RNA, 19 nt, Artificial Sequence
  Description of Artificial Sequence: Synthetic oligonucleotide
agacucacaauaguuuugc

SEQ ID NO: 627715 - RNA, 19 nt, Artificial Sequence
  Description of Artificial Sequence: Synthetic oligonucleotide
gauucgaggaccagcauag

SEQ ID NO: 627716 - RNA, 19 nt, Artificial Sequence
  Description of Artificial Sequence: Synthetic oligonucleotide
ucgcauagcacugugaaca

SEQ ID NO: 627717 - RNA, 19 nt, Artificial Sequence
  Description of Artificial Sequence: Synthetic oligonucleotide
aauaaagugucucccuuua

SEQ ID NO: 627718 - RNA, 19 nt, Artificial Sequence
  Description of Artificial Sequence: Synthetic oligonucleotide
augacugaagaagagcaac

SEQ ID NO: 627719 - RNA, 19 nt, Artificial Sequence
  Description of Artificial Sequence: Synthetic oligonucleotide
uagagguguauuaaucuac

SEQ ID NO: 627720 - RNA, 19 nt, Artificial Sequence
  Description of Artificial Sequence: Synthetic oligonucleotide
auaacgcguauuucccucc

SEQ ID NO: 627721 - RNA, 19 nt, Artificial Sequence
  Description of Artificial Sequence: Synthetic oligonucleotide
acaacucuauuuuaauugu

SEQ ID NO: 627722 - RNA, 19 nt, Artificial Sequence
  Description of Artificial Sequence: Synthetic oligonucleotide
aacucuauuuuaauuguga

SEQ ID NO: 627723 - RNA, 19 nt, Artificial Sequence
  Description of Artificial Sequence: Synthetic oligonucleotide
auuugguuaaguccuaaaa

SEQ ID NO: 627724 - RNA, 19 nt, Artificial Sequence
  Description of Artificial Sequence: Synthetic oligonucleotide
aaauaacgcguauuucccu

SEQ ID NO: 627725 - RNA, 19 nt, Artificial Sequence
  Description of Artificial Sequence: Synthetic oligonucleotide
auagggacagacugcacag

SEQ ID NO: 627726 - RNA, 19 nt, Artificial Sequence
  Description of Artificial Sequence: Synthetic oligonucleotide
acaauaguuuugcucuuuc

SEQ ID NO: 627727 - RNA, 19 nt, Artificial Sequence
  Description of Artificial Sequence: Synthetic oligonucleotide
ccaccauacauaaauaggg

SEQ ID NO: 627728 - RNA, 19 nt, Artificial Sequence
  Description of Artificial Sequence: Synthetic oligonucleotide
aaggagucuagccaccaca

SEQ ID NO: 627729 - RNA, 19 nt, Artificial Sequence
  Description of Artificial Sequence: Synthetic oligonucleotide
aguaaauaacgcguauuuc

SEQ ID NO: 627730 - RNA, 19 nt, Artificial Sequence
  Description of Artificial Sequence: Synthetic oligonucleotide
uggguuugcucauuccugg

SEQ ID NO: 627731 - RNA, 19 nt, Artificial Sequence
  Description of Artificial Sequence: Synthetic oligonucleotide
gaagggacggcugauacug

SEQ ID NO: 627732 - RNA, 19 nt, Artificial Sequence
  Description of Artificial Sequence: Synthetic oligonucleotide
uguggauauuaucuguggu

SEQ ID NO: 627733 - RNA, 19 nt, Artificial Sequence
  Description of Artificial Sequence: Synthetic oligonucleotide
aggacaucgcccuagccag

SEQ ID NO: 627734 - RNA, 19 nt, Artificial Sequence
  Description of Artificial Sequence: Synthetic oligonucleotide
aagcuacucgcucaggaga

SEQ ID NO: 627735 - RNA, 19 nt, Artificial Sequence
  Description of Artificial Sequence: Synthetic oligonucleotide
gucaacaggugacacaagc

SEQ ID NO: 627736 - RNA, 19 nt, Artificial Sequence
  Description of Artificial Sequence: Synthetic oligonucleotide
accaugauugcaaaacgac

SEQ ID NO: 627737 - RNA, 19 nt, Artificial Sequence
  Description of Artificial Sequence: Synthetic oligonucleotide
aaucagacggguagugugg

SEQ ID NO: 627738 - RNA, 19 nt, Artificial Sequence
  Description of Artificial Sequence: Synthetic oligonucleotide
aaaucuacggcacccuuua

SEQ ID NO: 627739 - RNA, 19 nt, Artificial Sequence
  Description of Artificial Sequence: Synthetic oligonucleotide
ucuacggcacccuuuaaaa

SEQ ID NO: 627740 - RNA, 19 nt, Artificial Sequence
  Description of Artificial Sequence: Synthetic oligonucleotide
agauagagguguauuaauc

SEQ ID NO: 627741 - RNA, 19 nt, Artificial Sequence
  Description of Artificial Sequence: Synthetic oligonucleotide
ugguuaaguccuaaaacau

SEQ ID NO: 627742 - RNA, 19 nt, Artificial Sequence
  Description of Artificial Sequence: Synthetic oligonucleotide
cacugaauccaucccagcg

SEQ ID NO: 627743 - RNA, 19 nt, Artificial Sequence
  Description of Artificial Sequence: Synthetic oligonucleotide
aagagcaacgcuccugagu

SEQ ID NO: 627744 - RNA, 19 nt, Artificial Sequence
  Description of Artificial Sequence: Synthetic oligonucleotide
aaggccugcgcuuuauugu

SEQ ID NO: 627745 - RNA, 19 nt, Artificial Sequence
  Description of Artificial Sequence: Synthetic oligonucleotide
acgaggauggccaagcuuc

SEQ ID NO: 627746 - RNA, 19 nt, Artificial Sequence
  Description of Artificial Sequence: Synthetic oligonucleotide
ugauugcaaaacgacacug

SEQ ID NO: 627747 - RNA, 19 nt, Artificial Sequence
  Description of Artificial Sequence: Synthetic oligonucleotide
gauagagguguauuaaucu

SEQ ID NO: 627748 - RNA, 19 nt, Artificial Sequence
  Description of Artificial Sequence: Synthetic oligonucleotide
uucaauccagcucgauggg

SEQ ID NO: 627749 - RNA, 19 nt, Artificial Sequence
  Description of Artificial Sequence: Synthetic oligonucleotide
aacccgaucucaucugcag

SEQ ID NO: 627750 - RNA, 19 nt, Artificial Sequence
  Description of Artificial Sequence: Synthetic oligonucleotide
acaugaaaaucuacggcac

SEQ ID NO: 627751 - RNA, 19 nt, Artificial Sequence
  Description of Artificial Sequence: Synthetic oligonucleotide
guaguguggauauuaucug

SEQ ID NO: 627752 - RNA, 19 nt, Artificial Sequence
  Description of Artificial Sequence: Synthetic oligonucleotide
aacacuuuagccagauucu

SEQ ID NO: 627753 - RNA, 19 nt, Artificial Sequence
  Description of Artificial Sequence: Synthetic oligonucleotide
ugaacggacgagcccacag

SEQ ID NO: 627754 - RNA, 19 nt, Artificial Sequence
  Description of Artificial Sequence: Synthetic oligonucleotide
cugguuauuugguuaaguc

SEQ ID NO: 627755 - RNA, 19 nt, Artificial Sequence
  Description of Artificial Sequence: Synthetic oligonucleotide
uauaaucagacggguagug

SEQ ID NO: 627756 - RNA, 19 nt, Artificial Sequence
  Description of Artificial Sequence: Synthetic oligonucleotide
agagcaacgcuccugagua

SEQ ID NO: 627757 - RNA, 19 nt, Artificial Sequence
  Description of Artificial Sequence: Synthetic oligonucleotide
guguguacguuguaaagac

SEQ ID NO: 627758 - RNA, 19 nt, Artificial Sequence
  Description of Artificial Sequence: Synthetic oligonucleotide
uuacaguaaauaacgcgua

SEQ ID NO: 627759 - RNA, 19 nt, Artificial Sequence
  Description of Artificial Sequence: Synthetic oligonucleotide
agagaaacuguagcacagc

SEQ ID NO: 627760 - RNA, 19 nt, Artificial Sequence
  Description of Artificial Sequence: Synthetic oligonucleotide
uguguacguuguaaagacc

SEQ ID NO: 627761 - RNA, 19 nt, Artificial Sequence
  Description of Artificial Sequence: Synthetic oligonucleotide
agcaagccuccauaggagg

SEQ ID NO: 627762 - RNA, 19 nt, Artificial Sequence
  Description of Artificial Sequence: Synthetic oligonucleotide
ucuguguguacguuguaaa

SEQ ID NO: 627763 - RNA, 19 nt, Artificial Sequence
  Description of Artificial Sequence: Synthetic oligonucleotide
uucgaggaccagcauagac

SEQ ID NO: 627764 - RNA, 19 nt, Artificial Sequence
  Description of Artificial Sequence: Synthetic oligonucleotide
aagugauaucgagacucac

SEQ ID NO: 627765 - RNA, 19 nt, Artificial Sequence
  Description of Artificial Sequence: Synthetic oligonucleotide
uaucgagacucacaauagu

SEQ ID NO: 627766 - RNA, 19 nt, Artificial Sequence
  Description of Artificial Sequence: Synthetic oligonucleotide
cucccuuuauaaucagacg

SEQ ID NO: 627767 - RNA, 19 nt, Artificial Sequence
  Description of Artificial Sequence: Synthetic oligonucleotide
caugaaaaucuacggcacc

SEQ ID NO: 627768 - RNA, 19 nt, Artificial Sequence
  Description of Artificial Sequence: Synthetic oligonucleotide
gaaacccgaucucaucugc

SEQ ID NO: 627769 - RNA, 19 nt, Artificial Sequence
  Description of Artificial Sequence: Synthetic oligonucleotide
gugauaucgagacucacaa

SEQ ID NO: 627770 - RNA, 19 nt, Artificial Sequence
  Description of Artificial Sequence: Synthetic oligonucleotide
uugcucuuuccacagcgug

SEQ ID NO: 627771 - RNA, 19 nt, Artificial Sequence
  Description of Artificial Sequence: Synthetic oligonucleotide
aaucuacaacucuauuuua

SEQ ID NO: 627772 - RNA, 19 nt, Artificial Sequence
  Description of Artificial Sequence: Synthetic oligonucleotide
uauugugggugaucugaag

SEQ ID NO: 627773 - RNA, 19 nt, Artificial Sequence
  Description of Artificial Sequence: Synthetic oligonucleotide
cagacgacaggacaucgcc

SEQ ID NO: 627774 - RNA, 19 nt, Artificial Sequence
  Description of Artificial Sequence: Synthetic oligonucleotide
cagcauaugugcacugucc

SEQ ID NO: 627775 - RNA, 19 nt, Artificial Sequence
  Description of Artificial Sequence: Synthetic oligonucleotide
ggaguacucaaccagcaug

SEQ ID NO: 627776 - RNA, 19 nt, Artificial Sequence
  Description of Artificial Sequence: Synthetic oligonucleotide
ggacaugaaaaucuacggc

SEQ ID NO: 627777 - RNA, 19 nt, Artificial Sequence
  Description of Artificial Sequence: Synthetic oligonucleotide
ucgagacucacaauaguuu

SEQ ID NO: 627778 - RNA, 19 nt, Artificial Sequence
  Description of Artificial Sequence: Synthetic oligonucleotide
acugugaacacagccagcu

SEQ ID NO: 627779 - RNA, 19 nt, Artificial Sequence
  Description of Artificial Sequence: Synthetic oligonucleotide
uacgaacauguccaccuca

SEQ ID NO: 627780 - RNA, 19 nt, Artificial Sequence
  Description of Artificial Sequence: Synthetic oligonucleotide
uacaguaaauaacgcguau

SEQ ID NO: 627781 - RNA, 19 nt, Artificial Sequence
  Description of Artificial Sequence: Synthetic oligonucleotide
uauagucaacaggugacac

SEQ ID NO: 627782 - RNA, 19 nt, Artificial Sequence
  Description of Artificial Sequence: Synthetic oligonucleotide
uguacguuguaaagaccac

SEQ ID NO: 627783 - RNA, 19 nt, Artificial Sequence
  Description of Artificial Sequence: Synthetic oligonucleotide
ggaagugauaucgagacuc

SEQ ID NO: 627784 - RNA, 19 nt, Artificial Sequence
  Description of Artificial Sequence: Synthetic oligonucleotide
auaucgagacucacaauag

SEQ ID NO: 627785 - RNA, 19 nt, Artificial Sequence
  Description of Artificial Sequence: Synthetic oligonucleotide
cuguguguacguuguaaag

SEQ ID NO: 627786 - RNA, 19 nt, Artificial Sequence
  Description of Artificial Sequence: Synthetic oligonucleotide
acgcguauuucccuccuuc

SEQ ID NO: 627787 - RNA, 19 nt, Artificial Sequence
  Description of Artificial Sequence: Synthetic oligonucleotide
uacaugagcucucgggccu

SEQ ID NO: 627788 - RNA, 19 nt, Artificial Sequence
  Description of Artificial Sequence: Synthetic oligonucleotide
agcagaagcccacugguaa

SEQ ID NO: 627789 - RNA, 19 nt, Artificial Sequence
  Description of Artificial Sequence: Synthetic oligonucleotide
ugcgcuuuauuguggguga

SEQ ID NO: 627790 - RNA, 19 nt, Artificial Sequence
  Description of Artificial Sequence: Synthetic oligonucleotide
auuaaucuacaacucuauu

SEQ ID NO: 627791 - RNA, 19 nt, Artificial Sequence
  Description of Artificial Sequence: Synthetic oligonucleotide
uauuugguuaaguccuaaa

SEQ ID NO: 627792 - RNA, 19 nt, Artificial Sequence
  Description of Artificial Sequence: Synthetic oligonucleotide
uggacugguuauuugguua

SEQ ID NO: 627793 - RNA, 19 nt, Artificial Sequence
  Description of Artificial Sequence: Synthetic oligonucleotide
ucaauccagcucgaugggg

SEQ ID NO: 627794 - RNA, 19 nt, Artificial Sequence
  Description of Artificial Sequence: Synthetic oligonucleotide
agcauagacaggucagcug

SEQ ID NO: 627795 - RNA, 19 nt, Artificial Sequence
  Description of Artificial Sequence: Synthetic oligonucleotide
guguacguuguaaagacca

SEQ ID NO: 627796 - RNA, 19 nt, Artificial Sequence
  Description of Artificial Sequence: Synthetic oligonucleotide
aguuuggauccaucaaacu

SEQ ID NO: 627797 - RNA, 19 nt, Artificial Sequence
  Description of Artificial Sequence: Synthetic oligonucleotide
caacucuauuuuaauugug

SEQ ID NO: 627798 - RNA, 19 nt, Artificial Sequence
  Description of Artificial Sequence: Synthetic oligonucleotide
ucgagguacucguuguaca

SEQ ID NO: 627799 - RNA, 19 nt, Artificial Sequence
  Description of Artificial Sequence: Synthetic oligonucleotide
aguagucgcccuucucgac

SEQ ID NO: 627800 - RNA, 19 nt, Artificial Sequence
  Description of Artificial Sequence: Synthetic oligonucleotide
aaaacgacacuguguccaa

SEQ ID NO: 627801 - RNA, 19 nt, Artificial Sequence
  Description of Artificial Sequence: Synthetic oligonucleotide
cacuucugaagccucgggc

SEQ ID NO: 627802 - RNA, 19 nt, Artificial Sequence
  Description of Artificial Sequence: Synthetic oligonucleotide
agaaacccgaucucaucug

SEQ ID NO: 627803 - RNA, 19 nt, Artificial Sequence
  Description of Artificial Sequence: Synthetic oligonucleotide
gaagggauaccagucgcug

SEQ ID NO: 627804 - RNA, 19 nt, Artificial Sequence
  Description of Artificial Sequence: Synthetic oligonucleotide
aucugaagaagaggguccg

SEQ ID NO: 627805 - RNA, 19 nt, Artificial Sequence
  Description of Artificial Sequence: Synthetic oligonucleotide
auggauggaugcuucugug

SEQ ID NO: 627806 - RNA, 19 nt, Artificial Sequence
  Description of Artificial Sequence: Synthetic oligonucleotide
cugcuuugguggcacaccg

SEQ ID NO: 627807 - RNA, 19 nt, Artificial Sequence
  Description of Artificial Sequence: Synthetic oligonucleotide
cccuuuauaaucagacggg

SEQ ID NO: 627808 - RNA, 19 nt, Artificial Sequence
  Description of Artificial Sequence: Synthetic oligonucleotide
agguugaacgaaggguggc

SEQ ID NO: 627809 - RNA, 19 nt, Artificial Sequence
  Description of Artificial Sequence: Synthetic oligonucleotide
ugcgccucguaguagucgc

SEQ ID NO: 627810 - RNA, 19 nt, Artificial Sequence
  Description of Artificial Sequence: Synthetic oligonucleotide
agugauaucgagacucaca

SEQ ID NO: 627811 - RNA, 19 nt, Artificial Sequence
  Description of Artificial Sequence: Synthetic oligonucleotide
gauggguuugcucauuccu

SEQ ID NO: 627812 - RNA, 19 nt, Artificial Sequence
  Description of Artificial Sequence: Synthetic oligonucleotide
ugaaaaucuacggcacccu

SEQ ID NO: 627813 - RNA, 19 nt, Artificial Sequence
  Description of Artificial Sequence: Synthetic oligonucleotide
ugcuugugaccuccaagga

SEQ ID NO: 627814 - RNA, 19 nt, Artificial Sequence
  Description of Artificial Sequence: Synthetic oligonucleotide
uacugcucgcauagcacug

SEQ ID NO: 627815 - RNA, 19 nt, Artificial Sequence
  Description of Artificial Sequence: Synthetic oligonucleotide
gagacucacaauaguuuug

SEQ ID NO: 627816 - RNA, 19 nt, Artificial Sequence
  Description of Artificial Sequence: Synthetic oligonucleotide
guauuaaucuacaacucua

SEQ ID NO: 627817 - RNA, 19 nt, Artificial Sequence
  Description of Artificial Sequence: Synthetic oligonucleotide
acucccucuacgguggccg

SEQ ID NO: 627818 - RNA, 19 nt, Artificial Sequence
  Description of Artificial Sequence: Synthetic oligonucleotide
guacguuguaaagaccacc

SEQ ID NO: 627819 - RNA, 19 nt, Artificial Sequence
  Description of Artificial Sequence: Synthetic oligonucleotide
gagacgaggauggccaagc

SEQ ID NO: 627820 - RNA, 19 nt, Artificial Sequence
  Description of Artificial Sequence: Synthetic oligonucleotide
acguuguaaagaccaccag

SEQ ID NO: 627821 - RNA, 19 nt, Artificial Sequence
  Description of Artificial Sequence: Synthetic oligonucleotide
uggcccauccucaauggau

SEQ ID NO: 627822 - RNA, 19 nt, Artificial Sequence
  Description of Artificial Sequence: Synthetic oligonucleotide
acgaacauguccaccucac

SEQ ID NO: 627823 - RNA, 19 nt, Artificial Sequence
  Description of Artificial Sequence: Synthetic oligonucleotide
caagaaacccgaucucauc

SEQ ID NO: 627824 - RNA, 19 nt, Artificial Sequence
  Description of Artificial Sequence: Synthetic oligonucleotide
aucuacggcacccuuuaaa

SEQ ID NO: 627825 - RNA, 19 nt, Artificial Sequence
  Description of Artificial Sequence: Synthetic oligonucleotide
ugcaagauagagguguauu

SEQ ID NO: 627826 - RNA, 19 nt, Artificial Sequence
  Description of Artificial Sequence: Synthetic oligonucleotide
ugcagcuugaacggacgag

SEQ ID NO: 627827 - RNA, 19 nt, Artificial Sequence
  Description of Artificial Sequence: Synthetic oligonucleotide
aaaaucuacggcacccuuu

SEQ ID NO: 627828 - RNA, 19 nt, Artificial Sequence
  Description of Artificial Sequence: Synthetic oligonucleotide
uucuguguguacguuguaa

SEQ ID NO: 627829 - RNA, 19 nt, Artificial Sequence
  Description of Artificial Sequence: Synthetic oligonucleotide
gagaguuuggauccaucaa

SEQ ID NO: 627830 - RNA, 19 nt, Artificial Sequence
  Description of Artificial Sequence: Synthetic oligonucleotide
caccauacauaaauaggga

SEQ ID NO: 627831 - RNA, 19 nt, Artificial Sequence
  Description of Artificial Sequence: Synthetic oligonucleotide
uugaacgaaggguggccca

SEQ ID NO: 627832 - RNA, 19 nt, Artificial Sequence
  Description of Artificial Sequence: Synthetic oligonucleotide
cucguuguacauggggucc

SEQ ID NO: 627833 - RNA, 19 nt, Artificial Sequence
  Description of Artificial Sequence: Synthetic oligonucleotide
cuuagcagguucccuagca

SEQ ID NO: 627834 - RNA, 19 nt, Artificial Sequence
  Description of Artificial Sequence: Synthetic oligonucleotide
agacgacaggacaucgccc

SEQ ID NO: 627835 - RNA, 19 nt, Artificial Sequence
  Description of Artificial Sequence: Synthetic oligonucleotide
agagguguauuaaucuaca

SEQ ID NO: 627836 - RNA, 19 nt, Artificial Sequence
  Description of Artificial Sequence: Synthetic oligonucleotide
agucgcugacgccaggcug

SEQ ID NO: 627837 - RNA, 19 nt, Artificial Sequence
  Description of Artificial Sequence: Synthetic oligonucleotide
auccugucgagguacucgu

SEQ ID NO: 627838 - RNA, 19 nt, Artificial Sequence
  Description of Artificial Sequence: Synthetic oligonucleotide
aggccugcgcuuuauugug

SEQ ID NO: 627839 - RNA, 19 nt, Artificial Sequence
  Description of Artificial Sequence: Synthetic oligonucleotide
ucuggugcgccucguagua

SEQ ID NO: 627840 - RNA, 19 nt, Artificial Sequence
  Description of Artificial Sequence: Synthetic oligonucleotide
gaaauugagcagagguuga

SEQ ID NO: 627841 - RNA, 19 nt, Artificial Sequence
  Description of Artificial Sequence: Synthetic oligonucleotide
guugcgggcgcccuccugc

SEQ ID NO: 627842 - RNA, 19 nt, Artificial Sequence
  Description of Artificial Sequence: Synthetic oligonucleotide
auaaucagacggguagugu

SEQ ID NO: 627843 - RNA, 19 nt, Artificial Sequence
  Description of Artificial Sequence: Synthetic oligonucleotide
caucgcccuagccagcugc

SEQ ID NO: 627844 - RNA, 19 nt, Artificial Sequence
  Description of Artificial Sequence: Synthetic oligonucleotide
guugaacgaaggguggccc

SEQ ID NO: 627845 - RNA, 19 nt, Artificial Sequence
  Description of Artificial Sequence: Synthetic oligonucleotide
cacagacuacagcuggggc

SEQ ID NO: 627846 - RNA, 19 nt, Artificial Sequence
  Description of Artificial Sequence: Synthetic oligonucleotide
cacagccugggcuacgaac

SEQ ID NO: 627847 - RNA, 19 nt, Artificial Sequence
  Description of Artificial Sequence: Synthetic oligonucleotide
gagcugacgcugucgcagg

SEQ ID NO: 627848 - RNA, 19 nt, Artificial Sequence
  Description of Artificial Sequence: Synthetic oligonucleotide
ugacacaagccuuccuuua

SEQ ID NO: 627849 - RNA, 19 nt, Artificial Sequence
  Description of Artificial Sequence: Synthetic oligonucleotide
caucaaacugaacacuuua

SEQ ID NO: 627850 - RNA, 19 nt, Artificial Sequence
  Description of Artificial Sequence: Synthetic oligonucleotide
ucuagccaccacagcauau

SEQ ID NO: 627851 - RNA, 19 nt, Artificial Sequence
  Description of Artificial Sequence: Synthetic oligonucleotide
acaguaaauaacgcguauu

SEQ ID NO: 627852 - RNA, 19 nt, Artificial Sequence
  Description of Artificial Sequence: Synthetic oligonucleotide
gaagagcaacgcuccugag

SEQ ID NO: 627853 - RNA, 19 nt, Artificial Sequence
  Description of Artificial Sequence: Synthetic oligonucleotide
auaaagugucucccuuuau

SEQ ID NO: 627854 - RNA, 19 nt, Artificial Sequence
  Description of Artificial Sequence: Synthetic oligonucleotide
acucgcucaggagaguuug

SEQ ID NO: 627855 - RNA, 19 nt, Artificial Sequence
  Description of Artificial Sequence: Synthetic oligonucleotide
gacgcugucgcaggcgcgg

SEQ ID NO: 627856 - RNA, 19 nt, Artificial Sequence
  Description of Artificial Sequence: Synthetic oligonucleotide
gaagugauaucgagacuca

SEQ ID NO: 627857 - RNA, 19 nt, Artificial Sequence
  Description of Artificial Sequence: Synthetic oligonucleotide
ccaugacugaagaagagca

SEQ ID NO: 627858 - RNA, 19 nt, Artificial Sequence
  Description of Artificial Sequence: Synthetic oligonucleotide
uggaguacucaaccagcau

SEQ ID NO: 627859 - RNA, 19 nt, Artificial Sequence
  Description of Artificial Sequence: Synthetic oligonucleotide
gacgacaggacaucgcccu

SEQ ID NO: 627860 - RNA, 19 nt, Artificial Sequence
  Description of Artificial Sequence: Synthetic oligonucleotide
caccgcacucccucuacgg

SEQ ID NO: 627861 - RNA, 19 nt, Artificial Sequence
  Description of Artificial Sequence: Synthetic oligonucleotide
gacaggacaucgcccuagc

SEQ ID NO: 627862 - RNA, 19 nt, Artificial Sequence
  Description of Artificial Sequence: Synthetic oligonucleotide
uaacgcguauuucccuccu

SEQ ID NO: 627863 - RNA, 19 nt, Artificial Sequence
  Description of Artificial Sequence: Synthetic oligonucleotide
aagggacggcugauacugc

SEQ ID NO: 627864 - RNA, 19 nt, Artificial Sequence
  Description of Artificial Sequence: Synthetic oligonucleotide
caagauagagguguauuaa

SEQ ID NO: 627865 - RNA, 19 nt, Artificial Sequence
  Description of Artificial Sequence: Synthetic oligonucleotide
cuccgcgcagagcugacgc

SEQ ID NO: 627866 - RNA, 19 nt, Artificial Sequence
  Description of Artificial Sequence: Synthetic oligonucleotide
guugcgggcgccguugcgg

SEQ ID NO: 627867 - RNA, 19 nt, Artificial Sequence
  Description of Artificial Sequence: Synthetic oligonucleotide
ucccuagcaagccuccaua

SEQ ID NO: 627868 - RNA, 19 nt, Artificial Sequence
  Description of Artificial Sequence: Synthetic oligonucleotide
uagggacagacugcacagg

SEQ ID NO: 627869 - RNA, 19 nt, Artificial Sequence
  Description of Artificial Sequence: Synthetic oligonucleotide
ugauaucgagacucacaau

SEQ ID NO: 627870 - RNA, 19 nt, Artificial Sequence
  Description of Artificial Sequence: Synthetic oligonucleotide
cucgcauagcacugugaac

SEQ ID NO: 627871 - RNA, 19 nt, Artificial Sequence
  Description of Artificial Sequence: Synthetic oligonucleotide
uggugcgccucguaguagu

SEQ ID NO: 627872 - RNA, 19 nt, Artificial Sequence
  Description of Artificial Sequence: Synthetic oligonucleotide
cucucgggccucugcaugc

SEQ ID NO: 627873 - RNA, 19 nt, Artificial Sequence
  Description of Artificial Sequence: Synthetic oligonucleotide
gagguguauuaaucuacaa

SEQ ID NO: 627874 - RNA, 19 nt, Artificial Sequence
  Description of Artificial Sequence: Synthetic oligonucleotide
uugcgggcgccguugcggg

SEQ ID NO: 627875 - RNA, 19 nt, Artificial Sequence
  Description of Artificial Sequence: Synthetic oligonucleotide
aggaagugauaucgagacu

SEQ ID NO: 627876 - RNA, 19 nt, Artificial Sequence
  Description of Artificial Sequence: Synthetic oligonucleotide
gaacggacgagcccacaga

SEQ ID NO: 627877 - RNA, 19 nt, Artificial Sequence
  Description of Artificial Sequence: Synthetic oligonucleotide
gaucugaaggaacacgguu

SEQ ID NO: 627878 - RNA, 19 nt, Artificial Sequence
  Description of Artificial Sequence: Synthetic oligonucleotide
gguggcccauccucaaugg

SEQ ID NO: 627879 - RNA, 19 nt, Artificial Sequence
  Description of Artificial Sequence: Synthetic oligonucleotide
aaacccgaucucaucugca

SEQ ID NO: 627880 - RNA, 19 nt, Artificial Sequence
  Description of Artificial Sequence: Synthetic oligonucleotide
agcaacgcuccugaguaca

SEQ ID NO: 627881 - RNA, 19 nt, Artificial Sequence
  Description of Artificial Sequence: Synthetic oligonucleotide
uaccagucgcugacgccag

SEQ ID NO: 627882 - RNA, 19 nt, Artificial Sequence
  Description of Artificial Sequence: Synthetic oligonucleotide
ucguuguacaugggguccc

SEQ ID NO: 627883 - RNA, 19 nt, Artificial Sequence
  Description of Artificial Sequence: Synthetic oligonucleotide
cucgacgcuggcacgcagc

SEQ ID NO: 627884 - RNA, 19 nt, Artificial Sequence
  Description of Artificial Sequence: Synthetic oligonucleotide
caccgaagaagagcugucc

SEQ ID NO: 627885 - RNA, 19 nt, Artificial Sequence
  Description of Artificial Sequence: Synthetic oligonucleotide
gacugguuauuugguuaag

SEQ ID NO: 627886 - RNA, 19 nt, Artificial Sequence
  Description of Artificial Sequence: Synthetic oligonucleotide
gagugcaggaagugauauc

SEQ ID NO: 627887 - RNA, 19 nt, Artificial Sequence
  Description of Artificial Sequence: Synthetic oligonucleotide
cucgccgucaguggagugc

SEQ ID NO: 627888 - RNA, 19 nt, Artificial Sequence
  Description of Artificial Sequence: Synthetic oligonucleotide
cucgcucaggagaguuugg

SEQ ID NO: 627889 - RNA, 19 nt, Artificial Sequence
  Description of Artificial Sequence: Synthetic oligonucleotide
gucgcugacgccaggcugc

SEQ ID NO: 627890 - RNA, 19 nt, Artificial Sequence
  Description of Artificial Sequence: Synthetic oligonucleotide
caugacugaagaagagcaa

SEQ ID NO: 627891 - RNA, 19 nt, Artificial Sequence
  Description of Artificial Sequence: Synthetic oligonucleotide
gguuugcucauuccuggac

SEQ ID NO: 627892 - RNA, 19 nt, Artificial Sequence
  Description of Artificial Sequence: Synthetic oligonucleotide
cuugaacggacgagcccac

SEQ ID NO: 627893 - RNA, 19 nt, Artificial Sequence
  Description of Artificial Sequence: Synthetic oligonucleotide
ccagccuagcacugaaucc

SEQ ID NO: 627894 - RNA, 19 nt, Artificial Sequence
  Description of Artificial Sequence: Synthetic oligonucleotide
cagccuagcacugaaucca

SEQ ID NO: 627895 - RNA, 19 nt, Artificial Sequence
  Description of Artificial Sequence: Synthetic oligonucleotide
gcuacgaacauguccaccu

SEQ ID NO: 627896 - RNA, 19 nt, Artificial Sequence
  Description of Artificial Sequence: Synthetic oligonucleotide
gucgagguacucguuguac

SEQ ID NO: 627897 - RNA, 19 nt, Artificial Sequence
  Description of Artificial Sequence: Synthetic oligonucleotide
gcaagauagagguguauua

SEQ ID NO: 627898 - RNA, 19 nt, Artificial Sequence
  Description of Artificial Sequence: Synthetic oligonucleotide
caguaaauaacgcguauuu

SEQ ID NO: 627899 - RNA, 19 nt, Artificial Sequence
  Description of Artificial Sequence: Synthetic oligonucleotide
cuacgaacauguccaccuc

SEQ ID NO: 627900 - RNA, 19 nt, Artificial Sequence
  Description of Artificial Sequence: Synthetic oligonucleotide
ugccaccguccacagccag

SEQ ID NO: 627901 - RNA, 19 nt, Artificial Sequence
  Description of Artificial Sequence: Synthetic oligonucleotide
gacggcugauacugcucgc

SEQ ID NO: 627902 - RNA, 19 nt, Artificial Sequence
  Description of Artificial Sequence: Synthetic oligonucleotide
ccaugauugcaaaacgaca

SEQ ID NO: 627903 - RNA, 19 nt, Artificial Sequence
  Description of Artificial Sequence: Synthetic oligonucleotide
gguugaacgaaggguggcc

SEQ ID NO: 627904 - RNA, 19 nt, Artificial Sequence
  Description of Artificial Sequence: Synthetic oligonucleotide
gcugacgccaggcugccug

SEQ ID NO: 627905 - RNA, 19 nt, Artificial Sequence
  Description of Artificial Sequence: Synthetic oligonucleotide
ugaacgaaggguggcccau

SEQ ID NO: 627906 - RNA, 19 nt, Artificial Sequence
  Description of Artificial Sequence: Synthetic oligonucleotide
acggguaguguggauauua

SEQ ID NO: 627907 - RNA, 19 nt, Artificial Sequence
  Description of Artificial Sequence: Synthetic oligonucleotide
cuacagacgacaggacauc

SEQ ID NO: 627908 - RNA, 19 nt, Artificial Sequence
  Description of Artificial Sequence: Synthetic oligonucleotide
accgcacucccucuacggu

SEQ ID NO: 627909 - RNA, 19 nt, Artificial Sequence
  Description of Artificial Sequence: Synthetic oligonucleotide
gcguauuucccuccuuccc

SEQ ID NO: 627910 - RNA, 19 nt, Artificial Sequence
  Description of Artificial Sequence: Synthetic oligonucleotide
ugggccggcgcuccgcgca

SEQ ID NO: 627911 - RNA, 19 nt, Artificial Sequence
  Description of Artificial Sequence: Synthetic oligonucleotide
gcuugaacggacgagccca

SEQ ID NO: 627912 - RNA, 19 nt, Artificial Sequence
  Description of Artificial Sequence: Synthetic oligonucleotide
acgcgcuggacgccaccgc

SEQ ID NO: 627913 - RNA, 19 nt, Artificial Sequence
  Description of Artificial Sequence: Synthetic oligonucleotide
uggccaagcuucccagauc

SEQ ID NO: 627914 - RNA, 19 nt, Artificial Sequence
  Description of Artificial Sequence: Synthetic oligonucleotide
aacgcguauuucccuccuu

SEQ ID NO: 627915 - RNA, 19 nt, Artificial Sequence
  Description of Artificial Sequence: Synthetic oligonucleotide
ucgauggggcugcugucau

SEQ ID NO: 627916 - RNA, 19 nt, Artificial Sequence
  Description of Artificial Sequence: Synthetic oligonucleotide
ggucccuccgaagggacgg

SEQ ID NO: 627917 - RNA, 19 nt, Artificial Sequence
  Description of Artificial Sequence: Synthetic oligonucleotide
ucgccgucaguggagugca

SEQ ID NO: 627918 - RNA, 19 nt, Artificial Sequence
  Description of Artificial Sequence: Synthetic oligonucleotide
agacgaggauggccaagcu

SEQ ID NO: 627919 - RNA, 19 nt, Artificial Sequence
  Description of Artificial Sequence: Synthetic oligonucleotide
gccugcgcuuuauuguggg

SEQ ID NO: 627920 - RNA, 19 nt, Artificial Sequence
  Description of Artificial Sequence: Synthetic oligonucleotide
ggacugguuauuugguuaa

SEQ ID NO: 627921 - RNA, 19 nt, Artificial Sequence
  Description of Artificial Sequence: Synthetic oligonucleotide
cucauuccuggacugguua

SEQ ID NO: 627922 - RNA, 19 nt, Artificial Sequence
  Description of Artificial Sequence: Synthetic oligonucleotide
aucagacggguagugugga

SEQ ID NO: 627923 - RNA, 19 nt, Artificial Sequence
  Description of Artificial Sequence: Synthetic oligonucleotide
cucuacgguggccgcgagg

SEQ ID NO: 627924 - RNA, 19 nt, Artificial Sequence
  Description of Artificial Sequence: Synthetic oligonucleotide
ccugucgagguacucguug

SEQ ID NO: 627925 - RNA, 19 nt, Artificial Sequence
  Description of Artificial Sequence: Synthetic oligonucleotide
uacucgcucaggagaguuu

SEQ ID NO: 627926 - RNA, 19 nt, Artificial Sequence
  Description of Artificial Sequence: Synthetic oligonucleotide
cucguaguagucgcccuuc

SEQ ID NO: 627927 - RNA, 19 nt, Artificial Sequence
  Description of Artificial Sequence: Synthetic oligonucleotide
gugaccuccaaggagucua

SEQ ID NO: 627928 - RNA, 19 nt, Artificial Sequence
  Description of Artificial Sequence: Synthetic oligonucleotide
gugcgccucguaguagucg

SEQ ID NO: 627929 - RNA, 19 nt, Artificial Sequence
  Description of Artificial Sequence: Synthetic oligonucleotide
aaacgacacuguguccaaa

SEQ ID NO: 627930 - RNA, 19 nt, Artificial Sequence
  Description of Artificial Sequence: Synthetic oligonucleotide
gguaaggggccucgugccc

SEQ ID NO: 627931 - RNA, 19 nt, Artificial Sequence
  Description of Artificial Sequence: Synthetic oligonucleotide
ucccucuacgguggccgcg

SEQ ID NO: 627932 - RNA, 19 nt, Artificial Sequence
  Description of Artificial Sequence: Synthetic oligonucleotide
acggcugauacugcucgca

SEQ ID NO: 627933 - RNA, 19 nt, Artificial Sequence
  Description of Artificial Sequence: Synthetic oligonucleotide
agaggguccgguacaucug

SEQ ID NO: 627934 - RNA, 19 nt, Artificial Sequence
  Description of Artificial Sequence: Synthetic oligonucleotide
guacauggggucccuccga

SEQ ID NO: 627935 - RNA, 19 nt, Artificial Sequence
  Description of Artificial Sequence: Synthetic oligonucleotide
ggguaguguggauauuauc

SEQ ID NO: 627936 - RNA, 19 nt, Artificial Sequence
  Description of Artificial Sequence: Synthetic oligonucleotide
caccucccggcuuccgucc

SEQ ID NO: 627937 - RNA, 19 nt, Artificial Sequence
  Description of Artificial Sequence: Synthetic oligonucleotide
ccaccaauccucuggcaug

SEQ ID NO: 627938 - RNA, 19 nt, Artificial Sequence
  Description of Artificial Sequence: Synthetic oligonucleotide
ggagucuagccaccacagc

SEQ ID NO: 627939 - RNA, 19 nt, Artificial Sequence
  Description of Artificial Sequence: Synthetic oligonucleotide
cacgcgcuggacgccaccg

SEQ ID NO: 627940 - RNA, 19 nt, Artificial Sequence
  Description of Artificial Sequence: Synthetic oligonucleotide
acgccaccgcgguugcggg

SEQ ID NO: 627941 - RNA, 19 nt, Artificial Sequence
  Description of Artificial Sequence: Synthetic oligonucleotide
ggcccauccucaauggaug

SEQ ID NO: 627942 - RNA, 19 nt, Artificial Sequence
  Description of Artificial Sequence: Synthetic oligonucleotide
cccagccuagcacugaauc

SEQ ID NO: 627943 - RNA, 19 nt, Artificial Sequence
  Description of Artificial Sequence: Synthetic oligonucleotide
uggagacgaggauggccaa

SEQ ID NO: 627944 - RNA, 19 nt, Artificial Sequence
  Description of Artificial Sequence: Synthetic oligonucleotide
aucgccgccgccgccgccg

SEQ ID NO: 627945 - RNA, 19 nt, Artificial Sequence
  Description of Artificial Sequence: Synthetic oligonucleotide
uccgcgcagagcugacgcu

SEQ ID NO: 627946 - RNA, 19 nt, Artificial Sequence
  Description of Artificial Sequence: Synthetic oligonucleotide
guuauuugguuaaguccua

SEQ ID NO: 627947 - RNA, 19 nt, Artificial Sequence
  Description of Artificial Sequence: Synthetic oligonucleotide
guaaggggccucgugccca

SEQ ID NO: 627948 - RNA, 19 nt, Artificial Sequence
  Description of Artificial Sequence: Synthetic oligonucleotide
ggcacaccgaagaagagcu

SEQ ID NO: 627949 - RNA, 19 nt, Artificial Sequence
  Description of Artificial Sequence: Synthetic oligonucleotide
gguacucguuguacauggg

SEQ ID NO: 627950 - RNA, 19 nt, Artificial Sequence
  Description of Artificial Sequence: Synthetic oligonucleotide
augggccggcgcuccgcgc

SEQ ID NO: 627951 - RNA, 19 nt, Artificial Sequence
  Description of Artificial Sequence: Synthetic oligonucleotide
agccucgcgagggcgggcg

SEQ ID NO: 627952 - RNA, 19 nt, Artificial Sequence
  Description of Artificial Sequence: Synthetic oligonucleotide
uugaacggacgagcccaca

SEQ ID NO: 627953 - RNA, 19 nt, Artificial Sequence
  Description of Artificial Sequence: Synthetic oligonucleotide
guggccgcgaggagccucg

SEQ ID NO: 627954 - RNA, 19 nt, Artificial Sequence
  Description of Artificial Sequence: Synthetic oligonucleotide
augcaagauagagguguau

SEQ ID NO: 627955 - RNA, 19 nt, Artificial Sequence
  Description of Artificial Sequence: Synthetic oligonucleotide
ccgaagggacggcugauac

SEQ ID NO: 627956 - RNA, 19 nt, Artificial Sequence
  Description of Artificial Sequence: Synthetic oligonucleotide
uucucgacgcuggcacgca

SEQ ID NO: 627957 - RNA, 19 nt, Artificial Sequence
  Description of Artificial Sequence: Synthetic oligonucleotide
ccagcauagacaggucagc

SEQ ID NO: 627958 - RNA, 19 nt, Artificial Sequence
  Description of Artificial Sequence: Synthetic oligonucleotide
gacgaggauggccaagcuu

SEQ ID NO: 627959 - RNA, 19 nt, Artificial Sequence
  Description of Artificial Sequence: Synthetic oligonucleotide
ccaaggaaccagagacaag

SEQ ID NO: 627960 - RNA, 19 nt, Artificial Sequence
  Description of Artificial Sequence: Synthetic oligonucleotide
cacuguucugcuggccaug

SEQ ID NO: 627961 - RNA, 19 nt, Artificial Sequence
  Description of Artificial Sequence: Synthetic oligonucleotide
cucccucuacgguggccgc

SEQ ID NO: 627962 - RNA, 19 nt, Artificial Sequence
  Description of Artificial Sequence: Synthetic oligonucleotide
cgcacucccucuacggugg

SEQ ID NO: 627963 - RNA, 19 nt, Artificial Sequence
  Description of Artificial Sequence: Synthetic oligonucleotide
gugacacaagccuuccuuu

SEQ ID NO: 627964 - RNA, 19 nt, Artificial Sequence
  Description of Artificial Sequence: Synthetic oligonucleotide
acaucgcccuagccagcug

SEQ ID NO: 627965 - RNA, 19 nt, Artificial Sequence
  Description of Artificial Sequence: Synthetic oligonucleotide
ggcuacgaacauguccacc

SEQ ID NO: 627966 - RNA, 19 nt, Artificial Sequence
  Description of Artificial Sequence: Synthetic oligonucleotide
cacgguuggccagcaggag

SEQ ID NO: 627967 - RNA, 19 nt, Artificial Sequence
  Description of Artificial Sequence: Synthetic oligonucleotide
cacaggcggcuccuccagc

SEQ ID NO: 627968 - RNA, 19 nt, Artificial Sequence
  Description of Artificial Sequence: Synthetic oligonucleotide
acgcuccugaguacaugag

SEQ ID NO: 627969 - RNA, 19 nt, Artificial Sequence
  Description of Artificial Sequence: Synthetic oligonucleotide
cugucgagguacucguugu

SEQ ID NO: 627970 - RNA, 19 nt, Artificial Sequence
  Description of Artificial Sequence: Synthetic oligonucleotide
uccugucgagguacucguu

SEQ ID NO: 627971 - RNA, 19 nt, Artificial Sequence
  Description of Artificial Sequence: Synthetic oligonucleotide
cgcguauuucccuccuucc

SEQ ID NO: 627972 - RNA, 19 nt, Artificial Sequence
  Description of Artificial Sequence: Synthetic oligonucleotide
ggagacgaggauggccaag

SEQ ID NO: 627973 - RNA, 19 nt, Artificial Sequence
  Description of Artificial Sequence: Synthetic oligonucleotide
guggcccauccucaaugga

SEQ ID NO: 627974 - RNA, 19 nt, Artificial Sequence
  Description of Artificial Sequence: Synthetic oligonucleotide
cugcagcuugaacggacga

SEQ ID NO: 627975 - RNA, 19 nt, Artificial Sequence
  Description of Artificial Sequence: Synthetic oligonucleotide
gccaccgcgguugcgggcg

SEQ ID NO: 627976 - RNA, 19 nt, Artificial Sequence
  Description of Artificial Sequence: Synthetic oligonucleotide
cagccaccauacauaaaua

SEQ ID NO: 627977 - RNA, 19 nt, Artificial Sequence
  Description of Artificial Sequence: Synthetic oligonucleotide
cagacggguaguguggaua

SEQ ID NO: 627978 - RNA, 19 nt, Artificial Sequence
  Description of Artificial Sequence: Synthetic oligonucleotide
gccgcgaggagccucgcga

SEQ ID NO: 627979 - RNA, 19 nt, Artificial Sequence
  Description of Artificial Sequence: Synthetic oligonucleotide
gguugcgggcgccguugcg

SEQ ID NO: 627980 - RNA, 19 nt, Artificial Sequence
  Description of Artificial Sequence: Synthetic oligonucleotide
gucgcccuucucgacgcug

SEQ ID NO: 627981 - RNA, 19 nt, Artificial Sequence
  Description of Artificial Sequence: Synthetic oligonucleotide
ccgcacucccucuacggug

SEQ ID NO: 627982 - RNA, 19 nt, Artificial Sequence
  Description of Artificial Sequence: Synthetic oligonucleotide
ucccuccgaagggacggcu

SEQ ID NO: 627983 - RNA, 19 nt, Artificial Sequence
  Description of Artificial Sequence: Synthetic oligonucleotide
guuguacauggggucccuc

SEQ ID NO: 627984 - RNA, 19 nt, Artificial Sequence
  Description of Artificial Sequence: Synthetic oligonucleotide
gcaugccauggcugcacug

SEQ ID NO: 627985 - RNA, 19 nt, Artificial Sequence
  Description of Artificial Sequence: Synthetic oligonucleotide
ggguuugcucauuccugga

SEQ ID NO: 627986 - RNA, 19 nt, Artificial Sequence
  Description of Artificial Sequence: Synthetic oligonucleotide
acgacaggacaucgcccua

SEQ ID NO: 627987 - RNA, 19 nt, Artificial Sequence
  Description of Artificial Sequence: Synthetic oligonucleotide
acgagcccacagacuacag

SEQ ID NO: 627988 - RNA, 19 nt, Artificial Sequence
  Description of Artificial Sequence: Synthetic oligonucleotide
acggacgagcccacagacu

SEQ ID NO: 627989 - RNA, 19 nt, Artificial Sequence
  Description of Artificial Sequence: Synthetic oligonucleotide
ggccugcgcuuuauugugg

SEQ ID NO: 627990 - RNA, 19 nt, Artificial Sequence
  Description of Artificial Sequence: Synthetic oligonucleotide
cacucccucuacgguggcc

SEQ ID NO: 627991 - RNA, 19 nt, Artificial Sequence
  Description of Artificial Sequence: Synthetic oligonucleotide
gcauaugugcacugucccu

SEQ ID NO: 627992 - RNA, 19 nt, Artificial Sequence
  Description of Artificial Sequence: Synthetic oligonucleotide
aucgcccuagccagcugcu

SEQ ID NO: 627993 - RNA, 19 nt, Artificial Sequence
  Description of Artificial Sequence: Synthetic oligonucleotide
cuggacugguuauuugguu

SEQ ID NO: 627994 - RNA, 19 nt, Artificial Sequence
  Description of Artificial Sequence: Synthetic oligonucleotide
cgcauagcacugugaacac

SEQ ID NO: 627995 - RNA, 19 nt, Artificial Sequence
  Description of Artificial Sequence: Synthetic oligonucleotide
ggcugauacugcucgcaua

SEQ ID NO: 627996 - RNA, 19 nt, Artificial Sequence
  Description of Artificial Sequence: Synthetic oligonucleotide
augcuucuguguguacguu

SEQ ID NO: 627997 - RNA, 19 nt, Artificial Sequence
  Description of Artificial Sequence: Synthetic oligonucleotide
cucgggcaguggaguacuc

SEQ ID NO: 627998 - RNA, 19 nt, Artificial Sequence
  Description of Artificial Sequence: Synthetic oligonucleotide
cugucacccugcagcccuc

SEQ ID NO: 627999 - RNA, 19 nt, Artificial Sequence
  Description of Artificial Sequence: Synthetic oligonucleotide
ccaccgcacucccucuacg

SEQ ID NO: 628000 - RNA, 19 nt, Artificial Sequence
  Description of Artificial Sequence: Synthetic oligonucleotide
gguaauggauggguuugcu

SEQ ID NO: 628001 - RNA, 19 nt, Artificial Sequence
  Description of Artificial Sequence: Synthetic oligonucleotide
cugugguaauggauggguu

SEQ ID NO: 628002 - RNA, 19 nt, Artificial Sequence
  Description of Artificial Sequence: Synthetic oligonucleotide
ggucggcggcaccucccgg

SEQ ID NO: 628003 - RNA, 19 nt, Artificial Sequence
  Description of Artificial Sequence: Synthetic oligonucleotide
cgcgcuggacgccaccgcg

SEQ ID NO: 628004 - RNA, 19 nt, Artificial Sequence
  Description of Artificial Sequence: Synthetic oligonucleotide
gccaccgcacucccucuac

SEQ ID NO: 628005 - RNA, 19 nt, Artificial Sequence
  Description of Artificial Sequence: Synthetic oligonucleotide
ugacgccaggcugccuguc

SEQ ID NO: 628006 - RNA, 19 nt, Artificial Sequence
  Description of Artificial Sequence: Synthetic oligonucleotide
cucccggcuuccgucccug

SEQ ID NO: 628007 - RNA, 19 nt, Artificial Sequence
  Description of Artificial Sequence: Synthetic oligonucleotide
cagcggugccggccauggg

SEQ ID NO: 628008 - RNA, 19 nt, Artificial Sequence
  Description of Artificial Sequence: Synthetic oligonucleotide
cgacacuguguccaaacaa

SEQ ID NO: 628009 - RNA, 19 nt, Artificial Sequence
  Description of Artificial Sequence: Synthetic oligonucleotide
ggccgcgaggagccucgcg

SEQ ID NO: 628010 - RNA, 19 nt, Artificial Sequence
  Description of Artificial Sequence: Synthetic oligonucleotide
ccgaucucaucugcaggac

SEQ ID NO: 628011 - RNA, 19 nt, Artificial Sequence
  Description of Artificial Sequence: Synthetic oligonucleotide
gucccuccgaagggacggc

SEQ ID NO: 628012 - RNA, 19 nt, Artificial Sequence
  Description of Artificial Sequence: Synthetic oligonucleotide
gcgcuggacgccaccgcgg

SEQ ID NO: 628013 - RNA, 19 nt, Artificial Sequence
  Description of Artificial Sequence: Synthetic oligonucleotide
cgacaggacaucgcccuag

SEQ ID NO: 628014 - RNA, 19 nt, Artificial Sequence
  Description of Artificial Sequence: Synthetic oligonucleotide
cuacucgcucaggagaguu

SEQ ID NO: 628015 - RNA, 19 nt, Artificial Sequence
  Description of Artificial Sequence: Synthetic oligonucleotide
gccguugcgggcgcccucc

SEQ ID NO: 628016 - RNA, 19 nt, Artificial Sequence
  Description of Artificial Sequence: Synthetic oligonucleotide
cugggaagcucaccaugau

SEQ ID NO: 628017 - RNA, 19 nt, Artificial Sequence
  Description of Artificial Sequence: Synthetic oligonucleotide
ucgccgccgccgccgccgc

SEQ ID NO: 628018 - RNA, 19 nt, Artificial Sequence
  Description of Artificial Sequence: Synthetic oligonucleotide
gagccucgcgagggcgggc

SEQ ID NO: 628019 - RNA, 19 nt, Artificial Sequence
  Description of Artificial Sequence: Synthetic oligonucleotide
ccgcgcagagcugacgcug

SEQ ID NO: 628020 - RNA, 19 nt, Artificial Sequence
  Description of Artificial Sequence: Synthetic oligonucleotide
gcacaccgaagaagagcug

SEQ ID NO: 628021 - RNA, 19 nt, Artificial Sequence
  Description of Artificial Sequence: Synthetic oligonucleotide
gugcccagccuagcacuga

SEQ ID NO: 628022 - RNA, 19 nt, Artificial Sequence
  Description of Artificial Sequence: Synthetic oligonucleotide
ccaaggagucuagccacca

SEQ ID NO: 628023 - RNA, 19 nt, Artificial Sequence
  Description of Artificial Sequence: Synthetic oligonucleotide
ucgcccuagccagcugcuu

SEQ ID NO: 628024 - RNA, 19 nt, Artificial Sequence
  Description of Artificial Sequence: Synthetic oligonucleotide
ggcuuccgucccugcggcc

SEQ ID NO: 628025 - RNA, 19 nt, Artificial Sequence
  Description of Artificial Sequence: Synthetic oligonucleotide
cugacgccaggcugccugu

SEQ ID NO: 628026 - RNA, 19 nt, Artificial Sequence
  Description of Artificial Sequence: Synthetic oligonucleotide
ccucgugcccagccuagca

SEQ ID NO: 628027 - RNA, 19 nt, Artificial Sequence
  Description of Artificial Sequence: Synthetic oligonucleotide
acgcugucgcaggcgcggu

SEQ ID NO: 628028 - RNA, 19 nt, Artificial Sequence
  Description of Artificial Sequence: Synthetic oligonucleotide
gguggccgcgaggagccuc

SEQ ID NO: 628029 - RNA, 19 nt, Artificial Sequence
  Description of Artificial Sequence: Synthetic oligonucleotide
cggcuuccgucccugcggc

SEQ ID NO: 628030 - RNA, 19 nt, Artificial Sequence
  Description of Artificial Sequence: Synthetic oligonucleotide
ggcaugccauggcugcacu

SEQ ID NO: 628031 - RNA, 19 nt, Artificial Sequence
  Description of Artificial Sequence: Synthetic oligonucleotide
ccauaggaggaugucugcu

SEQ ID NO: 628032 - RNA, 19 nt, Artificial Sequence
  Description of Artificial Sequence: Synthetic oligonucleotide
gggccucgugcccagccua

SEQ ID NO: 628033 - RNA, 19 nt, Artificial Sequence
  Description of Artificial Sequence: Synthetic oligonucleotide
caccgcgguugcgggcgcc

SEQ ID NO: 628034 - RNA, 19 nt, Artificial Sequence
  Description of Artificial Sequence: Synthetic oligonucleotide
ccgguacaucuggugcgcc

SEQ ID NO: 628035 - RNA, 19 nt, Artificial Sequence
  Description of Artificial Sequence: Synthetic oligonucleotide
gggccggcgcuccgcgcag

SEQ ID NO: 628036 - RNA, 19 nt, Artificial Sequence
  Description of Artificial Sequence: Synthetic oligonucleotide
ggauccugccuggcucaca

SEQ ID NO: 628037 - RNA, 19 nt, Artificial Sequence
  Description of Artificial Sequence: Synthetic oligonucleotide
gcgccucguaguagucgcc

SEQ ID NO: 628038 - RNA, 19 nt, Artificial Sequence
  Description of Artificial Sequence: Synthetic oligonucleotide
ccucuacgguggccgcgag

SEQ ID NO: 628039 - RNA, 19 nt, Artificial Sequence
  Description of Artificial Sequence: Synthetic oligonucleotide
ggacgccaccgcgguugcg

SEQ ID NO: 628040 - RNA, 19 nt, Artificial Sequence
  Description of Artificial Sequence: Synthetic oligonucleotide
ggcgcuccgcgcagagcug

SEQ ID NO: 628041 - RNA, 19 nt, Artificial Sequence
  Description of Artificial Sequence: Synthetic oligonucleotide
ccaauccugucgagguacu

SEQ ID NO: 628042 - RNA, 19 nt, Artificial Sequence
  Description of Artificial Sequence: Synthetic oligonucleotide
ccuccacgcgcuggacgcc

SEQ ID NO: 628043 - RNA, 19 nt, Artificial Sequence
  Description of Artificial Sequence: Synthetic oligonucleotide
cccuagccagcugcuugug

SEQ ID NO: 628044 - RNA, 19 nt, Artificial Sequence
  Description of Artificial Sequence: Synthetic oligonucleotide
gcgcuccgcgcagagcuga

SEQ ID NO: 628045 - RNA, 19 nt, Artificial Sequence
  Description of Artificial Sequence: Synthetic oligonucleotide
gccucgcgagggcgggcgc

SEQ ID NO: 628046 - RNA, 19 nt, Artificial Sequence
  Description of Artificial Sequence: Synthetic oligonucleotide
ggccaccgcacucccucua

SEQ ID NO: 628047 - RNA, 19 nt, Artificial Sequence
  Description of Artificial Sequence: Synthetic oligonucleotide
cgaagggacggcugauacu

SEQ ID NO: 628048 - RNA, 19 nt, Artificial Sequence
  Description of Artificial Sequence: Synthetic oligonucleotide
gcuacucgcucaggagagu

SEQ ID NO: 628049 - RNA, 19 nt, Artificial Sequence
  Description of Artificial Sequence: Synthetic oligonucleotide
gcaacgcuccugaguacau

SEQ ID NO: 628050 - RNA, 19 nt, Artificial Sequence
  Description of Artificial Sequence: Synthetic oligonucleotide
cggcgcuccgcgcagagcu

SEQ ID NO: 628051 - RNA, 19 nt, Artificial Sequence
  Description of Artificial Sequence: Synthetic oligonucleotide
ccaccgcgguugcgggcgc

SEQ ID NO: 628052 - RNA, 19 nt, Artificial Sequence
  Description of Artificial Sequence: Synthetic oligonucleotide
cgccaccgcgguugcgggc

SEQ ID NO: 628053 - RNA, 19 nt, Artificial Sequence
  Description of Artificial Sequence: Synthetic oligonucleotide
cggguaguguggauauuau

SEQ ID NO: 628054 - RNA, 19 nt, Artificial Sequence
  Description of Artificial Sequence: Synthetic oligonucleotide
ccucgggcaguggaguacu

SEQ ID NO: 628055 - RNA, 19 nt, Artificial Sequence
  Description of Artificial Sequence: Synthetic oligonucleotide
gccgccgccgccgccgcca

SEQ ID NO: 628056 - RNA, 19 nt, Artificial Sequence
  Description of Artificial Sequence: Synthetic oligonucleotide
cgcuccgcgcagagcugac

SEQ ID NO: 628057 - RNA, 19 nt, Artificial Sequence
  Description of Artificial Sequence: Synthetic oligonucleotide
cgcugucgcaggcgcgguc

SEQ ID NO: 628058 - RNA, 19 nt, Artificial Sequence
  Description of Artificial Sequence: Synthetic oligonucleotide
gggcgcccuccugcucugc

SEQ ID NO: 628059 - RNA, 19 nt, Artificial Sequence
  Description of Artificial Sequence: Synthetic oligonucleotide
cgggcgccguugcgggcgc

SEQ ID NO: 628060 - RNA, 19 nt, Artificial Sequence
  Description of Artificial Sequence: Synthetic oligonucleotide
cgccguugcgggcgcccuc

SEQ ID NO: 628061 - RNA, 19 nt, Artificial Sequence
  Description of Artificial Sequence: Synthetic oligonucleotide
ggccggcgcuccgcgcaga

SEQ ID NO: 628062 - RNA, 19 nt, Artificial Sequence
  Description of Artificial Sequence: Synthetic oligonucleotide
ccagcucgauggggcugcu

SEQ ID NO: 628063 - RNA, 19 nt, Artificial Sequence
  Description of Artificial Sequence: Synthetic oligonucleotide
cgccgccgccgccgccgcc

SEQ ID NO: 628064 - RNA, 19 nt, Artificial Sequence
  Description of Artificial Sequence: Synthetic oligonucleotide
cgcgguugcgggcgccguu

SEQ ID NO: 628065 - RNA, 19 nt, Artificial Sequence
  Description of Artificial Sequence: Synthetic oligonucleotide
ccgccgccgccgccgccau

SEQ ID NO: 628066 - RNA, 19 nt, Artificial Sequence
  Description of Artificial Sequence: Synthetic oligonucleotide
uuggauuucaacaagacca

SEQ ID NO: 628067 - RNA, 19 nt, Artificial Sequence
  Description of Artificial Sequence: Synthetic oligonucleotide
aaucaagccacccugcccc

SEQ ID NO: 628068 - RNA, 19 nt, Artificial Sequence
  Description of Artificial Sequence: Synthetic oligonucleotide
uucaacaagaccaucagaa

SEQ ID NO: 628069 - RNA, 19 nt, Artificial Sequence
  Description of Artificial Sequence: Synthetic oligonucleotide
auuggauuucaacaagacc

SEQ ID NO: 628070 - RNA, 19 nt, Artificial Sequence
  Description of Artificial Sequence: Synthetic oligonucleotide
uguguguuuccgcauaugg

SEQ ID NO: 628071 - RNA, 19 nt, Artificial Sequence
  Description of Artificial Sequence: Synthetic oligonucleotide
uuggcgaaaagccuugugg

SEQ ID NO: 628072 - RNA, 19 nt, Artificial Sequence
  Description of Artificial Sequence: Synthetic oligonucleotide
ugaaauuggauuucaacaa

SEQ ID NO: 628073 - RNA, 19 nt, Artificial Sequence
  Description of Artificial Sequence: Synthetic oligonucleotide
uuaaauagauacagggacu

SEQ ID NO: 628074 - RNA, 19 nt, Artificial Sequence
  Description of Artificial Sequence: Synthetic oligonucleotide
aauuggauuucaacaagac

SEQ ID NO: 628075 - RNA, 19 nt, Artificial Sequence
  Description of Artificial Sequence: Synthetic oligonucleotide
ugugaaauuggauuucaac

SEQ ID NO: 628076 - RNA, 19 nt, Artificial Sequence
  Description of Artificial Sequence: Synthetic oligonucleotide
cuagaaacccgcauagccg

SEQ ID NO: 628077 - RNA, 19 nt, Artificial Sequence
  Description of Artificial Sequence: Synthetic oligonucleotide
ugugcaaaugggcauggag

SEQ ID NO: 628078 - RNA, 19 nt, Artificial Sequence
  Description of Artificial Sequence: Synthetic oligonucleotide
aucaggucgggaucgaugg

SEQ ID NO: 628079 - RNA, 19 nt, Artificial Sequence
  Description of Artificial Sequence: Synthetic oligonucleotide
agaggcuauguacagaaug

SEQ ID NO: 628080 - RNA, 19 nt, Artificial Sequence
  Description of Artificial Sequence: Synthetic oligonucleotide
uccccuaucaccugaaaug

SEQ ID NO: 628081 - RNA, 19 nt, Artificial Sequence
  Description of Artificial Sequence: Synthetic oligonucleotide
aggaacaagacauucccug

SEQ ID NO: 628082 - RNA, 19 nt, Artificial Sequence
  Description of Artificial Sequence: Synthetic oligonucleotide
gauuauugcuucaauuccc

SEQ ID NO: 628083 - RNA, 19 nt, Artificial Sequence
  Description of Artificial Sequence: Synthetic oligonucleotide
gaagggguaggauugaaga

SEQ ID NO: 628084 - RNA, 19 nt, Artificial Sequence
  Description of Artificial Sequence: Synthetic oligonucleotide
uugcauaauuuacugccag

SEQ ID NO: 628085 - RNA, 19 nt, Artificial Sequence
  Description of Artificial Sequence: Synthetic oligonucleotide
ucuagauccgcuccgcagc

SEQ ID NO: 628086 - RNA, 19 nt, Artificial Sequence
  Description of Artificial Sequence: Synthetic oligonucleotide
cuccuaauauauuacauca

SEQ ID NO: 628087 - RNA, 19 nt, Artificial Sequence
  Description of Artificial Sequence: Synthetic oligonucleotide
ugguaguuuaaaaugugaa

SEQ ID NO: 628088 - RNA, 19 nt, Artificial Sequence
  Description of Artificial Sequence: Synthetic oligonucleotide
ugcauaauuuacugccagg

SEQ ID NO: 628089 - RNA, 19 nt, Artificial Sequence
  Description of Artificial Sequence: Synthetic oligonucleotide
uuugcauaauuuacugcca

SEQ ID NO: 628090 - RNA, 19 nt, Artificial Sequence
  Description of Artificial Sequence: Synthetic oligonucleotide
gacgccgcaaaccucacag

SEQ ID NO: 628091 - RNA, 19 nt, Artificial Sequence
  Description of Artificial Sequence: Synthetic oligonucleotide
uggacucaguccuuaagag

SEQ ID NO: 628092 - RNA, 19 nt, Artificial Sequence
  Description of Artificial Sequence: Synthetic oligonucleotide
auagcuaugcaggaagcgg

SEQ ID NO: 628093 - RNA, 19 nt, Artificial Sequence
  Description of Artificial Sequence: Synthetic oligonucleotide
cugugaacggcguuuacgc

SEQ ID NO: 628094 - RNA, 19 nt, Artificial Sequence
  Description of Artificial Sequence: Synthetic oligonucleotide
aagaggguaagacgcccgg

SEQ ID NO: 628095 - RNA, 19 nt, Artificial Sequence
  Description of Artificial Sequence: Synthetic oligonucleotide
aaauuggauuucaacaaga

SEQ ID NO: 628096 - RNA, 19 nt, Artificial Sequence
  Description of Artificial Sequence: Synthetic oligonucleotide
ucugugaacggcguuuacg

SEQ ID NO: 628097 - RNA, 19 nt, Artificial Sequence
  Description of Artificial Sequence: Synthetic oligonucleotide
ugcaaaugggcauggaggu

SEQ ID NO: 628098 - RNA, 19 nt, Artificial Sequence
  Description of Artificial Sequence: Synthetic oligonucleotide
uauauuacaucaucacuuu

SEQ ID NO: 628099 - RNA, 19 nt, Artificial Sequence
  Description of Artificial Sequence: Synthetic oligonucleotide
accugaaaugcuaagauga

SEQ ID NO: 628100 - RNA, 19 nt, Artificial Sequence
  Description of Artificial Sequence: Synthetic oligonucleotide
ucaccugaaaugcuaagau

SEQ ID NO: 628101 - RNA, 19 nt, Artificial Sequence
  Description of Artificial Sequence: Synthetic oligonucleotide
ugaaccugccccuuuuaag

SEQ ID NO: 628102 - RNA, 19 nt, Artificial Sequence
  Description of Artificial Sequence: Synthetic oligonucleotide
acggcguuuacgcaccagc

SEQ ID NO: 628103 - RNA, 19 nt, Artificial Sequence
  Description of Artificial Sequence: Synthetic oligonucleotide
auuuacugccaggaaaagg

SEQ ID NO: 628104 - RNA, 19 nt, Artificial Sequence
  Description of Artificial Sequence: Synthetic oligonucleotide
ugucacuuacacccgaggu

SEQ ID NO: 628105 - RNA, 19 nt, Artificial Sequence
  Description of Artificial Sequence: Synthetic oligonucleotide
cuuucaagcuuccaccuug

SEQ ID NO: 628106 - RNA, 19 nt, Artificial Sequence
  Description of Artificial Sequence: Synthetic oligonucleotide
uucaauuccccaguagcag

SEQ ID NO: 628107 - RNA, 19 nt, Artificial Sequence
  Description of Artificial Sequence: Synthetic oligonucleotide
  modified_base (7)..(7): a, c, u, g, unknown or other
ugacugnucccaggaaucg

SEQ ID NO: 628108 - RNA, 19 nt, Artificial Sequence
  Description of Artificial Sequence: Synthetic oligonucleotide
cagcauuggaacugggugg

SEQ ID NO: 628109 - RNA, 19 nt, Artificial Sequence
  Description of Artificial Sequence: Synthetic oligonucleotide
uguuuccgcauauggaucu

SEQ ID NO: 628110 - RNA, 19 nt, Artificial Sequence
  Description of Artificial Sequence: Synthetic oligonucleotide
aaaucagagauagauuauu

SEQ ID NO: 628111 - RNA, 19 nt, Artificial Sequence
  Description of Artificial Sequence: Synthetic oligonucleotide
ucauagcuaugcaggaagc

SEQ ID NO: 628112 - RNA, 19 nt, Artificial Sequence
  Description of Artificial Sequence: Synthetic oligonucleotide
gagccacaaguagagaugg

SEQ ID NO: 628113 - RNA, 19 nt, Artificial Sequence
  Description of Artificial Sequence: Synthetic oligonucleotide
gauacagggacuggucccg

SEQ ID NO: 628114 - RNA, 19 nt, Artificial Sequence
  Description of Artificial Sequence: Synthetic oligonucleotide
aagaccaucagaagaggcu

SEQ ID NO: 628115 - RNA, 19 nt, Artificial Sequence
  Description of Artificial Sequence: Synthetic oligonucleotide
aauuuacugccaggaaaag

SEQ ID NO: 628116 - RNA, 19 nt, Artificial Sequence
  Description of Artificial Sequence: Synthetic oligonucleotide
ugaacggcguuuacgcacc

SEQ ID NO: 628117 - RNA, 19 nt, Artificial Sequence
  Description of Artificial Sequence: Synthetic oligonucleotide
ucauuccuggugaagcgga

SEQ ID NO: 628118 - RNA, 19 nt, Artificial Sequence
  Description of Artificial Sequence: Synthetic oligonucleotide
uuacgcaccagcuugucuu

SEQ ID NO: 628119 - RNA, 19 nt, Artificial Sequence
  Description of Artificial Sequence: Synthetic oligonucleotide
uuccucuagauccgcuccg

SEQ ID NO: 628120 - RNA, 19 nt, Artificial Sequence
  Description of Artificial Sequence: Synthetic oligonucleotide
ugcuucaauuccccaguag

SEQ ID NO: 628121 - RNA, 19 nt, Artificial Sequence
  Description of Artificial Sequence: Synthetic oligonucleotide
gcuucaauuccccaguagc

SEQ ID NO: 628122 - RNA, 19 nt, Artificial Sequence
  Description of Artificial Sequence: Synthetic oligonucleotide
aagggguaggauugaagau

SEQ ID NO: 628123 - RNA, 19 nt, Artificial Sequence
  Description of Artificial Sequence: Synthetic oligonucleotide
accccaggagaauugguag

SEQ ID NO: 628124 - RNA, 19 nt, Artificial Sequence
  Description of Artificial Sequence: Synthetic oligonucleotide
cuccuagaaacccgcauag

SEQ ID NO: 628125 - RNA, 19 nt, Artificial Sequence
  Description of Artificial Sequence: Synthetic oligonucleotide
ugugugugugugugugugg

SEQ ID NO: 628126 - RNA, 19 nt, Artificial Sequence
  Description of Artificial Sequence: Synthetic oligonucleotide
ccuagaaacccgcauagcc

SEQ ID NO: 628127 - RNA, 19 nt, Artificial Sequence
  Description of Artificial Sequence: Synthetic oligonucleotide
agggaacuuagguaggcca

SEQ ID NO: 628128 - RNA, 19 nt, Artificial Sequence
  Description of Artificial Sequence: Synthetic oligonucleotide
acgaauaggggcgcucucc

SEQ ID NO: 628129 - RNA, 19 nt, Artificial Sequence
  Description of Artificial Sequence: Synthetic oligonucleotide
  modified_base (5)..(5): a, c, u, g, unknown or other
acugnucccaggaaucggg

SEQ ID NO: 628130 - RNA, 19 nt, Artificial Sequence
  Description of Artificial Sequence: Synthetic oligonucleotide
ucccuccuaauauauuaca

SEQ ID NO: 628131 - RNA, 19 nt, Artificial Sequence
  Description of Artificial Sequence: Synthetic oligonucleotide
uuuacgcaccagcuugucu

SEQ ID NO: 628132 - RNA, 19 nt, Artificial Sequence
  Description of Artificial Sequence: Synthetic oligonucleotide
  modified_base (2)..(2): a, c, u, g, unknown or other
gnucccaggaaucgggcca

SEQ ID NO: 628133 - RNA, 19 nt, Artificial Sequence
  Description of Artificial Sequence: Synthetic oligonucleotide
gauggcgcuggcucgcccg

SEQ ID NO: 628134 - RNA, 19 nt, Artificial Sequence
  Description of Artificial Sequence: Synthetic oligonucleotide
  modified_base (3)..(3): a, c, u, g, unknown or other
ugnucccaggaaucgggcc

SEQ ID NO: 628135 - RNA, 19 nt, Artificial Sequence
  Description of Artificial Sequence: Synthetic oligonucleotide
ugacucagcauuggaacug

SEQ ID NO: 628136 - RNA, 19 nt, Artificial Sequence
  Description of Artificial Sequence: Synthetic oligonucleotide
cuucaauuccccaguagca

SEQ ID NO: 628137 - RNA, 19 nt, Artificial Sequence
  Description of Artificial Sequence: Synthetic oligonucleotide
gaagaggguaagacgcccg

SEQ ID NO: 628138 - RNA, 19 nt, Artificial Sequence
  Description of Artificial Sequence: Synthetic oligonucleotide
acccgcauagccgaagugg

SEQ ID NO: 628139 - RNA, 19 nt, Artificial Sequence
  Description of Artificial Sequence: Synthetic oligonucleotide
  modified_base (8)..(8): a, c, u, g, unknown or other
cugacugnucccaggaauc

SEQ ID NO: 628140 - RNA, 19 nt, Artificial Sequence
  Description of Artificial Sequence: Synthetic oligonucleotide
guugcugugugugugugug

SEQ ID NO: 628141 - RNA, 19 nt, Artificial Sequence
  Description of Artificial Sequence: Synthetic oligonucleotide
uuccgcauauggaucuuca

SEQ ID NO: 628142 - RNA, 19 nt, Artificial Sequence
  Description of Artificial Sequence: Synthetic oligonucleotide
gugggcacgaauaggggcg

SEQ ID NO: 628143 - RNA, 19 nt, Artificial Sequence
  Description of Artificial Sequence: Synthetic oligonucleotide
caccugaaaugcuaagaug

SEQ ID NO: 628144 - RNA, 19 nt, Artificial Sequence
  Description of Artificial Sequence: Synthetic oligonucleotide
gugggagagccacaaguag

SEQ ID NO: 628145 - RNA, 19 nt, Artificial Sequence
  Description of Artificial Sequence: Synthetic oligonucleotide
guggacucaguccuuaaga

SEQ ID NO: 628146 - RNA, 19 nt, Artificial Sequence
  Description of Artificial Sequence: Synthetic oligonucleotide
agcucccuuaguugggcgg

SEQ ID NO: 628147 - RNA, 19 nt, Artificial Sequence
  Description of Artificial Sequence: Synthetic oligonucleotide
cucuagauccgcuccgcag

SEQ ID NO: 628148 - RNA, 19 nt, Artificial Sequence
  Description of Artificial Sequence: Synthetic oligonucleotide
gguagaugaagggaacggg

SEQ ID NO: 628149 - RNA, 19 nt, Artificial Sequence
  Description of Artificial Sequence: Synthetic oligonucleotide
aagugggaccccacaaauc

SEQ ID NO: 628150 - RNA, 19 nt, Artificial Sequence
  Description of Artificial Sequence: Synthetic oligonucleotide
gaagcggacgccgcaaacc

SEQ ID NO: 628151 - RNA, 19 nt, Artificial Sequence
  Description of Artificial Sequence: Synthetic oligonucleotide
aacccgucaccccauccca

SEQ ID NO: 628152 - RNA, 19 nt, Artificial Sequence
  Description of Artificial Sequence: Synthetic oligonucleotide
cagucuccuagaaacccgc

SEQ ID NO: 628153 - RNA, 19 nt, Artificial Sequence
  Description of Artificial Sequence: Synthetic oligonucleotide
cuuuguugcugugugugug

SEQ ID NO: 628154 - RNA, 19 nt, Artificial Sequence
  Description of Artificial Sequence: Synthetic oligonucleotide
  modified_base (6)..(6): a, c, u, g, unknown or other
gacugnucccaggaaucgg

SEQ ID NO: 628155 - RNA, 19 nt, Artificial Sequence
  Description of Artificial Sequence: Synthetic oligonucleotide
ugugaacggcguuuacgca

SEQ ID NO: 628156 - RNA, 19 nt, Artificial Sequence
  Description of Artificial Sequence: Synthetic oligonucleotide
ugcugugugugugugugug

SEQ ID NO: 628157 - RNA, 19 nt, Artificial Sequence
  Description of Artificial Sequence: Synthetic oligonucleotide
  modified_base (4)..(4): a, c, u, g, unknown or other
cugnucccaggaaucgggc

SEQ ID NO: 628158 - RNA, 19 nt, Artificial Sequence
  Description of Artificial Sequence: Synthetic oligonucleotide
ucaacccgucaccccaucc

SEQ ID NO: 628159 - RNA, 19 nt, Artificial Sequence
  Description of Artificial Sequence: Synthetic oligonucleotide
gagauagauuauugcuuca

SEQ ID NO: 628160 - RNA, 19 nt, Artificial Sequence
  Description of Artificial Sequence: Synthetic oligonucleotide
cucccuccuaauauauuac

SEQ ID NO: 628161 - RNA, 19 nt, Artificial Sequence
  Description of Artificial Sequence: Synthetic oligonucleotide
gucauuccuggugaagcgg

SEQ ID NO: 628162 - RNA, 19 nt, Artificial Sequence
  Description of Artificial Sequence: Synthetic oligonucleotide
agauagauuauugcuucaa

SEQ ID NO: 628163 - RNA, 19 nt, Artificial Sequence
  Description of Artificial Sequence: Synthetic oligonucleotide
agcuaugcaggaagcgggc

SEQ ID NO: 628164 - RNA, 19 nt, Artificial Sequence
  Description of Artificial Sequence: Synthetic oligonucleotide
caacccgucaccccauccc

SEQ ID NO: 628165 - RNA, 19 nt, Artificial Sequence
  Description of Artificial Sequence: Synthetic oligonucleotide
guagaugaagggaacggga

SEQ ID NO: 628166 - RNA, 19 nt, Artificial Sequence
  Description of Artificial Sequence: Synthetic oligonucleotide
cuaugcaggaagcgggcug

SEQ ID NO: 628167 - RNA, 19 nt, Artificial Sequence
  Description of Artificial Sequence: Synthetic oligonucleotide
uguguguguguguggcuga

SEQ ID NO: 628168 - RNA, 19 nt, Artificial Sequence
  Description of Artificial Sequence: Synthetic oligonucleotide
uggggcaucugugaacggc

SEQ ID NO: 628169 - RNA, 19 nt, Artificial Sequence
  Description of Artificial Sequence: Synthetic oligonucleotide
agaggguaagacgcccggc

SEQ ID NO: 628170 - RNA, 19 nt, Artificial Sequence
  Description of Artificial Sequence: Synthetic oligonucleotide
ggugcaguccauccuugcg

SEQ ID NO: 628171 - RNA, 19 nt, Artificial Sequence
  Description of Artificial Sequence: Synthetic oligonucleotide
auauuacaucaucacuuuu

SEQ ID NO: 628172 - RNA, 19 nt, Artificial Sequence
  Description of Artificial Sequence: Synthetic oligonucleotide
aggccaucaggucgggauc

SEQ ID NO: 628173 - RNA, 19 nt, Artificial Sequence
  Description of Artificial Sequence: Synthetic oligonucleotide
gcguuuacgcaccagcuug

SEQ ID NO: 628174 - RNA, 19 nt, Artificial Sequence
  Description of Artificial Sequence: Synthetic oligonucleotide
acuuacccuuccuuugcca

SEQ ID NO: 628175 - RNA, 19 nt, Artificial Sequence
  Description of Artificial Sequence: Synthetic oligonucleotide
ugaagcggacgccgcaaac

SEQ ID NO: 628176 - RNA, 19 nt, Artificial Sequence
  Description of Artificial Sequence: Synthetic oligonucleotide
uggcgcucgcccuuucagg

SEQ ID NO: 628177 - RNA, 19 nt, Artificial Sequence
  Description of Artificial Sequence: Synthetic oligonucleotide
gaccccaugacucagcauu

SEQ ID NO: 628178 - RNA, 19 nt, Artificial Sequence
  Description of Artificial Sequence: Synthetic oligonucleotide
ggauuaucuugugacagac

SEQ ID NO: 628179 - RNA, 19 nt, Artificial Sequence
  Description of Artificial Sequence: Synthetic oligonucleotide
accugccccuuuuaaggag

SEQ ID NO: 628180 - RNA, 19 nt, Artificial Sequence
  Description of Artificial Sequence: Synthetic oligonucleotide
acuuacacccgaggugggg

SEQ ID NO: 628181 - RNA, 19 nt, Artificial Sequence
  Description of Artificial Sequence: Synthetic oligonucleotide
agcauuggaacugggugga

SEQ ID NO: 628182 - RNA, 19 nt, Artificial Sequence
  Description of Artificial Sequence: Synthetic oligonucleotide
agggacaaguggcgcucgc

SEQ ID NO: 628183 - RNA, 19 nt, Artificial Sequence
  Description of Artificial Sequence: Synthetic oligonucleotide
ugugugugugugugugugu

SEQ ID NO: 628184 - RNA, 19 nt, Artificial Sequence
  Description of Artificial Sequence: Synthetic oligonucleotide
gaaacccgcauagccgaag

SEQ ID NO: 628185 - RNA, 19 nt, Artificial Sequence
  Description of Artificial Sequence: Synthetic oligonucleotide
guguguguguguguguggc

SEQ ID NO: 628186 - RNA, 19 nt, Artificial Sequence
  Description of Artificial Sequence: Synthetic oligonucleotide
cuuggcgaaaagccuugug

SEQ ID NO: 628187 - RNA, 19 nt, Artificial Sequence
  Description of Artificial Sequence: Synthetic oligonucleotide
gagcucccuuaguugggcg

SEQ ID NO: 628188 - RNA, 19 nt, Artificial Sequence
  Description of Artificial Sequence: Synthetic oligonucleotide
ugaggcggaagguggucca

SEQ ID NO: 628189 - RNA, 19 nt, Artificial Sequence
  Description of Artificial Sequence: Synthetic oligonucleotide
ucccuguuugaccccuccc

SEQ ID NO: 628190 - RNA, 19 nt, Artificial Sequence
  Description of Artificial Sequence: Synthetic oligonucleotide
guguguguguguguggcug

SEQ ID NO: 628191 - RNA, 19 nt, Artificial Sequence
  Description of Artificial Sequence: Synthetic oligonucleotide
ggagguagggaggagaaga

SEQ ID NO: 628192 - RNA, 19 nt, Artificial Sequence
  Description of Artificial Sequence: Synthetic oligonucleotide
cugugugugugugugugug

SEQ ID NO: 628193 - RNA, 19 nt, Artificial Sequence
  Description of Artificial Sequence: Synthetic oligonucleotide
auauggaucuucagcuugu

SEQ ID NO: 628194 - RNA, 19 nt, Artificial Sequence
  Description of Artificial Sequence: Synthetic oligonucleotide
gugugugugugugugugug

SEQ ID NO: 628195 - RNA, 19 nt, Artificial Sequence
  Description of Artificial Sequence: Synthetic oligonucleotide
uguguguguguguguggcu

SEQ ID NO: 628196 - RNA, 19 nt, Artificial Sequence
  Description of Artificial Sequence: Synthetic oligonucleotide
agauggcgcuggcucgccc

SEQ ID NO: 628197 - RNA, 19 nt, Artificial Sequence
  Description of Artificial Sequence: Synthetic oligonucleotide
uguugcugugugugugugu

SEQ ID NO: 628198 - RNA, 19 nt, Artificial Sequence
  Description of Artificial Sequence: Synthetic oligonucleotide
ggacaaguggcgcucgccc

SEQ ID NO: 628199 - RNA, 19 nt, Artificial Sequence
  Description of Artificial Sequence: Synthetic oligonucleotide
ggugcaugugguucuugag

SEQ ID NO: 628200 - RNA, 19 nt, Artificial Sequence
  Description of Artificial Sequence: Synthetic oligonucleotide
auccuugcggcgccuucgg

SEQ ID NO: 628201 - RNA, 19 nt, Artificial Sequence
  Description of Artificial Sequence: Synthetic oligonucleotide
gaagugggaccccacaaau

SEQ ID NO: 628202 - RNA, 19 nt, Artificial Sequence
  Description of Artificial Sequence: Synthetic oligonucleotide
uaagacgcccggcccgccc

SEQ ID NO: 628203 - RNA, 19 nt, Artificial Sequence
  Description of Artificial Sequence: Synthetic oligonucleotide
uccuagaaacccgcauagc

SEQ ID NO: 628204 - RNA, 19 nt, Artificial Sequence
  Description of Artificial Sequence: Synthetic oligonucleotide
ccauuggagaggucaaggc

SEQ ID NO: 628205 - RNA, 19 nt, Artificial Sequence
  Description of Artificial Sequence: Synthetic oligonucleotide
uuguugcugugugugugug

SEQ ID NO: 628206 - RNA, 19 nt, Artificial Sequence
  Description of Artificial Sequence: Synthetic oligonucleotide
ugaccccuccccacuguug

SEQ ID NO: 628207 - RNA, 19 nt, Artificial Sequence
  Description of Artificial Sequence: Synthetic oligonucleotide
uggugcaguccauccuugc

SEQ ID NO: 628208 - RNA, 19 nt, Artificial Sequence
  Description of Artificial Sequence: Synthetic oligonucleotide
cugccccuuuuaaggaggg

SEQ ID NO: 628209 - RNA, 19 nt, Artificial Sequence
  Description of Artificial Sequence: Synthetic oligonucleotide
uaccucaacccgucacccc

SEQ ID NO: 628210 - RNA, 19 nt, Artificial Sequence
  Description of Artificial Sequence: Synthetic oligonucleotide
cauccuugcggcgccuucg

SEQ ID NO: 628211 - RNA, 19 nt, Artificial Sequence
  Description of Artificial Sequence: Synthetic oligonucleotide
ggguaagacgcccggcccg

SEQ ID NO: 628212 - RNA, 19 nt, Artificial Sequence
  Description of Artificial Sequence: Synthetic oligonucleotide
auacagggacuggucccgc

SEQ ID NO: 628213 - RNA, 19 nt, Artificial Sequence
  Description of Artificial Sequence: Synthetic oligonucleotide
gcuccguccuuacaggccc

SEQ ID NO: 628214 - RNA, 19 nt, Artificial Sequence
  Description of Artificial Sequence: Synthetic oligonucleotide
ccuggugcagggaacuuag

SEQ ID NO: 628215 - RNA, 19 nt, Artificial Sequence
  Description of Artificial Sequence: Synthetic oligonucleotide
uccucuagauccgcuccgc

SEQ ID NO: 628216 - RNA, 19 nt, Artificial Sequence
  Description of Artificial Sequence: Synthetic oligonucleotide
acgccgcaaaccucacagg

SEQ ID NO: 628217 - RNA, 19 nt, Artificial Sequence
  Description of Artificial Sequence: Synthetic oligonucleotide
gaaggggucucggaaggga

SEQ ID NO: 628218 - RNA, 19 nt, Artificial Sequence
  Description of Artificial Sequence: Synthetic oligonucleotide
cagagauagauuauugcuu

SEQ ID NO: 628219 - RNA, 19 nt, Artificial Sequence
  Description of Artificial Sequence: Synthetic oligonucleotide
guggcgcucgcccuuucag

SEQ ID NO: 628220 - RNA, 19 nt, Artificial Sequence
  Description of Artificial Sequence: Synthetic oligonucleotide
uccccgcaaggcuaccuca

SEQ ID NO: 628221 - RNA, 19 nt, Artificial Sequence
  Description of Artificial Sequence: Synthetic oligonucleotide
agugacaagcaaggucuca

SEQ ID NO: 628222 - RNA, 19 nt, Artificial Sequence
  Description of Artificial Sequence: Synthetic oligonucleotide
ggaaucgggccagagugag

SEQ ID NO: 628223 - RNA, 19 nt, Artificial Sequence
  Description of Artificial Sequence: Synthetic oligonucleotide
uccuugcggcgccuucggg

SEQ ID NO: 628224 - RNA, 19 nt, Artificial Sequence
  Description of Artificial Sequence: Synthetic oligonucleotide
cccgcauagccgaaguggg

SEQ ID NO: 628225 - RNA, 19 nt, Artificial Sequence
  Description of Artificial Sequence: Synthetic oligonucleotide
gaaucgggccagagugagg

SEQ ID NO: 628226 - RNA, 19 nt, Artificial Sequence
  Description of Artificial Sequence: Synthetic oligonucleotide
cucaguccuuaagagugac

SEQ ID NO: 628227 - RNA, 19 nt, Artificial Sequence
  Description of Artificial Sequence: Synthetic oligonucleotide
uuggggcaucugugaacgg

SEQ ID NO: 628228 - RNA, 19 nt, Artificial Sequence
  Description of Artificial Sequence: Synthetic oligonucleotide
ccugccccuuuuaaggagg

SEQ ID NO: 628229 - RNA, 19 nt, Artificial Sequence
  Description of Artificial Sequence: Synthetic oligonucleotide
ucgcccgcuccccgcaagg

SEQ ID NO: 628230 - RNA, 19 nt, Artificial Sequence
  Description of Artificial Sequence: Synthetic oligonucleotide
cagggaacuuagguaggcc

SEQ ID NO: 628231 - RNA, 19 nt, Artificial Sequence
  Description of Artificial Sequence: Synthetic oligonucleotide
cacuuacacccgagguggg

SEQ ID NO: 628232 - RNA, 19 nt, Artificial Sequence
  Description of Artificial Sequence: Synthetic oligonucleotide
aacggcguuuacgcaccag

SEQ ID NO: 628233 - RNA, 19 nt, Artificial Sequence
  Description of Artificial Sequence: Synthetic oligonucleotide
ucaggucgggaucgauggu

SEQ ID NO: 628234 - RNA, 19 nt, Artificial Sequence
  Description of Artificial Sequence: Synthetic oligonucleotide
ggucccaagccccagucuc

SEQ ID NO: 628235 - RNA, 19 nt, Artificial Sequence
  Description of Artificial Sequence: Synthetic oligonucleotide
ggaagggguaggauugaag

SEQ ID NO: 628236 - RNA, 19 nt, Artificial Sequence
  Description of Artificial Sequence: Synthetic oligonucleotide
uggcuugcaccugggcggg

SEQ ID NO: 628237 - RNA, 19 nt, Artificial Sequence
  Description of Artificial Sequence: Synthetic oligonucleotide
agggcauggccaccagaug

SEQ ID NO: 628238 - RNA, 19 nt, Artificial Sequence
  Description of Artificial Sequence: Synthetic oligonucleotide
cuggugcagggaacuuagg

SEQ ID NO: 628239 - RNA, 19 nt, Artificial Sequence
  Description of Artificial Sequence: Synthetic oligonucleotide
acuaagccccagguuucuc

SEQ ID NO: 628240 - RNA, 19 nt, Artificial Sequence
  Description of Artificial Sequence: Synthetic oligonucleotide
ggagaauugguaguuuaaa

SEQ ID NO: 628241 - RNA, 19 nt, Artificial Sequence
  Description of Artificial Sequence: Synthetic oligonucleotide
cccuguuugaccccucccc

SEQ ID NO: 628242 - RNA, 19 nt, Artificial Sequence
  Description of Artificial Sequence: Synthetic oligonucleotide
ucgcccuuucagggcaugg

SEQ ID NO: 628243 - RNA, 19 nt, Artificial Sequence
  Description of Artificial Sequence: Synthetic oligonucleotide
caaaucagagauagauuau

SEQ ID NO: 628244 - RNA, 19 nt, Artificial Sequence
  Description of Artificial Sequence: Synthetic oligonucleotide
ucgggaucgauggugucuu

SEQ ID NO: 628245 - RNA, 19 nt, Artificial Sequence
  Description of Artificial Sequence: Synthetic oligonucleotide
ccacuuucugggacuaagc

SEQ ID NO: 628246 - RNA, 19 nt, Artificial Sequence
  Description of Artificial Sequence: Synthetic oligonucleotide
ugccccuuuuaaggagggg

SEQ ID NO: 628247 - RNA, 19 nt, Artificial Sequence
  Description of Artificial Sequence: Synthetic oligonucleotide
ccaaucaagccacccugcc

SEQ ID NO: 628248 - RNA, 19 nt, Artificial Sequence
  Description of Artificial Sequence: Synthetic oligonucleotide
ccccuaucaccugaaaugc

SEQ ID NO: 628249 - RNA, 19 nt, Artificial Sequence
  Description of Artificial Sequence: Synthetic oligonucleotide
gagagcaccgggccccuga

SEQ ID NO: 628250 - RNA, 19 nt, Artificial Sequence
  Description of Artificial Sequence: Synthetic oligonucleotide
gcagcucacuuuucccagg

SEQ ID NO: 628251 - RNA, 19 nt, Artificial Sequence
  Description of Artificial Sequence: Synthetic oligonucleotide
cuuaguugggcggagcccu

SEQ ID NO: 628252 - RNA, 19 nt, Artificial Sequence
  Description of Artificial Sequence: Synthetic oligonucleotide
gggacuaagccccagguuu

SEQ ID NO: 628253 - RNA, 19 nt, Artificial Sequence
  Description of Artificial Sequence: Synthetic oligonucleotide
uugcugugugugugugugu

SEQ ID NO: 628254 - RNA, 19 nt, Artificial Sequence
  Description of Artificial Sequence: Synthetic oligonucleotide
uguguguguguggcugacu

SEQ ID NO: 628255 - RNA, 19 nt, Artificial Sequence
  Description of Artificial Sequence: Synthetic oligonucleotide
uccuggugcagggaacuua

SEQ ID NO: 628256 - RNA, 19 nt, Artificial Sequence
  Description of Artificial Sequence: Synthetic oligonucleotide
ggcggagcccuucugcuac

SEQ ID NO: 628257 - RNA, 19 nt, Artificial Sequence
  Description of Artificial Sequence: Synthetic oligonucleotide
aagaggcuauguacagaau

SEQ ID NO: 628258 - RNA, 19 nt, Artificial Sequence
  Description of Artificial Sequence: Synthetic oligonucleotide
gcugugcaaaugggcaugg

SEQ ID NO: 628259 - RNA, 19 nt, Artificial Sequence
  Description of Artificial Sequence: Synthetic oligonucleotide
caccccaggagaauuggua

SEQ ID NO: 628260 - RNA, 19 nt, Artificial Sequence
  Description of Artificial Sequence: Synthetic oligonucleotide
ucccuuaguugggcggagc

SEQ ID NO: 628261 - RNA, 19 nt, Artificial Sequence
  Description of Artificial Sequence: Synthetic oligonucleotide
accccuccccacuguuggg

SEQ ID NO: 628262 - RNA, 19 nt, Artificial Sequence
  Description of Artificial Sequence: Synthetic oligonucleotide
ggcgagccaaucaagccac

SEQ ID NO: 628263 - RNA, 19 nt, Artificial Sequence
  Description of Artificial Sequence: Synthetic oligonucleotide
cccuuaguugggcggagcc

SEQ ID NO: 628264 - RNA, 19 nt, Artificial Sequence
  Description of Artificial Sequence: Synthetic oligonucleotide
uccguccuuacaggcccag

SEQ ID NO: 628265 - RNA, 19 nt, Artificial Sequence
  Description of Artificial Sequence: Synthetic oligonucleotide
augugaaauuggauuucaa

SEQ ID NO: 628266 - RNA, 19 nt, Artificial Sequence
  Description of Artificial Sequence: Synthetic oligonucleotide
uuaguugggcggagcccuu

SEQ ID NO: 628267 - RNA, 19 nt, Artificial Sequence
  Description of Artificial Sequence: Synthetic oligonucleotide
ccgcaaggcuaccucaacc

SEQ ID NO: 628268 - RNA, 19 nt, Artificial Sequence
  Description of Artificial Sequence: Synthetic oligonucleotide
cacccagcgaggaaggggu

SEQ ID NO: 628269 - RNA, 19 nt, Artificial Sequence
  Description of Artificial Sequence: Synthetic oligonucleotide
gagugacaagcaaggucuc

SEQ ID NO: 628270 - RNA, 19 nt, Artificial Sequence
  Description of Artificial Sequence: Synthetic oligonucleotide
aggaaucgggccagaguga

SEQ ID NO: 628271 - RNA, 19 nt, Artificial Sequence
  Description of Artificial Sequence: Synthetic oligonucleotide
cacgaauaggggcgcucuc

SEQ ID NO: 628272 - RNA, 19 nt, Artificial Sequence
  Description of Artificial Sequence: Synthetic oligonucleotide
cuccccgcaaggcuaccuc

SEQ ID NO: 628273 - RNA, 19 nt, Artificial Sequence
  Description of Artificial Sequence: Synthetic oligonucleotide
gaggaagggguaggauuga

SEQ ID NO: 628274 - RNA, 19 nt, Artificial Sequence
  Description of Artificial Sequence: Synthetic oligonucleotide
cgccgcaaaccucacaggc

SEQ ID NO: 628275 - RNA, 19 nt, Artificial Sequence
  Description of Artificial Sequence: Synthetic oligonucleotide
ggaacuuagguaggccauc

SEQ ID NO: 628276 - RNA, 19 nt, Artificial Sequence
  Description of Artificial Sequence: Synthetic oligonucleotide
cagggacaaguggcgcucg

SEQ ID NO: 628277 - RNA, 19 nt, Artificial Sequence
  Description of Artificial Sequence: Synthetic oligonucleotide
ccucccuccuaauauauua

SEQ ID NO: 628278 - RNA, 19 nt, Artificial Sequence
  Description of Artificial Sequence: Synthetic oligonucleotide
ggacucaguccuuaagagu

SEQ ID NO: 628279 - RNA, 19 nt, Artificial Sequence
  Description of Artificial Sequence: Synthetic oligonucleotide
ccaugacucagcauuggaa

SEQ ID NO: 628280 - RNA, 19 nt, Artificial Sequence
  Description of Artificial Sequence: Synthetic oligonucleotide
  modified_base (9)..(9): a, c, u, g, unknown or other
gcugacugnucccaggaau

SEQ ID NO: 628281 - RNA, 19 nt, Artificial Sequence
  Description of Artificial Sequence: Synthetic oligonucleotide
ccuucgggugcgcaccucc

SEQ ID NO: 628282 - RNA, 19 nt, Artificial Sequence
  Description of Artificial Sequence: Synthetic oligonucleotide
gguaagacgcccggcccgc

SEQ ID NO: 628283 - RNA, 19 nt, Artificial Sequence
  Description of Artificial Sequence: Synthetic oligonucleotide
agagcaccgggccccugaa

SEQ ID NO: 628284 - RNA, 19 nt, Artificial Sequence
  Description of Artificial Sequence: Synthetic oligonucleotide
gccaaucaagccacccugc

SEQ ID NO: 628285 - RNA, 19 nt, Artificial Sequence
  Description of Artificial Sequence: Synthetic oligonucleotide
agucuccuagaaacccgca

SEQ ID NO: 628286 - RNA, 19 nt, Artificial Sequence
  Description of Artificial Sequence: Synthetic oligonucleotide
gacggggcgggaggucggg

SEQ ID NO: 628287 - RNA, 19 nt, Artificial Sequence
  Description of Artificial Sequence: Synthetic oligonucleotide
ccuuaguugggcggagccc

SEQ ID NO: 628288 - RNA, 19 nt, Artificial Sequence
  Description of Artificial Sequence: Synthetic oligonucleotide
gucuccuagaaacccgcau

SEQ ID NO: 628289 - RNA, 19 nt, Artificial Sequence
  Description of Artificial Sequence: Synthetic oligonucleotide
aggaagggguaggauugaa

SEQ ID NO: 628290 - RNA, 19 nt, Artificial Sequence
  Description of Artificial Sequence: Synthetic oligonucleotide
gcaaaugggcauggaggug

SEQ ID NO: 628291 - RNA, 19 nt, Artificial Sequence
  Description of Artificial Sequence: Synthetic oligonucleotide
ggacuaagccccagguuuc

SEQ ID NO: 628292 - RNA, 19 nt, Artificial Sequence
  Description of Artificial Sequence: Synthetic oligonucleotide
aggacgcgggaggggagag

SEQ ID NO: 628293 - RNA, 19 nt, Artificial Sequence
  Description of Artificial Sequence: Synthetic oligonucleotide
agcgaggaagggguaggau

SEQ ID NO: 628294 - RNA, 19 nt, Artificial Sequence
  Description of Artificial Sequence: Synthetic oligonucleotide
agcaugcggcagaggcggc

SEQ ID NO: 628295 - RNA, 19 nt, Artificial Sequence
  Description of Artificial Sequence: Synthetic oligonucleotide
cucaacccgucaccccauc

SEQ ID NO: 628296 - RNA, 19 nt, Artificial Sequence
  Description of Artificial Sequence: Synthetic oligonucleotide
guguguguguguggcugac

SEQ ID NO: 628297 - RNA, 19 nt, Artificial Sequence
  Description of Artificial Sequence: Synthetic oligonucleotide
cucccuuaguugggcggag

SEQ ID NO: 628298 - RNA, 19 nt, Artificial Sequence
  Description of Artificial Sequence: Synthetic oligonucleotide
cuccccuaucaccugaaau

SEQ ID NO: 628299 - RNA, 19 nt, Artificial Sequence
  Description of Artificial Sequence: Synthetic oligonucleotide
gcgggcgagccaaucaagc

SEQ ID NO: 628300 - RNA, 19 nt, Artificial Sequence
  Description of Artificial Sequence: Synthetic oligonucleotide
gaacggcguuuacgcacca

SEQ ID NO: 628301 - RNA, 19 nt, Artificial Sequence
  Description of Artificial Sequence: Synthetic oligonucleotide
gugaagcggacgccgcaaa

SEQ ID NO: 628302 - RNA, 19 nt, Artificial Sequence
  Description of Artificial Sequence: Synthetic oligonucleotide
gggacaaguggcgcucgcc

SEQ ID NO: 628303 - RNA, 19 nt, Artificial Sequence
  Description of Artificial Sequence: Synthetic oligonucleotide
aucccacacccagcacccg

SEQ ID NO: 628304 - RNA, 19 nt, Artificial Sequence
  Description of Artificial Sequence: Synthetic oligonucleotide
gucgggaucgauggugucu

SEQ ID NO: 628305 - RNA, 19 nt, Artificial Sequence
  Description of Artificial Sequence: Synthetic oligonucleotide
gggaucgauggugucuuca

SEQ ID NO: 628306 - RNA, 19 nt, Artificial Sequence
  Description of Artificial Sequence: Synthetic oligonucleotide
aggcuaccucaacccguca

SEQ ID NO: 628307 - RNA, 19 nt, Artificial Sequence
  Description of Artificial Sequence: Synthetic oligonucleotide
gaccucccuccuaauauau

SEQ ID NO: 628308 - RNA, 19 nt, Artificial Sequence
  Description of Artificial Sequence: Synthetic oligonucleotide
gagggagcgccaggaacaa

SEQ ID NO: 628309 - RNA, 19 nt, Artificial Sequence
  Description of Artificial Sequence: Synthetic oligonucleotide
caucugugaacggcguuua

SEQ ID NO: 628310 - RNA, 19 nt, Artificial Sequence
  Description of Artificial Sequence: Synthetic oligonucleotide
gacuaagccccagguuucu

SEQ ID NO: 628311 - RNA, 19 nt, Artificial Sequence
  Description of Artificial Sequence: Synthetic oligonucleotide
cagauggcgcuggcucgcc

SEQ ID NO: 628312 - RNA, 19 nt, Artificial Sequence
  Description of Artificial Sequence: Synthetic oligonucleotide
ggaucgauggugucuucau

SEQ ID NO: 628313 - RNA, 19 nt, Artificial Sequence
  Description of Artificial Sequence: Synthetic oligonucleotide
ggcguccuggugcagggaa

SEQ ID NO: 628314 - RNA, 19 nt, Artificial Sequence
  Description of Artificial Sequence: Synthetic oligonucleotide
agggagcgccaggaacaag

SEQ ID NO: 628315 - RNA, 19 nt, Artificial Sequence
  Description of Artificial Sequence: Synthetic oligonucleotide
ggacuggucccgccacccc

SEQ ID NO: 628316 - RNA, 19 nt, Artificial Sequence
  Description of Artificial Sequence: Synthetic oligonucleotide
agaaacccgcauagccgaa

SEQ ID NO: 628317 - RNA, 19 nt, Artificial Sequence
  Description of Artificial Sequence: Synthetic oligonucleotide
caggugcaugugguucuug

SEQ ID NO: 628318 - RNA, 19 nt, Artificial Sequence
  Description of Artificial Sequence: Synthetic oligonucleotide
aggaagcgggcugggcagu

SEQ ID NO: 628319 - RNA, 19 nt, Artificial Sequence
  Description of Artificial Sequence: Synthetic oligonucleotide
ggcgggcgagccaaucaag

SEQ ID NO: 628320 - RNA, 19 nt, Artificial Sequence
  Description of Artificial Sequence: Synthetic oligonucleotide
guaagacgcccggcccgcc

SEQ ID NO: 628321 - RNA, 19 nt, Artificial Sequence
  Description of Artificial Sequence: Synthetic oligonucleotide
cgagccaaucaagccaccc

SEQ ID NO: 628322 - RNA, 19 nt, Artificial Sequence
  Description of Artificial Sequence: Synthetic oligonucleotide
cccaugacucagcauugga

SEQ ID NO: 628323 - RNA, 19 nt, Artificial Sequence
  Description of Artificial Sequence: Synthetic oligonucleotide
gcucccuuaguugggcgga

SEQ ID NO: 628324 - RNA, 19 nt, Artificial Sequence
  Description of Artificial Sequence: Synthetic oligonucleotide
uccauccuugcggcgccuu

SEQ ID NO: 628325 - RNA, 19 nt, Artificial Sequence
  Description of Artificial Sequence: Synthetic oligonucleotide
ggugguccuccuuggcgaa

SEQ ID NO: 628326 - RNA, 19 nt, Artificial Sequence
  Description of Artificial Sequence: Synthetic oligonucleotide
cucgcccuuucagggcaug

SEQ ID NO: 628327 - RNA, 19 nt, Artificial Sequence
  Description of Artificial Sequence: Synthetic oligonucleotide
gggcgggcgagccaaucaa

SEQ ID NO: 628328 - RNA, 19 nt, Artificial Sequence
  Description of Artificial Sequence: Synthetic oligonucleotide
ggcacgaauaggggcgcuc

SEQ ID NO: 628329 - RNA, 19 nt, Artificial Sequence
  Description of Artificial Sequence: Synthetic oligonucleotide
cuccguccuuacaggccca

SEQ ID NO: 628330 - RNA, 19 nt, Artificial Sequence
  Description of Artificial Sequence: Synthetic oligonucleotide
cccgcaaggcuaccucaac

SEQ ID NO: 628331 - RNA, 19 nt, Artificial Sequence
  Description of Artificial Sequence: Synthetic oligonucleotide
gcgccuucgggugcgcacc

SEQ ID NO: 628332 - RNA, 19 nt, Artificial Sequence
  Description of Artificial Sequence: Synthetic oligonucleotide
gggaacuuagguaggccau

SEQ ID NO: 628333 - RNA, 19 nt, Artificial Sequence
  Description of Artificial Sequence: Synthetic oligonucleotide
cccugccccaggacgcggg

SEQ ID NO: 628334 - RNA, 19 nt, Artificial Sequence
  Description of Artificial Sequence: Synthetic oligonucleotide
gggcuccccuaucaccuga

SEQ ID NO: 628335 - RNA, 19 nt, Artificial Sequence
  Description of Artificial Sequence: Synthetic oligonucleotide
guaggccaucaggucggga

SEQ ID NO: 628336 - RNA, 19 nt, Artificial Sequence
  Description of Artificial Sequence: Synthetic oligonucleotide
ggcguuuacgcaccagcuu

SEQ ID NO: 628337 - RNA, 19 nt, Artificial Sequence
  Description of Artificial Sequence: Synthetic oligonucleotide
gggugcgcaccuccaggca

SEQ ID NO: 628338 - RNA, 19 nt, Artificial Sequence
  Description of Artificial Sequence: Synthetic oligonucleotide
gcugugugugugugugugu

SEQ ID NO: 628339 - RNA, 19 nt, Artificial Sequence
  Description of Artificial Sequence: Synthetic oligonucleotide
gcacgaauaggggcgcucu

SEQ ID NO: 628340 - RNA, 19 nt, Artificial Sequence
  Description of Artificial Sequence: Synthetic oligonucleotide
gcuuucaagcuuccaccuu

SEQ ID NO: 628341 - RNA, 19 nt, Artificial Sequence
  Description of Artificial Sequence: Synthetic oligonucleotide
ccuugcggcgccuucgggu

SEQ ID NO: 628342 - RNA, 19 nt, Artificial Sequence
  Description of Artificial Sequence: Synthetic oligonucleotide
ccucuagauccgcuccgca

SEQ ID NO: 628343 - RNA, 19 nt, Artificial Sequence
  Description of Artificial Sequence: Synthetic oligonucleotide
cgcccuuucagggcauggc

SEQ ID NO: 628344 - RNA, 19 nt, Artificial Sequence
  Description of Artificial Sequence: Synthetic oligonucleotide
ccgcauagccgaaguggga

SEQ ID NO: 628345 - RNA, 19 nt, Artificial Sequence
  Description of Artificial Sequence: Synthetic oligonucleotide
acgcgggaggggagaggug

SEQ ID NO: 628346 - RNA, 19 nt, Artificial Sequence
  Description of Artificial Sequence: Synthetic oligonucleotide
gggcggcgugagucagggg

SEQ ID NO: 628347 - RNA, 19 nt, Artificial Sequence
  Description of Artificial Sequence: Synthetic oligonucleotide
ccccaggagaauugguagu

SEQ ID NO: 628348 - RNA, 19 nt, Artificial Sequence
  Description of Artificial Sequence: Synthetic oligonucleotide
gcgagccaaucaagccacc

SEQ ID NO: 628349 - RNA, 19 nt, Artificial Sequence
  Description of Artificial Sequence: Synthetic oligonucleotide
cccuaucaccugaaaugcu

SEQ ID NO: 628350 - RNA, 19 nt, Artificial Sequence
  Description of Artificial Sequence: Synthetic oligonucleotide
cgccaccccucccuguuug

SEQ ID NO: 628351 - RNA, 19 nt, Artificial Sequence
  Description of Artificial Sequence: Synthetic oligonucleotide
cccagggacaaguggcgcu

SEQ ID NO: 628352 - RNA, 19 nt, Artificial Sequence
  Description of Artificial Sequence: Synthetic oligonucleotide
ccccucccuguuugacccc

SEQ ID NO: 628353 - RNA, 19 nt, Artificial Sequence
  Description of Artificial Sequence: Synthetic oligonucleotide
cgcucgcccuuucagggca

SEQ ID NO: 628354 - RNA, 19 nt, Artificial Sequence
  Description of Artificial Sequence: Synthetic oligonucleotide
gcacugagugggagagcca

SEQ ID NO: 628355 - RNA, 19 nt, Artificial Sequence
  Description of Artificial Sequence: Synthetic oligonucleotide
cgaauaggggcgcucuccu

SEQ ID NO: 628356 - RNA, 19 nt, Artificial Sequence
  Description of Artificial Sequence: Synthetic oligonucleotide
cgaccucccuccuaauaua

SEQ ID NO: 628357 - RNA, 19 nt, Artificial Sequence
  Description of Artificial Sequence: Synthetic oligonucleotide
ccccgcaaggcuaccucaa

SEQ ID NO: 628358 - RNA, 19 nt, Artificial Sequence
  Description of Artificial Sequence: Synthetic oligonucleotide
cguuuacgcaccagcuugu

SEQ ID NO: 628359 - RNA, 19 nt, Artificial Sequence
  Description of Artificial Sequence: Synthetic oligonucleotide
ccgggccccugaaccugcc

SEQ ID NO: 628360 - RNA, 19 nt, Artificial Sequence
  Description of Artificial Sequence: Synthetic oligonucleotide
gggcaaggcuuugguccca

SEQ ID NO: 628361 - RNA, 19 nt, Artificial Sequence
  Description of Artificial Sequence: Synthetic oligonucleotide
ccccacuaaggcacugagu

SEQ ID NO: 628362 - RNA, 19 nt, Artificial Sequence
  Description of Artificial Sequence: Synthetic oligonucleotide
ggaccccaugacucagcau

SEQ ID NO: 628363 - RNA, 19 nt, Artificial Sequence
  Description of Artificial Sequence: Synthetic oligonucleotide
cggcguuuacgcaccagcu

SEQ ID NO: 628364 - RNA, 19 nt, Artificial Sequence
  Description of Artificial Sequence: Synthetic oligonucleotide
caccgguauggguccucau

SEQ ID NO: 628365 - RNA, 19 nt, Artificial Sequence
  Description of Artificial Sequence: Synthetic oligonucleotide
gcaugcggcagaggcggcu

SEQ ID NO: 628366 - RNA, 19 nt, Artificial Sequence
  Description of Artificial Sequence: Synthetic oligonucleotide
ccuggugccagggcguccu

SEQ ID NO: 628367 - RNA, 19 nt, Artificial Sequence
  Description of Artificial Sequence: Synthetic oligonucleotide
caaguggcgcucgcccuuu

SEQ ID NO: 628368 - RNA, 19 nt, Artificial Sequence
  Description of Artificial Sequence: Synthetic oligonucleotide
ggcgcucuccuguguguuu

SEQ ID NO: 628369 - RNA, 19 nt, Artificial Sequence
  Description of Artificial Sequence: Synthetic oligonucleotide
cggacgccgcaaaccucac

SEQ ID NO: 628370 - RNA, 19 nt, Artificial Sequence
  Description of Artificial Sequence: Synthetic oligonucleotide
cgggaucgauggugucuuc

SEQ ID NO: 628371 - RNA, 19 nt, Artificial Sequence
  Description of Artificial Sequence: Synthetic oligonucleotide
gcuccccgcaaggcuaccu

SEQ ID NO: 628372 - RNA, 19 nt, Artificial Sequence
  Description of Artificial Sequence: Synthetic oligonucleotide
cgcuccgcagcucacuuuu

SEQ ID NO: 628373 - RNA, 19 nt, Artificial Sequence
  Description of Artificial Sequence: Synthetic oligonucleotide
cgcccgcuccccgcaaggc

SEQ ID NO: 628374 - RNA, 19 nt, Artificial Sequence
  Description of Artificial Sequence: Synthetic oligonucleotide
gccuucgggugcgcaccuc

SEQ ID NO: 628375 - RNA, 19 nt, Artificial Sequence
  Description of Artificial Sequence: Synthetic oligonucleotide
ccucaacccgucaccccau

SEQ ID NO: 628376 - RNA, 19 nt, Artificial Sequence
  Description of Artificial Sequence: Synthetic oligonucleotide
gggcacgaauaggggcgcu

SEQ ID NO: 628377 - RNA, 19 nt, Artificial Sequence
  Description of Artificial Sequence: Synthetic oligonucleotide
gcgccaggaacaagacauu

SEQ ID NO: 628378 - RNA, 19 nt, Artificial Sequence
  Description of Artificial Sequence: Synthetic oligonucleotide
gcggcgccuucgggugcgc

SEQ ID NO: 628379 - RNA, 19 nt, Artificial Sequence
  Description of Artificial Sequence: Synthetic oligonucleotide
gcucgcccuuucagggcau

SEQ ID NO: 628380 - RNA, 19 nt, Artificial Sequence
  Description of Artificial Sequence: Synthetic oligonucleotide
gccccugaaccugccccuu

SEQ ID NO: 628381 - RNA, 19 nt, Artificial Sequence
  Description of Artificial Sequence: Synthetic oligonucleotide
ccgcuccgcagcucacuuu

SEQ ID NO: 628382 - RNA, 19 nt, Artificial Sequence
  Description of Artificial Sequence: Synthetic oligonucleotide
cgccuucgggugcgcaccu

SEQ ID NO: 628383 - RNA, 19 nt, Artificial Sequence
  Description of Artificial Sequence: Synthetic oligonucleotide
ccgccaccccucccuguuu

SEQ ID NO: 628384 - RNA, 19 nt, Artificial Sequence
  Description of Artificial Sequence: Synthetic oligonucleotide
cggcgccuucgggugcgca

SEQ ID NO: 628385 - RNA, 19 nt, Artificial Sequence
  Description of Artificial Sequence: Synthetic oligonucleotide
uuaaauugcaguuacguug

SEQ ID NO: 628386 - RNA, 19 nt, Artificial Sequence
  Description of Artificial Sequence: Synthetic oligonucleotide
uauacuaccaacauuaaau

SEQ ID NO: 628387 - RNA, 19 nt, Artificial Sequence
  Description of Artificial Sequence: Synthetic oligonucleotide
cauagcuuaacaauuaagg

SEQ ID NO: 628388 - RNA, 19 nt, Artificial Sequence
  Description of Artificial Sequence: Synthetic oligonucleotide
uguaacagaccuaagaaac

SEQ ID NO: 628389 - RNA, 19 nt, Artificial Sequence
  Description of Artificial Sequence: Synthetic oligonucleotide
aaucuagaagagcaagccc

SEQ ID NO: 628390 - RNA, 19 nt, Artificial Sequence
  Description of Artificial Sequence: Synthetic oligonucleotide
uaaauugcaguuacguugg

SEQ ID NO: 628391 - RNA, 19 nt, Artificial Sequence
  Description of Artificial Sequence: Synthetic oligonucleotide
ugagaagugaugacuaugg

SEQ ID NO: 628392 - RNA, 19 nt, Artificial Sequence
  Description of Artificial Sequence: Synthetic oligonucleotide
auagcuuaacaauuaaggg

SEQ ID NO: 628393 - RNA, 19 nt, Artificial Sequence
  Description of Artificial Sequence: Synthetic oligonucleotide
ucaaagauauccaugggug

SEQ ID NO: 628394 - RNA, 19 nt, Artificial Sequence
  Description of Artificial Sequence: Synthetic oligonucleotide
aggcuaauuuucuauaugc

SEQ ID NO: 628395 - RNA, 19 nt, Artificial Sequence
  Description of Artificial Sequence: Synthetic oligonucleotide
uuuuacaucugucuuuagg

SEQ ID NO: 628396 - RNA, 19 nt, Artificial Sequence
  Description of Artificial Sequence: Synthetic oligonucleotide
ucugauuaccauuaaauac

SEQ ID NO: 628397 - RNA, 19 nt, Artificial Sequence
  Description of Artificial Sequence: Synthetic oligonucleotide
uucaccaucuuucacagcc

SEQ ID NO: 628398 - RNA, 19 nt, Artificial Sequence
  Description of Artificial Sequence: Synthetic oligonucleotide
auuacuugggcuuuggaag

SEQ ID NO: 628399 - RNA, 19 nt, Artificial Sequence
  Description of Artificial Sequence: Synthetic oligonucleotide
uuauacaagucuucuaagg

SEQ ID NO: 628400 - RNA, 19 nt, Artificial Sequence
  Description of Artificial Sequence: Synthetic oligonucleotide
aaauuauguauuaugccac

SEQ ID NO: 628401 - RNA, 19 nt, Artificial Sequence
  Description of Artificial Sequence: Synthetic oligonucleotide
aguauauuagaagacaguc

SEQ ID NO: 628402 - RNA, 19 nt, Artificial Sequence
  Description of Artificial Sequence: Synthetic oligonucleotide
uuaagcaguagcuugauaa

SEQ ID NO: 628403 - RNA, 19 nt, Artificial Sequence
  Description of Artificial Sequence: Synthetic oligonucleotide
cauaauuugcuauacuacc

SEQ ID NO: 628404 - RNA, 19 nt, Artificial Sequence
  Description of Artificial Sequence: Synthetic oligonucleotide
uuagaagacagucauacau

SEQ ID NO: 628405 - RNA, 19 nt, Artificial Sequence
  Description of Artificial Sequence: Synthetic oligonucleotide
ucaguauauuagaagacag

SEQ ID NO: 628406 - RNA, 19 nt, Artificial Sequence
  Description of Artificial Sequence: Synthetic oligonucleotide
ugcuauacuaccaacauua

SEQ ID NO: 628407 - RNA, 19 nt, Artificial Sequence
  Description of Artificial Sequence: Synthetic oligonucleotide
aauuugcuauacuaccaac

SEQ ID NO: 628408 - RNA, 19 nt, Artificial Sequence
  Description of Artificial Sequence: Synthetic oligonucleotide
uaaacuuuaggaauguauc

SEQ ID NO: 628409 - RNA, 19 nt, Artificial Sequence
  Description of Artificial Sequence: Synthetic oligonucleotide
accuaagucaaauagcaag

SEQ ID NO: 628410 - RNA, 19 nt, Artificial Sequence
  Description of Artificial Sequence: Synthetic oligonucleotide
uugauaaacuuuaggaaug

SEQ ID NO: 628411 - RNA, 19 nt, Artificial Sequence
  Description of Artificial Sequence: Synthetic oligonucleotide
aucaauaugaacuucuaaa

SEQ ID NO: 628412 - RNA, 19 nt, Artificial Sequence
  Description of Artificial Sequence: Synthetic oligonucleotide
aacaauuaagggucacaac

SEQ ID NO: 628413 - RNA, 19 nt, Artificial Sequence
  Description of Artificial Sequence: Synthetic oligonucleotide
uuacuuaaguuauuaaacu

SEQ ID NO: 628414 - RNA, 19 nt, Artificial Sequence
  Description of Artificial Sequence: Synthetic oligonucleotide
auuaugauuacaguccuuc

SEQ ID NO: 628415 - RNA, 19 nt, Artificial Sequence
  Description of Artificial Sequence: Synthetic oligonucleotide
gauauuggcuuuuggaagc

SEQ ID NO: 628416 - RNA, 19 nt, Artificial Sequence
  Description of Artificial Sequence: Synthetic oligonucleotide
auuccaugcacacugacug

SEQ ID NO: 628417 - RNA, 19 nt, Artificial Sequence
  Description of Artificial Sequence: Synthetic oligonucleotide
cacuacugcauuuagaaug

SEQ ID NO: 628418 - RNA, 19 nt, Artificial Sequence
  Description of Artificial Sequence: Synthetic oligonucleotide
uagcuuaacaauuaagggu

SEQ ID NO: 628419 - RNA, 19 nt, Artificial Sequence
  Description of Artificial Sequence: Synthetic oligonucleotide
agcuuaacaauuaaggguc

SEQ ID NO: 628420 - RNA, 19 nt, Artificial Sequence
  Description of Artificial Sequence: Synthetic oligonucleotide
auaguaagugguuucuuuc

SEQ ID NO: 628421 - RNA, 19 nt, Artificial Sequence
  Description of Artificial Sequence: Synthetic oligonucleotide
uguaucauuucuaucacua

SEQ ID NO: 628422 - RNA, 19 nt, Artificial Sequence
  Description of Artificial Sequence: Synthetic oligonucleotide
acuuaaguuauuaaacuuc

SEQ ID NO: 628423 - RNA, 19 nt, Artificial Sequence
  Description of Artificial Sequence: Synthetic oligonucleotide
ucaagaguggauauuggcu

SEQ ID NO: 628424 - RNA, 19 nt, Artificial Sequence
  Description of Artificial Sequence: Synthetic oligonucleotide
caauuaguccacuucauac

SEQ ID NO: 628425 - RNA, 19 nt, Artificial Sequence
  Description of Artificial Sequence: Synthetic oligonucleotide
aaugauaagacgucccuuu

SEQ ID NO: 628426 - RNA, 19 nt, Artificial Sequence
  Description of Artificial Sequence: Synthetic oligonucleotide
agaggcauuacaauuaguc

SEQ ID NO: 628427 - RNA, 19 nt, Artificial Sequence
  Description of Artificial Sequence: Synthetic oligonucleotide
auaaugacgccgucuuucc

SEQ ID NO: 628428 - RNA, 19 nt, Artificial Sequence
  Description of Artificial Sequence: Synthetic oligonucleotide
uacguugggaccuaaguca

SEQ ID NO: 628429 - RNA, 19 nt, Artificial Sequence
  Description of Artificial Sequence: Synthetic oligonucleotide
aagucaaauagcaagccug

SEQ ID NO: 628430 - RNA, 19 nt, Artificial Sequence
  Description of Artificial Sequence: Synthetic oligonucleotide
aauuaagggucacaacaca

SEQ ID NO: 628431 - RNA, 19 nt, Artificial Sequence
  Description of Artificial Sequence: Synthetic oligonucleotide
ugcgccauuauacaagucu

SEQ ID NO: 628432 - RNA, 19 nt, Artificial Sequence
  Description of Artificial Sequence: Synthetic oligonucleotide
aaguagugaguauauuaug

SEQ ID NO: 628433 - RNA, 19 nt, Artificial Sequence
  Description of Artificial Sequence: Synthetic oligonucleotide
uccauuauaaugacgccgu

SEQ ID NO: 628434 - RNA, 19 nt, Artificial Sequence
  Description of Artificial Sequence: Synthetic oligonucleotide
cugauuaccauuaaauaca

SEQ ID NO: 628435 - RNA, 19 nt, Artificial Sequence
  Description of Artificial Sequence: Synthetic oligonucleotide
aggcauuacaauuagucca

SEQ ID NO: 628436 - RNA, 19 nt, Artificial Sequence
  Description of Artificial Sequence: Synthetic oligonucleotide
uguugcgccauuauacaag

SEQ ID NO: 628437 - RNA, 19 nt, Artificial Sequence
  Description of Artificial Sequence: Synthetic oligonucleotide
agcaaagagagcuuaucag

SEQ ID NO: 628438 - RNA, 19 nt, Artificial Sequence
  Description of Artificial Sequence: Synthetic oligonucleotide
acauacaacaaagcuauuc

SEQ ID NO: 628439 - RNA, 19 nt, Artificial Sequence
  Description of Artificial Sequence: Synthetic oligonucleotide
uuugcuauacuaccaacau

SEQ ID NO: 628440 - RNA, 19 nt, Artificial Sequence
  Description of Artificial Sequence: Synthetic oligonucleotide
aguauauuaugauuacagu

SEQ ID NO: 628441 - RNA, 19 nt, Artificial Sequence
  Description of Artificial Sequence: Synthetic oligonucleotide
aguaagugguuucuuucac

SEQ ID NO: 628442 - RNA, 19 nt, Artificial Sequence
  Description of Artificial Sequence: Synthetic oligonucleotide
uucuaguaauggcugaggc

SEQ ID NO: 628443 - RNA, 19 nt, Artificial Sequence
  Description of Artificial Sequence: Synthetic oligonucleotide
cugauacccagauuuaagc

SEQ ID NO: 628444 - RNA, 19 nt, Artificial Sequence
  Description of Artificial Sequence: Synthetic oligonucleotide
uaucaggagagagaaagcc

SEQ ID NO: 628445 - RNA, 19 nt, Artificial Sequence
  Description of Artificial Sequence: Synthetic oligonucleotide
uacuucaaggcuaauuuuc

SEQ ID NO: 628446 - RNA, 19 nt, Artificial Sequence
  Description of Artificial Sequence: Synthetic oligonucleotide
acgcaguuggggcagacgc

SEQ ID NO: 628447 - RNA, 19 nt, Artificial Sequence
  Description of Artificial Sequence: Synthetic oligonucleotide
acacaugcaaaucacuucu

SEQ ID NO: 628448 - RNA, 19 nt, Artificial Sequence
  Description of Artificial Sequence: Synthetic oligonucleotide
gaugacuaugguucgguug

SEQ ID NO: 628449 - RNA, 19 nt, Artificial Sequence
  Description of Artificial Sequence: Synthetic oligonucleotide
gauaagacgucccuuuuca

SEQ ID NO: 628450 - RNA, 19 nt, Artificial Sequence
  Description of Artificial Sequence: Synthetic oligonucleotide
agggaaugcaaucuagaag

SEQ ID NO: 628451 - RNA, 19 nt, Artificial Sequence
  Description of Artificial Sequence: Synthetic oligonucleotide
ucaaugauaagacgucccu

SEQ ID NO: 628452 - RNA, 19 nt, Artificial Sequence
  Description of Artificial Sequence: Synthetic oligonucleotide
auauuaugauuacaguccu

SEQ ID NO: 628453 - RNA, 19 nt, Artificial Sequence
  Description of Artificial Sequence: Synthetic oligonucleotide
auuauaaugacgccgucuu

SEQ ID NO: 628454 - RNA, 19 nt, Artificial Sequence
  Description of Artificial Sequence: Synthetic oligonucleotide
guuuaccuuaaacucaaug

SEQ ID NO: 628455 - RNA, 19 nt, Artificial Sequence
  Description of Artificial Sequence: Synthetic oligonucleotide
cuuaaacucaaugauaaga

SEQ ID NO: 628456 - RNA, 19 nt, Artificial Sequence
  Description of Artificial Sequence: Synthetic oligonucleotide
uacuaccaacauuaaauug

SEQ ID NO: 628457 - RNA, 19 nt, Artificial Sequence
  Description of Artificial Sequence: Synthetic oligonucleotide
uaugguucgguugucaaga

SEQ ID NO: 628458 - RNA, 19 nt, Artificial Sequence
  Description of Artificial Sequence: Synthetic oligonucleotide
ugaauuugcugaaccauuc

SEQ ID NO: 628459 - RNA, 19 nt, Artificial Sequence
  Description of Artificial Sequence: Synthetic oligonucleotide
aacacuacuauaguugaau

SEQ ID NO: 628460 - RNA, 19 nt, Artificial Sequence
  Description of Artificial Sequence: Synthetic oligonucleotide
cuuucuuaccaccucggcc

SEQ ID NO: 628461 - RNA, 19 nt, Artificial Sequence
  Description of Artificial Sequence: Synthetic oligonucleotide
ucuaguaauggcugaggca

SEQ ID NO: 628462 - RNA, 19 nt, Artificial Sequence
  Description of Artificial Sequence: Synthetic oligonucleotide
ucaugguuugagaauggca

SEQ ID NO: 628463 - RNA, 19 nt, Artificial Sequence
  Description of Artificial Sequence: Synthetic oligonucleotide
uaucaugguuugagaaugg

SEQ ID NO: 628464 - RNA, 19 nt, Artificial Sequence
  Description of Artificial Sequence: Synthetic oligonucleotide
acagucauacauuucaaua

SEQ ID NO: 628465 - RNA, 19 nt, Artificial Sequence
  Description of Artificial Sequence: Synthetic oligonucleotide
uuacguugggaccuaaguc

SEQ ID NO: 628466 - RNA, 19 nt, Artificial Sequence
  Description of Artificial Sequence: Synthetic oligonucleotide
cauuucuaucacuaguaac

SEQ ID NO: 628467 - RNA, 19 nt, Artificial Sequence
  Description of Artificial Sequence: Synthetic oligonucleotide
cucaaugauaagacguccc

SEQ ID NO: 628468 - RNA, 19 nt, Artificial Sequence
  Description of Artificial Sequence: Synthetic oligonucleotide
uaucacuaguaacaggcaa

SEQ ID NO: 628469 - RNA, 19 nt, Artificial Sequence
  Description of Artificial Sequence: Synthetic oligonucleotide
ucucgaacuaucuuucuuc

SEQ ID NO: 628470 - RNA, 19 nt, Artificial Sequence
  Description of Artificial Sequence: Synthetic oligonucleotide
aaacaucauaguaaguggu

SEQ ID NO: 628471 - RNA, 19 nt, Artificial Sequence
  Description of Artificial Sequence: Synthetic oligonucleotide
acuagacagacccaacaug

SEQ ID NO: 628472 - RNA, 19 nt, Artificial Sequence
  Description of Artificial Sequence: Synthetic oligonucleotide
ugcaaucuagaagagcaag

SEQ ID NO: 628473 - RNA, 19 nt, Artificial Sequence
  Description of Artificial Sequence: Synthetic oligonucleotide
uauaaugacgccgucuuuc

SEQ ID NO: 628474 - RNA, 19 nt, Artificial Sequence
  Description of Artificial Sequence: Synthetic oligonucleotide
acaaagaggaacuggccca

SEQ ID NO: 628475 - RNA, 19 nt, Artificial Sequence
  Description of Artificial Sequence: Synthetic oligonucleotide
uuaucaggagagagaaagc

SEQ ID NO: 628476 - RNA, 19 nt, Artificial Sequence
  Description of Artificial Sequence: Synthetic oligonucleotide
agugaguauauuaugauua

SEQ ID NO: 628477 - RNA, 19 nt, Artificial Sequence
  Description of Artificial Sequence: Synthetic oligonucleotide
uacuuaaguuauuaaacuu

SEQ ID NO: 628478 - RNA, 19 nt, Artificial Sequence
  Description of Artificial Sequence: Synthetic oligonucleotide
ugcaaaucacuucuccaca

SEQ ID NO: 628479 - RNA, 19 nt, Artificial Sequence
  Description of Artificial Sequence: Synthetic oligonucleotide
uuucauauggccgacgaua

SEQ ID NO: 628480 - RNA, 19 nt, Artificial Sequence
  Description of Artificial Sequence: Synthetic oligonucleotide
uaacaauuaagggucacaa

SEQ ID NO: 628481 - RNA, 19 nt, Artificial Sequence
  Description of Artificial Sequence: Synthetic oligonucleotide
uaguaagugguuucuuuca

SEQ ID NO: 628482 - RNA, 19 nt, Artificial Sequence
  Description of Artificial Sequence: Synthetic oligonucleotide
aacugcuuaaauucugaua

SEQ ID NO: 628483 - RNA, 19 nt, Artificial Sequence
  Description of Artificial Sequence: Synthetic oligonucleotide
agacccaacaugugauuac

SEQ ID NO: 628484 - RNA, 19 nt, Artificial Sequence
  Description of Artificial Sequence: Synthetic oligonucleotide
ugaugcguucuccaugacc

SEQ ID NO: 628485 - RNA, 19 nt, Artificial Sequence
  Description of Artificial Sequence: Synthetic oligonucleotide
uuuggauucuuaucagggu

SEQ ID NO: 628486 - RNA, 19 nt, Artificial Sequence
  Description of Artificial Sequence: Synthetic oligonucleotide
gacgucccuuuucauaugg

SEQ ID NO: 628487 - RNA, 19 nt, Artificial Sequence
  Description of Artificial Sequence: Synthetic oligonucleotide
uguauuaugccaccuucua

SEQ ID NO: 628488 - RNA, 19 nt, Artificial Sequence
  Description of Artificial Sequence: Synthetic oligonucleotide
uggcauaccuucauuuagc

SEQ ID NO: 628489 - RNA, 19 nt, Artificial Sequence
  Description of Artificial Sequence: Synthetic oligonucleotide
auuaguccacuucauacaa

SEQ ID NO: 628490 - RNA, 19 nt, Artificial Sequence
  Description of Artificial Sequence: Synthetic oligonucleotide
uggccgacgauauauuggc

SEQ ID NO: 628491 - RNA, 19 nt, Artificial Sequence
  Description of Artificial Sequence: Synthetic oligonucleotide
aucacuucuccacauacaa

SEQ ID NO: 628492 - RNA, 19 nt, Artificial Sequence
  Description of Artificial Sequence: Synthetic oligonucleotide
uuaucauauaauucccuuu

SEQ ID NO: 628493 - RNA, 19 nt, Artificial Sequence
  Description of Artificial Sequence: Synthetic oligonucleotide
auuaaauugcaguuacguu

SEQ ID NO: 628494 - RNA, 19 nt, Artificial Sequence
  Description of Artificial Sequence: Synthetic oligonucleotide
uccgaucugaugaauccug

SEQ ID NO: 628495 - RNA, 19 nt, Artificial Sequence
  Description of Artificial Sequence: Synthetic oligonucleotide
agaaugacaaagaggaacu

SEQ ID NO: 628496 - RNA, 19 nt, Artificial Sequence
  Description of Artificial Sequence: Synthetic oligonucleotide
auaaacuuuaggaauguau

SEQ ID NO: 628497 - RNA, 19 nt, Artificial Sequence
  Description of Artificial Sequence: Synthetic oligonucleotide
uuaacaauuaagggucaca

SEQ ID NO: 628498 - RNA, 19 nt, Artificial Sequence
  Description of Artificial Sequence: Synthetic oligonucleotide
gucaagaguggauauuggc

SEQ ID NO: 628499 - RNA, 19 nt, Artificial Sequence
  Description of Artificial Sequence: Synthetic oligonucleotide
aggaauguaucauuucuau

SEQ ID NO: 628500 - RNA, 19 nt, Artificial Sequence
  Description of Artificial Sequence: Synthetic oligonucleotide
aguggauauuggcuuuugg

SEQ ID NO: 628501 - RNA, 19 nt, Artificial Sequence
  Description of Artificial Sequence: Synthetic oligonucleotide
cucgaacuaucuuucuucc

SEQ ID NO: 628502 - RNA, 19 nt, Artificial Sequence
  Description of Artificial Sequence: Synthetic oligonucleotide
aagggucacaacacauacc

SEQ ID NO: 628503 - RNA, 19 nt, Artificial Sequence
  Description of Artificial Sequence: Synthetic oligonucleotide
uuaagggucacaacacaua

SEQ ID NO: 628504 - RNA, 19 nt, Artificial Sequence
  Description of Artificial Sequence: Synthetic oligonucleotide
ugaacaccaccucuggggu

SEQ ID NO: 628505 - RNA, 19 nt, Artificial Sequence
  Description of Artificial Sequence: Synthetic oligonucleotide
ggaaaguuuaccuuaaacu

SEQ ID NO: 628506 - RNA, 19 nt, Artificial Sequence
  Description of Artificial Sequence: Synthetic oligonucleotide
ucucuuugcauccucccuc

SEQ ID NO: 628507 - RNA, 19 nt, Artificial Sequence
  Description of Artificial Sequence: Synthetic oligonucleotide
uaccuuaaacucaaugaua

SEQ ID NO: 628508 - RNA, 19 nt, Artificial Sequence
  Description of Artificial Sequence: Synthetic oligonucleotide
uuaucaauaugaacuucua

SEQ ID NO: 628509 - RNA, 19 nt, Artificial Sequence
  Description of Artificial Sequence: Synthetic oligonucleotide
uauggccgacgauauauug

SEQ ID NO: 628510 - RNA, 19 nt, Artificial Sequence
  Description of Artificial Sequence: Synthetic oligonucleotide
uucauauggccgacgauau

SEQ ID NO: 628511 - RNA, 19 nt, Artificial Sequence
  Description of Artificial Sequence: Synthetic oligonucleotide
auaauuugcuauacuacca

SEQ ID NO: 628512 - RNA, 19 nt, Artificial Sequence
  Description of Artificial Sequence: Synthetic oligonucleotide
uagaagacagucauacauu

SEQ ID NO: 628513 - RNA, 19 nt, Artificial Sequence
  Description of Artificial Sequence: Synthetic oligonucleotide
auacuaccaacauuaaauu

SEQ ID NO: 628514 - RNA, 19 nt, Artificial Sequence
  Description of Artificial Sequence: Synthetic oligonucleotide
uaagcuugagaaaucuguu

SEQ ID NO: 628515 - RNA, 19 nt, Artificial Sequence
  Description of Artificial Sequence: Synthetic oligonucleotide
aucaugguuugagaauggc

SEQ ID NO: 628516 - RNA, 19 nt, Artificial Sequence
  Description of Artificial Sequence: Synthetic oligonucleotide
auagcaagccuguaacaga

SEQ ID NO: 628517 - RNA, 19 nt, Artificial Sequence
  Description of Artificial Sequence: Synthetic oligonucleotide
uuuggaagucaccacccaa

SEQ ID NO: 628518 - RNA, 19 nt, Artificial Sequence
  Description of Artificial Sequence: Synthetic oligonucleotide
auugcagaggcauuacaau

SEQ ID NO: 628519 - RNA, 19 nt, Artificial Sequence
  Description of Artificial Sequence: Synthetic oligonucleotide
agacagacccaacauguga

SEQ ID NO: 628520 - RNA, 19 nt, Artificial Sequence
  Description of Artificial Sequence: Synthetic oligonucleotide
acgauauauuggcauaccu

SEQ ID NO: 628521 - RNA, 19 nt, Artificial Sequence
  Description of Artificial Sequence: Synthetic oligonucleotide
uuuaggacugaugcguucu

SEQ ID NO: 628522 - RNA, 19 nt, Artificial Sequence
  Description of Artificial Sequence: Synthetic oligonucleotide
uagcacaacgcaguugggg

SEQ ID NO: 628523 - RNA, 19 nt, Artificial Sequence
  Description of Artificial Sequence: Synthetic oligonucleotide
uccuccuuuaucauauaau

SEQ ID NO: 628524 - RNA, 19 nt, Artificial Sequence
  Description of Artificial Sequence: Synthetic oligonucleotide
ugauaagacgucccuuuuc

SEQ ID NO: 628525 - RNA, 19 nt, Artificial Sequence
  Description of Artificial Sequence: Synthetic oligonucleotide
gagagcggaaagaggagcg

SEQ ID NO: 628526 - RNA, 19 nt, Artificial Sequence
  Description of Artificial Sequence: Synthetic oligonucleotide
cauggaauguuaucuucug

SEQ ID NO: 628527 - RNA, 19 nt, Artificial Sequence
  Description of Artificial Sequence: Synthetic oligonucleotide
aagccuguaacagaccuaa

SEQ ID NO: 628528 - RNA, 19 nt, Artificial Sequence
  Description of Artificial Sequence: Synthetic oligonucleotide
uacaacuagacagacccaa

SEQ ID NO: 628529 - RNA, 19 nt, Artificial Sequence
  Description of Artificial Sequence: Synthetic oligonucleotide
cuaguaauggcugaggcaa

SEQ ID NO: 628530 - RNA, 19 nt, Artificial Sequence
  Description of Artificial Sequence: Synthetic oligonucleotide
aaucugaccuggaugagaa

SEQ ID NO: 628531 - RNA, 19 nt, Artificial Sequence
  Description of Artificial Sequence: Synthetic oligonucleotide
aguaacaggcaaaauuaug

SEQ ID NO: 628532 - RNA, 19 nt, Artificial Sequence
  Description of Artificial Sequence: Synthetic oligonucleotide
aaguuuaccuuaaacucaa

SEQ ID NO: 628533 - RNA, 19 nt, Artificial Sequence
  Description of Artificial Sequence: Synthetic oligonucleotide
uccauagcuuaacaauuaa

SEQ ID NO: 628534 - RNA, 19 nt, Artificial Sequence
  Description of Artificial Sequence: Synthetic oligonucleotide
caugggugagccaaaacca

SEQ ID NO: 628535 - RNA, 19 nt, Artificial Sequence
  Description of Artificial Sequence: Synthetic oligonucleotide
gucccuuuucauauggccg

SEQ ID NO: 628536 - RNA, 19 nt, Artificial Sequence
  Description of Artificial Sequence: Synthetic oligonucleotide
uuccauagcuuaacaauua

SEQ ID NO: 628537 - RNA, 19 nt, Artificial Sequence
  Description of Artificial Sequence: Synthetic oligonucleotide
ugggugagccaaaaccacc

SEQ ID NO: 628538 - RNA, 19 nt, Artificial Sequence
  Description of Artificial Sequence: Synthetic oligonucleotide
ggaauguuaucuucugacc

SEQ ID NO: 628539 - RNA, 19 nt, Artificial Sequence
  Description of Artificial Sequence: Synthetic oligonucleotide
acagaccuaagaaacaccu

SEQ ID NO: 628540 - RNA, 19 nt, Artificial Sequence
  Description of Artificial Sequence: Synthetic oligonucleotide
ucuaccugauccauuucau

SEQ ID NO: 628541 - RNA, 19 nt, Artificial Sequence
  Description of Artificial Sequence: Synthetic oligonucleotide
guaacaggcaaaauuaugu

SEQ ID NO: 628542 - RNA, 19 nt, Artificial Sequence
  Description of Artificial Sequence: Synthetic oligonucleotide
uucaccauggaauguuauc

SEQ ID NO: 628543 - RNA, 19 nt, Artificial Sequence
  Description of Artificial Sequence: Synthetic oligonucleotide
cuaacacaaugauaauauc

SEQ ID NO: 628544 - RNA, 19 nt, Artificial Sequence
  Description of Artificial Sequence: Synthetic oligonucleotide
gguucgguugucaagagug

SEQ ID NO: 628545 - RNA, 19 nt, Artificial Sequence
  Description of Artificial Sequence: Synthetic oligonucleotide
ugcaguuacguugggaccu

SEQ ID NO: 628546 - RNA, 19 nt, Artificial Sequence
  Description of Artificial Sequence: Synthetic oligonucleotide
augauaauaucuccugguu

SEQ ID NO: 628547 - RNA, 19 nt, Artificial Sequence
  Description of Artificial Sequence: Synthetic oligonucleotide
auauccaugggugagccaa

SEQ ID NO: 628548 - RNA, 19 nt, Artificial Sequence
  Description of Artificial Sequence: Synthetic oligonucleotide
agccgcacaaugcuucaac

SEQ ID NO: 628549 - RNA, 19 nt, Artificial Sequence
  Description of Artificial Sequence: Synthetic oligonucleotide
ccauuaagaggucugacac

SEQ ID NO: 628550 - RNA, 19 nt, Artificial Sequence
  Description of Artificial Sequence: Synthetic oligonucleotide
aagucagagcuuuuauauu

SEQ ID NO: 628551 - RNA, 19 nt, Artificial Sequence
  Description of Artificial Sequence: Synthetic oligonucleotide
gauuuaagcaugugaacau

SEQ ID NO: 628552 - RNA, 19 nt, Artificial Sequence
  Description of Artificial Sequence: Synthetic oligonucleotide
uccgcccucuuuaauggcc

SEQ ID NO: 628553 - RNA, 19 nt, Artificial Sequence
  Description of Artificial Sequence: Synthetic oligonucleotide
uugcaguuacguugggacc

SEQ ID NO: 628554 - RNA, 19 nt, Artificial Sequence
  Description of Artificial Sequence: Synthetic oligonucleotide
cauacauacagggcaaguc

SEQ ID NO: 628555 - RNA, 19 nt, Artificial Sequence
  Description of Artificial Sequence: Synthetic oligonucleotide
ccaugggugagccaaaacc

SEQ ID NO: 628556 - RNA, 19 nt, Artificial Sequence
  Description of Artificial Sequence: Synthetic oligonucleotide
agcuuaucaggagagagaa

SEQ ID NO: 628557 - RNA, 19 nt, Artificial Sequence
  Description of Artificial Sequence: Synthetic oligonucleotide
uagacagacccaacaugug

SEQ ID NO: 628558 - RNA, 19 nt, Artificial Sequence
  Description of Artificial Sequence: Synthetic oligonucleotide
cguagcacaacgcaguugg

SEQ ID NO: 628559 - RNA, 19 nt, Artificial Sequence
  Description of Artificial Sequence: Synthetic oligonucleotide
aggagcguagcacaacgca

SEQ ID NO: 628560 - RNA, 19 nt, Artificial Sequence
  Description of Artificial Sequence: Synthetic oligonucleotide
cuagacagacccaacaugu

SEQ ID NO: 628561 - RNA, 19 nt, Artificial Sequence
  Description of Artificial Sequence: Synthetic oligonucleotide
aagcccuuaagcaguagcu

SEQ ID NO: 628562 - RNA, 19 nt, Artificial Sequence
  Description of Artificial Sequence: Synthetic oligonucleotide
aagaguggauauuggcuuu

SEQ ID NO: 628563 - RNA, 19 nt, Artificial Sequence
  Description of Artificial Sequence: Synthetic oligonucleotide
auuggcauaccuucauuua

SEQ ID NO: 628564 - RNA, 19 nt, Artificial Sequence
  Description of Artificial Sequence: Synthetic oligonucleotide
augagaagugaugacuaug

SEQ ID NO: 628565 - RNA, 19 nt, Artificial Sequence
  Description of Artificial Sequence: Synthetic oligonucleotide
cugcuuaaauucugauacc

SEQ ID NO: 628566 - RNA, 19 nt, Artificial Sequence
  Description of Artificial Sequence: Synthetic oligonucleotide
auguuaucuucugaccauc

SEQ ID NO: 628567 - RNA, 19 nt, Artificial Sequence
  Description of Artificial Sequence: Synthetic oligonucleotide
agcuauucauaauuugcua

SEQ ID NO: 628568 - RNA, 19 nt, Artificial Sequence
  Description of Artificial Sequence: Synthetic oligonucleotide
acaauuaguccacuucaua

SEQ ID NO: 628569 - RNA, 19 nt, Artificial Sequence
  Description of Artificial Sequence: Synthetic oligonucleotide
ugauuacaguccuucccac

SEQ ID NO: 628570 - RNA, 19 nt, Artificial Sequence
  Description of Artificial Sequence: Synthetic oligonucleotide
auacccagauuuaagcaug

SEQ ID NO: 628571 - RNA, 19 nt, Artificial Sequence
  Description of Artificial Sequence: Synthetic oligonucleotide
aggcaauacauugcagagg

SEQ ID NO: 628572 - RNA, 19 nt, Artificial Sequence
  Description of Artificial Sequence: Synthetic oligonucleotide
uucuuaucagggugguacu

SEQ ID NO: 628573 - RNA, 19 nt, Artificial Sequence
  Description of Artificial Sequence: Synthetic oligonucleotide
auggccgacgauauauugg

SEQ ID NO: 628574 - RNA, 19 nt, Artificial Sequence
  Description of Artificial Sequence: Synthetic oligonucleotide
gugagccaaaaccaccacc

SEQ ID NO: 628575 - RNA, 19 nt, Artificial Sequence
  Description of Artificial Sequence: Synthetic oligonucleotide
caucuugcacauugaaguc

SEQ ID NO: 628576 - RNA, 19 nt, Artificial Sequence
  Description of Artificial Sequence: Synthetic oligonucleotide
uuuucauauggccgacgau

SEQ ID NO: 628577 - RNA, 19 nt, Artificial Sequence
  Description of Artificial Sequence: Synthetic oligonucleotide
aacaucauaguaagugguu

SEQ ID NO: 628578 - RNA, 19 nt, Artificial Sequence
  Description of Artificial Sequence: Synthetic oligonucleotide
cauuaaauugcaguuacgu

SEQ ID NO: 628579 - RNA, 19 nt, Artificial Sequence
  Description of Artificial Sequence: Synthetic oligonucleotide
gguccgaucugaugaaucc

SEQ ID NO: 628580 - RNA, 19 nt, Artificial Sequence
  Description of Artificial Sequence: Synthetic oligonucleotide
uggcccauuaagaggucug

SEQ ID NO: 628581 - RNA, 19 nt, Artificial Sequence
  Description of Artificial Sequence: Synthetic oligonucleotide
auuccauagcuuaacaauu

SEQ ID NO: 628582 - RNA, 19 nt, Artificial Sequence
  Description of Artificial Sequence: Synthetic oligonucleotide
gguggcauuggguuugacc

SEQ ID NO: 628583 - RNA, 19 nt, Artificial Sequence
  Description of Artificial Sequence: Synthetic oligonucleotide
cauuucaauaacugcuuaa

SEQ ID NO: 628584 - RNA, 19 nt, Artificial Sequence
  Description of Artificial Sequence: Synthetic oligonucleotide
uuguugcgccauuauacaa

SEQ ID NO: 628585 - RNA, 19 nt, Artificial Sequence
  Description of Artificial Sequence: Synthetic oligonucleotide
acaacuagacagacccaac

SEQ ID NO: 628586 - RNA, 19 nt, Artificial Sequence
  Description of Artificial Sequence: Synthetic oligonucleotide
augggugagccaaaaccac

SEQ ID NO: 628587 - RNA, 19 nt, Artificial Sequence
  Description of Artificial Sequence: Synthetic oligonucleotide
acuaugguucgguugucaa

SEQ ID NO: 628588 - RNA, 19 nt, Artificial Sequence
  Description of Artificial Sequence: Synthetic oligonucleotide
acccaagggcuuaucaugg

SEQ ID NO: 628589 - RNA, 19 nt, Artificial Sequence
  Description of Artificial Sequence: Synthetic oligonucleotide
uuaagaggucugacacuga

SEQ ID NO: 628590 - RNA, 19 nt, Artificial Sequence
  Description of Artificial Sequence: Synthetic oligonucleotide
ucgguugucaagaguggau

SEQ ID NO: 628591 - RNA, 19 nt, Artificial Sequence
  Description of Artificial Sequence: Synthetic oligonucleotide
ggaccuaagucaaauagca

SEQ ID NO: 628592 - RNA, 19 nt, Artificial Sequence
  Description of Artificial Sequence: Synthetic oligonucleotide
acacuacuauaguugaaua

SEQ ID NO: 628593 - RNA, 19 nt, Artificial Sequence
  Description of Artificial Sequence: Synthetic oligonucleotide
uucugauacccagauuuaa

SEQ ID NO: 628594 - RNA, 19 nt, Artificial Sequence
  Description of Artificial Sequence: Synthetic oligonucleotide
ucuuuaggacugaugcguu

SEQ ID NO: 628595 - RNA, 19 nt, Artificial Sequence
  Description of Artificial Sequence: Synthetic oligonucleotide
agucaaauagcaagccugu

SEQ ID NO: 628596 - RNA, 19 nt, Artificial Sequence
  Description of Artificial Sequence: Synthetic oligonucleotide
ugguccgaucugaugaauc

SEQ ID NO: 628597 - RNA, 19 nt, Artificial Sequence
  Description of Artificial Sequence: Synthetic oligonucleotide
uauuaugauuacaguccuu

SEQ ID NO: 628598 - RNA, 19 nt, Artificial Sequence
  Description of Artificial Sequence: Synthetic oligonucleotide
caaguagugaguauauuau

SEQ ID NO: 628599 - RNA, 19 nt, Artificial Sequence
  Description of Artificial Sequence: Synthetic oligonucleotide
auuaugccaccuucuagua

SEQ ID NO: 628600 - RNA, 19 nt, Artificial Sequence
  Description of Artificial Sequence: Synthetic oligonucleotide
auuugucacaaaucacauu

SEQ ID NO: 628601 - RNA, 19 nt, Artificial Sequence
  Description of Artificial Sequence: Synthetic oligonucleotide
caacuagacagacccaaca

SEQ ID NO: 628602 - RNA, 19 nt, Artificial Sequence
  Description of Artificial Sequence: Synthetic oligonucleotide
caccuuucuuggauuacac

SEQ ID NO: 628603 - RNA, 19 nt, Artificial Sequence
  Description of Artificial Sequence: Synthetic oligonucleotide
guuacguugggaccuaagu

SEQ ID NO: 628604 - RNA, 19 nt, Artificial Sequence
  Description of Artificial Sequence: Synthetic oligonucleotide
ccauagcuuaacaauuaag

SEQ ID NO: 628605 - RNA, 19 nt, Artificial Sequence
  Description of Artificial Sequence: Synthetic oligonucleotide
cuuuaggacugaugcguuc

SEQ ID NO: 628606 - RNA, 19 nt, Artificial Sequence
  Description of Artificial Sequence: Synthetic oligonucleotide
uuauaaugacgccgucuuu

SEQ ID NO: 628607 - RNA, 19 nt, Artificial Sequence
  Description of Artificial Sequence: Synthetic oligonucleotide
guaacagaccuaagaaaca

SEQ ID NO: 628608 - RNA, 19 nt, Artificial Sequence
  Description of Artificial Sequence: Synthetic oligonucleotide
ugaccuggaugagaaguga

SEQ ID NO: 628609 - RNA, 19 nt, Artificial Sequence
  Description of Artificial Sequence: Synthetic oligonucleotide
cuauacuaccaacauuaaa

SEQ ID NO: 628610 - RNA, 19 nt, Artificial Sequence
  Description of Artificial Sequence: Synthetic oligonucleotide
aucacuaguaacaggcaaa

SEQ ID NO: 628611 - RNA, 19 nt, Artificial Sequence
  Description of Artificial Sequence: Synthetic oligonucleotide
aggaacuggcccauuaaga

SEQ ID NO: 628612 - RNA, 19 nt, Artificial Sequence
  Description of Artificial Sequence: Synthetic oligonucleotide
ucucucgaacuaucuuucu

SEQ ID NO: 628613 - RNA, 19 nt, Artificial Sequence
  Description of Artificial Sequence: Synthetic oligonucleotide
caucauacauacagggcaa

SEQ ID NO: 628614 - RNA, 19 nt, Artificial Sequence
  Description of Artificial Sequence: Synthetic oligonucleotide
aaagaggagcguagcacaa

SEQ ID NO: 628615 - RNA, 19 nt, Artificial Sequence
  Description of Artificial Sequence: Synthetic oligonucleotide
uccaugggugagccaaaac

SEQ ID NO: 628616 - RNA, 19 nt, Artificial Sequence
  Description of Artificial Sequence: Synthetic oligonucleotide
cuaucacuaguaacaggca

SEQ ID NO: 628617 - RNA, 19 nt, Artificial Sequence
  Description of Artificial Sequence: Synthetic oligonucleotide
auguauuaugccaccuucu

SEQ ID NO: 628618 - RNA, 19 nt, Artificial Sequence
  Description of Artificial Sequence: Synthetic oligonucleotide
gucuaacacaaugauaaua

SEQ ID NO: 628619 - RNA, 19 nt, Artificial Sequence
  Description of Artificial Sequence: Synthetic oligonucleotide
uaggacugaugcguucucc

SEQ ID NO: 628620 - RNA, 19 nt, Artificial Sequence
  Description of Artificial Sequence: Synthetic oligonucleotide
uccaugcacacugacugaa

SEQ ID NO: 628621 - RNA, 19 nt, Artificial Sequence
  Description of Artificial Sequence: Synthetic oligonucleotide
augguucgguugucaagag

SEQ ID NO: 628622 - RNA, 19 nt, Artificial Sequence
  Description of Artificial Sequence: Synthetic oligonucleotide
cuauaugccuucuucaguu

SEQ ID NO: 628623 - RNA, 19 nt, Artificial Sequence
  Description of Artificial Sequence: Synthetic oligonucleotide
gaauccugauuugcaugcc

SEQ ID NO: 628624 - RNA, 19 nt, Artificial Sequence
  Description of Artificial Sequence: Synthetic oligonucleotide
uucuccucgucguguaaaa

SEQ ID NO: 628625 - RNA, 19 nt, Artificial Sequence
  Description of Artificial Sequence: Synthetic oligonucleotide
gggcuuaucaugguuugag

SEQ ID NO: 628626 - RNA, 19 nt, Artificial Sequence
  Description of Artificial Sequence: Synthetic oligonucleotide
auaagacgucccuuuucau

SEQ ID NO: 628627 - RNA, 19 nt, Artificial Sequence
  Description of Artificial Sequence: Synthetic oligonucleotide
agcggaaagaggagcguag

SEQ ID NO: 628628 - RNA, 19 nt, Artificial Sequence
  Description of Artificial Sequence: Synthetic oligonucleotide
uccuucaccauggaauguu

SEQ ID NO: 628629 - RNA, 19 nt, Artificial Sequence
  Description of Artificial Sequence: Synthetic oligonucleotide
agcaagccuguaacagacc

SEQ ID NO: 628630 - RNA, 19 nt, Artificial Sequence
  Description of Artificial Sequence: Synthetic oligonucleotide
gaagccgcacaaugcuuca

SEQ ID NO: 628631 - RNA, 19 nt, Artificial Sequence
  Description of Artificial Sequence: Synthetic oligonucleotide
caagaguggauauuggcuu

SEQ ID NO: 628632 - RNA, 19 nt, Artificial Sequence
  Description of Artificial Sequence: Synthetic oligonucleotide
ugaugacuaugguucgguu

SEQ ID NO: 628633 - RNA, 19 nt, Artificial Sequence
  Description of Artificial Sequence: Synthetic oligonucleotide
ggagcguagcacaacgcag

SEQ ID NO: 628634 - RNA, 19 nt, Artificial Sequence
  Description of Artificial Sequence: Synthetic oligonucleotide
gcuauucauaauuugcuau

SEQ ID NO: 628635 - RNA, 19 nt, Artificial Sequence
  Description of Artificial Sequence: Synthetic oligonucleotide
guugcgccauuauacaagu

SEQ ID NO: 628636 - RNA, 19 nt, Artificial Sequence
  Description of Artificial Sequence: Synthetic oligonucleotide
cuucucucgaacuaucuuu

SEQ ID NO: 628637 - RNA, 19 nt, Artificial Sequence
  Description of Artificial Sequence: Synthetic oligonucleotide
caguauauuagaagacagu

SEQ ID NO: 628638 - RNA, 19 nt, Artificial Sequence
  Description of Artificial Sequence: Synthetic oligonucleotide
acgucccuuuucauauggc

SEQ ID NO: 628639 - RNA, 19 nt, Artificial Sequence
  Description of Artificial Sequence: Synthetic oligonucleotide
ggcauaccuucauuuagca

SEQ ID NO: 628640 - RNA, 19 nt, Artificial Sequence
  Description of Artificial Sequence: Synthetic oligonucleotide
ucauauggccgacgauaua

SEQ ID NO: 628641 - RNA, 19 nt, Artificial Sequence
  Description of Artificial Sequence: Synthetic oligonucleotide
acgccgucuuuccugauuu

SEQ ID NO: 628642 - RNA, 19 nt, Artificial Sequence
  Description of Artificial Sequence: Synthetic oligonucleotide
aguuacguugggaccuaag

SEQ ID NO: 628643 - RNA, 19 nt, Artificial Sequence
  Description of Artificial Sequence: Synthetic oligonucleotide
ggagagcggaaagaggagc

SEQ ID NO: 628644 - RNA, 19 nt, Artificial Sequence
  Description of Artificial Sequence: Synthetic oligonucleotide
gaggagcguagcacaacgc

SEQ ID NO: 628645 - RNA, 19 nt, Artificial Sequence
  Description of Artificial Sequence: Synthetic oligonucleotide
gauauccaugggugagcca

SEQ ID NO: 628646 - RNA, 19 nt, Artificial Sequence
  Description of Artificial Sequence: Synthetic oligonucleotide
ucuuaucagggugguacuu

SEQ ID NO: 628647 - RNA, 19 nt, Artificial Sequence
  Description of Artificial Sequence: Synthetic oligonucleotide
cagacgcugcuccuccacc

SEQ ID NO: 628648 - RNA, 19 nt, Artificial Sequence
  Description of Artificial Sequence: Synthetic oligonucleotide
cuggucuaacacaaugaua

SEQ ID NO: 628649 - RNA, 19 nt, Artificial Sequence
  Description of Artificial Sequence: Synthetic oligonucleotide
uggcuuuuggaagccgcac

SEQ ID NO: 628650 - RNA, 19 nt, Artificial Sequence
  Description of Artificial Sequence: Synthetic oligonucleotide
gagaagugaugacuauggu

SEQ ID NO: 628651 - RNA, 19 nt, Artificial Sequence
  Description of Artificial Sequence: Synthetic oligonucleotide
gacuaugguucgguuguca

SEQ ID NO: 628652 - RNA, 19 nt, Artificial Sequence
  Description of Artificial Sequence: Synthetic oligonucleotide
cauuuagcacacauuuuau

SEQ ID NO: 628653 - RNA, 19 nt, Artificial Sequence
  Description of Artificial Sequence: Synthetic oligonucleotide
cauuauaaugacgccgucu

SEQ ID NO: 628654 - RNA, 19 nt, Artificial Sequence
  Description of Artificial Sequence: Synthetic oligonucleotide
gccgucuuuccugauuugg

SEQ ID NO: 628655 - RNA, 19 nt, Artificial Sequence
  Description of Artificial Sequence: Synthetic oligonucleotide
ccggagagcggaaagagga

SEQ ID NO: 628656 - RNA, 19 nt, Artificial Sequence
  Description of Artificial Sequence: Synthetic oligonucleotide
gccgcacaaugcuucaacc

SEQ ID NO: 628657 - RNA, 19 nt, Artificial Sequence
  Description of Artificial Sequence: Synthetic oligonucleotide
caaucugaccuggaugaga

SEQ ID NO: 628658 - RNA, 19 nt, Artificial Sequence
  Description of Artificial Sequence: Synthetic oligonucleotide
cacagcagaagggaaugca

SEQ ID NO: 628659 - RNA, 19 nt, Artificial Sequence
  Description of Artificial Sequence: Synthetic oligonucleotide
cauuaagaggucugacacu

SEQ ID NO: 628660 - RNA, 19 nt, Artificial Sequence
  Description of Artificial Sequence: Synthetic oligonucleotide
gacagacccaacaugugau

SEQ ID NO: 628661 - RNA, 19 nt, Artificial Sequence
  Description of Artificial Sequence: Synthetic oligonucleotide
guagcacaacgcaguuggg

SEQ ID NO: 628662 - RNA, 19 nt, Artificial Sequence
  Description of Artificial Sequence: Synthetic oligonucleotide
ggaugagaagugaugacua

SEQ ID NO: 628663 - RNA, 19 nt, Artificial Sequence
  Description of Artificial Sequence: Synthetic oligonucleotide
gcauaccuucauuuagcac

SEQ ID NO: 628664 - RNA, 19 nt, Artificial Sequence
  Description of Artificial Sequence: Synthetic oligonucleotide
gaccuaagucaaauagcaa

SEQ ID NO: 628665 - RNA, 19 nt, Artificial Sequence
  Description of Artificial Sequence: Synthetic oligonucleotide
cuccgcccucuuuaauggc

SEQ ID NO: 628666 - RNA, 19 nt, Artificial Sequence
  Description of Artificial Sequence: Synthetic oligonucleotide
agccaaguagugaguauau

SEQ ID NO: 628667 - RNA, 19 nt, Artificial Sequence
  Description of Artificial Sequence: Synthetic oligonucleotide
cauaugcuucuccauuaua

SEQ ID NO: 628668 - RNA, 19 nt, Artificial Sequence
  Description of Artificial Sequence: Synthetic oligonucleotide
uugcgccauuauacaaguc

SEQ ID NO: 628669 - RNA, 19 nt, Artificial Sequence
  Description of Artificial Sequence: Synthetic oligonucleotide
ccuucuaguaauggcugag

SEQ ID NO: 628670 - RNA, 19 nt, Artificial Sequence
  Description of Artificial Sequence: Synthetic oligonucleotide
gagcguagcacaacgcagu

SEQ ID NO: 628671 - RNA, 19 nt, Artificial Sequence
  Description of Artificial Sequence: Synthetic oligonucleotide
augcguucuccaugacccu

SEQ ID NO: 628672 - RNA, 19 nt, Artificial Sequence
  Description of Artificial Sequence: Synthetic oligonucleotide
cuuaccaccucggccuuca

SEQ ID NO: 628673 - RNA, 19 nt, Artificial Sequence
  Description of Artificial Sequence: Synthetic oligonucleotide
uccguucucuuugcauccu

SEQ ID NO: 628674 - RNA, 19 nt, Artificial Sequence
  Description of Artificial Sequence: Synthetic oligonucleotide
cuuaagcaguagcuugaua

SEQ ID NO: 628675 - RNA, 19 nt, Artificial Sequence
  Description of Artificial Sequence: Synthetic oligonucleotide
cuacugcauuuagaaugac

SEQ ID NO: 628676 - RNA, 19 nt, Artificial Sequence
  Description of Artificial Sequence: Synthetic oligonucleotide
augcaaucuagaagagcaa

SEQ ID NO: 628677 - RNA, 19 nt, Artificial Sequence
  Description of Artificial Sequence: Synthetic oligonucleotide
agggcuuaucaugguuuga

SEQ ID NO: 628678 - RNA, 19 nt, Artificial Sequence
  Description of Artificial Sequence: Synthetic oligonucleotide
ugacuaugguucgguuguc

SEQ ID NO: 628679 - RNA, 19 nt, Artificial Sequence
  Description of Artificial Sequence: Synthetic oligonucleotide
gagcggaaagaggagcgua

SEQ ID NO: 628680 - RNA, 19 nt, Artificial Sequence
  Description of Artificial Sequence: Synthetic oligonucleotide
caagccuguaacagaccua

SEQ ID NO: 628681 - RNA, 19 nt, Artificial Sequence
  Description of Artificial Sequence: Synthetic oligonucleotide
auauggccgacgauauauu

SEQ ID NO: 628682 - RNA, 19 nt, Artificial Sequence
  Description of Artificial Sequence: Synthetic oligonucleotide
cagacccaacaugugauua

SEQ ID NO: 628683 - RNA, 19 nt, Artificial Sequence
  Description of Artificial Sequence: Synthetic oligonucleotide
aagccgcacaaugcuucaa

SEQ ID NO: 628684 - RNA, 19 nt, Artificial Sequence
  Description of Artificial Sequence: Synthetic oligonucleotide
gguugucaagaguggauau

SEQ ID NO: 628685 - RNA, 19 nt, Artificial Sequence
  Description of Artificial Sequence: Synthetic oligonucleotide
gccggagagcggaaagagg

SEQ ID NO: 628686 - RNA, 19 nt, Artificial Sequence
  Description of Artificial Sequence: Synthetic oligonucleotide
gcggaaagaggagcguagc

SEQ ID NO: 628687 - RNA, 19 nt, Artificial Sequence
  Description of Artificial Sequence: Synthetic oligonucleotide
ccauugcaacuuuuacauc

SEQ ID NO: 628688 - RNA, 19 nt, Artificial Sequence
  Description of Artificial Sequence: Synthetic oligonucleotide
gucaaauagcaagccugua

SEQ ID NO: 628689 - RNA, 19 nt, Artificial Sequence
  Description of Artificial Sequence: Synthetic oligonucleotide
ucuuaccaccucggccuuc

SEQ ID NO: 628690 - RNA, 19 nt, Artificial Sequence
  Description of Artificial Sequence: Synthetic oligonucleotide
gccgacgauauauuggcau

SEQ ID NO: 628691 - RNA, 19 nt, Artificial Sequence
  Description of Artificial Sequence: Synthetic oligonucleotide
cgacgauauauuggcauac

SEQ ID NO: 628692 - RNA, 19 nt, Artificial Sequence
  Description of Artificial Sequence: Synthetic oligonucleotide
gaaccauuccugguccgau

SEQ ID NO: 628693 - RNA, 19 nt, Artificial Sequence
  Description of Artificial Sequence: Synthetic oligonucleotide
cucuccguucucuuugcau

SEQ ID NO: 628694 - RNA, 19 nt, Artificial Sequence
  Description of Artificial Sequence: Synthetic oligonucleotide
ccauuauaaugacgccguc

SEQ ID NO: 628695 - RNA, 19 nt, Artificial Sequence
  Description of Artificial Sequence: Synthetic oligonucleotide
cuagaagagcaagcccuua

SEQ ID NO: 628696 - RNA, 19 nt, Artificial Sequence
  Description of Artificial Sequence: Synthetic oligonucleotide
gaccuggaugagaagugau

SEQ ID NO: 628697 - RNA, 19 nt, Artificial Sequence
  Description of Artificial Sequence: Synthetic oligonucleotide
acccaacaugugauuacua

SEQ ID NO: 628698 - RNA, 19 nt, Artificial Sequence
  Description of Artificial Sequence: Synthetic oligonucleotide
guccgaucugaugaauccu

SEQ ID NO: 628699 - RNA, 19 nt, Artificial Sequence
  Description of Artificial Sequence: Synthetic oligonucleotide
gcuauacuaccaacauuaa

SEQ ID NO: 628700 - RNA, 19 nt, Artificial Sequence
  Description of Artificial Sequence: Synthetic oligonucleotide
gacgccgucuuuccugauu

SEQ ID NO: 628701 - RNA, 19 nt, Artificial Sequence
  Description of Artificial Sequence: Synthetic oligonucleotide
caacgcaguuggggcagac

SEQ ID NO: 628702 - RNA, 19 nt, Artificial Sequence
  Description of Artificial Sequence: Synthetic oligonucleotide
caaugauaagacgucccuu

SEQ ID NO: 628703 - RNA, 19 nt, Artificial Sequence
  Description of Artificial Sequence: Synthetic oligonucleotide
gcccauuaagaggucugac

SEQ ID NO: 628704 - RNA, 19 nt, Artificial Sequence
  Description of Artificial Sequence: Synthetic oligonucleotide
ggcccauuaagaggucuga

SEQ ID NO: 628705 - RNA, 19 nt, Artificial Sequence
  Description of Artificial Sequence: Synthetic oligonucleotide
ccgaucugaugaauccuga

SEQ ID NO: 628706 - RNA, 19 nt, Artificial Sequence
  Description of Artificial Sequence: Synthetic oligonucleotide
gcaugugaacaugugacuu

SEQ ID NO: 628707 - RNA, 19 nt, Artificial Sequence
  Description of Artificial Sequence: Synthetic oligonucleotide
agcaagcccuuaagcagua

SEQ ID NO: 628708 - RNA, 19 nt, Artificial Sequence
  Description of Artificial Sequence: Synthetic oligonucleotide
cgaacuaucuuucuuccau

SEQ ID NO: 628709 - RNA, 19 nt, Artificial Sequence
  Description of Artificial Sequence: Synthetic oligonucleotide
ggucuaacacaaugauaau

SEQ ID NO: 628710 - RNA, 19 nt, Artificial Sequence
  Description of Artificial Sequence: Synthetic oligonucleotide
ccgacgauauauuggcaua

SEQ ID NO: 628711 - RNA, 19 nt, Artificial Sequence
  Description of Artificial Sequence: Synthetic oligonucleotide
gcguagcacaacgcaguug

SEQ ID NO: 628712 - RNA, 19 nt, Artificial Sequence
  Description of Artificial Sequence: Synthetic oligonucleotide
cagagcuaauuuucuuguu

SEQ ID NO: 628713 - RNA, 19 nt, Artificial Sequence
  Description of Artificial Sequence: Synthetic oligonucleotide
caaagaggaacuggcccau

SEQ ID NO: 628714 - RNA, 19 nt, Artificial Sequence
  Description of Artificial Sequence: Synthetic oligonucleotide
gcaauacauugcagaggca

SEQ ID NO: 628715 - RNA, 19 nt, Artificial Sequence
  Description of Artificial Sequence: Synthetic oligonucleotide
caggagagagaaagccauu

SEQ ID NO: 628716 - RNA, 19 nt, Artificial Sequence
  Description of Artificial Sequence: Synthetic oligonucleotide
agggcaagucagagcuuuu

SEQ ID NO: 628717 - RNA, 19 nt, Artificial Sequence
  Description of Artificial Sequence: Synthetic oligonucleotide
cacuaguaacaggcaaaau

SEQ ID NO: 628718 - RNA, 19 nt, Artificial Sequence
  Description of Artificial Sequence: Synthetic oligonucleotide
ggccgacgauauauuggca

SEQ ID NO: 628719 - RNA, 19 nt, Artificial Sequence
  Description of Artificial Sequence: Synthetic oligonucleotide
gcauuacaauuaguccacu

SEQ ID NO: 628720 - RNA, 19 nt, Artificial Sequence
  Description of Artificial Sequence: Synthetic oligonucleotide
caguuacguugggaccuaa

SEQ ID NO: 628721 - RNA, 19 nt, Artificial Sequence
  Description of Artificial Sequence: Synthetic oligonucleotide
gcaguuacguugggaccua

SEQ ID NO: 628722 - RNA, 19 nt, Artificial Sequence
  Description of Artificial Sequence: Synthetic oligonucleotide
cugguccgaucugaugaau

SEQ ID NO: 628723 - RNA, 19 nt, Artificial Sequence
  Description of Artificial Sequence: Synthetic oligonucleotide
cgccgucuuuccugauuug

SEQ ID NO: 628724 - RNA, 19 nt, Artificial Sequence
  Description of Artificial Sequence: Synthetic oligonucleotide
ccccgacaguugggacagc

SEQ ID NO: 628725 - RNA, 19 nt, Artificial Sequence
  Description of Artificial Sequence: Synthetic oligonucleotide
ccggugccggagagcggaa

SEQ ID NO: 628726 - RNA, 19 nt, Artificial Sequence
  Description of Artificial Sequence: Synthetic oligonucleotide
gacauaguaauauugagag

SEQ ID NO: 628727 - RNA, 19 nt, Artificial Sequence
  Description of Artificial Sequence: Synthetic oligonucleotide
aagguuuaccaccuuagac

SEQ ID NO: 628728 - RNA, 19 nt, Artificial Sequence
  Description of Artificial Sequence: Synthetic oligonucleotide
aauagagcaauccauugca

SEQ ID NO: 628729 - RNA, 19 nt, Artificial Sequence
  Description of Artificial Sequence: Synthetic oligonucleotide
caaacuuugugauaggcgg

SEQ ID NO: 628730 - RNA, 19 nt, Artificial Sequence
  Description of Artificial Sequence: Synthetic oligonucleotide
ugaguaaucgcucacuacc

SEQ ID NO: 628731 - RNA, 19 nt, Artificial Sequence
  Description of Artificial Sequence: Synthetic oligonucleotide
aaugucaugucauuuauuu

SEQ ID NO: 628732 - RNA, 19 nt, Artificial Sequence
  Description of Artificial Sequence: Synthetic oligonucleotide
uuagagaagcacuaugucc

SEQ ID NO: 628733 - RNA, 19 nt, Artificial Sequence
  Description of Artificial Sequence: Synthetic oligonucleotide
ucaaauauccauauccuaa

SEQ ID NO: 628734 - RNA, 19 nt, Artificial Sequence
  Description of Artificial Sequence: Synthetic oligonucleotide
aauaucugaucuugguuag

SEQ ID NO: 628735 - RNA, 19 nt, Artificial Sequence
  Description of Artificial Sequence: Synthetic oligonucleotide
agauagcuuaccuuggugg

SEQ ID NO: 628736 - RNA, 19 nt, Artificial Sequence
  Description of Artificial Sequence: Synthetic oligonucleotide
aauuugaguaaucgcucac

SEQ ID NO: 628737 - RNA, 19 nt, Artificial Sequence
  Description of Artificial Sequence: Synthetic oligonucleotide
agacauaagaccaauggac

SEQ ID NO: 628738 - RNA, 19 nt, Artificial Sequence
  Description of Artificial Sequence: Synthetic oligonucleotide
uccaauauggccacacggg

SEQ ID NO: 628739 - RNA, 19 nt, Artificial Sequence
  Description of Artificial Sequence: Synthetic oligonucleotide
aaguccuuuacguuuaacu

SEQ ID NO: 628740 - RNA, 19 nt, Artificial Sequence
  Description of Artificial Sequence: Synthetic oligonucleotide
ugaagagugacuguaagug

SEQ ID NO: 628741 - RNA, 19 nt, Artificial Sequence
  Description of Artificial Sequence: Synthetic oligonucleotide
aguuucuauaucuaggaca

SEQ ID NO: 628742 - RNA, 19 nt, Artificial Sequence
  Description of Artificial Sequence: Synthetic oligonucleotide
uguccauaauaucugaucu

SEQ ID NO: 628743 - RNA, 19 nt, Artificial Sequence
  Description of Artificial Sequence: Synthetic oligonucleotide
agcaagauagcuuaccuug

SEQ ID NO: 628744 - RNA, 19 nt, Artificial Sequence
  Description of Artificial Sequence: Synthetic oligonucleotide
aggaaguuauaucuacugc

SEQ ID NO: 628745 - RNA, 19 nt, Artificial Sequence
  Description of Artificial Sequence: Synthetic oligonucleotide
agcagcaucauauuuggag

SEQ ID NO: 628746 - RNA, 19 nt, Artificial Sequence
  Description of Artificial Sequence: Synthetic oligonucleotide
aaccugaccagacauaaga

SEQ ID NO: 628747 - RNA, 19 nt, Artificial Sequence
  Description of Artificial Sequence: Synthetic oligonucleotide
uauuuggagaugaaucaag

SEQ ID NO: 628748 - RNA, 19 nt, Artificial Sequence
  Description of Artificial Sequence: Synthetic oligonucleotide
uuuacguuuaacuaucuuu

SEQ ID NO: 628749 - RNA, 19 nt, Artificial Sequence
  Description of Artificial Sequence: Synthetic oligonucleotide
uguagaaaaugacuguaga

SEQ ID NO: 628750 - RNA, 19 nt, Artificial Sequence
  Description of Artificial Sequence: Synthetic oligonucleotide
uaauagagcaauccauugc

SEQ ID NO: 628751 - RNA, 19 nt, Artificial Sequence
  Description of Artificial Sequence: Synthetic oligonucleotide
ucugaucuugguuagagaa

SEQ ID NO: 628752 - RNA, 19 nt, Artificial Sequence
  Description of Artificial Sequence: Synthetic oligonucleotide
uccagcgugacucugggag

SEQ ID NO: 628753 - RNA, 19 nt, Artificial Sequence
  Description of Artificial Sequence: Synthetic oligonucleotide
cacuuaucaaccaacggcc

SEQ ID NO: 628754 - RNA, 19 nt, Artificial Sequence
  Description of Artificial Sequence: Synthetic oligonucleotide
guaaauuccaagguggucc

SEQ ID NO: 628755 - RNA, 19 nt, Artificial Sequence
  Description of Artificial Sequence: Synthetic oligonucleotide
aguccuaauagagcaaucc

SEQ ID NO: 628756 - RNA, 19 nt, Artificial Sequence
  Description of Artificial Sequence: Synthetic oligonucleotide
agugaguccagucuucuuc

SEQ ID NO: 628757 - RNA, 19 nt, Artificial Sequence
  Description of Artificial Sequence: Synthetic oligonucleotide
aacuuaauguugugaauga

SEQ ID NO: 628758 - RNA, 19 nt, Artificial Sequence
  Description of Artificial Sequence: Synthetic oligonucleotide
gaacuguagaaaaugacug

SEQ ID NO: 628759 - RNA, 19 nt, Artificial Sequence
  Description of Artificial Sequence: Synthetic oligonucleotide
aauauucgaccacagguaa

SEQ ID NO: 628760 - RNA, 19 nt, Artificial Sequence
  Description of Artificial Sequence: Synthetic oligonucleotide
aaacaaggcaagguaugcc

SEQ ID NO: 628761 - RNA, 19 nt, Artificial Sequence
  Description of Artificial Sequence: Synthetic oligonucleotide
aguuagcugguuuaauccg

SEQ ID NO: 628762 - RNA, 19 nt, Artificial Sequence
  Description of Artificial Sequence: Synthetic oligonucleotide
uucuauaucuaggacagug

SEQ ID NO: 628763 - RNA, 19 nt, Artificial Sequence
  Description of Artificial Sequence: Synthetic oligonucleotide
uuacguuuaacuaucuuuu

SEQ ID NO: 628764 - RNA, 19 nt, Artificial Sequence
  Description of Artificial Sequence: Synthetic oligonucleotide
gguaauuccagguugagca

SEQ ID NO: 628765 - RNA, 19 nt, Artificial Sequence
  Description of Artificial Sequence: Synthetic oligonucleotide
aaucuggaggaaguggucg

SEQ ID NO: 628766 - RNA, 19 nt, Artificial Sequence
  Description of Artificial Sequence: Synthetic oligonucleotide
uacucuaucauuucaucac

SEQ ID NO: 628767 - RNA, 19 nt, Artificial Sequence
  Description of Artificial Sequence: Synthetic oligonucleotide
uauuaauccaugccccaag

SEQ ID NO: 628768 - RNA, 19 nt, Artificial Sequence
  Description of Artificial Sequence: Synthetic oligonucleotide
acuuccucgauguauacca

SEQ ID NO: 628769 - RNA, 19 nt, Artificial Sequence
  Description of Artificial Sequence: Synthetic oligonucleotide
cucgauguauaccagacug

SEQ ID NO: 628770 - RNA, 19 nt, Artificial Sequence
  Description of Artificial Sequence: Synthetic oligonucleotide
acugauuauucagcaaucc

SEQ ID NO: 628771 - RNA, 19 nt, Artificial Sequence
  Description of Artificial Sequence: Synthetic oligonucleotide
uggagaugaaucaaggcuc

SEQ ID NO: 628772 - RNA, 19 nt, Artificial Sequence
  Description of Artificial Sequence: Synthetic oligonucleotide
cauugcagcacuuaucaac

SEQ ID NO: 628773 - RNA, 19 nt, Artificial Sequence
  Description of Artificial Sequence: Synthetic oligonucleotide
agcaaaccuggguacaagc

SEQ ID NO: 628774 - RNA, 19 nt, Artificial Sequence
  Description of Artificial Sequence: Synthetic oligonucleotide
uagagggaaauauucgacc

SEQ ID NO: 628775 - RNA, 19 nt, Artificial Sequence
  Description of Artificial Sequence: Synthetic oligonucleotide
aauccguccaccgcaacac

SEQ ID NO: 628776 - RNA, 19 nt, Artificial Sequence
  Description of Artificial Sequence: Synthetic oligonucleotide
uacaacagagcacuuuuga

SEQ ID NO: 628777 - RNA, 19 nt, Artificial Sequence
  Description of Artificial Sequence: Synthetic oligonucleotide
uuuuacugacccaccauca

SEQ ID NO: 628778 - RNA, 19 nt, Artificial Sequence
  Description of Artificial Sequence: Synthetic oligonucleotide
ugacaugguguucugaagu

SEQ ID NO: 628779 - RNA, 19 nt, Artificial Sequence
  Description of Artificial Sequence: Synthetic oligonucleotide
uacugacccaccaucauca

SEQ ID NO: 628780 - RNA, 19 nt, Artificial Sequence
  Description of Artificial Sequence: Synthetic oligonucleotide
ucuauaucuaggacaguga

SEQ ID NO: 628781 - RNA, 19 nt, Artificial Sequence
  Description of Artificial Sequence: Synthetic oligonucleotide
ugacggaacuucauuaaug

SEQ ID NO: 628782 - RNA, 19 nt, Artificial Sequence
  Description of Artificial Sequence: Synthetic oligonucleotide
auauccuaagagcauuguc

SEQ ID NO: 628783 - RNA, 19 nt, Artificial Sequence
  Description of Artificial Sequence: Synthetic oligonucleotide
gauagcuuaccuugguggc

SEQ ID NO: 628784 - RNA, 19 nt, Artificial Sequence
  Description of Artificial Sequence: Synthetic oligonucleotide
caguuagcugguuuaaucc

SEQ ID NO: 628785 - RNA, 19 nt, Artificial Sequence
  Description of Artificial Sequence: Synthetic oligonucleotide
aaguuauaucuacugcugu

SEQ ID NO: 628786 - RNA, 19 nt, Artificial Sequence
  Description of Artificial Sequence: Synthetic oligonucleotide
uguagggccaucaaauauc

SEQ ID NO: 628787 - RNA, 19 nt, Artificial Sequence
  Description of Artificial Sequence: Synthetic oligonucleotide
aagauagcuuaccuuggug

SEQ ID NO: 628788 - RNA, 19 nt, Artificial Sequence
  Description of Artificial Sequence: Synthetic oligonucleotide
cuaauagagcaauccauug

SEQ ID NO: 628789 - RNA, 19 nt, Artificial Sequence
  Description of Artificial Sequence: Synthetic oligonucleotide
aguaauauugagaggagcu

SEQ ID NO: 628790 - RNA, 19 nt, Artificial Sequence
  Description of Artificial Sequence: Synthetic oligonucleotide
agcgccauuuguaacaagc

SEQ ID NO: 628791 - RNA, 19 nt, Artificial Sequence
  Description of Artificial Sequence: Synthetic oligonucleotide
aagcaccuauuguagaucu

SEQ ID NO: 628792 - RNA, 19 nt, Artificial Sequence
  Description of Artificial Sequence: Synthetic oligonucleotide
uucuguucaacaucauccc

SEQ ID NO: 628793 - RNA, 19 nt, Artificial Sequence
  Description of Artificial Sequence: Synthetic oligonucleotide
ugcuagaaagucuccagug

SEQ ID NO: 628794 - RNA, 19 nt, Artificial Sequence
  Description of Artificial Sequence: Synthetic oligonucleotide
acuguaagugaguccaguc

SEQ ID NO: 628795 - RNA, 19 nt, Artificial Sequence
  Description of Artificial Sequence: Synthetic oligonucleotide
accgcaacaccucuaacag

SEQ ID NO: 628796 - RNA, 19 nt, Artificial Sequence
  Description of Artificial Sequence: Synthetic oligonucleotide
agagggaaauauucgacca

SEQ ID NO: 628797 - RNA, 19 nt, Artificial Sequence
  Description of Artificial Sequence: Synthetic oligonucleotide
ucuacaguuccugaggaga

SEQ ID NO: 628798 - RNA, 19 nt, Artificial Sequence
  Description of Artificial Sequence: Synthetic oligonucleotide
auacucuaucauuucauca

SEQ ID NO: 628799 - RNA, 19 nt, Artificial Sequence
  Description of Artificial Sequence: Synthetic oligonucleotide
uugagguguaacuucaaaa

SEQ ID NO: 628800 - RNA, 19 nt, Artificial Sequence
  Description of Artificial Sequence: Synthetic oligonucleotide
guccaauauggccacacgg

SEQ ID NO: 628801 - RNA, 19 nt, Artificial Sequence
  Description of Artificial Sequence: Synthetic oligonucleotide
aacuuccucgauguauacc

SEQ ID NO: 628802 - RNA, 19 nt, Artificial Sequence
  Description of Artificial Sequence: Synthetic oligonucleotide
acauaguaauauugagagg

SEQ ID NO: 628803 - RNA, 19 nt, Artificial Sequence
  Description of Artificial Sequence: Synthetic oligonucleotide
auagagggaaauauucgac

SEQ ID NO: 628804 - RNA, 19 nt, Artificial Sequence
  Description of Artificial Sequence: Synthetic oligonucleotide
aagccuuacugacauggug

SEQ ID NO: 628805 - RNA, 19 nt, Artificial Sequence
  Description of Artificial Sequence: Synthetic oligonucleotide
ugaggagaggccaauuacu

SEQ ID NO: 628806 - RNA, 19 nt, Artificial Sequence
  Description of Artificial Sequence: Synthetic oligonucleotide
agcacuuaucaaccaacgg

SEQ ID NO: 628807 - RNA, 19 nt, Artificial Sequence
  Description of Artificial Sequence: Synthetic oligonucleotide
ugacaaucuuccuaguuuc

SEQ ID NO: 628808 - RNA, 19 nt, Artificial Sequence
  Description of Artificial Sequence: Synthetic oligonucleotide
ugggcuaacucaaaaucac

SEQ ID NO: 628809 - RNA, 19 nt, Artificial Sequence
  Description of Artificial Sequence: Synthetic oligonucleotide
ugaaugucaugucauuuau

SEQ ID NO: 628810 - RNA, 19 nt, Artificial Sequence
  Description of Artificial Sequence: Synthetic oligonucleotide
uaccaucccaaucacuuug

SEQ ID NO: 628811 - RNA, 19 nt, Artificial Sequence
  Description of Artificial Sequence: Synthetic oligonucleotide
uagagcaauccauugcagc

SEQ ID NO: 628812 - RNA, 19 nt, Artificial Sequence
  Description of Artificial Sequence: Synthetic oligonucleotide
uucucuaugcagaaauguc

SEQ ID NO: 628813 - RNA, 19 nt, Artificial Sequence
  Description of Artificial Sequence: Synthetic oligonucleotide
ugccauuacuggaugacca

SEQ ID NO: 628814 - RNA, 19 nt, Artificial Sequence
  Description of Artificial Sequence: Synthetic oligonucleotide
uccuuuacguuuaacuauc

SEQ ID NO: 628815 - RNA, 19 nt, Artificial Sequence
  Description of Artificial Sequence: Synthetic oligonucleotide
ugguuagagaagcacuaug

SEQ ID NO: 628816 - RNA, 19 nt, Artificial Sequence
  Description of Artificial Sequence: Synthetic oligonucleotide
aucugugcgaaaugaaaug

SEQ ID NO: 628817 - RNA, 19 nt, Artificial Sequence
  Description of Artificial Sequence: Synthetic oligonucleotide
ugaaucucaacagccgucc

SEQ ID NO: 628818 - RNA, 19 nt, Artificial Sequence
  Description of Artificial Sequence: Synthetic oligonucleotide
uuuauuuggccuugguguc

SEQ ID NO: 628819 - RNA, 19 nt, Artificial Sequence
  Description of Artificial Sequence: Synthetic oligonucleotide
ucuaccugugaugacaacu

SEQ ID NO: 628820 - RNA, 19 nt, Artificial Sequence
  Description of Artificial Sequence: Synthetic oligonucleotide
aagcagucgauaaggcacc

SEQ ID NO: 628821 - RNA, 19 nt, Artificial Sequence
  Description of Artificial Sequence: Synthetic oligonucleotide
cucacuaccagcuguaaca

SEQ ID NO: 628822 - RNA, 19 nt, Artificial Sequence
  Description of Artificial Sequence: Synthetic oligonucleotide
aaugucagcccagcuauug

SEQ ID NO: 628823 - RNA, 19 nt, Artificial Sequence
  Description of Artificial Sequence: Synthetic oligonucleotide
gcacuuaucaaccaacggc

SEQ ID NO: 628824 - RNA, 19 nt, Artificial Sequence
  Description of Artificial Sequence: Synthetic oligonucleotide
aaacacacaugcuuugauu

SEQ ID NO: 628825 - RNA, 19 nt, Artificial Sequence
  Description of Artificial Sequence: Synthetic oligonucleotide
uuggguuugacaaguccca

SEQ ID NO: 628826 - RNA, 19 nt, Artificial Sequence
  Description of Artificial Sequence: Synthetic oligonucleotide
gaauuugaguaaucgcuca

SEQ ID NO: 628827 - RNA, 19 nt, Artificial Sequence
  Description of Artificial Sequence: Synthetic oligonucleotide
accaauggacaacaacauc

SEQ ID NO: 628828 - RNA, 19 nt, Artificial Sequence
  Description of Artificial Sequence: Synthetic oligonucleotide
aggacugaaugucauguca

SEQ ID NO: 628829 - RNA, 19 nt, Artificial Sequence
  Description of Artificial Sequence: Synthetic oligonucleotide
aaauauucgaccacaggua

SEQ ID NO: 628830 - RNA, 19 nt, Artificial Sequence
  Description of Artificial Sequence: Synthetic oligonucleotide
acuuaaaaucugcugucca

SEQ ID NO: 628831 - RNA, 19 nt, Artificial Sequence
  Description of Artificial Sequence: Synthetic oligonucleotide
uuucagguagaaauuugau

SEQ ID NO: 628832 - RNA, 19 nt, Artificial Sequence
  Description of Artificial Sequence: Synthetic oligonucleotide
ucgauguauaccagacugc

SEQ ID NO: 628833 - RNA, 19 nt, Artificial Sequence
  Description of Artificial Sequence: Synthetic oligonucleotide
agggccaucaaauauccau

SEQ ID NO: 628834 - RNA, 19 nt, Artificial Sequence
  Description of Artificial Sequence: Synthetic oligonucleotide
aguccuuuacguuuaacua

SEQ ID NO: 628835 - RNA, 19 nt, Artificial Sequence
  Description of Artificial Sequence: Synthetic oligonucleotide
uaguaauauugagaggagc

SEQ ID NO: 628836 - RNA, 19 nt, Artificial Sequence
  Description of Artificial Sequence: Synthetic oligonucleotide
ucuaacaacaccggcucug

SEQ ID NO: 628837 - RNA, 19 nt, Artificial Sequence
  Description of Artificial Sequence: Synthetic oligonucleotide
uaaauuccaagguggucca

SEQ ID NO: 628838 - RNA, 19 nt, Artificial Sequence
  Description of Artificial Sequence: Synthetic oligonucleotide
ccaauuacugcaaaguuuc

SEQ ID NO: 628839 - RNA, 19 nt, Artificial Sequence
  Description of Artificial Sequence: Synthetic oligonucleotide
uguaacaguuagcugguuu

SEQ ID NO: 628840 - RNA, 19 nt, Artificial Sequence
  Description of Artificial Sequence: Synthetic oligonucleotide
uuaauccaugccccaagcu

SEQ ID NO: 628841 - RNA, 19 nt, Artificial Sequence
  Description of Artificial Sequence: Synthetic oligonucleotide
uuacaacagagcacuuuug

SEQ ID NO: 628842 - RNA, 19 nt, Artificial Sequence
  Description of Artificial Sequence: Synthetic oligonucleotide
caucacuuggcucaaucug

SEQ ID NO: 628843 - RNA, 19 nt, Artificial Sequence
  Description of Artificial Sequence: Synthetic oligonucleotide
uauaucuacugcuguugca

SEQ ID NO: 628844 - RNA, 19 nt, Artificial Sequence
  Description of Artificial Sequence: Synthetic oligonucleotide
gacauaagaccaauggaca

SEQ ID NO: 628845 - RNA, 19 nt, Artificial Sequence
  Description of Artificial Sequence: Synthetic oligonucleotide
uaauccguccaccgcaaca

SEQ ID NO: 628846 - RNA, 19 nt, Artificial Sequence
  Description of Artificial Sequence: Synthetic oligonucleotide
uccugaugggccuaauucu

SEQ ID NO: 628847 - RNA, 19 nt, Artificial Sequence
  Description of Artificial Sequence: Synthetic oligonucleotide
uaguuucuauaucuaggac

SEQ ID NO: 628848 - RNA, 19 nt, Artificial Sequence
  Description of Artificial Sequence: Synthetic oligonucleotide
ugguggcaagcaaugauac

SEQ ID NO: 628849 - RNA, 19 nt, Artificial Sequence
  Description of Artificial Sequence: Synthetic oligonucleotide
aguaaucgcucacuaccag

SEQ ID NO: 628850 - RNA, 19 nt, Artificial Sequence
  Description of Artificial Sequence: Synthetic oligonucleotide
gaaguggucguaaggagac

SEQ ID NO: 628851 - RNA, 19 nt, Artificial Sequence
  Description of Artificial Sequence: Synthetic oligonucleotide
uccagaaaacucucugaca

SEQ ID NO: 628852 - RNA, 19 nt, Artificial Sequence
  Description of Artificial Sequence: Synthetic oligonucleotide
uugcuagaaagucuccagu

SEQ ID NO: 628853 - RNA, 19 nt, Artificial Sequence
  Description of Artificial Sequence: Synthetic oligonucleotide
uacugauuauucagcaauc

SEQ ID NO: 628854 - RNA, 19 nt, Artificial Sequence
  Description of Artificial Sequence: Synthetic oligonucleotide
cagcacuuaucaaccaacg

SEQ ID NO: 628855 - RNA, 19 nt, Artificial Sequence
  Description of Artificial Sequence: Synthetic oligonucleotide
guaaucgcucacuaccagc

SEQ ID NO: 628856 - RNA, 19 nt, Artificial Sequence
  Description of Artificial Sequence: Synthetic oligonucleotide
gaggccaauuacugcaaag

SEQ ID NO: 628857 - RNA, 19 nt, Artificial Sequence
  Description of Artificial Sequence: Synthetic oligonucleotide
aaaacggugcugacugggg

SEQ ID NO: 628858 - RNA, 19 nt, Artificial Sequence
  Description of Artificial Sequence: Synthetic oligonucleotide
gaagagugacuguaaguga

SEQ ID NO: 628859 - RNA, 19 nt, Artificial Sequence
  Description of Artificial Sequence: Synthetic oligonucleotide
ugauugaagagugacugua

SEQ ID NO: 628860 - RNA, 19 nt, Artificial Sequence
  Description of Artificial Sequence: Synthetic oligonucleotide
uggguacaagcccaggaac

SEQ ID NO: 628861 - RNA, 19 nt, Artificial Sequence
  Description of Artificial Sequence: Synthetic oligonucleotide
agcaucacuacugaaggga

SEQ ID NO: 628862 - RNA, 19 nt, Artificial Sequence
  Description of Artificial Sequence: Synthetic oligonucleotide
cuacaguuccugaggagag

SEQ ID NO: 628863 - RNA, 19 nt, Artificial Sequence
  Description of Artificial Sequence: Synthetic oligonucleotide
uuacugacccaccaucauc

SEQ ID NO: 628864 - RNA, 19 nt, Artificial Sequence
  Description of Artificial Sequence: Synthetic oligonucleotide
aucaagauucagaagauuu

SEQ ID NO: 628865 - RNA, 19 nt, Artificial Sequence
  Description of Artificial Sequence: Synthetic oligonucleotide
uauucgaccacagguaaau

SEQ ID NO: 628866 - RNA, 19 nt, Artificial Sequence
  Description of Artificial Sequence: Synthetic oligonucleotide
ucauccaaagcaagcccca

SEQ ID NO: 628867 - RNA, 19 nt, Artificial Sequence
  Description of Artificial Sequence: Synthetic oligonucleotide
caacacuucuguaccuugg

SEQ ID NO: 628868 - RNA, 19 nt, Artificial Sequence
  Description of Artificial Sequence: Synthetic oligonucleotide
acauaagaccaauggacaa

SEQ ID NO: 628869 - RNA, 19 nt, Artificial Sequence
  Description of Artificial Sequence: Synthetic oligonucleotide
ugugauaggcggaagccuu

SEQ ID NO: 628870 - RNA, 19 nt, Artificial Sequence
  Description of Artificial Sequence: Synthetic oligonucleotide
aguuauaucuacugcuguu

SEQ ID NO: 628871 - RNA, 19 nt, Artificial Sequence
  Description of Artificial Sequence: Synthetic oligonucleotide
cagucgauaaggcacccag

SEQ ID NO: 628872 - RNA, 19 nt, Artificial Sequence
  Description of Artificial Sequence: Synthetic oligonucleotide
gucguaaggagacaacuga

SEQ ID NO: 628873 - RNA, 19 nt, Artificial Sequence
  Description of Artificial Sequence: Synthetic oligonucleotide
aaacggugcugacuggggu

SEQ ID NO: 628874 - RNA, 19 nt, Artificial Sequence
  Description of Artificial Sequence: Synthetic oligonucleotide
ucccuauguagcagcauca

SEQ ID NO: 628875 - RNA, 19 nt, Artificial Sequence
  Description of Artificial Sequence: Synthetic oligonucleotide
cuauugcuguggaaugugc

SEQ ID NO: 628876 - RNA, 19 nt, Artificial Sequence
  Description of Artificial Sequence: Synthetic oligonucleotide
ucguaaggagacaacugaa

SEQ ID NO: 628877 - RNA, 19 nt, Artificial Sequence
  Description of Artificial Sequence: Synthetic oligonucleotide
uguagaucuuugguaauuc

SEQ ID NO: 628878 - RNA, 19 nt, Artificial Sequence
  Description of Artificial Sequence: Synthetic oligonucleotide
uuuacugacccaccaucau

SEQ ID NO: 628879 - RNA, 19 nt, Artificial Sequence
  Description of Artificial Sequence: Synthetic oligonucleotide
gggacauaguaauauugag

SEQ ID NO: 628880 - RNA, 19 nt, Artificial Sequence
  Description of Artificial Sequence: Synthetic oligonucleotide
uuuaauccguccaccgcaa

SEQ ID NO: 628881 - RNA, 19 nt, Artificial Sequence
  Description of Artificial Sequence: Synthetic oligonucleotide
ucgauaaggcacccagaug

SEQ ID NO: 628882 - RNA, 19 nt, Artificial Sequence
  Description of Artificial Sequence: Synthetic oligonucleotide
cuauuguagaucuuuggua

SEQ ID NO: 628883 - RNA, 19 nt, Artificial Sequence
  Description of Artificial Sequence: Synthetic oligonucleotide
augggccuaauucuuucag

SEQ ID NO: 628884 - RNA, 19 nt, Artificial Sequence
  Description of Artificial Sequence: Synthetic oligonucleotide
guaaggagacaacugaaua

SEQ ID NO: 628885 - RNA, 19 nt, Artificial Sequence
  Description of Artificial Sequence: Synthetic oligonucleotide
gacaugguguucugaaguc

SEQ ID NO: 628886 - RNA, 19 nt, Artificial Sequence
  Description of Artificial Sequence: Synthetic oligonucleotide
auaguaauauugagaggag

SEQ ID NO: 628887 - RNA, 19 nt, Artificial Sequence
  Description of Artificial Sequence: Synthetic oligonucleotide
agucccaggaagcaucacu

SEQ ID NO: 628888 - RNA, 19 nt, Artificial Sequence
  Description of Artificial Sequence: Synthetic oligonucleotide
uguucaacaucaucccgau

SEQ ID NO: 628889 - RNA, 19 nt, Artificial Sequence
  Description of Artificial Sequence: Synthetic oligonucleotide
guaacaguuagcugguuua

SEQ ID NO: 628890 - RNA, 19 nt, Artificial Sequence
  Description of Artificial Sequence: Synthetic oligonucleotide
uugucagcgccauuuguaa

SEQ ID NO: 628891 - RNA, 19 nt, Artificial Sequence
  Description of Artificial Sequence: Synthetic oligonucleotide
auuacuggaugaccaucug

SEQ ID NO: 628892 - RNA, 19 nt, Artificial Sequence
  Description of Artificial Sequence: Synthetic oligonucleotide
gaagcacuaugucccauuc

SEQ ID NO: 628893 - RNA, 19 nt, Artificial Sequence
  Description of Artificial Sequence: Synthetic oligonucleotide
gucauccaaagcaagcccc

SEQ ID NO: 628894 - RNA, 19 nt, Artificial Sequence
  Description of Artificial Sequence: Synthetic oligonucleotide
uuaucaaccaacggccauc

SEQ ID NO: 628895 - RNA, 19 nt, Artificial Sequence
  Description of Artificial Sequence: Synthetic oligonucleotide
uggucguaaggagacaacu

SEQ ID NO: 628896 - RNA, 19 nt, Artificial Sequence
  Description of Artificial Sequence: Synthetic oligonucleotide
aaucgcucacuaccagcug

SEQ ID NO: 628897 - RNA, 19 nt, Artificial Sequence
  Description of Artificial Sequence: Synthetic oligonucleotide
gagggaaauauucgaccac

SEQ ID NO: 628898 - RNA, 19 nt, Artificial Sequence
  Description of Artificial Sequence: Synthetic oligonucleotide
gugcgaaaugaaauggaag

SEQ ID NO: 628899 - RNA, 19 nt, Artificial Sequence
  Description of Artificial Sequence: Synthetic oligonucleotide
uccugacggaacuucauua

SEQ ID NO: 628900 - RNA, 19 nt, Artificial Sequence
  Description of Artificial Sequence: Synthetic oligonucleotide
agaauggauuaaaaccuug

SEQ ID NO: 628901 - RNA, 19 nt, Artificial Sequence
  Description of Artificial Sequence: Synthetic oligonucleotide
agggaaauauucgaccaca

SEQ ID NO: 628902 - RNA, 19 nt, Artificial Sequence
  Description of Artificial Sequence: Synthetic oligonucleotide
augacaaccugaccagaca

SEQ ID NO: 628903 - RNA, 19 nt, Artificial Sequence
  Description of Artificial Sequence: Synthetic oligonucleotide
aucgcucacuaccagcugu

SEQ ID NO: 628904 - RNA, 19 nt, Artificial Sequence
  Description of Artificial Sequence: Synthetic oligonucleotide
gucagcgccauuuguaaca

SEQ ID NO: 628905 - RNA, 19 nt, Artificial Sequence
  Description of Artificial Sequence: Synthetic oligonucleotide
ggaaguuauaucuacugcu

SEQ ID NO: 628906 - RNA, 19 nt, Artificial Sequence
  Description of Artificial Sequence: Synthetic oligonucleotide
cugacaugguguucugaag

SEQ ID NO: 628907 - RNA, 19 nt, Artificial Sequence
  Description of Artificial Sequence: Synthetic oligonucleotide
ggcuaacucaaaaucacgc

SEQ ID NO: 628908 - RNA, 19 nt, Artificial Sequence
  Description of Artificial Sequence: Synthetic oligonucleotide
aaacuuugugauaggcgga

SEQ ID NO: 628909 - RNA, 19 nt, Artificial Sequence
  Description of Artificial Sequence: Synthetic oligonucleotide
accugaccagacauaagac

SEQ ID NO: 628910 - RNA, 19 nt, Artificial Sequence
  Description of Artificial Sequence: Synthetic oligonucleotide
cauaauaucugaucuuggu

SEQ ID NO: 628911 - RNA, 19 nt, Artificial Sequence
  Description of Artificial Sequence: Synthetic oligonucleotide
agcaauccauugcagcacu

SEQ ID NO: 628912 - RNA, 19 nt, Artificial Sequence
  Description of Artificial Sequence: Synthetic oligonucleotide
aauuccagguugagcaaga

SEQ ID NO: 628913 - RNA, 19 nt, Artificial Sequence
  Description of Artificial Sequence: Synthetic oligonucleotide
aaauuccaaggugguccac

SEQ ID NO: 628914 - RNA, 19 nt, Artificial Sequence
  Description of Artificial Sequence: Synthetic oligonucleotide
auuguagaucuuugguaau

SEQ ID NO: 628915 - RNA, 19 nt, Artificial Sequence
  Description of Artificial Sequence: Synthetic oligonucleotide
gguacagcaaaccugggua

SEQ ID NO: 628916 - RNA, 19 nt, Artificial Sequence
  Description of Artificial Sequence: Synthetic oligonucleotide
acaaccugaccagacauaa

SEQ ID NO: 628917 - RNA, 19 nt, Artificial Sequence
  Description of Artificial Sequence: Synthetic oligonucleotide
guaccuuggguuugacaag

SEQ ID NO: 628918 - RNA, 19 nt, Artificial Sequence
  Description of Artificial Sequence: Synthetic oligonucleotide
aggcaagguaugccugggc

SEQ ID NO: 628919 - RNA, 19 nt, Artificial Sequence
  Description of Artificial Sequence: Synthetic oligonucleotide
aggccaauuacugcaaagu

SEQ ID NO: 628920 - RNA, 19 nt, Artificial Sequence
  Description of Artificial Sequence: Synthetic oligonucleotide
cuugguuagagaagcacua

SEQ ID NO: 628921 - RNA, 19 nt, Artificial Sequence
  Description of Artificial Sequence: Synthetic oligonucleotide
uccaccgcaacaccucuaa

SEQ ID NO: 628922 - RNA, 19 nt, Artificial Sequence
  Description of Artificial Sequence: Synthetic oligonucleotide
agccuuacugacauggugu

SEQ ID NO: 628923 - RNA, 19 nt, Artificial Sequence
  Description of Artificial Sequence: Synthetic oligonucleotide
agugauagagucaccaguu

SEQ ID NO: 628924 - RNA, 19 nt, Artificial Sequence
  Description of Artificial Sequence: Synthetic oligonucleotide
gugauagagucaccaguug

SEQ ID NO: 628925 - RNA, 19 nt, Artificial Sequence
  Description of Artificial Sequence: Synthetic oligonucleotide
ugacuguaagugaguccag

SEQ ID NO: 628926 - RNA, 19 nt, Artificial Sequence
  Description of Artificial Sequence: Synthetic oligonucleotide
gucccuauguagcagcauc

SEQ ID NO: 628927 - RNA, 19 nt, Artificial Sequence
  Description of Artificial Sequence: Synthetic oligonucleotide
uugguaauuccagguugag

SEQ ID NO: 628928 - RNA, 19 nt, Artificial Sequence
  Description of Artificial Sequence: Synthetic oligonucleotide
aaggugguccacaugggaa

SEQ ID NO: 628929 - RNA, 19 nt, Artificial Sequence
  Description of Artificial Sequence: Synthetic oligonucleotide
gauagagucaccaguugcu

SEQ ID NO: 628930 - RNA, 19 nt, Artificial Sequence
  Description of Artificial Sequence: Synthetic oligonucleotide
agaguuccaucuugacuug

SEQ ID NO: 628931 - RNA, 19 nt, Artificial Sequence
  Description of Artificial Sequence: Synthetic oligonucleotide
uucaccuguagggccauca

SEQ ID NO: 628932 - RNA, 19 nt, Artificial Sequence
  Description of Artificial Sequence: Synthetic oligonucleotide
ccguccuucaccuguaggg

SEQ ID NO: 628933 - RNA, 19 nt, Artificial Sequence
  Description of Artificial Sequence: Synthetic oligonucleotide
ucuggcgacucauacucua

SEQ ID NO: 628934 - RNA, 19 nt, Artificial Sequence
  Description of Artificial Sequence: Synthetic oligonucleotide
uucuaacaacaccggcucu

SEQ ID NO: 628935 - RNA, 19 nt, Artificial Sequence
  Description of Artificial Sequence: Synthetic oligonucleotide
caccgcaacaccucuaaca

SEQ ID NO: 628936 - RNA, 19 nt, Artificial Sequence
  Description of Artificial Sequence: Synthetic oligonucleotide
guaugccugggcuaacuca

SEQ ID NO: 628937 - RNA, 19 nt, Artificial Sequence
  Description of Artificial Sequence: Synthetic oligonucleotide
auguagcagcaucauauuu

SEQ ID NO: 628938 - RNA, 19 nt, Artificial Sequence
  Description of Artificial Sequence: Synthetic oligonucleotide
gguuucgcagcucuguuuc

SEQ ID NO: 628939 - RNA, 19 nt, Artificial Sequence
  Description of Artificial Sequence: Synthetic oligonucleotide
auagagcaauccauugcag

SEQ ID NO: 628940 - RNA, 19 nt, Artificial Sequence
  Description of Artificial Sequence: Synthetic oligonucleotide
ugacgagcuuccucagcag

SEQ ID NO: 628941 - RNA, 19 nt, Artificial Sequence
  Description of Artificial Sequence: Synthetic oligonucleotide
auccauugcagcacuuauc

SEQ ID NO: 628942 - RNA, 19 nt, Artificial Sequence
  Description of Artificial Sequence: Synthetic oligonucleotide
ggacauaguaauauugaga

SEQ ID NO: 628943 - RNA, 19 nt, Artificial Sequence
  Description of Artificial Sequence: Synthetic oligonucleotide
uaucuacugcuguugcaau

SEQ ID NO: 628944 - RNA, 19 nt, Artificial Sequence
  Description of Artificial Sequence: Synthetic oligonucleotide
gaguaaucgcucacuacca

SEQ ID NO: 628945 - RNA, 19 nt, Artificial Sequence
  Description of Artificial Sequence: Synthetic oligonucleotide
ugucagcgccauuuguaac

SEQ ID NO: 628946 - RNA, 19 nt, Artificial Sequence
  Description of Artificial Sequence: Synthetic oligonucleotide
uaacaguuagcugguuuaa

SEQ ID NO: 628947 - RNA, 19 nt, Artificial Sequence
  Description of Artificial Sequence: Synthetic oligonucleotide
uuguagaucuuugguaauu

SEQ ID NO: 628948 - RNA, 19 nt, Artificial Sequence
  Description of Artificial Sequence: Synthetic oligonucleotide
cuuccucgauguauaccag

SEQ ID NO: 628949 - RNA, 19 nt, Artificial Sequence
  Description of Artificial Sequence: Synthetic oligonucleotide
ccaauauggccacacgggc

SEQ ID NO: 628950 - RNA, 19 nt, Artificial Sequence
  Description of Artificial Sequence: Synthetic oligonucleotide
accucuaacagaaccugca

SEQ ID NO: 628951 - RNA, 19 nt, Artificial Sequence
  Description of Artificial Sequence: Synthetic oligonucleotide
uacaagcccaggaaccguu

SEQ ID NO: 628952 - RNA, 19 nt, Artificial Sequence
  Description of Artificial Sequence: Synthetic oligonucleotide
aucacgcuuucuguucaac

SEQ ID NO: 628953 - RNA, 19 nt, Artificial Sequence
  Description of Artificial Sequence: Synthetic oligonucleotide
uggguuugacaagucccag

SEQ ID NO: 628954 - RNA, 19 nt, Artificial Sequence
  Description of Artificial Sequence: Synthetic oligonucleotide
uaagaccaauggacaacaa

SEQ ID NO: 628955 - RNA, 19 nt, Artificial Sequence
  Description of Artificial Sequence: Synthetic oligonucleotide
gagcaauccauugcagcac

SEQ ID NO: 628956 - RNA, 19 nt, Artificial Sequence
  Description of Artificial Sequence: Synthetic oligonucleotide
cacuaugucccauucugaa

SEQ ID NO: 628957 - RNA, 19 nt, Artificial Sequence
  Description of Artificial Sequence: Synthetic oligonucleotide
acagguuucgcagcucugu

SEQ ID NO: 628958 - RNA, 19 nt, Artificial Sequence
  Description of Artificial Sequence: Synthetic oligonucleotide
cugugcgaaaugaaaugga

SEQ ID NO: 628959 - RNA, 19 nt, Artificial Sequence
  Description of Artificial Sequence: Synthetic oligonucleotide
uuaauccguccaccgcaac

SEQ ID NO: 628960 - RNA, 19 nt, Artificial Sequence
  Description of Artificial Sequence: Synthetic oligonucleotide
acaggaaguuauaucuacu

SEQ ID NO: 628961 - RNA, 19 nt, Artificial Sequence
  Description of Artificial Sequence: Synthetic oligonucleotide
uggcgacucauacucuauc

SEQ ID NO: 628962 - RNA, 19 nt, Artificial Sequence
  Description of Artificial Sequence: Synthetic oligonucleotide
auugucagcgccauuugua

SEQ ID NO: 628963 - RNA, 19 nt, Artificial Sequence
  Description of Artificial Sequence: Synthetic oligonucleotide
auagcuuaccuugguggca

SEQ ID NO: 628964 - RNA, 19 nt, Artificial Sequence
  Description of Artificial Sequence: Synthetic oligonucleotide
auguugugaaugacaaccu

SEQ ID NO: 628965 - RNA, 19 nt, Artificial Sequence
  Description of Artificial Sequence: Synthetic oligonucleotide
aaagcccugcaugacuuuu

SEQ ID NO: 628966 - RNA, 19 nt, Artificial Sequence
  Description of Artificial Sequence: Synthetic oligonucleotide
gacucauacucuaucauuu

SEQ ID NO: 628967 - RNA, 19 nt, Artificial Sequence
  Description of Artificial Sequence: Synthetic oligonucleotide
gcaagauagcuuaccuugg

SEQ ID NO: 628968 - RNA, 19 nt, Artificial Sequence
  Description of Artificial Sequence: Synthetic oligonucleotide
uagcuuaccuugguggcaa

SEQ ID NO: 628969 - RNA, 19 nt, Artificial Sequence
  Description of Artificial Sequence: Synthetic oligonucleotide
auauugagaggagcugagu

SEQ ID NO: 628970 - RNA, 19 nt, Artificial Sequence
  Description of Artificial Sequence: Synthetic oligonucleotide
aagguaugccugggcuaac

SEQ ID NO: 628971 - RNA, 19 nt, Artificial Sequence
  Description of Artificial Sequence: Synthetic oligonucleotide
cacuuugacgagcuuccuc

SEQ ID NO: 628972 - RNA, 19 nt, Artificial Sequence
  Description of Artificial Sequence: Synthetic oligonucleotide
agguaaauuccaagguggu

SEQ ID NO: 628973 - RNA, 19 nt, Artificial Sequence
  Description of Artificial Sequence: Synthetic oligonucleotide
caaccugaccagacauaag

SEQ ID NO: 628974 - RNA, 19 nt, Artificial Sequence
  Description of Artificial Sequence: Synthetic oligonucleotide
gucgauaaggcacccagau

SEQ ID NO: 628975 - RNA, 19 nt, Artificial Sequence
  Description of Artificial Sequence: Synthetic oligonucleotide
caagguuuaccaccuuaga

SEQ ID NO: 628976 - RNA, 19 nt, Artificial Sequence
  Description of Artificial Sequence: Synthetic oligonucleotide
agaagguuaagagcagcuu

SEQ ID NO: 628977 - RNA, 19 nt, Artificial Sequence
  Description of Artificial Sequence: Synthetic oligonucleotide
gauaaggcacccagaugga

SEQ ID NO: 628978 - RNA, 19 nt, Artificial Sequence
  Description of Artificial Sequence: Synthetic oligonucleotide
ugauaggcggaagccuuac

SEQ ID NO: 628979 - RNA, 19 nt, Artificial Sequence
  Description of Artificial Sequence: Synthetic oligonucleotide
uaucuaggacagugaugga

SEQ ID NO: 628980 - RNA, 19 nt, Artificial Sequence
  Description of Artificial Sequence: Synthetic oligonucleotide
auaccaucccaaucacuuu

SEQ ID NO: 628981 - RNA, 19 nt, Artificial Sequence
  Description of Artificial Sequence: Synthetic oligonucleotide
agacaacugaauagaggga

SEQ ID NO: 628982 - RNA, 19 nt, Artificial Sequence
  Description of Artificial Sequence: Synthetic oligonucleotide
acuuaucaaccaacggcca

SEQ ID NO: 628983 - RNA, 19 nt, Artificial Sequence
  Description of Artificial Sequence: Synthetic oligonucleotide
gagcacuuuugauauaauu

SEQ ID NO: 628984 - RNA, 19 nt, Artificial Sequence
  Description of Artificial Sequence: Synthetic oligonucleotide
uccccaguccugacggaac

SEQ ID NO: 628985 - RNA, 19 nt, Artificial Sequence
  Description of Artificial Sequence: Synthetic oligonucleotide
uucuggcgacucauacucu

SEQ ID NO: 628986 - RNA, 19 nt, Artificial Sequence
  Description of Artificial Sequence: Synthetic oligonucleotide
acuuugugauaggcggaag

SEQ ID NO: 628987 - RNA, 19 nt, Artificial Sequence
  Description of Artificial Sequence: Synthetic oligonucleotide
acggaacuucauuaauguu

SEQ ID NO: 628988 - RNA, 19 nt, Artificial Sequence
  Description of Artificial Sequence: Synthetic oligonucleotide
gaaguccuuuacguuuaac

SEQ ID NO: 628989 - RNA, 19 nt, Artificial Sequence
  Description of Artificial Sequence: Synthetic oligonucleotide
ggucguaaggagacaacug

SEQ ID NO: 628990 - RNA, 19 nt, Artificial Sequence
  Description of Artificial Sequence: Synthetic oligonucleotide
cuguaagugaguccagucu

SEQ ID NO: 628991 - RNA, 19 nt, Artificial Sequence
  Description of Artificial Sequence: Synthetic oligonucleotide
gguggcaagcaaugauacc

SEQ ID NO: 628992 - RNA, 19 nt, Artificial Sequence
  Description of Artificial Sequence: Synthetic oligonucleotide
agcugccauuacuggauga

SEQ ID NO: 628993 - RNA, 19 nt, Artificial Sequence
  Description of Artificial Sequence: Synthetic oligonucleotide
cagcuguaacaguuagcug

SEQ ID NO: 628994 - RNA, 19 nt, Artificial Sequence
  Description of Artificial Sequence: Synthetic oligonucleotide
ggcgacucauacucuauca

SEQ ID NO: 628995 - RNA, 19 nt, Artificial Sequence
  Description of Artificial Sequence: Synthetic oligonucleotide
cacccagauggaagguccc

SEQ ID NO: 628996 - RNA, 19 nt, Artificial Sequence
  Description of Artificial Sequence: Synthetic oligonucleotide
gagaggagcugagucuaac

SEQ ID NO: 628997 - RNA, 19 nt, Artificial Sequence
  Description of Artificial Sequence: Synthetic oligonucleotide
uucgcagcucuguuucaau

SEQ ID NO: 628998 - RNA, 19 nt, Artificial Sequence
  Description of Artificial Sequence: Synthetic oligonucleotide
aucccaagguuuaccaccu

SEQ ID NO: 628999 - RNA, 19 nt, Artificial Sequence
  Description of Artificial Sequence: Synthetic oligonucleotide
ggaaccguugggaugaaaa

SEQ ID NO: 629000 - RNA, 19 nt, Artificial Sequence
  Description of Artificial Sequence: Synthetic oligonucleotide
uuucuauaucuaggacagu

SEQ ID NO: 629001 - RNA, 19 nt, Artificial Sequence
  Description of Artificial Sequence: Synthetic oligonucleotide
gaucuugguuagagaagca

SEQ ID NO: 629002 - RNA, 19 nt, Artificial Sequence
  Description of Artificial Sequence: Synthetic oligonucleotide
gcuauugcuguggaaugug

SEQ ID NO: 629003 - RNA, 19 nt, Artificial Sequence
  Description of Artificial Sequence: Synthetic oligonucleotide
caccaguugcucacucaac

SEQ ID NO: 629004 - RNA, 19 nt, Artificial Sequence
  Description of Artificial Sequence: Synthetic oligonucleotide
agguuucgcagcucuguuu

SEQ ID NO: 629005 - RNA, 19 nt, Artificial Sequence
  Description of Artificial Sequence: Synthetic oligonucleotide
gcuaacucaaaaucacgcu

SEQ ID NO: 629006 - RNA, 19 nt, Artificial Sequence
  Description of Artificial Sequence: Synthetic oligonucleotide
gguucucuaugcagaaaug

SEQ ID NO: 629007 - RNA, 19 nt, Artificial Sequence
  Description of Artificial Sequence: Synthetic oligonucleotide
ccaccuuagacugcugggg

SEQ ID NO: 629008 - RNA, 19 nt, Artificial Sequence
  Description of Artificial Sequence: Synthetic oligonucleotide
aaguggucguaaggagaca

SEQ ID NO: 629009 - RNA, 19 nt, Artificial Sequence
  Description of Artificial Sequence: Synthetic oligonucleotide
ggagaugaaucaaggcuca

SEQ ID NO: 629010 - RNA, 19 nt, Artificial Sequence
  Description of Artificial Sequence: Synthetic oligonucleotide
gacagguuucgcagcucug

SEQ ID NO: 629011 - RNA, 19 nt, Artificial Sequence
  Description of Artificial Sequence: Synthetic oligonucleotide
guuagcugguuuaauccgu

SEQ ID NO: 629012 - RNA, 19 nt, Artificial Sequence
  Description of Artificial Sequence: Synthetic oligonucleotide
guuugacaagucccaggaa

SEQ ID NO: 629013 - RNA, 19 nt, Artificial Sequence
  Description of Artificial Sequence: Synthetic oligonucleotide
cuaccugugaugacaacuu

SEQ ID NO: 629014 - RNA, 19 nt, Artificial Sequence
  Description of Artificial Sequence: Synthetic oligonucleotide
gagcaagauagcuuaccuu

SEQ ID NO: 629015 - RNA, 19 nt, Artificial Sequence
  Description of Artificial Sequence: Synthetic oligonucleotide
auauucgaccacagguaaa

SEQ ID NO: 629016 - RNA, 19 nt, Artificial Sequence
  Description of Artificial Sequence: Synthetic oligonucleotide
aauuccugaugggccuaau

SEQ ID NO: 629017 - RNA, 19 nt, Artificial Sequence
  Description of Artificial Sequence: Synthetic oligonucleotide
agcuuaccuugguggcaag

SEQ ID NO: 629018 - RNA, 19 nt, Artificial Sequence
  Description of Artificial Sequence: Synthetic oligonucleotide
caagauagcuuaccuuggu

SEQ ID NO: 629019 - RNA, 19 nt, Artificial Sequence
  Description of Artificial Sequence: Synthetic oligonucleotide
gcugccauuacuggaugac

SEQ ID NO: 629020 - RNA, 19 nt, Artificial Sequence
  Description of Artificial Sequence: Synthetic oligonucleotide
cuguagggccaucaaauau

SEQ ID NO: 629021 - RNA, 19 nt, Artificial Sequence
  Description of Artificial Sequence: Synthetic oligonucleotide
caucccgaucauuuucaaa

SEQ ID NO: 629022 - RNA, 19 nt, Artificial Sequence
  Description of Artificial Sequence: Synthetic oligonucleotide
agaaugccacugucccuau

SEQ ID NO: 629023 - RNA, 19 nt, Artificial Sequence
  Description of Artificial Sequence: Synthetic oligonucleotide
uuccagcgugacucuggga

SEQ ID NO: 629024 - RNA, 19 nt, Artificial Sequence
  Description of Artificial Sequence: Synthetic oligonucleotide
gacaaccugaccagacaua

SEQ ID NO: 629025 - RNA, 19 nt, Artificial Sequence
  Description of Artificial Sequence: Synthetic oligonucleotide
cugucccuauguagcagca

SEQ ID NO: 629026 - RNA, 19 nt, Artificial Sequence
  Description of Artificial Sequence: Synthetic oligonucleotide
cuuaucaaccaacggccau

SEQ ID NO: 629027 - RNA, 19 nt, Artificial Sequence
  Description of Artificial Sequence: Synthetic oligonucleotide
acaagcccaggaaccguug

SEQ ID NO: 629028 - RNA, 19 nt, Artificial Sequence
  Description of Artificial Sequence: Synthetic oligonucleotide
ucuguaccuuggguuugac

SEQ ID NO: 629029 - RNA, 19 nt, Artificial Sequence
  Description of Artificial Sequence: Synthetic oligonucleotide
agccguccuucaccuguag

SEQ ID NO: 629030 - RNA, 19 nt, Artificial Sequence
  Description of Artificial Sequence: Synthetic oligonucleotide
acggccaucaggacugaau

SEQ ID NO: 629031 - RNA, 19 nt, Artificial Sequence
  Description of Artificial Sequence: Synthetic oligonucleotide
ccagcuguaacaguuagcu

SEQ ID NO: 629032 - RNA, 19 nt, Artificial Sequence
  Description of Artificial Sequence: Synthetic oligonucleotide
agacugcauguuauacaca

SEQ ID NO: 629033 - RNA, 19 nt, Artificial Sequence
  Description of Artificial Sequence: Synthetic oligonucleotide
gccguccuucaccuguagg

SEQ ID NO: 629034 - RNA, 19 nt, Artificial Sequence
  Description of Artificial Sequence: Synthetic oligonucleotide
ggcaagcaaugauaccauc

SEQ ID NO: 629035 - RNA, 19 nt, Artificial Sequence
  Description of Artificial Sequence: Synthetic oligonucleotide
cuguggaaugugcauuucu

SEQ ID NO: 629036 - RNA, 19 nt, Artificial Sequence
  Description of Artificial Sequence: Synthetic oligonucleotide
gacuguagaguuccaucuu

SEQ ID NO: 629037 - RNA, 19 nt, Artificial Sequence
  Description of Artificial Sequence: Synthetic oligonucleotide
aaaugucagcccagcuauu

SEQ ID NO: 629038 - RNA, 19 nt, Artificial Sequence
  Description of Artificial Sequence: Synthetic oligonucleotide
ugucccuauguagcagcau

SEQ ID NO: 629039 - RNA, 19 nt, Artificial Sequence
  Description of Artificial Sequence: Synthetic oligonucleotide
guggucguaaggagacaac

SEQ ID NO: 629040 - RNA, 19 nt, Artificial Sequence
  Description of Artificial Sequence: Synthetic oligonucleotide
gaaggucccaaguccuaau

SEQ ID NO: 629041 - RNA, 19 nt, Artificial Sequence
  Description of Artificial Sequence: Synthetic oligonucleotide
cagcaucauauuuggagau

SEQ ID NO: 629042 - RNA, 19 nt, Artificial Sequence
  Description of Artificial Sequence: Synthetic oligonucleotide
agcaagccccagaaugcca

SEQ ID NO: 629043 - RNA, 19 nt, Artificial Sequence
  Description of Artificial Sequence: Synthetic oligonucleotide
gauaggcggaagccuuacu

SEQ ID NO: 629044 - RNA, 19 nt, Artificial Sequence
  Description of Artificial Sequence: Synthetic oligonucleotide
aagcccugcaugacuuuua

SEQ ID NO: 629045 - RNA, 19 nt, Artificial Sequence
  Description of Artificial Sequence: Synthetic oligonucleotide
ggcucaaagaauggauuaa

SEQ ID NO: 629046 - RNA, 19 nt, Artificial Sequence
  Description of Artificial Sequence: Synthetic oligonucleotide
caacagccguccuucaccu

SEQ ID NO: 629047 - RNA, 19 nt, Artificial Sequence
  Description of Artificial Sequence: Synthetic oligonucleotide
agagcacuuuugauauaau

SEQ ID NO: 629048 - RNA, 19 nt, Artificial Sequence
  Description of Artificial Sequence: Synthetic oligonucleotide
gaagccuuacugacauggu

SEQ ID NO: 629049 - RNA, 19 nt, Artificial Sequence
  Description of Artificial Sequence: Synthetic oligonucleotide
aucuugacuugcacuuaaa

SEQ ID NO: 629050 - RNA, 19 nt, Artificial Sequence
  Description of Artificial Sequence: Synthetic oligonucleotide
ccugacggaacuucauuaa

SEQ ID NO: 629051 - RNA, 19 nt, Artificial Sequence
  Description of Artificial Sequence: Synthetic oligonucleotide
cuuggcucaaucuguucuu

SEQ ID NO: 629052 - RNA, 19 nt, Artificial Sequence
  Description of Artificial Sequence: Synthetic oligonucleotide
cauauccuaagagcauugu

SEQ ID NO: 629053 - RNA, 19 nt, Artificial Sequence
  Description of Artificial Sequence: Synthetic oligonucleotide
auucgaccacagguaaauu

SEQ ID NO: 629054 - RNA, 19 nt, Artificial Sequence
  Description of Artificial Sequence: Synthetic oligonucleotide
gcaagguaugccugggcua

SEQ ID NO: 629055 - RNA, 19 nt, Artificial Sequence
  Description of Artificial Sequence: Synthetic oligonucleotide
gcuguugcaaugaugucau

SEQ ID NO: 629056 - RNA, 19 nt, Artificial Sequence
  Description of Artificial Sequence: Synthetic oligonucleotide
cgauguauaccagacugca

SEQ ID NO: 629057 - RNA, 19 nt, Artificial Sequence
  Description of Artificial Sequence: Synthetic oligonucleotide
ggccaauuacugcaaaguu

SEQ ID NO: 629058 - RNA, 19 nt, Artificial Sequence
  Description of Artificial Sequence: Synthetic oligonucleotide
gcggaagccuuacugacau

SEQ ID NO: 629059 - RNA, 19 nt, Artificial Sequence
  Description of Artificial Sequence: Synthetic oligonucleotide
cagcgugacucugggagaa

SEQ ID NO: 629060 - RNA, 19 nt, Artificial Sequence
  Description of Artificial Sequence: Synthetic oligonucleotide
gugauaggcggaagccuua

SEQ ID NO: 629061 - RNA, 19 nt, Artificial Sequence
  Description of Artificial Sequence: Synthetic oligonucleotide
cagcucuguuucaauuccu

SEQ ID NO: 629062 - RNA, 19 nt, Artificial Sequence
  Description of Artificial Sequence: Synthetic oligonucleotide
cugaugggccuaauucuuu

SEQ ID NO: 629063 - RNA, 19 nt, Artificial Sequence
  Description of Artificial Sequence: Synthetic oligonucleotide
ccugaggagaggccaauua

SEQ ID NO: 629064 - RNA, 19 nt, Artificial Sequence
  Description of Artificial Sequence: Synthetic oligonucleotide
guacaagcccaggaaccgu

SEQ ID NO: 629065 - RNA, 19 nt, Artificial Sequence
  Description of Artificial Sequence: Synthetic oligonucleotide
gcgacucauacucuaucau

SEQ ID NO: 629066 - RNA, 19 nt, Artificial Sequence
  Description of Artificial Sequence: Synthetic oligonucleotide
cccaagguuuaccaccuua

SEQ ID NO: 629067 - RNA, 19 nt, Artificial Sequence
  Description of Artificial Sequence: Synthetic oligonucleotide
aggaaccguugggaugaaa

SEQ ID NO: 629068 - RNA, 19 nt, Artificial Sequence
  Description of Artificial Sequence: Synthetic oligonucleotide
ccuuacugacaugguguuc

SEQ ID NO: 629069 - RNA, 19 nt, Artificial Sequence
  Description of Artificial Sequence: Synthetic oligonucleotide
ccagcgugacucugggaga

SEQ ID NO: 629070 - RNA, 19 nt, Artificial Sequence
  Description of Artificial Sequence: Synthetic oligonucleotide
gccugggcuaacucaaaau

SEQ ID NO: 629071 - RNA, 19 nt, Artificial Sequence
  Description of Artificial Sequence: Synthetic oligonucleotide
cuacugcuguugcaaugau

SEQ ID NO: 629072 - RNA, 19 nt, Artificial Sequence
  Description of Artificial Sequence: Synthetic oligonucleotide
ccugaugggccuaauucuu

SEQ ID NO: 629073 - RNA, 19 nt, Artificial Sequence
  Description of Artificial Sequence: Synthetic oligonucleotide
gccuuacugacaugguguu

SEQ ID NO: 629074 - RNA, 19 nt, Artificial Sequence
  Description of Artificial Sequence: Synthetic oligonucleotide
ccuuuacguuuaacuaucu

SEQ ID NO: 629075 - RNA, 19 nt, Artificial Sequence
  Description of Artificial Sequence: Synthetic oligonucleotide
cagguuucgcagcucuguu

SEQ ID NO: 629076 - RNA, 19 nt, Artificial Sequence
  Description of Artificial Sequence: Synthetic oligonucleotide
ccaccgcaacaccucuaac

SEQ ID NO: 629077 - RNA, 19 nt, Artificial Sequence
  Description of Artificial Sequence: Synthetic oligonucleotide
gcccagcuauugcugugga

SEQ ID NO: 629078 - RNA, 19 nt, Artificial Sequence
  Description of Artificial Sequence: Synthetic oligonucleotide
ggugguucuuuugguuugu

SEQ ID NO: 629079 - RNA, 19 nt, Artificial Sequence
  Description of Artificial Sequence: Synthetic oligonucleotide
ccgcaacaccucuaacaga

SEQ ID NO: 629080 - RNA, 19 nt, Artificial Sequence
  Description of Artificial Sequence: Synthetic oligonucleotide
cccaagcucuuguugaauu

SEQ ID NO: 629081 - RNA, 19 nt, Artificial Sequence
  Description of Artificial Sequence: Synthetic oligonucleotide
ccucgauguauaccagacu

SEQ ID NO: 629082 - RNA, 19 nt, Artificial Sequence
  Description of Artificial Sequence: Synthetic oligonucleotide
cgacucauacucuaucauu

SEQ ID NO: 629083 - RNA, 19 nt, Artificial Sequence
  Description of Artificial Sequence: Synthetic oligonucleotide
guccaccgcaacaccucua

SEQ ID NO: 629084 - RNA, 19 nt, Artificial Sequence
  Description of Artificial Sequence: Synthetic oligonucleotide
cccagcuauugcuguggaa

SEQ ID NO: 629085 - RNA, 19 nt, Artificial Sequence
  Description of Artificial Sequence: Synthetic oligonucleotide
ccacacgggcugccagcug

SEQ ID NO: 629086 - RNA, 19 nt, Artificial Sequence
  Description of Artificial Sequence: Synthetic oligonucleotide
ccaugccccaagcucuugu

SEQ ID NO: 629087 - RNA, 19 nt, Artificial Sequence
  Description of Artificial Sequence: Synthetic oligonucleotide
ccaaagcaagccccagaau

SEQ ID NO: 629088 - RNA, 19 nt, Artificial Sequence
  Description of Artificial Sequence: Synthetic oligonucleotide
cuguaacaguuagcugguu

SEQ ID NO: 629089 - RNA, 19 nt, Artificial Sequence
  Description of Artificial Sequence: Synthetic oligonucleotide
cccuauguagcagcaucau

SEQ ID NO: 629090 - RNA, 19 nt, Artificial Sequence
  Description of Artificial Sequence: Synthetic oligonucleotide
cguccaccgcaacaccucu

SEQ ID NO: 629091 - RNA, 19 nt, Artificial Sequence
  Description of Artificial Sequence: Synthetic oligonucleotide
aaaguaacagucuaggcac

SEQ ID NO: 629092 - RNA, 19 nt, Artificial Sequence
  Description of Artificial Sequence: Synthetic oligonucleotide
aaauuuagaguucuugggc

SEQ ID NO: 629093 - RNA, 19 nt, Artificial Sequence
  Description of Artificial Sequence: Synthetic oligonucleotide
auaaauaugaaccagguuu

SEQ ID NO: 629094 - RNA, 19 nt, Artificial Sequence
  Description of Artificial Sequence: Synthetic oligonucleotide
uguagaacuuguaugaacc

SEQ ID NO: 629095 - RNA, 19 nt, Artificial Sequence
  Description of Artificial Sequence: Synthetic oligonucleotide
auauaagcgauucuccacc

SEQ ID NO: 629096 - RNA, 19 nt, Artificial Sequence
  Description of Artificial Sequence: Synthetic oligonucleotide
ugugguauuucacaguuag

SEQ ID NO: 629097 - RNA, 19 nt, Artificial Sequence
  Description of Artificial Sequence: Synthetic oligonucleotide
ugauagguaaucaauuacc

SEQ ID NO: 629098 - RNA, 19 nt, Artificial Sequence
  Description of Artificial Sequence: Synthetic oligonucleotide
gacuguauaguucuuaccc

SEQ ID NO: 629099 - RNA, 19 nt, Artificial Sequence
  Description of Artificial Sequence: Synthetic oligonucleotide
ugaaauauuauuguuagau

SEQ ID NO: 629100 - RNA, 19 nt, Artificial Sequence
  Description of Artificial Sequence: Synthetic oligonucleotide
aauuuagaguucuugggcu

SEQ ID NO: 629101 - RNA, 19 nt, Artificial Sequence
  Description of Artificial Sequence: Synthetic oligonucleotide
aaauccagcgugcuggagg

SEQ ID NO: 629102 - RNA, 19 nt, Artificial Sequence
  Description of Artificial Sequence: Synthetic oligonucleotide
aauuaugggaggcccaguc

SEQ ID NO: 629103 - RNA, 19 nt, Artificial Sequence
  Description of Artificial Sequence: Synthetic oligonucleotide
uauagguuguaacaguuca

SEQ ID NO: 629104 - RNA, 19 nt, Artificial Sequence
  Description of Artificial Sequence: Synthetic oligonucleotide
uuuagcaucaccgacggca

SEQ ID NO: 629105 - RNA, 19 nt, Artificial Sequence
  Description of Artificial Sequence: Synthetic oligonucleotide
aauguagacagacaauaaa

SEQ ID NO: 629106 - RNA, 19 nt, Artificial Sequence
  Description of Artificial Sequence: Synthetic oligonucleotide
gauaucuucugaaauguag

SEQ ID NO: 629107 - RNA, 19 nt, Artificial Sequence
  Description of Artificial Sequence: Synthetic oligonucleotide
uuuccuaagacaugggucu

SEQ ID NO: 629108 - RNA, 19 nt, Artificial Sequence
  Description of Artificial Sequence: Synthetic oligonucleotide
aagauugcaguccaacuca

SEQ ID NO: 629109 - RNA, 19 nt, Artificial Sequence
  Description of Artificial Sequence: Synthetic oligonucleotide
gaagucccaaaauuuagag

SEQ ID NO: 629110 - RNA, 19 nt, Artificial Sequence
  Description of Artificial Sequence: Synthetic oligonucleotide
accaggaguagucaacucc

SEQ ID NO: 629111 - RNA, 19 nt, Artificial Sequence
  Description of Artificial Sequence: Synthetic oligonucleotide
uucaaaacacaaacaguag

SEQ ID NO: 629112 - RNA, 19 nt, Artificial Sequence
  Description of Artificial Sequence: Synthetic oligonucleotide
ucauauguauauaagcgau

SEQ ID NO: 629113 - RNA, 19 nt, Artificial Sequence
  Description of Artificial Sequence: Synthetic oligonucleotide
uuuacacuccccauggaug

SEQ ID NO: 629114 - RNA, 19 nt, Artificial Sequence
  Description of Artificial Sequence: Synthetic oligonucleotide
aacaguucauaaguggcac

SEQ ID NO: 629115 - RNA, 19 nt, Artificial Sequence
  Description of Artificial Sequence: Synthetic oligonucleotide
ucuuuauauuuccuaagac

SEQ ID NO: 629116 - RNA, 19 nt, Artificial Sequence
  Description of Artificial Sequence: Synthetic oligonucleotide
cuuuauauuuccuaagaca

SEQ ID NO: 629117 - RNA, 19 nt, Artificial Sequence
  Description of Artificial Sequence: Synthetic oligonucleotide
aauuacuacagauggguua

SEQ ID NO: 629118 - RNA, 19 nt, Artificial Sequence
  Description of Artificial Sequence: Synthetic oligonucleotide
ucaauuaccaggaguaguc

SEQ ID NO: 629119 - RNA, 19 nt, Artificial Sequence
  Description of Artificial Sequence: Synthetic oligonucleotide
uugauagguaaucaauuac

SEQ ID NO: 629120 - RNA, 19 nt, Artificial Sequence
  Description of Artificial Sequence: Synthetic oligonucleotide
uggaucacaaaguauaaau

SEQ ID NO: 629121 - RNA, 19 nt, Artificial Sequence
  Description of Artificial Sequence: Synthetic oligonucleotide
acaguuagcucaucaaauc

SEQ ID NO: 629122 - RNA, 19 nt, Artificial Sequence
  Description of Artificial Sequence: Synthetic oligonucleotide
uuuuggauggaguaagggu

SEQ ID NO: 629123 - RNA, 19 nt, Artificial Sequence
  Description of Artificial Sequence: Synthetic oligonucleotide
acgcagacaacacugcagc

SEQ ID NO: 629124 - RNA, 19 nt, Artificial Sequence
  Description of Artificial Sequence: Synthetic oligonucleotide
aaucaccuaggcaagauug

SEQ ID NO: 629125 - RNA, 19 nt, Artificial Sequence
  Description of Artificial Sequence: Synthetic oligonucleotide
ugagauuuggcagggagag

SEQ ID NO: 629126 - RNA, 19 nt, Artificial Sequence
  Description of Artificial Sequence: Synthetic oligonucleotide
uucccuaacaccaaccuuc

SEQ ID NO: 629127 - RNA, 19 nt, Artificial Sequence
  Description of Artificial Sequence: Synthetic oligonucleotide
accauaacaacauuacagu

SEQ ID NO: 629128 - RNA, 19 nt, Artificial Sequence
  Description of Artificial Sequence: Synthetic oligonucleotide
uguagcaauugauagguaa

SEQ ID NO: 629129 - RNA, 19 nt, Artificial Sequence
  Description of Artificial Sequence: Synthetic oligonucleotide
ucaccggucaccaacgcag

SEQ ID NO: 629130 - RNA, 19 nt, Artificial Sequence
  Description of Artificial Sequence: Synthetic oligonucleotide
ggaguagucaacuccaacg

SEQ ID NO: 629131 - RNA, 19 nt, Artificial Sequence
  Description of Artificial Sequence: Synthetic oligonucleotide
ggucauauguauauaagcg

SEQ ID NO: 629132 - RNA, 19 nt, Artificial Sequence
  Description of Artificial Sequence: Synthetic oligonucleotide
uauauaagcgauucuccac

SEQ ID NO: 629133 - RNA, 19 nt, Artificial Sequence
  Description of Artificial Sequence: Synthetic oligonucleotide
gucuguauggaguagcacc

SEQ ID NO: 629134 - RNA, 19 nt, Artificial Sequence
  Description of Artificial Sequence: Synthetic oligonucleotide
gaucccuuguacuugaaca

SEQ ID NO: 629135 - RNA, 19 nt, Artificial Sequence
  Description of Artificial Sequence: Synthetic oligonucleotide
auagguaaucaauuaccag

SEQ ID NO: 629136 - RNA, 19 nt, Artificial Sequence
  Description of Artificial Sequence: Synthetic oligonucleotide
uaugguaccuaaacaugag

SEQ ID NO: 629137 - RNA, 19 nt, Artificial Sequence
  Description of Artificial Sequence: Synthetic oligonucleotide
aggucaacaagccgcgugc

SEQ ID NO: 629138 - RNA, 19 nt, Artificial Sequence
  Description of Artificial Sequence: Synthetic oligonucleotide
uuacuaaucacuuccccaa

SEQ ID NO: 629139 - RNA, 19 nt, Artificial Sequence
  Description of Artificial Sequence: Synthetic oligonucleotide
ucagaguaauuaugggagg

SEQ ID NO: 629140 - RNA, 19 nt, Artificial Sequence
  Description of Artificial Sequence: Synthetic oligonucleotide
auaaccuccucgccuaugg

SEQ ID NO: 629141 - RNA, 19 nt, Artificial Sequence
  Description of Artificial Sequence: Synthetic oligonucleotide
cacaucauaaccuccucgc

SEQ ID NO: 629142 - RNA, 19 nt, Artificial Sequence
  Description of Artificial Sequence: Synthetic oligonucleotide
uauaagcgauucuccaccg

SEQ ID NO: 629143 - RNA, 19 nt, Artificial Sequence
  Description of Artificial Sequence: Synthetic oligonucleotide
agaguaauuaugggaggcc

SEQ ID NO: 629144 - RNA, 19 nt, Artificial Sequence
  Description of Artificial Sequence: Synthetic oligonucleotide
guaacaguucauaaguggc

SEQ ID NO: 629145 - RNA, 19 nt, Artificial Sequence
  Description of Artificial Sequence: Synthetic oligonucleotide
acucucaccggucaccaac

SEQ ID NO: 629146 - RNA, 19 nt, Artificial Sequence
  Description of Artificial Sequence: Synthetic oligonucleotide
gcagcgaucacuuuggaug

SEQ ID NO: 629147 - RNA, 19 nt, Artificial Sequence
  Description of Artificial Sequence: Synthetic oligonucleotide
aagucccaaaauuuagagu

SEQ ID NO: 629148 - RNA, 19 nt, Artificial Sequence
  Description of Artificial Sequence: Synthetic oligonucleotide
ugggaguuagucaugccca

SEQ ID NO: 629149 - RNA, 19 nt, Artificial Sequence
  Description of Artificial Sequence: Synthetic oligonucleotide
aauugauagguaaucaauu

SEQ ID NO: 629150 - RNA, 19 nt, Artificial Sequence
  Description of Artificial Sequence: Synthetic oligonucleotide
auugauagguaaucaauua

SEQ ID NO: 629151 - RNA, 19 nt, Artificial Sequence
  Description of Artificial Sequence: Synthetic oligonucleotide
ucagguauuuacacucccc

SEQ ID NO: 629152 - RNA, 19 nt, Artificial Sequence
  Description of Artificial Sequence: Synthetic oligonucleotide
agggugauagaggaaaagg

SEQ ID NO: 629153 - RNA, 19 nt, Artificial Sequence
  Description of Artificial Sequence: Synthetic oligonucleotide
ugguaguguggucauaugu

SEQ ID NO: 629154 - RNA, 19 nt, Artificial Sequence
  Description of Artificial Sequence: Synthetic oligonucleotide
gauagguaaucaauuacca

SEQ ID NO: 629155 - RNA, 19 nt, Artificial Sequence
  Description of Artificial Sequence: Synthetic oligonucleotide
auaaauuacuacagauggg

SEQ ID NO: 629156 - RNA, 19 nt, Artificial Sequence
  Description of Artificial Sequence: Synthetic oligonucleotide
uuagcaucaccgacggcag

SEQ ID NO: 629157 - RNA, 19 nt, Artificial Sequence
  Description of Artificial Sequence: Synthetic oligonucleotide
uaagcgauucuccaccggu

SEQ ID NO: 629158 - RNA, 19 nt, Artificial Sequence
  Description of Artificial Sequence: Synthetic oligonucleotide
cauugccaaaguaacaguc

SEQ ID NO: 629159 - RNA, 19 nt, Artificial Sequence
  Description of Artificial Sequence: Synthetic oligonucleotide
gucauauguauauaagcga

SEQ ID NO: 629160 - RNA, 19 nt, Artificial Sequence
  Description of Artificial Sequence: Synthetic oligonucleotide
uucagagucggaccgcuug

SEQ ID NO: 629161 - RNA, 19 nt, Artificial Sequence
  Description of Artificial Sequence: Synthetic oligonucleotide
uagucaacuccaacguucc

SEQ ID NO: 629162 - RNA, 19 nt, Artificial Sequence
  Description of Artificial Sequence: Synthetic oligonucleotide
acagcgagauuccaccagg

SEQ ID NO: 629163 - RNA, 19 nt, Artificial Sequence
  Description of Artificial Sequence: Synthetic oligonucleotide
ucuauuacacauugacauc

SEQ ID NO: 629164 - RNA, 19 nt, Artificial Sequence
  Description of Artificial Sequence: Synthetic oligonucleotide
uucagguauuuacacuccc

SEQ ID NO: 629165 - RNA, 19 nt, Artificial Sequence
  Description of Artificial Sequence: Synthetic oligonucleotide
caagauugcaguccaacuc

SEQ ID NO: 629166 - RNA, 19 nt, Artificial Sequence
  Description of Artificial Sequence: Synthetic oligonucleotide
uauggcagcgaaacgucug

SEQ ID NO: 629167 - RNA, 19 nt, Artificial Sequence
  Description of Artificial Sequence: Synthetic oligonucleotide
ucuagacucucaccgguca

SEQ ID NO: 629168 - RNA, 19 nt, Artificial Sequence
  Description of Artificial Sequence: Synthetic oligonucleotide
auuaccaggaguagucaac

SEQ ID NO: 629169 - RNA, 19 nt, Artificial Sequence
  Description of Artificial Sequence: Synthetic oligonucleotide
cucuguagaacuuguauga

SEQ ID NO: 629170 - RNA, 19 nt, Artificial Sequence
  Description of Artificial Sequence: Synthetic oligonucleotide
acuguauaguucuuaccca

SEQ ID NO: 629171 - RNA, 19 nt, Artificial Sequence
  Description of Artificial Sequence: Synthetic oligonucleotide
agagucggaccgcuugucc

SEQ ID NO: 629172 - RNA, 19 nt, Artificial Sequence
  Description of Artificial Sequence: Synthetic oligonucleotide
auuuacacuccccauggau

SEQ ID NO: 629173 - RNA, 19 nt, Artificial Sequence
  Description of Artificial Sequence: Synthetic oligonucleotide
cagaaagagcuuuagcauc

SEQ ID NO: 629174 - RNA, 19 nt, Artificial Sequence
  Description of Artificial Sequence: Synthetic oligonucleotide
aggaguagucaacuccaac

SEQ ID NO: 629175 - RNA, 19 nt, Artificial Sequence
  Description of Artificial Sequence: Synthetic oligonucleotide
agaucccuuguacuugaac

SEQ ID NO: 629176 - RNA, 19 nt, Artificial Sequence
  Description of Artificial Sequence: Synthetic oligonucleotide
gaguaauuaugggaggccc

SEQ ID NO: 629177 - RNA, 19 nt, Artificial Sequence
  Description of Artificial Sequence: Synthetic oligonucleotide
ucauaaguggcaccagaaa

SEQ ID NO: 629178 - RNA, 19 nt, Artificial Sequence
  Description of Artificial Sequence: Synthetic oligonucleotide
uucuuacccaaaaccuucc

SEQ ID NO: 629179 - RNA, 19 nt, Artificial Sequence
  Description of Artificial Sequence: Synthetic oligonucleotide
gaaacgucugucuguucag

SEQ ID NO: 629180 - RNA, 19 nt, Artificial Sequence
  Description of Artificial Sequence: Synthetic oligonucleotide
ucaccgagcuggaugguag

SEQ ID NO: 629181 - RNA, 19 nt, Artificial Sequence
  Description of Artificial Sequence: Synthetic oligonucleotide
ugcgaagccguucuagacu

SEQ ID NO: 629182 - RNA, 19 nt, Artificial Sequence
  Description of Artificial Sequence: Synthetic oligonucleotide
aacgcagacaacacugcag

SEQ ID NO: 629183 - RNA, 19 nt, Artificial Sequence
  Description of Artificial Sequence: Synthetic oligonucleotide
gguaccuaaacaugagaag

SEQ ID NO: 629184 - RNA, 19 nt, Artificial Sequence
  Description of Artificial Sequence: Synthetic oligonucleotide
aacuuguaugaaccagugu

SEQ ID NO: 629185 - RNA, 19 nt, Artificial Sequence
  Description of Artificial Sequence: Synthetic oligonucleotide
uccuuacuaaucacuuccc

SEQ ID NO: 629186 - RNA, 19 nt, Artificial Sequence
  Description of Artificial Sequence: Synthetic oligonucleotide
agucggaccgcuuguccgc

SEQ ID NO: 629187 - RNA, 19 nt, Artificial Sequence
  Description of Artificial Sequence: Synthetic oligonucleotide
gagucggaccgcuuguccg

SEQ ID NO: 629188 - RNA, 19 nt, Artificial Sequence
  Description of Artificial Sequence: Synthetic oligonucleotide
cuguagaacuuguaugaac

SEQ ID NO: 629189 - RNA, 19 nt, Artificial Sequence
  Description of Artificial Sequence: Synthetic oligonucleotide
aagggugauagaggaaaag

SEQ ID NO: 629190 - RNA, 19 nt, Artificial Sequence
  Description of Artificial Sequence: Synthetic oligonucleotide
cuaggcaagauugcagucc

SEQ ID NO: 629191 - RNA, 19 nt, Artificial Sequence
  Description of Artificial Sequence: Synthetic oligonucleotide
agacagacaauaaauuacu

SEQ ID NO: 629192 - RNA, 19 nt, Artificial Sequence
  Description of Artificial Sequence: Synthetic oligonucleotide
guagcaacugggaaugaag

SEQ ID NO: 629193 - RNA, 19 nt, Artificial Sequence
  Description of Artificial Sequence: Synthetic oligonucleotide
cuucagguauuuacacucc

SEQ ID NO: 629194 - RNA, 19 nt, Artificial Sequence
  Description of Artificial Sequence: Synthetic oligonucleotide
gaaccauaacaacauuaca

SEQ ID NO: 629195 - RNA, 19 nt, Artificial Sequence
  Description of Artificial Sequence: Synthetic oligonucleotide
accuaggcaagauugcagu

SEQ ID NO: 629196 - RNA, 19 nt, Artificial Sequence
  Description of Artificial Sequence: Synthetic oligonucleotide
ucucagugggaguuaguca

SEQ ID NO: 629197 - RNA, 19 nt, Artificial Sequence
  Description of Artificial Sequence: Synthetic oligonucleotide
gaacuuguaugaaccagug

SEQ ID NO: 629198 - RNA, 19 nt, Artificial Sequence
  Description of Artificial Sequence: Synthetic oligonucleotide
aaaaucaccuaggcaagau

SEQ ID NO: 629199 - RNA, 19 nt, Artificial Sequence
  Description of Artificial Sequence: Synthetic oligonucleotide
auauagguuguaacaguuc

SEQ ID NO: 629200 - RNA, 19 nt, Artificial Sequence
  Description of Artificial Sequence: Synthetic oligonucleotide
auaagcgauucuccaccgg

SEQ ID NO: 629201 - RNA, 19 nt, Artificial Sequence
  Description of Artificial Sequence: Synthetic oligonucleotide
ucacuuuggaugcggcggc

SEQ ID NO: 629202 - RNA, 19 nt, Artificial Sequence
  Description of Artificial Sequence: Synthetic oligonucleotide
guaauuaugggaggcccag

SEQ ID NO: 629203 - RNA, 19 nt, Artificial Sequence
  Description of Artificial Sequence: Synthetic oligonucleotide
agcgauucuccaccgguag

SEQ ID NO: 629204 - RNA, 19 nt, Artificial Sequence
  Description of Artificial Sequence: Synthetic oligonucleotide
cagaguaauuaugggaggc

SEQ ID NO: 629205 - RNA, 19 nt, Artificial Sequence
  Description of Artificial Sequence: Synthetic oligonucleotide
uuuccuuacuaaucacuuc

SEQ ID NO: 629206 - RNA, 19 nt, Artificial Sequence
  Description of Artificial Sequence: Synthetic oligonucleotide
aucaccuaggcaagauugc

SEQ ID NO: 629207 - RNA, 19 nt, Artificial Sequence
  Description of Artificial Sequence: Synthetic oligonucleotide
agguaaucaauuaccagga

SEQ ID NO: 629208 - RNA, 19 nt, Artificial Sequence
  Description of Artificial Sequence: Synthetic oligonucleotide
acaccaaccuucccuguag

SEQ ID NO: 629209 - RNA, 19 nt, Artificial Sequence
  Description of Artificial Sequence: Synthetic oligonucleotide
guagucaacuccaacguuc

SEQ ID NO: 629210 - RNA, 19 nt, Artificial Sequence
  Description of Artificial Sequence: Synthetic oligonucleotide
agaaagagcuuuagcauca

SEQ ID NO: 629211 - RNA, 19 nt, Artificial Sequence
  Description of Artificial Sequence: Synthetic oligonucleotide
uucucagugggaguuaguc

SEQ ID NO: 629212 - RNA, 19 nt, Artificial Sequence
  Description of Artificial Sequence: Synthetic oligonucleotide
auuaugggaggcccaguca

SEQ ID NO: 629213 - RNA, 19 nt, Artificial Sequence
  Description of Artificial Sequence: Synthetic oligonucleotide
aucaauuaccaggaguagu

SEQ ID NO: 629214 - RNA, 19 nt, Artificial Sequence
  Description of Artificial Sequence: Synthetic oligonucleotide
cagcgaucacuuuggaugc

SEQ ID NO: 629215 - RNA, 19 nt, Artificial Sequence
  Description of Artificial Sequence: Synthetic oligonucleotide
ucccaaaauuuagaguucu

SEQ ID NO: 629216 - RNA, 19 nt, Artificial Sequence
  Description of Artificial Sequence: Synthetic oligonucleotide
acccaaaaccuucccuaac

SEQ ID NO: 629217 - RNA, 19 nt, Artificial Sequence
  Description of Artificial Sequence: Synthetic oligonucleotide
ucccuaacaccaaccuucc

SEQ ID NO: 629218 - RNA, 19 nt, Artificial Sequence
  Description of Artificial Sequence: Synthetic oligonucleotide
acuccaacguucccugcuc

SEQ ID NO: 629219 - RNA, 19 nt, Artificial Sequence
  Description of Artificial Sequence: Synthetic oligonucleotide
agucaacuccaacguuccc

SEQ ID NO: 629220 - RNA, 19 nt, Artificial Sequence
  Description of Artificial Sequence: Synthetic oligonucleotide
auggaugcccaaugucuuc

SEQ ID NO: 629221 - RNA, 19 nt, Artificial Sequence
  Description of Artificial Sequence: Synthetic oligonucleotide
caggacauugccaaaguaa

SEQ ID NO: 629222 - RNA, 19 nt, Artificial Sequence
  Description of Artificial Sequence: Synthetic oligonucleotide
ccguucuagacucucaccg

SEQ ID NO: 629223 - RNA, 19 nt, Artificial Sequence
  Description of Artificial Sequence: Synthetic oligonucleotide
agacaugggucucucuucu

SEQ ID NO: 629224 - RNA, 19 nt, Artificial Sequence
  Description of Artificial Sequence: Synthetic oligonucleotide
cucucaccggucaccaacg

SEQ ID NO: 629225 - RNA, 19 nt, Artificial Sequence
  Description of Artificial Sequence: Synthetic oligonucleotide
gcaacugggaaugaagaag

SEQ ID NO: 629226 - RNA, 19 nt, Artificial Sequence
  Description of Artificial Sequence: Synthetic oligonucleotide
uagguuguaacaguucaua

SEQ ID NO: 629227 - RNA, 19 nt, Artificial Sequence
  Description of Artificial Sequence: Synthetic oligonucleotide
uggguagaagucccaaaau

SEQ ID NO: 629228 - RNA, 19 nt, Artificial Sequence
  Description of Artificial Sequence: Synthetic oligonucleotide
aggguagcaacugggaaug

SEQ ID NO: 629229 - RNA, 19 nt, Artificial Sequence
  Description of Artificial Sequence: Synthetic oligonucleotide
accgcuuguccgcccagcc

SEQ ID NO: 629230 - RNA, 19 nt, Artificial Sequence
  Description of Artificial Sequence: Synthetic oligonucleotide
uuucccaaucccuugccuu

SEQ ID NO: 629231 - RNA, 19 nt, Artificial Sequence
  Description of Artificial Sequence: Synthetic oligonucleotide
auauuauuguuagauuguu

SEQ ID NO: 629232 - RNA, 19 nt, Artificial Sequence
  Description of Artificial Sequence: Synthetic oligonucleotide
ucagagucggaccgcuugu

SEQ ID NO: 629233 - RNA, 19 nt, Artificial Sequence
  Description of Artificial Sequence: Synthetic oligonucleotide
caccuaggcaagauugcag

SEQ ID NO: 629234 - RNA, 19 nt, Artificial Sequence
  Description of Artificial Sequence: Synthetic oligonucleotide
aaauuacuacagauggguu

SEQ ID NO: 629235 - RNA, 19 nt, Artificial Sequence
  Description of Artificial Sequence: Synthetic oligonucleotide
ucagugggaguuagucaug

SEQ ID NO: 629236 - RNA, 19 nt, Artificial Sequence
  Description of Artificial Sequence: Synthetic oligonucleotide
uuugcuuggcguggcuagg

SEQ ID NO: 629237 - RNA, 19 nt, Artificial Sequence
  Description of Artificial Sequence: Synthetic oligonucleotide
uuguaugaaccagugucuc

SEQ ID NO: 629238 - RNA, 19 nt, Artificial Sequence
  Description of Artificial Sequence: Synthetic oligonucleotide
uacuaaucacuuccccaaa

SEQ ID NO: 629239 - RNA, 19 nt, Artificial Sequence
  Description of Artificial Sequence: Synthetic oligonucleotide
ucucagagggaaccauccu

SEQ ID NO: 629240 - RNA, 19 nt, Artificial Sequence
  Description of Artificial Sequence: Synthetic oligonucleotide
gauggaguaaggguuauau

SEQ ID NO: 629241 - RNA, 19 nt, Artificial Sequence
  Description of Artificial Sequence: Synthetic oligonucleotide
auauuuccuaagacauggg

SEQ ID NO: 629242 - RNA, 19 nt, Artificial Sequence
  Description of Artificial Sequence: Synthetic oligonucleotide
accuucccuaacaccaacc

SEQ ID NO: 629243 - RNA, 19 nt, Artificial Sequence
  Description of Artificial Sequence: Synthetic oligonucleotide
ugcgauccugccgaggagc

SEQ ID NO: 629244 - RNA, 19 nt, Artificial Sequence
  Description of Artificial Sequence: Synthetic oligonucleotide
ucuguagaacuuguaugaa

SEQ ID NO: 629245 - RNA, 19 nt, Artificial Sequence
  Description of Artificial Sequence: Synthetic oligonucleotide
acguccuucaggucaacaa

SEQ ID NO: 629246 - RNA, 19 nt, Artificial Sequence
  Description of Artificial Sequence: Synthetic oligonucleotide
caauugauagguaaucaau

SEQ ID NO: 629247 - RNA, 19 nt, Artificial Sequence
  Description of Artificial Sequence: Synthetic oligonucleotide
uggacuuccugaccacgac

SEQ ID NO: 629248 - RNA, 19 nt, Artificial Sequence
  Description of Artificial Sequence: Synthetic oligonucleotide
uucuagacucucaccgguc

SEQ ID NO: 629249 - RNA, 19 nt, Artificial Sequence
  Description of Artificial Sequence: Synthetic oligonucleotide
acgguaugcugcccgcuuc

SEQ ID NO: 629250 - RNA, 19 nt, Artificial Sequence
  Description of Artificial Sequence: Synthetic oligonucleotide
cuuguaugaaccagugucu

SEQ ID NO: 629251 - RNA, 19 nt, Artificial Sequence
  Description of Artificial Sequence: Synthetic oligonucleotide
aaacgucugucuguucaga

SEQ ID NO: 629252 - RNA, 19 nt, Artificial Sequence
  Description of Artificial Sequence: Synthetic oligonucleotide
ggaaaugucuugacacagg

SEQ ID NO: 629253 - RNA, 19 nt, Artificial Sequence
  Description of Artificial Sequence: Synthetic oligonucleotide
gguaaucaauuaccaggag

SEQ ID NO: 629254 - RNA, 19 nt, Artificial Sequence
  Description of Artificial Sequence: Synthetic oligonucleotide
caacguucccugcuccucc

SEQ ID NO: 629255 - RNA, 19 nt, Artificial Sequence
  Description of Artificial Sequence: Synthetic oligonucleotide
aguagucaacuccaacguu

SEQ ID NO: 629256 - RNA, 19 nt, Artificial Sequence
  Description of Artificial Sequence: Synthetic oligonucleotide
gggaaaugucuugacacag

SEQ ID NO: 629257 - RNA, 19 nt, Artificial Sequence
  Description of Artificial Sequence: Synthetic oligonucleotide
ugccgaggagcccuauggc

SEQ ID NO: 629258 - RNA, 19 nt, Artificial Sequence
  Description of Artificial Sequence: Synthetic oligonucleotide
ugggagugugucaccgagc

SEQ ID NO: 629259 - RNA, 19 nt, Artificial Sequence
  Description of Artificial Sequence: Synthetic oligonucleotide
caggucaacaagccgcgug

SEQ ID NO: 629260 - RNA, 19 nt, Artificial Sequence
  Description of Artificial Sequence: Synthetic oligonucleotide
gagauuccaccaggcacgg

SEQ ID NO: 629261 - RNA, 19 nt, Artificial Sequence
  Description of Artificial Sequence: Synthetic oligonucleotide
caucaaauccagcgugcug

SEQ ID NO: 629262 - RNA, 19 nt, Artificial Sequence
  Description of Artificial Sequence: Synthetic oligonucleotide
cugaagguuccuugagcac

SEQ ID NO: 629263 - RNA, 19 nt, Artificial Sequence
  Description of Artificial Sequence: Synthetic oligonucleotide
cuucugggugcgauccugc

SEQ ID NO: 629264 - RNA, 19 nt, Artificial Sequence
  Description of Artificial Sequence: Synthetic oligonucleotide
uguucagagucggaccgcu

SEQ ID NO: 629265 - RNA, 19 nt, Artificial Sequence
  Description of Artificial Sequence: Synthetic oligonucleotide
agcgagauuccaccaggca

SEQ ID NO: 629266 - RNA, 19 nt, Artificial Sequence
  Description of Artificial Sequence: Synthetic oligonucleotide
acaugagaagccccacuau

SEQ ID NO: 629267 - RNA, 19 nt, Artificial Sequence
  Description of Artificial Sequence: Synthetic oligonucleotide
cugcgaagccguucuagac

SEQ ID NO: 629268 - RNA, 19 nt, Artificial Sequence
  Description of Artificial Sequence: Synthetic oligonucleotide
gcgagauuccaccaggcac

SEQ ID NO: 629269 - RNA, 19 nt, Artificial Sequence
  Description of Artificial Sequence: Synthetic oligonucleotide
cuggguagaagucccaaaa

SEQ ID NO: 629270 - RNA, 19 nt, Artificial Sequence
  Description of Artificial Sequence: Synthetic oligonucleotide
aaagggugauagaggaaaa

SEQ ID NO: 629271 - RNA, 19 nt, Artificial Sequence
  Description of Artificial Sequence: Synthetic oligonucleotide
accggucaccaacgcagac

SEQ ID NO: 629272 - RNA, 19 nt, Artificial Sequence
  Description of Artificial Sequence: Synthetic oligonucleotide
gcaauugauagguaaucaa

SEQ ID NO: 629273 - RNA, 19 nt, Artificial Sequence
  Description of Artificial Sequence: Synthetic oligonucleotide
cccuguagcaauugauagg

SEQ ID NO: 629274 - RNA, 19 nt, Artificial Sequence
  Description of Artificial Sequence: Synthetic oligonucleotide
uucugggugcgauccugcc

SEQ ID NO: 629275 - RNA, 19 nt, Artificial Sequence
  Description of Artificial Sequence: Synthetic oligonucleotide
gagacugcgaggcagcgau

SEQ ID NO: 629276 - RNA, 19 nt, Artificial Sequence
  Description of Artificial Sequence: Synthetic oligonucleotide
cagugggaguuagucaugc

SEQ ID NO: 629277 - RNA, 19 nt, Artificial Sequence
  Description of Artificial Sequence: Synthetic oligonucleotide
cacucugaccauacacaac

SEQ ID NO: 629278 - RNA, 19 nt, Artificial Sequence
  Description of Artificial Sequence: Synthetic oligonucleotide
ucucaccggucaccaacgc

SEQ ID NO: 629279 - RNA, 19 nt, Artificial Sequence
  Description of Artificial Sequence: Synthetic oligonucleotide
cugggugcgauccugccga

SEQ ID NO: 629280 - RNA, 19 nt, Artificial Sequence
  Description of Artificial Sequence: Synthetic oligonucleotide
auggaguaaggguuauauu

SEQ ID NO: 629281 - RNA, 19 nt, Artificial Sequence
  Description of Artificial Sequence: Synthetic oligonucleotide
ugaccacgaccaucucccg

SEQ ID NO: 629282 - RNA, 19 nt, Artificial Sequence
  Description of Artificial Sequence: Synthetic oligonucleotide
gcagcgaaacgucugucug

SEQ ID NO: 629283 - RNA, 19 nt, Artificial Sequence
  Description of Artificial Sequence: Synthetic oligonucleotide
auggguuacagagcacaug

SEQ ID NO: 629284 - RNA, 19 nt, Artificial Sequence
  Description of Artificial Sequence: Synthetic oligonucleotide
aggcauggaugcccaaugu

SEQ ID NO: 629285 - RNA, 19 nt, Artificial Sequence
  Description of Artificial Sequence: Synthetic oligonucleotide
cuagacucucaccggucac

SEQ ID NO: 629286 - RNA, 19 nt, Artificial Sequence
  Description of Artificial Sequence: Synthetic oligonucleotide
cagcgagauuccaccaggc

SEQ ID NO: 629287 - RNA, 19 nt, Artificial Sequence
  Description of Artificial Sequence: Synthetic oligonucleotide
gacaccucucuccauggua

SEQ ID NO: 629288 - RNA, 19 nt, Artificial Sequence
  Description of Artificial Sequence: Synthetic oligonucleotide
gacugcgaggcagcgauca

SEQ ID NO: 629289 - RNA, 19 nt, Artificial Sequence
  Description of Artificial Sequence: Synthetic oligonucleotide
acaguuuuggugagacugu

SEQ ID NO: 629290 - RNA, 19 nt, Artificial Sequence
  Description of Artificial Sequence: Synthetic oligonucleotide
guuggacgccugcaccggg

SEQ ID NO: 629291 - RNA, 19 nt, Artificial Sequence
  Description of Artificial Sequence: Synthetic oligonucleotide
gguggagacugcgaggcag

SEQ ID NO: 629292 - RNA, 19 nt, Artificial Sequence
  Description of Artificial Sequence: Synthetic oligonucleotide
acaagccgcgugcugcgug

SEQ ID NO: 629293 - RNA, 19 nt, Artificial Sequence
  Description of Artificial Sequence: Synthetic oligonucleotide
cucugcgaagccguucuag

SEQ ID NO: 629294 - RNA, 19 nt, Artificial Sequence
  Description of Artificial Sequence: Synthetic oligonucleotide
cugucuguauggaguagca

SEQ ID NO: 629295 - RNA, 19 nt, Artificial Sequence
  Description of Artificial Sequence: Synthetic oligonucleotide
cacaguuagcucaucaaau

SEQ ID NO: 629296 - RNA, 19 nt, Artificial Sequence
  Description of Artificial Sequence: Synthetic oligonucleotide
gcccaugacaccucucucc

SEQ ID NO: 629297 - RNA, 19 nt, Artificial Sequence
  Description of Artificial Sequence: Synthetic oligonucleotide
gaagccguucuagacucuc

SEQ ID NO: 629298 - RNA, 19 nt, Artificial Sequence
  Description of Artificial Sequence: Synthetic oligonucleotide
uaauuaugggaggcccagu

SEQ ID NO: 629299 - RNA, 19 nt, Artificial Sequence
  Description of Artificial Sequence: Synthetic oligonucleotide
uucuuugcuuggcguggcu

SEQ ID NO: 629300 - RNA, 19 nt, Artificial Sequence
  Description of Artificial Sequence: Synthetic oligonucleotide
aaaccuucccuaacaccaa

SEQ ID NO: 629301 - RNA, 19 nt, Artificial Sequence
  Description of Artificial Sequence: Synthetic oligonucleotide
ggugcgauccugccgagga

SEQ ID NO: 629302 - RNA, 19 nt, Artificial Sequence
  Description of Artificial Sequence: Synthetic oligonucleotide
ggaaccauccucugaaggu

SEQ ID NO: 629303 - RNA, 19 nt, Artificial Sequence
  Description of Artificial Sequence: Synthetic oligonucleotide
uaccaggaguagucaacuc

SEQ ID NO: 629304 - RNA, 19 nt, Artificial Sequence
  Description of Artificial Sequence: Synthetic oligonucleotide
acaccucucuccaugguaa

SEQ ID NO: 629305 - RNA, 19 nt, Artificial Sequence
  Description of Artificial Sequence: Synthetic oligonucleotide
gaggagcccuauggcagcg

SEQ ID NO: 629306 - RNA, 19 nt, Artificial Sequence
  Description of Artificial Sequence: Synthetic oligonucleotide
auacucugcuccugggaua

SEQ ID NO: 629307 - RNA, 19 nt, Artificial Sequence
  Description of Artificial Sequence: Synthetic oligonucleotide
auagguuguaacaguucau

SEQ ID NO: 629308 - RNA, 19 nt, Artificial Sequence
  Description of Artificial Sequence: Synthetic oligonucleotide
gauuuggcagggagaggac

SEQ ID NO: 629309 - RNA, 19 nt, Artificial Sequence
  Description of Artificial Sequence: Synthetic oligonucleotide
ggcaagauugcaguccaac

SEQ ID NO: 629310 - RNA, 19 nt, Artificial Sequence
  Description of Artificial Sequence: Synthetic oligonucleotide
uagcaucaccgacggcagc

SEQ ID NO: 629311 - RNA, 19 nt, Artificial Sequence
  Description of Artificial Sequence: Synthetic oligonucleotide
gcgaagccguucuagacuc

SEQ ID NO: 629312 - RNA, 19 nt, Artificial Sequence
  Description of Artificial Sequence: Synthetic oligonucleotide
cauggucccgaacguggug

SEQ ID NO: 629313 - RNA, 19 nt, Artificial Sequence
  Description of Artificial Sequence: Synthetic oligonucleotide
uuacuacagauggguuaca

SEQ ID NO: 629314 - RNA, 19 nt, Artificial Sequence
  Description of Artificial Sequence: Synthetic oligonucleotide
gguaguguggucauaugua

SEQ ID NO: 629315 - RNA, 19 nt, Artificial Sequence
  Description of Artificial Sequence: Synthetic oligonucleotide
caacgcagacaacacugca

SEQ ID NO: 629316 - RNA, 19 nt, Artificial Sequence
  Description of Artificial Sequence: Synthetic oligonucleotide
gagcccggagauccuucag

SEQ ID NO: 629317 - RNA, 19 nt, Artificial Sequence
  Description of Artificial Sequence: Synthetic oligonucleotide
ccuauggcagcgaaacguc

SEQ ID NO: 629318 - RNA, 19 nt, Artificial Sequence
  Description of Artificial Sequence: Synthetic oligonucleotide
agcgaaacgucugucuguu

SEQ ID NO: 629319 - RNA, 19 nt, Artificial Sequence
  Description of Artificial Sequence: Synthetic oligonucleotide
guagcaauugauagguaau

SEQ ID NO: 629320 - RNA, 19 nt, Artificial Sequence
  Description of Artificial Sequence: Synthetic oligonucleotide
cuuuagcaucaccgacggc

SEQ ID NO: 629321 - RNA, 19 nt, Artificial Sequence
  Description of Artificial Sequence: Synthetic oligonucleotide
gucaacuccaacguucccu

SEQ ID NO: 629322 - RNA, 19 nt, Artificial Sequence
  Description of Artificial Sequence: Synthetic oligonucleotide
cagagggaaccauccucug

SEQ ID NO: 629323 - RNA, 19 nt, Artificial Sequence
  Description of Artificial Sequence: Synthetic oligonucleotide
ccaggaguagucaacucca

SEQ ID NO: 629324 - RNA, 19 nt, Artificial Sequence
  Description of Artificial Sequence: Synthetic oligonucleotide
agcgaucacuuuggaugcg

SEQ ID NO: 629325 - RNA, 19 nt, Artificial Sequence
  Description of Artificial Sequence: Synthetic oligonucleotide
augcggcggccguuggacg

SEQ ID NO: 629326 - RNA, 19 nt, Artificial Sequence
  Description of Artificial Sequence: Synthetic oligonucleotide
aagccguucuagacucuca

SEQ ID NO: 629327 - RNA, 19 nt, Artificial Sequence
  Description of Artificial Sequence: Synthetic oligonucleotide
cguucuagacucucaccgg

SEQ ID NO: 629328 - RNA, 19 nt, Artificial Sequence
  Description of Artificial Sequence: Synthetic oligonucleotide
gcgauucuccaccgguagg

SEQ ID NO: 629329 - RNA, 19 nt, Artificial Sequence
  Description of Artificial Sequence: Synthetic oligonucleotide
ccguuggacgccugcaccg

SEQ ID NO: 629330 - RNA, 19 nt, Artificial Sequence
  Description of Artificial Sequence: Synthetic oligonucleotide
agaguggcucugcccaaau

SEQ ID NO: 629331 - RNA, 19 nt, Artificial Sequence
  Description of Artificial Sequence: Synthetic oligonucleotide
aagcgauucuccaccggua

SEQ ID NO: 629332 - RNA, 19 nt, Artificial Sequence
  Description of Artificial Sequence: Synthetic oligonucleotide
guggcuagggcuuguggcu

SEQ ID NO: 629333 - RNA, 19 nt, Artificial Sequence
  Description of Artificial Sequence: Synthetic oligonucleotide
gcgaucacuuuggaugcgg

SEQ ID NO: 629334 - RNA, 19 nt, Artificial Sequence
  Description of Artificial Sequence: Synthetic oligonucleotide
cuuguggcuuggaggagaa

SEQ ID NO: 629335 - RNA, 19 nt, Artificial Sequence
  Description of Artificial Sequence: Synthetic oligonucleotide
cgauucuccaccgguaggg

SEQ ID NO: 629336 - RNA, 19 nt, Artificial Sequence
  Description of Artificial Sequence: Synthetic oligonucleotide
ccuaacaccaaccuucccu

SEQ ID NO: 629337 - RNA, 19 nt, Artificial Sequence
  Description of Artificial Sequence: Synthetic oligonucleotide
cacgaccaucucccguggg

SEQ ID NO: 629338 - RNA, 19 nt, Artificial Sequence
  Description of Artificial Sequence: Synthetic oligonucleotide
gcucugcccaaaucauucc

SEQ ID NO: 629339 - RNA, 19 nt, Artificial Sequence
  Description of Artificial Sequence: Synthetic oligonucleotide
caccucucuccaugguaac

SEQ ID NO: 629340 - RNA, 19 nt, Artificial Sequence
  Description of Artificial Sequence: Synthetic oligonucleotide
gccguucuagacucucacc

SEQ ID NO: 629341 - RNA, 19 nt, Artificial Sequence
  Description of Artificial Sequence: Synthetic oligonucleotide
gugcgauccugccgaggag

SEQ ID NO: 629342 - RNA, 19 nt, Artificial Sequence
  Description of Artificial Sequence: Synthetic oligonucleotide
cucaccggucaccaacgca

SEQ ID NO: 629343 - RNA, 19 nt, Artificial Sequence
  Description of Artificial Sequence: Synthetic oligonucleotide
cgaaacgucugucuguuca

SEQ ID NO: 629344 - RNA, 19 nt, Artificial Sequence
  Description of Artificial Sequence: Synthetic oligonucleotide
aacaagccgcgugcugcgu

SEQ ID NO: 629345 - RNA, 19 nt, Artificial Sequence
  Description of Artificial Sequence: Synthetic oligonucleotide
cgaggcagcgaucacuuug

SEQ ID NO: 629346 - RNA, 19 nt, Artificial Sequence
  Description of Artificial Sequence: Synthetic oligonucleotide
gccguuggacgccugcacc

SEQ ID NO: 629347 - RNA, 19 nt, Artificial Sequence
  Description of Artificial Sequence: Synthetic oligonucleotide
ccuguagcaauugauaggu

SEQ ID NO: 629348 - RNA, 19 nt, Artificial Sequence
  Description of Artificial Sequence: Synthetic oligonucleotide
ccuaggcaagauugcaguc

SEQ ID NO: 629349 - RNA, 19 nt, Artificial Sequence
  Description of Artificial Sequence: Synthetic oligonucleotide
ggacauugccaaaguaaca

SEQ ID NO: 629350 - RNA, 19 nt, Artificial Sequence
  Description of Artificial Sequence: Synthetic oligonucleotide
caugggagugugucaccga

SEQ ID NO: 629351 - RNA, 19 nt, Artificial Sequence
  Description of Artificial Sequence: Synthetic oligonucleotide
caacucacagaguggcucu

SEQ ID NO: 629352 - RNA, 19 nt, Artificial Sequence
  Description of Artificial Sequence: Synthetic oligonucleotide
gccgaggagcccuauggca

SEQ ID NO: 629353 - RNA, 19 nt, Artificial Sequence
  Description of Artificial Sequence: Synthetic oligonucleotide
ugggugcgauccugccgag

SEQ ID NO: 629354 - RNA, 19 nt, Artificial Sequence
  Description of Artificial Sequence: Synthetic oligonucleotide
uuuggaugcggcggccguu

SEQ ID NO: 629355 - RNA, 19 nt, Artificial Sequence
  Description of Artificial Sequence: Synthetic oligonucleotide
gcguggcuagggcuugugg

SEQ ID NO: 629356 - RNA, 19 nt, Artificial Sequence
  Description of Artificial Sequence: Synthetic oligonucleotide
gcccuauggcagcgaaacg

SEQ ID NO: 629357 - RNA, 19 nt, Artificial Sequence
  Description of Artificial Sequence: Synthetic oligonucleotide
gguagcaacugggaaugaa

SEQ ID NO: 629358 - RNA, 19 nt, Artificial Sequence
  Description of Artificial Sequence: Synthetic oligonucleotide
accgacggcagcagcuuca

SEQ ID NO: 629359 - RNA, 19 nt, Artificial Sequence
  Description of Artificial Sequence: Synthetic oligonucleotide
cucgccuaugguaccuaaa

SEQ ID NO: 629360 - RNA, 19 nt, Artificial Sequence
  Description of Artificial Sequence: Synthetic oligonucleotide
ggaguuagucaugcccaac

SEQ ID NO: 629361 - RNA, 19 nt, Artificial Sequence
  Description of Artificial Sequence: Synthetic oligonucleotide
ucggaccgcuuguccgccc

SEQ ID NO: 629362 - RNA, 19 nt, Artificial Sequence
  Description of Artificial Sequence: Synthetic oligonucleotide
uggcuagggcuuguggcuu

SEQ ID NO: 629363 - RNA, 19 nt, Artificial Sequence
  Description of Artificial Sequence: Synthetic oligonucleotide
cuuggcguggcuagggcuu

SEQ ID NO: 629364 - RNA, 19 nt, Artificial Sequence
  Description of Artificial Sequence: Synthetic oligonucleotide
ggagugugucaccgagcug

SEQ ID NO: 629365 - RNA, 19 nt, Artificial Sequence
  Description of Artificial Sequence: Synthetic oligonucleotide
cagagucggaccgcuuguc

SEQ ID NO: 629366 - RNA, 19 nt, Artificial Sequence
  Description of Artificial Sequence: Synthetic oligonucleotide
ccagcgugcuggagggucc

SEQ ID NO: 629367 - RNA, 19 nt, Artificial Sequence
  Description of Artificial Sequence: Synthetic oligonucleotide
gcuugugguauuucacagu

SEQ ID NO: 629368 - RNA, 19 nt, Artificial Sequence
  Description of Artificial Sequence: Synthetic oligonucleotide
ggcuagggcuuguggcuug

SEQ ID NO: 629369 - RNA, 19 nt, Artificial Sequence
  Description of Artificial Sequence: Synthetic oligonucleotide
gucggaccgcuuguccgcc

SEQ ID NO: 629370 - RNA, 19 nt, Artificial Sequence
  Description of Artificial Sequence: Synthetic oligonucleotide
cugcccgcuucugggugcg

SEQ ID NO: 629371 - RNA, 19 nt, Artificial Sequence
  Description of Artificial Sequence: Synthetic oligonucleotide
ugucaccgagcuggauggu

SEQ ID NO: 629372 - RNA, 19 nt, Artificial Sequence
  Description of Artificial Sequence: Synthetic oligonucleotide
cagcgaaacgucugucugu

SEQ ID NO: 629373 - RNA, 19 nt, Artificial Sequence
  Description of Artificial Sequence: Synthetic oligonucleotide
gggaguuagucaugcccaa

SEQ ID NO: 629374 - RNA, 19 nt, Artificial Sequence
  Description of Artificial Sequence: Synthetic oligonucleotide
cuguagcaauugauaggua

SEQ ID NO: 629375 - RNA, 19 nt, Artificial Sequence
  Description of Artificial Sequence: Synthetic oligonucleotide
ccaccgguagggucagccc

SEQ ID NO: 629376 - RNA, 19 nt, Artificial Sequence
  Description of Artificial Sequence: Synthetic oligonucleotide
caccgagcuggaugguaga

SEQ ID NO: 629377 - RNA, 19 nt, Artificial Sequence
  Description of Artificial Sequence: Synthetic oligonucleotide
caccggucaccaacgcaga

SEQ ID NO: 629378 - RNA, 19 nt, Artificial Sequence
  Description of Artificial Sequence: Synthetic oligonucleotide
aagccgcgugcugcgugca

SEQ ID NO: 629379 - RNA, 19 nt, Artificial Sequence
  Description of Artificial Sequence: Synthetic oligonucleotide
ggagcccuauggcagcgaa

SEQ ID NO: 629380 - RNA, 19 nt, Artificial Sequence
  Description of Artificial Sequence: Synthetic oligonucleotide
ccggagauccuucagguau

SEQ ID NO: 629381 - RNA, 19 nt, Artificial Sequence
  Description of Artificial Sequence: Synthetic oligonucleotide
agaugguaguguggucaua

SEQ ID NO: 629382 - RNA, 19 nt, Artificial Sequence
  Description of Artificial Sequence: Synthetic oligonucleotide
gucaccgagcuggauggua

SEQ ID NO: 629383 - RNA, 19 nt, Artificial Sequence
  Description of Artificial Sequence: Synthetic oligonucleotide
gcaucaccgacggcagcag

SEQ ID NO: 629384 - RNA, 19 nt, Artificial Sequence
  Description of Artificial Sequence: Synthetic oligonucleotide
ccacgaccaucucccgugg

SEQ ID NO: 629385 - RNA, 19 nt, Artificial Sequence
  Description of Artificial Sequence: Synthetic oligonucleotide
gggucagcccaugacaccu

SEQ ID NO: 629386 - RNA, 19 nt, Artificial Sequence
  Description of Artificial Sequence: Synthetic oligonucleotide
gcgauccugccgaggagcc

SEQ ID NO: 629387 - RNA, 19 nt, Artificial Sequence
  Description of Artificial Sequence: Synthetic oligonucleotide
ggacgccugcaccggggcc

SEQ ID NO: 629388 - RNA, 19 nt, Artificial Sequence
  Description of Artificial Sequence: Synthetic oligonucleotide
cccuauggcagcgaaacgu

SEQ ID NO: 629389 - RNA, 19 nt, Artificial Sequence
  Description of Artificial Sequence: Synthetic oligonucleotide
ccaacguucccugcuccuc

SEQ ID NO: 629390 - RNA, 19 nt, Artificial Sequence
  Description of Artificial Sequence: Synthetic oligonucleotide
cccuaacaccaaccuuccc

SEQ ID NO: 629391 - RNA, 19 nt, Artificial Sequence
  Description of Artificial Sequence: Synthetic oligonucleotide
aggagcccuauggcagcga

SEQ ID NO: 629392 - RNA, 19 nt, Artificial Sequence
  Description of Artificial Sequence: Synthetic oligonucleotide
cagaucccuuguacuugaa

SEQ ID NO: 629393 - RNA, 19 nt, Artificial Sequence
  Description of Artificial Sequence: Synthetic oligonucleotide
gggugcgauccugccgagg

SEQ ID NO: 629394 - RNA, 19 nt, Artificial Sequence
  Description of Artificial Sequence: Synthetic oligonucleotide
ggcccagucaggguagcaa

SEQ ID NO: 629395 - RNA, 19 nt, Artificial Sequence
  Description of Artificial Sequence: Synthetic oligonucleotide
gcggccguuggacgccugc

SEQ ID NO: 629396 - RNA, 19 nt, Artificial Sequence
  Description of Artificial Sequence: Synthetic oligonucleotide
uggcguggcuagggcuugu

SEQ ID NO: 629397 - RNA, 19 nt, Artificial Sequence
  Description of Artificial Sequence: Synthetic oligonucleotide
aggcaagauugcaguccaa

SEQ ID NO: 629398 - RNA, 19 nt, Artificial Sequence
  Description of Artificial Sequence: Synthetic oligonucleotide
gcgaaacgucugucuguuc

SEQ ID NO: 629399 - RNA, 19 nt, Artificial Sequence
  Description of Artificial Sequence: Synthetic oligonucleotide
cccgcuucugggugcgauc

SEQ ID NO: 629400 - RNA, 19 nt, Artificial Sequence
  Description of Artificial Sequence: Synthetic oligonucleotide
auccagcgugcuggagggu

SEQ ID NO: 629401 - RNA, 19 nt, Artificial Sequence
  Description of Artificial Sequence: Synthetic oligonucleotide
ccggaucugucucuuccaa

SEQ ID NO: 629402 - RNA, 19 nt, Artificial Sequence
  Description of Artificial Sequence: Synthetic oligonucleotide
agaccucugcgaagccguu

SEQ ID NO: 629403 - RNA, 19 nt, Artificial Sequence
  Description of Artificial Sequence: Synthetic oligonucleotide
ggucaacaagccgcgugcu

SEQ ID NO: 629404 - RNA, 19 nt, Artificial Sequence
  Description of Artificial Sequence: Synthetic oligonucleotide
ggauggaguaaggguuaua

SEQ ID NO: 629405 - RNA, 19 nt, Artificial Sequence
  Description of Artificial Sequence: Synthetic oligonucleotide
cagcgugcuggagggucca

SEQ ID NO: 629406 - RNA, 19 nt, Artificial Sequence
  Description of Artificial Sequence: Synthetic oligonucleotide
ggguagcaacugggaauga

SEQ ID NO: 629407 - RNA, 19 nt, Artificial Sequence
  Description of Artificial Sequence: Synthetic oligonucleotide
ccucgccuaugguaccuaa

SEQ ID NO: 629408 - RNA, 19 nt, Artificial Sequence
  Description of Artificial Sequence: Synthetic oligonucleotide
gcaccggggccaggcggcg

SEQ ID NO: 629409 - RNA, 19 nt, Artificial Sequence
  Description of Artificial Sequence: Synthetic oligonucleotide
ccacuaugacaagcagaca

SEQ ID NO: 629410 - RNA, 19 nt, Artificial Sequence
  Description of Artificial Sequence: Synthetic oligonucleotide
ugcccgcuucugggugcga

SEQ ID NO: 629411 - RNA, 19 nt, Artificial Sequence
  Description of Artificial Sequence: Synthetic oligonucleotide
cuccaccgguagggucagc

SEQ ID NO: 629412 - RNA, 19 nt, Artificial Sequence
  Description of Artificial Sequence: Synthetic oligonucleotide
cccggagauccuucaggua

SEQ ID NO: 629413 - RNA, 19 nt, Artificial Sequence
  Description of Artificial Sequence: Synthetic oligonucleotide
gcgugcuggaggguccaaa

SEQ ID NO: 629414 - RNA, 19 nt, Artificial Sequence
  Description of Artificial Sequence: Synthetic oligonucleotide
guucagagucggaccgcuu

SEQ ID NO: 629415 - RNA, 19 nt, Artificial Sequence
  Description of Artificial Sequence: Synthetic oligonucleotide
ccgguagggucagcccaug

SEQ ID NO: 629416 - RNA, 19 nt, Artificial Sequence
  Description of Artificial Sequence: Synthetic oligonucleotide
ccccucuguagaacuugua

SEQ ID NO: 629417 - RNA, 19 nt, Artificial Sequence
  Description of Artificial Sequence: Synthetic oligonucleotide
cggaccgcuuguccgccca

SEQ ID NO: 629418 - RNA, 19 nt, Artificial Sequence
  Description of Artificial Sequence: Synthetic oligonucleotide
cgguagggucagcccauga

SEQ ID NO: 629419 - RNA, 19 nt, Artificial Sequence
  Description of Artificial Sequence: Synthetic oligonucleotide
ccgcgugcugcgugcagcu

SEQ ID NO: 629420 - RNA, 19 nt, Artificial Sequence
  Description of Artificial Sequence: Synthetic oligonucleotide
gcuuguccgcccagccccu

SEQ ID NO: 629421 - RNA, 19 nt, Artificial Sequence
  Description of Artificial Sequence: Synthetic oligonucleotide
ccaaucccuugccuuucuu

SEQ ID NO: 629422 - RNA, 19 nt, Artificial Sequence
  Description of Artificial Sequence: Synthetic oligonucleotide
ccucugcgaagccguucua

SEQ ID NO: 629423 - RNA, 19 nt, Artificial Sequence
  Description of Artificial Sequence: Synthetic oligonucleotide
ggcggaggacagcgagauu

SEQ ID NO: 629424 - RNA, 19 nt, Artificial Sequence
  Description of Artificial Sequence: Synthetic oligonucleotide
cggccguuggacgccugca

SEQ ID NO: 629425 - RNA, 19 nt, Artificial Sequence
  Description of Artificial Sequence: Synthetic oligonucleotide
cggcggccguuggacgccu

SEQ ID NO: 629426 - RNA, 19 nt, Artificial Sequence
  Description of Artificial Sequence: Synthetic oligonucleotide
guugugauaacauugacag

SEQ ID NO: 629427 - RNA, 19 nt, Artificial Sequence
  Description of Artificial Sequence: Synthetic oligonucleotide
uuuauagugauuauacugc

SEQ ID NO: 629428 - RNA, 19 nt, Artificial Sequence
  Description of Artificial Sequence: Synthetic oligonucleotide
gauugaauaaucucuggcg

SEQ ID NO: 629429 - RNA, 19 nt, Artificial Sequence
  Description of Artificial Sequence: Synthetic oligonucleotide
auuuauagugauuauacug

SEQ ID NO: 629430 - RNA, 19 nt, Artificial Sequence
  Description of Artificial Sequence: Synthetic oligonucleotide
auagugauuauacugcugg

SEQ ID NO: 629431 - RNA, 19 nt, Artificial Sequence
  Description of Artificial Sequence: Synthetic oligonucleotide
auagcauugauuccuacgg

SEQ ID NO: 629432 - RNA, 19 nt, Artificial Sequence
  Description of Artificial Sequence: Synthetic oligonucleotide
uaucgcaucaucauaaagu

SEQ ID NO: 629433 - RNA, 19 nt, Artificial Sequence
  Description of Artificial Sequence: Synthetic oligonucleotide
uuugguuguaacuugaaaa

SEQ ID NO: 629434 - RNA, 19 nt, Artificial Sequence
  Description of Artificial Sequence: Synthetic oligonucleotide
uuuauguucuugaugucag

SEQ ID NO: 629435 - RNA, 19 nt, Artificial Sequence
  Description of Artificial Sequence: Synthetic oligonucleotide
ugcaaaaugucauucggag

SEQ ID NO: 629436 - RNA, 19 nt, Artificial Sequence
  Description of Artificial Sequence: Synthetic oligonucleotide
uauagcauugauuccuacg

SEQ ID NO: 629437 - RNA, 19 nt, Artificial Sequence
  Description of Artificial Sequence: Synthetic oligonucleotide
ugauuauacugcuggaggg

SEQ ID NO: 629438 - RNA, 19 nt, Artificial Sequence
  Description of Artificial Sequence: Synthetic oligonucleotide
ucaauagaggcuucgguag

SEQ ID NO: 629439 - RNA, 19 nt, Artificial Sequence
  Description of Artificial Sequence: Synthetic oligonucleotide
uagaguucgaucaucacgu

SEQ ID NO: 629440 - RNA, 19 nt, Artificial Sequence
  Description of Artificial Sequence: Synthetic oligonucleotide
ucgauuucgauguauuucc

SEQ ID NO: 629441 - RNA, 19 nt, Artificial Sequence
  Description of Artificial Sequence: Synthetic oligonucleotide
ugugauaacauugacaguu

SEQ ID NO: 629442 - RNA, 19 nt, Artificial Sequence
  Description of Artificial Sequence: Synthetic oligonucleotide
guacaugaaauuuugcagc

SEQ ID NO: 629443 - RNA, 19 nt, Artificial Sequence
  Description of Artificial Sequence: Synthetic oligonucleotide
ucgaucaucacguccaaag

SEQ ID NO: 629444 - RNA, 19 nt, Artificial Sequence
  Description of Artificial Sequence: Synthetic oligonucleotide
aauguaaucuuuagcaucu

SEQ ID NO: 629445 - RNA, 19 nt, Artificial Sequence
  Description of Artificial Sequence: Synthetic oligonucleotide
uuagcaucauuccacgaug

SEQ ID NO: 629446 - RNA, 19 nt, Artificial Sequence
  Description of Artificial Sequence: Synthetic oligonucleotide
guuacugagaugcuccggg

SEQ ID NO: 629447 - RNA, 19 nt, Artificial Sequence
  Description of Artificial Sequence: Synthetic oligonucleotide
uuuagcaucauuccacgau

SEQ ID NO: 629448 - RNA, 19 nt, Artificial Sequence
  Description of Artificial Sequence: Synthetic oligonucleotide
uuugcuagguuuauuuggu

SEQ ID NO: 629449 - RNA, 19 nt, Artificial Sequence
  Description of Artificial Sequence: Synthetic oligonucleotide
aaagcagcaacuaguaucu

SEQ ID NO: 629450 - RNA, 19 nt, Artificial Sequence
  Description of Artificial Sequence: Synthetic oligonucleotide
acuaguaucuuggugaucu

SEQ ID NO: 629451 - RNA, 19 nt, Artificial Sequence
  Description of Artificial Sequence: Synthetic oligonucleotide
aaaauggauuuauuuuggu

SEQ ID NO: 629452 - RNA, 19 nt, Artificial Sequence
  Description of Artificial Sequence: Synthetic oligonucleotide
aaagcucgugaauucccac

SEQ ID NO: 629453 - RNA, 19 nt, Artificial Sequence
  Description of Artificial Sequence: Synthetic oligonucleotide
ugcuaaguuacuucuauuc

SEQ ID NO: 629454 - RNA, 19 nt, Artificial Sequence
  Description of Artificial Sequence: Synthetic oligonucleotide
uauacugcuggagggaacg

SEQ ID NO: 629455 - RNA, 19 nt, Artificial Sequence
  Description of Artificial Sequence: Synthetic oligonucleotide
ucacugucgauuucgaugu

SEQ ID NO: 629456 - RNA, 19 nt, Artificial Sequence
  Description of Artificial Sequence: Synthetic oligonucleotide
uugugugucuuauacugag

SEQ ID NO: 629457 - RNA, 19 nt, Artificial Sequence
  Description of Artificial Sequence: Synthetic oligonucleotide
gggaucaugaaucaaauga

SEQ ID NO: 629458 - RNA, 19 nt, Artificial Sequence
  Description of Artificial Sequence: Synthetic oligonucleotide
uugguuguaacuugaaaau

SEQ ID NO: 629459 - RNA, 19 nt, Artificial Sequence
  Description of Artificial Sequence: Synthetic oligonucleotide
ucuccuuacagcucucuag

SEQ ID NO: 629460 - RNA, 19 nt, Artificial Sequence
  Description of Artificial Sequence: Synthetic oligonucleotide
aaguuacugagaugcuccg

SEQ ID NO: 629461 - RNA, 19 nt, Artificial Sequence
  Description of Artificial Sequence: Synthetic oligonucleotide
gaucaucacguccaaagac

SEQ ID NO: 629462 - RNA, 19 nt, Artificial Sequence
  Description of Artificial Sequence: Synthetic oligonucleotide
uugaauaaucucuggcggc

SEQ ID NO: 629463 - RNA, 19 nt, Artificial Sequence
  Description of Artificial Sequence: Synthetic oligonucleotide
uuaugaaggcguucaaugu

SEQ ID NO: 629464 - RNA, 19 nt, Artificial Sequence
  Description of Artificial Sequence: Synthetic oligonucleotide
ugcuagguuuauuugguug

SEQ ID NO: 629465 - RNA, 19 nt, Artificial Sequence
  Description of Artificial Sequence: Synthetic oligonucleotide
ugauggauugaugagauuu

SEQ ID NO: 629466 - RNA, 19 nt, Artificial Sequence
  Description of Artificial Sequence: Synthetic oligonucleotide
uauagugauuauacugcug

SEQ ID NO: 629467 - RNA, 19 nt, Artificial Sequence
  Description of Artificial Sequence: Synthetic oligonucleotide
uucaauagaggcuucggua

SEQ ID NO: 629468 - RNA, 19 nt, Artificial Sequence
  Description of Artificial Sequence: Synthetic oligonucleotide
uguuuggcguuuauguucu

SEQ ID NO: 629469 - RNA, 19 nt, Artificial Sequence
  Description of Artificial Sequence: Synthetic oligonucleotide
aaaccuaggccaccgucag

SEQ ID NO: 629470 - RNA, 19 nt, Artificial Sequence
  Description of Artificial Sequence: Synthetic oligonucleotide
agcaauucaccccuggacu

SEQ ID NO: 629471 - RNA, 19 nt, Artificial Sequence
  Description of Artificial Sequence: Synthetic oligonucleotide
aaauuuugcagcaccacau

SEQ ID NO: 629472 - RNA, 19 nt, Artificial Sequence
  Description of Artificial Sequence: Synthetic oligonucleotide
cuucgguagguuuaccccg

SEQ ID NO: 629473 - RNA, 19 nt, Artificial Sequence
  Description of Artificial Sequence: Synthetic oligonucleotide
ucacaaauuccuuucgguc

SEQ ID NO: 629474 - RNA, 19 nt, Artificial Sequence
  Description of Artificial Sequence: Synthetic oligonucleotide
caguucuuggaaaaccuag

SEQ ID NO: 629475 - RNA, 19 nt, Artificial Sequence
  Description of Artificial Sequence: Synthetic oligonucleotide
ugugcagagucuuccguag

SEQ ID NO: 629476 - RNA, 19 nt, Artificial Sequence
  Description of Artificial Sequence: Synthetic oligonucleotide
auaucgcaucaucauaaag

SEQ ID NO: 629477 - RNA, 19 nt, Artificial Sequence
  Description of Artificial Sequence: Synthetic oligonucleotide
aguugcuagucucgucucc

SEQ ID NO: 629478 - RNA, 19 nt, Artificial Sequence
  Description of Artificial Sequence: Synthetic oligonucleotide
uugaugucagucacaauau

SEQ ID NO: 629479 - RNA, 19 nt, Artificial Sequence
  Description of Artificial Sequence: Synthetic oligonucleotide
uuaaaacccgacucgugcu

SEQ ID NO: 629480 - RNA, 19 nt, Artificial Sequence
  Description of Artificial Sequence: Synthetic oligonucleotide
gcaacuaguaucuugguga

SEQ ID NO: 629481 - RNA, 19 nt, Artificial Sequence
  Description of Artificial Sequence: Synthetic oligonucleotide
auuucgauguauuuccuuu

SEQ ID NO: 629482 - RNA, 19 nt, Artificial Sequence
  Description of Artificial Sequence: Synthetic oligonucleotide
agucucgucuccuugucag

SEQ ID NO: 629483 - RNA, 19 nt, Artificial Sequence
  Description of Artificial Sequence: Synthetic oligonucleotide
uuacguucuuaucuuugug

SEQ ID NO: 629484 - RNA, 19 nt, Artificial Sequence
  Description of Artificial Sequence: Synthetic oligonucleotide
cuggaauguaaucuuuagc

SEQ ID NO: 629485 - RNA, 19 nt, Artificial Sequence
  Description of Artificial Sequence: Synthetic oligonucleotide
uuccguaggagcuugucgu

SEQ ID NO: 629486 - RNA, 19 nt, Artificial Sequence
  Description of Artificial Sequence: Synthetic oligonucleotide
agugauugaauaaucucug

SEQ ID NO: 629487 - RNA, 19 nt, Artificial Sequence
  Description of Artificial Sequence: Synthetic oligonucleotide
aaauuguuggccaccguca

SEQ ID NO: 629488 - RNA, 19 nt, Artificial Sequence
  Description of Artificial Sequence: Synthetic oligonucleotide
cuggagggaacguaccucg

SEQ ID NO: 629489 - RNA, 19 nt, Artificial Sequence
  Description of Artificial Sequence: Synthetic oligonucleotide
ugaauaaucucuggcggca

SEQ ID NO: 629490 - RNA, 19 nt, Artificial Sequence
  Description of Artificial Sequence: Synthetic oligonucleotide
uuauacugagccagguccu

SEQ ID NO: 629491 - RNA, 19 nt, Artificial Sequence
  Description of Artificial Sequence: Synthetic oligonucleotide
cuugaucagguucuguaac

SEQ ID NO: 629492 - RNA, 19 nt, Artificial Sequence
  Description of Artificial Sequence: Synthetic oligonucleotide
cauauuggauuuauaguga

SEQ ID NO: 629493 - RNA, 19 nt, Artificial Sequence
  Description of Artificial Sequence: Synthetic oligonucleotide
agcaacuaguaucuuggug

SEQ ID NO: 629494 - RNA, 19 nt, Artificial Sequence
  Description of Artificial Sequence: Synthetic oligonucleotide
acggucaugacuuccccag

SEQ ID NO: 629495 - RNA, 19 nt, Artificial Sequence
  Description of Artificial Sequence: Synthetic oligonucleotide
acaucgagcuguuaucucu

SEQ ID NO: 629496 - RNA, 19 nt, Artificial Sequence
  Description of Artificial Sequence: Synthetic oligonucleotide
uaaaacccgacucgugcug

SEQ ID NO: 629497 - RNA, 19 nt, Artificial Sequence
  Description of Artificial Sequence: Synthetic oligonucleotide
cauucggagauccgggucc

SEQ ID NO: 629498 - RNA, 19 nt, Artificial Sequence
  Description of Artificial Sequence: Synthetic oligonucleotide
cuauaucgcaucaucauaa

SEQ ID NO: 629499 - RNA, 19 nt, Artificial Sequence
  Description of Artificial Sequence: Synthetic oligonucleotide
uucgguagguuuaccccgg

SEQ ID NO: 629500 - RNA, 19 nt, Artificial Sequence
  Description of Artificial Sequence: Synthetic oligonucleotide
uguccggaagagaugaauc

SEQ ID NO: 629501 - RNA, 19 nt, Artificial Sequence
  Description of Artificial Sequence: Synthetic oligonucleotide
uggcuauaucgcaucauca

SEQ ID NO: 629502 - RNA, 19 nt, Artificial Sequence
  Description of Artificial Sequence: Synthetic oligonucleotide
ugagcagugauugaauaau

SEQ ID NO: 629503 - RNA, 19 nt, Artificial Sequence
  Description of Artificial Sequence: Synthetic oligonucleotide
cuccuuacagcucucuagc

SEQ ID NO: 629504 - RNA, 19 nt, Artificial Sequence
  Description of Artificial Sequence: Synthetic oligonucleotide
gaaaagcucgugaauuccc

SEQ ID NO: 629505 - RNA, 19 nt, Artificial Sequence
  Description of Artificial Sequence: Synthetic oligonucleotide
uugaucagguucuguaacu

SEQ ID NO: 629506 - RNA, 19 nt, Artificial Sequence
  Description of Artificial Sequence: Synthetic oligonucleotide
augucauucggagauccgg

SEQ ID NO: 629507 - RNA, 19 nt, Artificial Sequence
  Description of Artificial Sequence: Synthetic oligonucleotide
ugcuccuggaauguaaucu

SEQ ID NO: 629508 - RNA, 19 nt, Artificial Sequence
  Description of Artificial Sequence: Synthetic oligonucleotide
ugugucuuauacugagcca

SEQ ID NO: 629509 - RNA, 19 nt, Artificial Sequence
  Description of Artificial Sequence: Synthetic oligonucleotide
gaguucgaucaucacgucc

SEQ ID NO: 629510 - RNA, 19 nt, Artificial Sequence
  Description of Artificial Sequence: Synthetic oligonucleotide
aaugucaaagcagcaacua

SEQ ID NO: 629511 - RNA, 19 nt, Artificial Sequence
  Description of Artificial Sequence: Synthetic oligonucleotide
aucauuacguucuuaucuu

SEQ ID NO: 629512 - RNA, 19 nt, Artificial Sequence
  Description of Artificial Sequence: Synthetic oligonucleotide
cauucggauuuucuggaag

SEQ ID NO: 629513 - RNA, 19 nt, Artificial Sequence
  Description of Artificial Sequence: Synthetic oligonucleotide
aguucgaucaucacgucca

SEQ ID NO: 629514 - RNA, 19 nt, Artificial Sequence
  Description of Artificial Sequence: Synthetic oligonucleotide
aguugugauaacauugaca

SEQ ID NO: 629515 - RNA, 19 nt, Artificial Sequence
  Description of Artificial Sequence: Synthetic oligonucleotide
guaccucggauguacgccg

SEQ ID NO: 629516 - RNA, 19 nt, Artificial Sequence
  Description of Artificial Sequence: Synthetic oligonucleotide
auuccuacggucaugacuu

SEQ ID NO: 629517 - RNA, 19 nt, Artificial Sequence
  Description of Artificial Sequence: Synthetic oligonucleotide
acguaccucggauguacgc

SEQ ID NO: 629518 - RNA, 19 nt, Artificial Sequence
  Description of Artificial Sequence: Synthetic oligonucleotide
agauccggguccaagacag

SEQ ID NO: 629519 - RNA, 19 nt, Artificial Sequence
  Description of Artificial Sequence: Synthetic oligonucleotide
ucaucacguccaaagacau

SEQ ID NO: 629520 - RNA, 19 nt, Artificial Sequence
  Description of Artificial Sequence: Synthetic oligonucleotide
acccgacucgugcugaugg

SEQ ID NO: 629521 - RNA, 19 nt, Artificial Sequence
  Description of Artificial Sequence: Synthetic oligonucleotide
ucggauguacgccggcggg

SEQ ID NO: 629522 - RNA, 19 nt, Artificial Sequence
  Description of Artificial Sequence: Synthetic oligonucleotide
uucgucggaagaguggugc

SEQ ID NO: 629523 - RNA, 19 nt, Artificial Sequence
  Description of Artificial Sequence: Synthetic oligonucleotide
ggaagaguggugcacauca

SEQ ID NO: 629524 - RNA, 19 nt, Artificial Sequence
  Description of Artificial Sequence: Synthetic oligonucleotide
aaugucauucggagauccg

SEQ ID NO: 629525 - RNA, 19 nt, Artificial Sequence
  Description of Artificial Sequence: Synthetic oligonucleotide
guauucuugcuucaauaga

SEQ ID NO: 629526 - RNA, 19 nt, Artificial Sequence
  Description of Artificial Sequence: Synthetic oligonucleotide
uauuugguuguaacuugaa

SEQ ID NO: 629527 - RNA, 19 nt, Artificial Sequence
  Description of Artificial Sequence: Synthetic oligonucleotide
ucgugaauucccaccaauc

SEQ ID NO: 629528 - RNA, 19 nt, Artificial Sequence
  Description of Artificial Sequence: Synthetic oligonucleotide
uuuaccccggaacuucuuc

SEQ ID NO: 629529 - RNA, 19 nt, Artificial Sequence
  Description of Artificial Sequence: Synthetic oligonucleotide
gauuuauagugauuauacu

SEQ ID NO: 629530 - RNA, 19 nt, Artificial Sequence
  Description of Artificial Sequence: Synthetic oligonucleotide
caauagaggcuucgguagg

SEQ ID NO: 629531 - RNA, 19 nt, Artificial Sequence
  Description of Artificial Sequence: Synthetic oligonucleotide
aauagaggcuucgguaggu

SEQ ID NO: 629532 - RNA, 19 nt, Artificial Sequence
  Description of Artificial Sequence: Synthetic oligonucleotide
ucuucgucggaagaguggu

SEQ ID NO: 629533 - RNA, 19 nt, Artificial Sequence
  Description of Artificial Sequence: Synthetic oligonucleotide
uccuguguuaaaacccgac

SEQ ID NO: 629534 - RNA, 19 nt, Artificial Sequence
  Description of Artificial Sequence: Synthetic oligonucleotide
acguccaaagacaucuugg

SEQ ID NO: 629535 - RNA, 19 nt, Artificial Sequence
  Description of Artificial Sequence: Synthetic oligonucleotide
ugaggguucaguguccgga

SEQ ID NO: 629536 - RNA, 19 nt, Artificial Sequence
  Description of Artificial Sequence: Synthetic oligonucleotide
gauuccuacggucaugacu

SEQ ID NO: 629537 - RNA, 19 nt, Artificial Sequence
  Description of Artificial Sequence: Synthetic oligonucleotide
uuucggucuguccuuccug

SEQ ID NO: 629538 - RNA, 19 nt, Artificial Sequence
  Description of Artificial Sequence: Synthetic oligonucleotide
aaaagcucgugaauuccca

SEQ ID NO: 629539 - RNA, 19 nt, Artificial Sequence
  Description of Artificial Sequence: Synthetic oligonucleotide
gucguggcaucgcagaagc

SEQ ID NO: 629540 - RNA, 19 nt, Artificial Sequence
  Description of Artificial Sequence: Synthetic oligonucleotide
acauucuggcuauaucgca

SEQ ID NO: 629541 - RNA, 19 nt, Artificial Sequence
  Description of Artificial Sequence: Synthetic oligonucleotide
gacaucauuacguucuuau

SEQ ID NO: 629542 - RNA, 19 nt, Artificial Sequence
  Description of Artificial Sequence: Synthetic oligonucleotide
uauaucgcaucaucauaaa

SEQ ID NO: 629543 - RNA, 19 nt, Artificial Sequence
  Description of Artificial Sequence: Synthetic oligonucleotide
uucaaaagugcaucucgua

SEQ ID NO: 629544 - RNA, 19 nt, Artificial Sequence
  Description of Artificial Sequence: Synthetic oligonucleotide
aucaucacguccaaagaca

SEQ ID NO: 629545 - RNA, 19 nt, Artificial Sequence
  Description of Artificial Sequence: Synthetic oligonucleotide
caguaacaaaauuguuggc

SEQ ID NO: 629546 - RNA, 19 nt, Artificial Sequence
  Description of Artificial Sequence: Synthetic oligonucleotide
ugauaacauugacaguuuu

SEQ ID NO: 629547 - RNA, 19 nt, Artificial Sequence
  Description of Artificial Sequence: Synthetic oligonucleotide
gaaggcguucaaugucccg

SEQ ID NO: 629548 - RNA, 19 nt, Artificial Sequence
  Description of Artificial Sequence: Synthetic oligonucleotide
uaguaucuuggugaucuug

SEQ ID NO: 629549 - RNA, 19 nt, Artificial Sequence
  Description of Artificial Sequence: Synthetic oligonucleotide
cuggcuauaucgcaucauc

SEQ ID NO: 629550 - RNA, 19 nt, Artificial Sequence
  Description of Artificial Sequence: Synthetic oligonucleotide
uauuggauuuauagugauu

SEQ ID NO: 629551 - RNA, 19 nt, Artificial Sequence
  Description of Artificial Sequence: Synthetic oligonucleotide
acaucaacccauucgccau

SEQ ID NO: 629552 - RNA, 19 nt, Artificial Sequence
  Description of Artificial Sequence: Synthetic oligonucleotide
cagugauugaauaaucucu

SEQ ID NO: 629553 - RNA, 19 nt, Artificial Sequence
  Description of Artificial Sequence: Synthetic oligonucleotide
gguagguuuaccccggaac

SEQ ID NO: 629554 - RNA, 19 nt, Artificial Sequence
  Description of Artificial Sequence: Synthetic oligonucleotide
ugaacaucaccagcucugc

SEQ ID NO: 629555 - RNA, 19 nt, Artificial Sequence
  Description of Artificial Sequence: Synthetic oligonucleotide
uagcaucauuccacgaugu

SEQ ID NO: 629556 - RNA, 19 nt, Artificial Sequence
  Description of Artificial Sequence: Synthetic oligonucleotide
uuauagcauugauuccuac

SEQ ID NO: 629557 - RNA, 19 nt, Artificial Sequence
  Description of Artificial Sequence: Synthetic oligonucleotide
accaaucuggagaugaggu

SEQ ID NO: 629558 - RNA, 19 nt, Artificial Sequence
  Description of Artificial Sequence: Synthetic oligonucleotide
gaacguaccucggauguac

SEQ ID NO: 629559 - RNA, 19 nt, Artificial Sequence
  Description of Artificial Sequence: Synthetic oligonucleotide
accccggaacuucuucugc

SEQ ID NO: 629560 - RNA, 19 nt, Artificial Sequence
  Description of Artificial Sequence: Synthetic oligonucleotide
uagcauugauuccuacggu

SEQ ID NO: 629561 - RNA, 19 nt, Artificial Sequence
  Description of Artificial Sequence: Synthetic oligonucleotide
gucgauuucgauguauuuc

SEQ ID NO: 629562 - RNA, 19 nt, Artificial Sequence
  Description of Artificial Sequence: Synthetic oligonucleotide
ugguuguaacuugaaaauc

SEQ ID NO: 629563 - RNA, 19 nt, Artificial Sequence
  Description of Artificial Sequence: Synthetic oligonucleotide
uuaccccggaacuucuucu

SEQ ID NO: 629564 - RNA, 19 nt, Artificial Sequence
  Description of Artificial Sequence: Synthetic oligonucleotide
uguaccggacauucuggcu

SEQ ID NO: 629565 - RNA, 19 nt, Artificial Sequence
  Description of Artificial Sequence: Synthetic oligonucleotide
auuguguacaugaaauuuu

SEQ ID NO: 629566 - RNA, 19 nt, Artificial Sequence
  Description of Artificial Sequence: Synthetic oligonucleotide
ucgucuccuugucagauuu

SEQ ID NO: 629567 - RNA, 19 nt, Artificial Sequence
  Description of Artificial Sequence: Synthetic oligonucleotide
aaauuccuuucggucuguc

SEQ ID NO: 629568 - RNA, 19 nt, Artificial Sequence
  Description of Artificial Sequence: Synthetic oligonucleotide
agcagugauugaauaaucu

SEQ ID NO: 629569 - RNA, 19 nt, Artificial Sequence
  Description of Artificial Sequence: Synthetic oligonucleotide
aacuaguaucuuggugauc

SEQ ID NO: 629570 - RNA, 19 nt, Artificial Sequence
  Description of Artificial Sequence: Synthetic oligonucleotide
aguuacugagaugcuccgg

SEQ ID NO: 629571 - RNA, 19 nt, Artificial Sequence
  Description of Artificial Sequence: Synthetic oligonucleotide
acagcaauucaccccugga

SEQ ID NO: 629572 - RNA, 19 nt, Artificial Sequence
  Description of Artificial Sequence: Synthetic oligonucleotide
uggagggaacguaccucgg

SEQ ID NO: 629573 - RNA, 19 nt, Artificial Sequence
  Description of Artificial Sequence: Synthetic oligonucleotide
agaguucgaucaucacguc

SEQ ID NO: 629574 - RNA, 19 nt, Artificial Sequence
  Description of Artificial Sequence: Synthetic oligonucleotide
agagucuuccguaggagcu

SEQ ID NO: 629575 - RNA, 19 nt, Artificial Sequence
  Description of Artificial Sequence: Synthetic oligonucleotide
augaaauuuugcagcacca

SEQ ID NO: 629576 - RNA, 19 nt, Artificial Sequence
  Description of Artificial Sequence: Synthetic oligonucleotide
aaaacccgacucgugcuga

SEQ ID NO: 629577 - RNA, 19 nt, Artificial Sequence
  Description of Artificial Sequence: Synthetic oligonucleotide
cgggaaguuacugagaugc

SEQ ID NO: 629578 - RNA, 19 nt, Artificial Sequence
  Description of Artificial Sequence: Synthetic oligonucleotide
ucucguagugccagcugcu

SEQ ID NO: 629579 - RNA, 19 nt, Artificial Sequence
  Description of Artificial Sequence: Synthetic oligonucleotide
uuacugagaugcuccgggu

SEQ ID NO: 629580 - RNA, 19 nt, Artificial Sequence
  Description of Artificial Sequence: Synthetic oligonucleotide
gcagugauugaauaaucuc

SEQ ID NO: 629581 - RNA, 19 nt, Artificial Sequence
  Description of Artificial Sequence: Synthetic oligonucleotide
guagguuuaccccggaacu

SEQ ID NO: 629582 - RNA, 19 nt, Artificial Sequence
  Description of Artificial Sequence: Synthetic oligonucleotide
cucggauguacgccggcgg

SEQ ID NO: 629583 - RNA, 19 nt, Artificial Sequence
  Description of Artificial Sequence: Synthetic oligonucleotide
ugucguggcaucgcagaag

SEQ ID NO: 629584 - RNA, 19 nt, Artificial Sequence
  Description of Artificial Sequence: Synthetic oligonucleotide
auuauacugcuggagggaa

SEQ ID NO: 629585 - RNA, 19 nt, Artificial Sequence
  Description of Artificial Sequence: Synthetic oligonucleotide
cucggauucugagucacug

SEQ ID NO: 629586 - RNA, 19 nt, Artificial Sequence
  Description of Artificial Sequence: Synthetic oligonucleotide
ugucgauuucgauguauuu

SEQ ID NO: 629587 - RNA, 19 nt, Artificial Sequence
  Description of Artificial Sequence: Synthetic oligonucleotide
gcuucgguagguuuacccc

SEQ ID NO: 629588 - RNA, 19 nt, Artificial Sequence
  Description of Artificial Sequence: Synthetic oligonucleotide
ugcuccggguagcaguggc

SEQ ID NO: 629589 - RNA, 19 nt, Artificial Sequence
  Description of Artificial Sequence: Synthetic oligonucleotide
aacguaccucggauguacg

SEQ ID NO: 629590 - RNA, 19 nt, Artificial Sequence
  Description of Artificial Sequence: Synthetic oligonucleotide
uaccucggauguacgccgg

SEQ ID NO: 629591 - RNA, 19 nt, Artificial Sequence
  Description of Artificial Sequence: Synthetic oligonucleotide
gagacuggcacuuucccau

SEQ ID NO: 629592 - RNA, 19 nt, Artificial Sequence
  Description of Artificial Sequence: Synthetic oligonucleotide
uccggguccaagacagugu

SEQ ID NO: 629593 - RNA, 19 nt, Artificial Sequence
  Description of Artificial Sequence: Synthetic oligonucleotide
uagucucgucuccuuguca

SEQ ID NO: 629594 - RNA, 19 nt, Artificial Sequence
  Description of Artificial Sequence: Synthetic oligonucleotide
cacguccaaagacaucuug

SEQ ID NO: 629595 - RNA, 19 nt, Artificial Sequence
  Description of Artificial Sequence: Synthetic oligonucleotide
uccuuacagcucucuagcu

SEQ ID NO: 629596 - RNA, 19 nt, Artificial Sequence
  Description of Artificial Sequence: Synthetic oligonucleotide
auugauuccuacggucaug

SEQ ID NO: 629597 - RNA, 19 nt, Artificial Sequence
  Description of Artificial Sequence: Synthetic oligonucleotide
uccguaggagcuugucgug

SEQ ID NO: 629598 - RNA, 19 nt, Artificial Sequence
  Description of Artificial Sequence: Synthetic oligonucleotide
caguugugauaacauugac

SEQ ID NO: 629599 - RNA, 19 nt, Artificial Sequence
  Description of Artificial Sequence: Synthetic oligonucleotide
uaccccggaacuucuucug

SEQ ID NO: 629600 - RNA, 19 nt, Artificial Sequence
  Description of Artificial Sequence: Synthetic oligonucleotide
uggugaucuuggagaaaca

SEQ ID NO: 629601 - RNA, 19 nt, Artificial Sequence
  Description of Artificial Sequence: Synthetic oligonucleotide
gacaucgagcuguuaucuc

SEQ ID NO: 629602 - RNA, 19 nt, Artificial Sequence
  Description of Artificial Sequence: Synthetic oligonucleotide
guaccggacauucuggcua

SEQ ID NO: 629603 - RNA, 19 nt, Artificial Sequence
  Description of Artificial Sequence: Synthetic oligonucleotide
ggcuucgguagguuuaccc

SEQ ID NO: 629604 - RNA, 19 nt, Artificial Sequence
  Description of Artificial Sequence: Synthetic oligonucleotide
gagauccggguccaagaca

SEQ ID NO: 629605 - RNA, 19 nt, Artificial Sequence
  Description of Artificial Sequence: Synthetic oligonucleotide
gaauaaucucuggcggcac

SEQ ID NO: 629606 - RNA, 19 nt, Artificial Sequence
  Description of Artificial Sequence: Synthetic oligonucleotide
ccauucgccauccuccucc

SEQ ID NO: 629607 - RNA, 19 nt, Artificial Sequence
  Description of Artificial Sequence: Synthetic oligonucleotide
auguacgccggcggguccc

SEQ ID NO: 629608 - RNA, 19 nt, Artificial Sequence
  Description of Artificial Sequence: Synthetic oligonucleotide
uuccacgauguuccuccug

SEQ ID NO: 629609 - RNA, 19 nt, Artificial Sequence
  Description of Artificial Sequence: Synthetic oligonucleotide
aaugucccgcagagacagc

SEQ ID NO: 629610 - RNA, 19 nt, Artificial Sequence
  Description of Artificial Sequence: Synthetic oligonucleotide
uccuacggucaugacuucc

SEQ ID NO: 629611 - RNA, 19 nt, Artificial Sequence
  Description of Artificial Sequence: Synthetic oligonucleotide
ggaucaugaaucaaaugaa

SEQ ID NO: 629612 - RNA, 19 nt, Artificial Sequence
  Description of Artificial Sequence: Synthetic oligonucleotide
ccucacaaauuccuuucgg

SEQ ID NO: 629613 - RNA, 19 nt, Artificial Sequence
  Description of Artificial Sequence: Synthetic oligonucleotide
gacaacuugcugcuaaguu

SEQ ID NO: 629614 - RNA, 19 nt, Artificial Sequence
  Description of Artificial Sequence: Synthetic oligonucleotide
ugcaucucguagugccagc

SEQ ID NO: 629615 - RNA, 19 nt, Artificial Sequence
  Description of Artificial Sequence: Synthetic oligonucleotide
ucuuguguuuggcguuuau

SEQ ID NO: 629616 - RNA, 19 nt, Artificial Sequence
  Description of Artificial Sequence: Synthetic oligonucleotide
caagaucaaugcuuugcaa

SEQ ID NO: 629617 - RNA, 19 nt, Artificial Sequence
  Description of Artificial Sequence: Synthetic oligonucleotide
auccggguccaagacagug

SEQ ID NO: 629618 - RNA, 19 nt, Artificial Sequence
  Description of Artificial Sequence: Synthetic oligonucleotide
ugcugcuaaguuacuucua

SEQ ID NO: 629619 - RNA, 19 nt, Artificial Sequence
  Description of Artificial Sequence: Synthetic oligonucleotide
gauguacgccggcgggucc

SEQ ID NO: 629620 - RNA, 19 nt, Artificial Sequence
  Description of Artificial Sequence: Synthetic oligonucleotide
gguucaguguccggaagag

SEQ ID NO: 629621 - RNA, 19 nt, Artificial Sequence
  Description of Artificial Sequence: Synthetic oligonucleotide
cuagucucgucuccuuguc

SEQ ID NO: 629622 - RNA, 19 nt, Artificial Sequence
  Description of Artificial Sequence: Synthetic oligonucleotide
gcuucaauagaggcuucgg

SEQ ID NO: 629623 - RNA, 19 nt, Artificial Sequence
  Description of Artificial Sequence: Synthetic oligonucleotide
gcaaaaugucauucggaga

SEQ ID NO: 629624 - RNA, 19 nt, Artificial Sequence
  Description of Artificial Sequence: Synthetic oligonucleotide
uggcguuuauguucuugau

SEQ ID NO: 629625 - RNA, 19 nt, Artificial Sequence
  Description of Artificial Sequence: Synthetic oligonucleotide
acugucgauuucgauguau

SEQ ID NO: 629626 - RNA, 19 nt, Artificial Sequence
  Description of Artificial Sequence: Synthetic oligonucleotide
uagaggcuucgguagguuu

SEQ ID NO: 629627 - RNA, 19 nt, Artificial Sequence
  Description of Artificial Sequence: Synthetic oligonucleotide
cuagcaaacuugauggauu

SEQ ID NO: 629628 - RNA, 19 nt, Artificial Sequence
  Description of Artificial Sequence: Synthetic oligonucleotide
ugcaguugcuagucucguc

SEQ ID NO: 629629 - RNA, 19 nt, Artificial Sequence
  Description of Artificial Sequence: Synthetic oligonucleotide
gauuucgauguauuuccuu

SEQ ID NO: 629630 - RNA, 19 nt, Artificial Sequence
  Description of Artificial Sequence: Synthetic oligonucleotide
aaacccgacucgugcugau

SEQ ID NO: 629631 - RNA, 19 nt, Artificial Sequence
  Description of Artificial Sequence: Synthetic oligonucleotide
cugccagaucuuugcuagg

SEQ ID NO: 629632 - RNA, 19 nt, Artificial Sequence
  Description of Artificial Sequence: Synthetic oligonucleotide
uaccggacauucuggcuau

SEQ ID NO: 629633 - RNA, 19 nt, Artificial Sequence
  Description of Artificial Sequence: Synthetic oligonucleotide
ggagauccggguccaagac

SEQ ID NO: 629634 - RNA, 19 nt, Artificial Sequence
  Description of Artificial Sequence: Synthetic oligonucleotide
caucucguagugccagcug

SEQ ID NO: 629635 - RNA, 19 nt, Artificial Sequence
  Description of Artificial Sequence: Synthetic oligonucleotide
cuucaauagaggcuucggu

SEQ ID NO: 629636 - RNA, 19 nt, Artificial Sequence
  Description of Artificial Sequence: Synthetic oligonucleotide
aaccuaggccaccgucagu

SEQ ID NO: 629637 - RNA, 19 nt, Artificial Sequence
  Description of Artificial Sequence: Synthetic oligonucleotide
uugcuagguuuauuugguu

SEQ ID NO: 629638 - RNA, 19 nt, Artificial Sequence
  Description of Artificial Sequence: Synthetic oligonucleotide
guuguuguuccugcccgac

SEQ ID NO: 629639 - RNA, 19 nt, Artificial Sequence
  Description of Artificial Sequence: Synthetic oligonucleotide
gccaaucugugccaugaac

SEQ ID NO: 629640 - RNA, 19 nt, Artificial Sequence
  Description of Artificial Sequence: Synthetic oligonucleotide
caguugcuagucucgucuc

SEQ ID NO: 629641 - RNA, 19 nt, Artificial Sequence
  Description of Artificial Sequence: Synthetic oligonucleotide
caaaaggguagaaguugaa

SEQ ID NO: 629642 - RNA, 19 nt, Artificial Sequence
  Description of Artificial Sequence: Synthetic oligonucleotide
ugauuccuacggucaugac

SEQ ID NO: 629643 - RNA, 19 nt, Artificial Sequence
  Description of Artificial Sequence: Synthetic oligonucleotide
agcaucauuccacgauguu

SEQ ID NO: 629644 - RNA, 19 nt, Artificial Sequence
  Description of Artificial Sequence: Synthetic oligonucleotide
ggaauguaaucuuuagcau

SEQ ID NO: 629645 - RNA, 19 nt, Artificial Sequence
  Description of Artificial Sequence: Synthetic oligonucleotide
uagguuuaccccggaacuu

SEQ ID NO: 629646 - RNA, 19 nt, Artificial Sequence
  Description of Artificial Sequence: Synthetic oligonucleotide
cuucgucggaagaguggug

SEQ ID NO: 629647 - RNA, 19 nt, Artificial Sequence
  Description of Artificial Sequence: Synthetic oligonucleotide
gcaguugcuagucucgucu

SEQ ID NO: 629648 - RNA, 19 nt, Artificial Sequence
  Description of Artificial Sequence: Synthetic oligonucleotide
aacccgacucgugcugaug

SEQ ID NO: 629649 - RNA, 19 nt, Artificial Sequence
  Description of Artificial Sequence: Synthetic oligonucleotide
ccuccuguagaguucgauc

SEQ ID NO: 629650 - RNA, 19 nt, Artificial Sequence
  Description of Artificial Sequence: Synthetic oligonucleotide
ucgguagguuuaccccgga

SEQ ID NO: 629651 - RNA, 19 nt, Artificial Sequence
  Description of Artificial Sequence: Synthetic oligonucleotide
gauggauugaugagauuuu

SEQ ID NO: 629652 - RNA, 19 nt, Artificial Sequence
  Description of Artificial Sequence: Synthetic oligonucleotide
uccuccuguagaguucgau

SEQ ID NO: 629653 - RNA, 19 nt, Artificial Sequence
  Description of Artificial Sequence: Synthetic oligonucleotide
gagcuugucguggcaucgc

SEQ ID NO: 629654 - RNA, 19 nt, Artificial Sequence
  Description of Artificial Sequence: Synthetic oligonucleotide
cauagccaaaggacaucga

SEQ ID NO: 629655 - RNA, 19 nt, Artificial Sequence
  Description of Artificial Sequence: Synthetic oligonucleotide
agcaccacauucacuuuau

SEQ ID NO: 629656 - RNA, 19 nt, Artificial Sequence
  Description of Artificial Sequence: Synthetic oligonucleotide
uguacgccggcgggucccg

SEQ ID NO: 629657 - RNA, 19 nt, Artificial Sequence
  Description of Artificial Sequence: Synthetic oligonucleotide
guaggagcuugucguggca

SEQ ID NO: 629658 - RNA, 19 nt, Artificial Sequence
  Description of Artificial Sequence: Synthetic oligonucleotide
ggguucaguguccggaaga

SEQ ID NO: 629659 - RNA, 19 nt, Artificial Sequence
  Description of Artificial Sequence: Synthetic oligonucleotide
auucggagauccgggucca

SEQ ID NO: 629660 - RNA, 19 nt, Artificial Sequence
  Description of Artificial Sequence: Synthetic oligonucleotide
uggcaucgcagaagcucaa

SEQ ID NO: 629661 - RNA, 19 nt, Artificial Sequence
  Description of Artificial Sequence: Synthetic oligonucleotide
ggcuauaucgcaucaucau

SEQ ID NO: 629662 - RNA, 19 nt, Artificial Sequence
  Description of Artificial Sequence: Synthetic oligonucleotide
uugcuagucucgucuccuu

SEQ ID NO: 629663 - RNA, 19 nt, Artificial Sequence
  Description of Artificial Sequence: Synthetic oligonucleotide
aucgagcuguuaucucuuu

SEQ ID NO: 629664 - RNA, 19 nt, Artificial Sequence
  Description of Artificial Sequence: Synthetic oligonucleotide
ucguggcaucgcagaagcu

SEQ ID NO: 629665 - RNA, 19 nt, Artificial Sequence
  Description of Artificial Sequence: Synthetic oligonucleotide
gaagaguggugcacaucaa

SEQ ID NO: 629666 - RNA, 19 nt, Artificial Sequence
  Description of Artificial Sequence: Synthetic oligonucleotide
gucauucggagauccgggu

SEQ ID NO: 629667 - RNA, 19 nt, Artificial Sequence
  Description of Artificial Sequence: Synthetic oligonucleotide
caacuaguaucuuggugau

SEQ ID NO: 629668 - RNA, 19 nt, Artificial Sequence
  Description of Artificial Sequence: Synthetic oligonucleotide
gcugcuaaguuacuucuau

SEQ ID NO: 629669 - RNA, 19 nt, Artificial Sequence
  Description of Artificial Sequence: Synthetic oligonucleotide
guugcuagucucgucuccu

SEQ ID NO: 629670 - RNA, 19 nt, Artificial Sequence
  Description of Artificial Sequence: Synthetic oligonucleotide
cguaccucggauguacgcc

SEQ ID NO: 629671 - RNA, 19 nt, Artificial Sequence
  Description of Artificial Sequence: Synthetic oligonucleotide
ccggguccaagacagugug

SEQ ID NO: 629672 - RNA, 19 nt, Artificial Sequence
  Description of Artificial Sequence: Synthetic oligonucleotide
auagaggcuucgguagguu

SEQ ID NO: 629673 - RNA, 19 nt, Artificial Sequence
  Description of Artificial Sequence: Synthetic oligonucleotide
cucccucaucuuugccgag

SEQ ID NO: 629674 - RNA, 19 nt, Artificial Sequence
  Description of Artificial Sequence: Synthetic oligonucleotide
guucgaucaucacguccaa

SEQ ID NO: 629675 - RNA, 19 nt, Artificial Sequence
  Description of Artificial Sequence: Synthetic oligonucleotide
cguaggagcuugucguggc

SEQ ID NO: 629676 - RNA, 19 nt, Artificial Sequence
  Description of Artificial Sequence: Synthetic oligonucleotide
uuccuacggucaugacuuc

SEQ ID NO: 629677 - RNA, 19 nt, Artificial Sequence
  Description of Artificial Sequence: Synthetic oligonucleotide
guggaacuggaaaauggau

SEQ ID NO: 629678 - RNA, 19 nt, Artificial Sequence
  Description of Artificial Sequence: Synthetic oligonucleotide
gccaaaggacaucgagcug

SEQ ID NO: 629679 - RNA, 19 nt, Artificial Sequence
  Description of Artificial Sequence: Synthetic oligonucleotide
cugcgggaaguuacugaga

SEQ ID NO: 629680 - RNA, 19 nt, Artificial Sequence
  Description of Artificial Sequence: Synthetic oligonucleotide
cauugauuccuacggucau

SEQ ID NO: 629681 - RNA, 19 nt, Artificial Sequence
  Description of Artificial Sequence: Synthetic oligonucleotide
guaacugcggcagguugcu

SEQ ID NO: 629682 - RNA, 19 nt, Artificial Sequence
  Description of Artificial Sequence: Synthetic oligonucleotide
uaacugcggcagguugcug

SEQ ID NO: 629683 - RNA, 19 nt, Artificial Sequence
  Description of Artificial Sequence: Synthetic oligonucleotide
uucuuguguuuggcguuua

SEQ ID NO: 629684 - RNA, 19 nt, Artificial Sequence
  Description of Artificial Sequence: Synthetic oligonucleotide
cuuucggucuguccuuccu

SEQ ID NO: 629685 - RNA, 19 nt, Artificial Sequence
  Description of Artificial Sequence: Synthetic oligonucleotide
gcuugucguggcaucgcag

SEQ ID NO: 629686 - RNA, 19 nt, Artificial Sequence
  Description of Artificial Sequence: Synthetic oligonucleotide
ccguaggagcuugucgugg

SEQ ID NO: 629687 - RNA, 19 nt, Artificial Sequence
  Description of Artificial Sequence: Synthetic oligonucleotide
auguaaucuuuagcaucua

SEQ ID NO: 629688 - RNA, 19 nt, Artificial Sequence
  Description of Artificial Sequence: Synthetic oligonucleotide
gcguucaaugucccgcaga

SEQ ID NO: 629689 - RNA, 19 nt, Artificial Sequence
  Description of Artificial Sequence: Synthetic oligonucleotide
cugcaguggcguugcuguc

SEQ ID NO: 629690 - RNA, 19 nt, Artificial Sequence
  Description of Artificial Sequence: Synthetic oligonucleotide
cccggccuugaucagguuc

SEQ ID NO: 629691 - RNA, 19 nt, Artificial Sequence
  Description of Artificial Sequence: Synthetic oligonucleotide
ggauguacgccggcggguc

SEQ ID NO: 629692 - RNA, 19 nt, Artificial Sequence
  Description of Artificial Sequence: Synthetic oligonucleotide
ccucggauguacgccggcg

SEQ ID NO: 629693 - RNA, 19 nt, Artificial Sequence
  Description of Artificial Sequence: Synthetic oligonucleotide
gugauaacauugacaguuu

SEQ ID NO: 629694 - RNA, 19 nt, Artificial Sequence
  Description of Artificial Sequence: Synthetic oligonucleotide
ucccaccaaucuggagaug

SEQ ID NO: 629695 - RNA, 19 nt, Artificial Sequence
  Description of Artificial Sequence: Synthetic oligonucleotide
agacagcaauucaccccug

SEQ ID NO: 629696 - RNA, 19 nt, Artificial Sequence
  Description of Artificial Sequence: Synthetic oligonucleotide
caucgagcuguuaucucuu

SEQ ID NO: 629697 - RNA, 19 nt, Artificial Sequence
  Description of Artificial Sequence: Synthetic oligonucleotide
guguccggaagagaugaau

SEQ ID NO: 629698 - RNA, 19 nt, Artificial Sequence
  Description of Artificial Sequence: Synthetic oligonucleotide
cccgacucgugcugauggc

SEQ ID NO: 629699 - RNA, 19 nt, Artificial Sequence
  Description of Artificial Sequence: Synthetic oligonucleotide
cggacauucuggcuauauc

SEQ ID NO: 629700 - RNA, 19 nt, Artificial Sequence
  Description of Artificial Sequence: Synthetic oligonucleotide
cagcaacuaguaucuuggu

SEQ ID NO: 629701 - RNA, 19 nt, Artificial Sequence
  Description of Artificial Sequence: Synthetic oligonucleotide
aguguccggaagagaugaa

SEQ ID NO: 629702 - RNA, 19 nt, Artificial Sequence
  Description of Artificial Sequence: Synthetic oligonucleotide
uucggagauccggguccaa

SEQ ID NO: 629703 - RNA, 19 nt, Artificial Sequence
  Description of Artificial Sequence: Synthetic oligonucleotide
gagucuuccguaggagcuu

SEQ ID NO: 629704 - RNA, 19 nt, Artificial Sequence
  Description of Artificial Sequence: Synthetic oligonucleotide
cugcggcagguugcugggc

SEQ ID NO: 629705 - RNA, 19 nt, Artificial Sequence
  Description of Artificial Sequence: Synthetic oligonucleotide
gcgggucccggccuugauc

SEQ ID NO: 629706 - RNA, 19 nt, Artificial Sequence
  Description of Artificial Sequence: Synthetic oligonucleotide
cuaguaucuuggugaucuu

SEQ ID NO: 629707 - RNA, 19 nt, Artificial Sequence
  Description of Artificial Sequence: Synthetic oligonucleotide
gggucccggccuugaucag

SEQ ID NO: 629708 - RNA, 19 nt, Artificial Sequence
  Description of Artificial Sequence: Synthetic oligonucleotide
ccgcagagacagcaauuca

SEQ ID NO: 629709 - RNA, 19 nt, Artificial Sequence
  Description of Artificial Sequence: Synthetic oligonucleotide
guacgccggcgggucccgg

SEQ ID NO: 629710 - RNA, 19 nt, Artificial Sequence
  Description of Artificial Sequence: Synthetic oligonucleotide
ggaacguaccucggaugua

SEQ ID NO: 629711 - RNA, 19 nt, Artificial Sequence
  Description of Artificial Sequence: Synthetic oligonucleotide
ggcaucgcagaagcucaaa

SEQ ID NO: 629712 - RNA, 19 nt, Artificial Sequence
  Description of Artificial Sequence: Synthetic oligonucleotide
cucgucuccuugucagauu

SEQ ID NO: 629713 - RNA, 19 nt, Artificial Sequence
  Description of Artificial Sequence: Synthetic oligonucleotide
ccaaucuggagaugagguu

SEQ ID NO: 629714 - RNA, 19 nt, Artificial Sequence
  Description of Artificial Sequence: Synthetic oligonucleotide
caccgucaugagcagugau

SEQ ID NO: 629715 - RNA, 19 nt, Artificial Sequence
  Description of Artificial Sequence: Synthetic oligonucleotide
cacugucgauuucgaugua

SEQ ID NO: 629716 - RNA, 19 nt, Artificial Sequence
  Description of Artificial Sequence: Synthetic oligonucleotide
ccaagacagugugauugua

SEQ ID NO: 629717 - RNA, 19 nt, Artificial Sequence
  Description of Artificial Sequence: Synthetic oligonucleotide
cucguagugccagcugcuu

SEQ ID NO: 629718 - RNA, 19 nt, Artificial Sequence
  Description of Artificial Sequence: Synthetic oligonucleotide
cgauuucgauguauuuccu

SEQ ID NO: 629719 - RNA, 19 nt, Artificial Sequence
  Description of Artificial Sequence: Synthetic oligonucleotide
accggacauucuggcuaua

SEQ ID NO: 629720 - RNA, 19 nt, Artificial Sequence
  Description of Artificial Sequence: Synthetic oligonucleotide
cccuggcgagcaguucuug

SEQ ID NO: 629721 - RNA, 19 nt, Artificial Sequence
  Description of Artificial Sequence: Synthetic oligonucleotide
ccaccgucaugagcaguga

SEQ ID NO: 629722 - RNA, 19 nt, Artificial Sequence
  Description of Artificial Sequence: Synthetic oligonucleotide
cggucaugacuuccccaga

SEQ ID NO: 629723 - RNA, 19 nt, Artificial Sequence
  Description of Artificial Sequence: Synthetic oligonucleotide
ccgacucgugcugauggcu

SEQ ID NO: 629724 - RNA, 19 nt, Artificial Sequence
  Description of Artificial Sequence: Synthetic oligonucleotide
caguggcguugcugucucu

SEQ ID NO: 629725 - RNA, 19 nt, Artificial Sequence
  Description of Artificial Sequence: Synthetic oligonucleotide
cgguagguuuaccccggaa

SEQ ID NO: 629726 - RNA, 19 nt, Artificial Sequence
  Description of Artificial Sequence: Synthetic oligonucleotide
ccggacauucuggcuauau

SEQ ID NO: 629727 - RNA, 19 nt, Artificial Sequence
  Description of Artificial Sequence: Synthetic oligonucleotide
ggccaccgucaugagcagu

SEQ ID NO: 629728 - RNA, 19 nt, Artificial Sequence
  Description of Artificial Sequence: Synthetic oligonucleotide
ggcgggucccggccuugau

SEQ ID NO: 629729 - RNA, 19 nt, Artificial Sequence
  Description of Artificial Sequence: Synthetic oligonucleotide
cggauguacgccggcgggu

SEQ ID NO: 629730 - RNA, 19 nt, Artificial Sequence
  Description of Artificial Sequence: Synthetic oligonucleotide
gccggcgggucccggccuu

SEQ ID NO: 629731 - RNA, 19 nt, Artificial Sequence
  Description of Artificial Sequence: Synthetic oligonucleotide
cgccggcgggucccggccu

SEQ ID NO: 629732 - RNA, 19 nt, Artificial Sequence
  Description of Artificial Sequence: Synthetic oligonucleotide
aaagaacgagaauacaucc

SEQ ID NO: 629733 - RNA, 19 nt, Artificial Sequence
  Description of Artificial Sequence: Synthetic oligonucleotide
ucaauguaagcacugaucc

SEQ ID NO: 629734 - RNA, 19 nt, Artificial Sequence
  Description of Artificial Sequence: Synthetic oligonucleotide
aauacuaaucuuaaugggg

SEQ ID NO: 629735 - RNA, 19 nt, Artificial Sequence
  Description of Artificial Sequence: Synthetic oligonucleotide
aauacauccgcucauauuu

SEQ ID NO: 629736 - RNA, 19 nt, Artificial Sequence
  Description of Artificial Sequence: Synthetic oligonucleotide
aaauucaagagcagaaagc

SEQ ID NO: 629737 - RNA, 19 nt, Artificial Sequence
  Description of Artificial Sequence: Synthetic oligonucleotide
agaacgagaauacauccgc

SEQ ID NO: 629738 - RNA, 19 nt, Artificial Sequence
  Description of Artificial Sequence: Synthetic oligonucleotide
cauauaaaucuauagguag

SEQ ID NO: 629739 - RNA, 19 nt, Artificial Sequence
  Description of Artificial Sequence: Synthetic oligonucleotide
ugauuauacagccugauau

SEQ ID NO: 629740 - RNA, 19 nt, Artificial Sequence
  Description of Artificial Sequence: Synthetic oligonucleotide
uagcuaaugauccugaaga

SEQ ID NO: 629741 - RNA, 19 nt, Artificial Sequence
  Description of Artificial Sequence: Synthetic oligonucleotide
uuuggugugauuauacagc

SEQ ID NO: 629742 - RNA, 19 nt, Artificial Sequence
  Description of Artificial Sequence: Synthetic oligonucleotide
uauagguagaguuauguac

SEQ ID NO: 629743 - RNA, 19 nt, Artificial Sequence
  Description of Artificial Sequence: Synthetic oligonucleotide
aaagauugcauccagcuuu

SEQ ID NO: 629744 - RNA, 19 nt, Artificial Sequence
  Description of Artificial Sequence: Synthetic oligonucleotide
uuuaaaagauugcauccag

SEQ ID NO: 629745 - RNA, 19 nt, Artificial Sequence
  Description of Artificial Sequence: Synthetic oligonucleotide
aauucaagagcagaaagcu

SEQ ID NO: 629746 - RNA, 19 nt, Artificial Sequence
  Description of Artificial Sequence: Synthetic oligonucleotide
uccuuuucgauaaacgaag

SEQ ID NO: 629747 - RNA, 19 nt, Artificial Sequence
  Description of Artificial Sequence: Synthetic oligonucleotide
ugcagaauagggcauuugg

SEQ ID NO: 629748 - RNA, 19 nt, Artificial Sequence
  Description of Artificial Sequence: Synthetic oligonucleotide
ugaguuuuaagugauguug

SEQ ID NO: 629749 - RNA, 19 nt, Artificial Sequence
  Description of Artificial Sequence: Synthetic oligonucleotide
aauguaagcacugauccug

SEQ ID NO: 629750 - RNA, 19 nt, Artificial Sequence
  Description of Artificial Sequence: Synthetic oligonucleotide
uggacuauuguacaggagu

SEQ ID NO: 629751 - RNA, 19 nt, Artificial Sequence
  Description of Artificial Sequence: Synthetic oligonucleotide
ucgaaaacgacuguaacgc

SEQ ID NO: 629752 - RNA, 19 nt, Artificial Sequence
  Description of Artificial Sequence: Synthetic oligonucleotide
cuugacuucaaacucguag

SEQ ID NO: 629753 - RNA, 19 nt, Artificial Sequence
  Description of Artificial Sequence: Synthetic oligonucleotide
uaaaucuauagguagaguu

SEQ ID NO: 629754 - RNA, 19 nt, Artificial Sequence
  Description of Artificial Sequence: Synthetic oligonucleotide
aacgagaauacauccgcuc

SEQ ID NO: 629755 - RNA, 19 nt, Artificial Sequence
  Description of Artificial Sequence: Synthetic oligonucleotide
aauuccuuuucgauaaacg

SEQ ID NO: 629756 - RNA, 19 nt, Artificial Sequence
  Description of Artificial Sequence: Synthetic oligonucleotide
uguuuuaugcauuucucga

SEQ ID NO: 629757 - RNA, 19 nt, Artificial Sequence
  Description of Artificial Sequence: Synthetic oligonucleotide
gaagauucuguacuaaaac

SEQ ID NO: 629758 - RNA, 19 nt, Artificial Sequence
  Description of Artificial Sequence: Synthetic oligonucleotide
aguuuuaagugauguugcc

SEQ ID NO: 629759 - RNA, 19 nt, Artificial Sequence
  Description of Artificial Sequence: Synthetic oligonucleotide
uccugugcaaaucaugaag

SEQ ID NO: 629760 - RNA, 19 nt, Artificial Sequence
  Description of Artificial Sequence: Synthetic oligonucleotide
uuauacagccugauauugg

SEQ ID NO: 629761 - RNA, 19 nt, Artificial Sequence
  Description of Artificial Sequence: Synthetic oligonucleotide
uuucgauaaacgaagcagu

SEQ ID NO: 629762 - RNA, 19 nt, Artificial Sequence
  Description of Artificial Sequence: Synthetic oligonucleotide
acuaaucuuaauggggucc

SEQ ID NO: 629763 - RNA, 19 nt, Artificial Sequence
  Description of Artificial Sequence: Synthetic oligonucleotide
ucucugaacaccauccacc

SEQ ID NO: 629764 - RNA, 19 nt, Artificial Sequence
  Description of Artificial Sequence: Synthetic oligonucleotide
cucgaaaacgacuguaacg

SEQ ID NO: 629765 - RNA, 19 nt, Artificial Sequence
  Description of Artificial Sequence: Synthetic oligonucleotide
acucuuuucaugauugacc

SEQ ID NO: 629766 - RNA, 19 nt, Artificial Sequence
  Description of Artificial Sequence: Synthetic oligonucleotide
uuugggaggucccaaguag

SEQ ID NO: 629767 - RNA, 19 nt, Artificial Sequence
  Description of Artificial Sequence: Synthetic oligonucleotide
uguuuagguauauuaaguc

SEQ ID NO: 629768 - RNA, 19 nt, Artificial Sequence
  Description of Artificial Sequence: Synthetic oligonucleotide
uacucuuuaucacaucagc

SEQ ID NO: 629769 - RNA, 19 nt, Artificial Sequence
  Description of Artificial Sequence: Synthetic oligonucleotide
uuaaaagauugcauccagc

SEQ ID NO: 629770 - RNA, 19 nt, Artificial Sequence
  Description of Artificial Sequence: Synthetic oligonucleotide
ugugcaaaucaugaaggcg

SEQ ID NO: 629771 - RNA, 19 nt, Artificial Sequence
  Description of Artificial Sequence: Synthetic oligonucleotide
uagaguuauguacauuuca

SEQ ID NO: 629772 - RNA, 19 nt, Artificial Sequence
  Description of Artificial Sequence: Synthetic oligonucleotide
cuagauauggugugugagg

SEQ ID NO: 629773 - RNA, 19 nt, Artificial Sequence
  Description of Artificial Sequence: Synthetic oligonucleotide
agggccuacguucaagugc

SEQ ID NO: 629774 - RNA, 19 nt, Artificial Sequence
  Description of Artificial Sequence: Synthetic oligonucleotide
agcaaugucuuauuugcag

SEQ ID NO: 629775 - RNA, 19 nt, Artificial Sequence
  Description of Artificial Sequence: Synthetic oligonucleotide
uuccaaacagcuucuuugg

SEQ ID NO: 629776 - RNA, 19 nt, Artificial Sequence
  Description of Artificial Sequence: Synthetic oligonucleotide
aauuuggugugauuauaca

SEQ ID NO: 629777 - RNA, 19 nt, Artificial Sequence
  Description of Artificial Sequence: Synthetic oligonucleotide
ucaguguuuagguauauua

SEQ ID NO: 629778 - RNA, 19 nt, Artificial Sequence
  Description of Artificial Sequence: Synthetic oligonucleotide
aacgccugaauacagucca

SEQ ID NO: 629779 - RNA, 19 nt, Artificial Sequence
  Description of Artificial Sequence: Synthetic oligonucleotide
aaugcuacauuauguccug

SEQ ID NO: 629780 - RNA, 19 nt, Artificial Sequence
  Description of Artificial Sequence: Synthetic oligonucleotide
cauuucucgaaaacgacug

SEQ ID NO: 629781 - RNA, 19 nt, Artificial Sequence
  Description of Artificial Sequence: Synthetic oligonucleotide
gggaauacuaaucuuaaug

SEQ ID NO: 629782 - RNA, 19 nt, Artificial Sequence
  Description of Artificial Sequence: Synthetic oligonucleotide
ugcauguugccccaacggg

SEQ ID NO: 629783 - RNA, 19 nt, Artificial Sequence
  Description of Artificial Sequence: Synthetic oligonucleotide
uggaagacucuuuucauga

SEQ ID NO: 629784 - RNA, 19 nt, Artificial Sequence
  Description of Artificial Sequence: Synthetic oligonucleotide
uauugaagguuuaagcaau

SEQ ID NO: 629785 - RNA, 19 nt, Artificial Sequence
  Description of Artificial Sequence: Synthetic oligonucleotide
auauugaagguuuaagcaa

SEQ ID NO: 629786 - RNA, 19 nt, Artificial Sequence
  Description of Artificial Sequence: Synthetic oligonucleotide
uugacuucaaacucguagu

SEQ ID NO: 629787 - RNA, 19 nt, Artificial Sequence
  Description of Artificial Sequence: Synthetic oligonucleotide
cuuaaugggguccuucagg

SEQ ID NO: 629788 - RNA, 19 nt, Artificial Sequence
  Description of Artificial Sequence: Synthetic oligonucleotide
uaugaguuuuaagugaugu

SEQ ID NO: 629789 - RNA, 19 nt, Artificial Sequence
  Description of Artificial Sequence: Synthetic oligonucleotide
aguuauguacauuucaaua

SEQ ID NO: 629790 - RNA, 19 nt, Artificial Sequence
  Description of Artificial Sequence: Synthetic oligonucleotide
ucaugauugaccgacagau

SEQ ID NO: 629791 - RNA, 19 nt, Artificial Sequence
  Description of Artificial Sequence: Synthetic oligonucleotide
uuagcuuacguugaauggc

SEQ ID NO: 629792 - RNA, 19 nt, Artificial Sequence
  Description of Artificial Sequence: Synthetic oligonucleotide
aaaaugcccucaaauauug

SEQ ID NO: 629793 - RNA, 19 nt, Artificial Sequence
  Description of Artificial Sequence: Synthetic oligonucleotide
uuuaauaaauuugguguga

SEQ ID NO: 629794 - RNA, 19 nt, Artificial Sequence
  Description of Artificial Sequence: Synthetic oligonucleotide
caaagaacgagaauacauc

SEQ ID NO: 629795 - RNA, 19 nt, Artificial Sequence
  Description of Artificial Sequence: Synthetic oligonucleotide
aagcaguuucacuguacac

SEQ ID NO: 629796 - RNA, 19 nt, Artificial Sequence
  Description of Artificial Sequence: Synthetic oligonucleotide
uccucguuacucuuuauca

SEQ ID NO: 629797 - RNA, 19 nt, Artificial Sequence
  Description of Artificial Sequence: Synthetic oligonucleotide
uuaaugggguccuucaggu

SEQ ID NO: 629798 - RNA, 19 nt, Artificial Sequence
  Description of Artificial Sequence: Synthetic oligonucleotide
aagaacgagaauacauccg

SEQ ID NO: 629799 - RNA, 19 nt, Artificial Sequence
  Description of Artificial Sequence: Synthetic oligonucleotide
uugcacuuguuuuaugcag

SEQ ID NO: 629800 - RNA, 19 nt, Artificial Sequence
  Description of Artificial Sequence: Synthetic oligonucleotide
ugaagguuuaagcaauguc

SEQ ID NO: 629801 - RNA, 19 nt, Artificial Sequence
  Description of Artificial Sequence: Synthetic oligonucleotide
uuccuuuucgauaaacgaa

SEQ ID NO: 629802 - RNA, 19 nt, Artificial Sequence
  Description of Artificial Sequence: Synthetic oligonucleotide
aguuucacuguacacagau

SEQ ID NO: 629803 - RNA, 19 nt, Artificial Sequence
  Description of Artificial Sequence: Synthetic oligonucleotide
uacaggaguguauacauau

SEQ ID NO: 629804 - RNA, 19 nt, Artificial Sequence
  Description of Artificial Sequence: Synthetic oligonucleotide
ugacuugcugcacaaugag

SEQ ID NO: 629805 - RNA, 19 nt, Artificial Sequence
  Description of Artificial Sequence: Synthetic oligonucleotide
uugcugcacaaugagaagg

SEQ ID NO: 629806 - RNA, 19 nt, Artificial Sequence
  Description of Artificial Sequence: Synthetic oligonucleotide
aaucuauagguagaguuau

SEQ ID NO: 629807 - RNA, 19 nt, Artificial Sequence
  Description of Artificial Sequence: Synthetic oligonucleotide
uacauuauguccugaguaa

SEQ ID NO: 629808 - RNA, 19 nt, Artificial Sequence
  Description of Artificial Sequence: Synthetic oligonucleotide
auauuuuggugaaagagga

SEQ ID NO: 629809 - RNA, 19 nt, Artificial Sequence
  Description of Artificial Sequence: Synthetic oligonucleotide
auuauacagccugauauug

SEQ ID NO: 629810 - RNA, 19 nt, Artificial Sequence
  Description of Artificial Sequence: Synthetic oligonucleotide
ugcaaugcuacauuauguc

SEQ ID NO: 629811 - RNA, 19 nt, Artificial Sequence
  Description of Artificial Sequence: Synthetic oligonucleotide
aaugagaagggccuacguu

SEQ ID NO: 629812 - RNA, 19 nt, Artificial Sequence
  Description of Artificial Sequence: Synthetic oligonucleotide
auauuggacuauuguacag

SEQ ID NO: 629813 - RNA, 19 nt, Artificial Sequence
  Description of Artificial Sequence: Synthetic oligonucleotide
aaucguccugugcaaauca

SEQ ID NO: 629814 - RNA, 19 nt, Artificial Sequence
  Description of Artificial Sequence: Synthetic oligonucleotide
uuugcacuuguuuuaugca

SEQ ID NO: 629815 - RNA, 19 nt, Artificial Sequence
  Description of Artificial Sequence: Synthetic oligonucleotide
uacguucaagugcagaggu

SEQ ID NO: 629816 - RNA, 19 nt, Artificial Sequence
  Description of Artificial Sequence: Synthetic oligonucleotide
agucccaauccaauuaagc

SEQ ID NO: 629817 - RNA, 19 nt, Artificial Sequence
  Description of Artificial Sequence: Synthetic oligonucleotide
acaucuaucccguuccaug

SEQ ID NO: 629818 - RNA, 19 nt, Artificial Sequence
  Description of Artificial Sequence: Synthetic oligonucleotide
ucacuguacacagaugugc

SEQ ID NO: 629819 - RNA, 19 nt, Artificial Sequence
  Description of Artificial Sequence: Synthetic oligonucleotide
agaaucaccaaucguccug

SEQ ID NO: 629820 - RNA, 19 nt, Artificial Sequence
  Description of Artificial Sequence: Synthetic oligonucleotide
gguauauuaagucccaauc

SEQ ID NO: 629821 - RNA, 19 nt, Artificial Sequence
  Description of Artificial Sequence: Synthetic oligonucleotide
aaucaugaaggcgucuuug

SEQ ID NO: 629822 - RNA, 19 nt, Artificial Sequence
  Description of Artificial Sequence: Synthetic oligonucleotide
agaggaaaccagaugaaag

SEQ ID NO: 629823 - RNA, 19 nt, Artificial Sequence
  Description of Artificial Sequence: Synthetic oligonucleotide
uacucacaauuccuuuucg

SEQ ID NO: 629824 - RNA, 19 nt, Artificial Sequence
  Description of Artificial Sequence: Synthetic oligonucleotide
cucaauguaagcacugauc

SEQ ID NO: 629825 - RNA, 19 nt, Artificial Sequence
  Description of Artificial Sequence: Synthetic oligonucleotide
ugcacuuguuuuaugcaga

SEQ ID NO: 629826 - RNA, 19 nt, Artificial Sequence
  Description of Artificial Sequence: Synthetic oligonucleotide
aagacgccuuucuugaaga

SEQ ID NO: 629827 - RNA, 19 nt, Artificial Sequence
  Description of Artificial Sequence: Synthetic oligonucleotide
aguaacaacugccggucag

SEQ ID NO: 629828 - RNA, 19 nt, Artificial Sequence
  Description of Artificial Sequence: Synthetic oligonucleotide
uuacucacaauuccuuuuc

SEQ ID NO: 629829 - RNA, 19 nt, Artificial Sequence
  Description of Artificial Sequence: Synthetic oligonucleotide
auugagggauuauuaauaa

SEQ ID NO: 629830 - RNA, 19 nt, Artificial Sequence
  Description of Artificial Sequence: Synthetic oligonucleotide
cauacuuuagcuucaaugu

SEQ ID NO: 629831 - RNA, 19 nt, Artificial Sequence
  Description of Artificial Sequence: Synthetic oligonucleotide
uccaaacagcuucuuuggg

SEQ ID NO: 629832 - RNA, 19 nt, Artificial Sequence
  Description of Artificial Sequence: Synthetic oligonucleotide
aaaagauugcauccagcuu

SEQ ID NO: 629833 - RNA, 19 nt, Artificial Sequence
  Description of Artificial Sequence: Synthetic oligonucleotide
  modified_base (8)..(8): a, c, u, g, unknown or other
uuuucucnccuucucuucu

SEQ ID NO: 629834 - RNA, 19 nt, Artificial Sequence
  Description of Artificial Sequence: Synthetic oligonucleotide
auuggacuauuguacagga

SEQ ID NO: 629835 - RNA, 19 nt, Artificial Sequence
  Description of Artificial Sequence: Synthetic oligonucleotide
acaguaacaacugccgguc

SEQ ID NO: 629836 - RNA, 19 nt, Artificial Sequence
  Description of Artificial Sequence: Synthetic oligonucleotide
caugaaggcgucuuuggac

SEQ ID NO: 629837 - RNA, 19 nt, Artificial Sequence
  Description of Artificial Sequence: Synthetic oligonucleotide
ucucgaaaacgacuguaac

SEQ ID NO: 629838 - RNA, 19 nt, Artificial Sequence
  Description of Artificial Sequence: Synthetic oligonucleotide
aaaucuauagguagaguua

SEQ ID NO: 629839 - RNA, 19 nt, Artificial Sequence
  Description of Artificial Sequence: Synthetic oligonucleotide
aaaacgacuguaacgccug

SEQ ID NO: 629840 - RNA, 19 nt, Artificial Sequence
  Description of Artificial Sequence: Synthetic oligonucleotide
uggccagaaucaccaaucg

SEQ ID NO: 629841 - RNA, 19 nt, Artificial Sequence
  Description of Artificial Sequence: Synthetic oligonucleotide
auagguagaguuauguaca

SEQ ID NO: 629842 - RNA, 19 nt, Artificial Sequence
  Description of Artificial Sequence: Synthetic oligonucleotide
auacuaaucuuaauggggu

SEQ ID NO: 629843 - RNA, 19 nt, Artificial Sequence
  Description of Artificial Sequence: Synthetic oligonucleotide
uagcuuacguugaauggca

SEQ ID NO: 629844 - RNA, 19 nt, Artificial Sequence
  Description of Artificial Sequence: Synthetic oligonucleotide
acaacauaacuuaaaacau

SEQ ID NO: 629845 - RNA, 19 nt, Artificial Sequence
  Description of Artificial Sequence: Synthetic oligonucleotide
gcauauuuuggugaaagag

SEQ ID NO: 629846 - RNA, 19 nt, Artificial Sequence
  Description of Artificial Sequence: Synthetic oligonucleotide
uuccuuacucacaauuccu

SEQ ID NO: 629847 - RNA, 19 nt, Artificial Sequence
  Description of Artificial Sequence: Synthetic oligonucleotide
  modified_base (3)..(3): a, c, u, g, unknown or other
ucnccuucucuucuugucu

SEQ ID NO: 629848 - RNA, 19 nt, Artificial Sequence
  Description of Artificial Sequence: Synthetic oligonucleotide
uagauauggugugugaggu

SEQ ID NO: 629849 - RNA, 19 nt, Artificial Sequence
  Description of Artificial Sequence: Synthetic oligonucleotide
uguaacgccugaauacagu

SEQ ID NO: 629850 - RNA, 19 nt, Artificial Sequence
  Description of Artificial Sequence: Synthetic oligonucleotide
uucacaaauggugugcuuc

SEQ ID NO: 629851 - RNA, 19 nt, Artificial Sequence
  Description of Artificial Sequence: Synthetic oligonucleotide
uucucgaaaacgacuguaa

SEQ ID NO: 629852 - RNA, 19 nt, Artificial Sequence
  Description of Artificial Sequence: Synthetic oligonucleotide
guugaauggcaccauugug

SEQ ID NO: 629853 - RNA, 19 nt, Artificial Sequence
  Description of Artificial Sequence: Synthetic oligonucleotide
guaauugagggauuauuaa

SEQ ID NO: 629854 - RNA, 19 nt, Artificial Sequence
  Description of Artificial Sequence: Synthetic oligonucleotide
uaacgccugaauacagucc

SEQ ID NO: 629855 - RNA, 19 nt, Artificial Sequence
  Description of Artificial Sequence: Synthetic oligonucleotide
agcaguuucacuguacaca

SEQ ID NO: 629856 - RNA, 19 nt, Artificial Sequence
  Description of Artificial Sequence: Synthetic oligonucleotide
aagggugagacuucacaaa

SEQ ID NO: 629857 - RNA, 19 nt, Artificial Sequence
  Description of Artificial Sequence: Synthetic oligonucleotide
ugguguaaacuucaguguu

SEQ ID NO: 629858 - RNA, 19 nt, Artificial Sequence
  Description of Artificial Sequence: Synthetic oligonucleotide
agggauuauuaauaaacua

SEQ ID NO: 629859 - RNA, 19 nt, Artificial Sequence
  Description of Artificial Sequence: Synthetic oligonucleotide
auacaguccaugucucauc

SEQ ID NO: 629860 - RNA, 19 nt, Artificial Sequence
  Description of Artificial Sequence: Synthetic oligonucleotide
auauaaaucuauagguaga

SEQ ID NO: 629861 - RNA, 19 nt, Artificial Sequence
  Description of Artificial Sequence: Synthetic oligonucleotide
aucuaucccguuccauggc

SEQ ID NO: 629862 - RNA, 19 nt, Artificial Sequence
  Description of Artificial Sequence: Synthetic oligonucleotide
guugccuacauccaguuua

SEQ ID NO: 629863 - RNA, 19 nt, Artificial Sequence
  Description of Artificial Sequence: Synthetic oligonucleotide
cauccauuugccagagggg

SEQ ID NO: 629864 - RNA, 19 nt, Artificial Sequence
  Description of Artificial Sequence: Synthetic oligonucleotide
gucccaauccaauuaagca

SEQ ID NO: 629865 - RNA, 19 nt, Artificial Sequence
  Description of Artificial Sequence: Synthetic oligonucleotide
uagcggggaauacuaaucu

SEQ ID NO: 629866 - RNA, 19 nt, Artificial Sequence
  Description of Artificial Sequence: Synthetic oligonucleotide
uuaucaggcauggaagacu

SEQ ID NO: 629867 - RNA, 19 nt, Artificial Sequence
  Description of Artificial Sequence: Synthetic oligonucleotide
uuaauaaauuuggugugau

SEQ ID NO: 629868 - RNA, 19 nt, Artificial Sequence
  Description of Artificial Sequence: Synthetic oligonucleotide
acgagaauacauccgcuca

SEQ ID NO: 629869 - RNA, 19 nt, Artificial Sequence
  Description of Artificial Sequence: Synthetic oligonucleotide
uauuguacaggaguguaua

SEQ ID NO: 629870 - RNA, 19 nt, Artificial Sequence
  Description of Artificial Sequence: Synthetic oligonucleotide
auagcggggaauacuaauc

SEQ ID NO: 629871 - RNA, 19 nt, Artificial Sequence
  Description of Artificial Sequence: Synthetic oligonucleotide
uauuuuagcuuacguugaa

SEQ ID NO: 629872 - RNA, 19 nt, Artificial Sequence
  Description of Artificial Sequence: Synthetic oligonucleotide
cauguugccccaacgggag

SEQ ID NO: 629873 - RNA, 19 nt, Artificial Sequence
  Description of Artificial Sequence: Synthetic oligonucleotide
uuucaauauauaccacaua

SEQ ID NO: 629874 - RNA, 19 nt, Artificial Sequence
  Description of Artificial Sequence: Synthetic oligonucleotide
cauccgcucauauuuuagc

SEQ ID NO: 629875 - RNA, 19 nt, Artificial Sequence
  Description of Artificial Sequence: Synthetic oligonucleotide
ugcauuggagucacuuuga

SEQ ID NO: 629876 - RNA, 19 nt, Artificial Sequence
  Description of Artificial Sequence: Synthetic oligonucleotide
gaagggugagacuucacaa

SEQ ID NO: 629877 - RNA, 19 nt, Artificial Sequence
  Description of Artificial Sequence: Synthetic oligonucleotide
ggauauuuaaaagauugca

SEQ ID NO: 629878 - RNA, 19 nt, Artificial Sequence
  Description of Artificial Sequence: Synthetic oligonucleotide
gcaguuucacuguacacag

SEQ ID NO: 629879 - RNA, 19 nt, Artificial Sequence
  Description of Artificial Sequence: Synthetic oligonucleotide
ugauugaccgacagauccu

SEQ ID NO: 629880 - RNA, 19 nt, Artificial Sequence
  Description of Artificial Sequence: Synthetic oligonucleotide
ucuaucccguuccauggcu

SEQ ID NO: 629881 - RNA, 19 nt, Artificial Sequence
  Description of Artificial Sequence: Synthetic oligonucleotide
aguaauugagggauuauua

SEQ ID NO: 629882 - RNA, 19 nt, Artificial Sequence
  Description of Artificial Sequence: Synthetic oligonucleotide
aaguaggcuuggcucuggg

SEQ ID NO: 629883 - RNA, 19 nt, Artificial Sequence
  Description of Artificial Sequence: Synthetic oligonucleotide
uuggacuauuguacaggag

SEQ ID NO: 629884 - RNA, 19 nt, Artificial Sequence
  Description of Artificial Sequence: Synthetic oligonucleotide
uaacaacugccggucaggg

SEQ ID NO: 629885 - RNA, 19 nt, Artificial Sequence
  Description of Artificial Sequence: Synthetic oligonucleotide
uuccucguuacucuuuauc

SEQ ID NO: 629886 - RNA, 19 nt, Artificial Sequence
  Description of Artificial Sequence: Synthetic oligonucleotide
guucuagccguacaggguc

SEQ ID NO: 629887 - RNA, 19 nt, Artificial Sequence
  Description of Artificial Sequence: Synthetic oligonucleotide
ucccaaguaggcuuggcuc

SEQ ID NO: 629888 - RNA, 19 nt, Artificial Sequence
  Description of Artificial Sequence: Synthetic oligonucleotide
guaacgccugaauacaguc

SEQ ID NO: 629889 - RNA, 19 nt, Artificial Sequence
  Description of Artificial Sequence: Synthetic oligonucleotide
auccgcucauauuuuagcu

SEQ ID NO: 629890 - RNA, 19 nt, Artificial Sequence
  Description of Artificial Sequence: Synthetic oligonucleotide
cucaucuaggacagaaauc

SEQ ID NO: 629891 - RNA, 19 nt, Artificial Sequence
  Description of Artificial Sequence: Synthetic oligonucleotide
uauuuuggugaaagaggaa

SEQ ID NO: 629892 - RNA, 19 nt, Artificial Sequence
  Description of Artificial Sequence: Synthetic oligonucleotide
cuacauuauguccugagua

SEQ ID NO: 629893 - RNA, 19 nt, Artificial Sequence
  Description of Artificial Sequence: Synthetic oligonucleotide
agguauauuaagucccaau

SEQ ID NO: 629894 - RNA, 19 nt, Artificial Sequence
  Description of Artificial Sequence: Synthetic oligonucleotide
ugggaggucccaaguaggc

SEQ ID NO: 629895 - RNA, 19 nt, Artificial Sequence
  Description of Artificial Sequence: Synthetic oligonucleotide
aggucgucuggauuugcuc

SEQ ID NO: 629896 - RNA, 19 nt, Artificial Sequence
  Description of Artificial Sequence: Synthetic oligonucleotide
ucguccugugcaaaucaug

SEQ ID NO: 629897 - RNA, 19 nt, Artificial Sequence
  Description of Artificial Sequence: Synthetic oligonucleotide
guuuuaugcauuucucgaa

SEQ ID NO: 629898 - RNA, 19 nt, Artificial Sequence
  Description of Artificial Sequence: Synthetic oligonucleotide
uauugauagcagcuucaau

SEQ ID NO: 629899 - RNA, 19 nt, Artificial Sequence
  Description of Artificial Sequence: Synthetic oligonucleotide
cuuacguugaauggcacca

SEQ ID NO: 629900 - RNA, 19 nt, Artificial Sequence
  Description of Artificial Sequence: Synthetic oligonucleotide
uuuagcuaaugauccugaa

SEQ ID NO: 629901 - RNA, 19 nt, Artificial Sequence
  Description of Artificial Sequence: Synthetic oligonucleotide
caguggagcaaggugagag

SEQ ID NO: 629902 - RNA, 19 nt, Artificial Sequence
  Description of Artificial Sequence: Synthetic oligonucleotide
guaacaacugccggucagg

SEQ ID NO: 629903 - RNA, 19 nt, Artificial Sequence
  Description of Artificial Sequence: Synthetic oligonucleotide
uugagggauuauuaauaaa

SEQ ID NO: 629904 - RNA, 19 nt, Artificial Sequence
  Description of Artificial Sequence: Synthetic oligonucleotide
cucguuacucuuuaucaca

SEQ ID NO: 629905 - RNA, 19 nt, Artificial Sequence
  Description of Artificial Sequence: Synthetic oligonucleotide
acagccauugagguuuggg

SEQ ID NO: 629906 - RNA, 19 nt, Artificial Sequence
  Description of Artificial Sequence: Synthetic oligonucleotide
gcaaugcuacauuaugucc

SEQ ID NO: 629907 - RNA, 19 nt, Artificial Sequence
  Description of Artificial Sequence: Synthetic oligonucleotide
cacucccaaacucaggcac

SEQ ID NO: 629908 - RNA, 19 nt, Artificial Sequence
  Description of Artificial Sequence: Synthetic oligonucleotide
cuacguucaagugcagagg

SEQ ID NO: 629909 - RNA, 19 nt, Artificial Sequence
  Description of Artificial Sequence: Synthetic oligonucleotide
  modified_base (6)..(6): a, c, u, g, unknown or other
uucucnccuucucuucuug

SEQ ID NO: 629910 - RNA, 19 nt, Artificial Sequence
  Description of Artificial Sequence: Synthetic oligonucleotide
caaauggugugcuucgaca

SEQ ID NO: 629911 - RNA, 19 nt, Artificial Sequence
  Description of Artificial Sequence: Synthetic oligonucleotide
uguguuggugguuccucug

SEQ ID NO: 629912 - RNA, 19 nt, Artificial Sequence
  Description of Artificial Sequence: Synthetic oligonucleotide
aagauugcauccagcuuug

SEQ ID NO: 629913 - RNA, 19 nt, Artificial Sequence
  Description of Artificial Sequence: Synthetic oligonucleotide
gacgccuuucuugaagaag

SEQ ID NO: 629914 - RNA, 19 nt, Artificial Sequence
  Description of Artificial Sequence: Synthetic oligonucleotide
cuuuucgauaaacgaagca

SEQ ID NO: 629915 - RNA, 19 nt, Artificial Sequence
  Description of Artificial Sequence: Synthetic oligonucleotide
acagaugugcaaugcuaca

SEQ ID NO: 629916 - RNA, 19 nt, Artificial Sequence
  Description of Artificial Sequence: Synthetic oligonucleotide
aacucaggcacuagauaug

SEQ ID NO: 629917 - RNA, 19 nt, Artificial Sequence
  Description of Artificial Sequence: Synthetic oligonucleotide
ugugauuauacagccugau

SEQ ID NO: 629918 - RNA, 19 nt, Artificial Sequence
  Description of Artificial Sequence: Synthetic oligonucleotide
guaagccacccacuuuggg

SEQ ID NO: 629919 - RNA, 19 nt, Artificial Sequence
  Description of Artificial Sequence: Synthetic oligonucleotide
uugaagguuuaagcaaugu

SEQ ID NO: 629920 - RNA, 19 nt, Artificial Sequence
  Description of Artificial Sequence: Synthetic oligonucleotide
ggucgucuggauuugcucc

SEQ ID NO: 629921 - RNA, 19 nt, Artificial Sequence
  Description of Artificial Sequence: Synthetic oligonucleotide
auuucucgaaaacgacugu

SEQ ID NO: 629922 - RNA, 19 nt, Artificial Sequence
  Description of Artificial Sequence: Synthetic oligonucleotide
cuguaacgccugaauacag

SEQ ID NO: 629923 - RNA, 19 nt, Artificial Sequence
  Description of Artificial Sequence: Synthetic oligonucleotide
ccagaaucaccaaucgucc

SEQ ID NO: 629924 - RNA, 19 nt, Artificial Sequence
  Description of Artificial Sequence: Synthetic oligonucleotide
aggcacuagauauggugug

SEQ ID NO: 629925 - RNA, 19 nt, Artificial Sequence
  Description of Artificial Sequence: Synthetic oligonucleotide
caaugcuacauuauguccu

SEQ ID NO: 629926 - RNA, 19 nt, Artificial Sequence
  Description of Artificial Sequence: Synthetic oligonucleotide
acgaauggacaacagccau

SEQ ID NO: 629927 - RNA, 19 nt, Artificial Sequence
  Description of Artificial Sequence: Synthetic oligonucleotide
ugccccaacgggaggaggc

SEQ ID NO: 629928 - RNA, 19 nt, Artificial Sequence
  Description of Artificial Sequence: Synthetic oligonucleotide
  modified_base (4)..(4): a, c, u, g, unknown or other
cucnccuucucuucuuguc

SEQ ID NO: 629929 - RNA, 19 nt, Artificial Sequence
  Description of Artificial Sequence: Synthetic oligonucleotide
ucuaaggucccaggaugag

SEQ ID NO: 629930 - RNA, 19 nt, Artificial Sequence
  Description of Artificial Sequence: Synthetic oligonucleotide
ugccagaggggacugacuu

SEQ ID NO: 629931 - RNA, 19 nt, Artificial Sequence
  Description of Artificial Sequence: Synthetic oligonucleotide
caggaguguauacauauaa

SEQ ID NO: 629932 - RNA, 19 nt, Artificial Sequence
  Description of Artificial Sequence: Synthetic oligonucleotide
agauauggugugugaggug

SEQ ID NO: 629933 - RNA, 19 nt, Artificial Sequence
  Description of Artificial Sequence: Synthetic oligonucleotide
uucuagccguacagggucc

SEQ ID NO: 629934 - RNA, 19 nt, Artificial Sequence
  Description of Artificial Sequence: Synthetic oligonucleotide
guaagcacugauccuggca

SEQ ID NO: 629935 - RNA, 19 nt, Artificial Sequence
  Description of Artificial Sequence: Synthetic oligonucleotide
gguggagcgccucugcagg

SEQ ID NO: 629936 - RNA, 19 nt, Artificial Sequence
  Description of Artificial Sequence: Synthetic oligonucleotide
acuauuguacaggagugua

SEQ ID NO: 629937 - RNA, 19 nt, Artificial Sequence
  Description of Artificial Sequence: Synthetic oligonucleotide
ggggagaugucgaagacug

SEQ ID NO: 629938 - RNA, 19 nt, Artificial Sequence
  Description of Artificial Sequence: Synthetic oligonucleotide
augaguuuuaagugauguu

SEQ ID NO: 629939 - RNA, 19 nt, Artificial Sequence
  Description of Artificial Sequence: Synthetic oligonucleotide
gauuauacagccugauauu

SEQ ID NO: 629940 - RNA, 19 nt, Artificial Sequence
  Description of Artificial Sequence: Synthetic oligonucleotide
caauuccuuuucgauaaac

SEQ ID NO: 629941 - RNA, 19 nt, Artificial Sequence
  Description of Artificial Sequence: Synthetic oligonucleotide
auauuaagucccaauccaa

SEQ ID NO: 629942 - RNA, 19 nt, Artificial Sequence
  Description of Artificial Sequence: Synthetic oligonucleotide
gaaaacgacuguaacgccu

SEQ ID NO: 629943 - RNA, 19 nt, Artificial Sequence
  Description of Artificial Sequence: Synthetic oligonucleotide
  modified_base (2)..(2): a, c, u, g, unknown or other
cnccuucucuucuugucug

SEQ ID NO: 629944 - RNA, 19 nt, Artificial Sequence
  Description of Artificial Sequence: Synthetic oligonucleotide
ggaaaaugcccucaaauau

SEQ ID NO: 629945 - RNA, 19 nt, Artificial Sequence
  Description of Artificial Sequence: Synthetic oligonucleotide
ggauuauuaauaaacuacu

SEQ ID NO: 629946 - RNA, 19 nt, Artificial Sequence
  Description of Artificial Sequence: Synthetic oligonucleotide
uagggcauuugguguaaac

SEQ ID NO: 629947 - RNA, 19 nt, Artificial Sequence
  Description of Artificial Sequence: Synthetic oligonucleotide
  modified_base (5)..(5): a, c, u, g, unknown or other
ucucnccuucucuucuugu

SEQ ID NO: 629948 - RNA, 19 nt, Artificial Sequence
  Description of Artificial Sequence: Synthetic oligonucleotide
caugauugaccgacagauc

SEQ ID NO: 629949 - RNA, 19 nt, Artificial Sequence
  Description of Artificial Sequence: Synthetic oligonucleotide
uggugugauuauacagccu

SEQ ID NO: 629950 - RNA, 19 nt, Artificial Sequence
  Description of Artificial Sequence: Synthetic oligonucleotide
auugaagguuuaagcaaug

SEQ ID NO: 629951 - RNA, 19 nt, Artificial Sequence
  Description of Artificial Sequence: Synthetic oligonucleotide
ggucagucccacuuuguug

SEQ ID NO: 629952 - RNA, 19 nt, Artificial Sequence
  Description of Artificial Sequence: Synthetic oligonucleotide
gacauagcggggaauacua

SEQ ID NO: 629953 - RNA, 19 nt, Artificial Sequence
  Description of Artificial Sequence: Synthetic oligonucleotide
gccuacauccaguuuauca

SEQ ID NO: 629954 - RNA, 19 nt, Artificial Sequence
  Description of Artificial Sequence: Synthetic oligonucleotide
uguugccccaacgggagga

SEQ ID NO: 629955 - RNA, 19 nt, Artificial Sequence
  Description of Artificial Sequence: Synthetic oligonucleotide
cacgaauggacaacagcca

SEQ ID NO: 629956 - RNA, 19 nt, Artificial Sequence
  Description of Artificial Sequence: Synthetic oligonucleotide
ucgauaaacgaagcaguuu

SEQ ID NO: 629957 - RNA, 19 nt, Artificial Sequence
  Description of Artificial Sequence: Synthetic oligonucleotide
acauuauguccugaguaau

SEQ ID NO: 629958 - RNA, 19 nt, Artificial Sequence
  Description of Artificial Sequence: Synthetic oligonucleotide
ggacuauuguacaggagug

SEQ ID NO: 629959 - RNA, 19 nt, Artificial Sequence
  Description of Artificial Sequence: Synthetic oligonucleotide
guguccgccucucagcaac

SEQ ID NO: 629960 - RNA, 19 nt, Artificial Sequence
  Description of Artificial Sequence: Synthetic oligonucleotide
ugcuucgacagggucaguc

SEQ ID NO: 629961 - RNA, 19 nt, Artificial Sequence
  Description of Artificial Sequence: Synthetic oligonucleotide
cuauagguagaguuaugua

SEQ ID NO: 629962 - RNA, 19 nt, Artificial Sequence
  Description of Artificial Sequence: Synthetic oligonucleotide
acauccgcucauauuuuag

SEQ ID NO: 629963 - RNA, 19 nt, Artificial Sequence
  Description of Artificial Sequence: Synthetic oligonucleotide
ggucugguaagccacccac

SEQ ID NO: 629964 - RNA, 19 nt, Artificial Sequence
  Description of Artificial Sequence: Synthetic oligonucleotide
gguggauuucauguucuag

SEQ ID NO: 629965 - RNA, 19 nt, Artificial Sequence
  Description of Artificial Sequence: Synthetic oligonucleotide
cuaucccguuccauggcug

SEQ ID NO: 629966 - RNA, 19 nt, Artificial Sequence
  Description of Artificial Sequence: Synthetic oligonucleotide
guagaguuauguacauuuc

SEQ ID NO: 629967 - RNA, 19 nt, Artificial Sequence
  Description of Artificial Sequence: Synthetic oligonucleotide
ugaguaauugagggauuau

SEQ ID NO: 629968 - RNA, 19 nt, Artificial Sequence
  Description of Artificial Sequence: Synthetic oligonucleotide
guguuuagguauauuaagu

SEQ ID NO: 629969 - RNA, 19 nt, Artificial Sequence
  Description of Artificial Sequence: Synthetic oligonucleotide
gcuuacguugaauggcacc

SEQ ID NO: 629970 - RNA, 19 nt, Artificial Sequence
  Description of Artificial Sequence: Synthetic oligonucleotide
cucuaaggucccaggauga

SEQ ID NO: 629971 - RNA, 19 nt, Artificial Sequence
  Description of Artificial Sequence: Synthetic oligonucleotide
ggugaaagaggaaaccaga

SEQ ID NO: 629972 - RNA, 19 nt, Artificial Sequence
  Description of Artificial Sequence: Synthetic oligonucleotide
ccuuuucgauaaacgaagc

SEQ ID NO: 629973 - RNA, 19 nt, Artificial Sequence
  Description of Artificial Sequence: Synthetic oligonucleotide
ugucgaagacuggagcauc

SEQ ID NO: 629974 - RNA, 19 nt, Artificial Sequence
  Description of Artificial Sequence: Synthetic oligonucleotide
aggaguguauacauauaaa

SEQ ID NO: 629975 - RNA, 19 nt, Artificial Sequence
  Description of Artificial Sequence: Synthetic oligonucleotide
uggagcaaggugagaguuu

SEQ ID NO: 629976 - RNA, 19 nt, Artificial Sequence
  Description of Artificial Sequence: Synthetic oligonucleotide
auguugccccaacgggagg

SEQ ID NO: 629977 - RNA, 19 nt, Artificial Sequence
  Description of Artificial Sequence: Synthetic oligonucleotide
ccaaguccaggguggagcg

SEQ ID NO: 629978 - RNA, 19 nt, Artificial Sequence
  Description of Artificial Sequence: Synthetic oligonucleotide
agcuuacguugaauggcac

SEQ ID NO: 629979 - RNA, 19 nt, Artificial Sequence
  Description of Artificial Sequence: Synthetic oligonucleotide
uggcauccaucaguggagc

SEQ ID NO: 629980 - RNA, 19 nt, Artificial Sequence
  Description of Artificial Sequence: Synthetic oligonucleotide
gugauuauacagccugaua

SEQ ID NO: 629981 - RNA, 19 nt, Artificial Sequence
  Description of Artificial Sequence: Synthetic oligonucleotide
uagguauauuaagucccaa

SEQ ID NO: 629982 - RNA, 19 nt, Artificial Sequence
  Description of Artificial Sequence: Synthetic oligonucleotide
agcuucaauuuaacaguug

SEQ ID NO: 629983 - RNA, 19 nt, Artificial Sequence
  Description of Artificial Sequence: Synthetic oligonucleotide
gaauacauccgcucauauu

SEQ ID NO: 629984 - RNA, 19 nt, Artificial Sequence
  Description of Artificial Sequence: Synthetic oligonucleotide
uguccgccucucagcaacc

SEQ ID NO: 629985 - RNA, 19 nt, Artificial Sequence
  Description of Artificial Sequence: Synthetic oligonucleotide
cugaaggguggucugguaa

SEQ ID NO: 629986 - RNA, 19 nt, Artificial Sequence
  Description of Artificial Sequence: Synthetic oligonucleotide
ggagagagccaagucucgg

SEQ ID NO: 629987 - RNA, 19 nt, Artificial Sequence
  Description of Artificial Sequence: Synthetic oligonucleotide
agccacccacuuugggagg

SEQ ID NO: 629988 - RNA, 19 nt, Artificial Sequence
  Description of Artificial Sequence: Synthetic oligonucleotide
uugccagaggggacugacu

SEQ ID NO: 629989 - RNA, 19 nt, Artificial Sequence
  Description of Artificial Sequence: Synthetic oligonucleotide
caaucguccugugcaaauc

SEQ ID NO: 629990 - RNA, 19 nt, Artificial Sequence
  Description of Artificial Sequence: Synthetic oligonucleotide
aggggagaugucgaagacu

SEQ ID NO: 629991 - RNA, 19 nt, Artificial Sequence
  Description of Artificial Sequence: Synthetic oligonucleotide
gaaucaccaaucguccugu

SEQ ID NO: 629992 - RNA, 19 nt, Artificial Sequence
  Description of Artificial Sequence: Synthetic oligonucleotide
caggcacuagauauggugu

SEQ ID NO: 629993 - RNA, 19 nt, Artificial Sequence
  Description of Artificial Sequence: Synthetic oligonucleotide
ucguaguguucauccuuuc

SEQ ID NO: 629994 - RNA, 19 nt, Artificial Sequence
  Description of Artificial Sequence: Synthetic oligonucleotide
agcggggaauacuaaucuu

SEQ ID NO: 629995 - RNA, 19 nt, Artificial Sequence
  Description of Artificial Sequence: Synthetic oligonucleotide
acccacuuugggagguccc

SEQ ID NO: 629996 - RNA, 19 nt, Artificial Sequence
  Description of Artificial Sequence: Synthetic oligonucleotide
gagaauacauccgcucaua

SEQ ID NO: 629997 - RNA, 19 nt, Artificial Sequence
  Description of Artificial Sequence: Synthetic oligonucleotide
guggagcgccucugcaggg

SEQ ID NO: 629998 - RNA, 19 nt, Artificial Sequence
  Description of Artificial Sequence: Synthetic oligonucleotide
uucaguguuuagguauauu

SEQ ID NO: 629999 - RNA, 19 nt, Artificial Sequence
  Description of Artificial Sequence: Synthetic oligonucleotide
caaguaggcuuggcucugg

SEQ ID NO: 630000 - RNA, 19 nt, Artificial Sequence
  Description of Artificial Sequence: Synthetic oligonucleotide
ggagucacuuugaugagaa

SEQ ID NO: 630001 - RNA, 19 nt, Artificial Sequence
  Description of Artificial Sequence: Synthetic oligonucleotide
uuacguugaauggcaccau

SEQ ID NO: 630002 - RNA, 19 nt, Artificial Sequence
  Description of Artificial Sequence: Synthetic oligonucleotide
gacuauuguacaggagugu

SEQ ID NO: 630003 - RNA, 19 nt, Artificial Sequence
  Description of Artificial Sequence: Synthetic oligonucleotide
acgaagcaguuucacugua

SEQ ID NO: 630004 - RNA, 19 nt, Artificial Sequence
  Description of Artificial Sequence: Synthetic oligonucleotide
ggugagaguuuucagcccu

SEQ ID NO: 630005 - RNA, 19 nt, Artificial Sequence
  Description of Artificial Sequence: Synthetic oligonucleotide
uucagcccugggcggcaag

SEQ ID NO: 630006 - RNA, 19 nt, Artificial Sequence
  Description of Artificial Sequence: Synthetic oligonucleotide
cuaaucuuaaugggguccu

SEQ ID NO: 630007 - RNA, 19 nt, Artificial Sequence
  Description of Artificial Sequence: Synthetic oligonucleotide
caauguaagcacugauccu

SEQ ID NO: 630008 - RNA, 19 nt, Artificial Sequence
  Description of Artificial Sequence: Synthetic oligonucleotide
ucuagccguacaggguccu

SEQ ID NO: 630009 - RNA, 19 nt, Artificial Sequence
  Description of Artificial Sequence: Synthetic oligonucleotide
cugaguaauugagggauua

SEQ ID NO: 630010 - RNA, 19 nt, Artificial Sequence
  Description of Artificial Sequence: Synthetic oligonucleotide
agacgccuuucuugaagaa

SEQ ID NO: 630011 - RNA, 19 nt, Artificial Sequence
  Description of Artificial Sequence: Synthetic oligonucleotide
gucgcucuuggucgcugcc

SEQ ID NO: 630012 - RNA, 19 nt, Artificial Sequence
  Description of Artificial Sequence: Synthetic oligonucleotide
cauagcggggaauacuaau

SEQ ID NO: 630013 - RNA, 19 nt, Artificial Sequence
  Description of Artificial Sequence: Synthetic oligonucleotide
acucccaaacucaggcacu

SEQ ID NO: 630014 - RNA, 19 nt, Artificial Sequence
  Description of Artificial Sequence: Synthetic oligonucleotide
gugaaggggagaugucgaa

SEQ ID NO: 630015 - RNA, 19 nt, Artificial Sequence
  Description of Artificial Sequence: Synthetic oligonucleotide
gaacgagaauacauccgcu

SEQ ID NO: 630016 - RNA, 19 nt, Artificial Sequence
  Description of Artificial Sequence: Synthetic oligonucleotide
acugaaggguggucuggua

SEQ ID NO: 630017 - RNA, 19 nt, Artificial Sequence
  Description of Artificial Sequence: Synthetic oligonucleotide
caccuuuaauaaauuuggu

SEQ ID NO: 630018 - RNA, 19 nt, Artificial Sequence
  Description of Artificial Sequence: Synthetic oligonucleotide
gugugauuauacagccuga

SEQ ID NO: 630019 - RNA, 19 nt, Artificial Sequence
  Description of Artificial Sequence: Synthetic oligonucleotide
gucgaagacuggagcauca

SEQ ID NO: 630020 - RNA, 19 nt, Artificial Sequence
  Description of Artificial Sequence: Synthetic oligonucleotide
gggccuacguucaagugca

SEQ ID NO: 630021 - RNA, 19 nt, Artificial Sequence
  Description of Artificial Sequence: Synthetic oligonucleotide
ggugggcugcugcauguug

SEQ ID NO: 630022 - RNA, 19 nt, Artificial Sequence
  Description of Artificial Sequence: Synthetic oligonucleotide
guccugugcaaaucaugaa

SEQ ID NO: 630023 - RNA, 19 nt, Artificial Sequence
  Description of Artificial Sequence: Synthetic oligonucleotide
ggcagagugccucugcucu

SEQ ID NO: 630024 - RNA, 19 nt, Artificial Sequence
  Description of Artificial Sequence: Synthetic oligonucleotide
caacagccauugagguuug

SEQ ID NO: 630025 - RNA, 19 nt, Artificial Sequence
  Description of Artificial Sequence: Synthetic oligonucleotide
ccucacaucuaucccguuc

SEQ ID NO: 630026 - RNA, 19 nt, Artificial Sequence
  Description of Artificial Sequence: Synthetic oligonucleotide
caccauugugaaguuccuc

SEQ ID NO: 630027 - RNA, 19 nt, Artificial Sequence
  Description of Artificial Sequence: Synthetic oligonucleotide
gggugagacuucacaaaug

SEQ ID NO: 630028 - RNA, 19 nt, Artificial Sequence
  Description of Artificial Sequence: Synthetic oligonucleotide
gcuacauuauguccugagu

SEQ ID NO: 630029 - RNA, 19 nt, Artificial Sequence
  Description of Artificial Sequence: Synthetic oligonucleotide
cgaaaacgacuguaacgcc

SEQ ID NO: 630030 - RNA, 19 nt, Artificial Sequence
  Description of Artificial Sequence: Synthetic oligonucleotide
cagcccugacuucuccaug

SEQ ID NO: 630031 - RNA, 19 nt, Artificial Sequence
  Description of Artificial Sequence: Synthetic oligonucleotide
guugccccaacgggaggag

SEQ ID NO: 630032 - RNA, 19 nt, Artificial Sequence
  Description of Artificial Sequence: Synthetic oligonucleotide
gcauguugccccaacggga

SEQ ID NO: 630033 - RNA, 19 nt, Artificial Sequence
  Description of Artificial Sequence: Synthetic oligonucleotide
gauugaccgacagauccuu

SEQ ID NO: 630034 - RNA, 19 nt, Artificial Sequence
  Description of Artificial Sequence: Synthetic oligonucleotide
ucccaggaugaggucucug

SEQ ID NO: 630035 - RNA, 19 nt, Artificial Sequence
  Description of Artificial Sequence: Synthetic oligonucleotide
caaaucaugaaggcgucuu

SEQ ID NO: 630036 - RNA, 19 nt, Artificial Sequence
  Description of Artificial Sequence: Synthetic oligonucleotide
gaacaccauccaccucaca

SEQ ID NO: 630037 - RNA, 19 nt, Artificial Sequence
  Description of Artificial Sequence: Synthetic oligonucleotide
caaagacgccuuucuugaa

SEQ ID NO: 630038 - RNA, 19 nt, Artificial Sequence
  Description of Artificial Sequence: Synthetic oligonucleotide
agccugauauuggacuauu

SEQ ID NO: 630039 - RNA, 19 nt, Artificial Sequence
  Description of Artificial Sequence: Synthetic oligonucleotide
caguaacaacugccgguca

SEQ ID NO: 630040 - RNA, 19 nt, Artificial Sequence
  Description of Artificial Sequence: Synthetic oligonucleotide
cagaaucaccaaucguccu

SEQ ID NO: 630041 - RNA, 19 nt, Artificial Sequence
  Description of Artificial Sequence: Synthetic oligonucleotide
caguuucacuguacacaga

SEQ ID NO: 630042 - RNA, 19 nt, Artificial Sequence
  Description of Artificial Sequence: Synthetic oligonucleotide
aucguccugugcaaaucau

SEQ ID NO: 630043 - RNA, 19 nt, Artificial Sequence
  Description of Artificial Sequence: Synthetic oligonucleotide
augcuacauuauguccuga

SEQ ID NO: 630044 - RNA, 19 nt, Artificial Sequence
  Description of Artificial Sequence: Synthetic oligonucleotide
cucucgucuuuguuuccaa

SEQ ID NO: 630045 - RNA, 19 nt, Artificial Sequence
  Description of Artificial Sequence: Synthetic oligonucleotide
caccaaucguccugugcaa

SEQ ID NO: 630046 - RNA, 19 nt, Artificial Sequence
  Description of Artificial Sequence: Synthetic oligonucleotide
caccucacaucuaucccgu

SEQ ID NO: 630047 - RNA, 19 nt, Artificial Sequence
  Description of Artificial Sequence: Synthetic oligonucleotide
gcggggaauacuaaucuua

SEQ ID NO: 630048 - RNA, 19 nt, Artificial Sequence
  Description of Artificial Sequence: Synthetic oligonucleotide
ggucgcucuuggucgcugc

SEQ ID NO: 630049 - RNA, 19 nt, Artificial Sequence
  Description of Artificial Sequence: Synthetic oligonucleotide
agggucagucccacuuugu

SEQ ID NO: 630050 - RNA, 19 nt, Artificial Sequence
  Description of Artificial Sequence: Synthetic oligonucleotide
gcucacgaauggacaacag

SEQ ID NO: 630051 - RNA, 19 nt, Artificial Sequence
  Description of Artificial Sequence: Synthetic oligonucleotide
cuguguuggugguuccucu

SEQ ID NO: 630052 - RNA, 19 nt, Artificial Sequence
  Description of Artificial Sequence: Synthetic oligonucleotide
gccugauauuggacuauug

SEQ ID NO: 630053 - RNA, 19 nt, Artificial Sequence
  Description of Artificial Sequence: Synthetic oligonucleotide
cagcaaccacucucucguc

SEQ ID NO: 630054 - RNA, 19 nt, Artificial Sequence
  Description of Artificial Sequence: Synthetic oligonucleotide
auagggcauuugguguaaa

SEQ ID NO: 630055 - RNA, 19 nt, Artificial Sequence
  Description of Artificial Sequence: Synthetic oligonucleotide
agcgccucugcagggcaga

SEQ ID NO: 630056 - RNA, 19 nt, Artificial Sequence
  Description of Artificial Sequence: Synthetic oligonucleotide
guggagcaaggugagaguu

SEQ ID NO: 630057 - RNA, 19 nt, Artificial Sequence
  Description of Artificial Sequence: Synthetic oligonucleotide
ccaaacucaggcacuagau

SEQ ID NO: 630058 - RNA, 19 nt, Artificial Sequence
  Description of Artificial Sequence: Synthetic oligonucleotide
auugaccgacagauccuuu

SEQ ID NO: 630059 - RNA, 19 nt, Artificial Sequence
  Description of Artificial Sequence: Synthetic oligonucleotide
ccaacgggaggaggcaggc

SEQ ID NO: 630060 - RNA, 19 nt, Artificial Sequence
  Description of Artificial Sequence: Synthetic oligonucleotide
gcuaaugauccugaagauu

SEQ ID NO: 630061 - RNA, 19 nt, Artificial Sequence
  Description of Artificial Sequence: Synthetic oligonucleotide
ggacauagcggggaauacu

SEQ ID NO: 630062 - RNA, 19 nt, Artificial Sequence
  Description of Artificial Sequence: Synthetic oligonucleotide
acguucaagugcagaggua

SEQ ID NO: 630063 - RNA, 19 nt, Artificial Sequence
  Description of Artificial Sequence: Synthetic oligonucleotide
accucacaucuaucccguu

SEQ ID NO: 630064 - RNA, 19 nt, Artificial Sequence
  Description of Artificial Sequence: Synthetic oligonucleotide
ccaaguaggcuuggcucug

SEQ ID NO: 630065 - RNA, 19 nt, Artificial Sequence
  Description of Artificial Sequence: Synthetic oligonucleotide
caucuaggacagaaaucuu

SEQ ID NO: 630066 - RNA, 19 nt, Artificial Sequence
  Description of Artificial Sequence: Synthetic oligonucleotide
cccaaagaacgagaauaca

SEQ ID NO: 630067 - RNA, 19 nt, Artificial Sequence
  Description of Artificial Sequence: Synthetic oligonucleotide
ggccagaaucaccaaucgu

SEQ ID NO: 630068 - RNA, 19 nt, Artificial Sequence
  Description of Artificial Sequence: Synthetic oligonucleotide
cccaaguaggcuuggcucu

SEQ ID NO: 630069 - RNA, 19 nt, Artificial Sequence
  Description of Artificial Sequence: Synthetic oligonucleotide
ggggaauacuaaucuuaau

SEQ ID NO: 630070 - RNA, 19 nt, Artificial Sequence
  Description of Artificial Sequence: Synthetic oligonucleotide
gccuacguucaagugcaga

SEQ ID NO: 630071 - RNA, 19 nt, Artificial Sequence
  Description of Artificial Sequence: Synthetic oligonucleotide
cucaggcacuagauauggu

SEQ ID NO: 630072 - RNA, 19 nt, Artificial Sequence
  Description of Artificial Sequence: Synthetic oligonucleotide
caggcauggaagacucuuu

SEQ ID NO: 630073 - RNA, 19 nt, Artificial Sequence
  Description of Artificial Sequence: Synthetic oligonucleotide
cgccucucagcaaccacuc

SEQ ID NO: 630074 - RNA, 19 nt, Artificial Sequence
  Description of Artificial Sequence: Synthetic oligonucleotide
acgccugaauacaguccau

SEQ ID NO: 630075 - RNA, 19 nt, Artificial Sequence
  Description of Artificial Sequence: Synthetic oligonucleotide
cuucaguguuuagguauau

SEQ ID NO: 630076 - RNA, 19 nt, Artificial Sequence
  Description of Artificial Sequence: Synthetic oligonucleotide
ccuuacucacaauuccuuu

SEQ ID NO: 630077 - RNA, 19 nt, Artificial Sequence
  Description of Artificial Sequence: Synthetic oligonucleotide
gggucagucccacuuuguu

SEQ ID NO: 630078 - RNA, 19 nt, Artificial Sequence
  Description of Artificial Sequence: Synthetic oligonucleotide
ccccucuaaggucccagga

SEQ ID NO: 630079 - RNA, 19 nt, Artificial Sequence
  Description of Artificial Sequence: Synthetic oligonucleotide
cacaucuaucccguuccau

SEQ ID NO: 630080 - RNA, 19 nt, Artificial Sequence
  Description of Artificial Sequence: Synthetic oligonucleotide
gcaaaucaugaaggcgucu

SEQ ID NO: 630081 - RNA, 19 nt, Artificial Sequence
  Description of Artificial Sequence: Synthetic oligonucleotide
gcagagugccucugcucua

SEQ ID NO: 630082 - RNA, 19 nt, Artificial Sequence
  Description of Artificial Sequence: Synthetic oligonucleotide
ccaaucguccugugcaaau

SEQ ID NO: 630083 - RNA, 19 nt, Artificial Sequence
  Description of Artificial Sequence: Synthetic oligonucleotide
ccgccucucagcaaccacu

SEQ ID NO: 630084 - RNA, 19 nt, Artificial Sequence
  Description of Artificial Sequence: Synthetic oligonucleotide
ccggucagggucgcucuug

SEQ ID NO: 630085 - RNA, 19 nt, Artificial Sequence
  Description of Artificial Sequence: Synthetic oligonucleotide
cagccugauauuggacuau

SEQ ID NO: 630086 - RNA, 19 nt, Artificial Sequence
  Description of Artificial Sequence: Synthetic oligonucleotide
ggccuacguucaagugcag

SEQ ID NO: 630087 - RNA, 19 nt, Artificial Sequence
  Description of Artificial Sequence: Synthetic oligonucleotide
gccccaacgggaggaggca

SEQ ID NO: 630088 - RNA, 19 nt, Artificial Sequence
  Description of Artificial Sequence: Synthetic oligonucleotide
gcgccucugcagggcagag

SEQ ID NO: 630089 - RNA, 19 nt, Artificial Sequence
  Description of Artificial Sequence: Synthetic oligonucleotide
gccucucagcaaccacucu

SEQ ID NO: 630090 - RNA, 19 nt, Artificial Sequence
  Description of Artificial Sequence: Synthetic oligonucleotide
cccugggcggcaagcugga

SEQ ID NO: 630091 - RNA, 19 nt, Artificial Sequence
  Description of Artificial Sequence: Synthetic oligonucleotide
cuagccguacaggguccuu

SEQ ID NO: 630092 - RNA, 19 nt, Artificial Sequence
  Description of Artificial Sequence: Synthetic oligonucleotide
cgucuggauuugcucccaa

SEQ ID NO: 630093 - RNA, 19 nt, Artificial Sequence
  Description of Artificial Sequence: Synthetic oligonucleotide
agacauauggccuaggauc

SEQ ID NO: 630094 - RNA, 19 nt, Artificial Sequence
  Description of Artificial Sequence: Synthetic oligonucleotide
ucucuaauaagucggagcc

SEQ ID NO: 630095 - RNA, 19 nt, Artificial Sequence
  Description of Artificial Sequence: Synthetic oligonucleotide
aguugcaaaacccagaacu

SEQ ID NO: 630096 - RNA, 19 nt, Artificial Sequence
  Description of Artificial Sequence: Synthetic oligonucleotide
aaaauugaccucaaaauug

SEQ ID NO: 630097 - RNA, 19 nt, Artificial Sequence
  Description of Artificial Sequence: Synthetic oligonucleotide
uccaguuugauccagcccc

SEQ ID NO: 630098 - RNA, 19 nt, Artificial Sequence
  Description of Artificial Sequence: Synthetic oligonucleotide
aaucuuuaggcugucggcc

SEQ ID NO: 630099 - RNA, 19 nt, Artificial Sequence
  Description of Artificial Sequence: Synthetic oligonucleotide
uaacugauugucaaccugg

SEQ ID NO: 630100 - RNA, 19 nt, Artificial Sequence
  Description of Artificial Sequence: Synthetic oligonucleotide
ucaagauggaacuuggggc

SEQ ID NO: 630101 - RNA, 19 nt, Artificial Sequence
  Description of Artificial Sequence: Synthetic oligonucleotide
aaacuuaggaucgacaugu

SEQ ID NO: 630102 - RNA, 19 nt, Artificial Sequence
  Description of Artificial Sequence: Synthetic oligonucleotide
cuuaggaucgacaugucag

SEQ ID NO: 630103 - RNA, 19 nt, Artificial Sequence
  Description of Artificial Sequence: Synthetic oligonucleotide
aaauagggcaauaauagcu

SEQ ID NO: 630104 - RNA, 19 nt, Artificial Sequence
  Description of Artificial Sequence: Synthetic oligonucleotide
uuuuaaggccauuuccugg

SEQ ID NO: 630105 - RNA, 19 nt, Artificial Sequence
  Description of Artificial Sequence: Synthetic oligonucleotide
ucuaacaacacuccacaug

SEQ ID NO: 630106 - RNA, 19 nt, Artificial Sequence
  Description of Artificial Sequence: Synthetic oligonucleotide
uugccugucauauggacgg

SEQ ID NO: 630107 - RNA, 19 nt, Artificial Sequence
  Description of Artificial Sequence: Synthetic oligonucleotide
aauagggcaauaauagcuc

SEQ ID NO: 630108 - RNA, 19 nt, Artificial Sequence
  Description of Artificial Sequence: Synthetic oligonucleotide
uauucuuugaggucugacc

SEQ ID NO: 630109 - RNA, 19 nt, Artificial Sequence
  Description of Artificial Sequence: Synthetic oligonucleotide
ucauauggacggaugaugc

SEQ ID NO: 630110 - RNA, 19 nt, Artificial Sequence
  Description of Artificial Sequence: Synthetic oligonucleotide
gauaugguucucuaauaag

SEQ ID NO: 630111 - RNA, 19 nt, Artificial Sequence
  Description of Artificial Sequence: Synthetic oligonucleotide
agaauagugcuucgacucc

SEQ ID NO: 630112 - RNA, 19 nt, Artificial Sequence
  Description of Artificial Sequence: Synthetic oligonucleotide
acgguuugggcucugaauc

SEQ ID NO: 630113 - RNA, 19 nt, Artificial Sequence
  Description of Artificial Sequence: Synthetic oligonucleotide
uguagugucuaacaacacu

SEQ ID NO: 630114 - RNA, 19 nt, Artificial Sequence
  Description of Artificial Sequence: Synthetic oligonucleotide
aaugaguccaaauggguuu

SEQ ID NO: 630115 - RNA, 19 nt, Artificial Sequence
  Description of Artificial Sequence: Synthetic oligonucleotide
ugggcucugaaucuaaagc

SEQ ID NO: 630116 - RNA, 19 nt, Artificial Sequence
  Description of Artificial Sequence: Synthetic oligonucleotide
uuuaauagggcaccggaua

SEQ ID NO: 630117 - RNA, 19 nt, Artificial Sequence
  Description of Artificial Sequence: Synthetic oligonucleotide
uuccauuggaacuuuguca

SEQ ID NO: 630118 - RNA, 19 nt, Artificial Sequence
  Description of Artificial Sequence: Synthetic oligonucleotide
uauaaccgggcccuuaagc

SEQ ID NO: 630119 - RNA, 19 nt, Artificial Sequence
  Description of Artificial Sequence: Synthetic oligonucleotide
uacaagcacauacaucugc

SEQ ID NO: 630120 - RNA, 19 nt, Artificial Sequence
  Description of Artificial Sequence: Synthetic oligonucleotide
agaaacuuaggaucgacau

SEQ ID NO: 630121 - RNA, 19 nt, Artificial Sequence
  Description of Artificial Sequence: Synthetic oligonucleotide
aauaagucggagccuucag

SEQ ID NO: 630122 - RNA, 19 nt, Artificial Sequence
  Description of Artificial Sequence: Synthetic oligonucleotide
ucgaugaacgguuugggcu

SEQ ID NO: 630123 - RNA, 19 nt, Artificial Sequence
  Description of Artificial Sequence: Synthetic oligonucleotide
uaugguucucuaauaaguc

SEQ ID NO: 630124 - RNA, 19 nt, Artificial Sequence
  Description of Artificial Sequence: Synthetic oligonucleotide
uugacuguacucauugaac

SEQ ID NO: 630125 - RNA, 19 nt, Artificial Sequence
  Description of Artificial Sequence: Synthetic oligonucleotide
aucgaugaacgguuugggc

SEQ ID NO: 630126 - RNA, 19 nt, Artificial Sequence
  Description of Artificial Sequence: Synthetic oligonucleotide
caguuguugggguaaauag

SEQ ID NO: 630127 - RNA, 19 nt, Artificial Sequence
  Description of Artificial Sequence: Synthetic oligonucleotide
agaaccggugauucgagag

SEQ ID NO: 630128 - RNA, 19 nt, Artificial Sequence
  Description of Artificial Sequence: Synthetic oligonucleotide
acucauugaaccuugugau

SEQ ID NO: 630129 - RNA, 19 nt, Artificial Sequence
  Description of Artificial Sequence: Synthetic oligonucleotide
acuugaaucccugauaaga

SEQ ID NO: 630130 - RNA, 19 nt, Artificial Sequence
  Description of Artificial Sequence: Synthetic oligonucleotide
aaaacuccgcgcaguaagc

SEQ ID NO: 630131 - RNA, 19 nt, Artificial Sequence
  Description of Artificial Sequence: Synthetic oligonucleotide
uuucccaacagaaccggug

SEQ ID NO: 630132 - RNA, 19 nt, Artificial Sequence
  Description of Artificial Sequence: Synthetic oligonucleotide
uccuaauguaugcagaguu

SEQ ID NO: 630133 - RNA, 19 nt, Artificial Sequence
  Description of Artificial Sequence: Synthetic oligonucleotide
ucauaauaggccaguuuga

SEQ ID NO: 630134 - RNA, 19 nt, Artificial Sequence
  Description of Artificial Sequence: Synthetic oligonucleotide
ucaaccuggagccaguaua

SEQ ID NO: 630135 - RNA, 19 nt, Artificial Sequence
  Description of Artificial Sequence: Synthetic oligonucleotide
ugcagaguugcaaaaccca

SEQ ID NO: 630136 - RNA, 19 nt, Artificial Sequence
  Description of Artificial Sequence: Synthetic oligonucleotide
aaacuccgcgcaguaagcc

SEQ ID NO: 630137 - RNA, 19 nt, Artificial Sequence
  Description of Artificial Sequence: Synthetic oligonucleotide
aaccggugauucgagagac

SEQ ID NO: 630138 - RNA, 19 nt, Artificial Sequence
  Description of Artificial Sequence: Synthetic oligonucleotide
gaagucccguuuaauaggg

SEQ ID NO: 630139 - RNA, 19 nt, Artificial Sequence
  Description of Artificial Sequence: Synthetic oligonucleotide
ucuucguggaucaggcgag

SEQ ID NO: 630140 - RNA, 19 nt, Artificial Sequence
  Description of Artificial Sequence: Synthetic oligonucleotide
ucuuauucccaggaacggg

SEQ ID NO: 630141 - RNA, 19 nt, Artificial Sequence
  Description of Artificial Sequence: Synthetic oligonucleotide
gauuccgccaguuggacga

SEQ ID NO: 630142 - RNA, 19 nt, Artificial Sequence
  Description of Artificial Sequence: Synthetic oligonucleotide
uuugauccagccccggucu

SEQ ID NO: 630143 - RNA, 19 nt, Artificial Sequence
  Description of Artificial Sequence: Synthetic oligonucleotide
auaugguucucuaauaagu

SEQ ID NO: 630144 - RNA, 19 nt, Artificial Sequence
  Description of Artificial Sequence: Synthetic oligonucleotide
caaucacuaauccuucagc

SEQ ID NO: 630145 - RNA, 19 nt, Artificial Sequence
  Description of Artificial Sequence: Synthetic oligonucleotide
uuuuccgaagacagccuag

SEQ ID NO: 630146 - RNA, 19 nt, Artificial Sequence
  Description of Artificial Sequence: Synthetic oligonucleotide
aucuucguggaucaggcga

SEQ ID NO: 630147 - RNA, 19 nt, Artificial Sequence
  Description of Artificial Sequence: Synthetic oligonucleotide
uauccaguuugauccagcc

SEQ ID NO: 630148 - RNA, 19 nt, Artificial Sequence
  Description of Artificial Sequence: Synthetic oligonucleotide
uagugucuaacaacacucc

SEQ ID NO: 630149 - RNA, 19 nt, Artificial Sequence
  Description of Artificial Sequence: Synthetic oligonucleotide
ccgaagacagccuagauug

SEQ ID NO: 630150 - RNA, 19 nt, Artificial Sequence
  Description of Artificial Sequence: Synthetic oligonucleotide
aacuugaaucccugauaag

SEQ ID NO: 630151 - RNA, 19 nt, Artificial Sequence
  Description of Artificial Sequence: Synthetic oligonucleotide
aucgauaucuuguuggauu

SEQ ID NO: 630152 - RNA, 19 nt, Artificial Sequence
  Description of Artificial Sequence: Synthetic oligonucleotide
uaaauucaacuugaauccc

SEQ ID NO: 630153 - RNA, 19 nt, Artificial Sequence
  Description of Artificial Sequence: Synthetic oligonucleotide
aaauucaacuugaaucccu

SEQ ID NO: 630154 - RNA, 19 nt, Artificial Sequence
  Description of Artificial Sequence: Synthetic oligonucleotide
uuaacucuguguugagagc

SEQ ID NO: 630155 - RNA, 19 nt, Artificial Sequence
  Description of Artificial Sequence: Synthetic oligonucleotide
aucgacaugucagucauug

SEQ ID NO: 630156 - RNA, 19 nt, Artificial Sequence
  Description of Artificial Sequence: Synthetic oligonucleotide
uggaaaggcucguagaaua

SEQ ID NO: 630157 - RNA, 19 nt, Artificial Sequence
  Description of Artificial Sequence: Synthetic oligonucleotide
uucgagagacaacuccugc

SEQ ID NO: 630158 - RNA, 19 nt, Artificial Sequence
  Description of Artificial Sequence: Synthetic oligonucleotide
uuaggaucgacaugucagu

SEQ ID NO: 630159 - RNA, 19 nt, Artificial Sequence
  Description of Artificial Sequence: Synthetic oligonucleotide
guagugucuaacaacacuc

SEQ ID NO: 630160 - RNA, 19 nt, Artificial Sequence
  Description of Artificial Sequence: Synthetic oligonucleotide
gacgucagauguuuuagga

SEQ ID NO: 630161 - RNA, 19 nt, Artificial Sequence
  Description of Artificial Sequence: Synthetic oligonucleotide
aggaacgggacaguggaac

SEQ ID NO: 630162 - RNA, 19 nt, Artificial Sequence
  Description of Artificial Sequence: Synthetic oligonucleotide
acugauagcgaauuucaua

SEQ ID NO: 630163 - RNA, 19 nt, Artificial Sequence
  Description of Artificial Sequence: Synthetic oligonucleotide
aucuuguuggauuaacuuu

SEQ ID NO: 630164 - RNA, 19 nt, Artificial Sequence
  Description of Artificial Sequence: Synthetic oligonucleotide
cuugauuccucaccuccgg

SEQ ID NO: 630165 - RNA, 19 nt, Artificial Sequence
  Description of Artificial Sequence: Synthetic oligonucleotide
ucuuaccccaaucacuaau

SEQ ID NO: 630166 - RNA, 19 nt, Artificial Sequence
  Description of Artificial Sequence: Synthetic oligonucleotide
agucccguuuaauagggca

SEQ ID NO: 630167 - RNA, 19 nt, Artificial Sequence
  Description of Artificial Sequence: Synthetic oligonucleotide
ucuaauaagucggagccuu

SEQ ID NO: 630168 - RNA, 19 nt, Artificial Sequence
  Description of Artificial Sequence: Synthetic oligonucleotide
cauuguaauugcugccagg

SEQ ID NO: 630169 - RNA, 19 nt, Artificial Sequence
  Description of Artificial Sequence: Synthetic oligonucleotide
uuguaauugcugccaggcc

SEQ ID NO: 630170 - RNA, 19 nt, Artificial Sequence
  Description of Artificial Sequence: Synthetic oligonucleotide
gauaucuuguuggauuaac

SEQ ID NO: 630171 - RNA, 19 nt, Artificial Sequence
  Description of Artificial Sequence: Synthetic oligonucleotide
ucgagagacaacuccugca

SEQ ID NO: 630172 - RNA, 19 nt, Artificial Sequence
  Description of Artificial Sequence: Synthetic oligonucleotide
acaacacuccacaugagcu

SEQ ID NO: 630173 - RNA, 19 nt, Artificial Sequence
  Description of Artificial Sequence: Synthetic oligonucleotide
ugauuccgccaguuggacg

SEQ ID NO: 630174 - RNA, 19 nt, Artificial Sequence
  Description of Artificial Sequence: Synthetic oligonucleotide
gacuaaauggcuuccauuu

SEQ ID NO: 630175 - RNA, 19 nt, Artificial Sequence
  Description of Artificial Sequence: Synthetic oligonucleotide
ucaguugauucugcuaccc

SEQ ID NO: 630176 - RNA, 19 nt, Artificial Sequence
  Description of Artificial Sequence: Synthetic oligonucleotide
ucgauaucuuguuggauua

SEQ ID NO: 630177 - RNA, 19 nt, Artificial Sequence
  Description of Artificial Sequence: Synthetic oligonucleotide
acuuaggaucgacauguca

SEQ ID NO: 630178 - RNA, 19 nt, Artificial Sequence
  Description of Artificial Sequence: Synthetic oligonucleotide
aggcucguagaauagugcu

SEQ ID NO: 630179 - RNA, 19 nt, Artificial Sequence
  Description of Artificial Sequence: Synthetic oligonucleotide
auauggacggaugaugcca

SEQ ID NO: 630180 - RNA, 19 nt, Artificial Sequence
  Description of Artificial Sequence: Synthetic oligonucleotide
caugucagucauugaagac

SEQ ID NO: 630181 - RNA, 19 nt, Artificial Sequence
  Description of Artificial Sequence: Synthetic oligonucleotide
ucuuugaggucugaccuac

SEQ ID NO: 630182 - RNA, 19 nt, Artificial Sequence
  Description of Artificial Sequence: Synthetic oligonucleotide
auaauaggccaguuugaau

SEQ ID NO: 630183 - RNA, 19 nt, Artificial Sequence
  Description of Artificial Sequence: Synthetic oligonucleotide
acgggauuaaauaccacug

SEQ ID NO: 630184 - RNA, 19 nt, Artificial Sequence
  Description of Artificial Sequence: Synthetic oligonucleotide
cacaucuaagcccaguaca

SEQ ID NO: 630185 - RNA, 19 nt, Artificial Sequence
  Description of Artificial Sequence: Synthetic oligonucleotide
gucauauggacggaugaug

SEQ ID NO: 630186 - RNA, 19 nt, Artificial Sequence
  Description of Artificial Sequence: Synthetic oligonucleotide
uggacgagccacugcaccc

SEQ ID NO: 630187 - RNA, 19 nt, Artificial Sequence
  Description of Artificial Sequence: Synthetic oligonucleotide
acucacaucgaugaacggu

SEQ ID NO: 630188 - RNA, 19 nt, Artificial Sequence
  Description of Artificial Sequence: Synthetic oligonucleotide
aguauaaccgggcccuuaa

SEQ ID NO: 630189 - RNA, 19 nt, Artificial Sequence
  Description of Artificial Sequence: Synthetic oligonucleotide
cuauccaguuugauccagc

SEQ ID NO: 630190 - RNA, 19 nt, Artificial Sequence
  Description of Artificial Sequence: Synthetic oligonucleotide
ugacuaaauggcuuccauu

SEQ ID NO: 630191 - RNA, 19 nt, Artificial Sequence
  Description of Artificial Sequence: Synthetic oligonucleotide
cuugacuguacucauugaa

SEQ ID NO: 630192 - RNA, 19 nt, Artificial Sequence
  Description of Artificial Sequence: Synthetic oligonucleotide
cauaucuaugauuccgcca

SEQ ID NO: 630193 - RNA, 19 nt, Artificial Sequence
  Description of Artificial Sequence: Synthetic oligonucleotide
agagcaucgauaucuuguu

SEQ ID NO: 630194 - RNA, 19 nt, Artificial Sequence
  Description of Artificial Sequence: Synthetic oligonucleotide
gugacgucagauguuuuag

SEQ ID NO: 630195 - RNA, 19 nt, Artificial Sequence
  Description of Artificial Sequence: Synthetic oligonucleotide
ucguggaucaggcgaggug

SEQ ID NO: 630196 - RNA, 19 nt, Artificial Sequence
  Description of Artificial Sequence: Synthetic oligonucleotide
auaucuuguuggauuaacu

SEQ ID NO: 630197 - RNA, 19 nt, Artificial Sequence
  Description of Artificial Sequence: Synthetic oligonucleotide
augaguccaaauggguuuc

SEQ ID NO: 630198 - RNA, 19 nt, Artificial Sequence
  Description of Artificial Sequence: Synthetic oligonucleotide
cauuaucugcuucugacua

SEQ ID NO: 630199 - RNA, 19 nt, Artificial Sequence
  Description of Artificial Sequence: Synthetic oligonucleotide
cuugauaugguucucuaau

SEQ ID NO: 630200 - RNA, 19 nt, Artificial Sequence
  Description of Artificial Sequence: Synthetic oligonucleotide
aagugacaguuucccucuc

SEQ ID NO: 630201 - RNA, 19 nt, Artificial Sequence
  Description of Artificial Sequence: Synthetic oligonucleotide
acgggcuuugugauuauuc

SEQ ID NO: 630202 - RNA, 19 nt, Artificial Sequence
  Description of Artificial Sequence: Synthetic oligonucleotide
auuuuccgaagacagccua

SEQ ID NO: 630203 - RNA, 19 nt, Artificial Sequence
  Description of Artificial Sequence: Synthetic oligonucleotide
guuugauccagccccgguc

SEQ ID NO: 630204 - RNA, 19 nt, Artificial Sequence
  Description of Artificial Sequence: Synthetic oligonucleotide
guacucauugaaccuugug

SEQ ID NO: 630205 - RNA, 19 nt, Artificial Sequence
  Description of Artificial Sequence: Synthetic oligonucleotide
caacagaaccggugauucg

SEQ ID NO: 630206 - RNA, 19 nt, Artificial Sequence
  Description of Artificial Sequence: Synthetic oligonucleotide
ucccguuuaauagggcacc

SEQ ID NO: 630207 - RNA, 19 nt, Artificial Sequence
  Description of Artificial Sequence: Synthetic oligonucleotide
accuacuguguguccaaag

SEQ ID NO: 630208 - RNA, 19 nt, Artificial Sequence
  Description of Artificial Sequence: Synthetic oligonucleotide
cucguagaauagugcuucg

SEQ ID NO: 630209 - RNA, 19 nt, Artificial Sequence
  Description of Artificial Sequence: Synthetic oligonucleotide
aagucccguuuaauagggc

SEQ ID NO: 630210 - RNA, 19 nt, Artificial Sequence
  Description of Artificial Sequence: Synthetic oligonucleotide
gaaccggugauucgagaga

SEQ ID NO: 630211 - RNA, 19 nt, Artificial Sequence
  Description of Artificial Sequence: Synthetic oligonucleotide
ugcugcuagccauaucuau

SEQ ID NO: 630212 - RNA, 19 nt, Artificial Sequence
  Description of Artificial Sequence: Synthetic oligonucleotide
uaauagcuccaaggaaccc

SEQ ID NO: 630213 - RNA, 19 nt, Artificial Sequence
  Description of Artificial Sequence: Synthetic oligonucleotide
agcacaucuaagcccagua

SEQ ID NO: 630214 - RNA, 19 nt, Artificial Sequence
  Description of Artificial Sequence: Synthetic oligonucleotide
gagcaucgauaucuuguug

SEQ ID NO: 630215 - RNA, 19 nt, Artificial Sequence
  Description of Artificial Sequence: Synthetic oligonucleotide
caguuugaauaugagguca

SEQ ID NO: 630216 - RNA, 19 nt, Artificial Sequence
  Description of Artificial Sequence: Synthetic oligonucleotide
gauucgagagacaacuccu

SEQ ID NO: 630217 - RNA, 19 nt, Artificial Sequence
  Description of Artificial Sequence: Synthetic oligonucleotide
aguaagcccuucccuccuc

SEQ ID NO: 630218 - RNA, 19 nt, Artificial Sequence
  Description of Artificial Sequence: Synthetic oligonucleotide
uaucuaugauuccgccagu

SEQ ID NO: 630219 - RNA, 19 nt, Artificial Sequence
  Description of Artificial Sequence: Synthetic oligonucleotide
gucagauguuuuaggacug

SEQ ID NO: 630220 - RNA, 19 nt, Artificial Sequence
  Description of Artificial Sequence: Synthetic oligonucleotide
agcaauggauuugggagga

SEQ ID NO: 630221 - RNA, 19 nt, Artificial Sequence
  Description of Artificial Sequence: Synthetic oligonucleotide
aguuugauccagccccggu

SEQ ID NO: 630222 - RNA, 19 nt, Artificial Sequence
  Description of Artificial Sequence: Synthetic oligonucleotide
ugaccucaaaauugcuauc

SEQ ID NO: 630223 - RNA, 19 nt, Artificial Sequence
  Description of Artificial Sequence: Synthetic oligonucleotide
ugcuauccaguuugaucca

SEQ ID NO: 630224 - RNA, 19 nt, Artificial Sequence
  Description of Artificial Sequence: Synthetic oligonucleotide
uuaggcugucggcccaucu

SEQ ID NO: 630225 - RNA, 19 nt, Artificial Sequence
  Description of Artificial Sequence: Synthetic oligonucleotide
uuauuccagccaccccgcc

SEQ ID NO: 630226 - RNA, 19 nt, Artificial Sequence
  Description of Artificial Sequence: Synthetic oligonucleotide
cugaaugccuuggaaggug

SEQ ID NO: 630227 - RNA, 19 nt, Artificial Sequence
  Description of Artificial Sequence: Synthetic oligonucleotide
gaacgggacaguggaacug

SEQ ID NO: 630228 - RNA, 19 nt, Artificial Sequence
  Description of Artificial Sequence: Synthetic oligonucleotide
guauaaccgggcccuuaag

SEQ ID NO: 630229 - RNA, 19 nt, Artificial Sequence
  Description of Artificial Sequence: Synthetic oligonucleotide
agaagccuuguaaaaucug

SEQ ID NO: 630230 - RNA, 19 nt, Artificial Sequence
  Description of Artificial Sequence: Synthetic oligonucleotide
caucuucguggaucaggcg

SEQ ID NO: 630231 - RNA, 19 nt, Artificial Sequence
  Description of Artificial Sequence: Synthetic oligonucleotide
uauggccuaggaucucaac

SEQ ID NO: 630232 - RNA, 19 nt, Artificial Sequence
  Description of Artificial Sequence: Synthetic oligonucleotide
gaguccuaauguaugcaga

SEQ ID NO: 630233 - RNA, 19 nt, Artificial Sequence
  Description of Artificial Sequence: Synthetic oligonucleotide
uucuuugaggucugaccua

SEQ ID NO: 630234 - RNA, 19 nt, Artificial Sequence
  Description of Artificial Sequence: Synthetic oligonucleotide
cacgggauuaaauaccacu

SEQ ID NO: 630235 - RNA, 19 nt, Artificial Sequence
  Description of Artificial Sequence: Synthetic oligonucleotide
cauaauaggccaguuugaa

SEQ ID NO: 630236 - RNA, 19 nt, Artificial Sequence
  Description of Artificial Sequence: Synthetic oligonucleotide
ggucugaccuacaugcugc

SEQ ID NO: 630237 - RNA, 19 nt, Artificial Sequence
  Description of Artificial Sequence: Synthetic oligonucleotide
agccuagauuggcacuguc

SEQ ID NO: 630238 - RNA, 19 nt, Artificial Sequence
  Description of Artificial Sequence: Synthetic oligonucleotide
uuccucaccuccggaaccc

SEQ ID NO: 630239 - RNA, 19 nt, Artificial Sequence
  Description of Artificial Sequence: Synthetic oligonucleotide
acuguaagacuugacugua

SEQ ID NO: 630240 - RNA, 19 nt, Artificial Sequence
  Description of Artificial Sequence: Synthetic oligonucleotide
ggaucaggcgagguggacg

SEQ ID NO: 630241 - RNA, 19 nt, Artificial Sequence
  Description of Artificial Sequence: Synthetic oligonucleotide
uaaccgggcccuuaagcuu

SEQ ID NO: 630242 - RNA, 19 nt, Artificial Sequence
  Description of Artificial Sequence: Synthetic oligonucleotide
gcuuugugauuauuccagc

SEQ ID NO: 630243 - RNA, 19 nt, Artificial Sequence
  Description of Artificial Sequence: Synthetic oligonucleotide
ucgacaugucagucauuga

SEQ ID NO: 630244 - RNA, 19 nt, Artificial Sequence
  Description of Artificial Sequence: Synthetic oligonucleotide
ccccuaaugaguccaaaug

SEQ ID NO: 630245 - RNA, 19 nt, Artificial Sequence
  Description of Artificial Sequence: Synthetic oligonucleotide
ggauuaaauaccacuggaa

SEQ ID NO: 630246 - RNA, 19 nt, Artificial Sequence
  Description of Artificial Sequence: Synthetic oligonucleotide
cguagaauagugcuucgac

SEQ ID NO: 630247 - RNA, 19 nt, Artificial Sequence
  Description of Artificial Sequence: Synthetic oligonucleotide
gcugcuagccauaucuaug

SEQ ID NO: 630248 - RNA, 19 nt, Artificial Sequence
  Description of Artificial Sequence: Synthetic oligonucleotide
gucccguuuaauagggcac

SEQ ID NO: 630249 - RNA, 19 nt, Artificial Sequence
  Description of Artificial Sequence: Synthetic oligonucleotide
uucuuaccccaaucacuaa

SEQ ID NO: 630250 - RNA, 19 nt, Artificial Sequence
  Description of Artificial Sequence: Synthetic oligonucleotide
gcucguagaauagugcuuc

SEQ ID NO: 630251 - RNA, 19 nt, Artificial Sequence
  Description of Artificial Sequence: Synthetic oligonucleotide
cguggaucaggcgaggugg

SEQ ID NO: 630252 - RNA, 19 nt, Artificial Sequence
  Description of Artificial Sequence: Synthetic oligonucleotide
cauuaacucuguguugaga

SEQ ID NO: 630253 - RNA, 19 nt, Artificial Sequence
  Description of Artificial Sequence: Synthetic oligonucleotide
cgggauuaaauaccacugg

SEQ ID NO: 630254 - RNA, 19 nt, Artificial Sequence
  Description of Artificial Sequence: Synthetic oligonucleotide
gccauaucuaugauuccgc

SEQ ID NO: 630255 - RNA, 19 nt, Artificial Sequence
  Description of Artificial Sequence: Synthetic oligonucleotide
guacaagcacauacaucug

SEQ ID NO: 630256 - RNA, 19 nt, Artificial Sequence
  Description of Artificial Sequence: Synthetic oligonucleotide
caacuuaacaggagauaua

SEQ ID NO: 630257 - RNA, 19 nt, Artificial Sequence
  Description of Artificial Sequence: Synthetic oligonucleotide
uugggguaaauagggcaau

SEQ ID NO: 630258 - RNA, 19 nt, Artificial Sequence
  Description of Artificial Sequence: Synthetic oligonucleotide
cauauggccuaggaucuca

SEQ ID NO: 630259 - RNA, 19 nt, Artificial Sequence
  Description of Artificial Sequence: Synthetic oligonucleotide
ccaacagaaccggugauuc

SEQ ID NO: 630260 - RNA, 19 nt, Artificial Sequence
  Description of Artificial Sequence: Synthetic oligonucleotide
ggauuugggaggagccacg

SEQ ID NO: 630261 - RNA, 19 nt, Artificial Sequence
  Description of Artificial Sequence: Synthetic oligonucleotide
caguuggacgagccacugc

SEQ ID NO: 630262 - RNA, 19 nt, Artificial Sequence
  Description of Artificial Sequence: Synthetic oligonucleotide
gcacaucuaagcccaguac

SEQ ID NO: 630263 - RNA, 19 nt, Artificial Sequence
  Description of Artificial Sequence: Synthetic oligonucleotide
gcaucgauaucuuguugga

SEQ ID NO: 630264 - RNA, 19 nt, Artificial Sequence
  Description of Artificial Sequence: Synthetic oligonucleotide
ccaguuugauccagccccg

SEQ ID NO: 630265 - RNA, 19 nt, Artificial Sequence
  Description of Artificial Sequence: Synthetic oligonucleotide
uucguggaucaggcgaggu

SEQ ID NO: 630266 - RNA, 19 nt, Artificial Sequence
  Description of Artificial Sequence: Synthetic oligonucleotide
cuucguggaucaggcgagg

SEQ ID NO: 630267 - RNA, 19 nt, Artificial Sequence
  Description of Artificial Sequence: Synthetic oligonucleotide
ugggguaaauagggcaaua

SEQ ID NO: 630268 - RNA, 19 nt, Artificial Sequence
  Description of Artificial Sequence: Synthetic oligonucleotide
gguaacugauugucaaccu

SEQ ID NO: 630269 - RNA, 19 nt, Artificial Sequence
  Description of Artificial Sequence: Synthetic oligonucleotide
caguuugauccagccccgg

SEQ ID NO: 630270 - RNA, 19 nt, Artificial Sequence
  Description of Artificial Sequence: Synthetic oligonucleotide
ggaucgacaugucagucau

SEQ ID NO: 630271 - RNA, 19 nt, Artificial Sequence
  Description of Artificial Sequence: Synthetic oligonucleotide
cgaugaacgguuugggcuc

SEQ ID NO: 630272 - RNA, 19 nt, Artificial Sequence
  Description of Artificial Sequence: Synthetic oligonucleotide
gucugaccuacaugcugca

SEQ ID NO: 630273 - RNA, 19 nt, Artificial Sequence
  Description of Artificial Sequence: Synthetic oligonucleotide
gaaccccugaucaacuuuu

SEQ ID NO: 630274 - RNA, 19 nt, Artificial Sequence
  Description of Artificial Sequence: Synthetic oligonucleotide
uugauccagccccggucuu

SEQ ID NO: 630275 - RNA, 19 nt, Artificial Sequence
  Description of Artificial Sequence: Synthetic oligonucleotide
guuggacgagccacugcac

SEQ ID NO: 630276 - RNA, 19 nt, Artificial Sequence
  Description of Artificial Sequence: Synthetic oligonucleotide
uugcggugauggaauccuu

SEQ ID NO: 630277 - RNA, 19 nt, Artificial Sequence
  Description of Artificial Sequence: Synthetic oligonucleotide
gccacgggauuaaauacca

SEQ ID NO: 630278 - RNA, 19 nt, Artificial Sequence
  Description of Artificial Sequence: Synthetic oligonucleotide
gcaccggauaggaagccgc

SEQ ID NO: 630279 - RNA, 19 nt, Artificial Sequence
  Description of Artificial Sequence: Synthetic oligonucleotide
cgacaugucagucauugaa

SEQ ID NO: 630280 - RNA, 19 nt, Artificial Sequence
  Description of Artificial Sequence: Synthetic oligonucleotide
gggguaaauagggcaauaa

SEQ ID NO: 630281 - RNA, 19 nt, Artificial Sequence
  Description of Artificial Sequence: Synthetic oligonucleotide
agccccggucuugugacgu

SEQ ID NO: 630282 - RNA, 19 nt, Artificial Sequence
  Description of Artificial Sequence: Synthetic oligonucleotide
cgcaguaagcccuucccuc

SEQ ID NO: 630283 - RNA, 19 nt, Artificial Sequence
  Description of Artificial Sequence: Synthetic oligonucleotide
ccagccccggucuugugac

SEQ ID NO: 630284 - RNA, 19 nt, Artificial Sequence
  Description of Artificial Sequence: Synthetic oligonucleotide
uuuaggcugucggcccauc

SEQ ID NO: 630285 - RNA, 19 nt, Artificial Sequence
  Description of Artificial Sequence: Synthetic oligonucleotide
caggccccuaaugagucca

SEQ ID NO: 630286 - RNA, 19 nt, Artificial Sequence
  Description of Artificial Sequence: Synthetic oligonucleotide
aaccccugaucaacuuuua

SEQ ID NO: 630287 - RNA, 19 nt, Artificial Sequence
  Description of Artificial Sequence: Synthetic oligonucleotide
uuccacgggcuuugugauu

SEQ ID NO: 630288 - RNA, 19 nt, Artificial Sequence
  Description of Artificial Sequence: Synthetic oligonucleotide
ccguuuaauagggcaccgg

SEQ ID NO: 630289 - RNA, 19 nt, Artificial Sequence
  Description of Artificial Sequence: Synthetic oligonucleotide
auauggccuaggaucucaa

SEQ ID NO: 630290 - RNA, 19 nt, Artificial Sequence
  Description of Artificial Sequence: Synthetic oligonucleotide
cccguuuaauagggcaccg

SEQ ID NO: 630291 - RNA, 19 nt, Artificial Sequence
  Description of Artificial Sequence: Synthetic oligonucleotide
cagccccggucuugugacg

SEQ ID NO: 630292 - RNA, 19 nt, Artificial Sequence
  Description of Artificial Sequence: Synthetic oligonucleotide
ugccugucauauggacgga

SEQ ID NO: 630293 - RNA, 19 nt, Artificial Sequence
  Description of Artificial Sequence: Synthetic oligonucleotide
gaugaacgguuugggcucu

SEQ ID NO: 630294 - RNA, 19 nt, Artificial Sequence
  Description of Artificial Sequence: Synthetic oligonucleotide
gccaguauaaccgggcccu

SEQ ID NO: 630295 - RNA, 19 nt, Artificial Sequence
  Description of Artificial Sequence: Synthetic oligonucleotide
ggaacgggacaguggaacu

SEQ ID NO: 630296 - RNA, 19 nt, Artificial Sequence
  Description of Artificial Sequence: Synthetic oligonucleotide
cuuucccaacagaaccggu

SEQ ID NO: 630297 - RNA, 19 nt, Artificial Sequence
  Description of Artificial Sequence: Synthetic oligonucleotide
guccuaauguaugcagagu

SEQ ID NO: 630298 - RNA, 19 nt, Artificial Sequence
  Description of Artificial Sequence: Synthetic oligonucleotide
caccuccggaacccaaaga

SEQ ID NO: 630299 - RNA, 19 nt, Artificial Sequence
  Description of Artificial Sequence: Synthetic oligonucleotide
guggaucaggcgaggugga

SEQ ID NO: 630300 - RNA, 19 nt, Artificial Sequence
  Description of Artificial Sequence: Synthetic oligonucleotide
ucggcccaucuccucucuu

SEQ ID NO: 630301 - RNA, 19 nt, Artificial Sequence
  Description of Artificial Sequence: Synthetic oligonucleotide
ccacgggauuaaauaccac

SEQ ID NO: 630302 - RNA, 19 nt, Artificial Sequence
  Description of Artificial Sequence: Synthetic oligonucleotide
cccaaucacuaauccuuca

SEQ ID NO: 630303 - RNA, 19 nt, Artificial Sequence
  Description of Artificial Sequence: Synthetic oligonucleotide
accggugauucgagagaca

SEQ ID NO: 630304 - RNA, 19 nt, Artificial Sequence
  Description of Artificial Sequence: Synthetic oligonucleotide
uggcaccuuccacgggcuu

SEQ ID NO: 630305 - RNA, 19 nt, Artificial Sequence
  Description of Artificial Sequence: Synthetic oligonucleotide
ggacgagccacugcaccca

SEQ ID NO: 630306 - RNA, 19 nt, Artificial Sequence
  Description of Artificial Sequence: Synthetic oligonucleotide
ccggugauucgagagacaa

SEQ ID NO: 630307 - RNA, 19 nt, Artificial Sequence
  Description of Artificial Sequence: Synthetic oligonucleotide
ggaaccccugaucaacuuu

SEQ ID NO: 630308 - RNA, 19 nt, Artificial Sequence
  Description of Artificial Sequence: Synthetic oligonucleotide
cccggucuugugacgucag

SEQ ID NO: 630309 - RNA, 19 nt, Artificial Sequence
  Description of Artificial Sequence: Synthetic oligonucleotide
caucgauaucuuguuggau

SEQ ID NO: 630310 - RNA, 19 nt, Artificial Sequence
  Description of Artificial Sequence: Synthetic oligonucleotide
caguauaaccgggcccuua

SEQ ID NO: 630311 - RNA, 19 nt, Artificial Sequence
  Description of Artificial Sequence: Synthetic oligonucleotide
aucaggcgagguggacgga

SEQ ID NO: 630312 - RNA, 19 nt, Artificial Sequence
  Description of Artificial Sequence: Synthetic oligonucleotide
ccgcgcaguaagcccuucc

SEQ ID NO: 630313 - RNA, 19 nt, Artificial Sequence
  Description of Artificial Sequence: Synthetic oligonucleotide
uccgcgcaguaagcccuuc

SEQ ID NO: 630314 - RNA, 19 nt, Artificial Sequence
  Description of Artificial Sequence: Synthetic oligonucleotide
gcgcaguaagcccuucccu

SEQ ID NO: 630315 - RNA, 19 nt, Artificial Sequence
  Description of Artificial Sequence: Synthetic oligonucleotide
ccauuggaacuuugucaaa

SEQ ID NO: 630316 - RNA, 19 nt, Artificial Sequence
  Description of Artificial Sequence: Synthetic oligonucleotide
cacuggaaacauggugccu

SEQ ID NO: 630317 - RNA, 19 nt, Artificial Sequence
  Description of Artificial Sequence: Synthetic oligonucleotide
aggccccuaaugaguccaa

SEQ ID NO: 630318 - RNA, 19 nt, Artificial Sequence
  Description of Artificial Sequence: Synthetic oligonucleotide
ggcucguagaauagugcuu

SEQ ID NO: 630319 - RNA, 19 nt, Artificial Sequence
  Description of Artificial Sequence: Synthetic oligonucleotide
gaucgacaugucagucauu

SEQ ID NO: 630320 - RNA, 19 nt, Artificial Sequence
  Description of Artificial Sequence: Synthetic oligonucleotide
cauccacgucagucagagu

SEQ ID NO: 630321 - RNA, 19 nt, Artificial Sequence
  Description of Artificial Sequence: Synthetic oligonucleotide
ccggucuugugacgucaga

SEQ ID NO: 630322 - RNA, 19 nt, Artificial Sequence
  Description of Artificial Sequence: Synthetic oligonucleotide
cgcauuuccauuggaacuu

SEQ ID NO: 630323 - RNA, 19 nt, Artificial Sequence
  Description of Artificial Sequence: Synthetic oligonucleotide
ggacggaggcuggacacuu

SEQ ID NO: 630324 - RNA, 19 nt, Artificial Sequence
  Description of Artificial Sequence: Synthetic oligonucleotide
gcauuuccauuggaacuuu

SEQ ID NO: 630325 - RNA, 19 nt, Artificial Sequence
  Description of Artificial Sequence: Synthetic oligonucleotide
gccugucauauggacggau

SEQ ID NO: 630326 - RNA, 19 nt, Artificial Sequence
  Description of Artificial Sequence: Synthetic oligonucleotide
ccccggucuugugacguca

SEQ ID NO: 630327 - RNA, 19 nt, Artificial Sequence
  Description of Artificial Sequence: Synthetic oligonucleotide
cacgggcuuugugauuauu

SEQ ID NO: 630328 - RNA, 19 nt, Artificial Sequence
  Description of Artificial Sequence: Synthetic oligonucleotide
caccuuccacgggcuuugu

SEQ ID NO: 630329 - RNA, 19 nt, Artificial Sequence
  Description of Artificial Sequence: Synthetic oligonucleotide
ccacgggcuuugugauuau

SEQ ID NO: 630330 - RNA, 19 nt, Artificial Sequence
  Description of Artificial Sequence: Synthetic oligonucleotide
ccaguauaaccgggcccuu

SEQ ID NO: 630331 - RNA, 19 nt, Artificial Sequence
  Description of Artificial Sequence: Synthetic oligonucleotide
ccgggcccuuaagcuucuc

SEQ ID NO: 630332 - RNA, 19 nt, Artificial Sequence
  Description of Artificial Sequence: Synthetic oligonucleotide
ucaauggacacgcugaagg

SEQ ID NO: 630333 - RNA, 19 nt, Artificial Sequence
  Description of Artificial Sequence: Synthetic oligonucleotide
guuacuguggcccagaacc

SEQ ID NO: 630334 - RNA, 19 nt, Artificial Sequence
  Description of Artificial Sequence: Synthetic oligonucleotide
ugcguacuaaauauggucg

SEQ ID NO: 630335 - RNA, 19 nt, Artificial Sequence
  Description of Artificial Sequence: Synthetic oligonucleotide
augauauacacguguaccc

SEQ ID NO: 630336 - RNA, 19 nt, Artificial Sequence
  Description of Artificial Sequence: Synthetic oligonucleotide
uccaaugcagcugagaacg

SEQ ID NO: 630337 - RNA, 19 nt, Artificial Sequence
  Description of Artificial Sequence: Synthetic oligonucleotide
gaaaugagaccuuaugucc

SEQ ID NO: 630338 - RNA, 19 nt, Artificial Sequence
  Description of Artificial Sequence: Synthetic oligonucleotide
acacggugagcauagaugc

SEQ ID NO: 630339 - RNA, 19 nt, Artificial Sequence
  Description of Artificial Sequence: Synthetic oligonucleotide
gaauauauggccccaguag

SEQ ID NO: 630340 - RNA, 19 nt, Artificial Sequence
  Description of Artificial Sequence: Synthetic oligonucleotide
ucuaaugucaaaacucggc

SEQ ID NO: 630341 - RNA, 19 nt, Artificial Sequence
  Description of Artificial Sequence: Synthetic oligonucleotide
acguugaugaaacuucugc

SEQ ID NO: 630342 - RNA, 19 nt, Artificial Sequence
  Description of Artificial Sequence: Synthetic oligonucleotide
ugguaauacaacuggaaag

SEQ ID NO: 630343 - RNA, 19 nt, Artificial Sequence
  Description of Artificial Sequence: Synthetic oligonucleotide
augacuuuuguauccggcc

SEQ ID NO: 630344 - RNA, 19 nt, Artificial Sequence
  Description of Artificial Sequence: Synthetic oligonucleotide
uguguuaguauccagggua

SEQ ID NO: 630345 - RNA, 19 nt, Artificial Sequence
  Description of Artificial Sequence: Synthetic oligonucleotide
aagcguucaauggacacgc

SEQ ID NO: 630346 - RNA, 19 nt, Artificial Sequence
  Description of Artificial Sequence: Synthetic oligonucleotide
aggacguugguauacacag

SEQ ID NO: 630347 - RNA, 19 nt, Artificial Sequence
  Description of Artificial Sequence: Synthetic oligonucleotide
uauuugggaacauccagag

SEQ ID NO: 630348 - RNA, 19 nt, Artificial Sequence
  Description of Artificial Sequence: Synthetic oligonucleotide
uuuguauccggccugcuga

SEQ ID NO: 630349 - RNA, 19 nt, Artificial Sequence
  Description of Artificial Sequence: Synthetic oligonucleotide
caugacuccuuucaggugg

SEQ ID NO: 630350 - RNA, 19 nt, Artificial Sequence
  Description of Artificial Sequence: Synthetic oligonucleotide
auaccugccucagugaucc

SEQ ID NO: 630351 - RNA, 19 nt, Artificial Sequence
  Description of Artificial Sequence: Synthetic oligonucleotide
aagcccggaagccagcgcc

SEQ ID NO: 630352 - RNA, 19 nt, Artificial Sequence
  Description of Artificial Sequence: Synthetic oligonucleotide
uacacguguacccagguac

SEQ ID NO: 630353 - RNA, 19 nt, Artificial Sequence
  Description of Artificial Sequence: Synthetic oligonucleotide
auuagcgaggccuccaggg

SEQ ID NO: 630354 - RNA, 19 nt, Artificial Sequence
  Description of Artificial Sequence: Synthetic oligonucleotide
uacgaguugguuacugugg

SEQ ID NO: 630355 - RNA, 19 nt, Artificial Sequence
  Description of Artificial Sequence: Synthetic oligonucleotide
guagucaagcguucaaugg

SEQ ID NO: 630356 - RNA, 19 nt, Artificial Sequence
  Description of Artificial Sequence: Synthetic oligonucleotide
ucuccgaggaacugaaagg

SEQ ID NO: 630357 - RNA, 19 nt, Artificial Sequence
  Description of Artificial Sequence: Synthetic oligonucleotide
caugauauacacguguacc

SEQ ID NO: 630358 - RNA, 19 nt, Artificial Sequence
  Description of Artificial Sequence: Synthetic oligonucleotide
aagcguuguaauuucucag

SEQ ID NO: 630359 - RNA, 19 nt, Artificial Sequence
  Description of Artificial Sequence: Synthetic oligonucleotide
ucagugacguugaugaaac

SEQ ID NO: 630360 - RNA, 19 nt, Artificial Sequence
  Description of Artificial Sequence: Synthetic oligonucleotide
aauuuggcuccccgguagc

SEQ ID NO: 630361 - RNA, 19 nt, Artificial Sequence
  Description of Artificial Sequence: Synthetic oligonucleotide
uguagucaagcguucaaug

SEQ ID NO: 630362 - RNA, 19 nt, Artificial Sequence
  Description of Artificial Sequence: Synthetic oligonucleotide
uccugagugguacucauca

SEQ ID NO: 630363 - RNA, 19 nt, Artificial Sequence
  Description of Artificial Sequence: Synthetic oligonucleotide
gacaugggguaacacacgg

SEQ ID NO: 630364 - RNA, 19 nt, Artificial Sequence
  Description of Artificial Sequence: Synthetic oligonucleotide
gauauacacguguacccag

SEQ ID NO: 630365 - RNA, 19 nt, Artificial Sequence
  Description of Artificial Sequence: Synthetic oligonucleotide
uacagugcguacuaaauau

SEQ ID NO: 630366 - RNA, 19 nt, Artificial Sequence
  Description of Artificial Sequence: Synthetic oligonucleotide
cagugcguacuaaauaugg

SEQ ID NO: 630367 - RNA, 19 nt, Artificial Sequence
  Description of Artificial Sequence: Synthetic oligonucleotide
acgaguugguuacuguggc

SEQ ID NO: 630368 - RNA, 19 nt, Artificial Sequence
  Description of Artificial Sequence: Synthetic oligonucleotide
aagaguacugucugcagaa

SEQ ID NO: 630369 - RNA, 19 nt, Artificial Sequence
  Description of Artificial Sequence: Synthetic oligonucleotide
ugggguaacacacggugag

SEQ ID NO: 630370 - RNA, 19 nt, Artificial Sequence
  Description of Artificial Sequence: Synthetic oligonucleotide
uagucaagcguucaaugga

SEQ ID NO: 630371 - RNA, 19 nt, Artificial Sequence
  Description of Artificial Sequence: Synthetic oligonucleotide
acugaagcguuguaauuuc

SEQ ID NO: 630372 - RNA, 19 nt, Artificial Sequence
  Description of Artificial Sequence: Synthetic oligonucleotide
ugcagugguaauacaacug

SEQ ID NO: 630373 - RNA, 19 nt, Artificial Sequence
  Description of Artificial Sequence: Synthetic oligonucleotide
acaccguuuacguguaugg

SEQ ID NO: 630374 - RNA, 19 nt, Artificial Sequence
  Description of Artificial Sequence: Synthetic oligonucleotide
uaacacacggugagcauag

SEQ ID NO: 630375 - RNA, 19 nt, Artificial Sequence
  Description of Artificial Sequence: Synthetic oligonucleotide
gaugacgguagcaacacug

SEQ ID NO: 630376 - RNA, 19 nt, Artificial Sequence
  Description of Artificial Sequence: Synthetic oligonucleotide
gaccucaagugucacagag

SEQ ID NO: 630377 - RNA, 19 nt, Artificial Sequence
  Description of Artificial Sequence: Synthetic oligonucleotide
gguaauacaacuggaaagc

SEQ ID NO: 630378 - RNA, 19 nt, Artificial Sequence
  Description of Artificial Sequence: Synthetic oligonucleotide
aaaacucggcucaggaaac

SEQ ID NO: 630379 - RNA, 19 nt, Artificial Sequence
  Description of Artificial Sequence: Synthetic oligonucleotide
aaagcgcaggcuguucugc

SEQ ID NO: 630380 - RNA, 19 nt, Artificial Sequence
  Description of Artificial Sequence: Synthetic oligonucleotide
agggcgaugacuuuuguau

SEQ ID NO: 630381 - RNA, 19 nt, Artificial Sequence
  Description of Artificial Sequence: Synthetic oligonucleotide
agcaaauuuggcuccccgg

SEQ ID NO: 630382 - RNA, 19 nt, Artificial Sequence
  Description of Artificial Sequence: Synthetic oligonucleotide
agaauuguucacuccugag

SEQ ID NO: 630383 - RNA, 19 nt, Artificial Sequence
  Description of Artificial Sequence: Synthetic oligonucleotide
aggaaccuguguuaguauc

SEQ ID NO: 630384 - RNA, 19 nt, Artificial Sequence
  Description of Artificial Sequence: Synthetic oligonucleotide
uguauacagaucaccccug

SEQ ID NO: 630385 - RNA, 19 nt, Artificial Sequence
  Description of Artificial Sequence: Synthetic oligonucleotide
uuuuguauccggccugcug

SEQ ID NO: 630386 - RNA, 19 nt, Artificial Sequence
  Description of Artificial Sequence: Synthetic oligonucleotide
ugacuuuuguauccggccu

SEQ ID NO: 630387 - RNA, 19 nt, Artificial Sequence
  Description of Artificial Sequence: Synthetic oligonucleotide
gacucgguauuccaggaug

SEQ ID NO: 630388 - RNA, 19 nt, Artificial Sequence
  Description of Artificial Sequence: Synthetic oligonucleotide
gagaccuuauguccuggcg

SEQ ID NO: 630389 - RNA, 19 nt, Artificial Sequence
  Description of Artificial Sequence: Synthetic oligonucleotide
aaccacgaagggcuuggcg

SEQ ID NO: 630390 - RNA, 19 nt, Artificial Sequence
  Description of Artificial Sequence: Synthetic oligonucleotide
gucuccgaggaacugaaag

SEQ ID NO: 630391 - RNA, 19 nt, Artificial Sequence
  Description of Artificial Sequence: Synthetic oligonucleotide
aaaugagaccuuauguccu

SEQ ID NO: 630392 - RNA, 19 nt, Artificial Sequence
  Description of Artificial Sequence: Synthetic oligonucleotide
ggaaaugagaccuuauguc

SEQ ID NO: 630393 - RNA, 19 nt, Artificial Sequence
  Description of Artificial Sequence: Synthetic oligonucleotide
accguuuacguguauggug

SEQ ID NO: 630394 - RNA, 19 nt, Artificial Sequence
  Description of Artificial Sequence: Synthetic oligonucleotide
uucacauggaccuccugga

SEQ ID NO: 630395 - RNA, 19 nt, Artificial Sequence
  Description of Artificial Sequence: Synthetic oligonucleotide
cuccugacucccauuagcg

SEQ ID NO: 630396 - RNA, 19 nt, Artificial Sequence
  Description of Artificial Sequence: Synthetic oligonucleotide
cagcccacagcaaacauac

SEQ ID NO: 630397 - RNA, 19 nt, Artificial Sequence
  Description of Artificial Sequence: Synthetic oligonucleotide
gcuaccaccaaccacaguc

SEQ ID NO: 630398 - RNA, 19 nt, Artificial Sequence
  Description of Artificial Sequence: Synthetic oligonucleotide
gacguugguauacacagaa

SEQ ID NO: 630399 - RNA, 19 nt, Artificial Sequence
  Description of Artificial Sequence: Synthetic oligonucleotide
auugggaagcccggaagcc

SEQ ID NO: 630400 - RNA, 19 nt, Artificial Sequence
  Description of Artificial Sequence: Synthetic oligonucleotide
ucuggaacccuguccaaug

SEQ ID NO: 630401 - RNA, 19 nt, Artificial Sequence
  Description of Artificial Sequence: Synthetic oligonucleotide
uucuccacgcacauagcca

SEQ ID NO: 630402 - RNA, 19 nt, Artificial Sequence
  Description of Artificial Sequence: Synthetic oligonucleotide
ucaagcguucaauggacac

SEQ ID NO: 630403 - RNA, 19 nt, Artificial Sequence
  Description of Artificial Sequence: Synthetic oligonucleotide
gaagaguacugucugcaga

SEQ ID NO: 630404 - RNA, 19 nt, Artificial Sequence
  Description of Artificial Sequence: Synthetic oligonucleotide
uguacacaccguuuacgug

SEQ ID NO: 630405 - RNA, 19 nt, Artificial Sequence
  Description of Artificial Sequence: Synthetic oligonucleotide
caggguaaaggucucaguc

SEQ ID NO: 630406 - RNA, 19 nt, Artificial Sequence
  Description of Artificial Sequence: Synthetic oligonucleotide
agagucaaauggcaccuug

SEQ ID NO: 630407 - RNA, 19 nt, Artificial Sequence
  Description of Artificial Sequence: Synthetic oligonucleotide
agaccuuauguccuggcgu

SEQ ID NO: 630408 - RNA, 19 nt, Artificial Sequence
  Description of Artificial Sequence: Synthetic oligonucleotide
uccugaucccagaauauau

SEQ ID NO: 630409 - RNA, 19 nt, Artificial Sequence
  Description of Artificial Sequence: Synthetic oligonucleotide
agucaagcguucaauggac

SEQ ID NO: 630410 - RNA, 19 nt, Artificial Sequence
  Description of Artificial Sequence: Synthetic oligonucleotide
uguugccuguagucaagcg

SEQ ID NO: 630411 - RNA, 19 nt, Artificial Sequence
  Description of Artificial Sequence: Synthetic oligonucleotide
gaaggaugacgguagcaac

SEQ ID NO: 630412 - RNA, 19 nt, Artificial Sequence
  Description of Artificial Sequence: Synthetic oligonucleotide
agguaguagagagaaccac

SEQ ID NO: 630413 - RNA, 19 nt, Artificial Sequence
  Description of Artificial Sequence: Synthetic oligonucleotide
gaugcauugggaagcccgg

SEQ ID NO: 630414 - RNA, 19 nt, Artificial Sequence
  Description of Artificial Sequence: Synthetic oligonucleotide
ugcccauguagguaccggg

SEQ ID NO: 630415 - RNA, 19 nt, Artificial Sequence
  Description of Artificial Sequence: Synthetic oligonucleotide
aaaaugucuccgaggaacu

SEQ ID NO: 630416 - RNA, 19 nt, Artificial Sequence
  Description of Artificial Sequence: Synthetic oligonucleotide
uugccuguagucaagcguu

SEQ ID NO: 630417 - RNA, 19 nt, Artificial Sequence
  Description of Artificial Sequence: Synthetic oligonucleotide
gugcguacuaaauaugguc

SEQ ID NO: 630418 - RNA, 19 nt, Artificial Sequence
  Description of Artificial Sequence: Synthetic oligonucleotide
guacgaguugguuacugug

SEQ ID NO: 630419 - RNA, 19 nt, Artificial Sequence
  Description of Artificial Sequence: Synthetic oligonucleotide
cucggcucaggaaacacug

SEQ ID NO: 630420 - RNA, 19 nt, Artificial Sequence
  Description of Artificial Sequence: Synthetic oligonucleotide
uauacacguguacccaggu

SEQ ID NO: 630421 - RNA, 19 nt, Artificial Sequence
  Description of Artificial Sequence: Synthetic oligonucleotide
cugacucccauuagcgagg

SEQ ID NO: 630422 - RNA, 19 nt, Artificial Sequence
  Description of Artificial Sequence: Synthetic oligonucleotide
aaggaugacgguagcaaca

SEQ ID NO: 630423 - RNA, 19 nt, Artificial Sequence
  Description of Artificial Sequence: Synthetic oligonucleotide
ggucauaccugccucagug

SEQ ID NO: 630424 - RNA, 19 nt, Artificial Sequence
  Description of Artificial Sequence: Synthetic oligonucleotide
agagcuggacccaaguguc

SEQ ID NO: 630425 - RNA, 19 nt, Artificial Sequence
  Description of Artificial Sequence: Synthetic oligonucleotide
cacggugccagacccaucc

SEQ ID NO: 630426 - RNA, 19 nt, Artificial Sequence
  Description of Artificial Sequence: Synthetic oligonucleotide
uacguguauggugucauga

SEQ ID NO: 630427 - RNA, 19 nt, Artificial Sequence
  Description of Artificial Sequence: Synthetic oligonucleotide
auauuugggaacauccaga

SEQ ID NO: 630428 - RNA, 19 nt, Artificial Sequence
  Description of Artificial Sequence: Synthetic oligonucleotide
ucaaaacucggcucaggaa

SEQ ID NO: 630429 - RNA, 19 nt, Artificial Sequence
  Description of Artificial Sequence: Synthetic oligonucleotide
ggucaaaggucauaccugc

SEQ ID NO: 630430 - RNA, 19 nt, Artificial Sequence
  Description of Artificial Sequence: Synthetic oligonucleotide
uccccgguagccuagguuc

SEQ ID NO: 630431 - RNA, 19 nt, Artificial Sequence
  Description of Artificial Sequence: Synthetic oligonucleotide
ucccguaaauguccucagg

SEQ ID NO: 630432 - RNA, 19 nt, Artificial Sequence
  Description of Artificial Sequence: Synthetic oligonucleotide
agauccugagugcaguggu

SEQ ID NO: 630433 - RNA, 19 nt, Artificial Sequence
  Description of Artificial Sequence: Synthetic oligonucleotide
ggcaccuugauccuaucag

SEQ ID NO: 630434 - RNA, 19 nt, Artificial Sequence
  Description of Artificial Sequence: Synthetic oligonucleotide
auacacagaauuguucacu

SEQ ID NO: 630435 - RNA, 19 nt, Artificial Sequence
  Description of Artificial Sequence: Synthetic oligonucleotide
cuagcaggggugcccaugg

SEQ ID NO: 630436 - RNA, 19 nt, Artificial Sequence
  Description of Artificial Sequence: Synthetic oligonucleotide
uacacggcugcaccaaaac

SEQ ID NO: 630437 - RNA, 19 nt, Artificial Sequence
  Description of Artificial Sequence: Synthetic oligonucleotide
agggcuaagcccaugguug

SEQ ID NO: 630438 - RNA, 19 nt, Artificial Sequence
  Description of Artificial Sequence: Synthetic oligonucleotide
gugguaauacaacuggaaa

SEQ ID NO: 630439 - RNA, 19 nt, Artificial Sequence
  Description of Artificial Sequence: Synthetic oligonucleotide
ugcaggcgccuccagcugg

SEQ ID NO: 630440 - RNA, 19 nt, Artificial Sequence
  Description of Artificial Sequence: Synthetic oligonucleotide
uccgaggaacugaaaggug

SEQ ID NO: 630441 - RNA, 19 nt, Artificial Sequence
  Description of Artificial Sequence: Synthetic oligonucleotide
gaucccguaaauguccuca

SEQ ID NO: 630442 - RNA, 19 nt, Artificial Sequence
  Description of Artificial Sequence: Synthetic oligonucleotide
accccugguuugcagcugc

SEQ ID NO: 630443 - RNA, 19 nt, Artificial Sequence
  Description of Artificial Sequence: Synthetic oligonucleotide
uggacuguauacagaucac

SEQ ID NO: 630444 - RNA, 19 nt, Artificial Sequence
  Description of Artificial Sequence: Synthetic oligonucleotide
auauacacguguacccagg

SEQ ID NO: 630445 - RNA, 19 nt, Artificial Sequence
  Description of Artificial Sequence: Synthetic oligonucleotide
aaggugaaguugaacuugu

SEQ ID NO: 630446 - RNA, 19 nt, Artificial Sequence
  Description of Artificial Sequence: Synthetic oligonucleotide
uuuacguguauggugucau

SEQ ID NO: 630447 - RNA, 19 nt, Artificial Sequence
  Description of Artificial Sequence: Synthetic oligonucleotide
gcauagaugcauugggaag

SEQ ID NO: 630448 - RNA, 19 nt, Artificial Sequence
  Description of Artificial Sequence: Synthetic oligonucleotide
guacacaccguuuacgugu

SEQ ID NO: 630449 - RNA, 19 nt, Artificial Sequence
  Description of Artificial Sequence: Synthetic oligonucleotide
uguacggacucgguauucc

SEQ ID NO: 630450 - RNA, 19 nt, Artificial Sequence
  Description of Artificial Sequence: Synthetic oligonucleotide
aaggaaccuguguuaguau

SEQ ID NO: 630451 - RNA, 19 nt, Artificial Sequence
  Description of Artificial Sequence: Synthetic oligonucleotide
gcugcaccaaaacucagcc

SEQ ID NO: 630452 - RNA, 19 nt, Artificial Sequence
  Description of Artificial Sequence: Synthetic oligonucleotide
ccgaggaacugaaaggugg

SEQ ID NO: 630453 - RNA, 19 nt, Artificial Sequence
  Description of Artificial Sequence: Synthetic oligonucleotide
agugacguugaugaaacuu

SEQ ID NO: 630454 - RNA, 19 nt, Artificial Sequence
  Description of Artificial Sequence: Synthetic oligonucleotide
ucgguauuccaggauggcc

SEQ ID NO: 630455 - RNA, 19 nt, Artificial Sequence
  Description of Artificial Sequence: Synthetic oligonucleotide
cugagugcagugguaauac

SEQ ID NO: 630456 - RNA, 19 nt, Artificial Sequence
  Description of Artificial Sequence: Synthetic oligonucleotide
ggcgaugacuuuuguaucc

SEQ ID NO: 630457 - RNA, 19 nt, Artificial Sequence
  Description of Artificial Sequence: Synthetic oligonucleotide
acagaucaccccugguuug

SEQ ID NO: 630458 - RNA, 19 nt, Artificial Sequence
  Description of Artificial Sequence: Synthetic oligonucleotide
aauugcccggugagugugc

SEQ ID NO: 630459 - RNA, 19 nt, Artificial Sequence
  Description of Artificial Sequence: Synthetic oligonucleotide
cccguaaauguccucaggg

SEQ ID NO: 630460 - RNA, 19 nt, Artificial Sequence
  Description of Artificial Sequence: Synthetic oligonucleotide
uggaacccuguccaaugca

SEQ ID NO: 630461 - RNA, 19 nt, Artificial Sequence
  Description of Artificial Sequence: Synthetic oligonucleotide
guaguagagagaaccacga

SEQ ID NO: 630462 - RNA, 19 nt, Artificial Sequence
  Description of Artificial Sequence: Synthetic oligonucleotide
acccgaagaguacugucug

SEQ ID NO: 630463 - RNA, 19 nt, Artificial Sequence
  Description of Artificial Sequence: Synthetic oligonucleotide
agugguaauacaacuggaa

SEQ ID NO: 630464 - RNA, 19 nt, Artificial Sequence
  Description of Artificial Sequence: Synthetic oligonucleotide
ugugcacccgaagaguacu

SEQ ID NO: 630465 - RNA, 19 nt, Artificial Sequence
  Description of Artificial Sequence: Synthetic oligonucleotide
gaauugcccggugagugug

SEQ ID NO: 630466 - RNA, 19 nt, Artificial Sequence
  Description of Artificial Sequence: Synthetic oligonucleotide
gcguacuaaauauggucgg

SEQ ID NO: 630467 - RNA, 19 nt, Artificial Sequence
  Description of Artificial Sequence: Synthetic oligonucleotide
uuguauccggccugcugag

SEQ ID NO: 630468 - RNA, 19 nt, Artificial Sequence
  Description of Artificial Sequence: Synthetic oligonucleotide
ugucaggucgcaggggaag

SEQ ID NO: 630469 - RNA, 19 nt, Artificial Sequence
  Description of Artificial Sequence: Synthetic oligonucleotide
ggggcuccauucuacacgg

SEQ ID NO: 630470 - RNA, 19 nt, Artificial Sequence
  Description of Artificial Sequence: Synthetic oligonucleotide
ccugacucccauuagcgag

SEQ ID NO: 630471 - RNA, 19 nt, Artificial Sequence
  Description of Artificial Sequence: Synthetic oligonucleotide
agaauugcccggugagugu

SEQ ID NO: 630472 - RNA, 19 nt, Artificial Sequence
  Description of Artificial Sequence: Synthetic oligonucleotide
auucuacacggcugcacca

SEQ ID NO: 630473 - RNA, 19 nt, Artificial Sequence
  Description of Artificial Sequence: Synthetic oligonucleotide
uggaagucaggcccuacuu

SEQ ID NO: 630474 - RNA, 19 nt, Artificial Sequence
  Description of Artificial Sequence: Synthetic oligonucleotide
agugauccugaauccugug

SEQ ID NO: 630475 - RNA, 19 nt, Artificial Sequence
  Description of Artificial Sequence: Synthetic oligonucleotide
uguauggugucaugauaua

SEQ ID NO: 630476 - RNA, 19 nt, Artificial Sequence
  Description of Artificial Sequence: Synthetic oligonucleotide
cuaagcccaugguugauga

SEQ ID NO: 630477 - RNA, 19 nt, Artificial Sequence
  Description of Artificial Sequence: Synthetic oligonucleotide
uaguagagagaaccacgaa

SEQ ID NO: 630478 - RNA, 19 nt, Artificial Sequence
  Description of Artificial Sequence: Synthetic oligonucleotide
ggcagaauugcccggugag

SEQ ID NO: 630479 - RNA, 19 nt, Artificial Sequence
  Description of Artificial Sequence: Synthetic oligonucleotide
ccagguacgaguugguuac

SEQ ID NO: 630480 - RNA, 19 nt, Artificial Sequence
  Description of Artificial Sequence: Synthetic oligonucleotide
aucccguaaauguccucag

SEQ ID NO: 630481 - RNA, 19 nt, Artificial Sequence
  Description of Artificial Sequence: Synthetic oligonucleotide
ugggcauacagugcguacu

SEQ ID NO: 630482 - RNA, 19 nt, Artificial Sequence
  Description of Artificial Sequence: Synthetic oligonucleotide
uggcaccuugauccuauca

SEQ ID NO: 630483 - RNA, 19 nt, Artificial Sequence
  Description of Artificial Sequence: Synthetic oligonucleotide
uccugacucccauuagcga

SEQ ID NO: 630484 - RNA, 19 nt, Artificial Sequence
  Description of Artificial Sequence: Synthetic oligonucleotide
cauuagcgaggccuccagg

SEQ ID NO: 630485 - RNA, 19 nt, Artificial Sequence
  Description of Artificial Sequence: Synthetic oligonucleotide
guaccgggcucccuggaag

SEQ ID NO: 630486 - RNA, 19 nt, Artificial Sequence
  Description of Artificial Sequence: Synthetic oligonucleotide
agacacccuggacaccagg

SEQ ID NO: 630487 - RNA, 19 nt, Artificial Sequence
  Description of Artificial Sequence: Synthetic oligonucleotide
uuacguguauggugucaug

SEQ ID NO: 630488 - RNA, 19 nt, Artificial Sequence
  Description of Artificial Sequence: Synthetic oligonucleotide
auugcccggugagugugcc

SEQ ID NO: 630489 - RNA, 19 nt, Artificial Sequence
  Description of Artificial Sequence: Synthetic oligonucleotide
acacggcugcaccaaaacu

SEQ ID NO: 630490 - RNA, 19 nt, Artificial Sequence
  Description of Artificial Sequence: Synthetic oligonucleotide
uccacgcacauagccauca

SEQ ID NO: 630491 - RNA, 19 nt, Artificial Sequence
  Description of Artificial Sequence: Synthetic oligonucleotide
gagugcagugguaauacaa

SEQ ID NO: 630492 - RNA, 19 nt, Artificial Sequence
  Description of Artificial Sequence: Synthetic oligonucleotide
cuggaacccuguccaaugc

SEQ ID NO: 630493 - RNA, 19 nt, Artificial Sequence
  Description of Artificial Sequence: Synthetic oligonucleotide
cuguauacagaucaccccu

SEQ ID NO: 630494 - RNA, 19 nt, Artificial Sequence
  Description of Artificial Sequence: Synthetic oligonucleotide
ucccaguguacggacucgg

SEQ ID NO: 630495 - RNA, 19 nt, Artificial Sequence
  Description of Artificial Sequence: Synthetic oligonucleotide
ggaaccuguguuaguaucc

SEQ ID NO: 630496 - RNA, 19 nt, Artificial Sequence
  Description of Artificial Sequence: Synthetic oligonucleotide
acacguguacccagguacg

SEQ ID NO: 630497 - RNA, 19 nt, Artificial Sequence
  Description of Artificial Sequence: Synthetic oligonucleotide
aagcgcaggcuguucugca

SEQ ID NO: 630498 - RNA, 19 nt, Artificial Sequence
  Description of Artificial Sequence: Synthetic oligonucleotide
gacguugaugaaacuucug

SEQ ID NO: 630499 - RNA, 19 nt, Artificial Sequence
  Description of Artificial Sequence: Synthetic oligonucleotide
acguguauggugucaugau

SEQ ID NO: 630500 - RNA, 19 nt, Artificial Sequence
  Description of Artificial Sequence: Synthetic oligonucleotide
agugcguacuaaauauggu

SEQ ID NO: 630501 - RNA, 19 nt, Artificial Sequence
  Description of Artificial Sequence: Synthetic oligonucleotide
ggugguucuaaugucaaaa

SEQ ID NO: 630502 - RNA, 19 nt, Artificial Sequence
  Description of Artificial Sequence: Synthetic oligonucleotide
guugccuguagucaagcgu

SEQ ID NO: 630503 - RNA, 19 nt, Artificial Sequence
  Description of Artificial Sequence: Synthetic oligonucleotide
gggaaaugagaccuuaugu

SEQ ID NO: 630504 - RNA, 19 nt, Artificial Sequence
  Description of Artificial Sequence: Synthetic oligonucleotide
cauaccugccucagugauc

SEQ ID NO: 630505 - RNA, 19 nt, Artificial Sequence
  Description of Artificial Sequence: Synthetic oligonucleotide
acagugcguacuaaauaug

SEQ ID NO: 630506 - RNA, 19 nt, Artificial Sequence
  Description of Artificial Sequence: Synthetic oligonucleotide
aaacucggcucaggaaaca

SEQ ID NO: 630507 - RNA, 19 nt, Artificial Sequence
  Description of Artificial Sequence: Synthetic oligonucleotide
acacugaagcguuguaauu

SEQ ID NO: 630508 - RNA, 19 nt, Artificial Sequence
  Description of Artificial Sequence: Synthetic oligonucleotide
ccguaaauguccucagggc

SEQ ID NO: 630509 - RNA, 19 nt, Artificial Sequence
  Description of Artificial Sequence: Synthetic oligonucleotide
ucggcucaggaaacacuga

SEQ ID NO: 630510 - RNA, 19 nt, Artificial Sequence
  Description of Artificial Sequence: Synthetic oligonucleotide
uggggaaaugagaccuuau

SEQ ID NO: 630511 - RNA, 19 nt, Artificial Sequence
  Description of Artificial Sequence: Synthetic oligonucleotide
cagguaguagagagaacca

SEQ ID NO: 630512 - RNA, 19 nt, Artificial Sequence
  Description of Artificial Sequence: Synthetic oligonucleotide
uacacaccguuuacgugua

SEQ ID NO: 630513 - RNA, 19 nt, Artificial Sequence
  Description of Artificial Sequence: Synthetic oligonucleotide
agguaggagaugccagaga

SEQ ID NO: 630514 - RNA, 19 nt, Artificial Sequence
  Description of Artificial Sequence: Synthetic oligonucleotide
gucacugggcauacagugc

SEQ ID NO: 630515 - RNA, 19 nt, Artificial Sequence
  Description of Artificial Sequence: Synthetic oligonucleotide
uugauccuaucagccaccu

SEQ ID NO: 630516 - RNA, 19 nt, Artificial Sequence
  Description of Artificial Sequence: Synthetic oligonucleotide
acggugagcauagaugcau

SEQ ID NO: 630517 - RNA, 19 nt, Artificial Sequence
  Description of Artificial Sequence: Synthetic oligonucleotide
cacaccguuuacguguaug

SEQ ID NO: 630518 - RNA, 19 nt, Artificial Sequence
  Description of Artificial Sequence: Synthetic oligonucleotide
uagggcgaugacuuuugua

SEQ ID NO: 630519 - RNA, 19 nt, Artificial Sequence
  Description of Artificial Sequence: Synthetic oligonucleotide
cagugguaauacaacugga

SEQ ID NO: 630520 - RNA, 19 nt, Artificial Sequence
  Description of Artificial Sequence: Synthetic oligonucleotide
gguagccuagguucugggc

SEQ ID NO: 630521 - RNA, 19 nt, Artificial Sequence
  Description of Artificial Sequence: Synthetic oligonucleotide
aguguacggacucgguauu

SEQ ID NO: 630522 - RNA, 19 nt, Artificial Sequence
  Description of Artificial Sequence: Synthetic oligonucleotide
cuacuugcaggccaagucu

SEQ ID NO: 630523 - RNA, 19 nt, Artificial Sequence
  Description of Artificial Sequence: Synthetic oligonucleotide
uucuacacggcugcaccaa

SEQ ID NO: 630524 - RNA, 19 nt, Artificial Sequence
  Description of Artificial Sequence: Synthetic oligonucleotide
augacgguagcaacacugu

SEQ ID NO: 630525 - RNA, 19 nt, Artificial Sequence
  Description of Artificial Sequence: Synthetic oligonucleotide
accuccuggaucccguaaa

SEQ ID NO: 630526 - RNA, 19 nt, Artificial Sequence
  Description of Artificial Sequence: Synthetic oligonucleotide
ccuacuugcaggccaaguc

SEQ ID NO: 630527 - RNA, 19 nt, Artificial Sequence
  Description of Artificial Sequence: Synthetic oligonucleotide
gucaggucgcaggggaagg

SEQ ID NO: 630528 - RNA, 19 nt, Artificial Sequence
  Description of Artificial Sequence: Synthetic oligonucleotide
ugucugcauggacuguaua

SEQ ID NO: 630529 - RNA, 19 nt, Artificial Sequence
  Description of Artificial Sequence: Synthetic oligonucleotide
agguacgaguugguuacug

SEQ ID NO: 630530 - RNA, 19 nt, Artificial Sequence
  Description of Artificial Sequence: Synthetic oligonucleotide
uguuaguauccaggguaaa

SEQ ID NO: 630531 - RNA, 19 nt, Artificial Sequence
  Description of Artificial Sequence: Synthetic oligonucleotide
guuuacguguaugguguca

SEQ ID NO: 630532 - RNA, 19 nt, Artificial Sequence
  Description of Artificial Sequence: Synthetic oligonucleotide
guugguuacuguggcccag

SEQ ID NO: 630533 - RNA, 19 nt, Artificial Sequence
  Description of Artificial Sequence: Synthetic oligonucleotide
gucauaccugccucaguga

SEQ ID NO: 630534 - RNA, 19 nt, Artificial Sequence
  Description of Artificial Sequence: Synthetic oligonucleotide
cucgguauuccaggauggc

SEQ ID NO: 630535 - RNA, 19 nt, Artificial Sequence
  Description of Artificial Sequence: Synthetic oligonucleotide
gcguuguaauuucucagca

SEQ ID NO: 630536 - RNA, 19 nt, Artificial Sequence
  Description of Artificial Sequence: Synthetic oligonucleotide
gucaugauauacacgugua

SEQ ID NO: 630537 - RNA, 19 nt, Artificial Sequence
  Description of Artificial Sequence: Synthetic oligonucleotide
ugguuacuguggcccagaa

SEQ ID NO: 630538 - RNA, 19 nt, Artificial Sequence
  Description of Artificial Sequence: Synthetic oligonucleotide
gcguucaauggacacgcug

SEQ ID NO: 630539 - RNA, 19 nt, Artificial Sequence
  Description of Artificial Sequence: Synthetic oligonucleotide
guaacacacggugagcaua

SEQ ID NO: 630540 - RNA, 19 nt, Artificial Sequence
  Description of Artificial Sequence: Synthetic oligonucleotide
ugccuguagucaagcguuc

SEQ ID NO: 630541 - RNA, 19 nt, Artificial Sequence
  Description of Artificial Sequence: Synthetic oligonucleotide
auggaccuccuggaucccg

SEQ ID NO: 630542 - RNA, 19 nt, Artificial Sequence
  Description of Artificial Sequence: Synthetic oligonucleotide
aaauggcaccuugauccua

SEQ ID NO: 630543 - RNA, 19 nt, Artificial Sequence
  Description of Artificial Sequence: Synthetic oligonucleotide
uagaugcauugggaagccc

SEQ ID NO: 630544 - RNA, 19 nt, Artificial Sequence
  Description of Artificial Sequence: Synthetic oligonucleotide
ggaacauccagagguccug

SEQ ID NO: 630545 - RNA, 19 nt, Artificial Sequence
  Description of Artificial Sequence: Synthetic oligonucleotide
cugguuggggauaggcaga

SEQ ID NO: 630546 - RNA, 19 nt, Artificial Sequence
  Description of Artificial Sequence: Synthetic oligonucleotide
acggugccagacccauccg

SEQ ID NO: 630547 - RNA, 19 nt, Artificial Sequence
  Description of Artificial Sequence: Synthetic oligonucleotide
cguuguaauuucucagcag

SEQ ID NO: 630548 - RNA, 19 nt, Artificial Sequence
  Description of Artificial Sequence: Synthetic oligonucleotide
uccugagugcagugguaau

SEQ ID NO: 630549 - RNA, 19 nt, Artificial Sequence
  Description of Artificial Sequence: Synthetic oligonucleotide
ggguaacacacggugagca

SEQ ID NO: 630550 - RNA, 19 nt, Artificial Sequence
  Description of Artificial Sequence: Synthetic oligonucleotide
cguaaauguccucagggca

SEQ ID NO: 630551 - RNA, 19 nt, Artificial Sequence
  Description of Artificial Sequence: Synthetic oligonucleotide
cguucaauggacacgcuga

SEQ ID NO: 630552 - RNA, 19 nt, Artificial Sequence
  Description of Artificial Sequence: Synthetic oligonucleotide
augggguaacacacgguga

SEQ ID NO: 630553 - RNA, 19 nt, Artificial Sequence
  Description of Artificial Sequence: Synthetic oligonucleotide
aggugguucuaaugucaaa

SEQ ID NO: 630554 - RNA, 19 nt, Artificial Sequence
  Description of Artificial Sequence: Synthetic oligonucleotide
uccauucuacacggcugca

SEQ ID NO: 630555 - RNA, 19 nt, Artificial Sequence
  Description of Artificial Sequence: Synthetic oligonucleotide
gccagcgccuuccagggug

SEQ ID NO: 630556 - RNA, 19 nt, Artificial Sequence
  Description of Artificial Sequence: Synthetic oligonucleotide
aggggugagugugugccca

SEQ ID NO: 630557 - RNA, 19 nt, Artificial Sequence
  Description of Artificial Sequence: Synthetic oligonucleotide
gcaaauuuggcuccccggu

SEQ ID NO: 630558 - RNA, 19 nt, Artificial Sequence
  Description of Artificial Sequence: Synthetic oligonucleotide
aggucauaccugccucagu

SEQ ID NO: 630559 - RNA, 19 nt, Artificial Sequence
  Description of Artificial Sequence: Synthetic oligonucleotide
gaccuuauguccuggcguu

SEQ ID NO: 630560 - RNA, 19 nt, Artificial Sequence
  Description of Artificial Sequence: Synthetic oligonucleotide
accucaagugucacagagu

SEQ ID NO: 630561 - RNA, 19 nt, Artificial Sequence
  Description of Artificial Sequence: Synthetic oligonucleotide
ucccauuagcgaggccucc

SEQ ID NO: 630562 - RNA, 19 nt, Artificial Sequence
  Description of Artificial Sequence: Synthetic oligonucleotide
gcauacagugcguacuaaa

SEQ ID NO: 630563 - RNA, 19 nt, Artificial Sequence
  Description of Artificial Sequence: Synthetic oligonucleotide
uccggccugcugagugggg

SEQ ID NO: 630564 - RNA, 19 nt, Artificial Sequence
  Description of Artificial Sequence: Synthetic oligonucleotide
gguuacuguggcccagaac

SEQ ID NO: 630565 - RNA, 19 nt, Artificial Sequence
  Description of Artificial Sequence: Synthetic oligonucleotide
accaggacguugguauaca

SEQ ID NO: 630566 - RNA, 19 nt, Artificial Sequence
  Description of Artificial Sequence: Synthetic oligonucleotide
cuccugagugguacucauc

SEQ ID NO: 630567 - RNA, 19 nt, Artificial Sequence
  Description of Artificial Sequence: Synthetic oligonucleotide
gucaagcguucaauggaca

SEQ ID NO: 630568 - RNA, 19 nt, Artificial Sequence
  Description of Artificial Sequence: Synthetic oligonucleotide
agcuagggcgaugacuuuu

SEQ ID NO: 630569 - RNA, 19 nt, Artificial Sequence
  Description of Artificial Sequence: Synthetic oligonucleotide
ggcugugaccucaaguguc

SEQ ID NO: 630570 - RNA, 19 nt, Artificial Sequence
  Description of Artificial Sequence: Synthetic oligonucleotide
gcuaagcccaugguugaug

SEQ ID NO: 630571 - RNA, 19 nt, Artificial Sequence
  Description of Artificial Sequence: Synthetic oligonucleotide
ccuucggaugucaggucgc

SEQ ID NO: 630572 - RNA, 19 nt, Artificial Sequence
  Description of Artificial Sequence: Synthetic oligonucleotide
aacacacggugagcauaga

SEQ ID NO: 630573 - RNA, 19 nt, Artificial Sequence
  Description of Artificial Sequence: Synthetic oligonucleotide
ccuuauguccuggcguuag

SEQ ID NO: 630574 - RNA, 19 nt, Artificial Sequence
  Description of Artificial Sequence: Synthetic oligonucleotide
gcccaugguugaugaaucc

SEQ ID NO: 630575 - RNA, 19 nt, Artificial Sequence
  Description of Artificial Sequence: Synthetic oligonucleotide
gggcgaugacuuuuguauc

SEQ ID NO: 630576 - RNA, 19 nt, Artificial Sequence
  Description of Artificial Sequence: Synthetic oligonucleotide
gaaccacgaagggcuuggc

SEQ ID NO: 630577 - RNA, 19 nt, Artificial Sequence
  Description of Artificial Sequence: Synthetic oligonucleotide
uugcccggugagugugccc

SEQ ID NO: 630578 - RNA, 19 nt, Artificial Sequence
  Description of Artificial Sequence: Synthetic oligonucleotide
aggucucagucagugguuu

SEQ ID NO: 630579 - RNA, 19 nt, Artificial Sequence
  Description of Artificial Sequence: Synthetic oligonucleotide
cauccgcauucucugucca

SEQ ID NO: 630580 - RNA, 19 nt, Artificial Sequence
  Description of Artificial Sequence: Synthetic oligonucleotide
cagacacccuggacaccag

SEQ ID NO: 630581 - RNA, 19 nt, Artificial Sequence
  Description of Artificial Sequence: Synthetic oligonucleotide
cccgaagaguacugucugc

SEQ ID NO: 630582 - RNA, 19 nt, Artificial Sequence
  Description of Artificial Sequence: Synthetic oligonucleotide
cagugauccugaauccugu

SEQ ID NO: 630583 - RNA, 19 nt, Artificial Sequence
  Description of Artificial Sequence: Synthetic oligonucleotide
gaccuccuggaucccguaa

SEQ ID NO: 630584 - RNA, 19 nt, Artificial Sequence
  Description of Artificial Sequence: Synthetic oligonucleotide
gacucccauuagcgaggcc

SEQ ID NO: 630585 - RNA, 19 nt, Artificial Sequence
  Description of Artificial Sequence: Synthetic oligonucleotide
ccauuagcgaggccuccag

SEQ ID NO: 630586 - RNA, 19 nt, Artificial Sequence
  Description of Artificial Sequence: Synthetic oligonucleotide
gguacgaguugguuacugu

SEQ ID NO: 630587 - RNA, 19 nt, Artificial Sequence
  Description of Artificial Sequence: Synthetic oligonucleotide
ccguuuacguguauggugu

SEQ ID NO: 630588 - RNA, 19 nt, Artificial Sequence
  Description of Artificial Sequence: Synthetic oligonucleotide
ugaagggcucagugacguu

SEQ ID NO: 630589 - RNA, 19 nt, Artificial Sequence
  Description of Artificial Sequence: Synthetic oligonucleotide
cuccauuguacacaccguu

SEQ ID NO: 630590 - RNA, 19 nt, Artificial Sequence
  Description of Artificial Sequence: Synthetic oligonucleotide
guauuccaggauggcccug

SEQ ID NO: 630591 - RNA, 19 nt, Artificial Sequence
  Description of Artificial Sequence: Synthetic oligonucleotide
ccaaugcagcugagaacgc

SEQ ID NO: 630592 - RNA, 19 nt, Artificial Sequence
  Description of Artificial Sequence: Synthetic oligonucleotide
gggcuaagcccaugguuga

SEQ ID NO: 630593 - RNA, 19 nt, Artificial Sequence
  Description of Artificial Sequence: Synthetic oligonucleotide
acguugguauacacagaau

SEQ ID NO: 630594 - RNA, 19 nt, Artificial Sequence
  Description of Artificial Sequence: Synthetic oligonucleotide
guguacggacucgguauuc

SEQ ID NO: 630595 - RNA, 19 nt, Artificial Sequence
  Description of Artificial Sequence: Synthetic oligonucleotide
ucacggugccagacccauc

SEQ ID NO: 630596 - RNA, 19 nt, Artificial Sequence
  Description of Artificial Sequence: Synthetic oligonucleotide
gcccauguagguaccgggc

SEQ ID NO: 630597 - RNA, 19 nt, Artificial Sequence
  Description of Artificial Sequence: Synthetic oligonucleotide
cuguguuaguauccagggu

SEQ ID NO: 630598 - RNA, 19 nt, Artificial Sequence
  Description of Artificial Sequence: Synthetic oligonucleotide
gugcacccgaagaguacug

SEQ ID NO: 630599 - RNA, 19 nt, Artificial Sequence
  Description of Artificial Sequence: Synthetic oligonucleotide
cucagugauccugaauccu

SEQ ID NO: 630600 - RNA, 19 nt, Artificial Sequence
  Description of Artificial Sequence: Synthetic oligonucleotide
gggguaacacacggugagc

SEQ ID NO: 630601 - RNA, 19 nt, Artificial Sequence
  Description of Artificial Sequence: Synthetic oligonucleotide
cuucggaugucaggucgca

SEQ ID NO: 630602 - RNA, 19 nt, Artificial Sequence
  Description of Artificial Sequence: Synthetic oligonucleotide
cucagcagcuagggcgaug

SEQ ID NO: 630603 - RNA, 19 nt, Artificial Sequence
  Description of Artificial Sequence: Synthetic oligonucleotide
cacuccugagugguacuca

SEQ ID NO: 630604 - RNA, 19 nt, Artificial Sequence
  Description of Artificial Sequence: Synthetic oligonucleotide
ccauucuacacggcugcac

SEQ ID NO: 630605 - RNA, 19 nt, Artificial Sequence
  Description of Artificial Sequence: Synthetic oligonucleotide
gggcagaauugcccgguga

SEQ ID NO: 630606 - RNA, 19 nt, Artificial Sequence
  Description of Artificial Sequence: Synthetic oligonucleotide
ccgaagaguacugucugca

SEQ ID NO: 630607 - RNA, 19 nt, Artificial Sequence
  Description of Artificial Sequence: Synthetic oligonucleotide
cacguguacccagguacga

SEQ ID NO: 630608 - RNA, 19 nt, Artificial Sequence
  Description of Artificial Sequence: Synthetic oligonucleotide
cguugaugaaacuucugcu

SEQ ID NO: 630609 - RNA, 19 nt, Artificial Sequence
  Description of Artificial Sequence: Synthetic oligonucleotide
ggcgccuccagcuggacau

SEQ ID NO: 630610 - RNA, 19 nt, Artificial Sequence
  Description of Artificial Sequence: Synthetic oligonucleotide
ugggcucuagagggcuccu

SEQ ID NO: 630611 - RNA, 19 nt, Artificial Sequence
  Description of Artificial Sequence: Synthetic oligonucleotide
ccgcauucucuguccacac

SEQ ID NO: 630612 - RNA, 19 nt, Artificial Sequence
  Description of Artificial Sequence: Synthetic oligonucleotide
ggaucccguaaauguccuc

SEQ ID NO: 630613 - RNA, 19 nt, Artificial Sequence
  Description of Artificial Sequence: Synthetic oligonucleotide
accuuauguccuggcguua

SEQ ID NO: 630614 - RNA, 19 nt, Artificial Sequence
  Description of Artificial Sequence: Synthetic oligonucleotide
gcauucuucagggccccuc

SEQ ID NO: 630615 - RNA, 19 nt, Artificial Sequence
  Description of Artificial Sequence: Synthetic oligonucleotide
cgcauucucuguccacacc

SEQ ID NO: 630616 - RNA, 19 nt, Artificial Sequence
  Description of Artificial Sequence: Synthetic oligonucleotide
ggacguugguauacacaga

SEQ ID NO: 630617 - RNA, 19 nt, Artificial Sequence
  Description of Artificial Sequence: Synthetic oligonucleotide
aggugaaguugaacuuguu

SEQ ID NO: 630618 - RNA, 19 nt, Artificial Sequence
  Description of Artificial Sequence: Synthetic oligonucleotide
agcguucaauggacacgcu

SEQ ID NO: 630619 - RNA, 19 nt, Artificial Sequence
  Description of Artificial Sequence: Synthetic oligonucleotide
gggcugugaccucaagugu

SEQ ID NO: 630620 - RNA, 19 nt, Artificial Sequence
  Description of Artificial Sequence: Synthetic oligonucleotide
ggccagugcuugcacucuc

SEQ ID NO: 630621 - RNA, 19 nt, Artificial Sequence
  Description of Artificial Sequence: Synthetic oligonucleotide
ccaguguacggacucggua

SEQ ID NO: 630622 - RNA, 19 nt, Artificial Sequence
  Description of Artificial Sequence: Synthetic oligonucleotide
cagcagcuagggcgaugac

SEQ ID NO: 630623 - RNA, 19 nt, Artificial Sequence
  Description of Artificial Sequence: Synthetic oligonucleotide
cggugccagacccauccgc

SEQ ID NO: 630624 - RNA, 19 nt, Artificial Sequence
  Description of Artificial Sequence: Synthetic oligonucleotide
gguuggggauaggcagacc

SEQ ID NO: 630625 - RNA, 19 nt, Artificial Sequence
  Description of Artificial Sequence: Synthetic oligonucleotide
caccguuuacguguauggu

SEQ ID NO: 630626 - RNA, 19 nt, Artificial Sequence
  Description of Artificial Sequence: Synthetic oligonucleotide
ccaugguugaugaauccuu

SEQ ID NO: 630627 - RNA, 19 nt, Artificial Sequence
  Description of Artificial Sequence: Synthetic oligonucleotide
gggugagugugugcccaug

SEQ ID NO: 630628 - RNA, 19 nt, Artificial Sequence
  Description of Artificial Sequence: Synthetic oligonucleotide
cuagggcgaugacuuuugu

SEQ ID NO: 630629 - RNA, 19 nt, Artificial Sequence
  Description of Artificial Sequence: Synthetic oligonucleotide
cguguauggugucaugaua

SEQ ID NO: 630630 - RNA, 19 nt, Artificial Sequence
  Description of Artificial Sequence: Synthetic oligonucleotide
cguuuacguguaugguguc

SEQ ID NO: 630631 - RNA, 19 nt, Artificial Sequence
  Description of Artificial Sequence: Synthetic oligonucleotide
ccugagugcagugguaaua

SEQ ID NO: 630632 - RNA, 19 nt, Artificial Sequence
  Description of Artificial Sequence: Synthetic oligonucleotide
gucgcaggggaaggggacu

SEQ ID NO: 630633 - RNA, 19 nt, Artificial Sequence
  Description of Artificial Sequence: Synthetic oligonucleotide
cagugacguugaugaaacu

SEQ ID NO: 630634 - RNA, 19 nt, Artificial Sequence
  Description of Artificial Sequence: Synthetic oligonucleotide
cuuuuguauccggccugcu

SEQ ID NO: 630635 - RNA, 19 nt, Artificial Sequence
  Description of Artificial Sequence: Synthetic oligonucleotide
cccggugagugugcccucc

SEQ ID NO: 630636 - RNA, 19 nt, Artificial Sequence
  Description of Artificial Sequence: Synthetic oligonucleotide
ccaggguaaaggucucagu

SEQ ID NO: 630637 - RNA, 19 nt, Artificial Sequence
  Description of Artificial Sequence: Synthetic oligonucleotide
cuccccgguagccuagguu

SEQ ID NO: 630638 - RNA, 19 nt, Artificial Sequence
  Description of Artificial Sequence: Synthetic oligonucleotide
ggccucagacuggcuacca

SEQ ID NO: 630639 - RNA, 19 nt, Artificial Sequence
  Description of Artificial Sequence: Synthetic oligonucleotide
cccauuagcgaggccucca

SEQ ID NO: 630640 - RNA, 19 nt, Artificial Sequence
  Description of Artificial Sequence: Synthetic oligonucleotide
ggggagccgggccagugau

SEQ ID NO: 630641 - RNA, 19 nt, Artificial Sequence
  Description of Artificial Sequence: Synthetic oligonucleotide
ggaccuccuggaucccgua

SEQ ID NO: 630642 - RNA, 19 nt, Artificial Sequence
  Description of Artificial Sequence: Synthetic oligonucleotide
cccgguagccuagguucug

SEQ ID NO: 630643 - RNA, 19 nt, Artificial Sequence
  Description of Artificial Sequence: Synthetic oligonucleotide
gggcuccauucuacacggc

SEQ ID NO: 630644 - RNA, 19 nt, Artificial Sequence
  Description of Artificial Sequence: Synthetic oligonucleotide
ggcuuggcgcagggccaag

SEQ ID NO: 630645 - RNA, 19 nt, Artificial Sequence
  Description of Artificial Sequence: Synthetic oligonucleotide
ccgggcucccuggaaguca

SEQ ID NO: 630646 - RNA, 19 nt, Artificial Sequence
  Description of Artificial Sequence: Synthetic oligonucleotide
cagguacgaguugguuacu

SEQ ID NO: 630647 - RNA, 19 nt, Artificial Sequence
  Description of Artificial Sequence: Synthetic oligonucleotide
cccaguguacggacucggu

SEQ ID NO: 630648 - RNA, 19 nt, Artificial Sequence
  Description of Artificial Sequence: Synthetic oligonucleotide
ccggugagugugcccucca

SEQ ID NO: 630649 - RNA, 19 nt, Artificial Sequence
  Description of Artificial Sequence: Synthetic oligonucleotide
gcccggugagugugcccuc

SEQ ID NO: 630650 - RNA, 19 nt, Artificial Sequence
  Description of Artificial Sequence: Synthetic oligonucleotide
ggggugagugugugcccau

SEQ ID NO: 630651 - RNA, 19 nt, Artificial Sequence
  Description of Artificial Sequence: Synthetic oligonucleotide
ggcuaagcccaugguugau

SEQ ID NO: 630652 - RNA, 19 nt, Artificial Sequence
  Description of Artificial Sequence: Synthetic oligonucleotide
cccuacuugcaggccaagu

SEQ ID NO: 630653 - RNA, 19 nt, Artificial Sequence
  Description of Artificial Sequence: Synthetic oligonucleotide
ccagcgccuuccagggugu

SEQ ID NO: 630654 - RNA, 19 nt, Artificial Sequence
  Description of Artificial Sequence: Synthetic oligonucleotide
gcgccuccagcuggacauu

SEQ ID NO: 630655 - RNA, 19 nt, Artificial Sequence
  Description of Artificial Sequence: Synthetic oligonucleotide
aagaguuucggccagaguc

SEQ ID NO: 630656 - RNA, 19 nt, Artificial Sequence
  Description of Artificial Sequence: Synthetic oligonucleotide
ugaauuggaacaucgaggg

SEQ ID NO: 630657 - RNA, 19 nt, Artificial Sequence
  Description of Artificial Sequence: Synthetic oligonucleotide
aaauaaacaagacacugcu

SEQ ID NO: 630658 - RNA, 19 nt, Artificial Sequence
  Description of Artificial Sequence: Synthetic oligonucleotide
uggauaaagaguuucggcc

SEQ ID NO: 630659 - RNA, 19 nt, Artificial Sequence
  Description of Artificial Sequence: Synthetic oligonucleotide
aaagcccuagauuucagug

SEQ ID NO: 630660 - RNA, 19 nt, Artificial Sequence
  Description of Artificial Sequence: Synthetic oligonucleotide
aauuggaacaucgaggggu

SEQ ID NO: 630661 - RNA, 19 nt, Artificial Sequence
  Description of Artificial Sequence: Synthetic oligonucleotide
agugaauuggaacaucgag

SEQ ID NO: 630662 - RNA, 19 nt, Artificial Sequence
  Description of Artificial Sequence: Synthetic oligonucleotide
auccauacugucccgaagc

SEQ ID NO: 630663 - RNA, 19 nt, Artificial Sequence
  Description of Artificial Sequence: Synthetic oligonucleotide
gaaaauggggccauaaccc

SEQ ID NO: 630664 - RNA, 19 nt, Artificial Sequence
  Description of Artificial Sequence: Synthetic oligonucleotide
aaaggcagcacaacggcgc

SEQ ID NO: 630665 - RNA, 19 nt, Artificial Sequence
  Description of Artificial Sequence: Synthetic oligonucleotide
aaaagccugacacaccgug

SEQ ID NO: 630666 - RNA, 19 nt, Artificial Sequence
  Description of Artificial Sequence: Synthetic oligonucleotide
aaggaacccguacuuuugc

SEQ ID NO: 630667 - RNA, 19 nt, Artificial Sequence
  Description of Artificial Sequence: Synthetic oligonucleotide
gaucucaccggauuucugg

SEQ ID NO: 630668 - RNA, 19 nt, Artificial Sequence
  Description of Artificial Sequence: Synthetic oligonucleotide
ugcuuggucacaaacacaa

SEQ ID NO: 630669 - RNA, 19 nt, Artificial Sequence
  Description of Artificial Sequence: Synthetic oligonucleotide
gaacccguacuuuugcugg

SEQ ID NO: 630670 - RNA, 19 nt, Artificial Sequence
  Description of Artificial Sequence: Synthetic oligonucleotide
aggggucugaucuuucucc

SEQ ID NO: 630671 - RNA, 19 nt, Artificial Sequence
  Description of Artificial Sequence: Synthetic oligonucleotide
acaacggcgcuccagcugc

SEQ ID NO: 630672 - RNA, 19 nt, Artificial Sequence
  Description of Artificial Sequence: Synthetic oligonucleotide
cuuuggucugacuucagcc

SEQ ID NO: 630673 - RNA, 19 nt, Artificial Sequence
  Description of Artificial Sequence: Synthetic oligonucleotide
cucaaaggcagcacaacgg

SEQ ID NO: 630674 - RNA, 19 nt, Artificial Sequence
  Description of Artificial Sequence: Synthetic oligonucleotide
gugaauuggaacaucgagg

SEQ ID NO: 630675 - RNA, 19 nt, Artificial Sequence
  Description of Artificial Sequence: Synthetic oligonucleotide
aaaauggggccauaacccu

SEQ ID NO: 630676 - RNA, 19 nt, Artificial Sequence
  Description of Artificial Sequence: Synthetic oligonucleotide
gauaaagaguuucggccag

SEQ ID NO: 630677 - RNA, 19 nt, Artificial Sequence
  Description of Artificial Sequence: Synthetic oligonucleotide
gaaugcuuggcagaggccc

SEQ ID NO: 630678 - RNA, 19 nt, Artificial Sequence
  Description of Artificial Sequence: Synthetic oligonucleotide
cuagauuucaguggcagug

SEQ ID NO: 630679 - RNA, 19 nt, Artificial Sequence
  Description of Artificial Sequence: Synthetic oligonucleotide
uucuuuucccgcuggagug

SEQ ID NO: 630680 - RNA, 19 nt, Artificial Sequence
  Description of Artificial Sequence: Synthetic oligonucleotide
uucaguggcagugaucucc

SEQ ID NO: 630681 - RNA, 19 nt, Artificial Sequence
  Description of Artificial Sequence: Synthetic oligonucleotide
uaacccugguauuaggaga

SEQ ID NO: 630682 - RNA, 19 nt, Artificial Sequence
  Description of Artificial Sequence: Synthetic oligonucleotide
aacaucgaggggucugauc

SEQ ID NO: 630683 - RNA, 19 nt, Artificial Sequence
  Description of Artificial Sequence: Synthetic oligonucleotide
gaagugguggggucgguag

SEQ ID NO: 630684 - RNA, 19 nt, Artificial Sequence
  Description of Artificial Sequence: Synthetic oligonucleotide
ugcaccuuaaccucaucac

SEQ ID NO: 630685 - RNA, 19 nt, Artificial Sequence
  Description of Artificial Sequence: Synthetic oligonucleotide
aaggccucauccgaagggg

SEQ ID NO: 630686 - RNA, 19 nt, Artificial Sequence
  Description of Artificial Sequence: Synthetic oligonucleotide
gaauuggaacaucgagggg

SEQ ID NO: 630687 - RNA, 19 nt, Artificial Sequence
  Description of Artificial Sequence: Synthetic oligonucleotide
cugggugacagugaauugg

SEQ ID NO: 630688 - RNA, 19 nt, Artificial Sequence
  Description of Artificial Sequence: Synthetic oligonucleotide
ugguuguguggcuagugcc

SEQ ID NO: 630689 - RNA, 19 nt, Artificial Sequence
  Description of Artificial Sequence: Synthetic oligonucleotide
uggauuuguacaagaaauu

SEQ ID NO: 630690 - RNA, 19 nt, Artificial Sequence
  Description of Artificial Sequence: Synthetic oligonucleotide
augccaaggguuugucagc

SEQ ID NO: 630691 - RNA, 19 nt, Artificial Sequence
  Description of Artificial Sequence: Synthetic oligonucleotide
agucugacaauguucccga

SEQ ID NO: 630692 - RNA, 19 nt, Artificial Sequence
  Description of Artificial Sequence: Synthetic oligonucleotide
uucggccagagucugacaa

SEQ ID NO: 630693 - RNA, 19 nt, Artificial Sequence
  Description of Artificial Sequence: Synthetic oligonucleotide
ucuccacccgaacugcugc

SEQ ID NO: 630694 - RNA, 19 nt, Artificial Sequence
  Description of Artificial Sequence: Synthetic oligonucleotide
cugguagcggaucaccugc

SEQ ID NO: 630695 - RNA, 19 nt, Artificial Sequence
  Description of Artificial Sequence: Synthetic oligonucleotide
ucugguagcggaucaccug

SEQ ID NO: 630696 - RNA, 19 nt, Artificial Sequence
  Description of Artificial Sequence: Synthetic oligonucleotide
agccccuuucuuuucccgc

SEQ ID NO: 630697 - RNA, 19 nt, Artificial Sequence
  Description of Artificial Sequence: Synthetic oligonucleotide
guagggaccccucuggcug

SEQ ID NO: 630698 - RNA, 19 nt, Artificial Sequence
  Description of Artificial Sequence: Synthetic oligonucleotide
ucagcaagcucacgggccu

SEQ ID NO: 630699 - RNA, 19 nt, Artificial Sequence
  Description of Artificial Sequence: Synthetic oligonucleotide
caaggccucauccgaaggg

SEQ ID NO: 630700 - RNA, 19 nt, Artificial Sequence
  Description of Artificial Sequence: Synthetic oligonucleotide
agaccuggagugcucagug

SEQ ID NO: 630701 - RNA, 19 nt, Artificial Sequence
  Description of Artificial Sequence: Synthetic oligonucleotide
aaagaguuucggccagagu

SEQ ID NO: 630702 - RNA, 19 nt, Artificial Sequence
  Description of Artificial Sequence: Synthetic oligonucleotide
uuguguugcagcugcuucu

SEQ ID NO: 630703 - RNA, 19 nt, Artificial Sequence
  Description of Artificial Sequence: Synthetic oligonucleotide
gaauguggagauggguuag

SEQ ID NO: 630704 - RNA, 19 nt, Artificial Sequence
  Description of Artificial Sequence: Synthetic oligonucleotide
ucggucacgaagcuucccu

SEQ ID NO: 630705 - RNA, 19 nt, Artificial Sequence
  Description of Artificial Sequence: Synthetic oligonucleotide
ugaaugcuuggcagaggcc

SEQ ID NO: 630706 - RNA, 19 nt, Artificial Sequence
  Description of Artificial Sequence: Synthetic oligonucleotide
cucaguggauccugggacc

SEQ ID NO: 630707 - RNA, 19 nt, Artificial Sequence
  Description of Artificial Sequence: Synthetic oligonucleotide
ucuuuucccgcuggagugg

SEQ ID NO: 630708 - RNA, 19 nt, Artificial Sequence
  Description of Artificial Sequence: Synthetic oligonucleotide
cauaacccugguauuagga

SEQ ID NO: 630709 - RNA, 19 nt, Artificial Sequence
  Description of Artificial Sequence: Synthetic oligonucleotide
gagugaagugguggggucg

SEQ ID NO: 630710 - RNA, 19 nt, Artificial Sequence
  Description of Artificial Sequence: Synthetic oligonucleotide
guuagccccuuucuuuucc

SEQ ID NO: 630711 - RNA, 19 nt, Artificial Sequence
  Description of Artificial Sequence: Synthetic oligonucleotide
uguggcuagugcccuuugc

SEQ ID NO: 630712 - RNA, 19 nt, Artificial Sequence
  Description of Artificial Sequence: Synthetic oligonucleotide
uggcaggcacaucuggagc

SEQ ID NO: 630713 - RNA, 19 nt, Artificial Sequence
  Description of Artificial Sequence: Synthetic oligonucleotide
guagcaaggccucauccga

SEQ ID NO: 630714 - RNA, 19 nt, Artificial Sequence
  Description of Artificial Sequence: Synthetic oligonucleotide
cuagcccuguccuuccacc

SEQ ID NO: 630715 - RNA, 19 nt, Artificial Sequence
  Description of Artificial Sequence: Synthetic oligonucleotide
uuagccccuuucuuuuccc

SEQ ID NO: 630716 - RNA, 19 nt, Artificial Sequence
  Description of Artificial Sequence: Synthetic oligonucleotide
ucucgaagggccacccgca

SEQ ID NO: 630717 - RNA, 19 nt, Artificial Sequence
  Description of Artificial Sequence: Synthetic oligonucleotide
gaugcccagccuucucccg

SEQ ID NO: 630718 - RNA, 19 nt, Artificial Sequence
  Description of Artificial Sequence: Synthetic oligonucleotide
uguugggcccgcuggacac

SEQ ID NO: 630719 - RNA, 19 nt, Artificial Sequence
  Description of Artificial Sequence: Synthetic oligonucleotide
gcuagugcccuuugcaaag

SEQ ID NO: 630720 - RNA, 19 nt, Artificial Sequence
  Description of Artificial Sequence: Synthetic oligonucleotide
cucaccggauuucuggcac

SEQ ID NO: 630721 - RNA, 19 nt, Artificial Sequence
  Description of Artificial Sequence: Synthetic oligonucleotide
cugccgggccccaaaagcc

SEQ ID NO: 630722 - RNA, 19 nt, Artificial Sequence
  Description of Artificial Sequence: Synthetic oligonucleotide
accugaaugcuuggcagag

SEQ ID NO: 630723 - RNA, 19 nt, Artificial Sequence
  Description of Artificial Sequence: Synthetic oligonucleotide
ugcccgcugcaccuuaacc

SEQ ID NO: 630724 - RNA, 19 nt, Artificial Sequence
  Description of Artificial Sequence: Synthetic oligonucleotide
gcagugaucuccuccagac

SEQ ID NO: 630725 - RNA, 19 nt, Artificial Sequence
  Description of Artificial Sequence: Synthetic oligonucleotide
uggaacaucgaggggucug

SEQ ID NO: 630726 - RNA, 19 nt, Artificial Sequence
  Description of Artificial Sequence: Synthetic oligonucleotide
agugaaaauggggccauaa

SEQ ID NO: 630727 - RNA, 19 nt, Artificial Sequence
  Description of Artificial Sequence: Synthetic oligonucleotide
agaguuucggccagagucu

SEQ ID NO: 630728 - RNA, 19 nt, Artificial Sequence
  Description of Artificial Sequence: Synthetic oligonucleotide
caaggguuugucagcagca

SEQ ID NO: 630729 - RNA, 19 nt, Artificial Sequence
  Description of Artificial Sequence: Synthetic oligonucleotide
aacccguacuuuugcugga

SEQ ID NO: 630730 - RNA, 19 nt, Artificial Sequence
  Description of Artificial Sequence: Synthetic oligonucleotide
uggcuagugcccuuugcaa

SEQ ID NO: 630731 - RNA, 19 nt, Artificial Sequence
  Description of Artificial Sequence: Synthetic oligonucleotide
acacaccguggccucacuc

SEQ ID NO: 630732 - RNA, 19 nt, Artificial Sequence
  Description of Artificial Sequence: Synthetic oligonucleotide
ucaaagcugucccgcugcu

SEQ ID NO: 630733 - RNA, 19 nt, Artificial Sequence
  Description of Artificial Sequence: Synthetic oligonucleotide
cuggcgcuucucuugcugc

SEQ ID NO: 630734 - RNA, 19 nt, Artificial Sequence
  Description of Artificial Sequence: Synthetic oligonucleotide
uguccgagugggagggccc

SEQ ID NO: 630735 - RNA, 19 nt, Artificial Sequence
  Description of Artificial Sequence: Synthetic oligonucleotide
cucccggagccguucagcc

SEQ ID NO: 630736 - RNA, 19 nt, Artificial Sequence
  Description of Artificial Sequence: Synthetic oligonucleotide
agcggucuccacccgaacu

SEQ ID NO: 630737 - RNA, 19 nt, Artificial Sequence
  Description of Artificial Sequence: Synthetic oligonucleotide
cagccacucaaugccaagg

SEQ ID NO: 630738 - RNA, 19 nt, Artificial Sequence
  Description of Artificial Sequence: Synthetic oligonucleotide
uucccgaugggcagccacu

SEQ ID NO: 630739 - RNA, 19 nt, Artificial Sequence
  Description of Artificial Sequence: Synthetic oligonucleotide
auguucccgaugggcagcc

SEQ ID NO: 630740 - RNA, 19 nt, Artificial Sequence
  Description of Artificial Sequence: Synthetic oligonucleotide
gaggggucugaucuuucuc

SEQ ID NO: 630741 - RNA, 19 nt, Artificial Sequence
  Description of Artificial Sequence: Synthetic oligonucleotide
ucgaagggccacccgcaga

SEQ ID NO: 630742 - RNA, 19 nt, Artificial Sequence
  Description of Artificial Sequence: Synthetic oligonucleotide
aggacacacuguagcaagg

SEQ ID NO: 630743 - RNA, 19 nt, Artificial Sequence
  Description of Artificial Sequence: Synthetic oligonucleotide
agcaccuccggugcuguag

SEQ ID NO: 630744 - RNA, 19 nt, Artificial Sequence
  Description of Artificial Sequence: Synthetic oligonucleotide
gguuguguggcuagugccc

SEQ ID NO: 630745 - RNA, 19 nt, Artificial Sequence
  Description of Artificial Sequence: Synthetic oligonucleotide
ccugcaagccccuggcacg

SEQ ID NO: 630746 - RNA, 19 nt, Artificial Sequence
  Description of Artificial Sequence: Synthetic oligonucleotide
gaguuucggccagagucug

SEQ ID NO: 630747 - RNA, 19 nt, Artificial Sequence
  Description of Artificial Sequence: Synthetic oligonucleotide
auccagaugcccagccuuc

SEQ ID NO: 630748 - RNA, 19 nt, Artificial Sequence
  Description of Artificial Sequence: Synthetic oligonucleotide
guucccgaugggcagccac

SEQ ID NO: 630749 - RNA, 19 nt, Artificial Sequence
  Description of Artificial Sequence: Synthetic oligonucleotide
cacaacggcgcuccagcug

SEQ ID NO: 630750 - RNA, 19 nt, Artificial Sequence
  Description of Artificial Sequence: Synthetic oligonucleotide
ccuggcacggcccucacug

SEQ ID NO: 630751 - RNA, 19 nt, Artificial Sequence
  Description of Artificial Sequence: Synthetic oligonucleotide
ggggaucagaccccagucc

SEQ ID NO: 630752 - RNA, 19 nt, Artificial Sequence
  Description of Artificial Sequence: Synthetic oligonucleotide
cagugaauuggaacaucga

SEQ ID NO: 630753 - RNA, 19 nt, Artificial Sequence
  Description of Artificial Sequence: Synthetic oligonucleotide
cuagugcccuuugcaaagc

SEQ ID NO: 630754 - RNA, 19 nt, Artificial Sequence
  Description of Artificial Sequence: Synthetic oligonucleotide
ucucccggagccguucagc

SEQ ID NO: 630755 - RNA, 19 nt, Artificial Sequence
  Description of Artificial Sequence: Synthetic oligonucleotide
gaguuggugguuggcucag

SEQ ID NO: 630756 - RNA, 19 nt, Artificial Sequence
  Description of Artificial Sequence: Synthetic oligonucleotide
cugggucgcacaguccucc

SEQ ID NO: 630757 - RNA, 19 nt, Artificial Sequence
  Description of Artificial Sequence: Synthetic oligonucleotide
ggucgcacaguccucccgc

SEQ ID NO: 630758 - RNA, 19 nt, Artificial Sequence
  Description of Artificial Sequence: Synthetic oligonucleotide
ggggccauaacccugguau

SEQ ID NO: 630759 - RNA, 19 nt, Artificial Sequence
  Description of Artificial Sequence: Synthetic oligonucleotide
uggcccgaguucccgcugc

SEQ ID NO: 630760 - RNA, 19 nt, Artificial Sequence
  Description of Artificial Sequence: Synthetic oligonucleotide
caagcucgaccucccgagc

SEQ ID NO: 630761 - RNA, 19 nt, Artificial Sequence
  Description of Artificial Sequence: Synthetic oligonucleotide
ccauaacccugguauuagg

SEQ ID NO: 630762 - RNA, 19 nt, Artificial Sequence
  Description of Artificial Sequence: Synthetic oligonucleotide
accggauuucuggcacacc

SEQ ID NO: 630763 - RNA, 19 nt, Artificial Sequence
  Description of Artificial Sequence: Synthetic oligonucleotide
agauaggccagcaguucga

SEQ ID NO: 630764 - RNA, 19 nt, Artificial Sequence
  Description of Artificial Sequence: Synthetic oligonucleotide
uggccucacucucauccau

SEQ ID NO: 630765 - RNA, 19 nt, Artificial Sequence
  Description of Artificial Sequence: Synthetic oligonucleotide
cuggcccagccacucaaug

SEQ ID NO: 630766 - RNA, 19 nt, Artificial Sequence
  Description of Artificial Sequence: Synthetic oligonucleotide
agcuucccuuccaggacac

SEQ ID NO: 630767 - RNA, 19 nt, Artificial Sequence
  Description of Artificial Sequence: Synthetic oligonucleotide
cuuugcaaagcccuagauu

SEQ ID NO: 630768 - RNA, 19 nt, Artificial Sequence
  Description of Artificial Sequence: Synthetic oligonucleotide
cccgcuguagcuccuggcg

SEQ ID NO: 630769 - RNA, 19 nt, Artificial Sequence
  Description of Artificial Sequence: Synthetic oligonucleotide
cucccagauaggccagcag

SEQ ID NO: 630770 - RNA, 19 nt, Artificial Sequence
  Description of Artificial Sequence: Synthetic oligonucleotide
cugcaagccccuggcacgg

SEQ ID NO: 630771 - RNA, 19 nt, Artificial Sequence
  Description of Artificial Sequence: Synthetic oligonucleotide
cucgaagggccacccgcag

SEQ ID NO: 630772 - RNA, 19 nt, Artificial Sequence
  Description of Artificial Sequence: Synthetic oligonucleotide
ugaagugguggggucggua

SEQ ID NO: 630773 - RNA, 19 nt, Artificial Sequence
  Description of Artificial Sequence: Synthetic oligonucleotide
ucggccagagucugacaau

SEQ ID NO: 630774 - RNA, 19 nt, Artificial Sequence
  Description of Artificial Sequence: Synthetic oligonucleotide
gccauaacccugguauuag

SEQ ID NO: 630775 - RNA, 19 nt, Artificial Sequence
  Description of Artificial Sequence: Synthetic oligonucleotide
uuucaguggcagugaucuc

SEQ ID NO: 630776 - RNA, 19 nt, Artificial Sequence
  Description of Artificial Sequence: Synthetic oligonucleotide
gcggucuccacccgaacug

SEQ ID NO: 630777 - RNA, 19 nt, Artificial Sequence
  Description of Artificial Sequence: Synthetic oligonucleotide
ucccgaugggcagccacug

SEQ ID NO: 630778 - RNA, 19 nt, Artificial Sequence
  Description of Artificial Sequence: Synthetic oligonucleotide
ggcagcacaacggcgcucc

SEQ ID NO: 630779 - RNA, 19 nt, Artificial Sequence
  Description of Artificial Sequence: Synthetic oligonucleotide
agucacaaggccaccugaa

SEQ ID NO: 630780 - RNA, 19 nt, Artificial Sequence
  Description of Artificial Sequence: Synthetic oligonucleotide
acaguccucccgcucucgu

SEQ ID NO: 630781 - RNA, 19 nt, Artificial Sequence
  Description of Artificial Sequence: Synthetic oligonucleotide
gagagcggucuccacccga

SEQ ID NO: 630782 - RNA, 19 nt, Artificial Sequence
  Description of Artificial Sequence: Synthetic oligonucleotide
ucgaggggucugaucuuuc

SEQ ID NO: 630783 - RNA, 19 nt, Artificial Sequence
  Description of Artificial Sequence: Synthetic oligonucleotide
cagccguggcccgaguucc

SEQ ID NO: 630784 - RNA, 19 nt, Artificial Sequence
  Description of Artificial Sequence: Synthetic oligonucleotide
uccacccgaacugcugcca

SEQ ID NO: 630785 - RNA, 19 nt, Artificial Sequence
  Description of Artificial Sequence: Synthetic oligonucleotide
ccguucagccuccuggcgg

SEQ ID NO: 630786 - RNA, 19 nt, Artificial Sequence
  Description of Artificial Sequence: Synthetic oligonucleotide
cccuagauuucaguggcag

SEQ ID NO: 630787 - RNA, 19 nt, Artificial Sequence
  Description of Artificial Sequence: Synthetic oligonucleotide
ggucacgaagcuucccuuc

SEQ ID NO: 630788 - RNA, 19 nt, Artificial Sequence
  Description of Artificial Sequence: Synthetic oligonucleotide
ggcucucucuggcuucagg

SEQ ID NO: 630789 - RNA, 19 nt, Artificial Sequence
  Description of Artificial Sequence: Synthetic oligonucleotide
acccguacuuuugcuggag

SEQ ID NO: 630790 - RNA, 19 nt, Artificial Sequence
  Description of Artificial Sequence: Synthetic oligonucleotide
gccgugggagggcaagugg

SEQ ID NO: 630791 - RNA, 19 nt, Artificial Sequence
  Description of Artificial Sequence: Synthetic oligonucleotide
agaucucaccggauuucug

SEQ ID NO: 630792 - RNA, 19 nt, Artificial Sequence
  Description of Artificial Sequence: Synthetic oligonucleotide
ugacacaccguggccucac

SEQ ID NO: 630793 - RNA, 19 nt, Artificial Sequence
  Description of Artificial Sequence: Synthetic oligonucleotide
gcaccuccggugcuguagg

SEQ ID NO: 630794 - RNA, 19 nt, Artificial Sequence
  Description of Artificial Sequence: Synthetic oligonucleotide
uccuagcccuguccuucca

SEQ ID NO: 630795 - RNA, 19 nt, Artificial Sequence
  Description of Artificial Sequence: Synthetic oligonucleotide
gagaucucaccggauuucu

SEQ ID NO: 630796 - RNA, 19 nt, Artificial Sequence
  Description of Artificial Sequence: Synthetic oligonucleotide
ccgugggagggcaaguggc

SEQ ID NO: 630797 - RNA, 19 nt, Artificial Sequence
  Description of Artificial Sequence: Synthetic oligonucleotide
ggaccggccacuguccgag

SEQ ID NO: 630798 - RNA, 19 nt, Artificial Sequence
  Description of Artificial Sequence: Synthetic oligonucleotide
gcugcucgucuccucgccg

SEQ ID NO: 630799 - RNA, 19 nt, Artificial Sequence
  Description of Artificial Sequence: Synthetic oligonucleotide
ggagugaaguggugggguc

SEQ ID NO: 630800 - RNA, 19 nt, Artificial Sequence
  Description of Artificial Sequence: Synthetic oligonucleotide
caguccucccgcucucgug

SEQ ID NO: 630801 - RNA, 19 nt, Artificial Sequence
  Description of Artificial Sequence: Synthetic oligonucleotide
ugguucagcuaggcccaag

SEQ ID NO: 630802 - RNA, 19 nt, Artificial Sequence
  Description of Artificial Sequence: Synthetic oligonucleotide
acucccagauaggccagca

SEQ ID NO: 630803 - RNA, 19 nt, Artificial Sequence
  Description of Artificial Sequence: Synthetic oligonucleotide
cucgaccucccgagcucgg

SEQ ID NO: 630804 - RNA, 19 nt, Artificial Sequence
  Description of Artificial Sequence: Synthetic oligonucleotide
gaaagggucggugguggcu

SEQ ID NO: 630805 - RNA, 19 nt, Artificial Sequence
  Description of Artificial Sequence: Synthetic oligonucleotide
uuggaacaucgaggggucu

SEQ ID NO: 630806 - RNA, 19 nt, Artificial Sequence
  Description of Artificial Sequence: Synthetic oligonucleotide
cguacuuuugcuggaggag

SEQ ID NO: 630807 - RNA, 19 nt, Artificial Sequence
  Description of Artificial Sequence: Synthetic oligonucleotide
ggagaucucaccggauuuc

SEQ ID NO: 630808 - RNA, 19 nt, Artificial Sequence
  Description of Artificial Sequence: Synthetic oligonucleotide
caccggauuucuggcacac

SEQ ID NO: 630809 - RNA, 19 nt, Artificial Sequence
  Description of Artificial Sequence: Synthetic oligonucleotide
cccguagggaccccucugg

SEQ ID NO: 630810 - RNA, 19 nt, Artificial Sequence
  Description of Artificial Sequence: Synthetic oligonucleotide
uccagccguggcccgaguu

SEQ ID NO: 630811 - RNA, 19 nt, Artificial Sequence
  Description of Artificial Sequence: Synthetic oligonucleotide
gcucacugccuuucuguac

SEQ ID NO: 630812 - RNA, 19 nt, Artificial Sequence
  Description of Artificial Sequence: Synthetic oligonucleotide
aucgaggggucugaucuuu

SEQ ID NO: 630813 - RNA, 19 nt, Artificial Sequence
  Description of Artificial Sequence: Synthetic oligonucleotide
guugggcccgcuggacacg

SEQ ID NO: 630814 - RNA, 19 nt, Artificial Sequence
  Description of Artificial Sequence: Synthetic oligonucleotide
cacaccguggccucacucu

SEQ ID NO: 630815 - RNA, 19 nt, Artificial Sequence
  Description of Artificial Sequence: Synthetic oligonucleotide
gggucgcacaguccucccg

SEQ ID NO: 630816 - RNA, 19 nt, Artificial Sequence
  Description of Artificial Sequence: Synthetic oligonucleotide
cucguggccagugccucug

SEQ ID NO: 630817 - RNA, 19 nt, Artificial Sequence
  Description of Artificial Sequence: Synthetic oligonucleotide
acccgcaaggcagcccggg

SEQ ID NO: 630818 - RNA, 19 nt, Artificial Sequence
  Description of Artificial Sequence: Synthetic oligonucleotide
gcgccgguacaucuggaug

SEQ ID NO: 630819 - RNA, 19 nt, Artificial Sequence
  Description of Artificial Sequence: Synthetic oligonucleotide
aagugaaaauggggccaua

SEQ ID NO: 630820 - RNA, 19 nt, Artificial Sequence
  Description of Artificial Sequence: Synthetic oligonucleotide
cucggucacgaagcuuccc

SEQ ID NO: 630821 - RNA, 19 nt, Artificial Sequence
  Description of Artificial Sequence: Synthetic oligonucleotide
cccugguauuaggagaggc

SEQ ID NO: 630822 - RNA, 19 nt, Artificial Sequence
  Description of Artificial Sequence: Synthetic oligonucleotide
cucucguggccagugccuc

SEQ ID NO: 630823 - RNA, 19 nt, Artificial Sequence
  Description of Artificial Sequence: Synthetic oligonucleotide
gcaccuuaaccucaucacu

SEQ ID NO: 630824 - RNA, 19 nt, Artificial Sequence
  Description of Artificial Sequence: Synthetic oligonucleotide
ggagagcggucuccacccg

SEQ ID NO: 630825 - RNA, 19 nt, Artificial Sequence
  Description of Artificial Sequence: Synthetic oligonucleotide
ggaacaucgaggggucuga

SEQ ID NO: 630826 - RNA, 19 nt, Artificial Sequence
  Description of Artificial Sequence: Synthetic oligonucleotide
gguuagccccuuucuuuuc

SEQ ID NO: 630827 - RNA, 19 nt, Artificial Sequence
  Description of Artificial Sequence: Synthetic oligonucleotide
gagcggucuccacccgaac

SEQ ID NO: 630828 - RNA, 19 nt, Artificial Sequence
  Description of Artificial Sequence: Synthetic oligonucleotide
ggaggaccggccacugucc

SEQ ID NO: 630829 - RNA, 19 nt, Artificial Sequence
  Description of Artificial Sequence: Synthetic oligonucleotide
gucacaaggccaccugaau

SEQ ID NO: 630830 - RNA, 19 nt, Artificial Sequence
  Description of Artificial Sequence: Synthetic oligonucleotide
gcccucacugacccgcaag

SEQ ID NO: 630831 - RNA, 19 nt, Artificial Sequence
  Description of Artificial Sequence: Synthetic oligonucleotide
agagcggucuccacccgaa

SEQ ID NO: 630832 - RNA, 19 nt, Artificial Sequence
  Description of Artificial Sequence: Synthetic oligonucleotide
cauccagaugcccagccuu

SEQ ID NO: 630833 - RNA, 19 nt, Artificial Sequence
  Description of Artificial Sequence: Synthetic oligonucleotide
ggcuugcagagcugggaca

SEQ ID NO: 630834 - RNA, 19 nt, Artificial Sequence
  Description of Artificial Sequence: Synthetic oligonucleotide
guuguguggcuagugcccu

SEQ ID NO: 630835 - RNA, 19 nt, Artificial Sequence
  Description of Artificial Sequence: Synthetic oligonucleotide
gcacaccucccauuugguc

SEQ ID NO: 630836 - RNA, 19 nt, Artificial Sequence
  Description of Artificial Sequence: Synthetic oligonucleotide
ccguacuuuugcuggagga

SEQ ID NO: 630837 - RNA, 19 nt, Artificial Sequence
  Description of Artificial Sequence: Synthetic oligonucleotide
cuuuucccgcuggagugga

SEQ ID NO: 630838 - RNA, 19 nt, Artificial Sequence
  Description of Artificial Sequence: Synthetic oligonucleotide
acacuguagcaaggccuca

SEQ ID NO: 630839 - RNA, 19 nt, Artificial Sequence
  Description of Artificial Sequence: Synthetic oligonucleotide
guccgagugggagggcccc

SEQ ID NO: 630840 - RNA, 19 nt, Artificial Sequence
  Description of Artificial Sequence: Synthetic oligonucleotide
gcgguaccgcugcagcucc

SEQ ID NO: 630841 - RNA, 19 nt, Artificial Sequence
  Description of Artificial Sequence: Synthetic oligonucleotide
gcaagccccuggcacggcc

SEQ ID NO: 630842 - RNA, 19 nt, Artificial Sequence
  Description of Artificial Sequence: Synthetic oligonucleotide
ccggccacuguccgagugg

SEQ ID NO: 630843 - RNA, 19 nt, Artificial Sequence
  Description of Artificial Sequence: Synthetic oligonucleotide
cucaaugccaaggguuugu

SEQ ID NO: 630844 - RNA, 19 nt, Artificial Sequence
  Description of Artificial Sequence: Synthetic oligonucleotide
ccugggacccaggugguug

SEQ ID NO: 630845 - RNA, 19 nt, Artificial Sequence
  Description of Artificial Sequence: Synthetic oligonucleotide
ggacacgcuguguggccug

SEQ ID NO: 630846 - RNA, 19 nt, Artificial Sequence
  Description of Artificial Sequence: Synthetic oligonucleotide
aguuucggccagagucuga

SEQ ID NO: 630847 - RNA, 19 nt, Artificial Sequence
  Description of Artificial Sequence: Synthetic oligonucleotide
agggucggugguggcuggg

SEQ ID NO: 630848 - RNA, 19 nt, Artificial Sequence
  Description of Artificial Sequence: Synthetic oligonucleotide
guggcccgaguucccgcug

SEQ ID NO: 630849 - RNA, 19 nt, Artificial Sequence
  Description of Artificial Sequence: Synthetic oligonucleotide
ccgcuggacacgcugugug

SEQ ID NO: 630850 - RNA, 19 nt, Artificial Sequence
  Description of Artificial Sequence: Synthetic oligonucleotide
aggugguuguguggcuagu

SEQ ID NO: 630851 - RNA, 19 nt, Artificial Sequence
  Description of Artificial Sequence: Synthetic oligonucleotide
ggccauaacccugguauua

SEQ ID NO: 630852 - RNA, 19 nt, Artificial Sequence
  Description of Artificial Sequence: Synthetic oligonucleotide
uggggucgguaggagccuc

SEQ ID NO: 630853 - RNA, 19 nt, Artificial Sequence
  Description of Artificial Sequence: Synthetic oligonucleotide
cucccgcucaaaggcagca

SEQ ID NO: 630854 - RNA, 19 nt, Artificial Sequence
  Description of Artificial Sequence: Synthetic oligonucleotide
ccuagcccuguccuuccac

SEQ ID NO: 630855 - RNA, 19 nt, Artificial Sequence
  Description of Artificial Sequence: Synthetic oligonucleotide
ccggauuucuggcacaccu

SEQ ID NO: 630856 - RNA, 19 nt, Artificial Sequence
  Description of Artificial Sequence: Synthetic oligonucleotide
ugcaagccccuggcacggc

SEQ ID NO: 630857 - RNA, 19 nt, Artificial Sequence
  Description of Artificial Sequence: Synthetic oligonucleotide
ccacccgaacugcugccag

SEQ ID NO: 630858 - RNA, 19 nt, Artificial Sequence
  Description of Artificial Sequence: Synthetic oligonucleotide
ccguagggaccccucuggc

SEQ ID NO: 630859 - RNA, 19 nt, Artificial Sequence
  Description of Artificial Sequence: Synthetic oligonucleotide
cccgcucaaaggcagcaca

SEQ ID NO: 630860 - RNA, 19 nt, Artificial Sequence
  Description of Artificial Sequence: Synthetic oligonucleotide
ugcuuggcagaggcccuuu

SEQ ID NO: 630861 - RNA, 19 nt, Artificial Sequence
  Description of Artificial Sequence: Synthetic oligonucleotide
cgcucucguggccagugcc

SEQ ID NO: 630862 - RNA, 19 nt, Artificial Sequence
  Description of Artificial Sequence: Synthetic oligonucleotide
ccucucgaagggccacccg

SEQ ID NO: 630863 - RNA, 19 nt, Artificial Sequence
  Description of Artificial Sequence: Synthetic oligonucleotide
gccacucaaugccaagggu

SEQ ID NO: 630864 - RNA, 19 nt, Artificial Sequence
  Description of Artificial Sequence: Synthetic oligonucleotide
cggauuucuggcacaccuc

SEQ ID NO: 630865 - RNA, 19 nt, Artificial Sequence
  Description of Artificial Sequence: Synthetic oligonucleotide
cccgaugggcagccacugg

SEQ ID NO: 630866 - RNA, 19 nt, Artificial Sequence
  Description of Artificial Sequence: Synthetic oligonucleotide
gacacaccguggccucacu

SEQ ID NO: 630867 - RNA, 19 nt, Artificial Sequence
  Description of Artificial Sequence: Synthetic oligonucleotide
cccuuugcaaagcccuaga

SEQ ID NO: 630868 - RNA, 19 nt, Artificial Sequence
  Description of Artificial Sequence: Synthetic oligonucleotide
ccaaggaacccguacuuuu

SEQ ID NO: 630869 - RNA, 19 nt, Artificial Sequence
  Description of Artificial Sequence: Synthetic oligonucleotide
gucgcacaguccucccgcu

SEQ ID NO: 630870 - RNA, 19 nt, Artificial Sequence
  Description of Artificial Sequence: Synthetic oligonucleotide
gggucgguaggagccucug

SEQ ID NO: 630871 - RNA, 19 nt, Artificial Sequence
  Description of Artificial Sequence: Synthetic oligonucleotide
ugucgguggcaggcacauc

SEQ ID NO: 630872 - RNA, 19 nt, Artificial Sequence
  Description of Artificial Sequence: Synthetic oligonucleotide
ccuagauuucaguggcagu

SEQ ID NO: 630873 - RNA, 19 nt, Artificial Sequence
  Description of Artificial Sequence: Synthetic oligonucleotide
gaacaucgaggggucugau

SEQ ID NO: 630874 - RNA, 19 nt, Artificial Sequence
  Description of Artificial Sequence: Synthetic oligonucleotide
ccugggucgcacaguccuc

SEQ ID NO: 630875 - RNA, 19 nt, Artificial Sequence
  Description of Artificial Sequence: Synthetic oligonucleotide
cgaccucccgagcucgggc

SEQ ID NO: 630876 - RNA, 19 nt, Artificial Sequence
  Description of Artificial Sequence: Synthetic oligonucleotide
cccugggucgcacaguccu

SEQ ID NO: 630877 - RNA, 19 nt, Artificial Sequence
  Description of Artificial Sequence: Synthetic oligonucleotide
cggccacuguccgaguggg

SEQ ID NO: 630878 - RNA, 19 nt, Artificial Sequence
  Description of Artificial Sequence: Synthetic oligonucleotide
ccucggcuggggccguggg

SEQ ID NO: 630879 - RNA, 19 nt, Artificial Sequence
  Description of Artificial Sequence: Synthetic oligonucleotide
agggaccccucuggcugga

SEQ ID NO: 630880 - RNA, 19 nt, Artificial Sequence
  Description of Artificial Sequence: Synthetic oligonucleotide
cgcugcucgucuccucgcc

SEQ ID NO: 630881 - RNA, 19 nt, Artificial Sequence
  Description of Artificial Sequence: Synthetic oligonucleotide
caucgaggggucugaucuu

SEQ ID NO: 630882 - RNA, 19 nt, Artificial Sequence
  Description of Artificial Sequence: Synthetic oligonucleotide
ucccgcucucguggccagu

SEQ ID NO: 630883 - RNA, 19 nt, Artificial Sequence
  Description of Artificial Sequence: Synthetic oligonucleotide
gcacaacggcgcuccagcu

SEQ ID NO: 630884 - RNA, 19 nt, Artificial Sequence
  Description of Artificial Sequence: Synthetic oligonucleotide
gggccauaacccugguauu

SEQ ID NO: 630885 - RNA, 19 nt, Artificial Sequence
  Description of Artificial Sequence: Synthetic oligonucleotide
gcucucguggccagugccu

SEQ ID NO: 630886 - RNA, 19 nt, Artificial Sequence
  Description of Artificial Sequence: Synthetic oligonucleotide
gcaagcucacgggccucca

SEQ ID NO: 630887 - RNA, 19 nt, Artificial Sequence
  Description of Artificial Sequence: Synthetic oligonucleotide
ccgguugcgccgguacauc

SEQ ID NO: 630888 - RNA, 19 nt, Artificial Sequence
  Description of Artificial Sequence: Synthetic oligonucleotide
ccuggagugcucaguggau

SEQ ID NO: 630889 - RNA, 19 nt, Artificial Sequence
  Description of Artificial Sequence: Synthetic oligonucleotide
cccgcuggaguggacagcu

SEQ ID NO: 630890 - RNA, 19 nt, Artificial Sequence
  Description of Artificial Sequence: Synthetic oligonucleotide
gaccggccacuguccgagu

SEQ ID NO: 630891 - RNA, 19 nt, Artificial Sequence
  Description of Artificial Sequence: Synthetic oligonucleotide
caccuccggugcuguaggu

SEQ ID NO: 630892 - RNA, 19 nt, Artificial Sequence
  Description of Artificial Sequence: Synthetic oligonucleotide
cguucagccuccuggcggu

SEQ ID NO: 630893 - RNA, 19 nt, Artificial Sequence
  Description of Artificial Sequence: Synthetic oligonucleotide
ggucuccacccgaacugcu

SEQ ID NO: 630894 - RNA, 19 nt, Artificial Sequence
  Description of Artificial Sequence: Synthetic oligonucleotide
cguagggaccccucuggcu

SEQ ID NO: 630895 - RNA, 19 nt, Artificial Sequence
  Description of Artificial Sequence: Synthetic oligonucleotide
ccgcuggaguggacagcug

SEQ ID NO: 630896 - RNA, 19 nt, Artificial Sequence
  Description of Artificial Sequence: Synthetic oligonucleotide
gggacccaggugguugugu

SEQ ID NO: 630897 - RNA, 19 nt, Artificial Sequence
  Description of Artificial Sequence: Synthetic oligonucleotide
ggcccucacugacccgcaa

SEQ ID NO: 630898 - RNA, 19 nt, Artificial Sequence
  Description of Artificial Sequence: Synthetic oligonucleotide
gggcucccggaguccugca

SEQ ID NO: 630899 - RNA, 19 nt, Artificial Sequence
  Description of Artificial Sequence: Synthetic oligonucleotide
caacggcgcuccagcugcu

SEQ ID NO: 630900 - RNA, 19 nt, Artificial Sequence
  Description of Artificial Sequence: Synthetic oligonucleotide
gccgguugcgccgguacau

SEQ ID NO: 630901 - RNA, 19 nt, Artificial Sequence
  Description of Artificial Sequence: Synthetic oligonucleotide
gccccguagggaccccucu

SEQ ID NO: 630902 - RNA, 19 nt, Artificial Sequence
  Description of Artificial Sequence: Synthetic oligonucleotide
ccccaaggaacccguacuu

SEQ ID NO: 630903 - RNA, 19 nt, Artificial Sequence
  Description of Artificial Sequence: Synthetic oligonucleotide
gugccucugccgggcccca

SEQ ID NO: 630904 - RNA, 19 nt, Artificial Sequence
  Description of Artificial Sequence: Synthetic oligonucleotide
ggagauggguuagccccuu

SEQ ID NO: 630905 - RNA, 19 nt, Artificial Sequence
  Description of Artificial Sequence: Synthetic oligonucleotide
ggcccgaguucccgcugcu

SEQ ID NO: 630906 - RNA, 19 nt, Artificial Sequence
  Description of Artificial Sequence: Synthetic oligonucleotide
ccguggccucacucucauc

SEQ ID NO: 630907 - RNA, 19 nt, Artificial Sequence
  Description of Artificial Sequence: Synthetic oligonucleotide
gggaccccucuggcuggac

SEQ ID NO: 630908 - RNA, 19 nt, Artificial Sequence
  Description of Artificial Sequence: Synthetic oligonucleotide
ggggucgguaggagccucu

SEQ ID NO: 630909 - RNA, 19 nt, Artificial Sequence
  Description of Artificial Sequence: Synthetic oligonucleotide
cgguugcgccgguacaucu

SEQ ID NO: 630910 - RNA, 19 nt, Artificial Sequence
  Description of Artificial Sequence: Synthetic oligonucleotide
cguggcccgaguucccgcu

SEQ ID NO: 630911 - RNA, 19 nt, Artificial Sequence
  Description of Artificial Sequence: Synthetic oligonucleotide
cuccagccguggcccgagu

SEQ ID NO: 630912 - RNA, 19 nt, Artificial Sequence
  Description of Artificial Sequence: Synthetic oligonucleotide
cacgggccuccagcuccaa

SEQ ID NO: 630913 - RNA, 19 nt, Artificial Sequence
  Description of Artificial Sequence: Synthetic oligonucleotide
cgagugggagggccccgua

SEQ ID NO: 630914 - RNA, 19 nt, Artificial Sequence
  Description of Artificial Sequence: Synthetic oligonucleotide
gccccucggcuggggccgu

SEQ ID NO: 630915 - RNA, 19 nt, Artificial Sequence
  Description of Artificial Sequence: Synthetic oligonucleotide
cggagccguucagccuccu

SEQ ID NO: 630916 - RNA, 19 nt, Artificial Sequence
  Description of Artificial Sequence: Synthetic oligonucleotide
aagaugcaaacauugaagc

SEQ ID NO: 630917 - RNA, 19 nt, Artificial Sequence
  Description of Artificial Sequence: Synthetic oligonucleotide
uguauugccagucagaggc

SEQ ID NO: 630918 - RNA, 19 nt, Artificial Sequence
  Description of Artificial Sequence: Synthetic oligonucleotide
guugcuauuaaccuccucg

SEQ ID NO: 630919 - RNA, 19 nt, Artificial Sequence
  Description of Artificial Sequence: Synthetic oligonucleotide
aauggcccgguucuuaucc

SEQ ID NO: 630920 - RNA, 19 nt, Artificial Sequence
  Description of Artificial Sequence: Synthetic oligonucleotide
acuaguaaugcuugagugc

SEQ ID NO: 630921 - RNA, 19 nt, Artificial Sequence
  Description of Artificial Sequence: Synthetic oligonucleotide
auuguggcauuucuuacgc

SEQ ID NO: 630922 - RNA, 19 nt, Artificial Sequence
  Description of Artificial Sequence: Synthetic oligonucleotide
auacauacuccacuaaggg

SEQ ID NO: 630923 - RNA, 19 nt, Artificial Sequence
  Description of Artificial Sequence: Synthetic oligonucleotide
cauuguaaaucucagcugc

SEQ ID NO: 630924 - RNA, 19 nt, Artificial Sequence
  Description of Artificial Sequence: Synthetic oligonucleotide
uuugacacuccugagagcc

SEQ ID NO: 630925 - RNA, 19 nt, Artificial Sequence
  Description of Artificial Sequence: Synthetic oligonucleotide
accuuggaacauuauauac

SEQ ID NO: 630926 - RNA, 19 nt, Artificial Sequence
  Description of Artificial Sequence: Synthetic oligonucleotide
cuuaaauacagcccagacc

SEQ ID NO: 630927 - RNA, 19 nt, Artificial Sequence
  Description of Artificial Sequence: Synthetic oligonucleotide
aaaugacuaagguggguag

SEQ ID NO: 630928 - RNA, 19 nt, Artificial Sequence
  Description of Artificial Sequence: Synthetic oligonucleotide
ucaucuggaucaaagguca

SEQ ID NO: 630929 - RNA, 19 nt, Artificial Sequence
  Description of Artificial Sequence: Synthetic oligonucleotide
cugguuguugcuauuaacc

SEQ ID NO: 630930 - RNA, 19 nt, Artificial Sequence
  Description of Artificial Sequence: Synthetic oligonucleotide
agauagguaagcuuggagu

SEQ ID NO: 630931 - RNA, 19 nt, Artificial Sequence
  Description of Artificial Sequence: Synthetic oligonucleotide
uguggcauuucuuacgcag

SEQ ID NO: 630932 - RNA, 19 nt, Artificial Sequence
  Description of Artificial Sequence: Synthetic oligonucleotide
aaugccgggguucucgggg

SEQ ID NO: 630933 - RNA, 19 nt, Artificial Sequence
  Description of Artificial Sequence: Synthetic oligonucleotide
ugugcugugccucucgaag

SEQ ID NO: 630934 - RNA, 19 nt, Artificial Sequence
  Description of Artificial Sequence: Synthetic oligonucleotide
cuaguaaugcuugagugcc

SEQ ID NO: 630935 - RNA, 19 nt, Artificial Sequence
  Description of Artificial Sequence: Synthetic oligonucleotide
caccucuuggaauacaucc

SEQ ID NO: 630936 - RNA, 19 nt, Artificial Sequence
  Description of Artificial Sequence: Synthetic oligonucleotide
guuucggaagggcacaugg

SEQ ID NO: 630937 - RNA, 19 nt, Artificial Sequence
  Description of Artificial Sequence: Synthetic oligonucleotide
aucguauaugucuugccag

SEQ ID NO: 630938 - RNA, 19 nt, Artificial Sequence
  Description of Artificial Sequence: Synthetic oligonucleotide
agguugguaaacucugugg

SEQ ID NO: 630939 - RNA, 19 nt, Artificial Sequence
  Description of Artificial Sequence: Synthetic oligonucleotide
gacucgugcaaucacccgg

SEQ ID NO: 630940 - RNA, 19 nt, Artificial Sequence
  Description of Artificial Sequence: Synthetic oligonucleotide
cuccgaaccagccaggucc

SEQ ID NO: 630941 - RNA, 19 nt, Artificial Sequence
  Description of Artificial Sequence: Synthetic oligonucleotide
cauuguggcauuucuuacg

SEQ ID NO: 630942 - RNA, 19 nt, Artificial Sequence
  Description of Artificial Sequence: Synthetic oligonucleotide
aaugagcagagcaugugag

SEQ ID NO: 630943 - RNA, 19 nt, Artificial Sequence
  Description of Artificial Sequence: Synthetic oligonucleotide
agaucgaacccucucagca

SEQ ID NO: 630944 - RNA, 19 nt, Artificial Sequence
  Description of Artificial Sequence: Synthetic oligonucleotide
uucggauggagcccgggcg

SEQ ID NO: 630945 - RNA, 19 nt, Artificial Sequence
  Description of Artificial Sequence: Synthetic oligonucleotide
uguaaaucucagcugcacu

SEQ ID NO: 630946 - RNA, 19 nt, Artificial Sequence
  Description of Artificial Sequence: Synthetic oligonucleotide
acauaaaguugcccacugc

SEQ ID NO: 630947 - RNA, 19 nt, Artificial Sequence
  Description of Artificial Sequence: Synthetic oligonucleotide
aacucagucagcccuggca

SEQ ID NO: 630948 - RNA, 19 nt, Artificial Sequence
  Description of Artificial Sequence: Synthetic oligonucleotide
cacuaguaaugcuugagug

SEQ ID NO: 630949 - RNA, 19 nt, Artificial Sequence
  Description of Artificial Sequence: Synthetic oligonucleotide
auuaaugccgggguucucg

SEQ ID NO: 630950 - RNA, 19 nt, Artificial Sequence
  Description of Artificial Sequence: Synthetic oligonucleotide
uggcacauaaaguugccca

SEQ ID NO: 630951 - RNA, 19 nt, Artificial Sequence
  Description of Artificial Sequence: Synthetic oligonucleotide
aaaaugacuaaggugggua

SEQ ID NO: 630952 - RNA, 19 nt, Artificial Sequence
  Description of Artificial Sequence: Synthetic oligonucleotide
ucugccagccuuaaauaca

SEQ ID NO: 630953 - RNA, 19 nt, Artificial Sequence
  Description of Artificial Sequence: Synthetic oligonucleotide
ucuuuaagcaccugccgcu

SEQ ID NO: 630954 - RNA, 19 nt, Artificial Sequence
  Description of Artificial Sequence: Synthetic oligonucleotide
ucgucaucuggaucaaagg

SEQ ID NO: 630955 - RNA, 19 nt, Artificial Sequence
  Description of Artificial Sequence: Synthetic oligonucleotide
gucucugaggaccucauug

SEQ ID NO: 630956 - RNA, 19 nt, Artificial Sequence
  Description of Artificial Sequence: Synthetic oligonucleotide
ugguuguugcuauuaaccu

SEQ ID NO: 630957 - RNA, 19 nt, Artificial Sequence
  Description of Artificial Sequence: Synthetic oligonucleotide
aacgcagggcagcaaugac

SEQ ID NO: 630958 - RNA, 19 nt, Artificial Sequence
  Description of Artificial Sequence: Synthetic oligonucleotide
uaaaguugcccacugccau

SEQ ID NO: 630959 - RNA, 19 nt, Artificial Sequence
  Description of Artificial Sequence: Synthetic oligonucleotide
ucguauaugucuugccagc

SEQ ID NO: 630960 - RNA, 19 nt, Artificial Sequence
  Description of Artificial Sequence: Synthetic oligonucleotide
ucuuggaauacauccugcu

SEQ ID NO: 630961 - RNA, 19 nt, Artificial Sequence
  Description of Artificial Sequence: Synthetic oligonucleotide
uacaccuuggaacauuaua

SEQ ID NO: 630962 - RNA, 19 nt, Artificial Sequence
  Description of Artificial Sequence: Synthetic oligonucleotide
gguaaugagggccugcacc

SEQ ID NO: 630963 - RNA, 19 nt, Artificial Sequence
  Description of Artificial Sequence: Synthetic oligonucleotide
uggaauacauccugcugug

SEQ ID NO: 630964 - RNA, 19 nt, Artificial Sequence
  Description of Artificial Sequence: Synthetic oligonucleotide
uugcuauuaaccuccucga

SEQ ID NO: 630965 - RNA, 19 nt, Artificial Sequence
  Description of Artificial Sequence: Synthetic oligonucleotide
cuuggaugacuccaccucc

SEQ ID NO: 630966 - RNA, 19 nt, Artificial Sequence
  Description of Artificial Sequence: Synthetic oligonucleotide
ugcggcgggacccaggacc

SEQ ID NO: 630967 - RNA, 19 nt, Artificial Sequence
  Description of Artificial Sequence: Synthetic oligonucleotide
agagauguucuugcucucc

SEQ ID NO: 630968 - RNA, 19 nt, Artificial Sequence
  Description of Artificial Sequence: Synthetic oligonucleotide
uggaguuucggaagggcac

SEQ ID NO: 630969 - RNA, 19 nt, Artificial Sequence
  Description of Artificial Sequence: Synthetic oligonucleotide
uuucuucggauggagcccg

SEQ ID NO: 630970 - RNA, 19 nt, Artificial Sequence
  Description of Artificial Sequence: Synthetic oligonucleotide
auaugucuugccagcaccc

SEQ ID NO: 630971 - RNA, 19 nt, Artificial Sequence
  Description of Artificial Sequence: Synthetic oligonucleotide
uuaaugccgggguucucgg

SEQ ID NO: 630972 - RNA, 19 nt, Artificial Sequence
  Description of Artificial Sequence: Synthetic oligonucleotide
acacucugcaccuggaacu

SEQ ID NO: 630973 - RNA, 19 nt, Artificial Sequence
  Description of Artificial Sequence: Synthetic oligonucleotide
uuguauugccagucagagg

SEQ ID NO: 630974 - RNA, 19 nt, Artificial Sequence
  Description of Artificial Sequence: Synthetic oligonucleotide
guuguuguggccaaacuca

SEQ ID NO: 630975 - RNA, 19 nt, Artificial Sequence
  Description of Artificial Sequence: Synthetic oligonucleotide
agggcuccuauauacaccu

SEQ ID NO: 630976 - RNA, 19 nt, Artificial Sequence
  Description of Artificial Sequence: Synthetic oligonucleotide
augacuaagguggguaggg

SEQ ID NO: 630977 - RNA, 19 nt, Artificial Sequence
  Description of Artificial Sequence: Synthetic oligonucleotide
aagguggguagggagaaug

SEQ ID NO: 630978 - RNA, 19 nt, Artificial Sequence
  Description of Artificial Sequence: Synthetic oligonucleotide
gaagccaucgaugcaggag

SEQ ID NO: 630979 - RNA, 19 nt, Artificial Sequence
  Description of Artificial Sequence: Synthetic oligonucleotide
ugaugugcugugccucucg

SEQ ID NO: 630980 - RNA, 19 nt, Artificial Sequence
  Description of Artificial Sequence: Synthetic oligonucleotide
ugguaaacucuguggugcg

SEQ ID NO: 630981 - RNA, 19 nt, Artificial Sequence
  Description of Artificial Sequence: Synthetic oligonucleotide
ugagggcuccuauauacac

SEQ ID NO: 630982 - RNA, 19 nt, Artificial Sequence
  Description of Artificial Sequence: Synthetic oligonucleotide
cuuggaauacauccugcug

SEQ ID NO: 630983 - RNA, 19 nt, Artificial Sequence
  Description of Artificial Sequence: Synthetic oligonucleotide
caccauuagagucuugcug

SEQ ID NO: 630984 - RNA, 19 nt, Artificial Sequence
  Description of Artificial Sequence: Synthetic oligonucleotide
aaucucagcugcacugacg

SEQ ID NO: 630985 - RNA, 19 nt, Artificial Sequence
  Description of Artificial Sequence: Synthetic oligonucleotide
cuagagccaccacagacac

SEQ ID NO: 630986 - RNA, 19 nt, Artificial Sequence
  Description of Artificial Sequence: Synthetic oligonucleotide
auuucuuacgcagcugcag

SEQ ID NO: 630987 - RNA, 19 nt, Artificial Sequence
  Description of Artificial Sequence: Synthetic oligonucleotide
uuucggaagggcacauggc

SEQ ID NO: 630988 - RNA, 19 nt, Artificial Sequence
  Description of Artificial Sequence: Synthetic oligonucleotide
agcuuugacacuccugaga

SEQ ID NO: 630989 - RNA, 19 nt, Artificial Sequence
  Description of Artificial Sequence: Synthetic oligonucleotide
cuaaccccuagcugguucc

SEQ ID NO: 630990 - RNA, 19 nt, Artificial Sequence
  Description of Artificial Sequence: Synthetic oligonucleotide
uccccacuaguaaugcuug

SEQ ID NO: 630991 - RNA, 19 nt, Artificial Sequence
  Description of Artificial Sequence: Synthetic oligonucleotide
gcuuucuucggauggagcc

SEQ ID NO: 630992 - RNA, 19 nt, Artificial Sequence
  Description of Artificial Sequence: Synthetic oligonucleotide
acaccuuggaacauuauau

SEQ ID NO: 630993 - RNA, 19 nt, Artificial Sequence
  Description of Artificial Sequence: Synthetic oligonucleotide
ugacuggccggacucgugc

SEQ ID NO: 630994 - RNA, 19 nt, Artificial Sequence
  Description of Artificial Sequence: Synthetic oligonucleotide
ggugagggcuccuauauac

SEQ ID NO: 630995 - RNA, 19 nt, Artificial Sequence
  Description of Artificial Sequence: Synthetic oligonucleotide
cagauagguaagcuuggag

SEQ ID NO: 630996 - RNA, 19 nt, Artificial Sequence
  Description of Artificial Sequence: Synthetic oligonucleotide
uccaucguauaugucuugc

SEQ ID NO: 630997 - RNA, 19 nt, Artificial Sequence
  Description of Artificial Sequence: Synthetic oligonucleotide
agcaucugcccaugugugg

SEQ ID NO: 630998 - RNA, 19 nt, Artificial Sequence
  Description of Artificial Sequence: Synthetic oligonucleotide
uguugguugcggugucugg

SEQ ID NO: 630999 - RNA, 19 nt, Artificial Sequence
  Description of Artificial Sequence: Synthetic oligonucleotide
gucgucaucuggaucaaag

SEQ ID NO: 631000 - RNA, 19 nt, Artificial Sequence
  Description of Artificial Sequence: Synthetic oligonucleotide
agcauugguugccucaggu

SEQ ID NO: 631001 - RNA, 19 nt, Artificial Sequence
  Description of Artificial Sequence: Synthetic oligonucleotide
agcucauuguggcauuucu

SEQ ID NO: 631002 - RNA, 19 nt, Artificial Sequence
  Description of Artificial Sequence: Synthetic oligonucleotide
cucugccagccuuaaauac

SEQ ID NO: 631003 - RNA, 19 nt, Artificial Sequence
  Description of Artificial Sequence: Synthetic oligonucleotide
ugcggugucuggcaagcug

SEQ ID NO: 631004 - RNA, 19 nt, Artificial Sequence
  Description of Artificial Sequence: Synthetic oligonucleotide
aguucccggcgguacuugc

SEQ ID NO: 631005 - RNA, 19 nt, Artificial Sequence
  Description of Artificial Sequence: Synthetic oligonucleotide
cacccgucugaccauaagc

SEQ ID NO: 631006 - RNA, 19 nt, Artificial Sequence
  Description of Artificial Sequence: Synthetic oligonucleotide
uaaugcuugagugccuaga

SEQ ID NO: 631007 - RNA, 19 nt, Artificial Sequence
  Description of Artificial Sequence: Synthetic oligonucleotide
cacgcuccgaaccagccag

SEQ ID NO: 631008 - RNA, 19 nt, Artificial Sequence
  Description of Artificial Sequence: Synthetic oligonucleotide
ugcccacacgcuccgaacc

SEQ ID NO: 631009 - RNA, 19 nt, Artificial Sequence
  Description of Artificial Sequence: Synthetic oligonucleotide
uuggugacuggccggacuc

SEQ ID NO: 631010 - RNA, 19 nt, Artificial Sequence
  Description of Artificial Sequence: Synthetic oligonucleotide
cagugaucuguugaugugc

SEQ ID NO: 631011 - RNA, 19 nt, Artificial Sequence
  Description of Artificial Sequence: Synthetic oligonucleotide
ugugcggcgggacccagga

SEQ ID NO: 631012 - RNA, 19 nt, Artificial Sequence
  Description of Artificial Sequence: Synthetic oligonucleotide
ucucagcaaacuugaggga

SEQ ID NO: 631013 - RNA, 19 nt, Artificial Sequence
  Description of Artificial Sequence: Synthetic oligonucleotide
cauuagagucuugcugucg

SEQ ID NO: 631014 - RNA, 19 nt, Artificial Sequence
  Description of Artificial Sequence: Synthetic oligonucleotide
gaaggcgagugccuucagc

SEQ ID NO: 631015 - RNA, 19 nt, Artificial Sequence
  Description of Artificial Sequence: Synthetic oligonucleotide
uauuaaccuccucgauggc

SEQ ID NO: 631016 - RNA, 19 nt, Artificial Sequence
  Description of Artificial Sequence: Synthetic oligonucleotide
agguaaugagggccugcac

SEQ ID NO: 631017 - RNA, 19 nt, Artificial Sequence
  Description of Artificial Sequence: Synthetic oligonucleotide
cucagcugcacugacggug

SEQ ID NO: 631018 - RNA, 19 nt, Artificial Sequence
  Description of Artificial Sequence: Synthetic oligonucleotide
cugauuaaugccgggguuc

SEQ ID NO: 631019 - RNA, 19 nt, Artificial Sequence
  Description of Artificial Sequence: Synthetic oligonucleotide
ugcuauuaaccuccucgau

SEQ ID NO: 631020 - RNA, 19 nt, Artificial Sequence
  Description of Artificial Sequence: Synthetic oligonucleotide
cugacuugcccacacgcuc

SEQ ID NO: 631021 - RNA, 19 nt, Artificial Sequence
  Description of Artificial Sequence: Synthetic oligonucleotide
guagggagaaugccuggug

SEQ ID NO: 631022 - RNA, 19 nt, Artificial Sequence
  Description of Artificial Sequence: Synthetic oligonucleotide
uugguugcggugucuggca

SEQ ID NO: 631023 - RNA, 19 nt, Artificial Sequence
  Description of Artificial Sequence: Synthetic oligonucleotide
uccccuccaucguauaugu

SEQ ID NO: 631024 - RNA, 19 nt, Artificial Sequence
  Description of Artificial Sequence: Synthetic oligonucleotide
cuuugacacuccugagagc

SEQ ID NO: 631025 - RNA, 19 nt, Artificial Sequence
  Description of Artificial Sequence: Synthetic oligonucleotide
gcugucgccacugagggag

SEQ ID NO: 631026 - RNA, 19 nt, Artificial Sequence
  Description of Artificial Sequence: Synthetic oligonucleotide
acuaagguggguagggaga

SEQ ID NO: 631027 - RNA, 19 nt, Artificial Sequence
  Description of Artificial Sequence: Synthetic oligonucleotide
agccucaccagcucauugu

SEQ ID NO: 631028 - RNA, 19 nt, Artificial Sequence
  Description of Artificial Sequence: Synthetic oligonucleotide
guugguugcggugucuggc

SEQ ID NO: 631029 - RNA, 19 nt, Artificial Sequence
  Description of Artificial Sequence: Synthetic oligonucleotide
cuugagugccuagagccac

SEQ ID NO: 631030 - RNA, 19 nt, Artificial Sequence
  Description of Artificial Sequence: Synthetic oligonucleotide
uucaacuucccuggagacu

SEQ ID NO: 631031 - RNA, 19 nt, Artificial Sequence
  Description of Artificial Sequence: Synthetic oligonucleotide
cagguucucgugcacugcc

SEQ ID NO: 631032 - RNA, 19 nt, Artificial Sequence
  Description of Artificial Sequence: Synthetic oligonucleotide
guaaugagggccugcaccu

SEQ ID NO: 631033 - RNA, 19 nt, Artificial Sequence
  Description of Artificial Sequence: Synthetic oligonucleotide
ucaauggcccgguucuuau

SEQ ID NO: 631034 - RNA, 19 nt, Artificial Sequence
  Description of Artificial Sequence: Synthetic oligonucleotide
gagcccguuguagucauug

SEQ ID NO: 631035 - RNA, 19 nt, Artificial Sequence
  Description of Artificial Sequence: Synthetic oligonucleotide
uuacgcagcugcaguuccc

SEQ ID NO: 631036 - RNA, 19 nt, Artificial Sequence
  Description of Artificial Sequence: Synthetic oligonucleotide
ucgggucugggacucgcug

SEQ ID NO: 631037 - RNA, 19 nt, Artificial Sequence
  Description of Artificial Sequence: Synthetic oligonucleotide
guaaugcuugagugccuag

SEQ ID NO: 631038 - RNA, 19 nt, Artificial Sequence
  Description of Artificial Sequence: Synthetic oligonucleotide
uucucgugcacugccuuca

SEQ ID NO: 631039 - RNA, 19 nt, Artificial Sequence
  Description of Artificial Sequence: Synthetic oligonucleotide
uccugguuguugcuauuaa

SEQ ID NO: 631040 - RNA, 19 nt, Artificial Sequence
  Description of Artificial Sequence: Synthetic oligonucleotide
ucgauggccuggccaaucu

SEQ ID NO: 631041 - RNA, 19 nt, Artificial Sequence
  Description of Artificial Sequence: Synthetic oligonucleotide
cugaggaccucauuguaaa

SEQ ID NO: 631042 - RNA, 19 nt, Artificial Sequence
  Description of Artificial Sequence: Synthetic oligonucleotide
uaguaaugcuugagugccu

SEQ ID NO: 631043 - RNA, 19 nt, Artificial Sequence
  Description of Artificial Sequence: Synthetic oligonucleotide
cagaucgaacccucucagc

SEQ ID NO: 631044 - RNA, 19 nt, Artificial Sequence
  Description of Artificial Sequence: Synthetic oligonucleotide
cuucggauggagcccgggc

SEQ ID NO: 631045 - RNA, 19 nt, Artificial Sequence
  Description of Artificial Sequence: Synthetic oligonucleotide
gcuccuauauacaccuugg

SEQ ID NO: 631046 - RNA, 19 nt, Artificial Sequence
  Description of Artificial Sequence: Synthetic oligonucleotide
aucgaugcaggagguaaug

SEQ ID NO: 631047 - RNA, 19 nt, Artificial Sequence
  Description of Artificial Sequence: Synthetic oligonucleotide
ccuuaaauacagcccagac

SEQ ID NO: 631048 - RNA, 19 nt, Artificial Sequence
  Description of Artificial Sequence: Synthetic oligonucleotide
uccacagaucgaacccucu

SEQ ID NO: 631049 - RNA, 19 nt, Artificial Sequence
  Description of Artificial Sequence: Synthetic oligonucleotide
ucuuacgcagcugcaguuc

SEQ ID NO: 631050 - RNA, 19 nt, Artificial Sequence
  Description of Artificial Sequence: Synthetic oligonucleotide
uggugucaggcagaugagc

SEQ ID NO: 631051 - RNA, 19 nt, Artificial Sequence
  Description of Artificial Sequence: Synthetic oligonucleotide
ggagcuguguucguucagg

SEQ ID NO: 631052 - RNA, 19 nt, Artificial Sequence
  Description of Artificial Sequence: Synthetic oligonucleotide
cacagaucgaacccucuca

SEQ ID NO: 631053 - RNA, 19 nt, Artificial Sequence
  Description of Artificial Sequence: Synthetic oligonucleotide
uccgaaccagccaggucca

SEQ ID NO: 631054 - RNA, 19 nt, Artificial Sequence
  Description of Artificial Sequence: Synthetic oligonucleotide
gaucgaacccucucagcaa

SEQ ID NO: 631055 - RNA, 19 nt, Artificial Sequence
  Description of Artificial Sequence: Synthetic oligonucleotide
ccuuggaacauuauauaca

SEQ ID NO: 631056 - RNA, 19 nt, Artificial Sequence
  Description of Artificial Sequence: Synthetic oligonucleotide
uggugcggaggccugugcu

SEQ ID NO: 631057 - RNA, 19 nt, Artificial Sequence
  Description of Artificial Sequence: Synthetic oligonucleotide
uggaugacuccaccuccac

SEQ ID NO: 631058 - RNA, 19 nt, Artificial Sequence
  Description of Artificial Sequence: Synthetic oligonucleotide
augucuugccagcacccgu

SEQ ID NO: 631059 - RNA, 19 nt, Artificial Sequence
  Description of Artificial Sequence: Synthetic oligonucleotide
ucguucagguugguaaacu

SEQ ID NO: 631060 - RNA, 19 nt, Artificial Sequence
  Description of Artificial Sequence: Synthetic oligonucleotide
aggacccaacuccacagau

SEQ ID NO: 631061 - RNA, 19 nt, Artificial Sequence
  Description of Artificial Sequence: Synthetic oligonucleotide
agugucucacugguguucu

SEQ ID NO: 631062 - RNA, 19 nt, Artificial Sequence
  Description of Artificial Sequence: Synthetic oligonucleotide
uucuuacgcagcugcaguu

SEQ ID NO: 631063 - RNA, 19 nt, Artificial Sequence
  Description of Artificial Sequence: Synthetic oligonucleotide
ggcacauaaaguugcccac

SEQ ID NO: 631064 - RNA, 19 nt, Artificial Sequence
  Description of Artificial Sequence: Synthetic oligonucleotide
guugcggugucuggcaagc

SEQ ID NO: 631065 - RNA, 19 nt, Artificial Sequence
  Description of Artificial Sequence: Synthetic oligonucleotide
ugcucucccuaaccccuag

SEQ ID NO: 631066 - RNA, 19 nt, Artificial Sequence
  Description of Artificial Sequence: Synthetic oligonucleotide
acuugagggaguacagugu

SEQ ID NO: 631067 - RNA, 19 nt, Artificial Sequence
  Description of Artificial Sequence: Synthetic oligonucleotide
gacacucgcuuccuucuga

SEQ ID NO: 631068 - RNA, 19 nt, Artificial Sequence
  Description of Artificial Sequence: Synthetic oligonucleotide
uguugcuauuaaccuccuc

SEQ ID NO: 631069 - RNA, 19 nt, Artificial Sequence
  Description of Artificial Sequence: Synthetic oligonucleotide
uucguucagguugguaaac

SEQ ID NO: 631070 - RNA, 19 nt, Artificial Sequence
  Description of Artificial Sequence: Synthetic oligonucleotide
acauggcccugucgggaac

SEQ ID NO: 631071 - RNA, 19 nt, Artificial Sequence
  Description of Artificial Sequence: Synthetic oligonucleotide
ucccuaaccccuagcuggu

SEQ ID NO: 631072 - RNA, 19 nt, Artificial Sequence
  Description of Artificial Sequence: Synthetic oligonucleotide
caugugugggaguucugca

SEQ ID NO: 631073 - RNA, 19 nt, Artificial Sequence
  Description of Artificial Sequence: Synthetic oligonucleotide
aguaaugcuugagugccua

SEQ ID NO: 631074 - RNA, 19 nt, Artificial Sequence
  Description of Artificial Sequence: Synthetic oligonucleotide
ugacuaagguggguaggga

SEQ ID NO: 631075 - RNA, 19 nt, Artificial Sequence
  Description of Artificial Sequence: Synthetic oligonucleotide
ggcacagucggaucuccag

SEQ ID NO: 631076 - RNA, 19 nt, Artificial Sequence
  Description of Artificial Sequence: Synthetic oligonucleotide
cauuggugaggguccucag

SEQ ID NO: 631077 - RNA, 19 nt, Artificial Sequence
  Description of Artificial Sequence: Synthetic oligonucleotide
uucgugcuguugguugcgg

SEQ ID NO: 631078 - RNA, 19 nt, Artificial Sequence
  Description of Artificial Sequence: Synthetic oligonucleotide
ugguuucgggucugggacu

SEQ ID NO: 631079 - RNA, 19 nt, Artificial Sequence
  Description of Artificial Sequence: Synthetic oligonucleotide
gaacgcagggcagcaauga

SEQ ID NO: 631080 - RNA, 19 nt, Artificial Sequence
  Description of Artificial Sequence: Synthetic oligonucleotide
uuguugcuauuaaccuccu

SEQ ID NO: 631081 - RNA, 19 nt, Artificial Sequence
  Description of Artificial Sequence: Synthetic oligonucleotide
accccuagcugguuccuca

SEQ ID NO: 631082 - RNA, 19 nt, Artificial Sequence
  Description of Artificial Sequence: Synthetic oligonucleotide
gccuagagccaccacagac

SEQ ID NO: 631083 - RNA, 19 nt, Artificial Sequence
  Description of Artificial Sequence: Synthetic oligonucleotide
auauacaccuuggaacauu

SEQ ID NO: 631084 - RNA, 19 nt, Artificial Sequence
  Description of Artificial Sequence: Synthetic oligonucleotide
ggguucgugcuguugguug

SEQ ID NO: 631085 - RNA, 19 nt, Artificial Sequence
  Description of Artificial Sequence: Synthetic oligonucleotide
uuucgggucugggacucgc

SEQ ID NO: 631086 - RNA, 19 nt, Artificial Sequence
  Description of Artificial Sequence: Synthetic oligonucleotide
cauuucuuacgcagcugca

SEQ ID NO: 631087 - RNA, 19 nt, Artificial Sequence
  Description of Artificial Sequence: Synthetic oligonucleotide
aaccccuagcugguuccuc

SEQ ID NO: 631088 - RNA, 19 nt, Artificial Sequence
  Description of Artificial Sequence: Synthetic oligonucleotide
ugagugccuagagccacca

SEQ ID NO: 631089 - RNA, 19 nt, Artificial Sequence
  Description of Artificial Sequence: Synthetic oligonucleotide
ucgaacccucucagcaaac

SEQ ID NO: 631090 - RNA, 19 nt, Artificial Sequence
  Description of Artificial Sequence: Synthetic oligonucleotide
cgucugaccauaagcaaag

SEQ ID NO: 631091 - RNA, 19 nt, Artificial Sequence
  Description of Artificial Sequence: Synthetic oligonucleotide
agccuuccccacuaguaau

SEQ ID NO: 631092 - RNA, 19 nt, Artificial Sequence
  Description of Artificial Sequence: Synthetic oligonucleotide
ggcgagugccuucagcccc

SEQ ID NO: 631093 - RNA, 19 nt, Artificial Sequence
  Description of Artificial Sequence: Synthetic oligonucleotide
uugagcccguuguagucau

SEQ ID NO: 631094 - RNA, 19 nt, Artificial Sequence
  Description of Artificial Sequence: Synthetic oligonucleotide
guucgugcuguugguugcg

SEQ ID NO: 631095 - RNA, 19 nt, Artificial Sequence
  Description of Artificial Sequence: Synthetic oligonucleotide
auugguugccucagguccu

SEQ ID NO: 631096 - RNA, 19 nt, Artificial Sequence
  Description of Artificial Sequence: Synthetic oligonucleotide
ggcccgcugauuaaugccg

SEQ ID NO: 631097 - RNA, 19 nt, Artificial Sequence
  Description of Artificial Sequence: Synthetic oligonucleotide
cauggcccugucgggaacg

SEQ ID NO: 631098 - RNA, 19 nt, Artificial Sequence
  Description of Artificial Sequence: Synthetic oligonucleotide
gaccauaagcaaagaugca

SEQ ID NO: 631099 - RNA, 19 nt, Artificial Sequence
  Description of Artificial Sequence: Synthetic oligonucleotide
cauugaagccaucgaugca

SEQ ID NO: 631100 - RNA, 19 nt, Artificial Sequence
  Description of Artificial Sequence: Synthetic oligonucleotide
ugccagccuuaaauacagc

SEQ ID NO: 631101 - RNA, 19 nt, Artificial Sequence
  Description of Artificial Sequence: Synthetic oligonucleotide
ugugagcgggagcuguguu

SEQ ID NO: 631102 - RNA, 19 nt, Artificial Sequence
  Description of Artificial Sequence: Synthetic oligonucleotide
guggaugauggagucguca

SEQ ID NO: 631103 - RNA, 19 nt, Artificial Sequence
  Description of Artificial Sequence: Synthetic oligonucleotide
ggacucgugcaaucacccg

SEQ ID NO: 631104 - RNA, 19 nt, Artificial Sequence
  Description of Artificial Sequence: Synthetic oligonucleotide
cuccaucguauaugucuug

SEQ ID NO: 631105 - RNA, 19 nt, Artificial Sequence
  Description of Artificial Sequence: Synthetic oligonucleotide
guccccuccaucguauaug

SEQ ID NO: 631106 - RNA, 19 nt, Artificial Sequence
  Description of Artificial Sequence: Synthetic oligonucleotide
gguaaacucuguggugcgg

SEQ ID NO: 631107 - RNA, 19 nt, Artificial Sequence
  Description of Artificial Sequence: Synthetic oligonucleotide
acaccacgcacugucacaa

SEQ ID NO: 631108 - RNA, 19 nt, Artificial Sequence
  Description of Artificial Sequence: Synthetic oligonucleotide
ccugguuguugcuauuaac

SEQ ID NO: 631109 - RNA, 19 nt, Artificial Sequence
  Description of Artificial Sequence: Synthetic oligonucleotide
agccuuaaauacagcccag

SEQ ID NO: 631110 - RNA, 19 nt, Artificial Sequence
  Description of Artificial Sequence: Synthetic oligonucleotide
acacucgcuuccuucugaa

SEQ ID NO: 631111 - RNA, 19 nt, Artificial Sequence
  Description of Artificial Sequence: Synthetic oligonucleotide
gugagcgggagcuguguuc

SEQ ID NO: 631112 - RNA, 19 nt, Artificial Sequence
  Description of Artificial Sequence: Synthetic oligonucleotide
ugccuagagccaccacaga

SEQ ID NO: 631113 - RNA, 19 nt, Artificial Sequence
  Description of Artificial Sequence: Synthetic oligonucleotide
ggugaggguccucagugca

SEQ ID NO: 631114 - RNA, 19 nt, Artificial Sequence
  Description of Artificial Sequence: Synthetic oligonucleotide
guucccggcgguacuugcg

SEQ ID NO: 631115 - RNA, 19 nt, Artificial Sequence
  Description of Artificial Sequence: Synthetic oligonucleotide
ggagaaugccuggugucag

SEQ ID NO: 631116 - RNA, 19 nt, Artificial Sequence
  Description of Artificial Sequence: Synthetic oligonucleotide
ucgugcuguugguugcggu

SEQ ID NO: 631117 - RNA, 19 nt, Artificial Sequence
  Description of Artificial Sequence: Synthetic oligonucleotide
ugcaaucacccggauguuu

SEQ ID NO: 631118 - RNA, 19 nt, Artificial Sequence
  Description of Artificial Sequence: Synthetic oligonucleotide
gcugcaguccacaccacgc

SEQ ID NO: 631119 - RNA, 19 nt, Artificial Sequence
  Description of Artificial Sequence: Synthetic oligonucleotide
cuugagcccguuguaguca

SEQ ID NO: 631120 - RNA, 19 nt, Artificial Sequence
  Description of Artificial Sequence: Synthetic oligonucleotide
acucgugcaaucacccgga

SEQ ID NO: 631121 - RNA, 19 nt, Artificial Sequence
  Description of Artificial Sequence: Synthetic oligonucleotide
guauugccagucagaggcc

SEQ ID NO: 631122 - RNA, 19 nt, Artificial Sequence
  Description of Artificial Sequence: Synthetic oligonucleotide
agucggaucuccagcuucu

SEQ ID NO: 631123 - RNA, 19 nt, Artificial Sequence
  Description of Artificial Sequence: Synthetic oligonucleotide
guucucgugcacugccuuc

SEQ ID NO: 631124 - RNA, 19 nt, Artificial Sequence
  Description of Artificial Sequence: Synthetic oligonucleotide
ccuagagccaccacagaca

SEQ ID NO: 631125 - RNA, 19 nt, Artificial Sequence
  Description of Artificial Sequence: Synthetic oligonucleotide
ugggcacagucggaucucc

SEQ ID NO: 631126 - RNA, 19 nt, Artificial Sequence
  Description of Artificial Sequence: Synthetic oligonucleotide
uucgggucugggacucgcu

SEQ ID NO: 631127 - RNA, 19 nt, Artificial Sequence
  Description of Artificial Sequence: Synthetic oligonucleotide
gucacaaugagcagagcau

SEQ ID NO: 631128 - RNA, 19 nt, Artificial Sequence
  Description of Artificial Sequence: Synthetic oligonucleotide
gggucugggacucgcugag

SEQ ID NO: 631129 - RNA, 19 nt, Artificial Sequence
  Description of Artificial Sequence: Synthetic oligonucleotide
cccugacuugcccacacgc

SEQ ID NO: 631130 - RNA, 19 nt, Artificial Sequence
  Description of Artificial Sequence: Synthetic oligonucleotide
aguuucggaagggcacaug

SEQ ID NO: 631131 - RNA, 19 nt, Artificial Sequence
  Description of Artificial Sequence: Synthetic oligonucleotide
uugccagucagaggccuuc

SEQ ID NO: 631132 - RNA, 19 nt, Artificial Sequence
  Description of Artificial Sequence: Synthetic oligonucleotide
auggcccugucgggaacgc

SEQ ID NO: 631133 - RNA, 19 nt, Artificial Sequence
  Description of Artificial Sequence: Synthetic oligonucleotide
gggcccgcugauuaaugcc

SEQ ID NO: 631134 - RNA, 19 nt, Artificial Sequence
  Description of Artificial Sequence: Synthetic oligonucleotide
cacaccacgcacugucaca

SEQ ID NO: 631135 - RNA, 19 nt, Artificial Sequence
  Description of Artificial Sequence: Synthetic oligonucleotide
gauggagcccgggcggcug

SEQ ID NO: 631136 - RNA, 19 nt, Artificial Sequence
  Description of Artificial Sequence: Synthetic oligonucleotide
cacucgcuuccuucugaac

SEQ ID NO: 631137 - RNA, 19 nt, Artificial Sequence
  Description of Artificial Sequence: Synthetic oligonucleotide
gacuggccggacucgugca

SEQ ID NO: 631138 - RNA, 19 nt, Artificial Sequence
  Description of Artificial Sequence: Synthetic oligonucleotide
ggaacucagucagcccugg

SEQ ID NO: 631139 - RNA, 19 nt, Artificial Sequence
  Description of Artificial Sequence: Synthetic oligonucleotide
guggugcgguuguuguggc

SEQ ID NO: 631140 - RNA, 19 nt, Artificial Sequence
  Description of Artificial Sequence: Synthetic oligonucleotide
ccggacucgugcaaucacc

SEQ ID NO: 631141 - RNA, 19 nt, Artificial Sequence
  Description of Artificial Sequence: Synthetic oligonucleotide
ucucgaaggcgagugccuu

SEQ ID NO: 631142 - RNA, 19 nt, Artificial Sequence
  Description of Artificial Sequence: Synthetic oligonucleotide
cccacuaguaaugcuugag

SEQ ID NO: 631143 - RNA, 19 nt, Artificial Sequence
  Description of Artificial Sequence: Synthetic oligonucleotide
gcuugagcccguuguaguc

SEQ ID NO: 631144 - RNA, 19 nt, Artificial Sequence
  Description of Artificial Sequence: Synthetic oligonucleotide
cuccugagagccuccugca

SEQ ID NO: 631145 - RNA, 19 nt, Artificial Sequence
  Description of Artificial Sequence: Synthetic oligonucleotide
ugcugucgccacugaggga

SEQ ID NO: 631146 - RNA, 19 nt, Artificial Sequence
  Description of Artificial Sequence: Synthetic oligonucleotide
gauuaaugccgggguucuc

SEQ ID NO: 631147 - RNA, 19 nt, Artificial Sequence
  Description of Artificial Sequence: Synthetic oligonucleotide
ccguuguagucauugguga

SEQ ID NO: 631148 - RNA, 19 nt, Artificial Sequence
  Description of Artificial Sequence: Synthetic oligonucleotide
ccaacuccacagaucgaac

SEQ ID NO: 631149 - RNA, 19 nt, Artificial Sequence
  Description of Artificial Sequence: Synthetic oligonucleotide
augugagcgggagcugugu

SEQ ID NO: 631150 - RNA, 19 nt, Artificial Sequence
  Description of Artificial Sequence: Synthetic oligonucleotide
uugaugugcugugccucuc

SEQ ID NO: 631151 - RNA, 19 nt, Artificial Sequence
  Description of Artificial Sequence: Synthetic oligonucleotide
uaaccccuagcugguuccu

SEQ ID NO: 631152 - RNA, 19 nt, Artificial Sequence
  Description of Artificial Sequence: Synthetic oligonucleotide
cggacucgugcaaucaccc

SEQ ID NO: 631153 - RNA, 19 nt, Artificial Sequence
  Description of Artificial Sequence: Synthetic oligonucleotide
cccuccaucguauaugucu

SEQ ID NO: 631154 - RNA, 19 nt, Artificial Sequence
  Description of Artificial Sequence: Synthetic oligonucleotide
ucccggcgguacuugcgca

SEQ ID NO: 631155 - RNA, 19 nt, Artificial Sequence
  Description of Artificial Sequence: Synthetic oligonucleotide
cugcagcguuagcagguug

SEQ ID NO: 631156 - RNA, 19 nt, Artificial Sequence
  Description of Artificial Sequence: Synthetic oligonucleotide
aggagguaaugagggccug

SEQ ID NO: 631157 - RNA, 19 nt, Artificial Sequence
  Description of Artificial Sequence: Synthetic oligonucleotide
gugcaggcugcagcguuag

SEQ ID NO: 631158 - RNA, 19 nt, Artificial Sequence
  Description of Artificial Sequence: Synthetic oligonucleotide
uggccggacucgugcaauc

SEQ ID NO: 631159 - RNA, 19 nt, Artificial Sequence
  Description of Artificial Sequence: Synthetic oligonucleotide
ggaacgcagggcagcaaug

SEQ ID NO: 631160 - RNA, 19 nt, Artificial Sequence
  Description of Artificial Sequence: Synthetic oligonucleotide
ccuaaccccuagcugguuc

SEQ ID NO: 631161 - RNA, 19 nt, Artificial Sequence
  Description of Artificial Sequence: Synthetic oligonucleotide
guuucgggucugggacucg

SEQ ID NO: 631162 - RNA, 19 nt, Artificial Sequence
  Description of Artificial Sequence: Synthetic oligonucleotide
ucugugcggcgggacccag

SEQ ID NO: 631163 - RNA, 19 nt, Artificial Sequence
  Description of Artificial Sequence: Synthetic oligonucleotide
guggugcggaggccugugc

SEQ ID NO: 631164 - RNA, 19 nt, Artificial Sequence
  Description of Artificial Sequence: Synthetic oligonucleotide
cucgauggccuggccaauc

SEQ ID NO: 631165 - RNA, 19 nt, Artificial Sequence
  Description of Artificial Sequence: Synthetic oligonucleotide
uguguucguucagguuggu

SEQ ID NO: 631166 - RNA, 19 nt, Artificial Sequence
  Description of Artificial Sequence: Synthetic oligonucleotide
cacaggcacuggcuucaac

SEQ ID NO: 631167 - RNA, 19 nt, Artificial Sequence
  Description of Artificial Sequence: Synthetic oligonucleotide
ugccuggugucaggcagau

SEQ ID NO: 631168 - RNA, 19 nt, Artificial Sequence
  Description of Artificial Sequence: Synthetic oligonucleotide
ccacagaucgaacccucuc

SEQ ID NO: 631169 - RNA, 19 nt, Artificial Sequence
  Description of Artificial Sequence: Synthetic oligonucleotide
gccugcaccucuuggaaua

SEQ ID NO: 631170 - RNA, 19 nt, Artificial Sequence
  Description of Artificial Sequence: Synthetic oligonucleotide
cuuggugacuggccggacu

SEQ ID NO: 631171 - RNA, 19 nt, Artificial Sequence
  Description of Artificial Sequence: Synthetic oligonucleotide
gguuucgggucugggacuc

SEQ ID NO: 631172 - RNA, 19 nt, Artificial Sequence
  Description of Artificial Sequence: Synthetic oligonucleotide
gccuuaaauacagcccaga

SEQ ID NO: 631173 - RNA, 19 nt, Artificial Sequence
  Description of Artificial Sequence: Synthetic oligonucleotide
cagcguuagcagguugguc

SEQ ID NO: 631174 - RNA, 19 nt, Artificial Sequence
  Description of Artificial Sequence: Synthetic oligonucleotide
cacuaagggauccccuccu

SEQ ID NO: 631175 - RNA, 19 nt, Artificial Sequence
  Description of Artificial Sequence: Synthetic oligonucleotide
gcacccgucugaccauaag

SEQ ID NO: 631176 - RNA, 19 nt, Artificial Sequence
  Description of Artificial Sequence: Synthetic oligonucleotide
gugacuggccggacucgug

SEQ ID NO: 631177 - RNA, 19 nt, Artificial Sequence
  Description of Artificial Sequence: Synthetic oligonucleotide
ggcccgguucuuauccucc

SEQ ID NO: 631178 - RNA, 19 nt, Artificial Sequence
  Description of Artificial Sequence: Synthetic oligonucleotide
gcccgcugauuaaugccgg

SEQ ID NO: 631179 - RNA, 19 nt, Artificial Sequence
  Description of Artificial Sequence: Synthetic oligonucleotide
cauccacacucugcaccug

SEQ ID NO: 631180 - RNA, 19 nt, Artificial Sequence
  Description of Artificial Sequence: Synthetic oligonucleotide
ggacccaacuccacagauc

SEQ ID NO: 631181 - RNA, 19 nt, Artificial Sequence
  Description of Artificial Sequence: Synthetic oligonucleotide
augccuggugucaggcaga

SEQ ID NO: 631182 - RNA, 19 nt, Artificial Sequence
  Description of Artificial Sequence: Synthetic oligonucleotide
cucucgaaggcgagugccu

SEQ ID NO: 631183 - RNA, 19 nt, Artificial Sequence
  Description of Artificial Sequence: Synthetic oligonucleotide
agguugguccugacaccug

SEQ ID NO: 631184 - RNA, 19 nt, Artificial Sequence
  Description of Artificial Sequence: Synthetic oligonucleotide
ccaucgaugcaggagguaa

SEQ ID NO: 631185 - RNA, 19 nt, Artificial Sequence
  Description of Artificial Sequence: Synthetic oligonucleotide
agcuuccccguggugcgga

SEQ ID NO: 631186 - RNA, 19 nt, Artificial Sequence
  Description of Artificial Sequence: Synthetic oligonucleotide
cucaauggcccgguucuua

SEQ ID NO: 631187 - RNA, 19 nt, Artificial Sequence
  Description of Artificial Sequence: Synthetic oligonucleotide
ccgucaggcugauggcugc

SEQ ID NO: 631188 - RNA, 19 nt, Artificial Sequence
  Description of Artificial Sequence: Synthetic oligonucleotide
gccgucaggcugauggcug

SEQ ID NO: 631189 - RNA, 19 nt, Artificial Sequence
  Description of Artificial Sequence: Synthetic oligonucleotide
cuuccccacuaguaaugcu

SEQ ID NO: 631190 - RNA, 19 nt, Artificial Sequence
  Description of Artificial Sequence: Synthetic oligonucleotide
gugcugguuucgggucugg

SEQ ID NO: 631191 - RNA, 19 nt, Artificial Sequence
  Description of Artificial Sequence: Synthetic oligonucleotide
gccggacucgugcaaucac

SEQ ID NO: 631192 - RNA, 19 nt, Artificial Sequence
  Description of Artificial Sequence: Synthetic oligonucleotide
caucgaugcaggagguaau

SEQ ID NO: 631193 - RNA, 19 nt, Artificial Sequence
  Description of Artificial Sequence: Synthetic oligonucleotide
caguucccggcgguacuug

SEQ ID NO: 631194 - RNA, 19 nt, Artificial Sequence
  Description of Artificial Sequence: Synthetic oligonucleotide
cccaacuccacagaucgaa

SEQ ID NO: 631195 - RNA, 19 nt, Artificial Sequence
  Description of Artificial Sequence: Synthetic oligonucleotide
acgcuccgaaccagccagg

SEQ ID NO: 631196 - RNA, 19 nt, Artificial Sequence
  Description of Artificial Sequence: Synthetic oligonucleotide
gcucucccuaaccccuagc

SEQ ID NO: 631197 - RNA, 19 nt, Artificial Sequence
  Description of Artificial Sequence: Synthetic oligonucleotide
auugccagucagaggccuu

SEQ ID NO: 631198 - RNA, 19 nt, Artificial Sequence
  Description of Artificial Sequence: Synthetic oligonucleotide
cagaguggguucgugcugu

SEQ ID NO: 631199 - RNA, 19 nt, Artificial Sequence
  Description of Artificial Sequence: Synthetic oligonucleotide
ccacuaguaaugcuugagu

SEQ ID NO: 631200 - RNA, 19 nt, Artificial Sequence
  Description of Artificial Sequence: Synthetic oligonucleotide
agcgggagcuguguucguu

SEQ ID NO: 631201 - RNA, 19 nt, Artificial Sequence
  Description of Artificial Sequence: Synthetic oligonucleotide
ugagcccguuguagucauu

SEQ ID NO: 631202 - RNA, 19 nt, Artificial Sequence
  Description of Artificial Sequence: Synthetic oligonucleotide
cgucaucuggaucaaaggu

SEQ ID NO: 631203 - RNA, 19 nt, Artificial Sequence
  Description of Artificial Sequence: Synthetic oligonucleotide
cccugucgggaacgcaggg

SEQ ID NO: 631204 - RNA, 19 nt, Artificial Sequence
  Description of Artificial Sequence: Synthetic oligonucleotide
ugcccaugugugggaguuc

SEQ ID NO: 631205 - RNA, 19 nt, Artificial Sequence
  Description of Artificial Sequence: Synthetic oligonucleotide
ccgcuugagcccguuguag

SEQ ID NO: 631206 - RNA, 19 nt, Artificial Sequence
  Description of Artificial Sequence: Synthetic oligonucleotide
gcugauuaaugccgggguu

SEQ ID NO: 631207 - RNA, 19 nt, Artificial Sequence
  Description of Artificial Sequence: Synthetic oligonucleotide
uccccguggugcggaggcc

SEQ ID NO: 631208 - RNA, 19 nt, Artificial Sequence
  Description of Artificial Sequence: Synthetic oligonucleotide
gggaacgcagggcagcaau

SEQ ID NO: 631209 - RNA, 19 nt, Artificial Sequence
  Description of Artificial Sequence: Synthetic oligonucleotide
gcccacacgcuccgaacca

SEQ ID NO: 631210 - RNA, 19 nt, Artificial Sequence
  Description of Artificial Sequence: Synthetic oligonucleotide
gcacauaaaguugcccacu

SEQ ID NO: 631211 - RNA, 19 nt, Artificial Sequence
  Description of Artificial Sequence: Synthetic oligonucleotide
gccccugacuugcccacac

SEQ ID NO: 631212 - RNA, 19 nt, Artificial Sequence
  Description of Artificial Sequence: Synthetic oligonucleotide
ccucugccagccuuaaaua

SEQ ID NO: 631213 - RNA, 19 nt, Artificial Sequence
  Description of Artificial Sequence: Synthetic oligonucleotide
gcuccgaaccagccagguc

SEQ ID NO: 631214 - RNA, 19 nt, Artificial Sequence
  Description of Artificial Sequence: Synthetic oligonucleotide
guguucguucagguuggua

SEQ ID NO: 631215 - RNA, 19 nt, Artificial Sequence
  Description of Artificial Sequence: Synthetic oligonucleotide
gaguuucggaagggcacau

SEQ ID NO: 631216 - RNA, 19 nt, Artificial Sequence
  Description of Artificial Sequence: Synthetic oligonucleotide
gcguuagcagguugguccu

SEQ ID NO: 631217 - RNA, 19 nt, Artificial Sequence
  Description of Artificial Sequence: Synthetic oligonucleotide
cguauaugucuugccagca

SEQ ID NO: 631218 - RNA, 19 nt, Artificial Sequence
  Description of Artificial Sequence: Synthetic oligonucleotide
acccaacuccacagaucga

SEQ ID NO: 631219 - RNA, 19 nt, Artificial Sequence
  Description of Artificial Sequence: Synthetic oligonucleotide
cugcaccucuuggaauaca

SEQ ID NO: 631220 - RNA, 19 nt, Artificial Sequence
  Description of Artificial Sequence: Synthetic oligonucleotide
ugguugccucagguccuuc

SEQ ID NO: 631221 - RNA, 19 nt, Artificial Sequence
  Description of Artificial Sequence: Synthetic oligonucleotide
gguucucgugcacugccuu

SEQ ID NO: 631222 - RNA, 19 nt, Artificial Sequence
  Description of Artificial Sequence: Synthetic oligonucleotide
agcacccgucugaccauaa

SEQ ID NO: 631223 - RNA, 19 nt, Artificial Sequence
  Description of Artificial Sequence: Synthetic oligonucleotide
gcuugaccaggagcccagc

SEQ ID NO: 631224 - RNA, 19 nt, Artificial Sequence
  Description of Artificial Sequence: Synthetic oligonucleotide
ccugacuugcccacacgcu

SEQ ID NO: 631225 - RNA, 19 nt, Artificial Sequence
  Description of Artificial Sequence: Synthetic oligonucleotide
ggccggacucgugcaauca

SEQ ID NO: 631226 - RNA, 19 nt, Artificial Sequence
  Description of Artificial Sequence: Synthetic oligonucleotide
agcuccgcaccugccgcuu

SEQ ID NO: 631227 - RNA, 19 nt, Artificial Sequence
  Description of Artificial Sequence: Synthetic oligonucleotide
cucugugcggcgggaccca

SEQ ID NO: 631228 - RNA, 19 nt, Artificial Sequence
  Description of Artificial Sequence: Synthetic oligonucleotide
gcaguccacaccacgcacu

SEQ ID NO: 631229 - RNA, 19 nt, Artificial Sequence
  Description of Artificial Sequence: Synthetic oligonucleotide
ccgugcgaaggccuccuca

SEQ ID NO: 631230 - RNA, 19 nt, Artificial Sequence
  Description of Artificial Sequence: Synthetic oligonucleotide
gcccaugugugggaguucu

SEQ ID NO: 631231 - RNA, 19 nt, Artificial Sequence
  Description of Artificial Sequence: Synthetic oligonucleotide
gguccccuccaucguauau

SEQ ID NO: 631232 - RNA, 19 nt, Artificial Sequence
  Description of Artificial Sequence: Synthetic oligonucleotide
cugcccaugugugggaguu

SEQ ID NO: 631233 - RNA, 19 nt, Artificial Sequence
  Description of Artificial Sequence: Synthetic oligonucleotide
gcuccgcaccugccgcuug

SEQ ID NO: 631234 - RNA, 19 nt, Artificial Sequence
  Description of Artificial Sequence: Synthetic oligonucleotide
ccccacuaguaaugcuuga

SEQ ID NO: 631235 - RNA, 19 nt, Artificial Sequence
  Description of Artificial Sequence: Synthetic oligonucleotide
ggcccgugcgaaggccucc

SEQ ID NO: 631236 - RNA, 19 nt, Artificial Sequence
  Description of Artificial Sequence: Synthetic oligonucleotide
ggugucuggcaagcuggcu

SEQ ID NO: 631237 - RNA, 19 nt, Artificial Sequence
  Description of Artificial Sequence: Synthetic oligonucleotide
ccccuccaucguauauguc

SEQ ID NO: 631238 - RNA, 19 nt, Artificial Sequence
  Description of Artificial Sequence: Synthetic oligonucleotide
cgggagcuguguucguuca

SEQ ID NO: 631239 - RNA, 19 nt, Artificial Sequence
  Description of Artificial Sequence: Synthetic oligonucleotide
cugucgccacugagggagu

SEQ ID NO: 631240 - RNA, 19 nt, Artificial Sequence
  Description of Artificial Sequence: Synthetic oligonucleotide
ccuuggugacuggccggac

SEQ ID NO: 631241 - RNA, 19 nt, Artificial Sequence
  Description of Artificial Sequence: Synthetic oligonucleotide
cgaaggcgagugccuucag

SEQ ID NO: 631242 - RNA, 19 nt, Artificial Sequence
  Description of Artificial Sequence: Synthetic oligonucleotide
cucgugcaaucacccggau

SEQ ID NO: 631243 - RNA, 19 nt, Artificial Sequence
  Description of Artificial Sequence: Synthetic oligonucleotide
gccaucgaugcaggaggua

SEQ ID NO: 631244 - RNA, 19 nt, Artificial Sequence
  Description of Artificial Sequence: Synthetic oligonucleotide
caccacgcacugucacaau

SEQ ID NO: 631245 - RNA, 19 nt, Artificial Sequence
  Description of Artificial Sequence: Synthetic oligonucleotide
gugcaaucacccggauguu

SEQ ID NO: 631246 - RNA, 19 nt, Artificial Sequence
  Description of Artificial Sequence: Synthetic oligonucleotide
gggcccgugcgaaggccuc

SEQ ID NO: 631247 - RNA, 19 nt, Artificial Sequence
  Description of Artificial Sequence: Synthetic oligonucleotide
gccuggugucaggcagaug

SEQ ID NO: 631248 - RNA, 19 nt, Artificial Sequence
  Description of Artificial Sequence: Synthetic oligonucleotide
gcgagugccuucagccccu

SEQ ID NO: 631249 - RNA, 19 nt, Artificial Sequence
  Description of Artificial Sequence: Synthetic oligonucleotide
ccgcugcauggcccacuug

SEQ ID NO: 631250 - RNA, 19 nt, Artificial Sequence
  Description of Artificial Sequence: Synthetic oligonucleotide
ccuccucaggaggguaaaa

SEQ ID NO: 631251 - RNA, 19 nt, Artificial Sequence
  Description of Artificial Sequence: Synthetic oligonucleotide
cccgugcgaaggccuccuc

SEQ ID NO: 631252 - RNA, 19 nt, Artificial Sequence
  Description of Artificial Sequence: Synthetic oligonucleotide
cugcacugacggugauguu

SEQ ID NO: 631253 - RNA, 19 nt, Artificial Sequence
  Description of Artificial Sequence: Synthetic oligonucleotide
gcccgugcgaaggccuccu

SEQ ID NO: 631254 - RNA, 19 nt, Artificial Sequence
  Description of Artificial Sequence: Synthetic oligonucleotide
cccagccgucaggcugaug

SEQ ID NO: 631255 - RNA, 19 nt, Artificial Sequence
  Description of Artificial Sequence: Synthetic oligonucleotide
cgcuccgaaccagccaggu

SEQ ID NO: 631256 - RNA, 19 nt, Artificial Sequence
  Description of Artificial Sequence: Synthetic oligonucleotide
cccuaaccccuagcugguu

SEQ ID NO: 631257 - RNA, 19 nt, Artificial Sequence
  Description of Artificial Sequence: Synthetic oligonucleotide
uuaucagccacuaagaaca

SEQ ID NO: 631258 - RNA, 19 nt, Artificial Sequence
  Description of Artificial Sequence: Synthetic oligonucleotide
aaaaguaucagcccauagu

SEQ ID NO: 631259 - RNA, 19 nt, Artificial Sequence
  Description of Artificial Sequence: Synthetic oligonucleotide
aauacagcgauacaagaau

SEQ ID NO: 631260 - RNA, 19 nt, Artificial Sequence
  Description of Artificial Sequence: Synthetic oligonucleotide
ucuugaacccucaacaggc

SEQ ID NO: 631261 - RNA, 19 nt, Artificial Sequence
  Description of Artificial Sequence: Synthetic oligonucleotide
aguaucagcccauaguagg

SEQ ID NO: 631262 - RNA, 19 nt, Artificial Sequence
  Description of Artificial Sequence: Synthetic oligonucleotide
aaaguaucagcccauagua

SEQ ID NO: 631263 - RNA, 19 nt, Artificial Sequence
  Description of Artificial Sequence: Synthetic oligonucleotide
aauccgggcgcccagcacc

SEQ ID NO: 631264 - RNA, 19 nt, Artificial Sequence
  Description of Artificial Sequence: Synthetic oligonucleotide
aaaguagugccacuggcca

SEQ ID NO: 631265 - RNA, 19 nt, Artificial Sequence
  Description of Artificial Sequence: Synthetic oligonucleotide
ucuugaucaucauugcuag

SEQ ID NO: 631266 - RNA, 19 nt, Artificial Sequence
  Description of Artificial Sequence: Synthetic oligonucleotide
ucguauaguguccaucacg

SEQ ID NO: 631267 - RNA, 19 nt, Artificial Sequence
  Description of Artificial Sequence: Synthetic oligonucleotide
aucauuucgucguuugugg

SEQ ID NO: 631268 - RNA, 19 nt, Artificial Sequence
  Description of Artificial Sequence: Synthetic oligonucleotide
aauaagacuaggaagggaa

SEQ ID NO: 631269 - RNA, 19 nt, Artificial Sequence
  Description of Artificial Sequence: Synthetic oligonucleotide
ucacagaaucauuucgucg

SEQ ID NO: 631270 - RNA, 19 nt, Artificial Sequence
  Description of Artificial Sequence: Synthetic oligonucleotide
gaaggaaugacaauaguuc

SEQ ID NO: 631271 - RNA, 19 nt, Artificial Sequence
  Description of Artificial Sequence: Synthetic oligonucleotide
uugaucaucauugcuagug

SEQ ID NO: 631272 - RNA, 19 nt, Artificial Sequence
  Description of Artificial Sequence: Synthetic oligonucleotide
acaauaguuccugugaguc

SEQ ID NO: 631273 - RNA, 19 nt, Artificial Sequence
  Description of Artificial Sequence: Synthetic oligonucleotide
ucguuugugguuuugccag

SEQ ID NO: 631274 - RNA, 19 nt, Artificial Sequence
  Description of Artificial Sequence: Synthetic oligonucleotide
ucacauaucccucagccuc

SEQ ID NO: 631275 - RNA, 19 nt, Artificial Sequence
  Description of Artificial Sequence: Synthetic oligonucleotide
ucgauugagguccucaugu

SEQ ID NO: 631276 - RNA, 19 nt, Artificial Sequence
  Description of Artificial Sequence: Synthetic oligonucleotide
ugacaauaguuccugugag

SEQ ID NO: 631277 - RNA, 19 nt, Artificial Sequence
  Description of Artificial Sequence: Synthetic oligonucleotide
gaauacaguagccacgaac

SEQ ID NO: 631278 - RNA, 19 nt, Artificial Sequence
  Description of Artificial Sequence: Synthetic oligonucleotide
agaacaaaacauaggcugc

SEQ ID NO: 631279 - RNA, 19 nt, Artificial Sequence
  Description of Artificial Sequence: Synthetic oligonucleotide
ggaaacugcgaugagaucg

SEQ ID NO: 631280 - RNA, 19 nt, Artificial Sequence
  Description of Artificial Sequence: Synthetic oligonucleotide
acgauaucaucucuugaac

SEQ ID NO: 631281 - RNA, 19 nt, Artificial Sequence
  Description of Artificial Sequence: Synthetic oligonucleotide
uauaguguccaucacgcau

SEQ ID NO: 631282 - RNA, 19 nt, Artificial Sequence
  Description of Artificial Sequence: Synthetic oligonucleotide
agcuuauagaaucggugac

SEQ ID NO: 631283 - RNA, 19 nt, Artificial Sequence
  Description of Artificial Sequence: Synthetic oligonucleotide
uucucaaggguuuccacag

SEQ ID NO: 631284 - RNA, 19 nt, Artificial Sequence
  Description of Artificial Sequence: Synthetic oligonucleotide
ugucguauaguguccauca

SEQ ID NO: 631285 - RNA, 19 nt, Artificial Sequence
  Description of Artificial Sequence: Synthetic oligonucleotide
uuguugcaggcaaaugucg

SEQ ID NO: 631286 - RNA, 19 nt, Artificial Sequence
  Description of Artificial Sequence: Synthetic oligonucleotide
aaacgcuucagguggauaa

SEQ ID NO: 631287 - RNA, 19 nt, Artificial Sequence
  Description of Artificial Sequence: Synthetic oligonucleotide
uauagaaucggugacugaa

SEQ ID NO: 631288 - RNA, 19 nt, Artificial Sequence
  Description of Artificial Sequence: Synthetic oligonucleotide
acauucggcacaauggagc

SEQ ID NO: 631289 - RNA, 19 nt, Artificial Sequence
  Description of Artificial Sequence: Synthetic oligonucleotide
aggcaaaugucguauagug

SEQ ID NO: 631290 - RNA, 19 nt, Artificial Sequence
  Description of Artificial Sequence: Synthetic oligonucleotide
acugggaugcaaaauggcc

SEQ ID NO: 631291 - RNA, 19 nt, Artificial Sequence
  Description of Artificial Sequence: Synthetic oligonucleotide
gguuugaugacaaacucgg

SEQ ID NO: 631292 - RNA, 19 nt, Artificial Sequence
  Description of Artificial Sequence: Synthetic oligonucleotide
ucaaggguuuccacagugg

SEQ ID NO: 631293 - RNA, 19 nt, Artificial Sequence
  Description of Artificial Sequence: Synthetic oligonucleotide
ucgcagguaaacaggaacc

SEQ ID NO: 631294 - RNA, 19 nt, Artificial Sequence
  Description of Artificial Sequence: Synthetic oligonucleotide
ucaucauugcuaguggaag

SEQ ID NO: 631295 - RNA, 19 nt, Artificial Sequence
  Description of Artificial Sequence: Synthetic oligonucleotide
agcguagacuugaagaggc

SEQ ID NO: 631296 - RNA, 19 nt, Artificial Sequence
  Description of Artificial Sequence: Synthetic oligonucleotide
aguagacucauucuuuggu

SEQ ID NO: 631297 - RNA, 19 nt, Artificial Sequence
  Description of Artificial Sequence: Synthetic oligonucleotide
aacugggaugcaaaauggc

SEQ ID NO: 631298 - RNA, 19 nt, Artificial Sequence
  Description of Artificial Sequence: Synthetic oligonucleotide
ugagagaguaauacagcga

SEQ ID NO: 631299 - RNA, 19 nt, Artificial Sequence
  Description of Artificial Sequence: Synthetic oligonucleotide
uuaccagaucugcauaggc

SEQ ID NO: 631300 - RNA, 19 nt, Artificial Sequence
  Description of Artificial Sequence: Synthetic oligonucleotide
caggauuggauggagaacc

SEQ ID NO: 631301 - RNA, 19 nt, Artificial Sequence
  Description of Artificial Sequence: Synthetic oligonucleotide
cagcgauacaagaauacag

SEQ ID NO: 631302 - RNA, 19 nt, Artificial Sequence
  Description of Artificial Sequence: Synthetic oligonucleotide
cacuaagaacacuuugggg

SEQ ID NO: 631303 - RNA, 19 nt, Artificial Sequence
  Description of Artificial Sequence: Synthetic oligonucleotide
uacagcgauacaagaauac

SEQ ID NO: 631304 - RNA, 19 nt, Artificial Sequence
  Description of Artificial Sequence: Synthetic oligonucleotide
agaucguauuuguacaugu

SEQ ID NO: 631305 - RNA, 19 nt, Artificial Sequence
  Description of Artificial Sequence: Synthetic oligonucleotide
acaggugagacacuauugu

SEQ ID NO: 631306 - RNA, 19 nt, Artificial Sequence
  Description of Artificial Sequence: Synthetic oligonucleotide
guaaacaguugcuuucgcc

SEQ ID NO: 631307 - RNA, 19 nt, Artificial Sequence
  Description of Artificial Sequence: Synthetic oligonucleotide
agugccacuggccacuguc

SEQ ID NO: 631308 - RNA, 19 nt, Artificial Sequence
  Description of Artificial Sequence: Synthetic oligonucleotide
cauucggcacaauggagcg

SEQ ID NO: 631309 - RNA, 19 nt, Artificial Sequence
  Description of Artificial Sequence: Synthetic oligonucleotide
gaguagacucauucuuugg

SEQ ID NO: 631310 - RNA, 19 nt, Artificial Sequence
  Description of Artificial Sequence: Synthetic oligonucleotide
ucaccucauauacaaagau

SEQ ID NO: 631311 - RNA, 19 nt, Artificial Sequence
  Description of Artificial Sequence: Synthetic oligonucleotide
aaauaagacuaggaaggga

SEQ ID NO: 631312 - RNA, 19 nt, Artificial Sequence
  Description of Artificial Sequence: Synthetic oligonucleotide
uuuaccagaucugcauagg

SEQ ID NO: 631313 - RNA, 19 nt, Artificial Sequence
  Description of Artificial Sequence: Synthetic oligonucleotide
aucguaguaacgccucuuc

SEQ ID NO: 631314 - RNA, 19 nt, Artificial Sequence
  Description of Artificial Sequence: Synthetic oligonucleotide
guugucuaagagaaauggg

SEQ ID NO: 631315 - RNA, 19 nt, Artificial Sequence
  Description of Artificial Sequence: Synthetic oligonucleotide
caaaugucguauagugucc

SEQ ID NO: 631316 - RNA, 19 nt, Artificial Sequence
  Description of Artificial Sequence: Synthetic oligonucleotide
guuguacgggcacacacag

SEQ ID NO: 631317 - RNA, 19 nt, Artificial Sequence
  Description of Artificial Sequence: Synthetic oligonucleotide
agcggugguagccagacca

SEQ ID NO: 631318 - RNA, 19 nt, Artificial Sequence
  Description of Artificial Sequence: Synthetic oligonucleotide
agacauucggcacaaugga

SEQ ID NO: 631319 - RNA, 19 nt, Artificial Sequence
  Description of Artificial Sequence: Synthetic oligonucleotide
ucucccgagaaaauuugga

SEQ ID NO: 631320 - RNA, 19 nt, Artificial Sequence
  Description of Artificial Sequence: Synthetic oligonucleotide
ugggguauuggaugaagca

SEQ ID NO: 631321 - RNA, 19 nt, Artificial Sequence
  Description of Artificial Sequence: Synthetic oligonucleotide
aauacacucuguguucaug

SEQ ID NO: 631322 - RNA, 19 nt, Artificial Sequence
  Description of Artificial Sequence: Synthetic oligonucleotide
acgaacuaagccugcaaug

SEQ ID NO: 631323 - RNA, 19 nt, Artificial Sequence
  Description of Artificial Sequence: Synthetic oligonucleotide
ugcgaugagaucguauuug

SEQ ID NO: 631324 - RNA, 19 nt, Artificial Sequence
  Description of Artificial Sequence: Synthetic oligonucleotide
auaucaucccgauccaaga

SEQ ID NO: 631325 - RNA, 19 nt, Artificial Sequence
  Description of Artificial Sequence: Synthetic oligonucleotide
gacaucagcuacuaucauc

SEQ ID NO: 631326 - RNA, 19 nt, Artificial Sequence
  Description of Artificial Sequence: Synthetic oligonucleotide
cugcugguagcccagaaac

SEQ ID NO: 631327 - RNA, 19 nt, Artificial Sequence
  Description of Artificial Sequence: Synthetic oligonucleotide
ucaacaggcucaauccgac

SEQ ID NO: 631328 - RNA, 19 nt, Artificial Sequence
  Description of Artificial Sequence: Synthetic oligonucleotide
aagauaucaucccgaucca

SEQ ID NO: 631329 - RNA, 19 nt, Artificial Sequence
  Description of Artificial Sequence: Synthetic oligonucleotide
aucaucccgauccaagaug

SEQ ID NO: 631330 - RNA, 19 nt, Artificial Sequence
  Description of Artificial Sequence: Synthetic oligonucleotide
uuggguucgcucucgcagg

SEQ ID NO: 631331 - RNA, 19 nt, Artificial Sequence
  Description of Artificial Sequence: Synthetic oligonucleotide
ugaagucucgggauugggu

SEQ ID NO: 631332 - RNA, 19 nt, Artificial Sequence
  Description of Artificial Sequence: Synthetic oligonucleotide
ucucauucacaggugagac

SEQ ID NO: 631333 - RNA, 19 nt, Artificial Sequence
  Description of Artificial Sequence: Synthetic oligonucleotide
aaguaucagcccauaguag

SEQ ID NO: 631334 - RNA, 19 nt, Artificial Sequence
  Description of Artificial Sequence: Synthetic oligonucleotide
gguauauggugucaauaag

SEQ ID NO: 631335 - RNA, 19 nt, Artificial Sequence
  Description of Artificial Sequence: Synthetic oligonucleotide
ucccgauccaagaugcuac

SEQ ID NO: 631336 - RNA, 19 nt, Artificial Sequence
  Description of Artificial Sequence: Synthetic oligonucleotide
aacgccucuucaucuccgg

SEQ ID NO: 631337 - RNA, 19 nt, Artificial Sequence
  Description of Artificial Sequence: Synthetic oligonucleotide
acaaagauaucaucccgau

SEQ ID NO: 631338 - RNA, 19 nt, Artificial Sequence
  Description of Artificial Sequence: Synthetic oligonucleotide
caaaaguaucagcccauag

SEQ ID NO: 631339 - RNA, 19 nt, Artificial Sequence
  Description of Artificial Sequence: Synthetic oligonucleotide
aaauccgggcgcccagcac

SEQ ID NO: 631340 - RNA, 19 nt, Artificial Sequence
  Description of Artificial Sequence: Synthetic oligonucleotide
uucaucguaguaacgccuc

SEQ ID NO: 631341 - RNA, 19 nt, Artificial Sequence
  Description of Artificial Sequence: Synthetic oligonucleotide
uaagccugcaaugccuggg

SEQ ID NO: 631342 - RNA, 19 nt, Artificial Sequence
  Description of Artificial Sequence: Synthetic oligonucleotide
aaaugucguauagugucca

SEQ ID NO: 631343 - RNA, 19 nt, Artificial Sequence
  Description of Artificial Sequence: Synthetic oligonucleotide
guagagcuuauagaaucgg

SEQ ID NO: 631344 - RNA, 19 nt, Artificial Sequence
  Description of Artificial Sequence: Synthetic oligonucleotide
ugugguaguuccaguuccc

SEQ ID NO: 631345 - RNA, 19 nt, Artificial Sequence
  Description of Artificial Sequence: Synthetic oligonucleotide
uaacgccucuucaucuccg

SEQ ID NO: 631346 - RNA, 19 nt, Artificial Sequence
  Description of Artificial Sequence: Synthetic oligonucleotide
acuuccaaauccgggcgcc

SEQ ID NO: 631347 - RNA, 19 nt, Artificial Sequence
  Description of Artificial Sequence: Synthetic oligonucleotide
caauguauggcuggguuug

SEQ ID NO: 631348 - RNA, 19 nt, Artificial Sequence
  Description of Artificial Sequence: Synthetic oligonucleotide
aacuaagccugcaaugccu

SEQ ID NO: 631349 - RNA, 19 nt, Artificial Sequence
  Description of Artificial Sequence: Synthetic oligonucleotide
agaaggaaugacaauaguu

SEQ ID NO: 631350 - RNA, 19 nt, Artificial Sequence
  Description of Artificial Sequence: Synthetic oligonucleotide
caugcuucacauaucccuc

SEQ ID NO: 631351 - RNA, 19 nt, Artificial Sequence
  Description of Artificial Sequence: Synthetic oligonucleotide
agcauaaauaagacuagga

SEQ ID NO: 631352 - RNA, 19 nt, Artificial Sequence
  Description of Artificial Sequence: Synthetic oligonucleotide
auaucccucagccucuacu

SEQ ID NO: 631353 - RNA, 19 nt, Artificial Sequence
  Description of Artificial Sequence: Synthetic oligonucleotide
gaaggggagcauaaauaag

SEQ ID NO: 631354 - RNA, 19 nt, Artificial Sequence
  Description of Artificial Sequence: Synthetic oligonucleotide
cugguagcccagaaacugg

SEQ ID NO: 631355 - RNA, 19 nt, Artificial Sequence
  Description of Artificial Sequence: Synthetic oligonucleotide
aguugcuuucgccgucgcc

SEQ ID NO: 631356 - RNA, 19 nt, Artificial Sequence
  Description of Artificial Sequence: Synthetic oligonucleotide
agcgauacaagaauacagu

SEQ ID NO: 631357 - RNA, 19 nt, Artificial Sequence
  Description of Artificial Sequence: Synthetic oligonucleotide
ucacaggugagacacuauu

SEQ ID NO: 631358 - RNA, 19 nt, Artificial Sequence
  Description of Artificial Sequence: Synthetic oligonucleotide
guaguaacgccucuucauc

SEQ ID NO: 631359 - RNA, 19 nt, Artificial Sequence
  Description of Artificial Sequence: Synthetic oligonucleotide
ugagaucguauuuguacau

SEQ ID NO: 631360 - RNA, 19 nt, Artificial Sequence
  Description of Artificial Sequence: Synthetic oligonucleotide
cacaggugagacacuauug

SEQ ID NO: 631361 - RNA, 19 nt, Artificial Sequence
  Description of Artificial Sequence: Synthetic oligonucleotide
ucguaguaacgccucuuca

SEQ ID NO: 631362 - RNA, 19 nt, Artificial Sequence
  Description of Artificial Sequence: Synthetic oligonucleotide
cacgcaugccaccauaaug

SEQ ID NO: 631363 - RNA, 19 nt, Artificial Sequence
  Description of Artificial Sequence: Synthetic oligonucleotide
gucuggaguagacucauuc

SEQ ID NO: 631364 - RNA, 19 nt, Artificial Sequence
  Description of Artificial Sequence: Synthetic oligonucleotide
cucaaggguuuccacagug

SEQ ID NO: 631365 - RNA, 19 nt, Artificial Sequence
  Description of Artificial Sequence: Synthetic oligonucleotide
cacgauaucaucucuugaa

SEQ ID NO: 631366 - RNA, 19 nt, Artificial Sequence
  Description of Artificial Sequence: Synthetic oligonucleotide
gggagcauaaauaagacua

SEQ ID NO: 631367 - RNA, 19 nt, Artificial Sequence
  Description of Artificial Sequence: Synthetic oligonucleotide
cuucucccgagaaaauuug

SEQ ID NO: 631368 - RNA, 19 nt, Artificial Sequence
  Description of Artificial Sequence: Synthetic oligonucleotide
cguauaguguccaucacgc

SEQ ID NO: 631369 - RNA, 19 nt, Artificial Sequence
  Description of Artificial Sequence: Synthetic oligonucleotide
agcuacuaucaucuugucu

SEQ ID NO: 631370 - RNA, 19 nt, Artificial Sequence
  Description of Artificial Sequence: Synthetic oligonucleotide
uggaguagacucauucuuu

SEQ ID NO: 631371 - RNA, 19 nt, Artificial Sequence
  Description of Artificial Sequence: Synthetic oligonucleotide
uuuugacucgauugagguc

SEQ ID NO: 631372 - RNA, 19 nt, Artificial Sequence
  Description of Artificial Sequence: Synthetic oligonucleotide
cuguuguacgggcacacac

SEQ ID NO: 631373 - RNA, 19 nt, Artificial Sequence
  Description of Artificial Sequence: Synthetic oligonucleotide
cacaauggagcggugguag

SEQ ID NO: 631374 - RNA, 19 nt, Artificial Sequence
  Description of Artificial Sequence: Synthetic oligonucleotide
uucggcacaauggagcggu

SEQ ID NO: 631375 - RNA, 19 nt, Artificial Sequence
  Description of Artificial Sequence: Synthetic oligonucleotide
uuauagaaucggugacuga

SEQ ID NO: 631376 - RNA, 19 nt, Artificial Sequence
  Description of Artificial Sequence: Synthetic oligonucleotide
gacauucggcacaauggag

SEQ ID NO: 631377 - RNA, 19 nt, Artificial Sequence
  Description of Artificial Sequence: Synthetic oligonucleotide
ucaucuccggcucccaauc

SEQ ID NO: 631378 - RNA, 19 nt, Artificial Sequence
  Description of Artificial Sequence: Synthetic oligonucleotide
gguagagcuuauagaaucg

SEQ ID NO: 631379 - RNA, 19 nt, Artificial Sequence
  Description of Artificial Sequence: Synthetic oligonucleotide
aauggagcggugguagcca

SEQ ID NO: 631380 - RNA, 19 nt, Artificial Sequence
  Description of Artificial Sequence: Synthetic oligonucleotide
ucuuggcguugguagaaca

SEQ ID NO: 631381 - RNA, 19 nt, Artificial Sequence
  Description of Artificial Sequence: Synthetic oligonucleotide
uguagcccauccagaagga

SEQ ID NO: 631382 - RNA, 19 nt, Artificial Sequence
  Description of Artificial Sequence: Synthetic oligonucleotide
ggaguagacucauucuuug

SEQ ID NO: 631383 - RNA, 19 nt, Artificial Sequence
  Description of Artificial Sequence: Synthetic oligonucleotide
aaugucguauaguguccau

SEQ ID NO: 631384 - RNA, 19 nt, Artificial Sequence
  Description of Artificial Sequence: Synthetic oligonucleotide
aaucggugacugaagacau

SEQ ID NO: 631385 - RNA, 19 nt, Artificial Sequence
  Description of Artificial Sequence: Synthetic oligonucleotide
auaagacuaggaagggaag

SEQ ID NO: 631386 - RNA, 19 nt, Artificial Sequence
  Description of Artificial Sequence: Synthetic oligonucleotide
ucauuucgucguuuguggu

SEQ ID NO: 631387 - RNA, 19 nt, Artificial Sequence
  Description of Artificial Sequence: Synthetic oligonucleotide
augucguauaguguccauc

SEQ ID NO: 631388 - RNA, 19 nt, Artificial Sequence
  Description of Artificial Sequence: Synthetic oligonucleotide
gagaucguauuuguacaug

SEQ ID NO: 631389 - RNA, 19 nt, Artificial Sequence
  Description of Artificial Sequence: Synthetic oligonucleotide
acagcgauacaagaauaca

SEQ ID NO: 631390 - RNA, 19 nt, Artificial Sequence
  Description of Artificial Sequence: Synthetic oligonucleotide
auagaaucggugacugaag

SEQ ID NO: 631391 - RNA, 19 nt, Artificial Sequence
  Description of Artificial Sequence: Synthetic oligonucleotide
guaacgccucuucaucucc

SEQ ID NO: 631392 - RNA, 19 nt, Artificial Sequence
  Description of Artificial Sequence: Synthetic oligonucleotide
gaagcagucugggacuggc

SEQ ID NO: 631393 - RNA, 19 nt, Artificial Sequence
  Description of Artificial Sequence: Synthetic oligonucleotide
ugacaagaggaaguggcaa

SEQ ID NO: 631394 - RNA, 19 nt, Artificial Sequence
  Description of Artificial Sequence: Synthetic oligonucleotide
cauguagcccauccagaag

SEQ ID NO: 631395 - RNA, 19 nt, Artificial Sequence
  Description of Artificial Sequence: Synthetic oligonucleotide
uguuccggucacugguucc

SEQ ID NO: 631396 - RNA, 19 nt, Artificial Sequence
  Description of Artificial Sequence: Synthetic oligonucleotide
ccagcguagacuugaagag

SEQ ID NO: 631397 - RNA, 19 nt, Artificial Sequence
  Description of Artificial Sequence: Synthetic oligonucleotide
gucguuugugguuuugcca

SEQ ID NO: 631398 - RNA, 19 nt, Artificial Sequence
  Description of Artificial Sequence: Synthetic oligonucleotide
ucccacgcagucaugcuuc

SEQ ID NO: 631399 - RNA, 19 nt, Artificial Sequence
  Description of Artificial Sequence: Synthetic oligonucleotide
uggcguugguagaacaaaa

SEQ ID NO: 631400 - RNA, 19 nt, Artificial Sequence
  Description of Artificial Sequence: Synthetic oligonucleotide
guaucccacgcagucaugc

SEQ ID NO: 631401 - RNA, 19 nt, Artificial Sequence
  Description of Artificial Sequence: Synthetic oligonucleotide
auugcuaguggaagguuca

SEQ ID NO: 631402 - RNA, 19 nt, Artificial Sequence
  Description of Artificial Sequence: Synthetic oligonucleotide
gacuaggaagggaagucac

SEQ ID NO: 631403 - RNA, 19 nt, Artificial Sequence
  Description of Artificial Sequence: Synthetic oligonucleotide
cuaagccugcaaugccugg

SEQ ID NO: 631404 - RNA, 19 nt, Artificial Sequence
  Description of Artificial Sequence: Synthetic oligonucleotide
ucaucguaguaacgccucu

SEQ ID NO: 631405 - RNA, 19 nt, Artificial Sequence
  Description of Artificial Sequence: Synthetic oligonucleotide
guuggaaacugcgaugaga

SEQ ID NO: 631406 - RNA, 19 nt, Artificial Sequence
  Description of Artificial Sequence: Synthetic oligonucleotide
ucaggauuggauggagaac

SEQ ID NO: 631407 - RNA, 19 nt, Artificial Sequence
  Description of Artificial Sequence: Synthetic oligonucleotide
uccaucacgcaugccacca

SEQ ID NO: 631408 - RNA, 19 nt, Artificial Sequence
  Description of Artificial Sequence: Synthetic oligonucleotide
ggaguuguugaagucucgg

SEQ ID NO: 631409 - RNA, 19 nt, Artificial Sequence
  Description of Artificial Sequence: Synthetic oligonucleotide
cagaucccggauaggaaac

SEQ ID NO: 631410 - RNA, 19 nt, Artificial Sequence
  Description of Artificial Sequence: Synthetic oligonucleotide
cuguguucaugugaacccc

SEQ ID NO: 631411 - RNA, 19 nt, Artificial Sequence
  Description of Artificial Sequence: Synthetic oligonucleotide
agugggacacugagguagc

SEQ ID NO: 631412 - RNA, 19 nt, Artificial Sequence
  Description of Artificial Sequence: Synthetic oligonucleotide
acuucaggauuggauggag

SEQ ID NO: 631413 - RNA, 19 nt, Artificial Sequence
  Description of Artificial Sequence: Synthetic oligonucleotide
gggguauuggaugaagcag

SEQ ID NO: 631414 - RNA, 19 nt, Artificial Sequence
  Description of Artificial Sequence: Synthetic oligonucleotide
agacuaggaagggaaguca

SEQ ID NO: 631415 - RNA, 19 nt, Artificial Sequence
  Description of Artificial Sequence: Synthetic oligonucleotide
cagcguagacuugaagagg

SEQ ID NO: 631416 - RNA, 19 nt, Artificial Sequence
  Description of Artificial Sequence: Synthetic oligonucleotide
cauuaucagccacuaagaa

SEQ ID NO: 631417 - RNA, 19 nt, Artificial Sequence
  Description of Artificial Sequence: Synthetic oligonucleotide
auuucgucguuugugguuu

SEQ ID NO: 631418 - RNA, 19 nt, Artificial Sequence
  Description of Artificial Sequence: Synthetic oligonucleotide
uuggcguugguagaacaaa

SEQ ID NO: 631419 - RNA, 19 nt, Artificial Sequence
  Description of Artificial Sequence: Synthetic oligonucleotide
gaucguauuuguacauguc

SEQ ID NO: 631420 - RNA, 19 nt, Artificial Sequence
  Description of Artificial Sequence: Synthetic oligonucleotide
acagcagaagguauauggu

SEQ ID NO: 631421 - RNA, 19 nt, Artificial Sequence
  Description of Artificial Sequence: Synthetic oligonucleotide
cucuacuucaucguaguaa

SEQ ID NO: 631422 - RNA, 19 nt, Artificial Sequence
  Description of Artificial Sequence: Synthetic oligonucleotide
gcuguucuggcuugcggcg

SEQ ID NO: 631423 - RNA, 19 nt, Artificial Sequence
  Description of Artificial Sequence: Synthetic oligonucleotide
cacaaucagggcacaccag

SEQ ID NO: 631424 - RNA, 19 nt, Artificial Sequence
  Description of Artificial Sequence: Synthetic oligonucleotide
gaucccggauaggaaacug

SEQ ID NO: 631425 - RNA, 19 nt, Artificial Sequence
  Description of Artificial Sequence: Synthetic oligonucleotide
gcaggcaaaugucguauag

SEQ ID NO: 631426 - RNA, 19 nt, Artificial Sequence
  Description of Artificial Sequence: Synthetic oligonucleotide
uugcaggcaaaugucguau

SEQ ID NO: 631427 - RNA, 19 nt, Artificial Sequence
  Description of Artificial Sequence: Synthetic oligonucleotide
gacaauaguuccugugagu

SEQ ID NO: 631428 - RNA, 19 nt, Artificial Sequence
  Description of Artificial Sequence: Synthetic oligonucleotide
gaagucucgggauuggguu

SEQ ID NO: 631429 - RNA, 19 nt, Artificial Sequence
  Description of Artificial Sequence: Synthetic oligonucleotide
cucgauugagguccucaug

SEQ ID NO: 631430 - RNA, 19 nt, Artificial Sequence
  Description of Artificial Sequence: Synthetic oligonucleotide
ucgucguuugugguuuugc

SEQ ID NO: 631431 - RNA, 19 nt, Artificial Sequence
  Description of Artificial Sequence: Synthetic oligonucleotide
ucaauccgaccagucaccu

SEQ ID NO: 631432 - RNA, 19 nt, Artificial Sequence
  Description of Artificial Sequence: Synthetic oligonucleotide
acuaagccugcaaugccug

SEQ ID NO: 631433 - RNA, 19 nt, Artificial Sequence
  Description of Artificial Sequence: Synthetic oligonucleotide
uuucgccgucgccuugggg

SEQ ID NO: 631434 - RNA, 19 nt, Artificial Sequence
  Description of Artificial Sequence: Synthetic oligonucleotide
agaacacuuugggguaagg

SEQ ID NO: 631435 - RNA, 19 nt, Artificial Sequence
  Description of Artificial Sequence: Synthetic oligonucleotide
cucgggauuggguucgcuc

SEQ ID NO: 631436 - RNA, 19 nt, Artificial Sequence
  Description of Artificial Sequence: Synthetic oligonucleotide
gcguugguagaacaaaaca

SEQ ID NO: 631437 - RNA, 19 nt, Artificial Sequence
  Description of Artificial Sequence: Synthetic oligonucleotide
guugccuuucuuggggacc

SEQ ID NO: 631438 - RNA, 19 nt, Artificial Sequence
  Description of Artificial Sequence: Synthetic oligonucleotide
uaucccacgcagucaugcu

SEQ ID NO: 631439 - RNA, 19 nt, Artificial Sequence
  Description of Artificial Sequence: Synthetic oligonucleotide
aauguauggcuggguuuga

SEQ ID NO: 631440 - RNA, 19 nt, Artificial Sequence
  Description of Artificial Sequence: Synthetic oligonucleotide
gcaaugaacacagguuaag

SEQ ID NO: 631441 - RNA, 19 nt, Artificial Sequence
  Description of Artificial Sequence: Synthetic oligonucleotide
acgcagucaugcuucacau

SEQ ID NO: 631442 - RNA, 19 nt, Artificial Sequence
  Description of Artificial Sequence: Synthetic oligonucleotide
uucgcucucgcagguaaac

SEQ ID NO: 631443 - RNA, 19 nt, Artificial Sequence
  Description of Artificial Sequence: Synthetic oligonucleotide
cuugcggcggggauccaug

SEQ ID NO: 631444 - RNA, 19 nt, Artificial Sequence
  Description of Artificial Sequence: Synthetic oligonucleotide
cacgcagucaugcuucaca

SEQ ID NO: 631445 - RNA, 19 nt, Artificial Sequence
  Description of Artificial Sequence: Synthetic oligonucleotide
acuggcggcgacccacauc

SEQ ID NO: 631446 - RNA, 19 nt, Artificial Sequence
  Description of Artificial Sequence: Synthetic oligonucleotide
cccuuaguuaacauccaug

SEQ ID NO: 631447 - RNA, 19 nt, Artificial Sequence
  Description of Artificial Sequence: Synthetic oligonucleotide
uucaggcaacauccagaga

SEQ ID NO: 631448 - RNA, 19 nt, Artificial Sequence
  Description of Artificial Sequence: Synthetic oligonucleotide
caacaggcucaauccgacc

SEQ ID NO: 631449 - RNA, 19 nt, Artificial Sequence
  Description of Artificial Sequence: Synthetic oligonucleotide
uugcggcggggauccaugg

SEQ ID NO: 631450 - RNA, 19 nt, Artificial Sequence
  Description of Artificial Sequence: Synthetic oligonucleotide
guacaugucuggaguagac

SEQ ID NO: 631451 - RNA, 19 nt, Artificial Sequence
  Description of Artificial Sequence: Synthetic oligonucleotide
gaugggaaggggagcauaa

SEQ ID NO: 631452 - RNA, 19 nt, Artificial Sequence
  Description of Artificial Sequence: Synthetic oligonucleotide
guugcuuucgccgucgccu

SEQ ID NO: 631453 - RNA, 19 nt, Artificial Sequence
  Description of Artificial Sequence: Synthetic oligonucleotide
uugcuaguggaagguucag

SEQ ID NO: 631454 - RNA, 19 nt, Artificial Sequence
  Description of Artificial Sequence: Synthetic oligonucleotide
aaccacgauaucaucucuu

SEQ ID NO: 631455 - RNA, 19 nt, Artificial Sequence
  Description of Artificial Sequence: Synthetic oligonucleotide
auggagcggugguagccag

SEQ ID NO: 631456 - RNA, 19 nt, Artificial Sequence
  Description of Artificial Sequence: Synthetic oligonucleotide
aacgcuucagguggauaau

SEQ ID NO: 631457 - RNA, 19 nt, Artificial Sequence
  Description of Artificial Sequence: Synthetic oligonucleotide
caguagccacgaacuaagc

SEQ ID NO: 631458 - RNA, 19 nt, Artificial Sequence
  Description of Artificial Sequence: Synthetic oligonucleotide
cgaacuaagccugcaaugc

SEQ ID NO: 631459 - RNA, 19 nt, Artificial Sequence
  Description of Artificial Sequence: Synthetic oligonucleotide
ggauaggaaacugcaccag

SEQ ID NO: 631460 - RNA, 19 nt, Artificial Sequence
  Description of Artificial Sequence: Synthetic oligonucleotide
cuuggcguugguagaacaa

SEQ ID NO: 631461 - RNA, 19 nt, Artificial Sequence
  Description of Artificial Sequence: Synthetic oligonucleotide
acuaggaagggaagucacu

SEQ ID NO: 631462 - RNA, 19 nt, Artificial Sequence
  Description of Artificial Sequence: Synthetic oligonucleotide
aacugcgaugagaucguau

SEQ ID NO: 631463 - RNA, 19 nt, Artificial Sequence
  Description of Artificial Sequence: Synthetic oligonucleotide
gucguauaguguccaucac

SEQ ID NO: 631464 - RNA, 19 nt, Artificial Sequence
  Description of Artificial Sequence: Synthetic oligonucleotide
gcuacucagaggauccucc

SEQ ID NO: 631465 - RNA, 19 nt, Artificial Sequence
  Description of Artificial Sequence: Synthetic oligonucleotide
ccucaacaggcucaauccg

SEQ ID NO: 631466 - RNA, 19 nt, Artificial Sequence
  Description of Artificial Sequence: Synthetic oligonucleotide
cuucaggauuggauggaga

SEQ ID NO: 631467 - RNA, 19 nt, Artificial Sequence
  Description of Artificial Sequence: Synthetic oligonucleotide
gugguagccagaccagguc

SEQ ID NO: 631468 - RNA, 19 nt, Artificial Sequence
  Description of Artificial Sequence: Synthetic oligonucleotide
aucgcacagcucaacauau

SEQ ID NO: 631469 - RNA, 19 nt, Artificial Sequence
  Description of Artificial Sequence: Synthetic oligonucleotide
auucggcacaauggagcgg

SEQ ID NO: 631470 - RNA, 19 nt, Artificial Sequence
  Description of Artificial Sequence: Synthetic oligonucleotide
uuccaaauccgggcgccca

SEQ ID NO: 631471 - RNA, 19 nt, Artificial Sequence
  Description of Artificial Sequence: Synthetic oligonucleotide
cagguggauaaugagaacu

SEQ ID NO: 631472 - RNA, 19 nt, Artificial Sequence
  Description of Artificial Sequence: Synthetic oligonucleotide
gucuaagagaaaugggcau

SEQ ID NO: 631473 - RNA, 19 nt, Artificial Sequence
  Description of Artificial Sequence: Synthetic oligonucleotide
gagguagcagaagggguca

SEQ ID NO: 631474 - RNA, 19 nt, Artificial Sequence
  Description of Artificial Sequence: Synthetic oligonucleotide
cuucaucguaguaacgccu

SEQ ID NO: 631475 - RNA, 19 nt, Artificial Sequence
  Description of Artificial Sequence: Synthetic oligonucleotide
gugguaguuccaguucccc

SEQ ID NO: 631476 - RNA, 19 nt, Artificial Sequence
  Description of Artificial Sequence: Synthetic oligonucleotide
cccgagaaaauuuggagaa

SEQ ID NO: 631477 - RNA, 19 nt, Artificial Sequence
  Description of Artificial Sequence: Synthetic oligonucleotide
auacagcgauacaagaaua

SEQ ID NO: 631478 - RNA, 19 nt, Artificial Sequence
  Description of Artificial Sequence: Synthetic oligonucleotide
gcucucgcagguaaacagg

SEQ ID NO: 631479 - RNA, 19 nt, Artificial Sequence
  Description of Artificial Sequence: Synthetic oligonucleotide
aguguccaucacgcaugcc

SEQ ID NO: 631480 - RNA, 19 nt, Artificial Sequence
  Description of Artificial Sequence: Synthetic oligonucleotide
ugcaggcaaaugucguaua

SEQ ID NO: 631481 - RNA, 19 nt, Artificial Sequence
  Description of Artificial Sequence: Synthetic oligonucleotide
gaaacugcgaugagaucgu

SEQ ID NO: 631482 - RNA, 19 nt, Artificial Sequence
  Description of Artificial Sequence: Synthetic oligonucleotide
cuacucagaggauccucca

SEQ ID NO: 631483 - RNA, 19 nt, Artificial Sequence
  Description of Artificial Sequence: Synthetic oligonucleotide
aucccacgcagucaugcuu

SEQ ID NO: 631484 - RNA, 19 nt, Artificial Sequence
  Description of Artificial Sequence: Synthetic oligonucleotide
ggguugacaagaggaagug

SEQ ID NO: 631485 - RNA, 19 nt, Artificial Sequence
  Description of Artificial Sequence: Synthetic oligonucleotide
cuguucuggcuugcggcgg

SEQ ID NO: 631486 - RNA, 19 nt, Artificial Sequence
  Description of Artificial Sequence: Synthetic oligonucleotide
uucgucguuugugguuuug

SEQ ID NO: 631487 - RNA, 19 nt, Artificial Sequence
  Description of Artificial Sequence: Synthetic oligonucleotide
ucgcucucgcagguaaaca

SEQ ID NO: 631488 - RNA, 19 nt, Artificial Sequence
  Description of Artificial Sequence: Synthetic oligonucleotide
agcuucucccgagaaaauu

SEQ ID NO: 631489 - RNA, 19 nt, Artificial Sequence
  Description of Artificial Sequence: Synthetic oligonucleotide
cacuguuguacgggcacac

SEQ ID NO: 631490 - RNA, 19 nt, Artificial Sequence
  Description of Artificial Sequence: Synthetic oligonucleotide
caccagcguagacuugaag

SEQ ID NO: 631491 - RNA, 19 nt, Artificial Sequence
  Description of Artificial Sequence: Synthetic oligonucleotide
gguauuggaugaagcaguc

SEQ ID NO: 631492 - RNA, 19 nt, Artificial Sequence
  Description of Artificial Sequence: Synthetic oligonucleotide
ggcgacccacaucuuggcg

SEQ ID NO: 631493 - RNA, 19 nt, Artificial Sequence
  Description of Artificial Sequence: Synthetic oligonucleotide
cugggacuggcggcgaccc

SEQ ID NO: 631494 - RNA, 19 nt, Artificial Sequence
  Description of Artificial Sequence: Synthetic oligonucleotide
ugcuuucgccgucgccuug

SEQ ID NO: 631495 - RNA, 19 nt, Artificial Sequence
  Description of Artificial Sequence: Synthetic oligonucleotide
acgggcacacacaggcagg

SEQ ID NO: 631496 - RNA, 19 nt, Artificial Sequence
  Description of Artificial Sequence: Synthetic oligonucleotide
uggagcggugguagccaga

SEQ ID NO: 631497 - RNA, 19 nt, Artificial Sequence
  Description of Artificial Sequence: Synthetic oligonucleotide
ggcguugguagaacaaaac

SEQ ID NO: 631498 - RNA, 19 nt, Artificial Sequence
  Description of Artificial Sequence: Synthetic oligonucleotide
cuuccaaauccgggcgccc

SEQ ID NO: 631499 - RNA, 19 nt, Artificial Sequence
  Description of Artificial Sequence: Synthetic oligonucleotide
cuuucgccgucgccuuggg

SEQ ID NO: 631500 - RNA, 19 nt, Artificial Sequence
  Description of Artificial Sequence: Synthetic oligonucleotide
aucccgauccaagaugcua

SEQ ID NO: 631501 - RNA, 19 nt, Artificial Sequence
  Description of Artificial Sequence: Synthetic oligonucleotide
caauccgaccagucaccuc

SEQ ID NO: 631502 - RNA, 19 nt, Artificial Sequence
  Description of Artificial Sequence: Synthetic oligonucleotide
aggauuggauggagaacca

SEQ ID NO: 631503 - RNA, 19 nt, Artificial Sequence
  Description of Artificial Sequence: Synthetic oligonucleotide
uugcuuucgccgucgccuu

SEQ ID NO: 631504 - RNA, 19 nt, Artificial Sequence
  Description of Artificial Sequence: Synthetic oligonucleotide
ccuuguugcaggcaaaugu

SEQ ID NO: 631505 - RNA, 19 nt, Artificial Sequence
  Description of Artificial Sequence: Synthetic oligonucleotide
gcggcgacccacaucuugg

SEQ ID NO: 631506 - RNA, 19 nt, Artificial Sequence
  Description of Artificial Sequence: Synthetic oligonucleotide
guaguuccaguuccccuua

SEQ ID NO: 631507 - RNA, 19 nt, Artificial Sequence
  Description of Artificial Sequence: Synthetic oligonucleotide
ccacaaucagggcacacca

SEQ ID NO: 631508 - RNA, 19 nt, Artificial Sequence
  Description of Artificial Sequence: Synthetic oligonucleotide
cgucguuugugguuuugcc

SEQ ID NO: 631509 - RNA, 19 nt, Artificial Sequence
  Description of Artificial Sequence: Synthetic oligonucleotide
gggauuggguucgcucucg

SEQ ID NO: 631510 - RNA, 19 nt, Artificial Sequence
  Description of Artificial Sequence: Synthetic oligonucleotide
cacgaacuaagccugcaau

SEQ ID NO: 631511 - RNA, 19 nt, Artificial Sequence
  Description of Artificial Sequence: Synthetic oligonucleotide
ggcggcgacccacaucuug

SEQ ID NO: 631512 - RNA, 19 nt, Artificial Sequence
  Description of Artificial Sequence: Synthetic oligonucleotide
gcagguaaacaggaaccac

SEQ ID NO: 631513 - RNA, 19 nt, Artificial Sequence
  Description of Artificial Sequence: Synthetic oligonucleotide
cauaucccucagccucuac

SEQ ID NO: 631514 - RNA, 19 nt, Artificial Sequence
  Description of Artificial Sequence: Synthetic oligonucleotide
ggguauuggaugaagcagu

SEQ ID NO: 631515 - RNA, 19 nt, Artificial Sequence
  Description of Artificial Sequence: Synthetic oligonucleotide
ucggcacaauggagcggug

SEQ ID NO: 631516 - RNA, 19 nt, Artificial Sequence
  Description of Artificial Sequence: Synthetic oligonucleotide
gcuuucgccgucgccuugg

SEQ ID NO: 631517 - RNA, 19 nt, Artificial Sequence
  Description of Artificial Sequence: Synthetic oligonucleotide
ggauuggguucgcucucgc

SEQ ID NO: 631518 - RNA, 19 nt, Artificial Sequence
  Description of Artificial Sequence: Synthetic oligonucleotide
aaacugcgaugagaucgua

SEQ ID NO: 631519 - RNA, 19 nt, Artificial Sequence
  Description of Artificial Sequence: Synthetic oligonucleotide
cuugaacccucaacaggcu

SEQ ID NO: 631520 - RNA, 19 nt, Artificial Sequence
  Description of Artificial Sequence: Synthetic oligonucleotide
cacauaucccucagccucu

SEQ ID NO: 631521 - RNA, 19 nt, Artificial Sequence
  Description of Artificial Sequence: Synthetic oligonucleotide
cucugugguaguuccaguu

SEQ ID NO: 631522 - RNA, 19 nt, Artificial Sequence
  Description of Artificial Sequence: Synthetic oligonucleotide
ggggagcauaaauaagacu

SEQ ID NO: 631523 - RNA, 19 nt, Artificial Sequence
  Description of Artificial Sequence: Synthetic oligonucleotide
uuucgucguuugugguuuu

SEQ ID NO: 631524 - RNA, 19 nt, Artificial Sequence
  Description of Artificial Sequence: Synthetic oligonucleotide
caucacgcaugccaccaua

SEQ ID NO: 631525 - RNA, 19 nt, Artificial Sequence
  Description of Artificial Sequence: Synthetic oligonucleotide
uucuggcuugcggcgggga

SEQ ID NO: 631526 - RNA, 19 nt, Artificial Sequence
  Description of Artificial Sequence: Synthetic oligonucleotide
guucuggcuugcggcgggg

SEQ ID NO: 631527 - RNA, 19 nt, Artificial Sequence
  Description of Artificial Sequence: Synthetic oligonucleotide
ggcacaccagcguagacuu

SEQ ID NO: 631528 - RNA, 19 nt, Artificial Sequence
  Description of Artificial Sequence: Synthetic oligonucleotide
ugccaccauaaugguugga

SEQ ID NO: 631529 - RNA, 19 nt, Artificial Sequence
  Description of Artificial Sequence: Synthetic oligonucleotide
ggcaauguauggcuggguu

SEQ ID NO: 631530 - RNA, 19 nt, Artificial Sequence
  Description of Artificial Sequence: Synthetic oligonucleotide
gguuccauuggaguucacu

SEQ ID NO: 631531 - RNA, 19 nt, Artificial Sequence
  Description of Artificial Sequence: Synthetic oligonucleotide
uccgaccagucaccucaua

SEQ ID NO: 631532 - RNA, 19 nt, Artificial Sequence
  Description of Artificial Sequence: Synthetic oligonucleotide
gggguugacaagaggaagu

SEQ ID NO: 631533 - RNA, 19 nt, Artificial Sequence
  Description of Artificial Sequence: Synthetic oligonucleotide
caccaucgcacagcucaac

SEQ ID NO: 631534 - RNA, 19 nt, Artificial Sequence
  Description of Artificial Sequence: Synthetic oligonucleotide
caagacccuccuggaggag

SEQ ID NO: 631535 - RNA, 19 nt, Artificial Sequence
  Description of Artificial Sequence: Synthetic oligonucleotide
gcgacccacaucuuggcgu

SEQ ID NO: 631536 - RNA, 19 nt, Artificial Sequence
  Description of Artificial Sequence: Synthetic oligonucleotide
cuccuggaggagacaggca

SEQ ID NO: 631537 - RNA, 19 nt, Artificial Sequence
  Description of Artificial Sequence: Synthetic oligonucleotide
caggcaaaugucguauagu

SEQ ID NO: 631538 - RNA, 19 nt, Artificial Sequence
  Description of Artificial Sequence: Synthetic oligonucleotide
guagcccauccagaaggaa

SEQ ID NO: 631539 - RNA, 19 nt, Artificial Sequence
  Description of Artificial Sequence: Synthetic oligonucleotide
cgggcgcccagcaccaucg

SEQ ID NO: 631540 - RNA, 19 nt, Artificial Sequence
  Description of Artificial Sequence: Synthetic oligonucleotide
ccaguuccccuuaguuaac

SEQ ID NO: 631541 - RNA, 19 nt, Artificial Sequence
  Description of Artificial Sequence: Synthetic oligonucleotide
acauaucccucagccucua

SEQ ID NO: 631542 - RNA, 19 nt, Artificial Sequence
  Description of Artificial Sequence: Synthetic oligonucleotide
ccacgauaucaucucuuga

SEQ ID NO: 631543 - RNA, 19 nt, Artificial Sequence
  Description of Artificial Sequence: Synthetic oligonucleotide
gguagcccagaaacuggga

SEQ ID NO: 631544 - RNA, 19 nt, Artificial Sequence
  Description of Artificial Sequence: Synthetic oligonucleotide
ugacucgauugagguccuc

SEQ ID NO: 631545 - RNA, 19 nt, Artificial Sequence
  Description of Artificial Sequence: Synthetic oligonucleotide
gcuucucccgagaaaauuu

SEQ ID NO: 631546 - RNA, 19 nt, Artificial Sequence
  Description of Artificial Sequence: Synthetic oligonucleotide
cugcgaugagaucguauuu

SEQ ID NO: 631547 - RNA, 19 nt, Artificial Sequence
  Description of Artificial Sequence: Synthetic oligonucleotide
cguaguaacgccucuucau

SEQ ID NO: 631548 - RNA, 19 nt, Artificial Sequence
  Description of Artificial Sequence: Synthetic oligonucleotide
guucgcucucgcagguaaa

SEQ ID NO: 631549 - RNA, 19 nt, Artificial Sequence
  Description of Artificial Sequence: Synthetic oligonucleotide
gcucaacauauucuuuguu

SEQ ID NO: 631550 - RNA, 19 nt, Artificial Sequence
  Description of Artificial Sequence: Synthetic oligonucleotide
ccaauccauggcaauguau

SEQ ID NO: 631551 - RNA, 19 nt, Artificial Sequence
  Description of Artificial Sequence: Synthetic oligonucleotide
ggcucccaauccauggcaa

SEQ ID NO: 631552 - RNA, 19 nt, Artificial Sequence
  Description of Artificial Sequence: Synthetic oligonucleotide
gucucgggauuggguucgc

SEQ ID NO: 631553 - RNA, 19 nt, Artificial Sequence
  Description of Artificial Sequence: Synthetic oligonucleotide
ccacgaacuaagccugcaa

SEQ ID NO: 631554 - RNA, 19 nt, Artificial Sequence
  Description of Artificial Sequence: Synthetic oligonucleotide
caucguaguaacgccucuu

SEQ ID NO: 631555 - RNA, 19 nt, Artificial Sequence
  Description of Artificial Sequence: Synthetic oligonucleotide
ccauuggaguucacugucu

SEQ ID NO: 631556 - RNA, 19 nt, Artificial Sequence
  Description of Artificial Sequence: Synthetic oligonucleotide
cccagaaacugggaugcaa

SEQ ID NO: 631557 - RNA, 19 nt, Artificial Sequence
  Description of Artificial Sequence: Synthetic oligonucleotide
caggcucaauccgaccagu

SEQ ID NO: 631558 - RNA, 19 nt, Artificial Sequence
  Description of Artificial Sequence: Synthetic oligonucleotide
cggcgacccacaucuuggc

SEQ ID NO: 631559 - RNA, 19 nt, Artificial Sequence
  Description of Artificial Sequence: Synthetic oligonucleotide
gcagugggacacugaggua

SEQ ID NO: 631560 - RNA, 19 nt, Artificial Sequence
  Description of Artificial Sequence: Synthetic oligonucleotide
ccgaccagucaccucauau

SEQ ID NO: 631561 - RNA, 19 nt, Artificial Sequence
  Description of Artificial Sequence: Synthetic oligonucleotide
caucagcuacuaucaucuu

SEQ ID NO: 631562 - RNA, 19 nt, Artificial Sequence
  Description of Artificial Sequence: Synthetic oligonucleotide
cgaugagaucguauuugua

SEQ ID NO: 631563 - RNA, 19 nt, Artificial Sequence
  Description of Artificial Sequence: Synthetic oligonucleotide
cgggauuggguucgcucuc

SEQ ID NO: 631564 - RNA, 19 nt, Artificial Sequence
  Description of Artificial Sequence: Synthetic oligonucleotide
uggcggcgacccacaucuu

SEQ ID NO: 631565 - RNA, 19 nt, Artificial Sequence
  Description of Artificial Sequence: Synthetic oligonucleotide
gacuggcggcgacccacau

SEQ ID NO: 631566 - RNA, 19 nt, Artificial Sequence
  Description of Artificial Sequence: Synthetic oligonucleotide
ggacuggcggcgacccaca

SEQ ID NO: 631567 - RNA, 19 nt, Artificial Sequence
  Description of Artificial Sequence: Synthetic oligonucleotide
ccucuacuucaucguagua

SEQ ID NO: 631568 - RNA, 19 nt, Artificial Sequence
  Description of Artificial Sequence: Synthetic oligonucleotide
cggcucccaauccauggca

SEQ ID NO: 631569 - RNA, 19 nt, Artificial Sequence
  Description of Artificial Sequence: Synthetic oligonucleotide
cccacgcagucaugcuuca

SEQ ID NO: 631570 - RNA, 19 nt, Artificial Sequence
  Description of Artificial Sequence: Synthetic oligonucleotide
cccgauccaagaugcuacu

SEQ ID NO: 631571 - RNA, 19 nt, Artificial Sequence
  Description of Artificial Sequence: Synthetic oligonucleotide
ccacgcagucaugcuucac

SEQ ID NO: 631572 - RNA, 19 nt, Artificial Sequence
  Description of Artificial Sequence: Synthetic oligonucleotide
ccgggcgcccagcaccauc

SEQ ID NO: 631573 - RNA, 19 nt, Artificial Sequence
  Description of Artificial Sequence: Synthetic oligonucleotide
ccccuuaguuaacauccau

SEQ ID NO: 631574 - RNA, 19 nt, Artificial Sequence
  Description of Artificial Sequence: Synthetic oligonucleotide
uccgggcgcccagcaccau

SEQ ID NO: 631575 - RNA, 19 nt, Artificial Sequence
  Description of Artificial Sequence: Synthetic oligonucleotide
ccgagaaaauuuggagaau

SEQ ID NO: 631576 - RNA, 19 nt, Artificial Sequence
  Description of Artificial Sequence: Synthetic oligonucleotide
gcuugcggcggggauccau

SEQ ID NO: 631577 - RNA, 19 nt, Artificial Sequence
  Description of Artificial Sequence: Synthetic oligonucleotide
cgacccacaucuuggcguu

SEQ ID NO: 631578 - RNA, 19 nt, Artificial Sequence
  Description of Artificial Sequence: Synthetic oligonucleotide
ccaucacgcaugccaccau

SEQ ID NO: 631579 - RNA, 19 nt, Artificial Sequence
  Description of Artificial Sequence: Synthetic oligonucleotide
ggcuugcggcggggaucca

SEQ ID NO: 631580 - RNA, 19 nt, Artificial Sequence
  Description of Artificial Sequence: Synthetic oligonucleotide
auagauuacacacauacac

SEQ ID NO: 631581 - RNA, 19 nt, Artificial Sequence
  Description of Artificial Sequence: Synthetic oligonucleotide
aaccuaauagauuacacac

SEQ ID NO: 631582 - RNA, 19 nt, Artificial Sequence
  Description of Artificial Sequence: Synthetic oligonucleotide
ucaaauaggaugcagauga

SEQ ID NO: 631583 - RNA, 19 nt, Artificial Sequence
  Description of Artificial Sequence: Synthetic oligonucleotide
aguauaaagaaagauaaac

SEQ ID NO: 631584 - RNA, 19 nt, Artificial Sequence
  Description of Artificial Sequence: Synthetic oligonucleotide
auauaggauauacaaaagc

SEQ ID NO: 631585 - RNA, 19 nt, Artificial Sequence
  Description of Artificial Sequence: Synthetic oligonucleotide
uuuauaaccaauuccuagg

SEQ ID NO: 631586 - RNA, 19 nt, Artificial Sequence
  Description of Artificial Sequence: Synthetic oligonucleotide
auaaacuugcuuuaggcac

SEQ ID NO: 631587 - RNA, 19 nt, Artificial Sequence
  Description of Artificial Sequence: Synthetic oligonucleotide
uaaauauuggcuaacagaa

SEQ ID NO: 631588 - RNA, 19 nt, Artificial Sequence
  Description of Artificial Sequence: Synthetic oligonucleotide
auauuaacaucauacguac

SEQ ID NO: 631589 - RNA, 19 nt, Artificial Sequence
  Description of Artificial Sequence: Synthetic oligonucleotide
agauaaacuugcuuuaggc

SEQ ID NO: 631590 - RNA, 19 nt, Artificial Sequence
  Description of Artificial Sequence: Synthetic oligonucleotide
aauuguaacugauuuagca

SEQ ID NO: 631591 - RNA, 19 nt, Artificial Sequence
  Description of Artificial Sequence: Synthetic oligonucleotide
agagacaaugcuuuaaugg

SEQ ID NO: 631592 - RNA, 19 nt, Artificial Sequence
  Description of Artificial Sequence: Synthetic oligonucleotide
auggcuaccauauuggugg

SEQ ID NO: 631593 - RNA, 19 nt, Artificial Sequence
  Description of Artificial Sequence: Synthetic oligonucleotide
gaaagagauauugagaucc

SEQ ID NO: 631594 - RNA, 19 nt, Artificial Sequence
  Description of Artificial Sequence: Synthetic oligonucleotide
ugcagaugaauuaugaaug

SEQ ID NO: 631595 - RNA, 19 nt, Artificial Sequence
  Description of Artificial Sequence: Synthetic oligonucleotide
acugauuuagcauaagcag

SEQ ID NO: 631596 - RNA, 19 nt, Artificial Sequence
  Description of Artificial Sequence: Synthetic oligonucleotide
gauauuaauggacuguagc

SEQ ID NO: 631597 - RNA, 19 nt, Artificial Sequence
  Description of Artificial Sequence: Synthetic oligonucleotide
cauuauauugcaauuuugc

SEQ ID NO: 631598 - RNA, 19 nt, Artificial Sequence
  Description of Artificial Sequence: Synthetic oligonucleotide
ugcacguagauauauacag

SEQ ID NO: 631599 - RNA, 19 nt, Artificial Sequence
  Description of Artificial Sequence: Synthetic oligonucleotide
ugagaaauauccauuauau

SEQ ID NO: 631600 - RNA, 19 nt, Artificial Sequence
  Description of Artificial Sequence: Synthetic oligonucleotide
ucauacguacacaagagug

SEQ ID NO: 631601 - RNA, 19 nt, Artificial Sequence
  Description of Artificial Sequence: Synthetic oligonucleotide
uuuagaaguauuuacccac

SEQ ID NO: 631602 - RNA, 19 nt, Artificial Sequence
  Description of Artificial Sequence: Synthetic oligonucleotide
agaaagauaaacuugcuuu

SEQ ID NO: 631603 - RNA, 19 nt, Artificial Sequence
  Description of Artificial Sequence: Synthetic oligonucleotide
uuaagauuacuauuucugc

SEQ ID NO: 631604 - RNA, 19 nt, Artificial Sequence
  Description of Artificial Sequence: Synthetic oligonucleotide
aagucucggugucaaaugc

SEQ ID NO: 631605 - RNA, 19 nt, Artificial Sequence
  Description of Artificial Sequence: Synthetic oligonucleotide
gaacccacaacaaacauag

SEQ ID NO: 631606 - RNA, 19 nt, Artificial Sequence
  Description of Artificial Sequence: Synthetic oligonucleotide
uggauuggaacccacaaca

SEQ ID NO: 631607 - RNA, 19 nt, Artificial Sequence
  Description of Artificial Sequence: Synthetic oligonucleotide
ucuuuaacuagguaagggc

SEQ ID NO: 631608 - RNA, 19 nt, Artificial Sequence
  Description of Artificial Sequence: Synthetic oligonucleotide
agaugaauuaugaaugggc

SEQ ID NO: 631609 - RNA, 19 nt, Artificial Sequence
  Description of Artificial Sequence: Synthetic oligonucleotide
acuuucugcaauuaaaggu

SEQ ID NO: 631610 - RNA, 19 nt, Artificial Sequence
  Description of Artificial Sequence: Synthetic oligonucleotide
uagucuuuaacuagguaag

SEQ ID NO: 631611 - RNA, 19 nt, Artificial Sequence
  Description of Artificial Sequence: Synthetic oligonucleotide
agccauaguaauuuacagc

SEQ ID NO: 631612 - RNA, 19 nt, Artificial Sequence
  Description of Artificial Sequence: Synthetic oligonucleotide
agauauuaacaucauacgu

SEQ ID NO: 631613 - RNA, 19 nt, Artificial Sequence
  Description of Artificial Sequence: Synthetic oligonucleotide
agaaucaauucccuagugg

SEQ ID NO: 631614 - RNA, 19 nt, Artificial Sequence
  Description of Artificial Sequence: Synthetic oligonucleotide
uuagcauaagcagagaacu

SEQ ID NO: 631615 - RNA, 19 nt, Artificial Sequence
  Description of Artificial Sequence: Synthetic oligonucleotide
aguuuuauaaccaauuccu

SEQ ID NO: 631616 - RNA, 19 nt, Artificial Sequence
  Description of Artificial Sequence: Synthetic oligonucleotide
uuuagcauaagcagagaac

SEQ ID NO: 631617 - RNA, 19 nt, Artificial Sequence
  Description of Artificial Sequence: Synthetic oligonucleotide
uugcauuuaagucucggug

SEQ ID NO: 631618 - RNA, 19 nt, Artificial Sequence
  Description of Artificial Sequence: Synthetic oligonucleotide
ucaguaucagcauauuccc

SEQ ID NO: 631619 - RNA, 19 nt, Artificial Sequence
  Description of Artificial Sequence: Synthetic oligonucleotide
cacguagauauauacaggc

SEQ ID NO: 631620 - RNA, 19 nt, Artificial Sequence
  Description of Artificial Sequence: Synthetic oligonucleotide
uugcauagcaccccaaaag

SEQ ID NO: 631621 - RNA, 19 nt, Artificial Sequence
  Description of Artificial Sequence: Synthetic oligonucleotide
uauugagauccccaaaaca

SEQ ID NO: 631622 - RNA, 19 nt, Artificial Sequence
  Description of Artificial Sequence: Synthetic oligonucleotide
aguauuuacccacagcccu

SEQ ID NO: 631623 - RNA, 19 nt, Artificial Sequence
  Description of Artificial Sequence: Synthetic oligonucleotide
uaagauuacuauuucugcu

SEQ ID NO: 631624 - RNA, 19 nt, Artificial Sequence
  Description of Artificial Sequence: Synthetic oligonucleotide
ugucaaaugcacugagugg

SEQ ID NO: 631625 - RNA, 19 nt, Artificial Sequence
  Description of Artificial Sequence: Synthetic oligonucleotide
gguagauagaaucaauucc

SEQ ID NO: 631626 - RNA, 19 nt, Artificial Sequence
  Description of Artificial Sequence: Synthetic oligonucleotide
uuuauucugaaaccagacu

SEQ ID NO: 631627 - RNA, 19 nt, Artificial Sequence
  Description of Artificial Sequence: Synthetic oligonucleotide
agaaauaaaucagccauag

SEQ ID NO: 631628 - RNA, 19 nt, Artificial Sequence
  Description of Artificial Sequence: Synthetic oligonucleotide
agaaaguagcacuaggaga

SEQ ID NO: 631629 - RNA, 19 nt, Artificial Sequence
  Description of Artificial Sequence: Synthetic oligonucleotide
ugaauuaugaaugggcaac

SEQ ID NO: 631630 - RNA, 19 nt, Artificial Sequence
  Description of Artificial Sequence: Synthetic oligonucleotide
aaagagagugccugcuggg

SEQ ID NO: 631631 - RNA, 19 nt, Artificial Sequence
  Description of Artificial Sequence: Synthetic oligonucleotide
uacacaauuuacuuucucu

SEQ ID NO: 631632 - RNA, 19 nt, Artificial Sequence
  Description of Artificial Sequence: Synthetic oligonucleotide
aguagaaauaaaucagcca

SEQ ID NO: 631633 - RNA, 19 nt, Artificial Sequence
  Description of Artificial Sequence: Synthetic oligonucleotide
uagguaucuaaucucagaa

SEQ ID NO: 631634 - RNA, 19 nt, Artificial Sequence
  Description of Artificial Sequence: Synthetic oligonucleotide
aagauacaaaaggagcagg

SEQ ID NO: 631635 - RNA, 19 nt, Artificial Sequence
  Description of Artificial Sequence: Synthetic oligonucleotide
uuauaaccaauuccuaggu

SEQ ID NO: 631636 - RNA, 19 nt, Artificial Sequence
  Description of Artificial Sequence: Synthetic oligonucleotide
ugagauccccaaaacaccc

SEQ ID NO: 631637 - RNA, 19 nt, Artificial Sequence
  Description of Artificial Sequence: Synthetic oligonucleotide
uaguuuucuauauaggaua

SEQ ID NO: 631638 - RNA, 19 nt, Artificial Sequence
  Description of Artificial Sequence: Synthetic oligonucleotide
gauaaacuugcuuuaggca

SEQ ID NO: 631639 - RNA, 19 nt, Artificial Sequence
  Description of Artificial Sequence: Synthetic oligonucleotide
ucagucuauacuuucugca

SEQ ID NO: 631640 - RNA, 19 nt, Artificial Sequence
  Description of Artificial Sequence: Synthetic oligonucleotide
acguacacaagagugaggg

SEQ ID NO: 631641 - RNA, 19 nt, Artificial Sequence
  Description of Artificial Sequence: Synthetic oligonucleotide
uaaacuugcuuuaggcacc

SEQ ID NO: 631642 - RNA, 19 nt, Artificial Sequence
  Description of Artificial Sequence: Synthetic oligonucleotide
aagagauauugagaucccc

SEQ ID NO: 631643 - RNA, 19 nt, Artificial Sequence
  Description of Artificial Sequence: Synthetic oligonucleotide
ugcauagcaccccaaaaga

SEQ ID NO: 631644 - RNA, 19 nt, Artificial Sequence
  Description of Artificial Sequence: Synthetic oligonucleotide
caauuccuagguaacaggc

SEQ ID NO: 631645 - RNA, 19 nt, Artificial Sequence
  Description of Artificial Sequence: Synthetic oligonucleotide
aauuuugcauagcacccca

SEQ ID NO: 631646 - RNA, 19 nt, Artificial Sequence
  Description of Artificial Sequence: Synthetic oligonucleotide
ugggcaacccagaacaaag

SEQ ID NO: 631647 - RNA, 19 nt, Artificial Sequence
  Description of Artificial Sequence: Synthetic oligonucleotide
aaauuggagcacuacuccu

SEQ ID NO: 631648 - RNA, 19 nt, Artificial Sequence
  Description of Artificial Sequence: Synthetic oligonucleotide
aaagagauauugagauccc

SEQ ID NO: 631649 - RNA, 19 nt, Artificial Sequence
  Description of Artificial Sequence: Synthetic oligonucleotide
ugaccucaagaacauaccc

SEQ ID NO: 631650 - RNA, 19 nt, Artificial Sequence
  Description of Artificial Sequence: Synthetic oligonucleotide
aaaucagccauaguaauuu

SEQ ID NO: 631651 - RNA, 19 nt, Artificial Sequence
  Description of Artificial Sequence: Synthetic oligonucleotide
agggcuaucaggauguuac

SEQ ID NO: 631652 - RNA, 19 nt, Artificial Sequence
  Description of Artificial Sequence: Synthetic oligonucleotide
cuagucuuuaacuagguaa

SEQ ID NO: 631653 - RNA, 19 nt, Artificial Sequence
  Description of Artificial Sequence: Synthetic oligonucleotide
ugauauuaauggacuguag

SEQ ID NO: 631654 - RNA, 19 nt, Artificial Sequence
  Description of Artificial Sequence: Synthetic oligonucleotide
uaggaaagcacacaaccaa

SEQ ID NO: 631655 - RNA, 19 nt, Artificial Sequence
  Description of Artificial Sequence: Synthetic oligonucleotide
caaauuggagcacuacucc

SEQ ID NO: 631656 - RNA, 19 nt, Artificial Sequence
  Description of Artificial Sequence: Synthetic oligonucleotide
ugccuagucuuuaacuagg

SEQ ID NO: 631657 - RNA, 19 nt, Artificial Sequence
  Description of Artificial Sequence: Synthetic oligonucleotide
acguugaugccacuguugg

SEQ ID NO: 631658 - RNA, 19 nt, Artificial Sequence
  Description of Artificial Sequence: Synthetic oligonucleotide
agaacugaccucaagaaca

SEQ ID NO: 631659 - RNA, 19 nt, Artificial Sequence
  Description of Artificial Sequence: Synthetic oligonucleotide
aguaauuuacagcuuuagu

SEQ ID NO: 631660 - RNA, 19 nt, Artificial Sequence
  Description of Artificial Sequence: Synthetic oligonucleotide
caucauacguacacaagag

SEQ ID NO: 631661 - RNA, 19 nt, Artificial Sequence
  Description of Artificial Sequence: Synthetic oligonucleotide
augcagaugaauuaugaau

SEQ ID NO: 631662 - RNA, 19 nt, Artificial Sequence
  Description of Artificial Sequence: Synthetic oligonucleotide
gaugaauuaugaaugggca

SEQ ID NO: 631663 - RNA, 19 nt, Artificial Sequence
  Description of Artificial Sequence: Synthetic oligonucleotide
agcacuaggagauccccac

SEQ ID NO: 631664 - RNA, 19 nt, Artificial Sequence
  Description of Artificial Sequence: Synthetic oligonucleotide
guagaaauaaaucagccau

SEQ ID NO: 631665 - RNA, 19 nt, Artificial Sequence
  Description of Artificial Sequence: Synthetic oligonucleotide
uuagaaguauuuacccaca

SEQ ID NO: 631666 - RNA, 19 nt, Artificial Sequence
  Description of Artificial Sequence: Synthetic oligonucleotide
auagaaucaauucccuagu

SEQ ID NO: 631667 - RNA, 19 nt, Artificial Sequence
  Description of Artificial Sequence: Synthetic oligonucleotide
uuacuauuucugcuguuga

SEQ ID NO: 631668 - RNA, 19 nt, Artificial Sequence
  Description of Artificial Sequence: Synthetic oligonucleotide
acaaccaagcagauguacc

SEQ ID NO: 631669 - RNA, 19 nt, Artificial Sequence
  Description of Artificial Sequence: Synthetic oligonucleotide
uguaacugauuuagcauaa

SEQ ID NO: 631670 - RNA, 19 nt, Artificial Sequence
  Description of Artificial Sequence: Synthetic oligonucleotide
uacagcuuuagucuccaac

SEQ ID NO: 631671 - RNA, 19 nt, Artificial Sequence
  Description of Artificial Sequence: Synthetic oligonucleotide
uagaaguauuuacccacag

SEQ ID NO: 631672 - RNA, 19 nt, Artificial Sequence
  Description of Artificial Sequence: Synthetic oligonucleotide
aaacgcuuggggcacucag

SEQ ID NO: 631673 - RNA, 19 nt, Artificial Sequence
  Description of Artificial Sequence: Synthetic oligonucleotide
auuaugaaugggcaaccca

SEQ ID NO: 631674 - RNA, 19 nt, Artificial Sequence
  Description of Artificial Sequence: Synthetic oligonucleotide
ucuugccuagucuuuaacu

SEQ ID NO: 631675 - RNA, 19 nt, Artificial Sequence
  Description of Artificial Sequence: Synthetic oligonucleotide
acaagguugggcuguuugg

SEQ ID NO: 631676 - RNA, 19 nt, Artificial Sequence
  Description of Artificial Sequence: Synthetic oligonucleotide
uugccuagucuuuaacuag

SEQ ID NO: 631677 - RNA, 19 nt, Artificial Sequence
  Description of Artificial Sequence: Synthetic oligonucleotide
uuuaacuagguaagggcua

SEQ ID NO: 631678 - RNA, 19 nt, Artificial Sequence
  Description of Artificial Sequence: Synthetic oligonucleotide
agaacaaggugagugacug

SEQ ID NO: 631679 - RNA, 19 nt, Artificial Sequence
  Description of Artificial Sequence: Synthetic oligonucleotide
uccacaugucucuuggacc

SEQ ID NO: 631680 - RNA, 19 nt, Artificial Sequence
  Description of Artificial Sequence: Synthetic oligonucleotide
aacaccugcaguucauagu

SEQ ID NO: 631681 - RNA, 19 nt, Artificial Sequence
  Description of Artificial Sequence: Synthetic oligonucleotide
aaugcguuuaagauuacua

SEQ ID NO: 631682 - RNA, 19 nt, Artificial Sequence
  Description of Artificial Sequence: Synthetic oligonucleotide
aaaccuauccccaaccuaa

SEQ ID NO: 631683 - RNA, 19 nt, Artificial Sequence
  Description of Artificial Sequence: Synthetic oligonucleotide
acauacccaaguuuuauaa

SEQ ID NO: 631684 - RNA, 19 nt, Artificial Sequence
  Description of Artificial Sequence: Synthetic oligonucleotide
aagaacugccauuauccaa

SEQ ID NO: 631685 - RNA, 19 nt, Artificial Sequence
  Description of Artificial Sequence: Synthetic oligonucleotide
uaguaauuuacagcuuuag

SEQ ID NO: 631686 - RNA, 19 nt, Artificial Sequence
  Description of Artificial Sequence: Synthetic oligonucleotide
gucuuuaacuagguaaggg

SEQ ID NO: 631687 - RNA, 19 nt, Artificial Sequence
  Description of Artificial Sequence: Synthetic oligonucleotide
cacccaggaacaaaguuag

SEQ ID NO: 631688 - RNA, 19 nt, Artificial Sequence
  Description of Artificial Sequence: Synthetic oligonucleotide
aguaucagcauauucccuu

SEQ ID NO: 631689 - RNA, 19 nt, Artificial Sequence
  Description of Artificial Sequence: Synthetic oligonucleotide
aauagauuacacacauaca

SEQ ID NO: 631690 - RNA, 19 nt, Artificial Sequence
  Description of Artificial Sequence: Synthetic oligonucleotide
ucauagugcuuucucagau

SEQ ID NO: 631691 - RNA, 19 nt, Artificial Sequence
  Description of Artificial Sequence: Synthetic oligonucleotide
acuaggagauccccacccc

SEQ ID NO: 631692 - RNA, 19 nt, Artificial Sequence
  Description of Artificial Sequence: Synthetic oligonucleotide
uaagucucggugucaaaug

SEQ ID NO: 631693 - RNA, 19 nt, Artificial Sequence
  Description of Artificial Sequence: Synthetic oligonucleotide
uagaaucaauucccuagug

SEQ ID NO: 631694 - RNA, 19 nt, Artificial Sequence
  Description of Artificial Sequence: Synthetic oligonucleotide
aaggugagugacuguuuag

SEQ ID NO: 631695 - RNA, 19 nt, Artificial Sequence
  Description of Artificial Sequence: Synthetic oligonucleotide
uauggagacugguuauugc

SEQ ID NO: 631696 - RNA, 19 nt, Artificial Sequence
  Description of Artificial Sequence: Synthetic oligonucleotide
agagaacaaggugagugac

SEQ ID NO: 631697 - RNA, 19 nt, Artificial Sequence
  Description of Artificial Sequence: Synthetic oligonucleotide
agacuugggagagggaagc

SEQ ID NO: 631698 - RNA, 19 nt, Artificial Sequence
  Description of Artificial Sequence: Synthetic oligonucleotide
uaugaaugggcaacccaga

SEQ ID NO: 631699 - RNA, 19 nt, Artificial Sequence
  Description of Artificial Sequence: Synthetic oligonucleotide
uaucagaucaggguaauuu

SEQ ID NO: 631700 - RNA, 19 nt, Artificial Sequence
  Description of Artificial Sequence: Synthetic oligonucleotide
agauuacuauuucugcugu

SEQ ID NO: 631701 - RNA, 19 nt, Artificial Sequence
  Description of Artificial Sequence: Synthetic oligonucleotide
gaauuaugaaugggcaacc

SEQ ID NO: 631702 - RNA, 19 nt, Artificial Sequence
  Description of Artificial Sequence: Synthetic oligonucleotide
gagagacaaugcuuuaaug

SEQ ID NO: 631703 - RNA, 19 nt, Artificial Sequence
  Description of Artificial Sequence: Synthetic oligonucleotide
aggcucucugacaagauac

SEQ ID NO: 631704 - RNA, 19 nt, Artificial Sequence
  Description of Artificial Sequence: Synthetic oligonucleotide
auuggauuggaacccacaa

SEQ ID NO: 631705 - RNA, 19 nt, Artificial Sequence
  Description of Artificial Sequence: Synthetic oligonucleotide
gcuaucaggauguuacagg

SEQ ID NO: 631706 - RNA, 19 nt, Artificial Sequence
  Description of Artificial Sequence: Synthetic oligonucleotide
acaaacauagcuugagguu

SEQ ID NO: 631707 - RNA, 19 nt, Artificial Sequence
  Description of Artificial Sequence: Synthetic oligonucleotide
uagaaauaaaucagccaua

SEQ ID NO: 631708 - RNA, 19 nt, Artificial Sequence
  Description of Artificial Sequence: Synthetic oligonucleotide
augaaugcguuuaagauua

SEQ ID NO: 631709 - RNA, 19 nt, Artificial Sequence
  Description of Artificial Sequence: Synthetic oligonucleotide
uaaaucagccauaguaauu

SEQ ID NO: 631710 - RNA, 19 nt, Artificial Sequence
  Description of Artificial Sequence: Synthetic oligonucleotide
auacguacacaagagugag

SEQ ID NO: 631711 - RNA, 19 nt, Artificial Sequence
  Description of Artificial Sequence: Synthetic oligonucleotide
auagugcuuucucagauuu

SEQ ID NO: 631712 - RNA, 19 nt, Artificial Sequence
  Description of Artificial Sequence: Synthetic oligonucleotide
accucaagaacauacccaa

SEQ ID NO: 631713 - RNA, 19 nt, Artificial Sequence
  Description of Artificial Sequence: Synthetic oligonucleotide
uucugaaccugccccacug

SEQ ID NO: 631714 - RNA, 19 nt, Artificial Sequence
  Description of Artificial Sequence: Synthetic oligonucleotide
aaaccagacugagaaauau

SEQ ID NO: 631715 - RNA, 19 nt, Artificial Sequence
  Description of Artificial Sequence: Synthetic oligonucleotide
augcguuuaagauuacuau

SEQ ID NO: 631716 - RNA, 19 nt, Artificial Sequence
  Description of Artificial Sequence: Synthetic oligonucleotide
cagccauaguaauuuacag

SEQ ID NO: 631717 - RNA, 19 nt, Artificial Sequence
  Description of Artificial Sequence: Synthetic oligonucleotide
uuaagucucggugucaaau

SEQ ID NO: 631718 - RNA, 19 nt, Artificial Sequence
  Description of Artificial Sequence: Synthetic oligonucleotide
agagagacaaugcuuuaau

SEQ ID NO: 631719 - RNA, 19 nt, Artificial Sequence
  Description of Artificial Sequence: Synthetic oligonucleotide
agguaacaggccugaaagg

SEQ ID NO: 631720 - RNA, 19 nt, Artificial Sequence
  Description of Artificial Sequence: Synthetic oligonucleotide
aacauacccaaguuuuaua

SEQ ID NO: 631721 - RNA, 19 nt, Artificial Sequence
  Description of Artificial Sequence: Synthetic oligonucleotide
gguuuaaaggcaacagugg

SEQ ID NO: 631722 - RNA, 19 nt, Artificial Sequence
  Description of Artificial Sequence: Synthetic oligonucleotide
augaauuaugaaugggcaa

SEQ ID NO: 631723 - RNA, 19 nt, Artificial Sequence
  Description of Artificial Sequence: Synthetic oligonucleotide
agauccccaaaacacccag

SEQ ID NO: 631724 - RNA, 19 nt, Artificial Sequence
  Description of Artificial Sequence: Synthetic oligonucleotide
aucauacguacacaagagu

SEQ ID NO: 631725 - RNA, 19 nt, Artificial Sequence
  Description of Artificial Sequence: Synthetic oligonucleotide
acaaugcuuaguuuucuau

SEQ ID NO: 631726 - RNA, 19 nt, Artificial Sequence
  Description of Artificial Sequence: Synthetic oligonucleotide
ugcaugacguugaugccac

SEQ ID NO: 631727 - RNA, 19 nt, Artificial Sequence
  Description of Artificial Sequence: Synthetic oligonucleotide
aaccagacugagaaauauc

SEQ ID NO: 631728 - RNA, 19 nt, Artificial Sequence
  Description of Artificial Sequence: Synthetic oligonucleotide
aaugcacugaguggcucuc

SEQ ID NO: 631729 - RNA, 19 nt, Artificial Sequence
  Description of Artificial Sequence: Synthetic oligonucleotide
cauacguacacaagaguga

SEQ ID NO: 631730 - RNA, 19 nt, Artificial Sequence
  Description of Artificial Sequence: Synthetic oligonucleotide
aagcagauguaccaacauu

SEQ ID NO: 631731 - RNA, 19 nt, Artificial Sequence
  Description of Artificial Sequence: Synthetic oligonucleotide
caaagugcccacacucagg

SEQ ID NO: 631732 - RNA, 19 nt, Artificial Sequence
  Description of Artificial Sequence: Synthetic oligonucleotide
aucagccauaguaauuuac

SEQ ID NO: 631733 - RNA, 19 nt, Artificial Sequence
  Description of Artificial Sequence: Synthetic oligonucleotide
gagauauugagauccccaa

SEQ ID NO: 631734 - RNA, 19 nt, Artificial Sequence
  Description of Artificial Sequence: Synthetic oligonucleotide
agucccugaccuucuuagc

SEQ ID NO: 631735 - RNA, 19 nt, Artificial Sequence
  Description of Artificial Sequence: Synthetic oligonucleotide
cuuuagaaaguagcacuag

SEQ ID NO: 631736 - RNA, 19 nt, Artificial Sequence
  Description of Artificial Sequence: Synthetic oligonucleotide
agucuuuaacuagguaagg

SEQ ID NO: 631737 - RNA, 19 nt, Artificial Sequence
  Description of Artificial Sequence: Synthetic oligonucleotide
agugugauuccugaaggca

SEQ ID NO: 631738 - RNA, 19 nt, Artificial Sequence
  Description of Artificial Sequence: Synthetic oligonucleotide
gaugaaugcguuuaagauu

SEQ ID NO: 631739 - RNA, 19 nt, Artificial Sequence
  Description of Artificial Sequence: Synthetic oligonucleotide
aguucucaucugcacguag

SEQ ID NO: 631740 - RNA, 19 nt, Artificial Sequence
  Description of Artificial Sequence: Synthetic oligonucleotide
ucuuagccaagacaagguu

SEQ ID NO: 631741 - RNA, 19 nt, Artificial Sequence
  Description of Artificial Sequence: Synthetic oligonucleotide
ggcaacccagaacaaaggg

SEQ ID NO: 631742 - RNA, 19 nt, Artificial Sequence
  Description of Artificial Sequence: Synthetic oligonucleotide
gucccugaccuucuuagcc

SEQ ID NO: 631743 - RNA, 19 nt, Artificial Sequence
  Description of Artificial Sequence: Synthetic oligonucleotide
uuaauggcugggccuugag

SEQ ID NO: 631744 - RNA, 19 nt, Artificial Sequence
  Description of Artificial Sequence: Synthetic oligonucleotide
aggggcaaagugcccacac

SEQ ID NO: 631745 - RNA, 19 nt, Artificial Sequence
  Description of Artificial Sequence: Synthetic oligonucleotide
ggcaagacgggcaauaccc

SEQ ID NO: 631746 - RNA, 19 nt, Artificial Sequence
  Description of Artificial Sequence: Synthetic oligonucleotide
gaaggaguggcagugccac

SEQ ID NO: 631747 - RNA, 19 nt, Artificial Sequence
  Description of Artificial Sequence: Synthetic oligonucleotide
ggaagauacaaaaggagca

SEQ ID NO: 631748 - RNA, 19 nt, Artificial Sequence
  Description of Artificial Sequence: Synthetic oligonucleotide
cucuagguaucuaaucuca

SEQ ID NO: 631749 - RNA, 19 nt, Artificial Sequence
  Description of Artificial Sequence: Synthetic oligonucleotide
caugcuaucuugcauccca

SEQ ID NO: 631750 - RNA, 19 nt, Artificial Sequence
  Description of Artificial Sequence: Synthetic oligonucleotide
aauuggauuggaacccaca

SEQ ID NO: 631751 - RNA, 19 nt, Artificial Sequence
  Description of Artificial Sequence: Synthetic oligonucleotide
ucuugcaucccaggcuugg

SEQ ID NO: 631752 - RNA, 19 nt, Artificial Sequence
  Description of Artificial Sequence: Synthetic oligonucleotide
caauuuugcauagcacccc

SEQ ID NO: 631753 - RNA, 19 nt, Artificial Sequence
  Description of Artificial Sequence: Synthetic oligonucleotide
cugguuauugccaguauaa

SEQ ID NO: 631754 - RNA, 19 nt, Artificial Sequence
  Description of Artificial Sequence: Synthetic oligonucleotide
acugaguggcucucucuuc

SEQ ID NO: 631755 - RNA, 19 nt, Artificial Sequence
  Description of Artificial Sequence: Synthetic oligonucleotide
uucugaaaccagacugaga

SEQ ID NO: 631756 - RNA, 19 nt, Artificial Sequence
  Description of Artificial Sequence: Synthetic oligonucleotide
uaauuggauuggaacccac

SEQ ID NO: 631757 - RNA, 19 nt, Artificial Sequence
  Description of Artificial Sequence: Synthetic oligonucleotide
ugaaggaguggcagugcca

SEQ ID NO: 631758 - RNA, 19 nt, Artificial Sequence
  Description of Artificial Sequence: Synthetic oligonucleotide
cugaaggaguggcagugcc

SEQ ID NO: 631759 - RNA, 19 nt, Artificial Sequence
  Description of Artificial Sequence: Synthetic oligonucleotide
agcuuuagucuccaacccu

SEQ ID NO: 631760 - RNA, 19 nt, Artificial Sequence
  Description of Artificial Sequence: Synthetic oligonucleotide
ucuuggacccaugcuaucu

SEQ ID NO: 631761 - RNA, 19 nt, Artificial Sequence
  Description of Artificial Sequence: Synthetic oligonucleotide
uggcaagacgggcaauacc

SEQ ID NO: 631762 - RNA, 19 nt, Artificial Sequence
  Description of Artificial Sequence: Synthetic oligonucleotide
uucaccccauacuucaguc

SEQ ID NO: 631763 - RNA, 19 nt, Artificial Sequence
  Description of Artificial Sequence: Synthetic oligonucleotide
aaccaauuccuagguaaca

SEQ ID NO: 631764 - RNA, 19 nt, Artificial Sequence
  Description of Artificial Sequence: Synthetic oligonucleotide
cuagguaucuaaucucaga

SEQ ID NO: 631765 - RNA, 19 nt, Artificial Sequence
  Description of Artificial Sequence: Synthetic oligonucleotide
cagcuuuagucuccaaccc

SEQ ID NO: 631766 - RNA, 19 nt, Artificial Sequence
  Description of Artificial Sequence: Synthetic oligonucleotide
cugaugggucuugauaugc

SEQ ID NO: 631767 - RNA, 19 nt, Artificial Sequence
  Description of Artificial Sequence: Synthetic oligonucleotide
uuaacuagguaagggcuau

SEQ ID NO: 631768 - RNA, 19 nt, Artificial Sequence
  Description of Artificial Sequence: Synthetic oligonucleotide
ggguagauagaaucaauuc

SEQ ID NO: 631769 - RNA, 19 nt, Artificial Sequence
  Description of Artificial Sequence: Synthetic oligonucleotide
aaggcaacagugguaugga

SEQ ID NO: 631770 - RNA, 19 nt, Artificial Sequence
  Description of Artificial Sequence: Synthetic oligonucleotide
agauauugagauccccaaa

SEQ ID NO: 631771 - RNA, 19 nt, Artificial Sequence
  Description of Artificial Sequence: Synthetic oligonucleotide
cuugccuagucuuuaacua

SEQ ID NO: 631772 - RNA, 19 nt, Artificial Sequence
  Description of Artificial Sequence: Synthetic oligonucleotide
uuccuagguaacaggccug

SEQ ID NO: 631773 - RNA, 19 nt, Artificial Sequence
  Description of Artificial Sequence: Synthetic oligonucleotide
agguaucuaaucucagaaa

SEQ ID NO: 631774 - RNA, 19 nt, Artificial Sequence
  Description of Artificial Sequence: Synthetic oligonucleotide
ucuaggacagcugccucug

SEQ ID NO: 631775 - RNA, 19 nt, Artificial Sequence
  Description of Artificial Sequence: Synthetic oligonucleotide
aggauauacaaaagcaaaa

SEQ ID NO: 631776 - RNA, 19 nt, Artificial Sequence
  Description of Artificial Sequence: Synthetic oligonucleotide
uucuugccuagucuuuaac

SEQ ID NO: 631777 - RNA, 19 nt, Artificial Sequence
  Description of Artificial Sequence: Synthetic oligonucleotide
uuggcucuagguaucuaau

SEQ ID NO: 631778 - RNA, 19 nt, Artificial Sequence
  Description of Artificial Sequence: Synthetic oligonucleotide
gcuaucuugcaucccaggc

SEQ ID NO: 631779 - RNA, 19 nt, Artificial Sequence
  Description of Artificial Sequence: Synthetic oligonucleotide
uugguaaagaaggggcaga

SEQ ID NO: 631780 - RNA, 19 nt, Artificial Sequence
  Description of Artificial Sequence: Synthetic oligonucleotide
agauagaaucaauucccua

SEQ ID NO: 631781 - RNA, 19 nt, Artificial Sequence
  Description of Artificial Sequence: Synthetic oligonucleotide
uuggacccaugcuaucuug

SEQ ID NO: 631782 - RNA, 19 nt, Artificial Sequence
  Description of Artificial Sequence: Synthetic oligonucleotide
gcaauuuugcauagcaccc

SEQ ID NO: 631783 - RNA, 19 nt, Artificial Sequence
  Description of Artificial Sequence: Synthetic oligonucleotide
gaaccugccccacugucca

SEQ ID NO: 631784 - RNA, 19 nt, Artificial Sequence
  Description of Artificial Sequence: Synthetic oligonucleotide
ccacaugucucuuggaccc

SEQ ID NO: 631785 - RNA, 19 nt, Artificial Sequence
  Description of Artificial Sequence: Synthetic oligonucleotide
aguuuucuauauaggauau

SEQ ID NO: 631786 - RNA, 19 nt, Artificial Sequence
  Description of Artificial Sequence: Synthetic oligonucleotide
ggaagcaggcucuaggaca

SEQ ID NO: 631787 - RNA, 19 nt, Artificial Sequence
  Description of Artificial Sequence: Synthetic oligonucleotide
acgggcaauacccucugga

SEQ ID NO: 631788 - RNA, 19 nt, Artificial Sequence
  Description of Artificial Sequence: Synthetic oligonucleotide
uauuggcccauaugucucu

SEQ ID NO: 631789 - RNA, 19 nt, Artificial Sequence
  Description of Artificial Sequence: Synthetic oligonucleotide
gagguuuaaaggcaacagu

SEQ ID NO: 631790 - RNA, 19 nt, Artificial Sequence
  Description of Artificial Sequence: Synthetic oligonucleotide
gaccucaagaacauaccca

SEQ ID NO: 631791 - RNA, 19 nt, Artificial Sequence
  Description of Artificial Sequence: Synthetic oligonucleotide
accagccuaauuugucuug

SEQ ID NO: 631792 - RNA, 19 nt, Artificial Sequence
  Description of Artificial Sequence: Synthetic oligonucleotide
auucccuaguggagaaggc

SEQ ID NO: 631793 - RNA, 19 nt, Artificial Sequence
  Description of Artificial Sequence: Synthetic oligonucleotide
augaaugggcaacccagaa

SEQ ID NO: 631794 - RNA, 19 nt, Artificial Sequence
  Description of Artificial Sequence: Synthetic oligonucleotide
aggugagugacuguuuaga

SEQ ID NO: 631795 - RNA, 19 nt, Artificial Sequence
  Description of Artificial Sequence: Synthetic oligonucleotide
caugaaacgcuuggggcac

SEQ ID NO: 631796 - RNA, 19 nt, Artificial Sequence
  Description of Artificial Sequence: Synthetic oligonucleotide
accuaauagauuacacaca

SEQ ID NO: 631797 - RNA, 19 nt, Artificial Sequence
  Description of Artificial Sequence: Synthetic oligonucleotide
gauccccaaaacacccagg

SEQ ID NO: 631798 - RNA, 19 nt, Artificial Sequence
  Description of Artificial Sequence: Synthetic oligonucleotide
auacaaugcuuaguuuucu

SEQ ID NO: 631799 - RNA, 19 nt, Artificial Sequence
  Description of Artificial Sequence: Synthetic oligonucleotide
gaaaaccuauccccaaccu

SEQ ID NO: 631800 - RNA, 19 nt, Artificial Sequence
  Description of Artificial Sequence: Synthetic oligonucleotide
cuuggcucuagguaucuaa

SEQ ID NO: 631801 - RNA, 19 nt, Artificial Sequence
  Description of Artificial Sequence: Synthetic oligonucleotide
guggguauuggcccauaug

SEQ ID NO: 631802 - RNA, 19 nt, Artificial Sequence
  Description of Artificial Sequence: Synthetic oligonucleotide
ccaaccuaauagauuacac

SEQ ID NO: 631803 - RNA, 19 nt, Artificial Sequence
  Description of Artificial Sequence: Synthetic oligonucleotide
ucugaaccugccccacugu

SEQ ID NO: 631804 - RNA, 19 nt, Artificial Sequence
  Description of Artificial Sequence: Synthetic oligonucleotide
uuuaauggcugggccuuga

SEQ ID NO: 631805 - RNA, 19 nt, Artificial Sequence
  Description of Artificial Sequence: Synthetic oligonucleotide
uaggagauccccaccccau

SEQ ID NO: 631806 - RNA, 19 nt, Artificial Sequence
  Description of Artificial Sequence: Synthetic oligonucleotide
guaacugauuuagcauaag

SEQ ID NO: 631807 - RNA, 19 nt, Artificial Sequence
  Description of Artificial Sequence: Synthetic oligonucleotide
aagauaccagaaggucaag

SEQ ID NO: 631808 - RNA, 19 nt, Artificial Sequence
  Description of Artificial Sequence: Synthetic oligonucleotide
acuguuggcaagacgggca

SEQ ID NO: 631809 - RNA, 19 nt, Artificial Sequence
  Description of Artificial Sequence: Synthetic oligonucleotide
uuccucagaucaguaucag

SEQ ID NO: 631810 - RNA, 19 nt, Artificial Sequence
  Description of Artificial Sequence: Synthetic oligonucleotide
caagacgggcaauacccuc

SEQ ID NO: 631811 - RNA, 19 nt, Artificial Sequence
  Description of Artificial Sequence: Synthetic oligonucleotide
auguaccaacauucuucuc

SEQ ID NO: 631812 - RNA, 19 nt, Artificial Sequence
  Description of Artificial Sequence: Synthetic oligonucleotide
cacaaccaagcagauguac

SEQ ID NO: 631813 - RNA, 19 nt, Artificial Sequence
  Description of Artificial Sequence: Synthetic oligonucleotide
gguugcauuuaagucucgg

SEQ ID NO: 631814 - RNA, 19 nt, Artificial Sequence
  Description of Artificial Sequence: Synthetic oligonucleotide
uccuagguaacaggccuga

SEQ ID NO: 631815 - RNA, 19 nt, Artificial Sequence
  Description of Artificial Sequence: Synthetic oligonucleotide
ucggugucaaaugcacuga

SEQ ID NO: 631816 - RNA, 19 nt, Artificial Sequence
  Description of Artificial Sequence: Synthetic oligonucleotide
ucuaucagaucaggguaau

SEQ ID NO: 631817 - RNA, 19 nt, Artificial Sequence
  Description of Artificial Sequence: Synthetic oligonucleotide
cuagguaacaggccugaaa

SEQ ID NO: 631818 - RNA, 19 nt, Artificial Sequence
  Description of Artificial Sequence: Synthetic oligonucleotide
guugcauuuaagucucggu

SEQ ID NO: 631819 - RNA, 19 nt, Artificial Sequence
  Description of Artificial Sequence: Synthetic oligonucleotide
gagauccccaccccauuca

SEQ ID NO: 631820 - RNA, 19 nt, Artificial Sequence
  Description of Artificial Sequence: Synthetic oligonucleotide
gcaauuaaagguucuauuu

SEQ ID NO: 631821 - RNA, 19 nt, Artificial Sequence
  Description of Artificial Sequence: Synthetic oligonucleotide
guauuggcccauaugucuc

SEQ ID NO: 631822 - RNA, 19 nt, Artificial Sequence
  Description of Artificial Sequence: Synthetic oligonucleotide
acguagauauauacaggca

SEQ ID NO: 631823 - RNA, 19 nt, Artificial Sequence
  Description of Artificial Sequence: Synthetic oligonucleotide
aaccauugccacugauauu

SEQ ID NO: 631824 - RNA, 19 nt, Artificial Sequence
  Description of Artificial Sequence: Synthetic oligonucleotide
agugacuguuuagaaguau

SEQ ID NO: 631825 - RNA, 19 nt, Artificial Sequence
  Description of Artificial Sequence: Synthetic oligonucleotide
cacuguuggcaagacgggc

SEQ ID NO: 631826 - RNA, 19 nt, Artificial Sequence
  Description of Artificial Sequence: Synthetic oligonucleotide
ggcuaucaggauguuacag

SEQ ID NO: 631827 - RNA, 19 nt, Artificial Sequence
  Description of Artificial Sequence: Synthetic oligonucleotide
ugguggguugguccuuucu

SEQ ID NO: 631828 - RNA, 19 nt, Artificial Sequence
  Description of Artificial Sequence: Synthetic oligonucleotide
gucucggugucaaaugcac

SEQ ID NO: 631829 - RNA, 19 nt, Artificial Sequence
  Description of Artificial Sequence: Synthetic oligonucleotide
gcacguagauauauacagg

SEQ ID NO: 631830 - RNA, 19 nt, Artificial Sequence
  Description of Artificial Sequence: Synthetic oligonucleotide
guaagggcuaucaggaugu

SEQ ID NO: 631831 - RNA, 19 nt, Artificial Sequence
  Description of Artificial Sequence: Synthetic oligonucleotide
guaauuggauuggaaccca

SEQ ID NO: 631832 - RNA, 19 nt, Artificial Sequence
  Description of Artificial Sequence: Synthetic oligonucleotide
ugcccugggaugacagacu

SEQ ID NO: 631833 - RNA, 19 nt, Artificial Sequence
  Description of Artificial Sequence: Synthetic oligonucleotide
auaguaauuuacagcuuua

SEQ ID NO: 631834 - RNA, 19 nt, Artificial Sequence
  Description of Artificial Sequence: Synthetic oligonucleotide
cacaagagugaggguagag

SEQ ID NO: 631835 - RNA, 19 nt, Artificial Sequence
  Description of Artificial Sequence: Synthetic oligonucleotide
ugaaugcguuuaagauuac

SEQ ID NO: 631836 - RNA, 19 nt, Artificial Sequence
  Description of Artificial Sequence: Synthetic oligonucleotide
gcauuuaagucucgguguc

SEQ ID NO: 631837 - RNA, 19 nt, Artificial Sequence
  Description of Artificial Sequence: Synthetic oligonucleotide
aggcacaaacacccauuca

SEQ ID NO: 631838 - RNA, 19 nt, Artificial Sequence
  Description of Artificial Sequence: Synthetic oligonucleotide
uuggcccauaugucucuug

SEQ ID NO: 631839 - RNA, 19 nt, Artificial Sequence
  Description of Artificial Sequence: Synthetic oligonucleotide
cuaucuugcaucccaggcu

SEQ ID NO: 631840 - RNA, 19 nt, Artificial Sequence
  Description of Artificial Sequence: Synthetic oligonucleotide
ggcucuagguaucuaaucu

SEQ ID NO: 631841 - RNA, 19 nt, Artificial Sequence
  Description of Artificial Sequence: Synthetic oligonucleotide
caaaguuuucaagagcagu

SEQ ID NO: 631842 - RNA, 19 nt, Artificial Sequence
  Description of Artificial Sequence: Synthetic oligonucleotide
cugggacuuagagaagcug

SEQ ID NO: 631843 - RNA, 19 nt, Artificial Sequence
  Description of Artificial Sequence: Synthetic oligonucleotide
ggagcacuacuccucugcc

SEQ ID NO: 631844 - RNA, 19 nt, Artificial Sequence
  Description of Artificial Sequence: Synthetic oligonucleotide
ggugagugacuguuuagaa

SEQ ID NO: 631845 - RNA, 19 nt, Artificial Sequence
  Description of Artificial Sequence: Synthetic oligonucleotide
uggcuaccauauugguggc

SEQ ID NO: 631846 - RNA, 19 nt, Artificial Sequence
  Description of Artificial Sequence: Synthetic oligonucleotide
gaacauacccaaguuuuau

SEQ ID NO: 631847 - RNA, 19 nt, Artificial Sequence
  Description of Artificial Sequence: Synthetic oligonucleotide
acagugguauggagacugg

SEQ ID NO: 631848 - RNA, 19 nt, Artificial Sequence
  Description of Artificial Sequence: Synthetic oligonucleotide
ccccauucauaauuguaac

SEQ ID NO: 631849 - RNA, 19 nt, Artificial Sequence
  Description of Artificial Sequence: Synthetic oligonucleotide
ggucaagagagacaaugcu

SEQ ID NO: 631850 - RNA, 19 nt, Artificial Sequence
  Description of Artificial Sequence: Synthetic oligonucleotide
ccauauugguggcaauaag

SEQ ID NO: 631851 - RNA, 19 nt, Artificial Sequence
  Description of Artificial Sequence: Synthetic oligonucleotide
cccaugcuaucuugcaucc

SEQ ID NO: 631852 - RNA, 19 nt, Artificial Sequence
  Description of Artificial Sequence: Synthetic oligonucleotide
augcuaucuugcaucccag

SEQ ID NO: 631853 - RNA, 19 nt, Artificial Sequence
  Description of Artificial Sequence: Synthetic oligonucleotide
acaaagggaugaaugcguu

SEQ ID NO: 631854 - RNA, 19 nt, Artificial Sequence
  Description of Artificial Sequence: Synthetic oligonucleotide
ccuaauagauuacacacau

SEQ ID NO: 631855 - RNA, 19 nt, Artificial Sequence
  Description of Artificial Sequence: Synthetic oligonucleotide
gaaugcguuuaagauuacu

SEQ ID NO: 631856 - RNA, 19 nt, Artificial Sequence
  Description of Artificial Sequence: Synthetic oligonucleotide
aagggcuaucaggauguua

SEQ ID NO: 631857 - RNA, 19 nt, Artificial Sequence
  Description of Artificial Sequence: Synthetic oligonucleotide
gucuauacuuucugcaauu

SEQ ID NO: 631858 - RNA, 19 nt, Artificial Sequence
  Description of Artificial Sequence: Synthetic oligonucleotide
gggcaacccagaacaaagg

SEQ ID NO: 631859 - RNA, 19 nt, Artificial Sequence
  Description of Artificial Sequence: Synthetic oligonucleotide
gagauccccaaaacaccca

SEQ ID NO: 631860 - RNA, 19 nt, Artificial Sequence
  Description of Artificial Sequence: Synthetic oligonucleotide
ggguugguccuuucuagga

SEQ ID NO: 631861 - RNA, 19 nt, Artificial Sequence
  Description of Artificial Sequence: Synthetic oligonucleotide
ggccuugaggacaauucug

SEQ ID NO: 631862 - RNA, 19 nt, Artificial Sequence
  Description of Artificial Sequence: Synthetic oligonucleotide
caccccauucauaauugua

SEQ ID NO: 631863 - RNA, 19 nt, Artificial Sequence
  Description of Artificial Sequence: Synthetic oligonucleotide
cauuuaagucucgguguca

SEQ ID NO: 631864 - RNA, 19 nt, Artificial Sequence
  Description of Artificial Sequence: Synthetic oligonucleotide
aaccuauccccaaccuaau

SEQ ID NO: 631865 - RNA, 19 nt, Artificial Sequence
  Description of Artificial Sequence: Synthetic oligonucleotide
guuggcaagacgggcaaua

SEQ ID NO: 631866 - RNA, 19 nt, Artificial Sequence
  Description of Artificial Sequence: Synthetic oligonucleotide
cuuuaauggcugggccuug

SEQ ID NO: 631867 - RNA, 19 nt, Artificial Sequence
  Description of Artificial Sequence: Synthetic oligonucleotide
gguugguccuuucuaggaa

SEQ ID NO: 631868 - RNA, 19 nt, Artificial Sequence
  Description of Artificial Sequence: Synthetic oligonucleotide
auuuacccacagcccuggu

SEQ ID NO: 631869 - RNA, 19 nt, Artificial Sequence
  Description of Artificial Sequence: Synthetic oligonucleotide
agaucaguaucagcauauu

SEQ ID NO: 631870 - RNA, 19 nt, Artificial Sequence
  Description of Artificial Sequence: Synthetic oligonucleotide
gauuacuauuucugcuguu

SEQ ID NO: 631871 - RNA, 19 nt, Artificial Sequence
  Description of Artificial Sequence: Synthetic oligonucleotide
uuacagcuuuagucuccaa

SEQ ID NO: 631872 - RNA, 19 nt, Artificial Sequence
  Description of Artificial Sequence: Synthetic oligonucleotide
gcuaccauauugguggcaa

SEQ ID NO: 631873 - RNA, 19 nt, Artificial Sequence
  Description of Artificial Sequence: Synthetic oligonucleotide
ccagccuaauuugucuugc

SEQ ID NO: 631874 - RNA, 19 nt, Artificial Sequence
  Description of Artificial Sequence: Synthetic oligonucleotide
uucagacuucuugccuagu

SEQ ID NO: 631875 - RNA, 19 nt, Artificial Sequence
  Description of Artificial Sequence: Synthetic oligonucleotide
gaacugaccucaagaacau

SEQ ID NO: 631876 - RNA, 19 nt, Artificial Sequence
  Description of Artificial Sequence: Synthetic oligonucleotide
gcccauaugucucuuggcu

SEQ ID NO: 631877 - RNA, 19 nt, Artificial Sequence
  Description of Artificial Sequence: Synthetic oligonucleotide
auacaggcacaaacaccca

SEQ ID NO: 631878 - RNA, 19 nt, Artificial Sequence
  Description of Artificial Sequence: Synthetic oligonucleotide
gcguuuaagauuacuauuu

SEQ ID NO: 631879 - RNA, 19 nt, Artificial Sequence
  Description of Artificial Sequence: Synthetic oligonucleotide
acauagcuugagguuuaaa

SEQ ID NO: 631880 - RNA, 19 nt, Artificial Sequence
  Description of Artificial Sequence: Synthetic oligonucleotide
ggguauuggcccauauguc

SEQ ID NO: 631881 - RNA, 19 nt, Artificial Sequence
  Description of Artificial Sequence: Synthetic oligonucleotide
gcucucugacaagauacca

SEQ ID NO: 631882 - RNA, 19 nt, Artificial Sequence
  Description of Artificial Sequence: Synthetic oligonucleotide
cuucaccccauacuucagu

SEQ ID NO: 631883 - RNA, 19 nt, Artificial Sequence
  Description of Artificial Sequence: Synthetic oligonucleotide
caagguugggcuguuuggu

SEQ ID NO: 631884 - RNA, 19 nt, Artificial Sequence
  Description of Artificial Sequence: Synthetic oligonucleotide
uguuggcaagacgggcaau

SEQ ID NO: 631885 - RNA, 19 nt, Artificial Sequence
  Description of Artificial Sequence: Synthetic oligonucleotide
caguaucagcauauucccu

SEQ ID NO: 631886 - RNA, 19 nt, Artificial Sequence
  Description of Artificial Sequence: Synthetic oligonucleotide
aucugcacguagauauaua

SEQ ID NO: 631887 - RNA, 19 nt, Artificial Sequence
  Description of Artificial Sequence: Synthetic oligonucleotide
cauagugcuuucucagauu

SEQ ID NO: 631888 - RNA, 19 nt, Artificial Sequence
  Description of Artificial Sequence: Synthetic oligonucleotide
cgggcaauacccucuggac

SEQ ID NO: 631889 - RNA, 19 nt, Artificial Sequence
  Description of Artificial Sequence: Synthetic oligonucleotide
gacagacuugggagaggga

SEQ ID NO: 631890 - RNA, 19 nt, Artificial Sequence
  Description of Artificial Sequence: Synthetic oligonucleotide
ggauuggaacccacaacaa

SEQ ID NO: 631891 - RNA, 19 nt, Artificial Sequence
  Description of Artificial Sequence: Synthetic oligonucleotide
aggauguuacagggagaaa

SEQ ID NO: 631892 - RNA, 19 nt, Artificial Sequence
  Description of Artificial Sequence: Synthetic oligonucleotide
gcaccagccuaauuugucu

SEQ ID NO: 631893 - RNA, 19 nt, Artificial Sequence
  Description of Artificial Sequence: Synthetic oligonucleotide
gggcuaucaggauguuaca

SEQ ID NO: 631894 - RNA, 19 nt, Artificial Sequence
  Description of Artificial Sequence: Synthetic oligonucleotide
ggcuaacagaaaaccuauc

SEQ ID NO: 631895 - RNA, 19 nt, Artificial Sequence
  Description of Artificial Sequence: Synthetic oligonucleotide
cccacacucagggcgacac

SEQ ID NO: 631896 - RNA, 19 nt, Artificial Sequence
  Description of Artificial Sequence: Synthetic oligonucleotide
caaagggaugaaugcguuu

SEQ ID NO: 631897 - RNA, 19 nt, Artificial Sequence
  Description of Artificial Sequence: Synthetic oligonucleotide
cacugaguggcucucucuu

SEQ ID NO: 631898 - RNA, 19 nt, Artificial Sequence
  Description of Artificial Sequence: Synthetic oligonucleotide
acacaaccaagcagaugua

SEQ ID NO: 631899 - RNA, 19 nt, Artificial Sequence
  Description of Artificial Sequence: Synthetic oligonucleotide
ggugucaaaugcacugagu

SEQ ID NO: 631900 - RNA, 19 nt, Artificial Sequence
  Description of Artificial Sequence: Synthetic oligonucleotide
agaugguggguugguccuu

SEQ ID NO: 631901 - RNA, 19 nt, Artificial Sequence
  Description of Artificial Sequence: Synthetic oligonucleotide
cagcaccagccuaauuugu

SEQ ID NO: 631902 - RNA, 19 nt, Artificial Sequence
  Description of Artificial Sequence: Synthetic oligonucleotide
cuuggacccaugcuaucuu

SEQ ID NO: 631903 - RNA, 19 nt, Artificial Sequence
  Description of Artificial Sequence: Synthetic oligonucleotide
cagccuaauuugucuugcu

SEQ ID NO: 631904 - RNA, 19 nt, Artificial Sequence
  Description of Artificial Sequence: Synthetic oligonucleotide
ccuagucuuuaacuaggua

SEQ ID NO: 631905 - RNA, 19 nt, Artificial Sequence
  Description of Artificial Sequence: Synthetic oligonucleotide
ccccaaauuauaacacccu

SEQ ID NO: 631906 - RNA, 19 nt, Artificial Sequence
  Description of Artificial Sequence: Synthetic oligonucleotide
caccagccuaauuugucuu

SEQ ID NO: 631907 - RNA, 19 nt, Artificial Sequence
  Description of Artificial Sequence: Synthetic oligonucleotide
cacaugucucuuggaccca

SEQ ID NO: 631908 - RNA, 19 nt, Artificial Sequence
  Description of Artificial Sequence: Synthetic oligonucleotide
gggcacucagggcacgcaa

SEQ ID NO: 631909 - RNA, 19 nt, Artificial Sequence
  Description of Artificial Sequence: Synthetic oligonucleotide
ccaugcuaucuugcauccc

SEQ ID NO: 631910 - RNA, 19 nt, Artificial Sequence
  Description of Artificial Sequence: Synthetic oligonucleotide
ccacacucagggcgacacc

SEQ ID NO: 631911 - RNA, 19 nt, Artificial Sequence
  Description of Artificial Sequence: Synthetic oligonucleotide
ugguggguauuggcccaua

SEQ ID NO: 631912 - RNA, 19 nt, Artificial Sequence
  Description of Artificial Sequence: Synthetic oligonucleotide
acacuuccucacagugaaa

SEQ ID NO: 631913 - RNA, 19 nt, Artificial Sequence
  Description of Artificial Sequence: Synthetic oligonucleotide
cagugguauggagacuggu

SEQ ID NO: 631914 - RNA, 19 nt, Artificial Sequence
  Description of Artificial Sequence: Synthetic oligonucleotide
ccaaaagagagugccugcu

SEQ ID NO: 631915 - RNA, 19 nt, Artificial Sequence
  Description of Artificial Sequence: Synthetic oligonucleotide
ggcuaccauauugguggca

SEQ ID NO: 631916 - RNA, 19 nt, Artificial Sequence
  Description of Artificial Sequence: Synthetic oligonucleotide
gguggguauuggcccauau

SEQ ID NO: 631917 - RNA, 19 nt, Artificial Sequence
  Description of Artificial Sequence: Synthetic oligonucleotide
ggcgacaccugggccuccc

SEQ ID NO: 631918 - RNA, 19 nt, Artificial Sequence
  Description of Artificial Sequence: Synthetic oligonucleotide
ccauggcuaccauauuggu

SEQ ID NO: 631919 - RNA, 19 nt, Artificial Sequence
  Description of Artificial Sequence: Synthetic oligonucleotide
gcaagacgggcaauacccu

SEQ ID NO: 631920 - RNA, 19 nt, Artificial Sequence
  Description of Artificial Sequence: Synthetic oligonucleotide
gccuagucuuuaacuaggu

SEQ ID NO: 631921 - RNA, 19 nt, Artificial Sequence
  Description of Artificial Sequence: Synthetic oligonucleotide
cuaucagaucaggguaauu

SEQ ID NO: 631922 - RNA, 19 nt, Artificial Sequence
  Description of Artificial Sequence: Synthetic oligonucleotide
ccauaguaauuuacagcuu

SEQ ID NO: 631923 - RNA, 19 nt, Artificial Sequence
  Description of Artificial Sequence: Synthetic oligonucleotide
ccaccccauucauaauugu

SEQ ID NO: 631924 - RNA, 19 nt, Artificial Sequence
  Description of Artificial Sequence: Synthetic oligonucleotide
ccuagguaacaggccugaa

SEQ ID NO: 631925 - RNA, 19 nt, Artificial Sequence
  Description of Artificial Sequence: Synthetic oligonucleotide
gggcgacaccugggccucc

SEQ ID NO: 631926 - RNA, 19 nt, Artificial Sequence
  Description of Artificial Sequence: Synthetic oligonucleotide
ccccaaaagcugggacuua

SEQ ID NO: 631927 - RNA, 19 nt, Artificial Sequence
  Description of Artificial Sequence: Synthetic oligonucleotide
cgacaccugggccucccuu

SEQ ID NO: 631928 - RNA, 19 nt, Artificial Sequence
  Description of Artificial Sequence: Synthetic oligonucleotide
aaagguguuaugcagagac

SEQ ID NO: 631929 - RNA, 19 nt, Artificial Sequence
  Description of Artificial Sequence: Synthetic oligonucleotide
cauuucauagucuuggugg

SEQ ID NO: 631930 - RNA, 19 nt, Artificial Sequence
  Description of Artificial Sequence: Synthetic oligonucleotide
aaggugauuaggcucuucc

SEQ ID NO: 631931 - RNA, 19 nt, Artificial Sequence
  Description of Artificial Sequence: Synthetic oligonucleotide
aguuucagcauagugaccc

SEQ ID NO: 631932 - RNA, 19 nt, Artificial Sequence
  Description of Artificial Sequence: Synthetic oligonucleotide
uaacuuaauuuauuaaugc

SEQ ID NO: 631933 - RNA, 19 nt, Artificial Sequence
  Description of Artificial Sequence: Synthetic oligonucleotide
ucuacguucuuccauauac

SEQ ID NO: 631934 - RNA, 19 nt, Artificial Sequence
  Description of Artificial Sequence: Synthetic oligonucleotide
ucccauuacaccauuagcc

SEQ ID NO: 631935 - RNA, 19 nt, Artificial Sequence
  Description of Artificial Sequence: Synthetic oligonucleotide
auaaaugguugccuggccc

SEQ ID NO: 631936 - RNA, 19 nt, Artificial Sequence
  Description of Artificial Sequence: Synthetic oligonucleotide
ugcauuagggccaucaucu

SEQ ID NO: 631937 - RNA, 19 nt, Artificial Sequence
  Description of Artificial Sequence: Synthetic oligonucleotide
ugcaguuucagcauaguga

SEQ ID NO: 631938 - RNA, 19 nt, Artificial Sequence
  Description of Artificial Sequence: Synthetic oligonucleotide
uauacgcuagaaaucgggg

SEQ ID NO: 631939 - RNA, 19 nt, Artificial Sequence
  Description of Artificial Sequence: Synthetic oligonucleotide
uaucugaagaggcuauacg

SEQ ID NO: 631940 - RNA, 19 nt, Artificial Sequence
  Description of Artificial Sequence: Synthetic oligonucleotide
uuagccaucaaucuguguu

SEQ ID NO: 631941 - RNA, 19 nt, Artificial Sequence
  Description of Artificial Sequence: Synthetic oligonucleotide
uaucagaacacgauccuug

SEQ ID NO: 631942 - RNA, 19 nt, Artificial Sequence
  Description of Artificial Sequence: Synthetic oligonucleotide
guugaaugcaguuucagca

SEQ ID NO: 631943 - RNA, 19 nt, Artificial Sequence
  Description of Artificial Sequence: Synthetic oligonucleotide
auagcccugagauaaauca

SEQ ID NO: 631944 - RNA, 19 nt, Artificial Sequence
  Description of Artificial Sequence: Synthetic oligonucleotide
gggacugucuaauaaaugg

SEQ ID NO: 631945 - RNA, 19 nt, Artificial Sequence
  Description of Artificial Sequence: Synthetic oligonucleotide
gguucuuaagccuggaugg

SEQ ID NO: 631946 - RNA, 19 nt, Artificial Sequence
  Description of Artificial Sequence: Synthetic oligonucleotide
ugguucuuaagccuggaug

SEQ ID NO: 631947 - RNA, 19 nt, Artificial Sequence
  Description of Artificial Sequence: Synthetic oligonucleotide
ggaauguuaacuucaaccc

SEQ ID NO: 631948 - RNA, 19 nt, Artificial Sequence
  Description of Artificial Sequence: Synthetic oligonucleotide
uccauucccaaacaguuca

SEQ ID NO: 631949 - RNA, 19 nt, Artificial Sequence
  Description of Artificial Sequence: Synthetic oligonucleotide
uuggaaauccaucuuggga

SEQ ID NO: 631950 - RNA, 19 nt, Artificial Sequence
  Description of Artificial Sequence: Synthetic oligonucleotide
uggugaugaagcauggugc

SEQ ID NO: 631951 - RNA, 19 nt, Artificial Sequence
  Description of Artificial Sequence: Synthetic oligonucleotide
caucuugggacauagugag

SEQ ID NO: 631952 - RNA, 19 nt, Artificial Sequence
  Description of Artificial Sequence: Synthetic oligonucleotide
uagaaaucggggaucaaca

SEQ ID NO: 631953 - RNA, 19 nt, Artificial Sequence
  Description of Artificial Sequence: Synthetic oligonucleotide
ugacugguggaacaguucc

SEQ ID NO: 631954 - RNA, 19 nt, Artificial Sequence
  Description of Artificial Sequence: Synthetic oligonucleotide
ugaagguaggcgaaguucu

SEQ ID NO: 631955 - RNA, 19 nt, Artificial Sequence
  Description of Artificial Sequence: Synthetic oligonucleotide
aaaucggggaucaacagca

SEQ ID NO: 631956 - RNA, 19 nt, Artificial Sequence
  Description of Artificial Sequence: Synthetic oligonucleotide
caucauaggaucaucgaug

SEQ ID NO: 631957 - RNA, 19 nt, Artificial Sequence
  Description of Artificial Sequence: Synthetic oligonucleotide
guaaccgcaagguaguacc

SEQ ID NO: 631958 - RNA, 19 nt, Artificial Sequence
  Description of Artificial Sequence: Synthetic oligonucleotide
auggggacuaugcuggggc

SEQ ID NO: 631959 - RNA, 19 nt, Artificial Sequence
  Description of Artificial Sequence: Synthetic oligonucleotide
gaagguaacaguuccugac

SEQ ID NO: 631960 - RNA, 19 nt, Artificial Sequence
  Description of Artificial Sequence: Synthetic oligonucleotide
ucaaaauugggagcaauca

SEQ ID NO: 631961 - RNA, 19 nt, Artificial Sequence
  Description of Artificial Sequence: Synthetic oligonucleotide
uuuaucagaacacgauccu

SEQ ID NO: 631962 - RNA, 19 nt, Artificial Sequence
  Description of Artificial Sequence: Synthetic oligonucleotide
cagaucaaggugauuaggc

SEQ ID NO: 631963 - RNA, 19 nt, Artificial Sequence
  Description of Artificial Sequence: Synthetic oligonucleotide
aagacgaagaaguggugcu

SEQ ID NO: 631964 - RNA, 19 nt, Artificial Sequence
  Description of Artificial Sequence: Synthetic oligonucleotide
ugauuaggcucuuccaugc

SEQ ID NO: 631965 - RNA, 19 nt, Artificial Sequence
  Description of Artificial Sequence: Synthetic oligonucleotide
uaugcagagacagggaccc

SEQ ID NO: 631966 - RNA, 19 nt, Artificial Sequence
  Description of Artificial Sequence: Synthetic oligonucleotide
gaaaucggggaucaacagc

SEQ ID NO: 631967 - RNA, 19 nt, Artificial Sequence
  Description of Artificial Sequence: Synthetic oligonucleotide
acagacuguagguuacuac

SEQ ID NO: 631968 - RNA, 19 nt, Artificial Sequence
  Description of Artificial Sequence: Synthetic oligonucleotide
ggcuauacgcauuucauag

SEQ ID NO: 631969 - RNA, 19 nt, Artificial Sequence
  Description of Artificial Sequence: Synthetic oligonucleotide
uacguucuuccauauacgc

SEQ ID NO: 631970 - RNA, 19 nt, Artificial Sequence
  Description of Artificial Sequence: Synthetic oligonucleotide
aggaucaucgaugagugag

SEQ ID NO: 631971 - RNA, 19 nt, Artificial Sequence
  Description of Artificial Sequence: Synthetic oligonucleotide
cuugguggggugaagguag

SEQ ID NO: 631972 - RNA, 19 nt, Artificial Sequence
  Description of Artificial Sequence: Synthetic oligonucleotide
ucucuggugcaauaggccc

SEQ ID NO: 631973 - RNA, 19 nt, Artificial Sequence
  Description of Artificial Sequence: Synthetic oligonucleotide
aucgaugagugagaagucc

SEQ ID NO: 631974 - RNA, 19 nt, Artificial Sequence
  Description of Artificial Sequence: Synthetic oligonucleotide
gaugauggugacaacuugc

SEQ ID NO: 631975 - RNA, 19 nt, Artificial Sequence
  Description of Artificial Sequence: Synthetic oligonucleotide
uaaaugguugccuggcccc

SEQ ID NO: 631976 - RNA, 19 nt, Artificial Sequence
  Description of Artificial Sequence: Synthetic oligonucleotide
ugcaguguugguaaccgca

SEQ ID NO: 631977 - RNA, 19 nt, Artificial Sequence
  Description of Artificial Sequence: Synthetic oligonucleotide
ugaucugaacuguaaacuc

SEQ ID NO: 631978 - RNA, 19 nt, Artificial Sequence
  Description of Artificial Sequence: Synthetic oligonucleotide
uccauauacgcuagaaauc

SEQ ID NO: 631979 - RNA, 19 nt, Artificial Sequence
  Description of Artificial Sequence: Synthetic oligonucleotide
uccucaucccuccaguuug

SEQ ID NO: 631980 - RNA, 19 nt, Artificial Sequence
  Description of Artificial Sequence: Synthetic oligonucleotide
ucgaugagugagaaguccc

SEQ ID NO: 631981 - RNA, 19 nt, Artificial Sequence
  Description of Artificial Sequence: Synthetic oligonucleotide
gaucaaggugauuaggcuc

SEQ ID NO: 631982 - RNA, 19 nt, Artificial Sequence
  Description of Artificial Sequence: Synthetic oligonucleotide
guuugguaaacugugcugc

SEQ ID NO: 631983 - RNA, 19 nt, Artificial Sequence
  Description of Artificial Sequence: Synthetic oligonucleotide
aguuaacuucucuuccuuc

SEQ ID NO: 631984 - RNA, 19 nt, Artificial Sequence
  Description of Artificial Sequence: Synthetic oligonucleotide
aagagggacugucuaauaa

SEQ ID NO: 631985 - RNA, 19 nt, Artificial Sequence
  Description of Artificial Sequence: Synthetic oligonucleotide
uuuucuacguucuuccaua

SEQ ID NO: 631986 - RNA, 19 nt, Artificial Sequence
  Description of Artificial Sequence: Synthetic oligonucleotide
agaauugaggaagugguca

SEQ ID NO: 631987 - RNA, 19 nt, Artificial Sequence
  Description of Artificial Sequence: Synthetic oligonucleotide
auauacgcuagaaaucggg

SEQ ID NO: 631988 - RNA, 19 nt, Artificial Sequence
  Description of Artificial Sequence: Synthetic oligonucleotide
cuauacgcauuucauaguc

SEQ ID NO: 631989 - RNA, 19 nt, Artificial Sequence
  Description of Artificial Sequence: Synthetic oligonucleotide
accauuagccaucaaucug

SEQ ID NO: 631990 - RNA, 19 nt, Artificial Sequence
  Description of Artificial Sequence: Synthetic oligonucleotide
aauguuaacuucaacccuu

SEQ ID NO: 631991 - RNA, 19 nt, Artificial Sequence
  Description of Artificial Sequence: Synthetic oligonucleotide
auuagggccaucaucuuag

SEQ ID NO: 631992 - RNA, 19 nt, Artificial Sequence
  Description of Artificial Sequence: Synthetic oligonucleotide
uguacugguuccauuccca

SEQ ID NO: 631993 - RNA, 19 nt, Artificial Sequence
  Description of Artificial Sequence: Synthetic oligonucleotide
agaaaucggggaucaacag

SEQ ID NO: 631994 - RNA, 19 nt, Artificial Sequence
  Description of Artificial Sequence: Synthetic oligonucleotide
cuacaugaggggaugcugc

SEQ ID NO: 631995 - RNA, 19 nt, Artificial Sequence
  Description of Artificial Sequence: Synthetic oligonucleotide
agguguuaugcagagacag

SEQ ID NO: 631996 - RNA, 19 nt, Artificial Sequence
  Description of Artificial Sequence: Synthetic oligonucleotide
uucccauuucuagaguugg

SEQ ID NO: 631997 - RNA, 19 nt, Artificial Sequence
  Description of Artificial Sequence: Synthetic oligonucleotide
cauuuccaaaguccaaggg

SEQ ID NO: 631998 - RNA, 19 nt, Artificial Sequence
  Description of Artificial Sequence: Synthetic oligonucleotide
agugcuuccacccugcauu

SEQ ID NO: 631999 - RNA, 19 nt, Artificial Sequence
  Description of Artificial Sequence: Synthetic oligonucleotide
uccuguugucauuuccugg

SEQ ID NO: 632000 - RNA, 19 nt, Artificial Sequence
  Description of Artificial Sequence: Synthetic oligonucleotide
cuuauugaugacagggauc

SEQ ID NO: 632001 - RNA, 19 nt, Artificial Sequence
  Description of Artificial Sequence: Synthetic oligonucleotide
acgcauuucauagucuugg

SEQ ID NO: 632002 - RNA, 19 nt, Artificial Sequence
  Description of Artificial Sequence: Synthetic oligonucleotide
uuaagucuuggguuucccc

SEQ ID NO: 632003 - RNA, 19 nt, Artificial Sequence
  Description of Artificial Sequence: Synthetic oligonucleotide
cuacguucuuccauauacg

SEQ ID NO: 632004 - RNA, 19 nt, Artificial Sequence
  Description of Artificial Sequence: Synthetic oligonucleotide
uuacaucucugccacuucu

SEQ ID NO: 632005 - RNA, 19 nt, Artificial Sequence
  Description of Artificial Sequence: Synthetic oligonucleotide
ucuggaugacccuguaacc

SEQ ID NO: 632006 - RNA, 19 nt, Artificial Sequence
  Description of Artificial Sequence: Synthetic oligonucleotide
ugaggaaguggucauuuau

SEQ ID NO: 632007 - RNA, 19 nt, Artificial Sequence
  Description of Artificial Sequence: Synthetic oligonucleotide
ucugagcuaucauagcccu

SEQ ID NO: 632008 - RNA, 19 nt, Artificial Sequence
  Description of Artificial Sequence: Synthetic oligonucleotide
guuacuacugcugugcuga

SEQ ID NO: 632009 - RNA, 19 nt, Artificial Sequence
  Description of Artificial Sequence: Synthetic oligonucleotide
uguccuacggacacguuuc

SEQ ID NO: 632010 - RNA, 19 nt, Artificial Sequence
  Description of Artificial Sequence: Synthetic oligonucleotide
uggagaguccccauauucu

SEQ ID NO: 632011 - RNA, 19 nt, Artificial Sequence
  Description of Artificial Sequence: Synthetic oligonucleotide
gacuguagguuacuacugc

SEQ ID NO: 632012 - RNA, 19 nt, Artificial Sequence
  Description of Artificial Sequence: Synthetic oligonucleotide
guugcaguguugguaaccg

SEQ ID NO: 632013 - RNA, 19 nt, Artificial Sequence
  Description of Artificial Sequence: Synthetic oligonucleotide
auaggaucaucgaugagug

SEQ ID NO: 632014 - RNA, 19 nt, Artificial Sequence
  Description of Artificial Sequence: Synthetic oligonucleotide
gauaauccagcagccaccc

SEQ ID NO: 632015 - RNA, 19 nt, Artificial Sequence
  Description of Artificial Sequence: Synthetic oligonucleotide
agaggcuauacgcauuuca

SEQ ID NO: 632016 - RNA, 19 nt, Artificial Sequence
  Description of Artificial Sequence: Synthetic oligonucleotide
auagucugugguuaaugga

SEQ ID NO: 632017 - RNA, 19 nt, Artificial Sequence
  Description of Artificial Sequence: Synthetic oligonucleotide
agcgcuacauagucugugg

SEQ ID NO: 632018 - RNA, 19 nt, Artificial Sequence
  Description of Artificial Sequence: Synthetic oligonucleotide
agcaaagugccauccaccu

SEQ ID NO: 632019 - RNA, 19 nt, Artificial Sequence
  Description of Artificial Sequence: Synthetic oligonucleotide
uccagaucaaggugauuag

SEQ ID NO: 632020 - RNA, 19 nt, Artificial Sequence
  Description of Artificial Sequence: Synthetic oligonucleotide
ugcuacuucgugguguggg

SEQ ID NO: 632021 - RNA, 19 nt, Artificial Sequence
  Description of Artificial Sequence: Synthetic oligonucleotide
uuggcuggcaucauaggau

SEQ ID NO: 632022 - RNA, 19 nt, Artificial Sequence
  Description of Artificial Sequence: Synthetic oligonucleotide
ggcaaaacccgguugaaug

SEQ ID NO: 632023 - RNA, 19 nt, Artificial Sequence
  Description of Artificial Sequence: Synthetic oligonucleotide
cucaaaauugggagcaauc

SEQ ID NO: 632024 - RNA, 19 nt, Artificial Sequence
  Description of Artificial Sequence: Synthetic oligonucleotide
ugcugaaagguguuaugca

SEQ ID NO: 632025 - RNA, 19 nt, Artificial Sequence
  Description of Artificial Sequence: Synthetic oligonucleotide
ccauauacgcuagaaaucg

SEQ ID NO: 632026 - RNA, 19 nt, Artificial Sequence
  Description of Artificial Sequence: Synthetic oligonucleotide
cauauacgcuagaaaucgg

SEQ ID NO: 632027 - RNA, 19 nt, Artificial Sequence
  Description of Artificial Sequence: Synthetic oligonucleotide
gggccaucaucuuagaaag

SEQ ID NO: 632028 - RNA, 19 nt, Artificial Sequence
  Description of Artificial Sequence: Synthetic oligonucleotide
cuagaaaucggggaucaac

SEQ ID NO: 632029 - RNA, 19 nt, Artificial Sequence
  Description of Artificial Sequence: Synthetic oligonucleotide
auacgcuagaaaucgggga

SEQ ID NO: 632030 - RNA, 19 nt, Artificial Sequence
  Description of Artificial Sequence: Synthetic oligonucleotide
ugugcugaaagguguuaug

SEQ ID NO: 632031 - RNA, 19 nt, Artificial Sequence
  Description of Artificial Sequence: Synthetic oligonucleotide
uugggagcaaucagguaca

SEQ ID NO: 632032 - RNA, 19 nt, Artificial Sequence
  Description of Artificial Sequence: Synthetic oligonucleotide
uguaaccacaucuccaguu

SEQ ID NO: 632033 - RNA, 19 nt, Artificial Sequence
  Description of Artificial Sequence: Synthetic oligonucleotide
gugauuaggcucuuccaug

SEQ ID NO: 632034 - RNA, 19 nt, Artificial Sequence
  Description of Artificial Sequence: Synthetic oligonucleotide
gacaacuugcucaagucca

SEQ ID NO: 632035 - RNA, 19 nt, Artificial Sequence
  Description of Artificial Sequence: Synthetic oligonucleotide
ucggggaucaacagcaaau

SEQ ID NO: 632036 - RNA, 19 nt, Artificial Sequence
  Description of Artificial Sequence: Synthetic oligonucleotide
uucucauccaugccucggc

SEQ ID NO: 632037 - RNA, 19 nt, Artificial Sequence
  Description of Artificial Sequence: Synthetic oligonucleotide
acugucuaauaaaugguug

SEQ ID NO: 632038 - RNA, 19 nt, Artificial Sequence
  Description of Artificial Sequence: Synthetic oligonucleotide
uuuugggcgggaccgguca

SEQ ID NO: 632039 - RNA, 19 nt, Artificial Sequence
  Description of Artificial Sequence: Synthetic oligonucleotide
ugguuaauggaggugucug

SEQ ID NO: 632040 - RNA, 19 nt, Artificial Sequence
  Description of Artificial Sequence: Synthetic oligonucleotide
gcuggagucuacaugaggg

SEQ ID NO: 632041 - RNA, 19 nt, Artificial Sequence
  Description of Artificial Sequence: Synthetic oligonucleotide
ccuugggccauucagaggc

SEQ ID NO: 632042 - RNA, 19 nt, Artificial Sequence
  Description of Artificial Sequence: Synthetic oligonucleotide
agaaaggucuggucuuguc

SEQ ID NO: 632043 - RNA, 19 nt, Artificial Sequence
  Description of Artificial Sequence: Synthetic oligonucleotide
ucuacaugaggggaugcug

SEQ ID NO: 632044 - RNA, 19 nt, Artificial Sequence
  Description of Artificial Sequence: Synthetic oligonucleotide
ugugacugcagaugcuucu

SEQ ID NO: 632045 - RNA, 19 nt, Artificial Sequence
  Description of Artificial Sequence: Synthetic oligonucleotide
gaagcauggugcuggaguc

SEQ ID NO: 632046 - RNA, 19 nt, Artificial Sequence
  Description of Artificial Sequence: Synthetic oligonucleotide
cuaugcuggggcuucaguc

SEQ ID NO: 632047 - RNA, 19 nt, Artificial Sequence
  Description of Artificial Sequence: Synthetic oligonucleotide
uauuguucccugccccucc

SEQ ID NO: 632048 - RNA, 19 nt, Artificial Sequence
  Description of Artificial Sequence: Synthetic oligonucleotide
ggugcuggagucuacauga

SEQ ID NO: 632049 - RNA, 19 nt, Artificial Sequence
  Description of Artificial Sequence: Synthetic oligonucleotide
acgguuagaaggccauuuc

SEQ ID NO: 632050 - RNA, 19 nt, Artificial Sequence
  Description of Artificial Sequence: Synthetic oligonucleotide
uacgcauuucauagucuug

SEQ ID NO: 632051 - RNA, 19 nt, Artificial Sequence
  Description of Artificial Sequence: Synthetic oligonucleotide
uucuuauggaacagaggau

SEQ ID NO: 632052 - RNA, 19 nt, Artificial Sequence
  Description of Artificial Sequence: Synthetic oligonucleotide
agagggacugucuaauaaa

SEQ ID NO: 632053 - RNA, 19 nt, Artificial Sequence
  Description of Artificial Sequence: Synthetic oligonucleotide
cucccauuacaccauuagc

SEQ ID NO: 632054 - RNA, 19 nt, Artificial Sequence
  Description of Artificial Sequence: Synthetic oligonucleotide
ugcucuaggcuccuuugcu

SEQ ID NO: 632055 - RNA, 19 nt, Artificial Sequence
  Description of Artificial Sequence: Synthetic oligonucleotide
cuguagguuacuacugcug

SEQ ID NO: 632056 - RNA, 19 nt, Artificial Sequence
  Description of Artificial Sequence: Synthetic oligonucleotide
ugaaugcaguuucagcaua

SEQ ID NO: 632057 - RNA, 19 nt, Artificial Sequence
  Description of Artificial Sequence: Synthetic oligonucleotide
agucuugguggggugaagg

SEQ ID NO: 632058 - RNA, 19 nt, Artificial Sequence
  Description of Artificial Sequence: Synthetic oligonucleotide
cauguugcaguguugguaa

SEQ ID NO: 632059 - RNA, 19 nt, Artificial Sequence
  Description of Artificial Sequence: Synthetic oligonucleotide
gaaguggugcugcugugac

SEQ ID NO: 632060 - RNA, 19 nt, Artificial Sequence
  Description of Artificial Sequence: Synthetic oligonucleotide
gaauguuaacuucaacccu

SEQ ID NO: 632061 - RNA, 19 nt, Artificial Sequence
  Description of Artificial Sequence: Synthetic oligonucleotide
aucaaggugauuaggcucu

SEQ ID NO: 632062 - RNA, 19 nt, Artificial Sequence
  Description of Artificial Sequence: Synthetic oligonucleotide
gguuaauggaggugucugg

SEQ ID NO: 632063 - RNA, 19 nt, Artificial Sequence
  Description of Artificial Sequence: Synthetic oligonucleotide
uggaugacccuguaaccac

SEQ ID NO: 632064 - RNA, 19 nt, Artificial Sequence
  Description of Artificial Sequence: Synthetic oligonucleotide
caaauucuggaugacccug

SEQ ID NO: 632065 - RNA, 19 nt, Artificial Sequence
  Description of Artificial Sequence: Synthetic oligonucleotide
ugccacuucuguuuucuac

SEQ ID NO: 632066 - RNA, 19 nt, Artificial Sequence
  Description of Artificial Sequence: Synthetic oligonucleotide
uguugcaguguugguaacc

SEQ ID NO: 632067 - RNA, 19 nt, Artificial Sequence
  Description of Artificial Sequence: Synthetic oligonucleotide
uuguccuacggacacguuu

SEQ ID NO: 632068 - RNA, 19 nt, Artificial Sequence
  Description of Artificial Sequence: Synthetic oligonucleotide
gguuuaucagaacacgauc

SEQ ID NO: 632069 - RNA, 19 nt, Artificial Sequence
  Description of Artificial Sequence: Synthetic oligonucleotide
gugcugaaagguguuaugc

SEQ ID NO: 632070 - RNA, 19 nt, Artificial Sequence
  Description of Artificial Sequence: Synthetic oligonucleotide
uuuacaucucugccacuuc

SEQ ID NO: 632071 - RNA, 19 nt, Artificial Sequence
  Description of Artificial Sequence: Synthetic oligonucleotide
ucuuguccuacggacacgu

SEQ ID NO: 632072 - RNA, 19 nt, Artificial Sequence
  Description of Artificial Sequence: Synthetic oligonucleotide
acggacacguuucuugcug

SEQ ID NO: 632073 - RNA, 19 nt, Artificial Sequence
  Description of Artificial Sequence: Synthetic oligonucleotide
caaagugccauccaccuua

SEQ ID NO: 632074 - RNA, 19 nt, Artificial Sequence
  Description of Artificial Sequence: Synthetic oligonucleotide
cucucgucagugcuggagc

SEQ ID NO: 632075 - RNA, 19 nt, Artificial Sequence
  Description of Artificial Sequence: Synthetic oligonucleotide
ucugugguuaauggaggug

SEQ ID NO: 632076 - RNA, 19 nt, Artificial Sequence
  Description of Artificial Sequence: Synthetic oligonucleotide
agcaaucagguacaaguuu

SEQ ID NO: 632077 - RNA, 19 nt, Artificial Sequence
  Description of Artificial Sequence: Synthetic oligonucleotide
ugccuggccccaaaauucc

SEQ ID NO: 632078 - RNA, 19 nt, Artificial Sequence
  Description of Artificial Sequence: Synthetic oligonucleotide
uggagucuacaugagggga

SEQ ID NO: 632079 - RNA, 19 nt, Artificial Sequence
  Description of Artificial Sequence: Synthetic oligonucleotide
guagccagugguucuuaag

SEQ ID NO: 632080 - RNA, 19 nt, Artificial Sequence
  Description of Artificial Sequence: Synthetic oligonucleotide
aaauucuggaugacccugu

SEQ ID NO: 632081 - RNA, 19 nt, Artificial Sequence
  Description of Artificial Sequence: Synthetic oligonucleotide
cagccacccagcaaugggg

SEQ ID NO: 632082 - RNA, 19 nt, Artificial Sequence
  Description of Artificial Sequence: Synthetic oligonucleotide
uccaguuugacugguggaa

SEQ ID NO: 632083 - RNA, 19 nt, Artificial Sequence
  Description of Artificial Sequence: Synthetic oligonucleotide
aaaacccgguugaaugcag

SEQ ID NO: 632084 - RNA, 19 nt, Artificial Sequence
  Description of Artificial Sequence: Synthetic oligonucleotide
uguugguaaccgcaaggua

SEQ ID NO: 632085 - RNA, 19 nt, Artificial Sequence
  Description of Artificial Sequence: Synthetic oligonucleotide
caaacggcauaaaaggcaa

SEQ ID NO: 632086 - RNA, 19 nt, Artificial Sequence
  Description of Artificial Sequence: Synthetic oligonucleotide
aaccgcaagguaguaccag

SEQ ID NO: 632087 - RNA, 19 nt, Artificial Sequence
  Description of Artificial Sequence: Synthetic oligonucleotide
augcgguuuaucagaacac

SEQ ID NO: 632088 - RNA, 19 nt, Artificial Sequence
  Description of Artificial Sequence: Synthetic oligonucleotide
agucuacaugaggggaugc

SEQ ID NO: 632089 - RNA, 19 nt, Artificial Sequence
  Description of Artificial Sequence: Synthetic oligonucleotide
gcuaucauagcccugagau

SEQ ID NO: 632090 - RNA, 19 nt, Artificial Sequence
  Description of Artificial Sequence: Synthetic oligonucleotide
uugacugguggaacaguuc

SEQ ID NO: 632091 - RNA, 19 nt, Artificial Sequence
  Description of Artificial Sequence: Synthetic oligonucleotide
gaagcugcacugcuacuuc

SEQ ID NO: 632092 - RNA, 19 nt, Artificial Sequence
  Description of Artificial Sequence: Synthetic oligonucleotide
guccccauauucuccuggg

SEQ ID NO: 632093 - RNA, 19 nt, Artificial Sequence
  Description of Artificial Sequence: Synthetic oligonucleotide
aucaucuuagaaaggucug

SEQ ID NO: 632094 - RNA, 19 nt, Artificial Sequence
  Description of Artificial Sequence: Synthetic oligonucleotide
uucagcauagugacccuuu

SEQ ID NO: 632095 - RNA, 19 nt, Artificial Sequence
  Description of Artificial Sequence: Synthetic oligonucleotide
ugugguuaauggagguguc

SEQ ID NO: 632096 - RNA, 19 nt, Artificial Sequence
  Description of Artificial Sequence: Synthetic oligonucleotide
uccgacgguuagaaggcca

SEQ ID NO: 632097 - RNA, 19 nt, Artificial Sequence
  Description of Artificial Sequence: Synthetic oligonucleotide
aggugauuaggcucuucca

SEQ ID NO: 632098 - RNA, 19 nt, Artificial Sequence
  Description of Artificial Sequence: Synthetic oligonucleotide
guaucugaagaggcuauac

SEQ ID NO: 632099 - RNA, 19 nt, Artificial Sequence
  Description of Artificial Sequence: Synthetic oligonucleotide
uaaccgcaagguaguacca

SEQ ID NO: 632100 - RNA, 19 nt, Artificial Sequence
  Description of Artificial Sequence: Synthetic oligonucleotide
ggcgaaguuugguaaacug

SEQ ID NO: 632101 - RNA, 19 nt, Artificial Sequence
  Description of Artificial Sequence: Synthetic oligonucleotide
cauagcccugagauaaauc

SEQ ID NO: 632102 - RNA, 19 nt, Artificial Sequence
  Description of Artificial Sequence: Synthetic oligonucleotide
auauuguucccugccccuc

SEQ ID NO: 632103 - RNA, 19 nt, Artificial Sequence
  Description of Artificial Sequence: Synthetic oligonucleotide
aauucuggaugacccugua

SEQ ID NO: 632104 - RNA, 19 nt, Artificial Sequence
  Description of Artificial Sequence: Synthetic oligonucleotide
uacuucgugguguggggac

SEQ ID NO: 632105 - RNA, 19 nt, Artificial Sequence
  Description of Artificial Sequence: Synthetic oligonucleotide
guaccagagguggugguag

SEQ ID NO: 632106 - RNA, 19 nt, Artificial Sequence
  Description of Artificial Sequence: Synthetic oligonucleotide
gcaaaacccgguugaaugc

SEQ ID NO: 632107 - RNA, 19 nt, Artificial Sequence
  Description of Artificial Sequence: Synthetic oligonucleotide
cauuagccaucaaucugug

SEQ ID NO: 632108 - RNA, 19 nt, Artificial Sequence
  Description of Artificial Sequence: Synthetic oligonucleotide
caccacccaucacaaacgg

SEQ ID NO: 632109 - RNA, 19 nt, Artificial Sequence
  Description of Artificial Sequence: Synthetic oligonucleotide
guuagaaggccauuucccu

SEQ ID NO: 632110 - RNA, 19 nt, Artificial Sequence
  Description of Artificial Sequence: Synthetic oligonucleotide
gacacagacuguagguuac

SEQ ID NO: 632111 - RNA, 19 nt, Artificial Sequence
  Description of Artificial Sequence: Synthetic oligonucleotide
agacuguagguuacuacug

SEQ ID NO: 632112 - RNA, 19 nt, Artificial Sequence
  Description of Artificial Sequence: Synthetic oligonucleotide
cagacuguagguuacuacu

SEQ ID NO: 632113 - RNA, 19 nt, Artificial Sequence
  Description of Artificial Sequence: Synthetic oligonucleotide
ccauuucuagaguugguug

SEQ ID NO: 632114 - RNA, 19 nt, Artificial Sequence
  Description of Artificial Sequence: Synthetic oligonucleotide
uugugacugcagaugcuuc

SEQ ID NO: 632115 - RNA, 19 nt, Artificial Sequence
  Description of Artificial Sequence: Synthetic oligonucleotide
accgcaagguaguaccaga

SEQ ID NO: 632116 - RNA, 19 nt, Artificial Sequence
  Description of Artificial Sequence: Synthetic oligonucleotide
guaacaguuccugacccuc

SEQ ID NO: 632117 - RNA, 19 nt, Artificial Sequence
  Description of Artificial Sequence: Synthetic oligonucleotide
aacccgguugaaugcaguu

SEQ ID NO: 632118 - RNA, 19 nt, Artificial Sequence
  Description of Artificial Sequence: Synthetic oligonucleotide
uccucauguugcaguguug

SEQ ID NO: 632119 - RNA, 19 nt, Artificial Sequence
  Description of Artificial Sequence: Synthetic oligonucleotide
gagucuacaugaggggaug

SEQ ID NO: 632120 - RNA, 19 nt, Artificial Sequence
  Description of Artificial Sequence: Synthetic oligonucleotide
uuaucagaacacgauccuu

SEQ ID NO: 632121 - RNA, 19 nt, Artificial Sequence
  Description of Artificial Sequence: Synthetic oligonucleotide
gucauuuccuggcuccgac

SEQ ID NO: 632122 - RNA, 19 nt, Artificial Sequence
  Description of Artificial Sequence: Synthetic oligonucleotide
gcagacgaggucaaugcgg

SEQ ID NO: 632123 - RNA, 19 nt, Artificial Sequence
  Description of Artificial Sequence: Synthetic oligonucleotide
auuagccaucaaucugugu

SEQ ID NO: 632124 - RNA, 19 nt, Artificial Sequence
  Description of Artificial Sequence: Synthetic oligonucleotide
cauacagguuuugggcggg

SEQ ID NO: 632125 - RNA, 19 nt, Artificial Sequence
  Description of Artificial Sequence: Synthetic oligonucleotide
ggacagaaggcucucuuca

SEQ ID NO: 632126 - RNA, 19 nt, Artificial Sequence
  Description of Artificial Sequence: Synthetic oligonucleotide
uuugggcgggaccggucag

SEQ ID NO: 632127 - RNA, 19 nt, Artificial Sequence
  Description of Artificial Sequence: Synthetic oligonucleotide
ggugcaauaggcccuggca

SEQ ID NO: 632128 - RNA, 19 nt, Artificial Sequence
  Description of Artificial Sequence: Synthetic oligonucleotide
aagguguuaugcagagaca

SEQ ID NO: 632129 - RNA, 19 nt, Artificial Sequence
  Description of Artificial Sequence: Synthetic oligonucleotide
caucgaugagugagaaguc

SEQ ID NO: 632130 - RNA, 19 nt, Artificial Sequence
  Description of Artificial Sequence: Synthetic oligonucleotide
gguugucuguacugguucc

SEQ ID NO: 632131 - RNA, 19 nt, Artificial Sequence
  Description of Artificial Sequence: Synthetic oligonucleotide
agcuaucauagcccugaga

SEQ ID NO: 632132 - RNA, 19 nt, Artificial Sequence
  Description of Artificial Sequence: Synthetic oligonucleotide
aggcuauacgcauuucaua

SEQ ID NO: 632133 - RNA, 19 nt, Artificial Sequence
  Description of Artificial Sequence: Synthetic oligonucleotide
guuaacuucaacccuucuu

SEQ ID NO: 632134 - RNA, 19 nt, Artificial Sequence
  Description of Artificial Sequence: Synthetic oligonucleotide
gcuacuucguggugugggg

SEQ ID NO: 632135 - RNA, 19 nt, Artificial Sequence
  Description of Artificial Sequence: Synthetic oligonucleotide
uaggaguuccccugcccac

SEQ ID NO: 632136 - RNA, 19 nt, Artificial Sequence
  Description of Artificial Sequence: Synthetic oligonucleotide
ugccccucccacauuucca

SEQ ID NO: 632137 - RNA, 19 nt, Artificial Sequence
  Description of Artificial Sequence: Synthetic oligonucleotide
uugcaguguugguaaccgc

SEQ ID NO: 632138 - RNA, 19 nt, Artificial Sequence
  Description of Artificial Sequence: Synthetic oligonucleotide
ggacuguaucugaagaggc

SEQ ID NO: 632139 - RNA, 19 nt, Artificial Sequence
  Description of Artificial Sequence: Synthetic oligonucleotide
cugcucuaggcuccuuugc

SEQ ID NO: 632140 - RNA, 19 nt, Artificial Sequence
  Description of Artificial Sequence: Synthetic oligonucleotide
ugcccacccaauccucuca

SEQ ID NO: 632141 - RNA, 19 nt, Artificial Sequence
  Description of Artificial Sequence: Synthetic oligonucleotide
ggcagacgaggucaaugcg

SEQ ID NO: 632142 - RNA, 19 nt, Artificial Sequence
  Description of Artificial Sequence: Synthetic oligonucleotide
cuggaugacccuguaacca

SEQ ID NO: 632143 - RNA, 19 nt, Artificial Sequence
  Description of Artificial Sequence: Synthetic oligonucleotide
cuggcagacgaggucaaug

SEQ ID NO: 632144 - RNA, 19 nt, Artificial Sequence
  Description of Artificial Sequence: Synthetic oligonucleotide
gaauugaggaaguggucau

SEQ ID NO: 632145 - RNA, 19 nt, Artificial Sequence
  Description of Artificial Sequence: Synthetic oligonucleotide
gcagccacccagcaauggg

SEQ ID NO: 632146 - RNA, 19 nt, Artificial Sequence
  Description of Artificial Sequence: Synthetic oligonucleotide
ggagaguccccauauucuc

SEQ ID NO: 632147 - RNA, 19 nt, Artificial Sequence
  Description of Artificial Sequence: Synthetic oligonucleotide
agggacugucuaauaaaug

SEQ ID NO: 632148 - RNA, 19 nt, Artificial Sequence
  Description of Artificial Sequence: Synthetic oligonucleotide
ggaaauccaucuugggaca

SEQ ID NO: 632149 - RNA, 19 nt, Artificial Sequence
  Description of Artificial Sequence: Synthetic oligonucleotide
ucugaacuguaaacuccuu

SEQ ID NO: 632150 - RNA, 19 nt, Artificial Sequence
  Description of Artificial Sequence: Synthetic oligonucleotide
caguucccggggcaggagg

SEQ ID NO: 632151 - RNA, 19 nt, Artificial Sequence
  Description of Artificial Sequence: Synthetic oligonucleotide
caaucuguguuucuggaau

SEQ ID NO: 632152 - RNA, 19 nt, Artificial Sequence
  Description of Artificial Sequence: Synthetic oligonucleotide
gagcuaucauagcccugag

SEQ ID NO: 632153 - RNA, 19 nt, Artificial Sequence
  Description of Artificial Sequence: Synthetic oligonucleotide
uucuacguucuuccauaua

SEQ ID NO: 632154 - RNA, 19 nt, Artificial Sequence
  Description of Artificial Sequence: Synthetic oligonucleotide
uugaggaaguggucauuua

SEQ ID NO: 632155 - RNA, 19 nt, Artificial Sequence
  Description of Artificial Sequence: Synthetic oligonucleotide
aaacccgguugaaugcagu

SEQ ID NO: 632156 - RNA, 19 nt, Artificial Sequence
  Description of Artificial Sequence: Synthetic oligonucleotide
ugcauuccaccuccagcuc

SEQ ID NO: 632157 - RNA, 19 nt, Artificial Sequence
  Description of Artificial Sequence: Synthetic oligonucleotide
uaggaucaucgaugaguga

SEQ ID NO: 632158 - RNA, 19 nt, Artificial Sequence
  Description of Artificial Sequence: Synthetic oligonucleotide
ucggcgaaguuugguaaac

SEQ ID NO: 632159 - RNA, 19 nt, Artificial Sequence
  Description of Artificial Sequence: Synthetic oligonucleotide
gaagaggcuauacgcauuu

SEQ ID NO: 632160 - RNA, 19 nt, Artificial Sequence
  Description of Artificial Sequence: Synthetic oligonucleotide
gguuacuacugcugugcug

SEQ ID NO: 632161 - RNA, 19 nt, Artificial Sequence
  Description of Artificial Sequence: Synthetic oligonucleotide
guuuucuacguucuuccau

SEQ ID NO: 632162 - RNA, 19 nt, Artificial Sequence
  Description of Artificial Sequence: Synthetic oligonucleotide
acgaagaaguggugcugcu

SEQ ID NO: 632163 - RNA, 19 nt, Artificial Sequence
  Description of Artificial Sequence: Synthetic oligonucleotide
ccuggggucaaagagggac

SEQ ID NO: 632164 - RNA, 19 nt, Artificial Sequence
  Description of Artificial Sequence: Synthetic oligonucleotide
ggggcuucagucaucagca

SEQ ID NO: 632165 - RNA, 19 nt, Artificial Sequence
  Description of Artificial Sequence: Synthetic oligonucleotide
ggcaucauaggaucaucga

SEQ ID NO: 632166 - RNA, 19 nt, Artificial Sequence
  Description of Artificial Sequence: Synthetic oligonucleotide
caaugcgguuuaucagaac

SEQ ID NO: 632167 - RNA, 19 nt, Artificial Sequence
  Description of Artificial Sequence: Synthetic oligonucleotide
uagaaaggucuggucuugu

SEQ ID NO: 632168 - RNA, 19 nt, Artificial Sequence
  Description of Artificial Sequence: Synthetic oligonucleotide
ggaagguaacaguuccuga

SEQ ID NO: 632169 - RNA, 19 nt, Artificial Sequence
  Description of Artificial Sequence: Synthetic oligonucleotide
caccuccuuaagucuuggg

SEQ ID NO: 632170 - RNA, 19 nt, Artificial Sequence
  Description of Artificial Sequence: Synthetic oligonucleotide
gucugaguuggcuggcauc

SEQ ID NO: 632171 - RNA, 19 nt, Artificial Sequence
  Description of Artificial Sequence: Synthetic oligonucleotide
gaggggcgagcacaccagc

SEQ ID NO: 632172 - RNA, 19 nt, Artificial Sequence
  Description of Artificial Sequence: Synthetic oligonucleotide
uacauagucugugguuaau

SEQ ID NO: 632173 - RNA, 19 nt, Artificial Sequence
  Description of Artificial Sequence: Synthetic oligonucleotide
uggggacuaugcuggggcu

SEQ ID NO: 632174 - RNA, 19 nt, Artificial Sequence
  Description of Artificial Sequence: Synthetic oligonucleotide
caaaacccgguugaaugca

SEQ ID NO: 632175 - RNA, 19 nt, Artificial Sequence
  Description of Artificial Sequence: Synthetic oligonucleotide
ggugacaacuugcucaagu

SEQ ID NO: 632176 - RNA, 19 nt, Artificial Sequence
  Description of Artificial Sequence: Synthetic oligonucleotide
cuaggcuccuuugcuuccc

SEQ ID NO: 632177 - RNA, 19 nt, Artificial Sequence
  Description of Artificial Sequence: Synthetic oligonucleotide
acgaggucaaugcgguuua

SEQ ID NO: 632178 - RNA, 19 nt, Artificial Sequence
  Description of Artificial Sequence: Synthetic oligonucleotide
gacugucuaauaaaugguu

SEQ ID NO: 632179 - RNA, 19 nt, Artificial Sequence
  Description of Artificial Sequence: Synthetic oligonucleotide
ggucuggucuuguccuacg

SEQ ID NO: 632180 - RNA, 19 nt, Artificial Sequence
  Description of Artificial Sequence: Synthetic oligonucleotide
gggacauagugagggacag

SEQ ID NO: 632181 - RNA, 19 nt, Artificial Sequence
  Description of Artificial Sequence: Synthetic oligonucleotide
ccagaucaaggugauuagg

SEQ ID NO: 632182 - RNA, 19 nt, Artificial Sequence
  Description of Artificial Sequence: Synthetic oligonucleotide
cccauauucuccugggguc

SEQ ID NO: 632183 - RNA, 19 nt, Artificial Sequence
  Description of Artificial Sequence: Synthetic oligonucleotide
cuugggacauagugaggga

SEQ ID NO: 632184 - RNA, 19 nt, Artificial Sequence
  Description of Artificial Sequence: Synthetic oligonucleotide
cccauauuguucccugccc

SEQ ID NO: 632185 - RNA, 19 nt, Artificial Sequence
  Description of Artificial Sequence: Synthetic oligonucleotide
caccauuagccaucaaucu

SEQ ID NO: 632186 - RNA, 19 nt, Artificial Sequence
  Description of Artificial Sequence: Synthetic oligonucleotide
agagucggacucauccuca

SEQ ID NO: 632187 - RNA, 19 nt, Artificial Sequence
  Description of Artificial Sequence: Synthetic oligonucleotide
cugagcuaucauagcccug

SEQ ID NO: 632188 - RNA, 19 nt, Artificial Sequence
  Description of Artificial Sequence: Synthetic oligonucleotide
gugaugaagcauggugcug

SEQ ID NO: 632189 - RNA, 19 nt, Artificial Sequence
  Description of Artificial Sequence: Synthetic oligonucleotide
uucgugguguggggacugg

SEQ ID NO: 632190 - RNA, 19 nt, Artificial Sequence
  Description of Artificial Sequence: Synthetic oligonucleotide
ggugaugaagcauggugcu

SEQ ID NO: 632191 - RNA, 19 nt, Artificial Sequence
  Description of Artificial Sequence: Synthetic oligonucleotide
uacagguuuugggcgggac

SEQ ID NO: 632192 - RNA, 19 nt, Artificial Sequence
  Description of Artificial Sequence: Synthetic oligonucleotide
acaguucaauucugucuua

SEQ ID NO: 632193 - RNA, 19 nt, Artificial Sequence
  Description of Artificial Sequence: Synthetic oligonucleotide
cugugguuaauggaggugu

SEQ ID NO: 632194 - RNA, 19 nt, Artificial Sequence
  Description of Artificial Sequence: Synthetic oligonucleotide
cccgguugaaugcaguuuc

SEQ ID NO: 632195 - RNA, 19 nt, Artificial Sequence
  Description of Artificial Sequence: Synthetic oligonucleotide
ggugauuaggcucuuccau

SEQ ID NO: 632196 - RNA, 19 nt, Artificial Sequence
  Description of Artificial Sequence: Synthetic oligonucleotide
uggcaaaacccgguugaau

SEQ ID NO: 632197 - RNA, 19 nt, Artificial Sequence
  Description of Artificial Sequence: Synthetic oligonucleotide
aaagugccauccaccuuau

SEQ ID NO: 632198 - RNA, 19 nt, Artificial Sequence
  Description of Artificial Sequence: Synthetic oligonucleotide
cagcgcuacauagucugug

SEQ ID NO: 632199 - RNA, 19 nt, Artificial Sequence
  Description of Artificial Sequence: Synthetic oligonucleotide
gucuuguccuacggacacg

SEQ ID NO: 632200 - RNA, 19 nt, Artificial Sequence
  Description of Artificial Sequence: Synthetic oligonucleotide
ggccccaaaauuccuccug

SEQ ID NO: 632201 - RNA, 19 nt, Artificial Sequence
  Description of Artificial Sequence: Synthetic oligonucleotide
augaagcauggugcuggag

SEQ ID NO: 632202 - RNA, 19 nt, Artificial Sequence
  Description of Artificial Sequence: Synthetic oligonucleotide
gguaaccgcaagguaguac

SEQ ID NO: 632203 - RNA, 19 nt, Artificial Sequence
  Description of Artificial Sequence: Synthetic oligonucleotide
aaacggcauaaaaggcaaa

SEQ ID NO: 632204 - RNA, 19 nt, Artificial Sequence
  Description of Artificial Sequence: Synthetic oligonucleotide
agugguucuuaagccugga

SEQ ID NO: 632205 - RNA, 19 nt, Artificial Sequence
  Description of Artificial Sequence: Synthetic oligonucleotide
uuacuacugcugugcugaa

SEQ ID NO: 632206 - RNA, 19 nt, Artificial Sequence
  Description of Artificial Sequence: Synthetic oligonucleotide
cucauccaugccucggcga

SEQ ID NO: 632207 - RNA, 19 nt, Artificial Sequence
  Description of Artificial Sequence: Synthetic oligonucleotide
cagacgaggucaaugcggu

SEQ ID NO: 632208 - RNA, 19 nt, Artificial Sequence
  Description of Artificial Sequence: Synthetic oligonucleotide
gcuccgacgguuagaaggc

SEQ ID NO: 632209 - RNA, 19 nt, Artificial Sequence
  Description of Artificial Sequence: Synthetic oligonucleotide
guuccgcccggcgaggggc

SEQ ID NO: 632210 - RNA, 19 nt, Artificial Sequence
  Description of Artificial Sequence: Synthetic oligonucleotide
ugguugccuggccccaaaa

SEQ ID NO: 632211 - RNA, 19 nt, Artificial Sequence
  Description of Artificial Sequence: Synthetic oligonucleotide
accggucagcaguuaacuu

SEQ ID NO: 632212 - RNA, 19 nt, Artificial Sequence
  Description of Artificial Sequence: Synthetic oligonucleotide
agguuuugggcgggaccgg

SEQ ID NO: 632213 - RNA, 19 nt, Artificial Sequence
  Description of Artificial Sequence: Synthetic oligonucleotide
gacgaggucaaugcgguuu

SEQ ID NO: 632214 - RNA, 19 nt, Artificial Sequence
  Description of Artificial Sequence: Synthetic oligonucleotide
uacuacugcugugcugaaa

SEQ ID NO: 632215 - RNA, 19 nt, Artificial Sequence
  Description of Artificial Sequence: Synthetic oligonucleotide
ccgcaagguaguaccagag

SEQ ID NO: 632216 - RNA, 19 nt, Artificial Sequence
  Description of Artificial Sequence: Synthetic oligonucleotide
caucguccucauguugcag

SEQ ID NO: 632217 - RNA, 19 nt, Artificial Sequence
  Description of Artificial Sequence: Synthetic oligonucleotide
acuucgugguguggggacu

SEQ ID NO: 632218 - RNA, 19 nt, Artificial Sequence
  Description of Artificial Sequence: Synthetic oligonucleotide
gucugugguuaauggaggu

SEQ ID NO: 632219 - RNA, 19 nt, Artificial Sequence
  Description of Artificial Sequence: Synthetic oligonucleotide
ugcuuccacccugcauuag

SEQ ID NO: 632220 - RNA, 19 nt, Artificial Sequence
  Description of Artificial Sequence: Synthetic oligonucleotide
aaucggggaucaacagcaa

SEQ ID NO: 632221 - RNA, 19 nt, Artificial Sequence
  Description of Artificial Sequence: Synthetic oligonucleotide
gaccggucagcaguuaacu

SEQ ID NO: 632222 - RNA, 19 nt, Artificial Sequence
  Description of Artificial Sequence: Synthetic oligonucleotide
ugggcgggaccggucagca

SEQ ID NO: 632223 - RNA, 19 nt, Artificial Sequence
  Description of Artificial Sequence: Synthetic oligonucleotide
cuuccccagaauugaggaa

SEQ ID NO: 632224 - RNA, 19 nt, Artificial Sequence
  Description of Artificial Sequence: Synthetic oligonucleotide
uugggcgggaccggucagc

SEQ ID NO: 632225 - RNA, 19 nt, Artificial Sequence
  Description of Artificial Sequence: Synthetic oligonucleotide
gcaucauaggaucaucgau

SEQ ID NO: 632226 - RNA, 19 nt, Artificial Sequence
  Description of Artificial Sequence: Synthetic oligonucleotide
ggaucaucgaugagugaga

SEQ ID NO: 632227 - RNA, 19 nt, Artificial Sequence
  Description of Artificial Sequence: Synthetic oligonucleotide
gggccagcgcuacauaguc

SEQ ID NO: 632228 - RNA, 19 nt, Artificial Sequence
  Description of Artificial Sequence: Synthetic oligonucleotide
cgcaagguaguaccagagg

SEQ ID NO: 632229 - RNA, 19 nt, Artificial Sequence
  Description of Artificial Sequence: Synthetic oligonucleotide
ccaccuuauugaugacagg

SEQ ID NO: 632230 - RNA, 19 nt, Artificial Sequence
  Description of Artificial Sequence: Synthetic oligonucleotide
gacgguuagaaggccauuu

SEQ ID NO: 632231 - RNA, 19 nt, Artificial Sequence
  Description of Artificial Sequence: Synthetic oligonucleotide
uggcuccgacgguuagaag

SEQ ID NO: 632232 - RNA, 19 nt, Artificial Sequence
  Description of Artificial Sequence: Synthetic oligonucleotide
acgauccuugggccauuca

SEQ ID NO: 632233 - RNA, 19 nt, Artificial Sequence
  Description of Artificial Sequence: Synthetic oligonucleotide
gcucaggggucauuuguuc

SEQ ID NO: 632234 - RNA, 19 nt, Artificial Sequence
  Description of Artificial Sequence: Synthetic oligonucleotide
cucggcgaaguuugguaaa

SEQ ID NO: 632235 - RNA, 19 nt, Artificial Sequence
  Description of Artificial Sequence: Synthetic oligonucleotide
agcugcacugcuacuucgu

SEQ ID NO: 632236 - RNA, 19 nt, Artificial Sequence
  Description of Artificial Sequence: Synthetic oligonucleotide
cuccuuaagucuuggguuu

SEQ ID NO: 632237 - RNA, 19 nt, Artificial Sequence
  Description of Artificial Sequence: Synthetic oligonucleotide
uuccgcccggcgaggggcc

SEQ ID NO: 632238 - RNA, 19 nt, Artificial Sequence
  Description of Artificial Sequence: Synthetic oligonucleotide
cagaggcuagggccagcgc

SEQ ID NO: 632239 - RNA, 19 nt, Artificial Sequence
  Description of Artificial Sequence: Synthetic oligonucleotide
ugccucggcgaaguuuggu

SEQ ID NO: 632240 - RNA, 19 nt, Artificial Sequence
  Description of Artificial Sequence: Synthetic oligonucleotide
ggacugucuaauaaauggu

SEQ ID NO: 632241 - RNA, 19 nt, Artificial Sequence
  Description of Artificial Sequence: Synthetic oligonucleotide
cucuggugcaauaggcccu

SEQ ID NO: 632242 - RNA, 19 nt, Artificial Sequence
  Description of Artificial Sequence: Synthetic oligonucleotide
gcgguuuaucagaacacga

SEQ ID NO: 632243 - RNA, 19 nt, Artificial Sequence
  Description of Artificial Sequence: Synthetic oligonucleotide
gggacccagugcuuccacc

SEQ ID NO: 632244 - RNA, 19 nt, Artificial Sequence
  Description of Artificial Sequence: Synthetic oligonucleotide
cuacuucguggugugggga

SEQ ID NO: 632245 - RNA, 19 nt, Artificial Sequence
  Description of Artificial Sequence: Synthetic oligonucleotide
cuggcuccgacgguuagaa

SEQ ID NO: 632246 - RNA, 19 nt, Artificial Sequence
  Description of Artificial Sequence: Synthetic oligonucleotide
agcucaggggucauuuguu

SEQ ID NO: 632247 - RNA, 19 nt, Artificial Sequence
  Description of Artificial Sequence: Synthetic oligonucleotide
cuccgacgguuagaaggcc

SEQ ID NO: 632248 - RNA, 19 nt, Artificial Sequence
  Description of Artificial Sequence: Synthetic oligonucleotide
ccaguuugacugguggaac

SEQ ID NO: 632249 - RNA, 19 nt, Artificial Sequence
  Description of Artificial Sequence: Synthetic oligonucleotide
acccgguugaaugcaguuu

SEQ ID NO: 632250 - RNA, 19 nt, Artificial Sequence
  Description of Artificial Sequence: Synthetic oligonucleotide
ccuuaagucuuggguuucc

SEQ ID NO: 632251 - RNA, 19 nt, Artificial Sequence
  Description of Artificial Sequence: Synthetic oligonucleotide
gcuauacgcauuucauagu

SEQ ID NO: 632252 - RNA, 19 nt, Artificial Sequence
  Description of Artificial Sequence: Synthetic oligonucleotide
caaggugauuaggcucuuc

SEQ ID NO: 632253 - RNA, 19 nt, Artificial Sequence
  Description of Artificial Sequence: Synthetic oligonucleotide
gacagggauccgggucucc

SEQ ID NO: 632254 - RNA, 19 nt, Artificial Sequence
  Description of Artificial Sequence: Synthetic oligonucleotide
gguaacaguuccugacccu

SEQ ID NO: 632255 - RNA, 19 nt, Artificial Sequence
  Description of Artificial Sequence: Synthetic oligonucleotide
cugcuacuucguggugugg

SEQ ID NO: 632256 - RNA, 19 nt, Artificial Sequence
  Description of Artificial Sequence: Synthetic oligonucleotide
gcgaaguuugguaaacugu

SEQ ID NO: 632257 - RNA, 19 nt, Artificial Sequence
  Description of Artificial Sequence: Synthetic oligonucleotide
ugggagcaaucagguacaa

SEQ ID NO: 632258 - RNA, 19 nt, Artificial Sequence
  Description of Artificial Sequence: Synthetic oligonucleotide
aggggcgagcacaccagcu

SEQ ID NO: 632259 - RNA, 19 nt, Artificial Sequence
  Description of Artificial Sequence: Synthetic oligonucleotide
gaagucccuuucugagcua

SEQ ID NO: 632260 - RNA, 19 nt, Artificial Sequence
  Description of Artificial Sequence: Synthetic oligonucleotide
guuugacugguggaacagu

SEQ ID NO: 632261 - RNA, 19 nt, Artificial Sequence
  Description of Artificial Sequence: Synthetic oligonucleotide
gaugacccuguaaccacau

SEQ ID NO: 632262 - RNA, 19 nt, Artificial Sequence
  Description of Artificial Sequence: Synthetic oligonucleotide
ggaccggucagcaguuaac

SEQ ID NO: 632263 - RNA, 19 nt, Artificial Sequence
  Description of Artificial Sequence: Synthetic oligonucleotide
guuuugggcgggaccgguc

SEQ ID NO: 632264 - RNA, 19 nt, Artificial Sequence
  Description of Artificial Sequence: Synthetic oligonucleotide
uccuacggacacguuucuu

SEQ ID NO: 632265 - RNA, 19 nt, Artificial Sequence
  Description of Artificial Sequence: Synthetic oligonucleotide
gccagugguucuuaagccu

SEQ ID NO: 632266 - RNA, 19 nt, Artificial Sequence
  Description of Artificial Sequence: Synthetic oligonucleotide
ugguaaccgcaagguagua

SEQ ID NO: 632267 - RNA, 19 nt, Artificial Sequence
  Description of Artificial Sequence: Synthetic oligonucleotide
gggacuaugcuggggcuuc

SEQ ID NO: 632268 - RNA, 19 nt, Artificial Sequence
  Description of Artificial Sequence: Synthetic oligonucleotide
ggcgggaccggucagcagu

SEQ ID NO: 632269 - RNA, 19 nt, Artificial Sequence
  Description of Artificial Sequence: Synthetic oligonucleotide
auacagguuuugggcggga

SEQ ID NO: 632270 - RNA, 19 nt, Artificial Sequence
  Description of Artificial Sequence: Synthetic oligonucleotide
aucauagcccugagauaaa

SEQ ID NO: 632271 - RNA, 19 nt, Artificial Sequence
  Description of Artificial Sequence: Synthetic oligonucleotide
gucuacaugaggggaugcu

SEQ ID NO: 632272 - RNA, 19 nt, Artificial Sequence
  Description of Artificial Sequence: Synthetic oligonucleotide
agacgaggucaaugcgguu

SEQ ID NO: 632273 - RNA, 19 nt, Artificial Sequence
  Description of Artificial Sequence: Synthetic oligonucleotide
ggauccgggucuccagguc

SEQ ID NO: 632274 - RNA, 19 nt, Artificial Sequence
  Description of Artificial Sequence: Synthetic oligonucleotide
cacagacuguagguuacua

SEQ ID NO: 632275 - RNA, 19 nt, Artificial Sequence
  Description of Artificial Sequence: Synthetic oligonucleotide
cccuggcaaaacccgguug

SEQ ID NO: 632276 - RNA, 19 nt, Artificial Sequence
  Description of Artificial Sequence: Synthetic oligonucleotide
gagucggacucauccucau

SEQ ID NO: 632277 - RNA, 19 nt, Artificial Sequence
  Description of Artificial Sequence: Synthetic oligonucleotide
cacgauccuugggccauuc

SEQ ID NO: 632278 - RNA, 19 nt, Artificial Sequence
  Description of Artificial Sequence: Synthetic oligonucleotide
gggaccggucagcaguuaa

SEQ ID NO: 632279 - RNA, 19 nt, Artificial Sequence
  Description of Artificial Sequence: Synthetic oligonucleotide
gccucggcgaaguuuggua

SEQ ID NO: 632280 - RNA, 19 nt, Artificial Sequence
  Description of Artificial Sequence: Synthetic oligonucleotide
ccucggcgaaguuugguaa

SEQ ID NO: 632281 - RNA, 19 nt, Artificial Sequence
  Description of Artificial Sequence: Synthetic oligonucleotide
caucucugccacuucuguu

SEQ ID NO: 632282 - RNA, 19 nt, Artificial Sequence
  Description of Artificial Sequence: Synthetic oligonucleotide
ccuccuguugucauuuccu

SEQ ID NO: 632283 - RNA, 19 nt, Artificial Sequence
  Description of Artificial Sequence: Synthetic oligonucleotide
caguucaauucugucuuau

SEQ ID NO: 632284 - RNA, 19 nt, Artificial Sequence
  Description of Artificial Sequence: Synthetic oligonucleotide
gaagguaggcgaaguucuu

SEQ ID NO: 632285 - RNA, 19 nt, Artificial Sequence
  Description of Artificial Sequence: Synthetic oligonucleotide
cacccagcaauggggacua

SEQ ID NO: 632286 - RNA, 19 nt, Artificial Sequence
  Description of Artificial Sequence: Synthetic oligonucleotide
ggugaagguaggcgaaguu

SEQ ID NO: 632287 - RNA, 19 nt, Artificial Sequence
  Description of Artificial Sequence: Synthetic oligonucleotide
ccauuucccugagaguaca

SEQ ID NO: 632288 - RNA, 19 nt, Artificial Sequence
  Description of Artificial Sequence: Synthetic oligonucleotide
guccuacggacacguuucu

SEQ ID NO: 632289 - RNA, 19 nt, Artificial Sequence
  Description of Artificial Sequence: Synthetic oligonucleotide
guucccggggcaggaggga

SEQ ID NO: 632290 - RNA, 19 nt, Artificial Sequence
  Description of Artificial Sequence: Synthetic oligonucleotide
ggcuggcaucauaggauca

SEQ ID NO: 632291 - RNA, 19 nt, Artificial Sequence
  Description of Artificial Sequence: Synthetic oligonucleotide
cuugggccauucagaggcu

SEQ ID NO: 632292 - RNA, 19 nt, Artificial Sequence
  Description of Artificial Sequence: Synthetic oligonucleotide
ccgguugaaugcaguuuca

SEQ ID NO: 632293 - RNA, 19 nt, Artificial Sequence
  Description of Artificial Sequence: Synthetic oligonucleotide
cugccacuucuguuuucua

SEQ ID NO: 632294 - RNA, 19 nt, Artificial Sequence
  Description of Artificial Sequence: Synthetic oligonucleotide
gcgcuacauagucuguggu

SEQ ID NO: 632295 - RNA, 19 nt, Artificial Sequence
  Description of Artificial Sequence: Synthetic oligonucleotide
cgguuuaucagaacacgau

SEQ ID NO: 632296 - RNA, 19 nt, Artificial Sequence
  Description of Artificial Sequence: Synthetic oligonucleotide
gcucuaggcuccuuugcuu

SEQ ID NO: 632297 - RNA, 19 nt, Artificial Sequence
  Description of Artificial Sequence: Synthetic oligonucleotide
gccauucagaggcucuuuu

SEQ ID NO: 632298 - RNA, 19 nt, Artificial Sequence
  Description of Artificial Sequence: Synthetic oligonucleotide
cacucucgucagugcugga

SEQ ID NO: 632299 - RNA, 19 nt, Artificial Sequence
  Description of Artificial Sequence: Synthetic oligonucleotide
gcgagcacaccagcugcuc

SEQ ID NO: 632300 - RNA, 19 nt, Artificial Sequence
  Description of Artificial Sequence: Synthetic oligonucleotide
acacgauccuugggccauu

SEQ ID NO: 632301 - RNA, 19 nt, Artificial Sequence
  Description of Artificial Sequence: Synthetic oligonucleotide
gguuuugggcgggaccggu

SEQ ID NO: 632302 - RNA, 19 nt, Artificial Sequence
  Description of Artificial Sequence: Synthetic oligonucleotide
gcaaagugccauccaccuu

SEQ ID NO: 632303 - RNA, 19 nt, Artificial Sequence
  Description of Artificial Sequence: Synthetic oligonucleotide
ggacuaugcuggggcuuca

SEQ ID NO: 632304 - RNA, 19 nt, Artificial Sequence
  Description of Artificial Sequence: Synthetic oligonucleotide
cccauuucuagaguugguu

SEQ ID NO: 632305 - RNA, 19 nt, Artificial Sequence
  Description of Artificial Sequence: Synthetic oligonucleotide
cuuguccuacggacacguu

SEQ ID NO: 632306 - RNA, 19 nt, Artificial Sequence
  Description of Artificial Sequence: Synthetic oligonucleotide
gcauuagggccaucaucuu

SEQ ID NO: 632307 - RNA, 19 nt, Artificial Sequence
  Description of Artificial Sequence: Synthetic oligonucleotide
ggcccuggcaaaacccggu

SEQ ID NO: 632308 - RNA, 19 nt, Artificial Sequence
  Description of Artificial Sequence: Synthetic oligonucleotide
ccgacgguuagaaggccau

SEQ ID NO: 632309 - RNA, 19 nt, Artificial Sequence
  Description of Artificial Sequence: Synthetic oligonucleotide
ggcgagcacaccagcugcu

SEQ ID NO: 632310 - RNA, 19 nt, Artificial Sequence
  Description of Artificial Sequence: Synthetic oligonucleotide
cgcuacauagucugugguu

SEQ ID NO: 632311 - RNA, 19 nt, Artificial Sequence
  Description of Artificial Sequence: Synthetic oligonucleotide
cccacccaauccucucaaa

SEQ ID NO: 632312 - RNA, 19 nt, Artificial Sequence
  Description of Artificial Sequence: Synthetic oligonucleotide
gggcuucagucaucagcau

SEQ ID NO: 632313 - RNA, 19 nt, Artificial Sequence
  Description of Artificial Sequence: Synthetic oligonucleotide
ccagcgcuacauagucugu

SEQ ID NO: 632314 - RNA, 19 nt, Artificial Sequence
  Description of Artificial Sequence: Synthetic oligonucleotide
ggggacuaugcuggggcuu

SEQ ID NO: 632315 - RNA, 19 nt, Artificial Sequence
  Description of Artificial Sequence: Synthetic oligonucleotide
acccagcaauggggacuau

SEQ ID NO: 632316 - RNA, 19 nt, Artificial Sequence
  Description of Artificial Sequence: Synthetic oligonucleotide
gcccuggcaaaacccgguu

SEQ ID NO: 632317 - RNA, 19 nt, Artificial Sequence
  Description of Artificial Sequence: Synthetic oligonucleotide
gggccauucagaggcucuu

SEQ ID NO: 632318 - RNA, 19 nt, Artificial Sequence
  Description of Artificial Sequence: Synthetic oligonucleotide
ggccauucagaggcucuuu

SEQ ID NO: 632319 - RNA, 19 nt, Artificial Sequence
  Description of Artificial Sequence: Synthetic oligonucleotide
ccaugccucggcgaaguuu

SEQ ID NO: 632320 - RNA, 19 nt, Artificial Sequence
  Description of Artificial Sequence: Synthetic oligonucleotide
cggcgaaguuugguaaacu

SEQ ID NO: 632321 - RNA, 19 nt, Artificial Sequence
  Description of Artificial Sequence: Synthetic oligonucleotide
gcgggaccggucagcaguu

SEQ ID NO: 632322 - RNA, 19 nt, Artificial Sequence
  Description of Artificial Sequence: Synthetic oligonucleotide
cgacgguuagaaggccauu

SEQ ID NO: 632323 - RNA, 19 nt, Artificial Sequence
  Description of Artificial Sequence: Synthetic oligonucleotide
cgggaccggucagcaguua

SEQ ID NO: 632324 - RNA, 19 nt, Artificial Sequence
  Description of Artificial Sequence: Synthetic oligonucleotide
aaauuagucuguuacaaag

SEQ ID NO: 632325 - RNA, 19 nt, Artificial Sequence
  Description of Artificial Sequence: Synthetic oligonucleotide
uuaauuaggaacucaaucc

SEQ ID NO: 632326 - RNA, 19 nt, Artificial Sequence
  Description of Artificial Sequence: Synthetic oligonucleotide
uuugguguauuucaaaagg

SEQ ID NO: 632327 - RNA, 19 nt, Artificial Sequence
  Description of Artificial Sequence: Synthetic oligonucleotide
agaaguuagaaauuauccc

SEQ ID NO: 632328 - RNA, 19 nt, Artificial Sequence
  Description of Artificial Sequence: Synthetic oligonucleotide
ugauaaaucucuauuaaca

SEQ ID NO: 632329 - RNA, 19 nt, Artificial Sequence
  Description of Artificial Sequence: Synthetic oligonucleotide
gacaauucaaauuagucug

SEQ ID NO: 632330 - RNA, 19 nt, Artificial Sequence
  Description of Artificial Sequence: Synthetic oligonucleotide
uuaacuauuacuggaaggg

SEQ ID NO: 632331 - RNA, 19 nt, Artificial Sequence
  Description of Artificial Sequence: Synthetic oligonucleotide
uguuguauaggauaucagg

SEQ ID NO: 632332 - RNA, 19 nt, Artificial Sequence
  Description of Artificial Sequence: Synthetic oligonucleotide
aaacaaaacaaaacaaaac

SEQ ID NO: 632333 - RNA, 19 nt, Artificial Sequence
  Description of Artificial Sequence: Synthetic oligonucleotide
uuuaguaugaugacaacac

SEQ ID NO: 632334 - RNA, 19 nt, Artificial Sequence
  Description of Artificial Sequence: Synthetic oligonucleotide
gaaugugaaagcuucagcc

SEQ ID NO: 632335 - RNA, 19 nt, Artificial Sequence
  Description of Artificial Sequence: Synthetic oligonucleotide
aaagcauugguucagcacu

SEQ ID NO: 632336 - RNA, 19 nt, Artificial Sequence
  Description of Artificial Sequence: Synthetic oligonucleotide
uguaaaucuaugcuaagca

SEQ ID NO: 632337 - RNA, 19 nt, Artificial Sequence
  Description of Artificial Sequence: Synthetic oligonucleotide
uguugguuaaguaugcucc

SEQ ID NO: 632338 - RNA, 19 nt, Artificial Sequence
  Description of Artificial Sequence: Synthetic oligonucleotide
aaaacuaacacucgucacu

SEQ ID NO: 632339 - RNA, 19 nt, Artificial Sequence
  Description of Artificial Sequence: Synthetic oligonucleotide
auuaacuauuacuggaagg

SEQ ID NO: 632340 - RNA, 19 nt, Artificial Sequence
  Description of Artificial Sequence: Synthetic oligonucleotide
uuaaguaugcuccccaccc

SEQ ID NO: 632341 - RNA, 19 nt, Artificial Sequence
  Description of Artificial Sequence: Synthetic oligonucleotide
ucaaauuagauggugaccu

SEQ ID NO: 632342 - RNA, 19 nt, Artificial Sequence
  Description of Artificial Sequence: Synthetic oligonucleotide
uaauuaggaacucaaucca

SEQ ID NO: 632343 - RNA, 19 nt, Artificial Sequence
  Description of Artificial Sequence: Synthetic oligonucleotide
aaaacaaaacaaaacaaaa

SEQ ID NO: 632344 - RNA, 19 nt, Artificial Sequence
  Description of Artificial Sequence: Synthetic oligonucleotide
ucaagaaggaguauguuau

SEQ ID NO: 632345 - RNA, 19 nt, Artificial Sequence
  Description of Artificial Sequence: Synthetic oligonucleotide
agacaauacacaauuauuc

SEQ ID NO: 632346 - RNA, 19 nt, Artificial Sequence
  Description of Artificial Sequence: Synthetic oligonucleotide
aggaguauguuauuaaaug

SEQ ID NO: 632347 - RNA, 19 nt, Artificial Sequence
  Description of Artificial Sequence: Synthetic oligonucleotide
uguauaggauaucaggaga

SEQ ID NO: 632348 - RNA, 19 nt, Artificial Sequence
  Description of Artificial Sequence: Synthetic oligonucleotide
aauaguuuuguauccacuu

SEQ ID NO: 632349 - RNA, 19 nt, Artificial Sequence
  Description of Artificial Sequence: Synthetic oligonucleotide
uaguaugaugacaacacca

SEQ ID NO: 632350 - RNA, 19 nt, Artificial Sequence
  Description of Artificial Sequence: Synthetic oligonucleotide
aguugucgaaaacaguugg

SEQ ID NO: 632351 - RNA, 19 nt, Artificial Sequence
  Description of Artificial Sequence: Synthetic oligonucleotide
aaugugaaagcuucagcca

SEQ ID NO: 632352 - RNA, 19 nt, Artificial Sequence
  Description of Artificial Sequence: Synthetic oligonucleotide
ugacgaauccacaagauua

SEQ ID NO: 632353 - RNA, 19 nt, Artificial Sequence
  Description of Artificial Sequence: Synthetic oligonucleotide
aaacauacuaggaaaacgu

SEQ ID NO: 632354 - RNA, 19 nt, Artificial Sequence
  Description of Artificial Sequence: Synthetic oligonucleotide
ucuugaaugugaaagcuuc

SEQ ID NO: 632355 - RNA, 19 nt, Artificial Sequence
  Description of Artificial Sequence: Synthetic oligonucleotide
uucagcugaaucaaggaac

SEQ ID NO: 632356 - RNA, 19 nt, Artificial Sequence
  Description of Artificial Sequence: Synthetic oligonucleotide
agugcauccuaaaagaggg

SEQ ID NO: 632357 - RNA, 19 nt, Artificial Sequence
  Description of Artificial Sequence: Synthetic oligonucleotide
caaagggcaaauaaauacc

SEQ ID NO: 632358 - RNA, 19 nt, Artificial Sequence
  Description of Artificial Sequence: Synthetic oligonucleotide
cuaaacuagaccuggggag

SEQ ID NO: 632359 - RNA, 19 nt, Artificial Sequence
  Description of Artificial Sequence: Synthetic oligonucleotide
aauaguagaggggucaucu

SEQ ID NO: 632360 - RNA, 19 nt, Artificial Sequence
  Description of Artificial Sequence: Synthetic oligonucleotide
uccgauggaaauuuguuug

SEQ ID NO: 632361 - RNA, 19 nt, Artificial Sequence
  Description of Artificial Sequence: Synthetic oligonucleotide
aagauuaggacugggaaga

SEQ ID NO: 632362 - RNA, 19 nt, Artificial Sequence
  Description of Artificial Sequence: Synthetic oligonucleotide
uauuaaaugaggcguuucu

SEQ ID NO: 632363 - RNA, 19 nt, Artificial Sequence
  Description of Artificial Sequence: Synthetic oligonucleotide
uuuuaguaugaugacaaca

SEQ ID NO: 632364 - RNA, 19 nt, Artificial Sequence
  Description of Artificial Sequence: Synthetic oligonucleotide
acccuugaaagucacaguc

SEQ ID NO: 632365 - RNA, 19 nt, Artificial Sequence
  Description of Artificial Sequence: Synthetic oligonucleotide
uguggaaauaguuuuguau

SEQ ID NO: 632366 - RNA, 19 nt, Artificial Sequence
  Description of Artificial Sequence: Synthetic oligonucleotide
cuauuaacacuuaugaaga

SEQ ID NO: 632367 - RNA, 19 nt, Artificial Sequence
  Description of Artificial Sequence: Synthetic oligonucleotide
ugcuaagcauauaagaaaa

SEQ ID NO: 632368 - RNA, 19 nt, Artificial Sequence
  Description of Artificial Sequence: Synthetic oligonucleotide
auaaccauucgucuucuag

SEQ ID NO: 632369 - RNA, 19 nt, Artificial Sequence
  Description of Artificial Sequence: Synthetic oligonucleotide
acuaagaaacaacccuccc

SEQ ID NO: 632370 - RNA, 19 nt, Artificial Sequence
  Description of Artificial Sequence: Synthetic oligonucleotide
ucuuuaguuugauuuaaac

SEQ ID NO: 632371 - RNA, 19 nt, Artificial Sequence
  Description of Artificial Sequence: Synthetic oligonucleotide
ugcuaaacuagaccugggg

SEQ ID NO: 632372 - RNA, 19 nt, Artificial Sequence
  Description of Artificial Sequence: Synthetic oligonucleotide
ucguagucugucauaaucc

SEQ ID NO: 632373 - RNA, 19 nt, Artificial Sequence
  Description of Artificial Sequence: Synthetic oligonucleotide
uuaguaugaugacaacacc

SEQ ID NO: 632374 - RNA, 19 nt, Artificial Sequence
  Description of Artificial Sequence: Synthetic oligonucleotide
uaaccauucgucuucuagc

SEQ ID NO: 632375 - RNA, 19 nt, Artificial Sequence
  Description of Artificial Sequence: Synthetic oligonucleotide
aucaauuugggucccaaca

SEQ ID NO: 632376 - RNA, 19 nt, Artificial Sequence
  Description of Artificial Sequence: Synthetic oligonucleotide
gaaaggagucuuuggacag

SEQ ID NO: 632377 - RNA, 19 nt, Artificial Sequence
  Description of Artificial Sequence: Synthetic oligonucleotide
acugugacugcauaguugu

SEQ ID NO: 632378 - RNA, 19 nt, Artificial Sequence
  Description of Artificial Sequence: Synthetic oligonucleotide
auacuuaacagccuucaga

SEQ ID NO: 632379 - RNA, 19 nt, Artificial Sequence
  Description of Artificial Sequence: Synthetic oligonucleotide
auauaucugaaaagaauuc

SEQ ID NO: 632380 - RNA, 19 nt, Artificial Sequence
  Description of Artificial Sequence: Synthetic oligonucleotide
uucucaauaguagaggggu

SEQ ID NO: 632381 - RNA, 19 nt, Artificial Sequence
  Description of Artificial Sequence: Synthetic oligonucleotide
auguuauuaaaugaggcgu

SEQ ID NO: 632382 - RNA, 19 nt, Artificial Sequence
  Description of Artificial Sequence: Synthetic oligonucleotide
uaauugucugcauugugga

SEQ ID NO: 632383 - RNA, 19 nt, Artificial Sequence
  Description of Artificial Sequence: Synthetic oligonucleotide
auguugguuaaguaugcuc

SEQ ID NO: 632384 - RNA, 19 nt, Artificial Sequence
  Description of Artificial Sequence: Synthetic oligonucleotide
uuagucuguuacaaaguca

SEQ ID NO: 632385 - RNA, 19 nt, Artificial Sequence
  Description of Artificial Sequence: Synthetic oligonucleotide
uauugcagaaaccaauuuu

SEQ ID NO: 632386 - RNA, 19 nt, Artificial Sequence
  Description of Artificial Sequence: Synthetic oligonucleotide
caaaacaaaacaaaacaaa

SEQ ID NO: 632387 - RNA, 19 nt, Artificial Sequence
  Description of Artificial Sequence: Synthetic oligonucleotide
aaccauucgucuucuagca

SEQ ID NO: 632388 - RNA, 19 nt, Artificial Sequence
  Description of Artificial Sequence: Synthetic oligonucleotide
aaaagaacgucuucuuuua

SEQ ID NO: 632389 - RNA, 19 nt, Artificial Sequence
  Description of Artificial Sequence: Synthetic oligonucleotide
aagaguauauggcucucca

SEQ ID NO: 632390 - RNA, 19 nt, Artificial Sequence
  Description of Artificial Sequence: Synthetic oligonucleotide
caagauuaggacugggaag

SEQ ID NO: 632391 - RNA, 19 nt, Artificial Sequence
  Description of Artificial Sequence: Synthetic oligonucleotide
uuaaggaacccuguguacc

SEQ ID NO: 632392 - RNA, 19 nt, Artificial Sequence
  Description of Artificial Sequence: Synthetic oligonucleotide
aucuaugcuaagcauauaa

SEQ ID NO: 632393 - RNA, 19 nt, Artificial Sequence
  Description of Artificial Sequence: Synthetic oligonucleotide
augugaaagcuucagccag

SEQ ID NO: 632394 - RNA, 19 nt, Artificial Sequence
  Description of Artificial Sequence: Synthetic oligonucleotide
uauuaacacuuaugaagag

SEQ ID NO: 632395 - RNA, 19 nt, Artificial Sequence
  Description of Artificial Sequence: Synthetic oligonucleotide
cauaacugugacugcauag

SEQ ID NO: 632396 - RNA, 19 nt, Artificial Sequence
  Description of Artificial Sequence: Synthetic oligonucleotide
ugcauaguugucgaaaaca

SEQ ID NO: 632397 - RNA, 19 nt, Artificial Sequence
  Description of Artificial Sequence: Synthetic oligonucleotide
aaaacgucuguuugugggu

SEQ ID NO: 632398 - RNA, 19 nt, Artificial Sequence
  Description of Artificial Sequence: Synthetic oligonucleotide
acaagauuaggacugggaa

SEQ ID NO: 632399 - RNA, 19 nt, Artificial Sequence
  Description of Artificial Sequence: Synthetic oligonucleotide
ugucauuauugcagaaacc

SEQ ID NO: 632400 - RNA, 19 nt, Artificial Sequence
  Description of Artificial Sequence: Synthetic oligonucleotide
aaaucuaugcuaagcauau

SEQ ID NO: 632401 - RNA, 19 nt, Artificial Sequence
  Description of Artificial Sequence: Synthetic oligonucleotide
uugcucuccaaaauggaac

SEQ ID NO: 632402 - RNA, 19 nt, Artificial Sequence
  Description of Artificial Sequence: Synthetic oligonucleotide
aaauuagauggugaccuca

SEQ ID NO: 632403 - RNA, 19 nt, Artificial Sequence
  Description of Artificial Sequence: Synthetic oligonucleotide
gaaagcauugguucagcac

SEQ ID NO: 632404 - RNA, 19 nt, Artificial Sequence
  Description of Artificial Sequence: Synthetic oligonucleotide
uauuccgauggaaauuugu

SEQ ID NO: 632405 - RNA, 19 nt, Artificial Sequence
  Description of Artificial Sequence: Synthetic oligonucleotide
ugucgaaaacaguugguac

SEQ ID NO: 632406 - RNA, 19 nt, Artificial Sequence
  Description of Artificial Sequence: Synthetic oligonucleotide
aguaugaugacaacaccag

SEQ ID NO: 632407 - RNA, 19 nt, Artificial Sequence
  Description of Artificial Sequence: Synthetic oligonucleotide
aaacaaaagauugguggga

SEQ ID NO: 632408 - RNA, 19 nt, Artificial Sequence
  Description of Artificial Sequence: Synthetic oligonucleotide
ugaguuaucucaggcaccc

SEQ ID NO: 632409 - RNA, 19 nt, Artificial Sequence
  Description of Artificial Sequence: Synthetic oligonucleotide
gagugcauccuaaaagagg

SEQ ID NO: 632410 - RNA, 19 nt, Artificial Sequence
  Description of Artificial Sequence: Synthetic oligonucleotide
aauuagucuguuacaaagu

SEQ ID NO: 632411 - RNA, 19 nt, Artificial Sequence
  Description of Artificial Sequence: Synthetic oligonucleotide
aaaaguccaagaguauaug

SEQ ID NO: 632412 - RNA, 19 nt, Artificial Sequence
  Description of Artificial Sequence: Synthetic oligonucleotide
uaguugucgaaaacaguug

SEQ ID NO: 632413 - RNA, 19 nt, Artificial Sequence
  Description of Artificial Sequence: Synthetic oligonucleotide
aguuugauuuaaacauugc

SEQ ID NO: 632414 - RNA, 19 nt, Artificial Sequence
  Description of Artificial Sequence: Synthetic oligonucleotide
agaguauauggcucuccac

SEQ ID NO: 632415 - RNA, 19 nt, Artificial Sequence
  Description of Artificial Sequence: Synthetic oligonucleotide
acuuucaagaaggaguaug

SEQ ID NO: 632416 - RNA, 19 nt, Artificial Sequence
  Description of Artificial Sequence: Synthetic oligonucleotide
ucuacacuccuuccuaaga

SEQ ID NO: 632417 - RNA, 19 nt, Artificial Sequence
  Description of Artificial Sequence: Synthetic oligonucleotide
aacacuuaugaagagucau

SEQ ID NO: 632418 - RNA, 19 nt, Artificial Sequence
  Description of Artificial Sequence: Synthetic oligonucleotide
gaacucaauccauuuggug

SEQ ID NO: 632419 - RNA, 19 nt, Artificial Sequence
  Description of Artificial Sequence: Synthetic oligonucleotide
aacaagcaagaaaggaguc

SEQ ID NO: 632420 - RNA, 19 nt, Artificial Sequence
  Description of Artificial Sequence: Synthetic oligonucleotide
uguuauuaaaugaggcguu

SEQ ID NO: 632421 - RNA, 19 nt, Artificial Sequence
  Description of Artificial Sequence: Synthetic oligonucleotide
aaauacccuugaaagucac

SEQ ID NO: 632422 - RNA, 19 nt, Artificial Sequence
  Description of Artificial Sequence: Synthetic oligonucleotide
ugcauccuaaaagaggggc

SEQ ID NO: 632423 - RNA, 19 nt, Artificial Sequence
  Description of Artificial Sequence: Synthetic oligonucleotide
uuaacagccuucagauccc

SEQ ID NO: 632424 - RNA, 19 nt, Artificial Sequence
  Description of Artificial Sequence: Synthetic oligonucleotide
auaccaacgggccuugucu

SEQ ID NO: 632425 - RNA, 19 nt, Artificial Sequence
  Description of Artificial Sequence: Synthetic oligonucleotide
augcuaagcauauaagaaa

SEQ ID NO: 632426 - RNA, 19 nt, Artificial Sequence
  Description of Artificial Sequence: Synthetic oligonucleotide
uggaaauaaucuguccucc

SEQ ID NO: 632427 - RNA, 19 nt, Artificial Sequence
  Description of Artificial Sequence: Synthetic oligonucleotide
acuuaugaagagucaugag

SEQ ID NO: 632428 - RNA, 19 nt, Artificial Sequence
  Description of Artificial Sequence: Synthetic oligonucleotide
auuaacacuuaugaagagu

SEQ ID NO: 632429 - RNA, 19 nt, Artificial Sequence
  Description of Artificial Sequence: Synthetic oligonucleotide
agacauguuuuaccaacag

SEQ ID NO: 632430 - RNA, 19 nt, Artificial Sequence
  Description of Artificial Sequence: Synthetic oligonucleotide
gaugacaacaccagcugug

SEQ ID NO: 632431 - RNA, 19 nt, Artificial Sequence
  Description of Artificial Sequence: Synthetic oligonucleotide
uaacacucgucacuuuuca

SEQ ID NO: 632432 - RNA, 19 nt, Artificial Sequence
  Description of Artificial Sequence: Synthetic oligonucleotide
uaaugaagcaggccuguaa

SEQ ID NO: 632433 - RNA, 19 nt, Artificial Sequence
  Description of Artificial Sequence: Synthetic oligonucleotide
gacuaagaaacaacccucc

SEQ ID NO: 632434 - RNA, 19 nt, Artificial Sequence
  Description of Artificial Sequence: Synthetic oligonucleotide
uuguauccacuuuuaauau

SEQ ID NO: 632435 - RNA, 19 nt, Artificial Sequence
  Description of Artificial Sequence: Synthetic oligonucleotide
gacgaauccacaagauuag

SEQ ID NO: 632436 - RNA, 19 nt, Artificial Sequence
  Description of Artificial Sequence: Synthetic oligonucleotide
aggauaucaggagacaugu

SEQ ID NO: 632437 - RNA, 19 nt, Artificial Sequence
  Description of Artificial Sequence: Synthetic oligonucleotide
cauuguggaaauaguuuug

SEQ ID NO: 632438 - RNA, 19 nt, Artificial Sequence
  Description of Artificial Sequence: Synthetic oligonucleotide
cucacgugagugcaugugg

SEQ ID NO: 632439 - RNA, 19 nt, Artificial Sequence
  Description of Artificial Sequence: Synthetic oligonucleotide
cagauugcucuccaaaaug

SEQ ID NO: 632440 - RNA, 19 nt, Artificial Sequence
  Description of Artificial Sequence: Synthetic oligonucleotide
agaaggaguauguuauuaa

SEQ ID NO: 632441 - RNA, 19 nt, Artificial Sequence
  Description of Artificial Sequence: Synthetic oligonucleotide
auaacugugacugcauagu

SEQ ID NO: 632442 - RNA, 19 nt, Artificial Sequence
  Description of Artificial Sequence: Synthetic oligonucleotide
uguaaccucaccaccugaa

SEQ ID NO: 632443 - RNA, 19 nt, Artificial Sequence
  Description of Artificial Sequence: Synthetic oligonucleotide
uacagagugcauccuaaaa

SEQ ID NO: 632444 - RNA, 19 nt, Artificial Sequence
  Description of Artificial Sequence: Synthetic oligonucleotide
guuaaguaugcuccccacc

SEQ ID NO: 632445 - RNA, 19 nt, Artificial Sequence
  Description of Artificial Sequence: Synthetic oligonucleotide
ugguuaaguaugcucccca

SEQ ID NO: 632446 - RNA, 19 nt, Artificial Sequence
  Description of Artificial Sequence: Synthetic oligonucleotide
aaggaguauguuauuaaau

SEQ ID NO: 632447 - RNA, 19 nt, Artificial Sequence
  Description of Artificial Sequence: Synthetic oligonucleotide
ggugaguuaucucaggcac

SEQ ID NO: 632448 - RNA, 19 nt, Artificial Sequence
  Description of Artificial Sequence: Synthetic oligonucleotide
uaacuauuacuggaagggc

SEQ ID NO: 632449 - RNA, 19 nt, Artificial Sequence
  Description of Artificial Sequence: Synthetic oligonucleotide
aacauugcuuuuaguauga

SEQ ID NO: 632450 - RNA, 19 nt, Artificial Sequence
  Description of Artificial Sequence: Synthetic oligonucleotide
gauaucaggagacauguuu

SEQ ID NO: 632451 - RNA, 19 nt, Artificial Sequence
  Description of Artificial Sequence: Synthetic oligonucleotide
cuuaaggaacccuguguac

SEQ ID NO: 632452 - RNA, 19 nt, Artificial Sequence
  Description of Artificial Sequence: Synthetic oligonucleotide
uuaggaacucaauccauuu

SEQ ID NO: 632453 - RNA, 19 nt, Artificial Sequence
  Description of Artificial Sequence: Synthetic oligonucleotide
uuauugcagaaaccaauuu

SEQ ID NO: 632454 - RNA, 19 nt, Artificial Sequence
  Description of Artificial Sequence: Synthetic oligonucleotide
uucaaggguuccucagagg

SEQ ID NO: 632455 - RNA, 19 nt, Artificial Sequence
  Description of Artificial Sequence: Synthetic oligonucleotide
caucccuuaaggaacccug

SEQ ID NO: 632456 - RNA, 19 nt, Artificial Sequence
  Description of Artificial Sequence: Synthetic oligonucleotide
acuaggaaaacgucuguuu

SEQ ID NO: 632457 - RNA, 19 nt, Artificial Sequence
  Description of Artificial Sequence: Synthetic oligonucleotide
aaacuaacacucgucacuu

SEQ ID NO: 632458 - RNA, 19 nt, Artificial Sequence
  Description of Artificial Sequence: Synthetic oligonucleotide
acauacuaggaaaacgucu

SEQ ID NO: 632459 - RNA, 19 nt, Artificial Sequence
  Description of Artificial Sequence: Synthetic oligonucleotide
guauaggauaucaggagac

SEQ ID NO: 632460 - RNA, 19 nt, Artificial Sequence
  Description of Artificial Sequence: Synthetic oligonucleotide
uggugaguuaucucaggca

SEQ ID NO: 632461 - RNA, 19 nt, Artificial Sequence
  Description of Artificial Sequence: Synthetic oligonucleotide
aagaaggaguauguuauua

SEQ ID NO: 632462 - RNA, 19 nt, Artificial Sequence
  Description of Artificial Sequence: Synthetic oligonucleotide
guggaaauaaucuguccuc

SEQ ID NO: 632463 - RNA, 19 nt, Artificial Sequence
  Description of Artificial Sequence: Synthetic oligonucleotide
acuuaacagccuucagauc

SEQ ID NO: 632464 - RNA, 19 nt, Artificial Sequence
  Description of Artificial Sequence: Synthetic oligonucleotide
uauaggauaucaggagaca

SEQ ID NO: 632465 - RNA, 19 nt, Artificial Sequence
  Description of Artificial Sequence: Synthetic oligonucleotide
augccuugcuuuuaaacaa

SEQ ID NO: 632466 - RNA, 19 nt, Artificial Sequence
  Description of Artificial Sequence: Synthetic oligonucleotide
gaaagggcucuggagaggc

SEQ ID NO: 632467 - RNA, 19 nt, Artificial Sequence
  Description of Artificial Sequence: Synthetic oligonucleotide
uuccuaagagcaccaggug

SEQ ID NO: 632468 - RNA, 19 nt, Artificial Sequence
  Description of Artificial Sequence: Synthetic oligonucleotide
ugugaaagcuucagccagu

SEQ ID NO: 632469 - RNA, 19 nt, Artificial Sequence
  Description of Artificial Sequence: Synthetic oligonucleotide
aacucagcggucguagucu

SEQ ID NO: 632470 - RNA, 19 nt, Artificial Sequence
  Description of Artificial Sequence: Synthetic oligonucleotide
ugaggcguuucuacacucc

SEQ ID NO: 632471 - RNA, 19 nt, Artificial Sequence
  Description of Artificial Sequence: Synthetic oligonucleotide
guggugaguuaucucaggc

SEQ ID NO: 632472 - RNA, 19 nt, Artificial Sequence
  Description of Artificial Sequence: Synthetic oligonucleotide
augaggcguuucuacacuc

SEQ ID NO: 632473 - RNA, 19 nt, Artificial Sequence
  Description of Artificial Sequence: Synthetic oligonucleotide
aaagaacgucuucuuuuaa

SEQ ID NO: 632474 - RNA, 19 nt, Artificial Sequence
  Description of Artificial Sequence: Synthetic oligonucleotide
uggcaaguuucucaauagu

SEQ ID NO: 632475 - RNA, 19 nt, Artificial Sequence
  Description of Artificial Sequence: Synthetic oligonucleotide
agcugaaucaaggaacacu

SEQ ID NO: 632476 - RNA, 19 nt, Artificial Sequence
  Description of Artificial Sequence: Synthetic oligonucleotide
uuauuaaaugaggcguuuc

SEQ ID NO: 632477 - RNA, 19 nt, Artificial Sequence
  Description of Artificial Sequence: Synthetic oligonucleotide
gaagauuaccuaaacauuu

SEQ ID NO: 632478 - RNA, 19 nt, Artificial Sequence
  Description of Artificial Sequence: Synthetic oligonucleotide
acauacuuaacagccuuca

SEQ ID NO: 632479 - RNA, 19 nt, Artificial Sequence
  Description of Artificial Sequence: Synthetic oligonucleotide
cauacuuaacagccuucag

SEQ ID NO: 632480 - RNA, 19 nt, Artificial Sequence
  Description of Artificial Sequence: Synthetic oligonucleotide
uuccgauggaaauuuguuu

SEQ ID NO: 632481 - RNA, 19 nt, Artificial Sequence
  Description of Artificial Sequence: Synthetic oligonucleotide
uccuaaaagaggggcaaga

SEQ ID NO: 632482 - RNA, 19 nt, Artificial Sequence
  Description of Artificial Sequence: Synthetic oligonucleotide
acauucuuuaggccuuucu

SEQ ID NO: 632483 - RNA, 19 nt, Artificial Sequence
  Description of Artificial Sequence: Synthetic oligonucleotide
uugucgaaaacaguuggua

SEQ ID NO: 632484 - RNA, 19 nt, Artificial Sequence
  Description of Artificial Sequence: Synthetic oligonucleotide
ucauaacugugacugcaua

SEQ ID NO: 632485 - RNA, 19 nt, Artificial Sequence
  Description of Artificial Sequence: Synthetic oligonucleotide
gggaagauuaccuaaacau

SEQ ID NO: 632486 - RNA, 19 nt, Artificial Sequence
  Description of Artificial Sequence: Synthetic oligonucleotide
accauucgucuucuagcac

SEQ ID NO: 632487 - RNA, 19 nt, Artificial Sequence
  Description of Artificial Sequence: Synthetic oligonucleotide
gaucaauuugggucccaac

SEQ ID NO: 632488 - RNA, 19 nt, Artificial Sequence
  Description of Artificial Sequence: Synthetic oligonucleotide
ucgaaaacaguugguacau

SEQ ID NO: 632489 - RNA, 19 nt, Artificial Sequence
  Description of Artificial Sequence: Synthetic oligonucleotide
uguauccacuuuuaauauu

SEQ ID NO: 632490 - RNA, 19 nt, Artificial Sequence
  Description of Artificial Sequence: Synthetic oligonucleotide
auuugugaaggguuuuguu

SEQ ID NO: 632491 - RNA, 19 nt, Artificial Sequence
  Description of Artificial Sequence: Synthetic oligonucleotide
uucagacaauacacaauua

SEQ ID NO: 632492 - RNA, 19 nt, Artificial Sequence
  Description of Artificial Sequence: Synthetic oligonucleotide
aacuagaccuggggagugg

SEQ ID NO: 632493 - RNA, 19 nt, Artificial Sequence
  Description of Artificial Sequence: Synthetic oligonucleotide
auacuaggaaaacgucugu

SEQ ID NO: 632494 - RNA, 19 nt, Artificial Sequence
  Description of Artificial Sequence: Synthetic oligonucleotide
cugacugguccccauguug

SEQ ID NO: 632495 - RNA, 19 nt, Artificial Sequence
  Description of Artificial Sequence: Synthetic oligonucleotide
aagauuaccuaaacauuuu

SEQ ID NO: 632496 - RNA, 19 nt, Artificial Sequence
  Description of Artificial Sequence: Synthetic oligonucleotide
caacaagcaagaaaggagu

SEQ ID NO: 632497 - RNA, 19 nt, Artificial Sequence
  Description of Artificial Sequence: Synthetic oligonucleotide
auaggauaucaggagacau

SEQ ID NO: 632498 - RNA, 19 nt, Artificial Sequence
  Description of Artificial Sequence: Synthetic oligonucleotide
gcguuugucauuauugcag

SEQ ID NO: 632499 - RNA, 19 nt, Artificial Sequence
  Description of Artificial Sequence: Synthetic oligonucleotide
cucgucacuuuucagacaa

SEQ ID NO: 632500 - RNA, 19 nt, Artificial Sequence
  Description of Artificial Sequence: Synthetic oligonucleotide
ggcggaacacuccacauac

SEQ ID NO: 632501 - RNA, 19 nt, Artificial Sequence
  Description of Artificial Sequence: Synthetic oligonucleotide
cacuuaugaagagucauga

SEQ ID NO: 632502 - RNA, 19 nt, Artificial Sequence
  Description of Artificial Sequence: Synthetic oligonucleotide
ugucucacgugagugcaug

SEQ ID NO: 632503 - RNA, 19 nt, Artificial Sequence
  Description of Artificial Sequence: Synthetic oligonucleotide
auuaaaugaggcguuucua

SEQ ID NO: 632504 - RNA, 19 nt, Artificial Sequence
  Description of Artificial Sequence: Synthetic oligonucleotide
cugggaagauuaccuaaac

SEQ ID NO: 632505 - RNA, 19 nt, Artificial Sequence
  Description of Artificial Sequence: Synthetic oligonucleotide
cacaagauuaggacuggga

SEQ ID NO: 632506 - RNA, 19 nt, Artificial Sequence
  Description of Artificial Sequence: Synthetic oligonucleotide
gcuaaacuagaccugggga

SEQ ID NO: 632507 - RNA, 19 nt, Artificial Sequence
  Description of Artificial Sequence: Synthetic oligonucleotide
acacuuaugaagagucaug

SEQ ID NO: 632508 - RNA, 19 nt, Artificial Sequence
  Description of Artificial Sequence: Synthetic oligonucleotide
gagaggcguucauagcagc

SEQ ID NO: 632509 - RNA, 19 nt, Artificial Sequence
  Description of Artificial Sequence: Synthetic oligonucleotide
aggggcacgcgccugacgu

SEQ ID NO: 632510 - RNA, 19 nt, Artificial Sequence
  Description of Artificial Sequence: Synthetic oligonucleotide
caaauuagauggugaccuc

SEQ ID NO: 632511 - RNA, 19 nt, Artificial Sequence
  Description of Artificial Sequence: Synthetic oligonucleotide
guaaaucuaugcuaagcau

SEQ ID NO: 632512 - RNA, 19 nt, Artificial Sequence
  Description of Artificial Sequence: Synthetic oligonucleotide
augcucauagcuucuuaau

SEQ ID NO: 632513 - RNA, 19 nt, Artificial Sequence
  Description of Artificial Sequence: Synthetic oligonucleotide
agucaguuguaaaucuaug

SEQ ID NO: 632514 - RNA, 19 nt, Artificial Sequence
  Description of Artificial Sequence: Synthetic oligonucleotide
cucaauaguagagggguca

SEQ ID NO: 632515 - RNA, 19 nt, Artificial Sequence
  Description of Artificial Sequence: Synthetic oligonucleotide
gguaacucagcggucguag

SEQ ID NO: 632516 - RNA, 19 nt, Artificial Sequence
  Description of Artificial Sequence: Synthetic oligonucleotide
uuguggaaauaguuuugua

SEQ ID NO: 632517 - RNA, 19 nt, Artificial Sequence
  Description of Artificial Sequence: Synthetic oligonucleotide
uacccuugaaagucacagu

SEQ ID NO: 632518 - RNA, 19 nt, Artificial Sequence
  Description of Artificial Sequence: Synthetic oligonucleotide
uuuaggccuuucuguguga

SEQ ID NO: 632519 - RNA, 19 nt, Artificial Sequence
  Description of Artificial Sequence: Synthetic oligonucleotide
caaaagaacgucuucuuuu

SEQ ID NO: 632520 - RNA, 19 nt, Artificial Sequence
  Description of Artificial Sequence: Synthetic oligonucleotide
aacgggccuugucucacgu

SEQ ID NO: 632521 - RNA, 19 nt, Artificial Sequence
  Description of Artificial Sequence: Synthetic oligonucleotide
caugcucauagcuucuuaa

SEQ ID NO: 632522 - RNA, 19 nt, Artificial Sequence
  Description of Artificial Sequence: Synthetic oligonucleotide
ucauaaccauucgucuucu

SEQ ID NO: 632523 - RNA, 19 nt, Artificial Sequence
  Description of Artificial Sequence: Synthetic oligonucleotide
aaggaacccuguguaccag

SEQ ID NO: 632524 - RNA, 19 nt, Artificial Sequence
  Description of Artificial Sequence: Synthetic oligonucleotide
aaacgucuguuugugggua

SEQ ID NO: 632525 - RNA, 19 nt, Artificial Sequence
  Description of Artificial Sequence: Synthetic oligonucleotide
ucaauaguagaggggucau

SEQ ID NO: 632526 - RNA, 19 nt, Artificial Sequence
  Description of Artificial Sequence: Synthetic oligonucleotide
aggcguucauagcagcaca

SEQ ID NO: 632527 - RNA, 19 nt, Artificial Sequence
  Description of Artificial Sequence: Synthetic oligonucleotide
cauaccaacgggccuuguc

SEQ ID NO: 632528 - RNA, 19 nt, Artificial Sequence
  Description of Artificial Sequence: Synthetic oligonucleotide
cugcauaguugucgaaaac

SEQ ID NO: 632529 - RNA, 19 nt, Artificial Sequence
  Description of Artificial Sequence: Synthetic oligonucleotide
gggcguuugucauuauugc

SEQ ID NO: 632530 - RNA, 19 nt, Artificial Sequence
  Description of Artificial Sequence: Synthetic oligonucleotide
ggacacauuugcuaaacua

SEQ ID NO: 632531 - RNA, 19 nt, Artificial Sequence
  Description of Artificial Sequence: Synthetic oligonucleotide
uacuaggaaaacgucuguu

SEQ ID NO: 632532 - RNA, 19 nt, Artificial Sequence
  Description of Artificial Sequence: Synthetic oligonucleotide
auacagagugcauccuaaa

SEQ ID NO: 632533 - RNA, 19 nt, Artificial Sequence
  Description of Artificial Sequence: Synthetic oligonucleotide
gaggcguucauagcagcac

SEQ ID NO: 632534 - RNA, 19 nt, Artificial Sequence
  Description of Artificial Sequence: Synthetic oligonucleotide
acacaagaaagcauugguu

SEQ ID NO: 632535 - RNA, 19 nt, Artificial Sequence
  Description of Artificial Sequence: Synthetic oligonucleotide
cacacaccccaaaaggaga

SEQ ID NO: 632536 - RNA, 19 nt, Artificial Sequence
  Description of Artificial Sequence: Synthetic oligonucleotide
auuccgauggaaauuuguu

SEQ ID NO: 632537 - RNA, 19 nt, Artificial Sequence
  Description of Artificial Sequence: Synthetic oligonucleotide
cuauuacuggaagggcaag

SEQ ID NO: 632538 - RNA, 19 nt, Artificial Sequence
  Description of Artificial Sequence: Synthetic oligonucleotide
gcaugccuugcuuuuaaac

SEQ ID NO: 632539 - RNA, 19 nt, Artificial Sequence
  Description of Artificial Sequence: Synthetic oligonucleotide
ucagcggucguagucuguc

SEQ ID NO: 632540 - RNA, 19 nt, Artificial Sequence
  Description of Artificial Sequence: Synthetic oligonucleotide
uaccaacgggccuugucuc

SEQ ID NO: 632541 - RNA, 19 nt, Artificial Sequence
  Description of Artificial Sequence: Synthetic oligonucleotide
gguuaaguaugcuccccac

SEQ ID NO: 632542 - RNA, 19 nt, Artificial Sequence
  Description of Artificial Sequence: Synthetic oligonucleotide
aacuaacacucgucacuuu

SEQ ID NO: 632543 - RNA, 19 nt, Artificial Sequence
  Description of Artificial Sequence: Synthetic oligonucleotide
gugagugcauguggguagg

SEQ ID NO: 632544 - RNA, 19 nt, Artificial Sequence
  Description of Artificial Sequence: Synthetic oligonucleotide
ugcagggcguuugucauua

SEQ ID NO: 632545 - RNA, 19 nt, Artificial Sequence
  Description of Artificial Sequence: Synthetic oligonucleotide
ggucccaacaagcaagaaa

SEQ ID NO: 632546 - RNA, 19 nt, Artificial Sequence
  Description of Artificial Sequence: Synthetic oligonucleotide
cagcaaagggcaaauaaau

SEQ ID NO: 632547 - RNA, 19 nt, Artificial Sequence
  Description of Artificial Sequence: Synthetic oligonucleotide
acucagcggucguagucug

SEQ ID NO: 632548 - RNA, 19 nt, Artificial Sequence
  Description of Artificial Sequence: Synthetic oligonucleotide
acaccccaaaaggagagaa

SEQ ID NO: 632549 - RNA, 19 nt, Artificial Sequence
  Description of Artificial Sequence: Synthetic oligonucleotide
uucuccgccggggcguugg

SEQ ID NO: 632550 - RNA, 19 nt, Artificial Sequence
  Description of Artificial Sequence: Synthetic oligonucleotide
auaaucugauaaaucucua

SEQ ID NO: 632551 - RNA, 19 nt, Artificial Sequence
  Description of Artificial Sequence: Synthetic oligonucleotide
aacuuucaagaaggaguau

SEQ ID NO: 632552 - RNA, 19 nt, Artificial Sequence
  Description of Artificial Sequence: Synthetic oligonucleotide
acucgucacuuuucagaca

SEQ ID NO: 632553 - RNA, 19 nt, Artificial Sequence
  Description of Artificial Sequence: Synthetic oligonucleotide
gccaauauugcuucaucaa

SEQ ID NO: 632554 - RNA, 19 nt, Artificial Sequence
  Description of Artificial Sequence: Synthetic oligonucleotide
uggguaacucagcggucgu

SEQ ID NO: 632555 - RNA, 19 nt, Artificial Sequence
  Description of Artificial Sequence: Synthetic oligonucleotide
ugagggcggaacacuccac

SEQ ID NO: 632556 - RNA, 19 nt, Artificial Sequence
  Description of Artificial Sequence: Synthetic oligonucleotide
ccuugucucacgugagugc

SEQ ID NO: 632557 - RNA, 19 nt, Artificial Sequence
  Description of Artificial Sequence: Synthetic oligonucleotide
ggcguuugucauuauugca

SEQ ID NO: 632558 - RNA, 19 nt, Artificial Sequence
  Description of Artificial Sequence: Synthetic oligonucleotide
uuaaugaagcaggccugua

SEQ ID NO: 632559 - RNA, 19 nt, Artificial Sequence
  Description of Artificial Sequence: Synthetic oligonucleotide
accaacgggccuugucuca

SEQ ID NO: 632560 - RNA, 19 nt, Artificial Sequence
  Description of Artificial Sequence: Synthetic oligonucleotide
agcggucguagucugucau

SEQ ID NO: 632561 - RNA, 19 nt, Artificial Sequence
  Description of Artificial Sequence: Synthetic oligonucleotide
uggggacacauuugcuaaa

SEQ ID NO: 632562 - RNA, 19 nt, Artificial Sequence
  Description of Artificial Sequence: Synthetic oligonucleotide
agaucaauuugggucccaa

SEQ ID NO: 632563 - RNA, 19 nt, Artificial Sequence
  Description of Artificial Sequence: Synthetic oligonucleotide
uccuuccuaagagcaccag

SEQ ID NO: 632564 - RNA, 19 nt, Artificial Sequence
  Description of Artificial Sequence: Synthetic oligonucleotide
guagaggggucaucucuga

SEQ ID NO: 632565 - RNA, 19 nt, Artificial Sequence
  Description of Artificial Sequence: Synthetic oligonucleotide
ggagaggcguucauagcag

SEQ ID NO: 632566 - RNA, 19 nt, Artificial Sequence
  Description of Artificial Sequence: Synthetic oligonucleotide
guauauggcucuccaccaa

SEQ ID NO: 632567 - RNA, 19 nt, Artificial Sequence
  Description of Artificial Sequence: Synthetic oligonucleotide
aaucuaugcuaagcauaua

SEQ ID NO: 632568 - RNA, 19 nt, Artificial Sequence
  Description of Artificial Sequence: Synthetic oligonucleotide
ggaaauuuguuuguuguau

SEQ ID NO: 632569 - RNA, 19 nt, Artificial Sequence
  Description of Artificial Sequence: Synthetic oligonucleotide
gguggagagaaaaggcaac

SEQ ID NO: 632570 - RNA, 19 nt, Artificial Sequence
  Description of Artificial Sequence: Synthetic oligonucleotide
auauuccgauggaaauuug

SEQ ID NO: 632571 - RNA, 19 nt, Artificial Sequence
  Description of Artificial Sequence: Synthetic oligonucleotide
ccaauauugcuucaucaaa

SEQ ID NO: 632572 - RNA, 19 nt, Artificial Sequence
  Description of Artificial Sequence: Synthetic oligonucleotide
cauauuccgauggaaauuu

SEQ ID NO: 632573 - RNA, 19 nt, Artificial Sequence
  Description of Artificial Sequence: Synthetic oligonucleotide
agggcggaacacuccacau

SEQ ID NO: 632574 - RNA, 19 nt, Artificial Sequence
  Description of Artificial Sequence: Synthetic oligonucleotide
caacgggccuugucucacg

SEQ ID NO: 632575 - RNA, 19 nt, Artificial Sequence
  Description of Artificial Sequence: Synthetic oligonucleotide
caauaguagaggggucauc

SEQ ID NO: 632576 - RNA, 19 nt, Artificial Sequence
  Description of Artificial Sequence: Synthetic oligonucleotide
agcaugccuugcuuuuaaa

SEQ ID NO: 632577 - RNA, 19 nt, Artificial Sequence
  Description of Artificial Sequence: Synthetic oligonucleotide
cugguccccauguugguua

SEQ ID NO: 632578 - RNA, 19 nt, Artificial Sequence
  Description of Artificial Sequence: Synthetic oligonucleotide
ccuuucugugugagggcgg

SEQ ID NO: 632579 - RNA, 19 nt, Artificial Sequence
  Description of Artificial Sequence: Synthetic oligonucleotide
ggggacacauuugcuaaac

SEQ ID NO: 632580 - RNA, 19 nt, Artificial Sequence
  Description of Artificial Sequence: Synthetic oligonucleotide
gcguuucuacacuccuucc

SEQ ID NO: 632581 - RNA, 19 nt, Artificial Sequence
  Description of Artificial Sequence: Synthetic oligonucleotide
gggcguuggcagcacugcg

SEQ ID NO: 632582 - RNA, 19 nt, Artificial Sequence
  Description of Artificial Sequence: Synthetic oligonucleotide
ucgucacuuuucagacaau

SEQ ID NO: 632583 - RNA, 19 nt, Artificial Sequence
  Description of Artificial Sequence: Synthetic oligonucleotide
agauuaggacugggaagau

SEQ ID NO: 632584 - RNA, 19 nt, Artificial Sequence
  Description of Artificial Sequence: Synthetic oligonucleotide
ugagugcauguggguaggu

SEQ ID NO: 632585 - RNA, 19 nt, Artificial Sequence
  Description of Artificial Sequence: Synthetic oligonucleotide
ggaagauuaccuaaacauu

SEQ ID NO: 632586 - RNA, 19 nt, Artificial Sequence
  Description of Artificial Sequence: Synthetic oligonucleotide
gcauccuaaaagaggggca

SEQ ID NO: 632587 - RNA, 19 nt, Artificial Sequence
  Description of Artificial Sequence: Synthetic oligonucleotide
ggcguuggcagcacugcgc

SEQ ID NO: 632588 - RNA, 19 nt, Artificial Sequence
  Description of Artificial Sequence: Synthetic oligonucleotide
cugcgcggggccuccucgg

SEQ ID NO: 632589 - RNA, 19 nt, Artificial Sequence
  Description of Artificial Sequence: Synthetic oligonucleotide
acgggccuugucucacgug

SEQ ID NO: 632590 - RNA, 19 nt, Artificial Sequence
  Description of Artificial Sequence: Synthetic oligonucleotide
guaacucagcggucguagu

SEQ ID NO: 632591 - RNA, 19 nt, Artificial Sequence
  Description of Artificial Sequence: Synthetic oligonucleotide
cugacgaauccacaagauu

SEQ ID NO: 632592 - RNA, 19 nt, Artificial Sequence
  Description of Artificial Sequence: Synthetic oligonucleotide
gauuaggacugggaagauu

SEQ ID NO: 632593 - RNA, 19 nt, Artificial Sequence
  Description of Artificial Sequence: Synthetic oligonucleotide
caggggcacgcgccugacg

SEQ ID NO: 632594 - RNA, 19 nt, Artificial Sequence
  Description of Artificial Sequence: Synthetic oligonucleotide
ggcguucauagcagcacac

SEQ ID NO: 632595 - RNA, 19 nt, Artificial Sequence
  Description of Artificial Sequence: Synthetic oligonucleotide
gacugguccccauguuggu

SEQ ID NO: 632596 - RNA, 19 nt, Artificial Sequence
  Description of Artificial Sequence: Synthetic oligonucleotide
cgcgccugacgucagcacg

SEQ ID NO: 632597 - RNA, 19 nt, Artificial Sequence
  Description of Artificial Sequence: Synthetic oligonucleotide
guaggugcagggcguuugu

SEQ ID NO: 632598 - RNA, 19 nt, Artificial Sequence
  Description of Artificial Sequence: Synthetic oligonucleotide
ggggcguuggcagcacugc

SEQ ID NO: 632599 - RNA, 19 nt, Artificial Sequence
  Description of Artificial Sequence: Synthetic oligonucleotide
caagaaggaguauguuauu

SEQ ID NO: 632600 - RNA, 19 nt, Artificial Sequence
  Description of Artificial Sequence: Synthetic oligonucleotide
cauaaccauucgucuucua

SEQ ID NO: 632601 - RNA, 19 nt, Artificial Sequence
  Description of Artificial Sequence: Synthetic oligonucleotide
agaucccgggccagcuucu

SEQ ID NO: 632602 - RNA, 19 nt, Artificial Sequence
  Description of Artificial Sequence: Synthetic oligonucleotide
gcgccugacgucagcacgc

SEQ ID NO: 632603 - RNA, 19 nt, Artificial Sequence
  Description of Artificial Sequence: Synthetic oligonucleotide
cacgcgccugacgucagca

SEQ ID NO: 632604 - RNA, 19 nt, Artificial Sequence
  Description of Artificial Sequence: Synthetic oligonucleotide
uggguaggugcagggcguu

SEQ ID NO: 632605 - RNA, 19 nt, Artificial Sequence
  Description of Artificial Sequence: Synthetic oligonucleotide
cagcggucguagucuguca

SEQ ID NO: 632606 - RNA, 19 nt, Artificial Sequence
  Description of Artificial Sequence: Synthetic oligonucleotide
gggacacauuugcuaaacu

SEQ ID NO: 632607 - RNA, 19 nt, Artificial Sequence
  Description of Artificial Sequence: Synthetic oligonucleotide
aggcguuucuacacuccuu

SEQ ID NO: 632608 - RNA, 19 nt, Artificial Sequence
  Description of Artificial Sequence: Synthetic oligonucleotide
ccaagaguauauggcucuc

SEQ ID NO: 632609 - RNA, 19 nt, Artificial Sequence
  Description of Artificial Sequence: Synthetic oligonucleotide
gggcggaacacuccacaua

SEQ ID NO: 632610 - RNA, 19 nt, Artificial Sequence
  Description of Artificial Sequence: Synthetic oligonucleotide
cccuuaaggaacccugugu

SEQ ID NO: 632611 - RNA, 19 nt, Artificial Sequence
  Description of Artificial Sequence: Synthetic oligonucleotide
ccaacgggccuugucucac

SEQ ID NO: 632612 - RNA, 19 nt, Artificial Sequence
  Description of Artificial Sequence: Synthetic oligonucleotide
cgggccuugucucacguga

SEQ ID NO: 632613 - RNA, 19 nt, Artificial Sequence
  Description of Artificial Sequence: Synthetic oligonucleotide
ccgauggaaauuuguuugu

SEQ ID NO: 632614 - RNA, 19 nt, Artificial Sequence
  Description of Artificial Sequence: Synthetic oligonucleotide
ccagauugcucuccaaaau

SEQ ID NO: 632615 - RNA, 19 nt, Artificial Sequence
  Description of Artificial Sequence: Synthetic oligonucleotide
gcucuccaccaaucauaac

SEQ ID NO: 632616 - RNA, 19 nt, Artificial Sequence
  Description of Artificial Sequence: Synthetic oligonucleotide
gaagagucaugaggcucuu

SEQ ID NO: 632617 - RNA, 19 nt, Artificial Sequence
  Description of Artificial Sequence: Synthetic oligonucleotide
gguccccauguugguuaag

SEQ ID NO: 632618 - RNA, 19 nt, Artificial Sequence
  Description of Artificial Sequence: Synthetic oligonucleotide
cagggcguuugucauuauu

SEQ ID NO: 632619 - RNA, 19 nt, Artificial Sequence
  Description of Artificial Sequence: Synthetic oligonucleotide
cucaauccauuugguguau

SEQ ID NO: 632620 - RNA, 19 nt, Artificial Sequence
  Description of Artificial Sequence: Synthetic oligonucleotide
gcggucguagucugucaua

SEQ ID NO: 632621 - RNA, 19 nt, Artificial Sequence
  Description of Artificial Sequence: Synthetic oligonucleotide
cucagcggucguagucugu

SEQ ID NO: 632622 - RNA, 19 nt, Artificial Sequence
  Description of Artificial Sequence: Synthetic oligonucleotide
gcacgcgccugacgucagc

SEQ ID NO: 632623 - RNA, 19 nt, Artificial Sequence
  Description of Artificial Sequence: Synthetic oligonucleotide
ggggcacgcgccugacguc

SEQ ID NO: 632624 - RNA, 19 nt, Artificial Sequence
  Description of Artificial Sequence: Synthetic oligonucleotide
ggucguagucugucauaau

SEQ ID NO: 632625 - RNA, 19 nt, Artificial Sequence
  Description of Artificial Sequence: Synthetic oligonucleotide
cggucguagucugucauaa

SEQ ID NO: 632626 - RNA, 19 nt, Artificial Sequence
  Description of Artificial Sequence: Synthetic oligonucleotide
ggguaacucagcggucgua

SEQ ID NO: 632627 - RNA, 19 nt, Artificial Sequence
  Description of Artificial Sequence: Synthetic oligonucleotide
cuucuccgccggggcguug

SEQ ID NO: 632628 - RNA, 19 nt, Artificial Sequence
  Description of Artificial Sequence: Synthetic oligonucleotide
ccccacaugcucauagcuu

SEQ ID NO: 632629 - RNA, 19 nt, Artificial Sequence
  Description of Artificial Sequence: Synthetic oligonucleotide
ggguaggugcagggcguuu

SEQ ID NO: 632630 - RNA, 19 nt, Artificial Sequence
  Description of Artificial Sequence: Synthetic oligonucleotide
ccauaccaacgggccuugu

SEQ ID NO: 632631 - RNA, 19 nt, Artificial Sequence
  Description of Artificial Sequence: Synthetic oligonucleotide
aaauaugccuuccuuaggg

SEQ ID NO: 632632 - RNA, 19 nt, Artificial Sequence
  Description of Artificial Sequence: Synthetic oligonucleotide
aacaauguuacaccuuggc

SEQ ID NO: 632633 - RNA, 19 nt, Artificial Sequence
  Description of Artificial Sequence: Synthetic oligonucleotide
aaagauaagaaagagacaa

SEQ ID NO: 632634 - RNA, 19 nt, Artificial Sequence
  Description of Artificial Sequence: Synthetic oligonucleotide
agaguuaauuacaagaugc

SEQ ID NO: 632635 - RNA, 19 nt, Artificial Sequence
  Description of Artificial Sequence: Synthetic oligonucleotide
uguacagugaguuugcucc

SEQ ID NO: 632636 - RNA, 19 nt, Artificial Sequence
  Description of Artificial Sequence: Synthetic oligonucleotide
cugauugauaacaugacgg

SEQ ID NO: 632637 - RNA, 19 nt, Artificial Sequence
  Description of Artificial Sequence: Synthetic oligonucleotide
uacauaaagcuguaggugg

SEQ ID NO: 632638 - RNA, 19 nt, Artificial Sequence
  Description of Artificial Sequence: Synthetic oligonucleotide
uagcguuuaaguuaugugg

SEQ ID NO: 632639 - RNA, 19 nt, Artificial Sequence
  Description of Artificial Sequence: Synthetic oligonucleotide
accuuaaaaucauaacugc

SEQ ID NO: 632640 - RNA, 19 nt, Artificial Sequence
  Description of Artificial Sequence: Synthetic oligonucleotide
agaauccccauucagacuc

SEQ ID NO: 632641 - RNA, 19 nt, Artificial Sequence
  Description of Artificial Sequence: Synthetic oligonucleotide
aauggaacuaauuccgaug

SEQ ID NO: 632642 - RNA, 19 nt, Artificial Sequence
  Description of Artificial Sequence: Synthetic oligonucleotide
acaauguuacaccuuggcc

SEQ ID NO: 632643 - RNA, 19 nt, Artificial Sequence
  Description of Artificial Sequence: Synthetic oligonucleotide
gaauuugggagguuaaaag

SEQ ID NO: 632644 - RNA, 19 nt, Artificial Sequence
  Description of Artificial Sequence: Synthetic oligonucleotide
aagagcgccgguuucauuc

SEQ ID NO: 632645 - RNA, 19 nt, Artificial Sequence
  Description of Artificial Sequence: Synthetic oligonucleotide
agugaguuugcuccaaggc

SEQ ID NO: 632646 - RNA, 19 nt, Artificial Sequence
  Description of Artificial Sequence: Synthetic oligonucleotide
uucgcaugagguaauaaag

SEQ ID NO: 632647 - RNA, 19 nt, Artificial Sequence
  Description of Artificial Sequence: Synthetic oligonucleotide
acugucaacaauguuacac

SEQ ID NO: 632648 - RNA, 19 nt, Artificial Sequence
  Description of Artificial Sequence: Synthetic oligonucleotide
auggaacuaauuccgaugg

SEQ ID NO: 632649 - RNA, 19 nt, Artificial Sequence
  Description of Artificial Sequence: Synthetic oligonucleotide
uagaguuaucugaagaacc

SEQ ID NO: 632650 - RNA, 19 nt, Artificial Sequence
  Description of Artificial Sequence: Synthetic oligonucleotide
aagaguuaauuacaagaug

SEQ ID NO: 632651 - RNA, 19 nt, Artificial Sequence
  Description of Artificial Sequence: Synthetic oligonucleotide
ucugaaugcgcuuaucaag

SEQ ID NO: 632652 - RNA, 19 nt, Artificial Sequence
  Description of Artificial Sequence: Synthetic oligonucleotide
uuaaacgugugucuuaagu

SEQ ID NO: 632653 - RNA, 19 nt, Artificial Sequence
  Description of Artificial Sequence: Synthetic oligonucleotide
aucuaaggaaccuugaccu

SEQ ID NO: 632654 - RNA, 19 nt, Artificial Sequence
  Description of Artificial Sequence: Synthetic oligonucleotide
ccuaauuacaacuuaagag

SEQ ID NO: 632655 - RNA, 19 nt, Artificial Sequence
  Description of Artificial Sequence: Synthetic oligonucleotide
aacuaauuccgauggauga

SEQ ID NO: 632656 - RNA, 19 nt, Artificial Sequence
  Description of Artificial Sequence: Synthetic oligonucleotide
ugugauugcacauuggcuc

SEQ ID NO: 632657 - RNA, 19 nt, Artificial Sequence
  Description of Artificial Sequence: Synthetic oligonucleotide
auuggcuccgacuugggac

SEQ ID NO: 632658 - RNA, 19 nt, Artificial Sequence
  Description of Artificial Sequence: Synthetic oligonucleotide
uaagugagcgcucuaagcu

SEQ ID NO: 632659 - RNA, 19 nt, Artificial Sequence
  Description of Artificial Sequence: Synthetic oligonucleotide
cacaagacgcugaagagcg

SEQ ID NO: 632660 - RNA, 19 nt, Artificial Sequence
  Description of Artificial Sequence: Synthetic oligonucleotide
aaugggacgcguucuacuc

SEQ ID NO: 632661 - RNA, 19 nt, Artificial Sequence
  Description of Artificial Sequence: Synthetic oligonucleotide
guuuguaugaguucgcaug

SEQ ID NO: 632662 - RNA, 19 nt, Artificial Sequence
  Description of Artificial Sequence: Synthetic oligonucleotide
gugucuuaaguuuaaauac

SEQ ID NO: 632663 - RNA, 19 nt, Artificial Sequence
  Description of Artificial Sequence: Synthetic oligonucleotide
gauggcaacacaaacauga

SEQ ID NO: 632664 - RNA, 19 nt, Artificial Sequence
  Description of Artificial Sequence: Synthetic oligonucleotide
uaaucugaguguucaauag

SEQ ID NO: 632665 - RNA, 19 nt, Artificial Sequence
  Description of Artificial Sequence: Synthetic oligonucleotide
uguaugaguucgcaugagg

SEQ ID NO: 632666 - RNA, 19 nt, Artificial Sequence
  Description of Artificial Sequence: Synthetic oligonucleotide
aacaugacgagggaaguuc

SEQ ID NO: 632667 - RNA, 19 nt, Artificial Sequence
  Description of Artificial Sequence: Synthetic oligonucleotide
auuaguuagagguauccga

SEQ ID NO: 632668 - RNA, 19 nt, Artificial Sequence
  Description of Artificial Sequence: Synthetic oligonucleotide
cugaaugcgcuuaucaagg

SEQ ID NO: 632669 - RNA, 19 nt, Artificial Sequence
  Description of Artificial Sequence: Synthetic oligonucleotide
uagguggugaguuacaaac

SEQ ID NO: 632670 - RNA, 19 nt, Artificial Sequence
  Description of Artificial Sequence: Synthetic oligonucleotide
agaucaauaauaaauuaug

SEQ ID NO: 632671 - RNA, 19 nt, Artificial Sequence
  Description of Artificial Sequence: Synthetic oligonucleotide
aguuguugcauccugccag

SEQ ID NO: 632672 - RNA, 19 nt, Artificial Sequence
  Description of Artificial Sequence: Synthetic oligonucleotide
guuacaaacgcuuuccuuc

SEQ ID NO: 632673 - RNA, 19 nt, Artificial Sequence
  Description of Artificial Sequence: Synthetic oligonucleotide
aacaugacggaggguaucc

SEQ ID NO: 632674 - RNA, 19 nt, Artificial Sequence
  Description of Artificial Sequence: Synthetic oligonucleotide
acaaacgcuuuccuucucc

SEQ ID NO: 632675 - RNA, 19 nt, Artificial Sequence
  Description of Artificial Sequence: Synthetic oligonucleotide
uuagcguuuaaguuaugug

SEQ ID NO: 632676 - RNA, 19 nt, Artificial Sequence
  Description of Artificial Sequence: Synthetic oligonucleotide
uuacauaaagcuguaggug

SEQ ID NO: 632677 - RNA, 19 nt, Artificial Sequence
  Description of Artificial Sequence: Synthetic oligonucleotide
aacuguggaaccauuaaug

SEQ ID NO: 632678 - RNA, 19 nt, Artificial Sequence
  Description of Artificial Sequence: Synthetic oligonucleotide
auucuauugguuuguauga

SEQ ID NO: 632679 - RNA, 19 nt, Artificial Sequence
  Description of Artificial Sequence: Synthetic oligonucleotide
uuaaggccaaguaacuggc

SEQ ID NO: 632680 - RNA, 19 nt, Artificial Sequence
  Description of Artificial Sequence: Synthetic oligonucleotide
uugggagguuaaaagaacc

SEQ ID NO: 632681 - RNA, 19 nt, Artificial Sequence
  Description of Artificial Sequence: Synthetic oligonucleotide
aaacgugugucuuaaguuu

SEQ ID NO: 632682 - RNA, 19 nt, Artificial Sequence
  Description of Artificial Sequence: Synthetic oligonucleotide
caucuaaggaaccuugacc

SEQ ID NO: 632683 - RNA, 19 nt, Artificial Sequence
  Description of Artificial Sequence: Synthetic oligonucleotide
ugauugauaacaugacgga

SEQ ID NO: 632684 - RNA, 19 nt, Artificial Sequence
  Description of Artificial Sequence: Synthetic oligonucleotide
uuauguggacuguacagug

SEQ ID NO: 632685 - RNA, 19 nt, Artificial Sequence
  Description of Artificial Sequence: Synthetic oligonucleotide
ucguuuguugccaaaccag

SEQ ID NO: 632686 - RNA, 19 nt, Artificial Sequence
  Description of Artificial Sequence: Synthetic oligonucleotide
ucuaagcuacagaacaugu

SEQ ID NO: 632687 - RNA, 19 nt, Artificial Sequence
  Description of Artificial Sequence: Synthetic oligonucleotide
uacacuauauacagcacuc

SEQ ID NO: 632688 - RNA, 19 nt, Artificial Sequence
  Description of Artificial Sequence: Synthetic oligonucleotide
auauuguccagucucauua

SEQ ID NO: 632689 - RNA, 19 nt, Artificial Sequence
  Description of Artificial Sequence: Synthetic oligonucleotide
acucauucaagauuucugu

SEQ ID NO: 632690 - RNA, 19 nt, Artificial Sequence
  Description of Artificial Sequence: Synthetic oligonucleotide
auuggugggauguauaaau

SEQ ID NO: 632691 - RNA, 19 nt, Artificial Sequence
  Description of Artificial Sequence: Synthetic oligonucleotide
auuguccagucucauuagc

SEQ ID NO: 632692 - RNA, 19 nt, Artificial Sequence
  Description of Artificial Sequence: Synthetic oligonucleotide
uaugccuuccuuaggggag

SEQ ID NO: 632693 - RNA, 19 nt, Artificial Sequence
  Description of Artificial Sequence: Synthetic oligonucleotide
ugaacauguccccagaauu

SEQ ID NO: 632694 - RNA, 19 nt, Artificial Sequence
  Description of Artificial Sequence: Synthetic oligonucleotide
ucgcaugagguaauaaagc

SEQ ID NO: 632695 - RNA, 19 nt, Artificial Sequence
  Description of Artificial Sequence: Synthetic oligonucleotide
uacagcgugaguauuguuc

SEQ ID NO: 632696 - RNA, 19 nt, Artificial Sequence
  Description of Artificial Sequence: Synthetic oligonucleotide
gauuaguuagagguauccg

SEQ ID NO: 632697 - RNA, 19 nt, Artificial Sequence
  Description of Artificial Sequence: Synthetic oligonucleotide
aguuagagguauccgagug

SEQ ID NO: 632698 - RNA, 19 nt, Artificial Sequence
  Description of Artificial Sequence: Synthetic oligonucleotide
ucaauagaguuaucugaag

SEQ ID NO: 632699 - RNA, 19 nt, Artificial Sequence
  Description of Artificial Sequence: Synthetic oligonucleotide
aauuugccgauguucuucu

SEQ ID NO: 632700 - RNA, 19 nt, Artificial Sequence
  Description of Artificial Sequence: Synthetic oligonucleotide
guacauuacauuuugugaa

SEQ ID NO: 632701 - RNA, 19 nt, Artificial Sequence
  Description of Artificial Sequence: Synthetic oligonucleotide
gauaacaugacggagggua

SEQ ID NO: 632702 - RNA, 19 nt, Artificial Sequence
  Description of Artificial Sequence: Synthetic oligonucleotide
uggcucuguaaucugagug

SEQ ID NO: 632703 - RNA, 19 nt, Artificial Sequence
  Description of Artificial Sequence: Synthetic oligonucleotide
uuugggagguuaaaagaac

SEQ ID NO: 632704 - RNA, 19 nt, Artificial Sequence
  Description of Artificial Sequence: Synthetic oligonucleotide
accuaauuacaacuuaaga

SEQ ID NO: 632705 - RNA, 19 nt, Artificial Sequence
  Description of Artificial Sequence: Synthetic oligonucleotide
uugaccuuaaaaucauaac

SEQ ID NO: 632706 - RNA, 19 nt, Artificial Sequence
  Description of Artificial Sequence: Synthetic oligonucleotide
uuacaccuuggccuaauug

SEQ ID NO: 632707 - RNA, 19 nt, Artificial Sequence
  Description of Artificial Sequence: Synthetic oligonucleotide
ugaccuaauuacaacuuaa

SEQ ID NO: 632708 - RNA, 19 nt, Artificial Sequence
  Description of Artificial Sequence: Synthetic oligonucleotide
ugcacauggucaaacccag

SEQ ID NO: 632709 - RNA, 19 nt, Artificial Sequence
  Description of Artificial Sequence: Synthetic oligonucleotide
ugggauguauaaauacucu

SEQ ID NO: 632710 - RNA, 19 nt, Artificial Sequence
  Description of Artificial Sequence: Synthetic oligonucleotide
agagguauccgagugcacg

SEQ ID NO: 632711 - RNA, 19 nt, Artificial Sequence
  Description of Artificial Sequence: Synthetic oligonucleotide
guagccucccgucugauug

SEQ ID NO: 632712 - RNA, 19 nt, Artificial Sequence
  Description of Artificial Sequence: Synthetic oligonucleotide
gacaagucugugcagcacc

SEQ ID NO: 632713 - RNA, 19 nt, Artificial Sequence
  Description of Artificial Sequence: Synthetic oligonucleotide
uuagagguauccgagugca

SEQ ID NO: 632714 - RNA, 19 nt, Artificial Sequence
  Description of Artificial Sequence: Synthetic oligonucleotide
uuugaccuaauuacaacuu

SEQ ID NO: 632715 - RNA, 19 nt, Artificial Sequence
  Description of Artificial Sequence: Synthetic oligonucleotide
uaaacgugugucuuaaguu

SEQ ID NO: 632716 - RNA, 19 nt, Artificial Sequence
  Description of Artificial Sequence: Synthetic oligonucleotide
uggguugugaauucauuac

SEQ ID NO: 632717 - RNA, 19 nt, Artificial Sequence
  Description of Artificial Sequence: Synthetic oligonucleotide
uccuauugcucugaaugcg

SEQ ID NO: 632718 - RNA, 19 nt, Artificial Sequence
  Description of Artificial Sequence: Synthetic oligonucleotide
acccuuaaggccaaguaac

SEQ ID NO: 632719 - RNA, 19 nt, Artificial Sequence
  Description of Artificial Sequence: Synthetic oligonucleotide
aaaugggacgcguucuacu

SEQ ID NO: 632720 - RNA, 19 nt, Artificial Sequence
  Description of Artificial Sequence: Synthetic oligonucleotide
ugcacauuggcuccgacuu

SEQ ID NO: 632721 - RNA, 19 nt, Artificial Sequence
  Description of Artificial Sequence: Synthetic oligonucleotide
cauagaugguacuucuuac

SEQ ID NO: 632722 - RNA, 19 nt, Artificial Sequence
  Description of Artificial Sequence: Synthetic oligonucleotide
aguaagugagcgcucuaag

SEQ ID NO: 632723 - RNA, 19 nt, Artificial Sequence
  Description of Artificial Sequence: Synthetic oligonucleotide
gaguauuguucagagguag

SEQ ID NO: 632724 - RNA, 19 nt, Artificial Sequence
  Description of Artificial Sequence: Synthetic oligonucleotide
aacaaagaguuaauuacaa

SEQ ID NO: 632725 - RNA, 19 nt, Artificial Sequence
  Description of Artificial Sequence: Synthetic oligonucleotide
ucugaaauaugccuuccuu

SEQ ID NO: 632726 - RNA, 19 nt, Artificial Sequence
  Description of Artificial Sequence: Synthetic oligonucleotide
guaagugagcgcucuaagc

SEQ ID NO: 632727 - RNA, 19 nt, Artificial Sequence
  Description of Artificial Sequence: Synthetic oligonucleotide
agcgcucuaagcuacagaa

SEQ ID NO: 632728 - RNA, 19 nt, Artificial Sequence
  Description of Artificial Sequence: Synthetic oligonucleotide
ugaauggaacuaauuccga

SEQ ID NO: 632729 - RNA, 19 nt, Artificial Sequence
  Description of Artificial Sequence: Synthetic oligonucleotide
aucugaguguucaauagag

SEQ ID NO: 632730 - RNA, 19 nt, Artificial Sequence
  Description of Artificial Sequence: Synthetic oligonucleotide
aggacgagcacaccuugac

SEQ ID NO: 632731 - RNA, 19 nt, Artificial Sequence
  Description of Artificial Sequence: Synthetic oligonucleotide
aacagguuucccgaguucu

SEQ ID NO: 632732 - RNA, 19 nt, Artificial Sequence
  Description of Artificial Sequence: Synthetic oligonucleotide
gaacuaauuccgauggaug

SEQ ID NO: 632733 - RNA, 19 nt, Artificial Sequence
  Description of Artificial Sequence: Synthetic oligonucleotide
uuccuuaggggagacaggc

SEQ ID NO: 632734 - RNA, 19 nt, Artificial Sequence
  Description of Artificial Sequence: Synthetic oligonucleotide
acagcgugaguauuguuca

SEQ ID NO: 632735 - RNA, 19 nt, Artificial Sequence
  Description of Artificial Sequence: Synthetic oligonucleotide
uuacaaacgcuuuccuucu

SEQ ID NO: 632736 - RNA, 19 nt, Artificial Sequence
  Description of Artificial Sequence: Synthetic oligonucleotide
acacuauauacagcacucc

SEQ ID NO: 632737 - RNA, 19 nt, Artificial Sequence
  Description of Artificial Sequence: Synthetic oligonucleotide
aggcaaucuggauccaugg

SEQ ID NO: 632738 - RNA, 19 nt, Artificial Sequence
  Description of Artificial Sequence: Synthetic oligonucleotide
caggguuuacauaaagcug

SEQ ID NO: 632739 - RNA, 19 nt, Artificial Sequence
  Description of Artificial Sequence: Synthetic oligonucleotide
gaccuaauuacaacuuaag

SEQ ID NO: 632740 - RNA, 19 nt, Artificial Sequence
  Description of Artificial Sequence: Synthetic oligonucleotide
ugauuggugggauguauaa

SEQ ID NO: 632741 - RNA, 19 nt, Artificial Sequence
  Description of Artificial Sequence: Synthetic oligonucleotide
uuguucagagguaguaagu

SEQ ID NO: 632742 - RNA, 19 nt, Artificial Sequence
  Description of Artificial Sequence: Synthetic oligonucleotide
caauagaguuaucugaaga

SEQ ID NO: 632743 - RNA, 19 nt, Artificial Sequence
  Description of Artificial Sequence: Synthetic oligonucleotide
uggaaaucugcaaggguuc

SEQ ID NO: 632744 - RNA, 19 nt, Artificial Sequence
  Description of Artificial Sequence: Synthetic oligonucleotide
auagagguuggccucuucu

SEQ ID NO: 632745 - RNA, 19 nt, Artificial Sequence
  Description of Artificial Sequence: Synthetic oligonucleotide
gguaagaauccccauucag

SEQ ID NO: 632746 - RNA, 19 nt, Artificial Sequence
  Description of Artificial Sequence: Synthetic oligonucleotide
ucuaagaagacaggguuua

SEQ ID NO: 632747 - RNA, 19 nt, Artificial Sequence
  Description of Artificial Sequence: Synthetic oligonucleotide
gacgagcacaccuugacaa

SEQ ID NO: 632748 - RNA, 19 nt, Artificial Sequence
  Description of Artificial Sequence: Synthetic oligonucleotide
ugagguaauaaagcugugu

SEQ ID NO: 632749 - RNA, 19 nt, Artificial Sequence
  Description of Artificial Sequence: Synthetic oligonucleotide
cuugaccuuaaaaucauaa

SEQ ID NO: 632750 - RNA, 19 nt, Artificial Sequence
  Description of Artificial Sequence: Synthetic oligonucleotide
cuccuauugcucugaaugc

SEQ ID NO: 632751 - RNA, 19 nt, Artificial Sequence
  Description of Artificial Sequence: Synthetic oligonucleotide
auuagcguuuaaguuaugu

SEQ ID NO: 632752 - RNA, 19 nt, Artificial Sequence
  Description of Artificial Sequence: Synthetic oligonucleotide
uggcaucuaaggaaccuug

SEQ ID NO: 632753 - RNA, 19 nt, Artificial Sequence
  Description of Artificial Sequence: Synthetic oligonucleotide
ucugaguguucaauagagu

SEQ ID NO: 632754 - RNA, 19 nt, Artificial Sequence
  Description of Artificial Sequence: Synthetic oligonucleotide
guuagagguauccgagugc

SEQ ID NO: 632755 - RNA, 19 nt, Artificial Sequence
  Description of Artificial Sequence: Synthetic oligonucleotide
uugaccuaauuacaacuua

SEQ ID NO: 632756 - RNA, 19 nt, Artificial Sequence
  Description of Artificial Sequence: Synthetic oligonucleotide
uacucuuuugcuacacuau

SEQ ID NO: 632757 - RNA, 19 nt, Artificial Sequence
  Description of Artificial Sequence: Synthetic oligonucleotide
uggugaguuacaaacgcuu

SEQ ID NO: 632758 - RNA, 19 nt, Artificial Sequence
  Description of Artificial Sequence: Synthetic oligonucleotide
uuggcuccgacuugggacc

SEQ ID NO: 632759 - RNA, 19 nt, Artificial Sequence
  Description of Artificial Sequence: Synthetic oligonucleotide
ggcaacacaaacaugacga

SEQ ID NO: 632760 - RNA, 19 nt, Artificial Sequence
  Description of Artificial Sequence: Synthetic oligonucleotide
aagcccaucggugacagaa

SEQ ID NO: 632761 - RNA, 19 nt, Artificial Sequence
  Description of Artificial Sequence: Synthetic oligonucleotide
agacagguuuuguuuucac

SEQ ID NO: 632762 - RNA, 19 nt, Artificial Sequence
  Description of Artificial Sequence: Synthetic oligonucleotide
auacucuuuugcuacacua

SEQ ID NO: 632763 - RNA, 19 nt, Artificial Sequence
  Description of Artificial Sequence: Synthetic oligonucleotide
uaugaguucgcaugaggua

SEQ ID NO: 632764 - RNA, 19 nt, Artificial Sequence
  Description of Artificial Sequence: Synthetic oligonucleotide
uuggccuaauuggauaaag

SEQ ID NO: 632765 - RNA, 19 nt, Artificial Sequence
  Description of Artificial Sequence: Synthetic oligonucleotide
uuacccuuaaggccaagua

SEQ ID NO: 632766 - RNA, 19 nt, Artificial Sequence
  Description of Artificial Sequence: Synthetic oligonucleotide
acgcguucuacucuguucu

SEQ ID NO: 632767 - RNA, 19 nt, Artificial Sequence
  Description of Artificial Sequence: Synthetic oligonucleotide
gugauugcacauuggcucc

SEQ ID NO: 632768 - RNA, 19 nt, Artificial Sequence
  Description of Artificial Sequence: Synthetic oligonucleotide
uuuaaacgugugucuuaag

SEQ ID NO: 632769 - RNA, 19 nt, Artificial Sequence
  Description of Artificial Sequence: Synthetic oligonucleotide
gauucguuuguugccaaac

SEQ ID NO: 632770 - RNA, 19 nt, Artificial Sequence
  Description of Artificial Sequence: Synthetic oligonucleotide
aacuacagcgugaguauug

SEQ ID NO: 632771 - RNA, 19 nt, Artificial Sequence
  Description of Artificial Sequence: Synthetic oligonucleotide
guaagaauccccauucaga

SEQ ID NO: 632772 - RNA, 19 nt, Artificial Sequence
  Description of Artificial Sequence: Synthetic oligonucleotide
uauuguucagagguaguaa

SEQ ID NO: 632773 - RNA, 19 nt, Artificial Sequence
  Description of Artificial Sequence: Synthetic oligonucleotide
ucccgaguucucuaagaag

SEQ ID NO: 632774 - RNA, 19 nt, Artificial Sequence
  Description of Artificial Sequence: Synthetic oligonucleotide
uuacaacuuaagagauggc

SEQ ID NO: 632775 - RNA, 19 nt, Artificial Sequence
  Description of Artificial Sequence: Synthetic oligonucleotide
ucccgucugauugauaaca

SEQ ID NO: 632776 - RNA, 19 nt, Artificial Sequence
  Description of Artificial Sequence: Synthetic oligonucleotide
ugaucucacacaagacgcu

SEQ ID NO: 632777 - RNA, 19 nt, Artificial Sequence
  Description of Artificial Sequence: Synthetic oligonucleotide
ugaaugcgcuuaucaaggc

SEQ ID NO: 632778 - RNA, 19 nt, Artificial Sequence
  Description of Artificial Sequence: Synthetic oligonucleotide
auggguugugaauucauua

SEQ ID NO: 632779 - RNA, 19 nt, Artificial Sequence
  Description of Artificial Sequence: Synthetic oligonucleotide
uugacaagucugugcagca

SEQ ID NO: 632780 - RNA, 19 nt, Artificial Sequence
  Description of Artificial Sequence: Synthetic oligonucleotide
aaguuccgccuuuuccguc

SEQ ID NO: 632781 - RNA, 19 nt, Artificial Sequence
  Description of Artificial Sequence: Synthetic oligonucleotide
cagugaguuugcuccaagg

SEQ ID NO: 632782 - RNA, 19 nt, Artificial Sequence
  Description of Artificial Sequence: Synthetic oligonucleotide
cuaauuccgauggaugaug

SEQ ID NO: 632783 - RNA, 19 nt, Artificial Sequence
  Description of Artificial Sequence: Synthetic oligonucleotide
agccccggggauuaguuag

SEQ ID NO: 632784 - RNA, 19 nt, Artificial Sequence
  Description of Artificial Sequence: Synthetic oligonucleotide
agugagcgcucuaagcuac

SEQ ID NO: 632785 - RNA, 19 nt, Artificial Sequence
  Description of Artificial Sequence: Synthetic oligonucleotide
acuauauacagcacuccca

SEQ ID NO: 632786 - RNA, 19 nt, Artificial Sequence
  Description of Artificial Sequence: Synthetic oligonucleotide
agcguuuaaguuaugugga

SEQ ID NO: 632787 - RNA, 19 nt, Artificial Sequence
  Description of Artificial Sequence: Synthetic oligonucleotide
ugaguauuguucagaggua

SEQ ID NO: 632788 - RNA, 19 nt, Artificial Sequence
  Description of Artificial Sequence: Synthetic oligonucleotide
uuucggggaaaugggacgc

SEQ ID NO: 632789 - RNA, 19 nt, Artificial Sequence
  Description of Artificial Sequence: Synthetic oligonucleotide
aagugagcgcucuaagcua

SEQ ID NO: 632790 - RNA, 19 nt, Artificial Sequence
  Description of Artificial Sequence: Synthetic oligonucleotide
uaauuggauaaagugcuuu

SEQ ID NO: 632791 - RNA, 19 nt, Artificial Sequence
  Description of Artificial Sequence: Synthetic oligonucleotide
caacaauguuacaccuugg

SEQ ID NO: 632792 - RNA, 19 nt, Artificial Sequence
  Description of Artificial Sequence: Synthetic oligonucleotide
ucuagcauagaugguacuu

SEQ ID NO: 632793 - RNA, 19 nt, Artificial Sequence
  Description of Artificial Sequence: Synthetic oligonucleotide
aguuacaaacgcuuuccuu

SEQ ID NO: 632794 - RNA, 19 nt, Artificial Sequence
  Description of Artificial Sequence: Synthetic oligonucleotide
uucccgaguucucuaagaa

SEQ ID NO: 632795 - RNA, 19 nt, Artificial Sequence
  Description of Artificial Sequence: Synthetic oligonucleotide
gucaauuuggcucuguaau

SEQ ID NO: 632796 - RNA, 19 nt, Artificial Sequence
  Description of Artificial Sequence: Synthetic oligonucleotide
gaaugcgcuuaucaaggca

SEQ ID NO: 632797 - RNA, 19 nt, Artificial Sequence
  Description of Artificial Sequence: Synthetic oligonucleotide
uaaggaaccuugaccuuaa

SEQ ID NO: 632798 - RNA, 19 nt, Artificial Sequence
  Description of Artificial Sequence: Synthetic oligonucleotide
gaucucacacaagacgcug

SEQ ID NO: 632799 - RNA, 19 nt, Artificial Sequence
  Description of Artificial Sequence: Synthetic oligonucleotide
guucgcaugagguaauaaa

SEQ ID NO: 632800 - RNA, 19 nt, Artificial Sequence
  Description of Artificial Sequence: Synthetic oligonucleotide
guaccugauucguuuguug

SEQ ID NO: 632801 - RNA, 19 nt, Artificial Sequence
  Description of Artificial Sequence: Synthetic oligonucleotide
uagcugggaucuagcauag

SEQ ID NO: 632802 - RNA, 19 nt, Artificial Sequence
  Description of Artificial Sequence: Synthetic oligonucleotide
gugggauguauaaauacuc

SEQ ID NO: 632803 - RNA, 19 nt, Artificial Sequence
  Description of Artificial Sequence: Synthetic oligonucleotide
guucagagguaguaaguga

SEQ ID NO: 632804 - RNA, 19 nt, Artificial Sequence
  Description of Artificial Sequence: Synthetic oligonucleotide
ugacggaggguauccaccu

SEQ ID NO: 632805 - RNA, 19 nt, Artificial Sequence
  Description of Artificial Sequence: Synthetic oligonucleotide
gagguaauaaagcuguguu

SEQ ID NO: 632806 - RNA, 19 nt, Artificial Sequence
  Description of Artificial Sequence: Synthetic oligonucleotide
guuguugcauccugccagc

SEQ ID NO: 632807 - RNA, 19 nt, Artificial Sequence
  Description of Artificial Sequence: Synthetic oligonucleotide
uguugcauccugccagccu

SEQ ID NO: 632808 - RNA, 19 nt, Artificial Sequence
  Description of Artificial Sequence: Synthetic oligonucleotide
aaaccccuucugccaaaag

SEQ ID NO: 632809 - RNA, 19 nt, Artificial Sequence
  Description of Artificial Sequence: Synthetic oligonucleotide
aggaaccuugaccuuaaaa

SEQ ID NO: 632810 - RNA, 19 nt, Artificial Sequence
  Description of Artificial Sequence: Synthetic oligonucleotide
ggauuaguuagagguaucc

SEQ ID NO: 632811 - RNA, 19 nt, Artificial Sequence
  Description of Artificial Sequence: Synthetic oligonucleotide
agaggacgagcacaccuug

SEQ ID NO: 632812 - RNA, 19 nt, Artificial Sequence
  Description of Artificial Sequence: Synthetic oligonucleotide
aauucauuacaugccuguu

SEQ ID NO: 632813 - RNA, 19 nt, Artificial Sequence
  Description of Artificial Sequence: Synthetic oligonucleotide
acguugcuuugcuugagcu

SEQ ID NO: 632814 - RNA, 19 nt, Artificial Sequence
  Description of Artificial Sequence: Synthetic oligonucleotide
aaggcaugucagcugggaa

SEQ ID NO: 632815 - RNA, 19 nt, Artificial Sequence
  Description of Artificial Sequence: Synthetic oligonucleotide
ugggacgcguucuacucug

SEQ ID NO: 632816 - RNA, 19 nt, Artificial Sequence
  Description of Artificial Sequence: Synthetic oligonucleotide
uugcacauuggcuccgacu

SEQ ID NO: 632817 - RNA, 19 nt, Artificial Sequence
  Description of Artificial Sequence: Synthetic oligonucleotide
uggaacuaauuccgaugga

SEQ ID NO: 632818 - RNA, 19 nt, Artificial Sequence
  Description of Artificial Sequence: Synthetic oligonucleotide
aagacgcugaagagcgccg

SEQ ID NO: 632819 - RNA, 19 nt, Artificial Sequence
  Description of Artificial Sequence: Synthetic oligonucleotide
aguuccgccuuuuccgucu

SEQ ID NO: 632820 - RNA, 19 nt, Artificial Sequence
  Description of Artificial Sequence: Synthetic oligonucleotide
aggcaugucagcugggaaa

SEQ ID NO: 632821 - RNA, 19 nt, Artificial Sequence
  Description of Artificial Sequence: Synthetic oligonucleotide
aggaccugaaaccccuucu

SEQ ID NO: 632822 - RNA, 19 nt, Artificial Sequence
  Description of Artificial Sequence: Synthetic oligonucleotide
ugauugcacauuggcuccg

SEQ ID NO: 632823 - RNA, 19 nt, Artificial Sequence
  Description of Artificial Sequence: Synthetic oligonucleotide
agucuuugaccuaauuaca

SEQ ID NO: 632824 - RNA, 19 nt, Artificial Sequence
  Description of Artificial Sequence: Synthetic oligonucleotide
gacgcguucuacucuguuc

SEQ ID NO: 632825 - RNA, 19 nt, Artificial Sequence
  Description of Artificial Sequence: Synthetic oligonucleotide
uguagguggugaguuacaa

SEQ ID NO: 632826 - RNA, 19 nt, Artificial Sequence
  Description of Artificial Sequence: Synthetic oligonucleotide
ggacuguacagugaguuug

SEQ ID NO: 632827 - RNA, 19 nt, Artificial Sequence
  Description of Artificial Sequence: Synthetic oligonucleotide
ccuuucaaucucuuucggg

SEQ ID NO: 632828 - RNA, 19 nt, Artificial Sequence
  Description of Artificial Sequence: Synthetic oligonucleotide
agguggugaguuacaaacg

SEQ ID NO: 632829 - RNA, 19 nt, Artificial Sequence
  Description of Artificial Sequence: Synthetic oligonucleotide
acgagcacaccuugacaag

SEQ ID NO: 632830 - RNA, 19 nt, Artificial Sequence
  Description of Artificial Sequence: Synthetic oligonucleotide
caucggugacagaaggaug

SEQ ID NO: 632831 - RNA, 19 nt, Artificial Sequence
  Description of Artificial Sequence: Synthetic oligonucleotide
ugacgagggaaguucugaa

SEQ ID NO: 632832 - RNA, 19 nt, Artificial Sequence
  Description of Artificial Sequence: Synthetic oligonucleotide
ugguuuguaugaguucgca

SEQ ID NO: 632833 - RNA, 19 nt, Artificial Sequence
  Description of Artificial Sequence: Synthetic oligonucleotide
uuguaugaguucgcaugag

SEQ ID NO: 632834 - RNA, 19 nt, Artificial Sequence
  Description of Artificial Sequence: Synthetic oligonucleotide
gagacaaacuacagcguga

SEQ ID NO: 632835 - RNA, 19 nt, Artificial Sequence
  Description of Artificial Sequence: Synthetic oligonucleotide
uaguaagugagcgcucuaa

SEQ ID NO: 632836 - RNA, 19 nt, Artificial Sequence
  Description of Artificial Sequence: Synthetic oligonucleotide
cuguacagugaguuugcuc

SEQ ID NO: 632837 - RNA, 19 nt, Artificial Sequence
  Description of Artificial Sequence: Synthetic oligonucleotide
ccuaauuggauaaagugcu

SEQ ID NO: 632838 - RNA, 19 nt, Artificial Sequence
  Description of Artificial Sequence: Synthetic oligonucleotide
cuacacuauauacagcacu

SEQ ID NO: 632839 - RNA, 19 nt, Artificial Sequence
  Description of Artificial Sequence: Synthetic oligonucleotide
aaacccagacagguuuugu

SEQ ID NO: 632840 - RNA, 19 nt, Artificial Sequence
  Description of Artificial Sequence: Synthetic oligonucleotide
acuaauuccgauggaugau

SEQ ID NO: 632841 - RNA, 19 nt, Artificial Sequence
  Description of Artificial Sequence: Synthetic oligonucleotide
aaacaugacgagggaaguu

SEQ ID NO: 632842 - RNA, 19 nt, Artificial Sequence
  Description of Artificial Sequence: Synthetic oligonucleotide
acuacagcgugaguauugu

SEQ ID NO: 632843 - RNA, 19 nt, Artificial Sequence
  Description of Artificial Sequence: Synthetic oligonucleotide
ugaguucgcaugagguaau

SEQ ID NO: 632844 - RNA, 19 nt, Artificial Sequence
  Description of Artificial Sequence: Synthetic oligonucleotide
cauuaauguaaaagaucaa

SEQ ID NO: 632845 - RNA, 19 nt, Artificial Sequence
  Description of Artificial Sequence: Synthetic oligonucleotide
gaauggaacuaauuccgau

SEQ ID NO: 632846 - RNA, 19 nt, Artificial Sequence
  Description of Artificial Sequence: Synthetic oligonucleotide
aagcuguagguggugaguu

SEQ ID NO: 632847 - RNA, 19 nt, Artificial Sequence
  Description of Artificial Sequence: Synthetic oligonucleotide
gcgugaguauuguucagag

SEQ ID NO: 632848 - RNA, 19 nt, Artificial Sequence
  Description of Artificial Sequence: Synthetic oligonucleotide
gagucugcauggaaaucug

SEQ ID NO: 632849 - RNA, 19 nt, Artificial Sequence
  Description of Artificial Sequence: Synthetic oligonucleotide
augacgagggaaguucuga

SEQ ID NO: 632850 - RNA, 19 nt, Artificial Sequence
  Description of Artificial Sequence: Synthetic oligonucleotide
ugcccagaggacgagcaca

SEQ ID NO: 632851 - RNA, 19 nt, Artificial Sequence
  Description of Artificial Sequence: Synthetic oligonucleotide
ugagcgcucuaagcuacag

SEQ ID NO: 632852 - RNA, 19 nt, Artificial Sequence
  Description of Artificial Sequence: Synthetic oligonucleotide
cacccagugcacaugguca

SEQ ID NO: 632853 - RNA, 19 nt, Artificial Sequence
  Description of Artificial Sequence: Synthetic oligonucleotide
guauccaccugugauugca

SEQ ID NO: 632854 - RNA, 19 nt, Artificial Sequence
  Description of Artificial Sequence: Synthetic oligonucleotide
uuacaugccuguucauauu

SEQ ID NO: 632855 - RNA, 19 nt, Artificial Sequence
  Description of Artificial Sequence: Synthetic oligonucleotide
caugacgagggaaguucug

SEQ ID NO: 632856 - RNA, 19 nt, Artificial Sequence
  Description of Artificial Sequence: Synthetic oligonucleotide
gacgagggaaguucugaaa

SEQ ID NO: 632857 - RNA, 19 nt, Artificial Sequence
  Description of Artificial Sequence: Synthetic oligonucleotide
gcuuaucaaggcaugucag

SEQ ID NO: 632858 - RNA, 19 nt, Artificial Sequence
  Description of Artificial Sequence: Synthetic oligonucleotide
ugauucguuuguugccaaa

SEQ ID NO: 632859 - RNA, 19 nt, Artificial Sequence
  Description of Artificial Sequence: Synthetic oligonucleotide
ggguugugaauucauuaca

SEQ ID NO: 632860 - RNA, 19 nt, Artificial Sequence
  Description of Artificial Sequence: Synthetic oligonucleotide
cuauugguuuguaugaguu

SEQ ID NO: 632861 - RNA, 19 nt, Artificial Sequence
  Description of Artificial Sequence: Synthetic oligonucleotide
aaacuacagcgugaguauu

SEQ ID NO: 632862 - RNA, 19 nt, Artificial Sequence
  Description of Artificial Sequence: Synthetic oligonucleotide
gcaucuaaggaaccuugac

SEQ ID NO: 632863 - RNA, 19 nt, Artificial Sequence
  Description of Artificial Sequence: Synthetic oligonucleotide
uauugcucugaaugcgcuu

SEQ ID NO: 632864 - RNA, 19 nt, Artificial Sequence
  Description of Artificial Sequence: Synthetic oligonucleotide
uucggggaaaugggacgcg

SEQ ID NO: 632865 - RNA, 19 nt, Artificial Sequence
  Description of Artificial Sequence: Synthetic oligonucleotide
uaacaugacggaggguauc

SEQ ID NO: 632866 - RNA, 19 nt, Artificial Sequence
  Description of Artificial Sequence: Synthetic oligonucleotide
ucaaucucuuucggggaaa

SEQ ID NO: 632867 - RNA, 19 nt, Artificial Sequence
  Description of Artificial Sequence: Synthetic oligonucleotide
ggacccuugguaagaaucc

SEQ ID NO: 632868 - RNA, 19 nt, Artificial Sequence
  Description of Artificial Sequence: Synthetic oligonucleotide
ugcgcuuaucaaggcaugu

SEQ ID NO: 632869 - RNA, 19 nt, Artificial Sequence
  Description of Artificial Sequence: Synthetic oligonucleotide
augggacgcguucuacucu

SEQ ID NO: 632870 - RNA, 19 nt, Artificial Sequence
  Description of Artificial Sequence: Synthetic oligonucleotide
agacgcugaagagcgccgg

SEQ ID NO: 632871 - RNA, 19 nt, Artificial Sequence
  Description of Artificial Sequence: Synthetic oligonucleotide
agugcagacuccaggcucu

SEQ ID NO: 632872 - RNA, 19 nt, Artificial Sequence
  Description of Artificial Sequence: Synthetic oligonucleotide
uacaaacgcuuuccuucuc

SEQ ID NO: 632873 - RNA, 19 nt, Artificial Sequence
  Description of Artificial Sequence: Synthetic oligonucleotide
gauuggugggauguauaaa

SEQ ID NO: 632874 - RNA, 19 nt, Artificial Sequence
  Description of Artificial Sequence: Synthetic oligonucleotide
gaaguuccgccuuuuccgu

SEQ ID NO: 632875 - RNA, 19 nt, Artificial Sequence
  Description of Artificial Sequence: Synthetic oligonucleotide
caauuuggcucuguaaucu

SEQ ID NO: 632876 - RNA, 19 nt, Artificial Sequence
  Description of Artificial Sequence: Synthetic oligonucleotide
uuuugauuggugggaugua

SEQ ID NO: 632877 - RNA, 19 nt, Artificial Sequence
  Description of Artificial Sequence: Synthetic oligonucleotide
gcccaucggugacagaagg

SEQ ID NO: 632878 - RNA, 19 nt, Artificial Sequence
  Description of Artificial Sequence: Synthetic oligonucleotide
gcauagaugguacuucuua

SEQ ID NO: 632879 - RNA, 19 nt, Artificial Sequence
  Description of Artificial Sequence: Synthetic oligonucleotide
ugagaccuguuuucucuuu

SEQ ID NO: 632880 - RNA, 19 nt, Artificial Sequence
  Description of Artificial Sequence: Synthetic oligonucleotide
uagagguauccgagugcac

SEQ ID NO: 632881 - RNA, 19 nt, Artificial Sequence
  Description of Artificial Sequence: Synthetic oligonucleotide
cuaaggaaccuugaccuua

SEQ ID NO: 632882 - RNA, 19 nt, Artificial Sequence
  Description of Artificial Sequence: Synthetic oligonucleotide
aaagccccggggauuaguu

SEQ ID NO: 632883 - RNA, 19 nt, Artificial Sequence
  Description of Artificial Sequence: Synthetic oligonucleotide
guagggguugcugaggugu

SEQ ID NO: 632884 - RNA, 19 nt, Artificial Sequence
  Description of Artificial Sequence: Synthetic oligonucleotide
cacacguugcuuugcuuga

SEQ ID NO: 632885 - RNA, 19 nt, Artificial Sequence
  Description of Artificial Sequence: Synthetic oligonucleotide
ccuugcauacucuauagcu

SEQ ID NO: 632886 - RNA, 19 nt, Artificial Sequence
  Description of Artificial Sequence: Synthetic oligonucleotide
auaacaugacggaggguau

SEQ ID NO: 632887 - RNA, 19 nt, Artificial Sequence
  Description of Artificial Sequence: Synthetic oligonucleotide
acaugacgagggaaguucu

SEQ ID NO: 632888 - RNA, 19 nt, Artificial Sequence
  Description of Artificial Sequence: Synthetic oligonucleotide
acccagugcacauggucaa

SEQ ID NO: 632889 - RNA, 19 nt, Artificial Sequence
  Description of Artificial Sequence: Synthetic oligonucleotide
cugugauugcacauuggcu

SEQ ID NO: 632890 - RNA, 19 nt, Artificial Sequence
  Description of Artificial Sequence: Synthetic oligonucleotide
guagguggugaguuacaaa

SEQ ID NO: 632891 - RNA, 19 nt, Artificial Sequence
  Description of Artificial Sequence: Synthetic oligonucleotide
caaacccagacagguuuug

SEQ ID NO: 632892 - RNA, 19 nt, Artificial Sequence
  Description of Artificial Sequence: Synthetic oligonucleotide
gugaaccuugcauacucua

SEQ ID NO: 632893 - RNA, 19 nt, Artificial Sequence
  Description of Artificial Sequence: Synthetic oligonucleotide
agugaaccuugcauacucu

SEQ ID NO: 632894 - RNA, 19 nt, Artificial Sequence
  Description of Artificial Sequence: Synthetic oligonucleotide
ugauaacaugacggagggu

SEQ ID NO: 632895 - RNA, 19 nt, Artificial Sequence
  Description of Artificial Sequence: Synthetic oligonucleotide
gggacccuugguaagaauc

SEQ ID NO: 632896 - RNA, 19 nt, Artificial Sequence
  Description of Artificial Sequence: Synthetic oligonucleotide
cagcgugaguauuguucag

SEQ ID NO: 632897 - RNA, 19 nt, Artificial Sequence
  Description of Artificial Sequence: Synthetic oligonucleotide
ccggggauuaguuagaggu

SEQ ID NO: 632898 - RNA, 19 nt, Artificial Sequence
  Description of Artificial Sequence: Synthetic oligonucleotide
uagccucccgucugauuga

SEQ ID NO: 632899 - RNA, 19 nt, Artificial Sequence
  Description of Artificial Sequence: Synthetic oligonucleotide
ugaagagcgccgguuucau

SEQ ID NO: 632900 - RNA, 19 nt, Artificial Sequence
  Description of Artificial Sequence: Synthetic oligonucleotide
cuugguaagaauccccauu

SEQ ID NO: 632901 - RNA, 19 nt, Artificial Sequence
  Description of Artificial Sequence: Synthetic oligonucleotide
gcguuuaaguuauguggac

SEQ ID NO: 632902 - RNA, 19 nt, Artificial Sequence
  Description of Artificial Sequence: Synthetic oligonucleotide
gcguucuacucuguucucg

SEQ ID NO: 632903 - RNA, 19 nt, Artificial Sequence
  Description of Artificial Sequence: Synthetic oligonucleotide
aguucgcaugagguaauaa

SEQ ID NO: 632904 - RNA, 19 nt, Artificial Sequence
  Description of Artificial Sequence: Synthetic oligonucleotide
aaggaaccuugaccuuaaa

SEQ ID NO: 632905 - RNA, 19 nt, Artificial Sequence
  Description of Artificial Sequence: Synthetic oligonucleotide
gcaacuguggaaccauuaa

SEQ ID NO: 632906 - RNA, 19 nt, Artificial Sequence
  Description of Artificial Sequence: Synthetic oligonucleotide
cgcucuaagcuacagaaca

SEQ ID NO: 632907 - RNA, 19 nt, Artificial Sequence
  Description of Artificial Sequence: Synthetic oligonucleotide
guucuacucuguucucgga

SEQ ID NO: 632908 - RNA, 19 nt, Artificial Sequence
  Description of Artificial Sequence: Synthetic oligonucleotide
ggggaaaugggacgcguuc

SEQ ID NO: 632909 - RNA, 19 nt, Artificial Sequence
  Description of Artificial Sequence: Synthetic oligonucleotide
aagccccggggauuaguua

SEQ ID NO: 632910 - RNA, 19 nt, Artificial Sequence
  Description of Artificial Sequence: Synthetic oligonucleotide
uguuacaccuuggccuaau

SEQ ID NO: 632911 - RNA, 19 nt, Artificial Sequence
  Description of Artificial Sequence: Synthetic oligonucleotide
augagguaauaaagcugug

SEQ ID NO: 632912 - RNA, 19 nt, Artificial Sequence
  Description of Artificial Sequence: Synthetic oligonucleotide
cuugggacccuugguaaga

SEQ ID NO: 632913 - RNA, 19 nt, Artificial Sequence
  Description of Artificial Sequence: Synthetic oligonucleotide
gcugagaccuguuuucucu

SEQ ID NO: 632914 - RNA, 19 nt, Artificial Sequence
  Description of Artificial Sequence: Synthetic oligonucleotide
aggagaagucacagaagau

SEQ ID NO: 632915 - RNA, 19 nt, Artificial Sequence
  Description of Artificial Sequence: Synthetic oligonucleotide
ggauguauaaauacucuuu

SEQ ID NO: 632916 - RNA, 19 nt, Artificial Sequence
  Description of Artificial Sequence: Synthetic oligonucleotide
ccuuaaggccaaguaacug

SEQ ID NO: 632917 - RNA, 19 nt, Artificial Sequence
  Description of Artificial Sequence: Synthetic oligonucleotide
ggugggauguauaaauacu

SEQ ID NO: 632918 - RNA, 19 nt, Artificial Sequence
  Description of Artificial Sequence: Synthetic oligonucleotide
agaacauguugggauucua

SEQ ID NO: 632919 - RNA, 19 nt, Artificial Sequence
  Description of Artificial Sequence: Synthetic oligonucleotide
cugugacacugugaugcug

SEQ ID NO: 632920 - RNA, 19 nt, Artificial Sequence
  Description of Artificial Sequence: Synthetic oligonucleotide
acauuggcuccgacuuggg

SEQ ID NO: 632921 - RNA, 19 nt, Artificial Sequence
  Description of Artificial Sequence: Synthetic oligonucleotide
ggaacuaauuccgauggau

SEQ ID NO: 632922 - RNA, 19 nt, Artificial Sequence
  Description of Artificial Sequence: Synthetic oligonucleotide
gauggaguuguugcauccu

SEQ ID NO: 632923 - RNA, 19 nt, Artificial Sequence
  Description of Artificial Sequence: Synthetic oligonucleotide
accgcaugcgcagcuguca

SEQ ID NO: 632924 - RNA, 19 nt, Artificial Sequence
  Description of Artificial Sequence: Synthetic oligonucleotide
ccucccgucugauugauaa

SEQ ID NO: 632925 - RNA, 19 nt, Artificial Sequence
  Description of Artificial Sequence: Synthetic oligonucleotide
cauuggcuccgacuuggga

SEQ ID NO: 632926 - RNA, 19 nt, Artificial Sequence
  Description of Artificial Sequence: Synthetic oligonucleotide
ucuuacccuuaaggccaag

SEQ ID NO: 632927 - RNA, 19 nt, Artificial Sequence
  Description of Artificial Sequence: Synthetic oligonucleotide
uggcaacuguggaaccauu

SEQ ID NO: 632928 - RNA, 19 nt, Artificial Sequence
  Description of Artificial Sequence: Synthetic oligonucleotide
gcugggaucuagcauagau

SEQ ID NO: 632929 - RNA, 19 nt, Artificial Sequence
  Description of Artificial Sequence: Synthetic oligonucleotide
cugaagagcgccgguuuca

SEQ ID NO: 632930 - RNA, 19 nt, Artificial Sequence
  Description of Artificial Sequence: Synthetic oligonucleotide
agguauccgagugcacgcu

SEQ ID NO: 632931 - RNA, 19 nt, Artificial Sequence
  Description of Artificial Sequence: Synthetic oligonucleotide
guggacuguacagugaguu

SEQ ID NO: 632932 - RNA, 19 nt, Artificial Sequence
  Description of Artificial Sequence: Synthetic oligonucleotide
gguugugaauucauuacau

SEQ ID NO: 632933 - RNA, 19 nt, Artificial Sequence
  Description of Artificial Sequence: Synthetic oligonucleotide
acaugacggaggguaucca

SEQ ID NO: 632934 - RNA, 19 nt, Artificial Sequence
  Description of Artificial Sequence: Synthetic oligonucleotide
ugggaaagccccggggauu

SEQ ID NO: 632935 - RNA, 19 nt, Artificial Sequence
  Description of Artificial Sequence: Synthetic oligonucleotide
agcccaucggugacagaag

SEQ ID NO: 632936 - RNA, 19 nt, Artificial Sequence
  Description of Artificial Sequence: Synthetic oligonucleotide
ggacgagcacaccuugaca

SEQ ID NO: 632937 - RNA, 19 nt, Artificial Sequence
  Description of Artificial Sequence: Synthetic oligonucleotide
gaggacgagcacaccuuga

SEQ ID NO: 632938 - RNA, 19 nt, Artificial Sequence
  Description of Artificial Sequence: Synthetic oligonucleotide
cugauucguuuguugccaa

SEQ ID NO: 632939 - RNA, 19 nt, Artificial Sequence
  Description of Artificial Sequence: Synthetic oligonucleotide
ccgucuggcaucuaaggaa

SEQ ID NO: 632940 - RNA, 19 nt, Artificial Sequence
  Description of Artificial Sequence: Synthetic oligonucleotide
gguuucccgaguucucuaa

SEQ ID NO: 632941 - RNA, 19 nt, Artificial Sequence
  Description of Artificial Sequence: Synthetic oligonucleotide
cagagcauguuucuugcuu

SEQ ID NO: 632942 - RNA, 19 nt, Artificial Sequence
  Description of Artificial Sequence: Synthetic oligonucleotide
cgcuuaucaaggcauguca

SEQ ID NO: 632943 - RNA, 19 nt, Artificial Sequence
  Description of Artificial Sequence: Synthetic oligonucleotide
gguuuguaugaguucgcau

SEQ ID NO: 632944 - RNA, 19 nt, Artificial Sequence
  Description of Artificial Sequence: Synthetic oligonucleotide
ggcaucuaaggaaccuuga

SEQ ID NO: 632945 - RNA, 19 nt, Artificial Sequence
  Description of Artificial Sequence: Synthetic oligonucleotide
cuuacccuuaaggccaagu

SEQ ID NO: 632946 - RNA, 19 nt, Artificial Sequence
  Description of Artificial Sequence: Synthetic oligonucleotide
ggggauuaguuagagguau

SEQ ID NO: 632947 - RNA, 19 nt, Artificial Sequence
  Description of Artificial Sequence: Synthetic oligonucleotide
cccggggauuaguuagagg

SEQ ID NO: 632948 - RNA, 19 nt, Artificial Sequence
  Description of Artificial Sequence: Synthetic oligonucleotide
ccaaguaacuggcaacugu

SEQ ID NO: 632949 - RNA, 19 nt, Artificial Sequence
  Description of Artificial Sequence: Synthetic oligonucleotide
gccaaguaacuggcaacug

SEQ ID NO: 632950 - RNA, 19 nt, Artificial Sequence
  Description of Artificial Sequence: Synthetic oligonucleotide
gacgcugaagagcgccggu

SEQ ID NO: 632951 - RNA, 19 nt, Artificial Sequence
  Description of Artificial Sequence: Synthetic oligonucleotide
gggauuaguuagagguauc

SEQ ID NO: 632952 - RNA, 19 nt, Artificial Sequence
  Description of Artificial Sequence: Synthetic oligonucleotide
ggccaaguaacuggcaacu

SEQ ID NO: 632953 - RNA, 19 nt, Artificial Sequence
  Description of Artificial Sequence: Synthetic oligonucleotide
gaaagccccggggauuagu

SEQ ID NO: 632954 - RNA, 19 nt, Artificial Sequence
  Description of Artificial Sequence: Synthetic oligonucleotide
gaguucgcaugagguaaua

SEQ ID NO: 632955 - RNA, 19 nt, Artificial Sequence
  Description of Artificial Sequence: Synthetic oligonucleotide
cgguuucauucugugacag

SEQ ID NO: 632956 - RNA, 19 nt, Artificial Sequence
  Description of Artificial Sequence: Synthetic oligonucleotide
acgcugaagagcgccgguu

SEQ ID NO: 632957 - RNA, 19 nt, Artificial Sequence
  Description of Artificial Sequence: Synthetic oligonucleotide
gguuucauucugugacagu

SEQ ID NO: 632958 - RNA, 19 nt, Artificial Sequence
  Description of Artificial Sequence: Synthetic oligonucleotide
ggggucgggagggucuucc

SEQ ID NO: 632959 - RNA, 19 nt, Artificial Sequence
  Description of Artificial Sequence: Synthetic oligonucleotide
gcgcuuaucaaggcauguc

SEQ ID NO: 632960 - RNA, 19 nt, Artificial Sequence
  Description of Artificial Sequence: Synthetic oligonucleotide
gaauccccauucagacucu

SEQ ID NO: 632961 - RNA, 19 nt, Artificial Sequence
  Description of Artificial Sequence: Synthetic oligonucleotide
gggaaaugggacgcguucu

SEQ ID NO: 632962 - RNA, 19 nt, Artificial Sequence
  Description of Artificial Sequence: Synthetic oligonucleotide
ccgguuucauucugugaca

SEQ ID NO: 632963 - RNA, 19 nt, Artificial Sequence
  Description of Artificial Sequence: Synthetic oligonucleotide
auguuacaccuuggccuaa

SEQ ID NO: 632964 - RNA, 19 nt, Artificial Sequence
  Description of Artificial Sequence: Synthetic oligonucleotide
guuacaccuuggccuaauu

SEQ ID NO: 632965 - RNA, 19 nt, Artificial Sequence
  Description of Artificial Sequence: Synthetic oligonucleotide
cugggaaagccccggggau

SEQ ID NO: 632966 - RNA, 19 nt, Artificial Sequence
  Description of Artificial Sequence: Synthetic oligonucleotide
ggugaguuacaaacgcuuu

SEQ ID NO: 632967 - RNA, 19 nt, Artificial Sequence
  Description of Artificial Sequence: Synthetic oligonucleotide
gugcagacuccaggcucug

SEQ ID NO: 632968 - RNA, 19 nt, Artificial Sequence
  Description of Artificial Sequence: Synthetic oligonucleotide
cugagaccuguuuucucuu

SEQ ID NO: 632969 - RNA, 19 nt, Artificial Sequence
  Description of Artificial Sequence: Synthetic oligonucleotide
gcgcucuaagcuacagaac

SEQ ID NO: 632970 - RNA, 19 nt, Artificial Sequence
  Description of Artificial Sequence: Synthetic oligonucleotide
cccaucggugacagaagga

SEQ ID NO: 632971 - RNA, 19 nt, Artificial Sequence
  Description of Artificial Sequence: Synthetic oligonucleotide
gaagagcgccgguuucauu

SEQ ID NO: 632972 - RNA, 19 nt, Artificial Sequence
  Description of Artificial Sequence: Synthetic oligonucleotide
agccucccgucugauugau

SEQ ID NO: 632973 - RNA, 19 nt, Artificial Sequence
  Description of Artificial Sequence: Synthetic oligonucleotide
ccgcaugcgcagcugucac

SEQ ID NO: 632974 - RNA, 19 nt, Artificial Sequence
  Description of Artificial Sequence: Synthetic oligonucleotide
gugagcgcucuaagcuaca

SEQ ID NO: 632975 - RNA, 19 nt, Artificial Sequence
  Description of Artificial Sequence: Synthetic oligonucleotide
cgaguucucuaagaagaca

SEQ ID NO: 632976 - RNA, 19 nt, Artificial Sequence
  Description of Artificial Sequence: Synthetic oligonucleotide
caaucucuuucggggaaau

SEQ ID NO: 632977 - RNA, 19 nt, Artificial Sequence
  Description of Artificial Sequence: Synthetic oligonucleotide
ugcacgcugcccgggccuu

SEQ ID NO: 632978 - RNA, 19 nt, Artificial Sequence
  Description of Artificial Sequence: Synthetic oligonucleotide
cguuuaaguuauguggacu

SEQ ID NO: 632979 - RNA, 19 nt, Artificial Sequence
  Description of Artificial Sequence: Synthetic oligonucleotide
cucaggcaaagugaaccuu

SEQ ID NO: 632980 - RNA, 19 nt, Artificial Sequence
  Description of Artificial Sequence: Synthetic oligonucleotide
ccuugaccuuaaaaucaua

SEQ ID NO: 632981 - RNA, 19 nt, Artificial Sequence
  Description of Artificial Sequence: Synthetic oligonucleotide
gggauucuauugguuugua

SEQ ID NO: 632982 - RNA, 19 nt, Artificial Sequence
  Description of Artificial Sequence: Synthetic oligonucleotide
caagcccaucggugacaga

SEQ ID NO: 632983 - RNA, 19 nt, Artificial Sequence
  Description of Artificial Sequence: Synthetic oligonucleotide
cuacagcgugaguauuguu

SEQ ID NO: 632984 - RNA, 19 nt, Artificial Sequence
  Description of Artificial Sequence: Synthetic oligonucleotide
ggccuuccguaggagaagu

SEQ ID NO: 632985 - RNA, 19 nt, Artificial Sequence
  Description of Artificial Sequence: Synthetic oligonucleotide
ccgggccuuccguaggaga

SEQ ID NO: 632986 - RNA, 19 nt, Artificial Sequence
  Description of Artificial Sequence: Synthetic oligonucleotide
cggggauuaguuagaggua

SEQ ID NO: 632987 - RNA, 19 nt, Artificial Sequence
  Description of Artificial Sequence: Synthetic oligonucleotide
cgcguucuacucuguucuc

SEQ ID NO: 632988 - RNA, 19 nt, Artificial Sequence
  Description of Artificial Sequence: Synthetic oligonucleotide
ccugugacacugugaugcu

SEQ ID NO: 632989 - RNA, 19 nt, Artificial Sequence
  Description of Artificial Sequence: Synthetic oligonucleotide
ggacgcguucuacucuguu

SEQ ID NO: 632990 - RNA, 19 nt, Artificial Sequence
  Description of Artificial Sequence: Synthetic oligonucleotide
gccccggggauuaguuaga

SEQ ID NO: 632991 - RNA, 19 nt, Artificial Sequence
  Description of Artificial Sequence: Synthetic oligonucleotide
ccucuccaagcccaucggu

SEQ ID NO: 632992 - RNA, 19 nt, Artificial Sequence
  Description of Artificial Sequence: Synthetic oligonucleotide
gggucgggagggucuuccu

SEQ ID NO: 632993 - RNA, 19 nt, Artificial Sequence
  Description of Artificial Sequence: Synthetic oligonucleotide
ccuuucccggcugcccaga

SEQ ID NO: 632994 - RNA, 19 nt, Artificial Sequence
  Description of Artificial Sequence: Synthetic oligonucleotide
cccagugcacauggucaaa

SEQ ID NO: 632995 - RNA, 19 nt, Artificial Sequence
  Description of Artificial Sequence: Synthetic oligonucleotide
gggacgcguucuacucugu

SEQ ID NO: 632996 - RNA, 19 nt, Artificial Sequence
  Description of Artificial Sequence: Synthetic oligonucleotide
gcacgcugcccgggccuuc

SEQ ID NO: 632997 - RNA, 19 nt, Artificial Sequence
  Description of Artificial Sequence: Synthetic oligonucleotide
gccucccgucugauugaua

SEQ ID NO: 632998 - RNA, 19 nt, Artificial Sequence
  Description of Artificial Sequence: Synthetic oligonucleotide
ggcuccgacuugggacccu

SEQ ID NO: 632999 - RNA, 19 nt, Artificial Sequence
  Description of Artificial Sequence: Synthetic oligonucleotide
cggcugcccagaggacgag

SEQ ID NO: 633000 - RNA, 19 nt, Artificial Sequence
  Description of Artificial Sequence: Synthetic oligonucleotide
cggggaaaugggacgcguu

SEQ ID NO: 633001 - RNA, 19 nt, Artificial Sequence
  Description of Artificial Sequence: Synthetic oligonucleotide
uuagugauuacuuauacag

SEQ ID NO: 633002 - RNA, 19 nt, Artificial Sequence
  Description of Artificial Sequence: Synthetic oligonucleotide
ugaugauuugugaagaucg

SEQ ID NO: 633003 - RNA, 19 nt, Artificial Sequence
  Description of Artificial Sequence: Synthetic oligonucleotide
aacacuuuggcucagcuag

SEQ ID NO: 633004 - RNA, 19 nt, Artificial Sequence
  Description of Artificial Sequence: Synthetic oligonucleotide
aauauagacacauaccaca

SEQ ID NO: 633005 - RNA, 19 nt, Artificial Sequence
  Description of Artificial Sequence: Synthetic oligonucleotide
auuaacuauagcuacuugg

SEQ ID NO: 633006 - RNA, 19 nt, Artificial Sequence
  Description of Artificial Sequence: Synthetic oligonucleotide
agugauuacuuauacaguc

SEQ ID NO: 633007 - RNA, 19 nt, Artificial Sequence
  Description of Artificial Sequence: Synthetic oligonucleotide
uuugacacgguaaagguug

SEQ ID NO: 633008 - RNA, 19 nt, Artificial Sequence
  Description of Artificial Sequence: Synthetic oligonucleotide
  modified_base (8)..(8): a, c, u, g, unknown or other
cugauucngagaaagaacg

SEQ ID NO: 633009 - RNA, 19 nt, Artificial Sequence
  Description of Artificial Sequence: Synthetic oligonucleotide
auagacacauaccacauuc

SEQ ID NO: 633010 - RNA, 19 nt, Artificial Sequence
  Description of Artificial Sequence: Synthetic oligonucleotide
agauacaaagaacaggguc

SEQ ID NO: 633011 - RNA, 19 nt, Artificial Sequence
  Description of Artificial Sequence: Synthetic oligonucleotide
aaauaguccauuacuauuc

SEQ ID NO: 633012 - RNA, 19 nt, Artificial Sequence
  Description of Artificial Sequence: Synthetic oligonucleotide
aacagacgaacucugcggc

SEQ ID NO: 633013 - RNA, 19 nt, Artificial Sequence
  Description of Artificial Sequence: Synthetic oligonucleotide
aaacagacgaacucugcgg

SEQ ID NO: 633014 - RNA, 19 nt, Artificial Sequence
  Description of Artificial Sequence: Synthetic oligonucleotide
uuuaucaguucuauggccc

SEQ ID NO: 633015 - RNA, 19 nt, Artificial Sequence
  Description of Artificial Sequence: Synthetic oligonucleotide
uauacucucgcccuccucg

SEQ ID NO: 633016 - RNA, 19 nt, Artificial Sequence
  Description of Artificial Sequence: Synthetic oligonucleotide
uuacuuuacauuaaaguau

SEQ ID NO: 633017 - RNA, 19 nt, Artificial Sequence
  Description of Artificial Sequence: Synthetic oligonucleotide
uuaacuauagcuacuuggu

SEQ ID NO: 633018 - RNA, 19 nt, Artificial Sequence
  Description of Artificial Sequence: Synthetic oligonucleotide
uguauaaaccccaagucaa

SEQ ID NO: 633019 - RNA, 19 nt, Artificial Sequence
  Description of Artificial Sequence: Synthetic oligonucleotide
ugauuauucaugaguaggc

SEQ ID NO: 633020 - RNA, 19 nt, Artificial Sequence
  Description of Artificial Sequence: Synthetic oligonucleotide
gaaacagacgaacucugcg

SEQ ID NO: 633021 - RNA, 19 nt, Artificial Sequence
  Description of Artificial Sequence: Synthetic oligonucleotide
aguccauuacuauucauag

SEQ ID NO: 633022 - RNA, 19 nt, Artificial Sequence
  Description of Artificial Sequence: Synthetic oligonucleotide
cuaaauuaucccauguuug

SEQ ID NO: 633023 - RNA, 19 nt, Artificial Sequence
  Description of Artificial Sequence: Synthetic oligonucleotide
gucaucauaaaauagucca

SEQ ID NO: 633024 - RNA, 19 nt, Artificial Sequence
  Description of Artificial Sequence: Synthetic oligonucleotide
uuuagcuacggaauguaca

SEQ ID NO: 633025 - RNA, 19 nt, Artificial Sequence
  Description of Artificial Sequence: Synthetic oligonucleotide
auccacuuaaaccacaucu

SEQ ID NO: 633026 - RNA, 19 nt, Artificial Sequence
  Description of Artificial Sequence: Synthetic oligonucleotide
uuuuggauccuucacgugu

SEQ ID NO: 633027 - RNA, 19 nt, Artificial Sequence
  Description of Artificial Sequence: Synthetic oligonucleotide
aaaugggucuauuuuagaa

SEQ ID NO: 633028 - RNA, 19 nt, Artificial Sequence
  Description of Artificial Sequence: Synthetic oligonucleotide
aauuaucccauguuugcga

SEQ ID NO: 633029 - RNA, 19 nt, Artificial Sequence
  Description of Artificial Sequence: Synthetic oligonucleotide
  modified_base (9)..(9): a, c, u, g, unknown or other
ucugauucngagaaagaac

SEQ ID NO: 633030 - RNA, 19 nt, Artificial Sequence
  Description of Artificial Sequence: Synthetic oligonucleotide
aaauuaucccauguuugcg

SEQ ID NO: 633031 - RNA, 19 nt, Artificial Sequence
  Description of Artificial Sequence: Synthetic oligonucleotide
uccccagauacaaagaaca

SEQ ID NO: 633032 - RNA, 19 nt, Artificial Sequence
  Description of Artificial Sequence: Synthetic oligonucleotide
  modified_base (16)..(16): a, c, u, g, unknown or other
cauugugucugauucngag

SEQ ID NO: 633033 - RNA, 19 nt, Artificial Sequence
  Description of Artificial Sequence: Synthetic oligonucleotide
auagagguccauauuauac

SEQ ID NO: 633034 - RNA, 19 nt, Artificial Sequence
  Description of Artificial Sequence: Synthetic oligonucleotide
aaugggucuauuuuagaaa

SEQ ID NO: 633035 - RNA, 19 nt, Artificial Sequence
  Description of Artificial Sequence: Synthetic oligonucleotide
uccacauuaacuauagcua

SEQ ID NO: 633036 - RNA, 19 nt, Artificial Sequence
  Description of Artificial Sequence: Synthetic oligonucleotide
ggagacuaaagccaaaucc

SEQ ID NO: 633037 - RNA, 19 nt, Artificial Sequence
  Description of Artificial Sequence: Synthetic oligonucleotide
uuugcgaccuuccucuuag

SEQ ID NO: 633038 - RNA, 19 nt, Artificial Sequence
  Description of Artificial Sequence: Synthetic oligonucleotide
aaucacagacuccccgccc

SEQ ID NO: 633039 - RNA, 19 nt, Artificial Sequence
  Description of Artificial Sequence: Synthetic oligonucleotide
ugugcauaguguuuuauaa

SEQ ID NO: 633040 - RNA, 19 nt, Artificial Sequence
  Description of Artificial Sequence: Synthetic oligonucleotide
uuuauaugugcauaguguu

SEQ ID NO: 633041 - RNA, 19 nt, Artificial Sequence
  Description of Artificial Sequence: Synthetic oligonucleotide
uauucauaggucugucagg

SEQ ID NO: 633042 - RNA, 19 nt, Artificial Sequence
  Description of Artificial Sequence: Synthetic oligonucleotide
cauauuccgggacugagcc

SEQ ID NO: 633043 - RNA, 19 nt, Artificial Sequence
  Description of Artificial Sequence: Synthetic oligonucleotide
acuaaauuaucccauguuu

SEQ ID NO: 633044 - RNA, 19 nt, Artificial Sequence
  Description of Artificial Sequence: Synthetic oligonucleotide
guauugaggacucaucccc

SEQ ID NO: 633045 - RNA, 19 nt, Artificial Sequence
  Description of Artificial Sequence: Synthetic oligonucleotide
cuaagcgcagaacauagag

SEQ ID NO: 633046 - RNA, 19 nt, Artificial Sequence
  Description of Artificial Sequence: Synthetic oligonucleotide
uuuagugauuacuuauaca

SEQ ID NO: 633047 - RNA, 19 nt, Artificial Sequence
  Description of Artificial Sequence: Synthetic oligonucleotide
  modified_base (4)..(4): a, c, u, g, unknown or other
uucngagaaagaacguuga

SEQ ID NO: 633048 - RNA, 19 nt, Artificial Sequence
  Description of Artificial Sequence: Synthetic oligonucleotide
auuaucccauguuugcgac

SEQ ID NO: 633049 - RNA, 19 nt, Artificial Sequence
  Description of Artificial Sequence: Synthetic oligonucleotide
ugcuaagcgcagaacauag

SEQ ID NO: 633050 - RNA, 19 nt, Artificial Sequence
  Description of Artificial Sequence: Synthetic oligonucleotide
aaacugagaauccugcuuu

SEQ ID NO: 633051 - RNA, 19 nt, Artificial Sequence
  Description of Artificial Sequence: Synthetic oligonucleotide
guagcaaucacagacuccc

SEQ ID NO: 633052 - RNA, 19 nt, Artificial Sequence
  Description of Artificial Sequence: Synthetic oligonucleotide
acuaaagccaaaucccuug

SEQ ID NO: 633053 - RNA, 19 nt, Artificial Sequence
  Description of Artificial Sequence: Synthetic oligonucleotide
gauagcgccaacuaaagcu

SEQ ID NO: 633054 - RNA, 19 nt, Artificial Sequence
  Description of Artificial Sequence: Synthetic oligonucleotide
uuugucauaaauucucuuu

SEQ ID NO: 633055 - RNA, 19 nt, Artificial Sequence
  Description of Artificial Sequence: Synthetic oligonucleotide
gauuugugaagaucgggug

SEQ ID NO: 633056 - RNA, 19 nt, Artificial Sequence
  Description of Artificial Sequence: Synthetic oligonucleotide
agaaguuccauuccaggug

SEQ ID NO: 633057 - RNA, 19 nt, Artificial Sequence
  Description of Artificial Sequence: Synthetic oligonucleotide
uguauugaggacucauccc

SEQ ID NO: 633058 - RNA, 19 nt, Artificial Sequence
  Description of Artificial Sequence: Synthetic oligonucleotide
aaugauagcgccaacuaaa

SEQ ID NO: 633059 - RNA, 19 nt, Artificial Sequence
  Description of Artificial Sequence: Synthetic oligonucleotide
gguacaagcaaacacuuug

SEQ ID NO: 633060 - RNA, 19 nt, Artificial Sequence
  Description of Artificial Sequence: Synthetic oligonucleotide
uauugaggacucauccccg

SEQ ID NO: 633061 - RNA, 19 nt, Artificial Sequence
  Description of Artificial Sequence: Synthetic oligonucleotide
uuaucaguucuauggcccg

SEQ ID NO: 633062 - RNA, 19 nt, Artificial Sequence
  Description of Artificial Sequence: Synthetic oligonucleotide
agcaugaaauaaaagagug

SEQ ID NO: 633063 - RNA, 19 nt, Artificial Sequence
  Description of Artificial Sequence: Synthetic oligonucleotide
auuuauaugugcauagugu

SEQ ID NO: 633064 - RNA, 19 nt, Artificial Sequence
  Description of Artificial Sequence: Synthetic oligonucleotide
ugauccaggagucuuucca

SEQ ID NO: 633065 - RNA, 19 nt, Artificial Sequence
  Description of Artificial Sequence: Synthetic oligonucleotide
  modified_base (18)..(18): a, c, u, g, unknown or other
uacauugugucugauucng

SEQ ID NO: 633066 - RNA, 19 nt, Artificial Sequence
  Description of Artificial Sequence: Synthetic oligonucleotide
aaaugauagcgccaacuaa

SEQ ID NO: 633067 - RNA, 19 nt, Artificial Sequence
  Description of Artificial Sequence: Synthetic oligonucleotide
uauauucccaagaaucaau

SEQ ID NO: 633068 - RNA, 19 nt, Artificial Sequence
  Description of Artificial Sequence: Synthetic oligonucleotide
aacuaaauuaucccauguu

SEQ ID NO: 633069 - RNA, 19 nt, Artificial Sequence
  Description of Artificial Sequence: Synthetic oligonucleotide
uauacagucucccucuuua

SEQ ID NO: 633070 - RNA, 19 nt, Artificial Sequence
  Description of Artificial Sequence: Synthetic oligonucleotide
gcaguaauccacuuaaacc

SEQ ID NO: 633071 - RNA, 19 nt, Artificial Sequence
  Description of Artificial Sequence: Synthetic oligonucleotide
agguccauauuauacucuc

SEQ ID NO: 633072 - RNA, 19 nt, Artificial Sequence
  Description of Artificial Sequence: Synthetic oligonucleotide
uuacauaccugauuuacuu

SEQ ID NO: 633073 - RNA, 19 nt, Artificial Sequence
  Description of Artificial Sequence: Synthetic oligonucleotide
uguaaggccgccuucucug

SEQ ID NO: 633074 - RNA, 19 nt, Artificial Sequence
  Description of Artificial Sequence: Synthetic oligonucleotide
uuagcuacggaauguacau

SEQ ID NO: 633075 - RNA, 19 nt, Artificial Sequence
  Description of Artificial Sequence: Synthetic oligonucleotide
aauccacuuaaaccacauc

SEQ ID NO: 633076 - RNA, 19 nt, Artificial Sequence
  Description of Artificial Sequence: Synthetic oligonucleotide
aaagcuuuagugauuacuu

SEQ ID NO: 633077 - RNA, 19 nt, Artificial Sequence
  Description of Artificial Sequence: Synthetic oligonucleotide
agcaaucacagacuccccg

SEQ ID NO: 633078 - RNA, 19 nt, Artificial Sequence
  Description of Artificial Sequence: Synthetic oligonucleotide
uucucgguggccaaccuug

SEQ ID NO: 633079 - RNA, 19 nt, Artificial Sequence
  Description of Artificial Sequence: Synthetic oligonucleotide
aucacguccacauuaacua

SEQ ID NO: 633080 - RNA, 19 nt, Artificial Sequence
  Description of Artificial Sequence: Synthetic oligonucleotide
  modified_base (7)..(7): a, c, u, g, unknown or other
ugauucngagaaagaacgu

SEQ ID NO: 633081 - RNA, 19 nt, Artificial Sequence
  Description of Artificial Sequence: Synthetic oligonucleotide
agaaucaaucuguucauau

SEQ ID NO: 633082 - RNA, 19 nt, Artificial Sequence
  Description of Artificial Sequence: Synthetic oligonucleotide
uacuuauacagucucccuc

SEQ ID NO: 633083 - RNA, 19 nt, Artificial Sequence
  Description of Artificial Sequence: Synthetic oligonucleotide
uuuggauccuucacgugug

SEQ ID NO: 633084 - RNA, 19 nt, Artificial Sequence
  Description of Artificial Sequence: Synthetic oligonucleotide
uagagguccauauuauacu

SEQ ID NO: 633085 - RNA, 19 nt, Artificial Sequence
  Description of Artificial Sequence: Synthetic oligonucleotide
uccauauuauacucucgcc

SEQ ID NO: 633086 - RNA, 19 nt, Artificial Sequence
  Description of Artificial Sequence: Synthetic oligonucleotide
aacucugcggccaccauuc

SEQ ID NO: 633087 - RNA, 19 nt, Artificial Sequence
  Description of Artificial Sequence: Synthetic oligonucleotide
cuccguggagaaaugauag

SEQ ID NO: 633088 - RNA, 19 nt, Artificial Sequence
  Description of Artificial Sequence: Synthetic oligonucleotide
accuuugacacgguaaagg

SEQ ID NO: 633089 - RNA, 19 nt, Artificial Sequence
  Description of Artificial Sequence: Synthetic oligonucleotide
agccaaaucccuugguuuc

SEQ ID NO: 633090 - RNA, 19 nt, Artificial Sequence
  Description of Artificial Sequence: Synthetic oligonucleotide
augaguaggcucuccgugg

SEQ ID NO: 633091 - RNA, 19 nt, Artificial Sequence
  Description of Artificial Sequence: Synthetic oligonucleotide
uccaacagguacaagcaaa

SEQ ID NO: 633092 - RNA, 19 nt, Artificial Sequence
  Description of Artificial Sequence: Synthetic oligonucleotide
ucauauuccgggacugagc

SEQ ID NO: 633093 - RNA, 19 nt, Artificial Sequence
  Description of Artificial Sequence: Synthetic oligonucleotide
uccacuuaaaccacaucuc

SEQ ID NO: 633094 - RNA, 19 nt, Artificial Sequence
  Description of Artificial Sequence: Synthetic oligonucleotide
uguucguuggguuguuugc

SEQ ID NO: 633095 - RNA, 19 nt, Artificial Sequence
  Description of Artificial Sequence: Synthetic oligonucleotide
  modified_base (5)..(5): a, c, u, g, unknown or other
auucngagaaagaacguug

SEQ ID NO: 633096 - RNA, 19 nt, Artificial Sequence
  Description of Artificial Sequence: Synthetic oligonucleotide
auauuauacucucgcccuc

SEQ ID NO: 633097 - RNA, 19 nt, Artificial Sequence
  Description of Artificial Sequence: Synthetic oligonucleotide
uagugauuacuuauacagu

SEQ ID NO: 633098 - RNA, 19 nt, Artificial Sequence
  Description of Artificial Sequence: Synthetic oligonucleotide
auauucccaagaaucaauc

SEQ ID NO: 633099 - RNA, 19 nt, Artificial Sequence
  Description of Artificial Sequence: Synthetic oligonucleotide
aguauauucccaagaauca

SEQ ID NO: 633100 - RNA, 19 nt, Artificial Sequence
  Description of Artificial Sequence: Synthetic oligonucleotide
ucagcuaggcaguaaucca

SEQ ID NO: 633101 - RNA, 19 nt, Artificial Sequence
  Description of Artificial Sequence: Synthetic oligonucleotide
agcuuuagugauuacuuau

SEQ ID NO: 633102 - RNA, 19 nt, Artificial Sequence
  Description of Artificial Sequence: Synthetic oligonucleotide
gccaacuaaagcuuuagug

SEQ ID NO: 633103 - RNA, 19 nt, Artificial Sequence
  Description of Artificial Sequence: Synthetic oligonucleotide
auuacuauucauaggucug

SEQ ID NO: 633104 - RNA, 19 nt, Artificial Sequence
  Description of Artificial Sequence: Synthetic oligonucleotide
agagggagcacuaagcaug

SEQ ID NO: 633105 - RNA, 19 nt, Artificial Sequence
  Description of Artificial Sequence: Synthetic oligonucleotide
gauuacuuauacagucucc

SEQ ID NO: 633106 - RNA, 19 nt, Artificial Sequence
  Description of Artificial Sequence: Synthetic oligonucleotide
acagacgaacucugcggcc

SEQ ID NO: 633107 - RNA, 19 nt, Artificial Sequence
  Description of Artificial Sequence: Synthetic oligonucleotide
gcuauccccagauacaaag

SEQ ID NO: 633108 - RNA, 19 nt, Artificial Sequence
  Description of Artificial Sequence: Synthetic oligonucleotide
guacaagcaaacacuuugg

SEQ ID NO: 633109 - RNA, 19 nt, Artificial Sequence
  Description of Artificial Sequence: Synthetic oligonucleotide
acaccuugugcaccggugg

SEQ ID NO: 633110 - RNA, 19 nt, Artificial Sequence
  Description of Artificial Sequence: Synthetic oligonucleotide
ugauagcgccaacuaaagc

SEQ ID NO: 633111 - RNA, 19 nt, Artificial Sequence
  Description of Artificial Sequence: Synthetic oligonucleotide
acauaccugauuuacuuua

SEQ ID NO: 633112 - RNA, 19 nt, Artificial Sequence
  Description of Artificial Sequence: Synthetic oligonucleotide
ccauauuauacucucgccc

SEQ ID NO: 633113 - RNA, 19 nt, Artificial Sequence
  Description of Artificial Sequence: Synthetic oligonucleotide
uaccugauuuacuuuacau

SEQ ID NO: 633114 - RNA, 19 nt, Artificial Sequence
  Description of Artificial Sequence: Synthetic oligonucleotide
uauuauacucucgcccucc

SEQ ID NO: 633115 - RNA, 19 nt, Artificial Sequence
  Description of Artificial Sequence: Synthetic oligonucleotide
aguucuauggcccgagaau

SEQ ID NO: 633116 - RNA, 19 nt, Artificial Sequence
  Description of Artificial Sequence: Synthetic oligonucleotide
uggggcaugaguaguggug

SEQ ID NO: 633117 - RNA, 19 nt, Artificial Sequence
  Description of Artificial Sequence: Synthetic oligonucleotide
uauuccgggacugagccgu

SEQ ID NO: 633118 - RNA, 19 nt, Artificial Sequence
  Description of Artificial Sequence: Synthetic oligonucleotide
cacgguaaagguugcagug

SEQ ID NO: 633119 - RNA, 19 nt, Artificial Sequence
  Description of Artificial Sequence: Synthetic oligonucleotide
uuuggcucagcuaggcagu

SEQ ID NO: 633120 - RNA, 19 nt, Artificial Sequence
  Description of Artificial Sequence: Synthetic oligonucleotide
acgugugcccgcuuuuccc

SEQ ID NO: 633121 - RNA, 19 nt, Artificial Sequence
  Description of Artificial Sequence: Synthetic oligonucleotide
cuuugggccggcaugcccc

SEQ ID NO: 633122 - RNA, 19 nt, Artificial Sequence
  Description of Artificial Sequence: Synthetic oligonucleotide
uauggcccgagaauguuuc

SEQ ID NO: 633123 - RNA, 19 nt, Artificial Sequence
  Description of Artificial Sequence: Synthetic oligonucleotide
acuauagcuacuuggugua

SEQ ID NO: 633124 - RNA, 19 nt, Artificial Sequence
  Description of Artificial Sequence: Synthetic oligonucleotide
agaucggguggguaacugg

SEQ ID NO: 633125 - RNA, 19 nt, Artificial Sequence
  Description of Artificial Sequence: Synthetic oligonucleotide
uugcuaugcucccuauugc

SEQ ID NO: 633126 - RNA, 19 nt, Artificial Sequence
  Description of Artificial Sequence: Synthetic oligonucleotide
aaagaacguugaucacguc

SEQ ID NO: 633127 - RNA, 19 nt, Artificial Sequence
  Description of Artificial Sequence: Synthetic oligonucleotide
aguagcaaucacagacucc

SEQ ID NO: 633128 - RNA, 19 nt, Artificial Sequence
  Description of Artificial Sequence: Synthetic oligonucleotide
caugaguaggcucuccgug

SEQ ID NO: 633129 - RNA, 19 nt, Artificial Sequence
  Description of Artificial Sequence: Synthetic oligonucleotide
augaaauaaaagagugaag

SEQ ID NO: 633130 - RNA, 19 nt, Artificial Sequence
  Description of Artificial Sequence: Synthetic oligonucleotide
guucuauggcccgagaaug

SEQ ID NO: 633131 - RNA, 19 nt, Artificial Sequence
  Description of Artificial Sequence: Synthetic oligonucleotide
uugaggacucauccccggg

SEQ ID NO: 633132 - RNA, 19 nt, Artificial Sequence
  Description of Artificial Sequence: Synthetic oligonucleotide
ugguauuccuuguuuccug

SEQ ID NO: 633133 - RNA, 19 nt, Artificial Sequence
  Description of Artificial Sequence: Synthetic oligonucleotide
uccauuuuauuuugcuauc

SEQ ID NO: 633134 - RNA, 19 nt, Artificial Sequence
  Description of Artificial Sequence: Synthetic oligonucleotide
  modified_base (2)..(2): a, c, u, g, unknown or other
cngagaaagaacguugauc

SEQ ID NO: 633135 - RNA, 19 nt, Artificial Sequence
  Description of Artificial Sequence: Synthetic oligonucleotide
aagcuaugaacaauguaau

SEQ ID NO: 633136 - RNA, 19 nt, Artificial Sequence
  Description of Artificial Sequence: Synthetic oligonucleotide
ccucuuuccaguuccaccg

SEQ ID NO: 633137 - RNA, 19 nt, Artificial Sequence
  Description of Artificial Sequence: Synthetic oligonucleotide
uuacuauucauaggucugu

SEQ ID NO: 633138 - RNA, 19 nt, Artificial Sequence
  Description of Artificial Sequence: Synthetic oligonucleotide
accugauuuacuuuacauu

SEQ ID NO: 633139 - RNA, 19 nt, Artificial Sequence
  Description of Artificial Sequence: Synthetic oligonucleotide
aagcuuuagugauuacuua

SEQ ID NO: 633140 - RNA, 19 nt, Artificial Sequence
  Description of Artificial Sequence: Synthetic oligonucleotide
ugguguaauuucuuguaua

SEQ ID NO: 633141 - RNA, 19 nt, Artificial Sequence
  Description of Artificial Sequence: Synthetic oligonucleotide
ugccguagugguccaacag

SEQ ID NO: 633142 - RNA, 19 nt, Artificial Sequence
  Description of Artificial Sequence: Synthetic oligonucleotide
cuuuagcuacggaauguac

SEQ ID NO: 633143 - RNA, 19 nt, Artificial Sequence
  Description of Artificial Sequence: Synthetic oligonucleotide
guaaagguugcagugugac

SEQ ID NO: 633144 - RNA, 19 nt, Artificial Sequence
  Description of Artificial Sequence: Synthetic oligonucleotide
  modified_base (10)..(10): a, c, u, g, unknown or other
gucugauucngagaaagaa

SEQ ID NO: 633145 - RNA, 19 nt, Artificial Sequence
  Description of Artificial Sequence: Synthetic oligonucleotide
  modified_base (3)..(3): a, c, u, g, unknown or other
ucngagaaagaacguugau

SEQ ID NO: 633146 - RNA, 19 nt, Artificial Sequence
  Description of Artificial Sequence: Synthetic oligonucleotide
gcuggggucauauuccggg

SEQ ID NO: 633147 - RNA, 19 nt, Artificial Sequence
  Description of Artificial Sequence: Synthetic oligonucleotide
gguauuccuuguuuccugg

SEQ ID NO: 633148 - RNA, 19 nt, Artificial Sequence
  Description of Artificial Sequence: Synthetic oligonucleotide
ucccuugcugagauggggc

SEQ ID NO: 633149 - RNA, 19 nt, Artificial Sequence
  Description of Artificial Sequence: Synthetic oligonucleotide
uccggggaccucuucuugg

SEQ ID NO: 633150 - RNA, 19 nt, Artificial Sequence
  Description of Artificial Sequence: Synthetic oligonucleotide
gauggggcaugaguagugg

SEQ ID NO: 633151 - RNA, 19 nt, Artificial Sequence
  Description of Artificial Sequence: Synthetic oligonucleotide
cauauuauacucucgcccu

SEQ ID NO: 633152 - RNA, 19 nt, Artificial Sequence
  Description of Artificial Sequence: Synthetic oligonucleotide
uucuauggcccgagaaugu

SEQ ID NO: 633153 - RNA, 19 nt, Artificial Sequence
  Description of Artificial Sequence: Synthetic oligonucleotide
guauuccuuguuuccuggg

SEQ ID NO: 633154 - RNA, 19 nt, Artificial Sequence
  Description of Artificial Sequence: Synthetic oligonucleotide
acacgguaaagguugcagu

SEQ ID NO: 633155 - RNA, 19 nt, Artificial Sequence
  Description of Artificial Sequence: Synthetic oligonucleotide
ugucgguggacuuggcucu

SEQ ID NO: 633156 - RNA, 19 nt, Artificial Sequence
  Description of Artificial Sequence: Synthetic oligonucleotide
cuacggaauguacauugug

SEQ ID NO: 633157 - RNA, 19 nt, Artificial Sequence
  Description of Artificial Sequence: Synthetic oligonucleotide
gguuuggugguauuccuug

SEQ ID NO: 633158 - RNA, 19 nt, Artificial Sequence
  Description of Artificial Sequence: Synthetic oligonucleotide
ggcaguaauccacuuaaac

SEQ ID NO: 633159 - RNA, 19 nt, Artificial Sequence
  Description of Artificial Sequence: Synthetic oligonucleotide
gaauguacauugugucuga

SEQ ID NO: 633160 - RNA, 19 nt, Artificial Sequence
  Description of Artificial Sequence: Synthetic oligonucleotide
uugguuuggugguauuccu

SEQ ID NO: 633161 - RNA, 19 nt, Artificial Sequence
  Description of Artificial Sequence: Synthetic oligonucleotide
ugugaugauuugugaagau

SEQ ID NO: 633162 - RNA, 19 nt, Artificial Sequence
  Description of Artificial Sequence: Synthetic oligonucleotide
aaagauuggcccacacacu

SEQ ID NO: 633163 - RNA, 19 nt, Artificial Sequence
  Description of Artificial Sequence: Synthetic oligonucleotide
cauuaacuauagcuacuug

SEQ ID NO: 633164 - RNA, 19 nt, Artificial Sequence
  Description of Artificial Sequence: Synthetic oligonucleotide
uuuugguggucucaccauu

SEQ ID NO: 633165 - RNA, 19 nt, Artificial Sequence
  Description of Artificial Sequence: Synthetic oligonucleotide
agcaguguauugaggacuc

SEQ ID NO: 633166 - RNA, 19 nt, Artificial Sequence
  Description of Artificial Sequence: Synthetic oligonucleotide
uauagacacauaccacauu

SEQ ID NO: 633167 - RNA, 19 nt, Artificial Sequence
  Description of Artificial Sequence: Synthetic oligonucleotide
guguucguuggguuguuug

SEQ ID NO: 633168 - RNA, 19 nt, Artificial Sequence
  Description of Artificial Sequence: Synthetic oligonucleotide
uccguggagaaaugauagc

SEQ ID NO: 633169 - RNA, 19 nt, Artificial Sequence
  Description of Artificial Sequence: Synthetic oligonucleotide
gaaguuccauuccaggugu

SEQ ID NO: 633170 - RNA, 19 nt, Artificial Sequence
  Description of Artificial Sequence: Synthetic oligonucleotide
auacucucgcccuccucgg

SEQ ID NO: 633171 - RNA, 19 nt, Artificial Sequence
  Description of Artificial Sequence: Synthetic oligonucleotide
ugugcgucucuccaugcau

SEQ ID NO: 633172 - RNA, 19 nt, Artificial Sequence
  Description of Artificial Sequence: Synthetic oligonucleotide
aaaggacuacagaaauaca

SEQ ID NO: 633173 - RNA, 19 nt, Artificial Sequence
  Description of Artificial Sequence: Synthetic oligonucleotide
uuaucccauguuugcgacc

SEQ ID NO: 633174 - RNA, 19 nt, Artificial Sequence
  Description of Artificial Sequence: Synthetic oligonucleotide
augauagcgccaacuaaag

SEQ ID NO: 633175 - RNA, 19 nt, Artificial Sequence
  Description of Artificial Sequence: Synthetic oligonucleotide
ucggguggguaacuggacu

SEQ ID NO: 633176 - RNA, 19 nt, Artificial Sequence
  Description of Artificial Sequence: Synthetic oligonucleotide
ccugauuuacuuuacauua

SEQ ID NO: 633177 - RNA, 19 nt, Artificial Sequence
  Description of Artificial Sequence: Synthetic oligonucleotide
ucuuuguaaggccgccuuc

SEQ ID NO: 633178 - RNA, 19 nt, Artificial Sequence
  Description of Artificial Sequence: Synthetic oligonucleotide
ggguaacuggacuccaagg

SEQ ID NO: 633179 - RNA, 19 nt, Artificial Sequence
  Description of Artificial Sequence: Synthetic oligonucleotide
ggaggguccguuccggucg

SEQ ID NO: 633180 - RNA, 19 nt, Artificial Sequence
  Description of Artificial Sequence: Synthetic oligonucleotide
gucauauuccgggacugag

SEQ ID NO: 633181 - RNA, 19 nt, Artificial Sequence
  Description of Artificial Sequence: Synthetic oligonucleotide
ucccgguuucuuuugucca

SEQ ID NO: 633182 - RNA, 19 nt, Artificial Sequence
  Description of Artificial Sequence: Synthetic oligonucleotide
uacauaccugauuuacuuu

SEQ ID NO: 633183 - RNA, 19 nt, Artificial Sequence
  Description of Artificial Sequence: Synthetic oligonucleotide
cuugugcaccgguggaggg

SEQ ID NO: 633184 - RNA, 19 nt, Artificial Sequence
  Description of Artificial Sequence: Synthetic oligonucleotide
uuuguaaggccgccuucuc

SEQ ID NO: 633185 - RNA, 19 nt, Artificial Sequence
  Description of Artificial Sequence: Synthetic oligonucleotide
auagcuacuugguguaauu

SEQ ID NO: 633186 - RNA, 19 nt, Artificial Sequence
  Description of Artificial Sequence: Synthetic oligonucleotide
caauccucaucuuuccaca

SEQ ID NO: 633187 - RNA, 19 nt, Artificial Sequence
  Description of Artificial Sequence: Synthetic oligonucleotide
ugaagaucggguggguaac

SEQ ID NO: 633188 - RNA, 19 nt, Artificial Sequence
  Description of Artificial Sequence: Synthetic oligonucleotide
gguaagaaacuaaauuauc

SEQ ID NO: 633189 - RNA, 19 nt, Artificial Sequence
  Description of Artificial Sequence: Synthetic oligonucleotide
agaaccuuugacacgguaa

SEQ ID NO: 633190 - RNA, 19 nt, Artificial Sequence
  Description of Artificial Sequence: Synthetic oligonucleotide
aagaucggguggguaacug

SEQ ID NO: 633191 - RNA, 19 nt, Artificial Sequence
  Description of Artificial Sequence: Synthetic oligonucleotide
ugaucacguccacauuaac

SEQ ID NO: 633192 - RNA, 19 nt, Artificial Sequence
  Description of Artificial Sequence: Synthetic oligonucleotide
aggacuacagaaauacaaa

SEQ ID NO: 633193 - RNA, 19 nt, Artificial Sequence
  Description of Artificial Sequence: Synthetic oligonucleotide
acguccacauuaacuauag

SEQ ID NO: 633194 - RNA, 19 nt, Artificial Sequence
  Description of Artificial Sequence: Synthetic oligonucleotide
ccguggagaaaugauagcg

SEQ ID NO: 633195 - RNA, 19 nt, Artificial Sequence
  Description of Artificial Sequence: Synthetic oligonucleotide
auuauacucucgcccuccu

SEQ ID NO: 633196 - RNA, 19 nt, Artificial Sequence
  Description of Artificial Sequence: Synthetic oligonucleotide
gauuauucaugaguaggcu

SEQ ID NO: 633197 - RNA, 19 nt, Artificial Sequence
  Description of Artificial Sequence: Synthetic oligonucleotide
gugaugauuugugaagauc

SEQ ID NO: 633198 - RNA, 19 nt, Artificial Sequence
  Description of Artificial Sequence: Synthetic oligonucleotide
agagaccgcucucgccugc

SEQ ID NO: 633199 - RNA, 19 nt, Artificial Sequence
  Description of Artificial Sequence: Synthetic oligonucleotide
agcuagacuuuugucauaa

SEQ ID NO: 633200 - RNA, 19 nt, Artificial Sequence
  Description of Artificial Sequence: Synthetic oligonucleotide
ugucucgucuccggguggg

SEQ ID NO: 633201 - RNA, 19 nt, Artificial Sequence
  Description of Artificial Sequence: Synthetic oligonucleotide
gaucacguccacauuaacu

SEQ ID NO: 633202 - RNA, 19 nt, Artificial Sequence
  Description of Artificial Sequence: Synthetic oligonucleotide
guaacuggacuccaaggcu

SEQ ID NO: 633203 - RNA, 19 nt, Artificial Sequence
  Description of Artificial Sequence: Synthetic oligonucleotide
agacgaacucugcggccac

SEQ ID NO: 633204 - RNA, 19 nt, Artificial Sequence
  Description of Artificial Sequence: Synthetic oligonucleotide
cugauuuacuuuacauuaa

SEQ ID NO: 633205 - RNA, 19 nt, Artificial Sequence
  Description of Artificial Sequence: Synthetic oligonucleotide
ucacguccacauuaacuau

SEQ ID NO: 633206 - RNA, 19 nt, Artificial Sequence
  Description of Artificial Sequence: Synthetic oligonucleotide
gcgcagaacauagaggucc

SEQ ID NO: 633207 - RNA, 19 nt, Artificial Sequence
  Description of Artificial Sequence: Synthetic oligonucleotide
aagaaucaaucuguucaua

SEQ ID NO: 633208 - RNA, 19 nt, Artificial Sequence
  Description of Artificial Sequence: Synthetic oligonucleotide
augcggucugcggucaggc

SEQ ID NO: 633209 - RNA, 19 nt, Artificial Sequence
  Description of Artificial Sequence: Synthetic oligonucleotide
gguuguuugcuaugcuccc

SEQ ID NO: 633210 - RNA, 19 nt, Artificial Sequence
  Description of Artificial Sequence: Synthetic oligonucleotide
gcuacacucuuuguaaggc

SEQ ID NO: 633211 - RNA, 19 nt, Artificial Sequence
  Description of Artificial Sequence: Synthetic oligonucleotide
caacuaaagcuuuagugau

SEQ ID NO: 633212 - RNA, 19 nt, Artificial Sequence
  Description of Artificial Sequence: Synthetic oligonucleotide
gaucggguggguaacugga

SEQ ID NO: 633213 - RNA, 19 nt, Artificial Sequence
  Description of Artificial Sequence: Synthetic oligonucleotide
ugagccgucuccccgccuc

SEQ ID NO: 633214 - RNA, 19 nt, Artificial Sequence
  Description of Artificial Sequence: Synthetic oligonucleotide
ccggggaugauccggaggg

SEQ ID NO: 633215 - RNA, 19 nt, Artificial Sequence
  Description of Artificial Sequence: Synthetic oligonucleotide
uuauacucucgcccuccuc

SEQ ID NO: 633216 - RNA, 19 nt, Artificial Sequence
  Description of Artificial Sequence: Synthetic oligonucleotide
accaauccucaucuuucca

SEQ ID NO: 633217 - RNA, 19 nt, Artificial Sequence
  Description of Artificial Sequence: Synthetic oligonucleotide
aucaguucuauggcccgag

SEQ ID NO: 633218 - RNA, 19 nt, Artificial Sequence
  Description of Artificial Sequence: Synthetic oligonucleotide
ccugauuauucaugaguag

SEQ ID NO: 633219 - RNA, 19 nt, Artificial Sequence
  Description of Artificial Sequence: Synthetic oligonucleotide
ccaauccucaucuuuccac

SEQ ID NO: 633220 - RNA, 19 nt, Artificial Sequence
  Description of Artificial Sequence: Synthetic oligonucleotide
uacuauucauaggucuguc

SEQ ID NO: 633221 - RNA, 19 nt, Artificial Sequence
  Description of Artificial Sequence: Synthetic oligonucleotide
aauguacauugugucugau

SEQ ID NO: 633222 - RNA, 19 nt, Artificial Sequence
  Description of Artificial Sequence: Synthetic oligonucleotide
acauagagguccauauuau

SEQ ID NO: 633223 - RNA, 19 nt, Artificial Sequence
  Description of Artificial Sequence: Synthetic oligonucleotide
uucguuggguuguuugcua

SEQ ID NO: 633224 - RNA, 19 nt, Artificial Sequence
  Description of Artificial Sequence: Synthetic oligonucleotide
  modified_base (6)..(6): a, c, u, g, unknown or other
gauucngagaaagaacguu

SEQ ID NO: 633225 - RNA, 19 nt, Artificial Sequence
  Description of Artificial Sequence: Synthetic oligonucleotide
aguaggcucuccguggaga

SEQ ID NO: 633226 - RNA, 19 nt, Artificial Sequence
  Description of Artificial Sequence: Synthetic oligonucleotide
cuauccccagauacaaaga

SEQ ID NO: 633227 - RNA, 19 nt, Artificial Sequence
  Description of Artificial Sequence: Synthetic oligonucleotide
gaugcggucugcggucagg

SEQ ID NO: 633228 - RNA, 19 nt, Artificial Sequence
  Description of Artificial Sequence: Synthetic oligonucleotide
ugguuuggugguauuccuu

SEQ ID NO: 633229 - RNA, 19 nt, Artificial Sequence
  Description of Artificial Sequence: Synthetic oligonucleotide
acgguaaagguugcagugu

SEQ ID NO: 633230 - RNA, 19 nt, Artificial Sequence
  Description of Artificial Sequence: Synthetic oligonucleotide
uugccguagugguccaaca

SEQ ID NO: 633231 - RNA, 19 nt, Artificial Sequence
  Description of Artificial Sequence: Synthetic oligonucleotide
gcggucugcggucaggcgg

SEQ ID NO: 633232 - RNA, 19 nt, Artificial Sequence
  Description of Artificial Sequence: Synthetic oligonucleotide
uaucaguucuauggcccga

SEQ ID NO: 633233 - RNA, 19 nt, Artificial Sequence
  Description of Artificial Sequence: Synthetic oligonucleotide
uuagaaccuuugacacggu

SEQ ID NO: 633234 - RNA, 19 nt, Artificial Sequence
  Description of Artificial Sequence: Synthetic oligonucleotide
agccugcgguccuuugaac

SEQ ID NO: 633235 - RNA, 19 nt, Artificial Sequence
  Description of Artificial Sequence: Synthetic oligonucleotide
auagcgccaacuaaagcuu

SEQ ID NO: 633236 - RNA, 19 nt, Artificial Sequence
  Description of Artificial Sequence: Synthetic oligonucleotide
guaaggccgccuucucugc

SEQ ID NO: 633237 - RNA, 19 nt, Artificial Sequence
  Description of Artificial Sequence: Synthetic oligonucleotide
ugucgucccgguuucuuuu

SEQ ID NO: 633238 - RNA, 19 nt, Artificial Sequence
  Description of Artificial Sequence: Synthetic oligonucleotide
ugcggucugcggucaggcg

SEQ ID NO: 633239 - RNA, 19 nt, Artificial Sequence
  Description of Artificial Sequence: Synthetic oligonucleotide
agcugucucgucuccgggu

SEQ ID NO: 633240 - RNA, 19 nt, Artificial Sequence
  Description of Artificial Sequence: Synthetic oligonucleotide
guaauccacuuaaaccaca

SEQ ID NO: 633241 - RNA, 19 nt, Artificial Sequence
  Description of Artificial Sequence: Synthetic oligonucleotide
ccacugucggauuuucuag

SEQ ID NO: 633242 - RNA, 19 nt, Artificial Sequence
  Description of Artificial Sequence: Synthetic oligonucleotide
cacgugugcccgcuuuucc

SEQ ID NO: 633243 - RNA, 19 nt, Artificial Sequence
  Description of Artificial Sequence: Synthetic oligonucleotide
cguggagaaaugauagcgc

SEQ ID NO: 633244 - RNA, 19 nt, Artificial Sequence
  Description of Artificial Sequence: Synthetic oligonucleotide
ucggguggccggucuuugg

SEQ ID NO: 633245 - RNA, 19 nt, Artificial Sequence
  Description of Artificial Sequence: Synthetic oligonucleotide
agaccgcucucgccugcgc

SEQ ID NO: 633246 - RNA, 19 nt, Artificial Sequence
  Description of Artificial Sequence: Synthetic oligonucleotide
gaguaggcucuccguggag

SEQ ID NO: 633247 - RNA, 19 nt, Artificial Sequence
  Description of Artificial Sequence: Synthetic oligonucleotide
ugugaagaucgggugggua

SEQ ID NO: 633248 - RNA, 19 nt, Artificial Sequence
  Description of Artificial Sequence: Synthetic oligonucleotide
ugauccggagggucacugu

SEQ ID NO: 633249 - RNA, 19 nt, Artificial Sequence
  Description of Artificial Sequence: Synthetic oligonucleotide
cacugucggauuuucuaga

SEQ ID NO: 633250 - RNA, 19 nt, Artificial Sequence
  Description of Artificial Sequence: Synthetic oligonucleotide
auggggcaugaguaguggu

SEQ ID NO: 633251 - RNA, 19 nt, Artificial Sequence
  Description of Artificial Sequence: Synthetic oligonucleotide
cuccccgccucagaaacag

SEQ ID NO: 633252 - RNA, 19 nt, Artificial Sequence
  Description of Artificial Sequence: Synthetic oligonucleotide
aucggguggguaacuggac

SEQ ID NO: 633253 - RNA, 19 nt, Artificial Sequence
  Description of Artificial Sequence: Synthetic oligonucleotide
uccccgccccuuuagcuac

SEQ ID NO: 633254 - RNA, 19 nt, Artificial Sequence
  Description of Artificial Sequence: Synthetic oligonucleotide
augauccggagggucacug

SEQ ID NO: 633255 - RNA, 19 nt, Artificial Sequence
  Description of Artificial Sequence: Synthetic oligonucleotide
ucccauguuugcgaccuuc

SEQ ID NO: 633256 - RNA, 19 nt, Artificial Sequence
  Description of Artificial Sequence: Synthetic oligonucleotide
cacucuuuguaaggccgcc

SEQ ID NO: 633257 - RNA, 19 nt, Artificial Sequence
  Description of Artificial Sequence: Synthetic oligonucleotide
uccccggggaugauccgga

SEQ ID NO: 633258 - RNA, 19 nt, Artificial Sequence
  Description of Artificial Sequence: Synthetic oligonucleotide
guagaugcuuucucaggua

SEQ ID NO: 633259 - RNA, 19 nt, Artificial Sequence
  Description of Artificial Sequence: Synthetic oligonucleotide
uccggagggucacuguguu

SEQ ID NO: 633260 - RNA, 19 nt, Artificial Sequence
  Description of Artificial Sequence: Synthetic oligonucleotide
uggaggguccguuccgguc

SEQ ID NO: 633261 - RNA, 19 nt, Artificial Sequence
  Description of Artificial Sequence: Synthetic oligonucleotide
ucucgguggccaaccuugu

SEQ ID NO: 633262 - RNA, 19 nt, Artificial Sequence
  Description of Artificial Sequence: Synthetic oligonucleotide
auccccggggaugauccgg

SEQ ID NO: 633263 - RNA, 19 nt, Artificial Sequence
  Description of Artificial Sequence: Synthetic oligonucleotide
cccaaccacaccaucugag

SEQ ID NO: 633264 - RNA, 19 nt, Artificial Sequence
  Description of Artificial Sequence: Synthetic oligonucleotide
gaccgucucugauccagga

SEQ ID NO: 633265 - RNA, 19 nt, Artificial Sequence
  Description of Artificial Sequence: Synthetic oligonucleotide
uucacgugugcccgcuuuu

SEQ ID NO: 633266 - RNA, 19 nt, Artificial Sequence
  Description of Artificial Sequence: Synthetic oligonucleotide
agcgcagaacauagagguc

SEQ ID NO: 633267 - RNA, 19 nt, Artificial Sequence
  Description of Artificial Sequence: Synthetic oligonucleotide
uuugggccggcaugcccca

SEQ ID NO: 633268 - RNA, 19 nt, Artificial Sequence
  Description of Artificial Sequence: Synthetic oligonucleotide
gcaugaaauaaaagaguga

SEQ ID NO: 633269 - RNA, 19 nt, Artificial Sequence
  Description of Artificial Sequence: Synthetic oligonucleotide
cccgcuuuuccccauguug

SEQ ID NO: 633270 - RNA, 19 nt, Artificial Sequence
  Description of Artificial Sequence: Synthetic oligonucleotide
ucucgcccuccucggagac

SEQ ID NO: 633271 - RNA, 19 nt, Artificial Sequence
  Description of Artificial Sequence: Synthetic oligonucleotide
ucgucccgguuucuuuugu

SEQ ID NO: 633272 - RNA, 19 nt, Artificial Sequence
  Description of Artificial Sequence: Synthetic oligonucleotide
ugcaccgguggaggguccg

SEQ ID NO: 633273 - RNA, 19 nt, Artificial Sequence
  Description of Artificial Sequence: Synthetic oligonucleotide
gggagcacuaagcaugaaa

SEQ ID NO: 633274 - RNA, 19 nt, Artificial Sequence
  Description of Artificial Sequence: Synthetic oligonucleotide
uacucucgcccuccucgga

SEQ ID NO: 633275 - RNA, 19 nt, Artificial Sequence
  Description of Artificial Sequence: Synthetic oligonucleotide
gccucagaaacagacgaac

SEQ ID NO: 633276 - RNA, 19 nt, Artificial Sequence
  Description of Artificial Sequence: Synthetic oligonucleotide
cugucucgucuccgggugg

SEQ ID NO: 633277 - RNA, 19 nt, Artificial Sequence
  Description of Artificial Sequence: Synthetic oligonucleotide
gcugucucgucuccgggug

SEQ ID NO: 633278 - RNA, 19 nt, Artificial Sequence
  Description of Artificial Sequence: Synthetic oligonucleotide
gaacauagagguccauauu

SEQ ID NO: 633279 - RNA, 19 nt, Artificial Sequence
  Description of Artificial Sequence: Synthetic oligonucleotide
guaggcucuccguggagaa

SEQ ID NO: 633280 - RNA, 19 nt, Artificial Sequence
  Description of Artificial Sequence: Synthetic oligonucleotide
ugcgggugccuucccugug

SEQ ID NO: 633281 - RNA, 19 nt, Artificial Sequence
  Description of Artificial Sequence: Synthetic oligonucleotide
ggagcacuaagcaugaaau

SEQ ID NO: 633282 - RNA, 19 nt, Artificial Sequence
  Description of Artificial Sequence: Synthetic oligonucleotide
uugugcaccgguggagggu

SEQ ID NO: 633283 - RNA, 19 nt, Artificial Sequence
  Description of Artificial Sequence: Synthetic oligonucleotide
cacguccacauuaacuaua

SEQ ID NO: 633284 - RNA, 19 nt, Artificial Sequence
  Description of Artificial Sequence: Synthetic oligonucleotide
acucuuuguaaggccgccu

SEQ ID NO: 633285 - RNA, 19 nt, Artificial Sequence
  Description of Artificial Sequence: Synthetic oligonucleotide
gagaccgcucucgccugcg

SEQ ID NO: 633286 - RNA, 19 nt, Artificial Sequence
  Description of Artificial Sequence: Synthetic oligonucleotide
ugcccgcuuuuccccaugu

SEQ ID NO: 633287 - RNA, 19 nt, Artificial Sequence
  Description of Artificial Sequence: Synthetic oligonucleotide
ggugucggcacugcgggug

SEQ ID NO: 633288 - RNA, 19 nt, Artificial Sequence
  Description of Artificial Sequence: Synthetic oligonucleotide
ggguucagaaaaugggucu

SEQ ID NO: 633289 - RNA, 19 nt, Artificial Sequence
  Description of Artificial Sequence: Synthetic oligonucleotide
augcuuucucagguaagaa

SEQ ID NO: 633290 - RNA, 19 nt, Artificial Sequence
  Description of Artificial Sequence: Synthetic oligonucleotide
gaggguccguuccggucgc

SEQ ID NO: 633291 - RNA, 19 nt, Artificial Sequence
  Description of Artificial Sequence: Synthetic oligonucleotide
ggucucaccauugaucucu

SEQ ID NO: 633292 - RNA, 19 nt, Artificial Sequence
  Description of Artificial Sequence: Synthetic oligonucleotide
gccugauuauucaugagua

SEQ ID NO: 633293 - RNA, 19 nt, Artificial Sequence
  Description of Artificial Sequence: Synthetic oligonucleotide
ucacgugugcccgcuuuuc

SEQ ID NO: 633294 - RNA, 19 nt, Artificial Sequence
  Description of Artificial Sequence: Synthetic oligonucleotide
uccgcuccggcugugcguc

SEQ ID NO: 633295 - RNA, 19 nt, Artificial Sequence
  Description of Artificial Sequence: Synthetic oligonucleotide
gguccguuccggucgcugc

SEQ ID NO: 633296 - RNA, 19 nt, Artificial Sequence
  Description of Artificial Sequence: Synthetic oligonucleotide
cagagaccgcucucgccug

SEQ ID NO: 633297 - RNA, 19 nt, Artificial Sequence
  Description of Artificial Sequence: Synthetic oligonucleotide
ucgcccuccucggagacua

SEQ ID NO: 633298 - RNA, 19 nt, Artificial Sequence
  Description of Artificial Sequence: Synthetic oligonucleotide
uuccaggugugguguucgu

SEQ ID NO: 633299 - RNA, 19 nt, Artificial Sequence
  Description of Artificial Sequence: Synthetic oligonucleotide
auggcccgagaauguuuca

SEQ ID NO: 633300 - RNA, 19 nt, Artificial Sequence
  Description of Artificial Sequence: Synthetic oligonucleotide
cauccccggggaugauccg

SEQ ID NO: 633301 - RNA, 19 nt, Artificial Sequence
  Description of Artificial Sequence: Synthetic oligonucleotide
ugguggcgaucuucucagc

SEQ ID NO: 633302 - RNA, 19 nt, Artificial Sequence
  Description of Artificial Sequence: Synthetic oligonucleotide
ccugcgguccuuugaacuc

SEQ ID NO: 633303 - RNA, 19 nt, Artificial Sequence
  Description of Artificial Sequence: Synthetic oligonucleotide
gcuuuagugauuacuuaua

SEQ ID NO: 633304 - RNA, 19 nt, Artificial Sequence
  Description of Artificial Sequence: Synthetic oligonucleotide
ccggcaugccccacugucg

SEQ ID NO: 633305 - RNA, 19 nt, Artificial Sequence
  Description of Artificial Sequence: Synthetic oligonucleotide
guuugcgaccuuccucuua

SEQ ID NO: 633306 - RNA, 19 nt, Artificial Sequence
  Description of Artificial Sequence: Synthetic oligonucleotide
ggguggguaacuggacucc

SEQ ID NO: 633307 - RNA, 19 nt, Artificial Sequence
  Description of Artificial Sequence: Synthetic oligonucleotide
cuaugcucccuauugccuu

SEQ ID NO: 633308 - RNA, 19 nt, Artificial Sequence
  Description of Artificial Sequence: Synthetic oligonucleotide
auccggagggucacugugu

SEQ ID NO: 633309 - RNA, 19 nt, Artificial Sequence
  Description of Artificial Sequence: Synthetic oligonucleotide
gugcgucucuccaugcauc

SEQ ID NO: 633310 - RNA, 19 nt, Artificial Sequence
  Description of Artificial Sequence: Synthetic oligonucleotide
ugugcccgcuuuuccccau

SEQ ID NO: 633311 - RNA, 19 nt, Artificial Sequence
  Description of Artificial Sequence: Synthetic oligonucleotide
uccaggugugguguucguu

SEQ ID NO: 633312 - RNA, 19 nt, Artificial Sequence
  Description of Artificial Sequence: Synthetic oligonucleotide
uccgggugggugaccgcuc

SEQ ID NO: 633313 - RNA, 19 nt, Artificial Sequence
  Description of Artificial Sequence: Synthetic oligonucleotide
gguaaagguugcaguguga

SEQ ID NO: 633314 - RNA, 19 nt, Artificial Sequence
  Description of Artificial Sequence: Synthetic oligonucleotide
aggaccuccgccggcggcu

SEQ ID NO: 633315 - RNA, 19 nt, Artificial Sequence
  Description of Artificial Sequence: Synthetic oligonucleotide
ccaggagucuuuccaagga

SEQ ID NO: 633316 - RNA, 19 nt, Artificial Sequence
  Description of Artificial Sequence: Synthetic oligonucleotide
gcgccaacuaaagcuuuag

SEQ ID NO: 633317 - RNA, 19 nt, Artificial Sequence
  Description of Artificial Sequence: Synthetic oligonucleotide
cucgguggccaaccuuguc

SEQ ID NO: 633318 - RNA, 19 nt, Artificial Sequence
  Description of Artificial Sequence: Synthetic oligonucleotide
agguacaagcaaacacuuu

SEQ ID NO: 633319 - RNA, 19 nt, Artificial Sequence
  Description of Artificial Sequence: Synthetic oligonucleotide
gccggcaugccccacuguc

SEQ ID NO: 633320 - RNA, 19 nt, Artificial Sequence
  Description of Artificial Sequence: Synthetic oligonucleotide
ugcggccaccauucuuuau

SEQ ID NO: 633321 - RNA, 19 nt, Artificial Sequence
  Description of Artificial Sequence: Synthetic oligonucleotide
ggaugauccggagggucac

SEQ ID NO: 633322 - RNA, 19 nt, Artificial Sequence
  Description of Artificial Sequence: Synthetic oligonucleotide
cugcuaagcgcagaacaua

SEQ ID NO: 633323 - RNA, 19 nt, Artificial Sequence
  Description of Artificial Sequence: Synthetic oligonucleotide
gaagaucggguggguaacu

SEQ ID NO: 633324 - RNA, 19 nt, Artificial Sequence
  Description of Artificial Sequence: Synthetic oligonucleotide
cucucgcccuccucggaga

SEQ ID NO: 633325 - RNA, 19 nt, Artificial Sequence
  Description of Artificial Sequence: Synthetic oligonucleotide
cucuuuguaaggccgccuu

SEQ ID NO: 633326 - RNA, 19 nt, Artificial Sequence
  Description of Artificial Sequence: Synthetic oligonucleotide
ggggaugauccggaggguc

SEQ ID NO: 633327 - RNA, 19 nt, Artificial Sequence
  Description of Artificial Sequence: Synthetic oligonucleotide
gcgggugccuucccugugc

SEQ ID NO: 633328 - RNA, 19 nt, Artificial Sequence
  Description of Artificial Sequence: Synthetic oligonucleotide
cccggggaugauccggagg

SEQ ID NO: 633329 - RNA, 19 nt, Artificial Sequence
  Description of Artificial Sequence: Synthetic oligonucleotide
guuugcuaugcucccuauu

SEQ ID NO: 633330 - RNA, 19 nt, Artificial Sequence
  Description of Artificial Sequence: Synthetic oligonucleotide
cucggagacuaaagccaaa

SEQ ID NO: 633331 - RNA, 19 nt, Artificial Sequence
  Description of Artificial Sequence: Synthetic oligonucleotide
cuucuccggggaccucuuc

SEQ ID NO: 633332 - RNA, 19 nt, Artificial Sequence
  Description of Artificial Sequence: Synthetic oligonucleotide
gaccuccgccggcggcugg

SEQ ID NO: 633333 - RNA, 19 nt, Artificial Sequence
  Description of Artificial Sequence: Synthetic oligonucleotide
agcgccaacuaaagcuuua

SEQ ID NO: 633334 - RNA, 19 nt, Artificial Sequence
  Description of Artificial Sequence: Synthetic oligonucleotide
cggcaugccccacugucgg

SEQ ID NO: 633335 - RNA, 19 nt, Artificial Sequence
  Description of Artificial Sequence: Synthetic oligonucleotide
cuauggcccgagaauguuu

SEQ ID NO: 633336 - RNA, 19 nt, Artificial Sequence
  Description of Artificial Sequence: Synthetic oligonucleotide
ccagagaccgcucucgccu

SEQ ID NO: 633337 - RNA, 19 nt, Artificial Sequence
  Description of Artificial Sequence: Synthetic oligonucleotide
ccgagaauguuucauguuu

SEQ ID NO: 633338 - RNA, 19 nt, Artificial Sequence
  Description of Artificial Sequence: Synthetic oligonucleotide
gccugcgguccuuugaacu

SEQ ID NO: 633339 - RNA, 19 nt, Artificial Sequence
  Description of Artificial Sequence: Synthetic oligonucleotide
ccucagaaacagacgaacu

SEQ ID NO: 633340 - RNA, 19 nt, Artificial Sequence
  Description of Artificial Sequence: Synthetic oligonucleotide
gggccucacuuccggaaca

SEQ ID NO: 633341 - RNA, 19 nt, Artificial Sequence
  Description of Artificial Sequence: Synthetic oligonucleotide
gcuaagcgcagaacauaga

SEQ ID NO: 633342 - RNA, 19 nt, Artificial Sequence
  Description of Artificial Sequence: Synthetic oligonucleotide
cagcuagacuuuugucaua

SEQ ID NO: 633343 - RNA, 19 nt, Artificial Sequence
  Description of Artificial Sequence: Synthetic oligonucleotide
cggucugcggucaggcggc

SEQ ID NO: 633344 - RNA, 19 nt, Artificial Sequence
  Description of Artificial Sequence: Synthetic oligonucleotide
cucaggagucucagaugcu

SEQ ID NO: 633345 - RNA, 19 nt, Artificial Sequence
  Description of Artificial Sequence: Synthetic oligonucleotide
ggaugcggucugcggucag

SEQ ID NO: 633346 - RNA, 19 nt, Artificial Sequence
  Description of Artificial Sequence: Synthetic oligonucleotide
gcucagcuaggcaguaauc

SEQ ID NO: 633347 - RNA, 19 nt, Artificial Sequence
  Description of Artificial Sequence: Synthetic oligonucleotide
gcgucucuccaugcaucgg

SEQ ID NO: 633348 - RNA, 19 nt, Artificial Sequence
  Description of Artificial Sequence: Synthetic oligonucleotide
agccgucuccccgccucag

SEQ ID NO: 633349 - RNA, 19 nt, Artificial Sequence
  Description of Artificial Sequence: Synthetic oligonucleotide
guccguuccggucgcugcu

SEQ ID NO: 633350 - RNA, 19 nt, Artificial Sequence
  Description of Artificial Sequence: Synthetic oligonucleotide
cuucacgugugcccgcuuu

SEQ ID NO: 633351 - RNA, 19 nt, Artificial Sequence
  Description of Artificial Sequence: Synthetic oligonucleotide
gguggccaaccuugucguc

SEQ ID NO: 633352 - RNA, 19 nt, Artificial Sequence
  Description of Artificial Sequence: Synthetic oligonucleotide
ccuuuagcuacggaaugua

SEQ ID NO: 633353 - RNA, 19 nt, Artificial Sequence
  Description of Artificial Sequence: Synthetic oligonucleotide
gggugaccgcucucgcuuc

SEQ ID NO: 633354 - RNA, 19 nt, Artificial Sequence
  Description of Artificial Sequence: Synthetic oligonucleotide
ccguuccggucgcugcugg

SEQ ID NO: 633355 - RNA, 19 nt, Artificial Sequence
  Description of Artificial Sequence: Synthetic oligonucleotide
aucccauguuugcgaccuu

SEQ ID NO: 633356 - RNA, 19 nt, Artificial Sequence
  Description of Artificial Sequence: Synthetic oligonucleotide
gucugcggucaggcggccc

SEQ ID NO: 633357 - RNA, 19 nt, Artificial Sequence
  Description of Artificial Sequence: Synthetic oligonucleotide
ccauguugugaugauuugu

SEQ ID NO: 633358 - RNA, 19 nt, Artificial Sequence
  Description of Artificial Sequence: Synthetic oligonucleotide
caugcaucggguggccggu

SEQ ID NO: 633359 - RNA, 19 nt, Artificial Sequence
  Description of Artificial Sequence: Synthetic oligonucleotide
ccggcugugcgucucucca

SEQ ID NO: 633360 - RNA, 19 nt, Artificial Sequence
  Description of Artificial Sequence: Synthetic oligonucleotide
gcuacggaauguacauugu

SEQ ID NO: 633361 - RNA, 19 nt, Artificial Sequence
  Description of Artificial Sequence: Synthetic oligonucleotide
gucgguggacuuggcucuc

SEQ ID NO: 633362 - RNA, 19 nt, Artificial Sequence
  Description of Artificial Sequence: Synthetic oligonucleotide
ggguccguuccggucgcug

SEQ ID NO: 633363 - RNA, 19 nt, Artificial Sequence
  Description of Artificial Sequence: Synthetic oligonucleotide
gccccuuuagcuacggaau

SEQ ID NO: 633364 - RNA, 19 nt, Artificial Sequence
  Description of Artificial Sequence: Synthetic oligonucleotide
gugcaccgguggagggucc

SEQ ID NO: 633365 - RNA, 19 nt, Artificial Sequence
  Description of Artificial Sequence: Synthetic oligonucleotide
cugcgggugccuucccugu

SEQ ID NO: 633366 - RNA, 19 nt, Artificial Sequence
  Description of Artificial Sequence: Synthetic oligonucleotide
ggcaugccccacugucgga

SEQ ID NO: 633367 - RNA, 19 nt, Artificial Sequence
  Description of Artificial Sequence: Synthetic oligonucleotide
ggcccgggccucacuuccg

SEQ ID NO: 633368 - RNA, 19 nt, Artificial Sequence
  Description of Artificial Sequence: Synthetic oligonucleotide
ccauguuugcgaccuuccu

SEQ ID NO: 633369 - RNA, 19 nt, Artificial Sequence
  Description of Artificial Sequence: Synthetic oligonucleotide
caaccuugucgucccgguu

SEQ ID NO: 633370 - RNA, 19 nt, Artificial Sequence
  Description of Artificial Sequence: Synthetic oligonucleotide
ggaccuccgccggcggcug

SEQ ID NO: 633371 - RNA, 19 nt, Artificial Sequence
  Description of Artificial Sequence: Synthetic oligonucleotide
gccccacugucggauuuuc

SEQ ID NO: 633372 - RNA, 19 nt, Artificial Sequence
  Description of Artificial Sequence: Synthetic oligonucleotide
cguagugguccaacaggua

SEQ ID NO: 633373 - RNA, 19 nt, Artificial Sequence
  Description of Artificial Sequence: Synthetic oligonucleotide
cccgccccuuuagcuacgg

SEQ ID NO: 633374 - RNA, 19 nt, Artificial Sequence
  Description of Artificial Sequence: Synthetic oligonucleotide
ccccgccccuuuagcuacg

SEQ ID NO: 633375 - RNA, 19 nt, Artificial Sequence
  Description of Artificial Sequence: Synthetic oligonucleotide
gucggcacugcgggugccu

SEQ ID NO: 633376 - RNA, 19 nt, Artificial Sequence
  Description of Artificial Sequence: Synthetic oligonucleotide
aggguccguuccggucgcu

SEQ ID NO: 633377 - RNA, 19 nt, Artificial Sequence
  Description of Artificial Sequence: Synthetic oligonucleotide
ggucacuguguugcccgcu

SEQ ID NO: 633378 - RNA, 19 nt, Artificial Sequence
  Description of Artificial Sequence: Synthetic oligonucleotide
ccggucgcugcugggguca

SEQ ID NO: 633379 - RNA, 19 nt, Artificial Sequence
  Description of Artificial Sequence: Synthetic oligonucleotide
gcccuccucggagacuaaa

SEQ ID NO: 633380 - RNA, 19 nt, Artificial Sequence
  Description of Artificial Sequence: Synthetic oligonucleotide
caucggguggccggucuuu

SEQ ID NO: 633381 - RNA, 19 nt, Artificial Sequence
  Description of Artificial Sequence: Synthetic oligonucleotide
gucucgucuccgggugggu

SEQ ID NO: 633382 - RNA, 19 nt, Artificial Sequence
  Description of Artificial Sequence: Synthetic oligonucleotide
cgccaacuaaagcuuuagu

SEQ ID NO: 633383 - RNA, 19 nt, Artificial Sequence
  Description of Artificial Sequence: Synthetic oligonucleotide
cugagccgucuccccgccu

SEQ ID NO: 633384 - RNA, 19 nt, Artificial Sequence
  Description of Artificial Sequence: Synthetic oligonucleotide
gguguucguuggguuguuu

SEQ ID NO: 633385 - RNA, 19 nt, Artificial Sequence
  Description of Artificial Sequence: Synthetic oligonucleotide
cgucuccccgccucagaaa

SEQ ID NO: 633386 - RNA, 19 nt, Artificial Sequence
  Description of Artificial Sequence: Synthetic oligonucleotide
ggccggucuuugggccggc

SEQ ID NO: 633387 - RNA, 19 nt, Artificial Sequence
  Description of Artificial Sequence: Synthetic oligonucleotide
caccgguggaggguccguu

SEQ ID NO: 633388 - RNA, 19 nt, Artificial Sequence
  Description of Artificial Sequence: Synthetic oligonucleotide
gcgguccuuugaacucaaa

SEQ ID NO: 633389 - RNA, 19 nt, Artificial Sequence
  Description of Artificial Sequence: Synthetic oligonucleotide
ccgggugggugaccgcucu

SEQ ID NO: 633390 - RNA, 19 nt, Artificial Sequence
  Description of Artificial Sequence: Synthetic oligonucleotide
ccggucuuugggccggcau

SEQ ID NO: 633391 - RNA, 19 nt, Artificial Sequence
  Description of Artificial Sequence: Synthetic oligonucleotide
cguugaucacguccacauu

SEQ ID NO: 633392 - RNA, 19 nt, Artificial Sequence
  Description of Artificial Sequence: Synthetic oligonucleotide
ccgccccuuuagcuacgga

SEQ ID NO: 633393 - RNA, 19 nt, Artificial Sequence
  Description of Artificial Sequence: Synthetic oligonucleotide
gcccgcuuuuccccauguu

SEQ ID NO: 633394 - RNA, 19 nt, Artificial Sequence
  Description of Artificial Sequence: Synthetic oligonucleotide
gcaccgguggaggguccgu

SEQ ID NO: 633395 - RNA, 19 nt, Artificial Sequence
  Description of Artificial Sequence: Synthetic oligonucleotide
  modified_base (1)..(1): a, c, u, g, unknown or other
ngagaaagaacguugauca

SEQ ID NO: 633396 - RNA, 19 nt, Artificial Sequence
  Description of Artificial Sequence: Synthetic oligonucleotide
uauuauaaauuuaauaugg

SEQ ID NO: 633397 - RNA, 19 nt, Artificial Sequence
  Description of Artificial Sequence: Synthetic oligonucleotide
uuuaauauaaguaacugca

SEQ ID NO: 633398 - RNA, 19 nt, Artificial Sequence
  Description of Artificial Sequence: Synthetic oligonucleotide
ucauauaucagccacaaag

SEQ ID NO: 633399 - RNA, 19 nt, Artificial Sequence
  Description of Artificial Sequence: Synthetic oligonucleotide
agugcuauagcccauaugg

SEQ ID NO: 633400 - RNA, 19 nt, Artificial Sequence
  Description of Artificial Sequence: Synthetic oligonucleotide
aauauugcauuccaggcgg

SEQ ID NO: 633401 - RNA, 19 nt, Artificial Sequence
  Description of Artificial Sequence: Synthetic oligonucleotide
aguguuuaauucuacaccc

SEQ ID NO: 633402 - RNA, 19 nt, Artificial Sequence
  Description of Artificial Sequence: Synthetic oligonucleotide
aaauauuagcagcauuucc

SEQ ID NO: 633403 - RNA, 19 nt, Artificial Sequence
  Description of Artificial Sequence: Synthetic oligonucleotide
  modified_base (16)..(16): a, c, u, g, unknown or other
ucuacauggauuuugngca

SEQ ID NO: 633404 - RNA, 19 nt, Artificial Sequence
  Description of Artificial Sequence: Synthetic oligonucleotide
aguuuuacagcauccaggc

SEQ ID NO: 633405 - RNA, 19 nt, Artificial Sequence
  Description of Artificial Sequence: Synthetic oligonucleotide
uuuuacagcauccaggcgc

SEQ ID NO: 633406 - RNA, 19 nt, Artificial Sequence
  Description of Artificial Sequence: Synthetic oligonucleotide
agaauauugcauuccaggc

SEQ ID NO: 633407 - RNA, 19 nt, Artificial Sequence
  Description of Artificial Sequence: Synthetic oligonucleotide
  modified_base (10)..(10): a, c, u, g, unknown or other
uggauuuugngcaacaagu

SEQ ID NO: 633408 - RNA, 19 nt, Artificial Sequence
  Description of Artificial Sequence: Synthetic oligonucleotide
auuuuagucauacuguguc

SEQ ID NO: 633409 - RNA, 19 nt, Artificial Sequence
  Description of Artificial Sequence: Synthetic oligonucleotide
ucuaauauuccccacucag

SEQ ID NO: 633410 - RNA, 19 nt, Artificial Sequence
  Description of Artificial Sequence: Synthetic oligonucleotide
aagaauuccuccuuucagg

SEQ ID NO: 633411 - RNA, 19 nt, Artificial Sequence
  Description of Artificial Sequence: Synthetic oligonucleotide
ugaaguaccgugaaaaugu

SEQ ID NO: 633412 - RNA, 19 nt, Artificial Sequence
  Description of Artificial Sequence: Synthetic oligonucleotide
auaucaguuugauauacac

SEQ ID NO: 633413 - RNA, 19 nt, Artificial Sequence
  Description of Artificial Sequence: Synthetic oligonucleotide
guuagguuaauucuggaag

SEQ ID NO: 633414 - RNA, 19 nt, Artificial Sequence
  Description of Artificial Sequence: Synthetic oligonucleotide
aaagugcgcguccauaggc

SEQ ID NO: 633415 - RNA, 19 nt, Artificial Sequence
  Description of Artificial Sequence: Synthetic oligonucleotide
accuuguucauauaucagc

SEQ ID NO: 633416 - RNA, 19 nt, Artificial Sequence
  Description of Artificial Sequence: Synthetic oligonucleotide
gaauaauccggccacgggg

SEQ ID NO: 633417 - RNA, 19 nt, Artificial Sequence
  Description of Artificial Sequence: Synthetic oligonucleotide
agaauuccuccuuucaggc

SEQ ID NO: 633418 - RNA, 19 nt, Artificial Sequence
  Description of Artificial Sequence: Synthetic oligonucleotide
cagaauauugcauuccagg

SEQ ID NO: 633419 - RNA, 19 nt, Artificial Sequence
  Description of Artificial Sequence: Synthetic oligonucleotide
acaauaguggcucuacagg

SEQ ID NO: 633420 - RNA, 19 nt, Artificial Sequence
  Description of Artificial Sequence: Synthetic oligonucleotide
acaaauauguuccggaaga

SEQ ID NO: 633421 - RNA, 19 nt, Artificial Sequence
  Description of Artificial Sequence: Synthetic oligonucleotide
ugcuacauauucuagguac

SEQ ID NO: 633422 - RNA, 19 nt, Artificial Sequence
  Description of Artificial Sequence: Synthetic oligonucleotide
ucgaugugccuucugaggg

SEQ ID NO: 633423 - RNA, 19 nt, Artificial Sequence
  Description of Artificial Sequence: Synthetic oligonucleotide
uaugguugauuaaugaaaa

SEQ ID NO: 633424 - RNA, 19 nt, Artificial Sequence
  Description of Artificial Sequence: Synthetic oligonucleotide
uguauguaguguuuaauuc

SEQ ID NO: 633425 - RNA, 19 nt, Artificial Sequence
  Description of Artificial Sequence: Synthetic oligonucleotide
gacaauaguggcucuacag

SEQ ID NO: 633426 - RNA, 19 nt, Artificial Sequence
  Description of Artificial Sequence: Synthetic oligonucleotide
aaaacaguagccagacugg

SEQ ID NO: 633427 - RNA, 19 nt, Artificial Sequence
  Description of Artificial Sequence: Synthetic oligonucleotide
uccuccguaaaacaguagc

SEQ ID NO: 633428 - RNA, 19 nt, Artificial Sequence
  Description of Artificial Sequence: Synthetic oligonucleotide
caggccacaaauauguucc

SEQ ID NO: 633429 - RNA, 19 nt, Artificial Sequence
  Description of Artificial Sequence: Synthetic oligonucleotide
ugugaauacgcauacccac

SEQ ID NO: 633430 - RNA, 19 nt, Artificial Sequence
  Description of Artificial Sequence: Synthetic oligonucleotide
acagucacgaaccaggcca

SEQ ID NO: 633431 - RNA, 19 nt, Artificial Sequence
  Description of Artificial Sequence: Synthetic oligonucleotide
ugaauaauccggccacggg

SEQ ID NO: 633432 - RNA, 19 nt, Artificial Sequence
  Description of Artificial Sequence: Synthetic oligonucleotide
uguacaguaguuagguuaa

SEQ ID NO: 633433 - RNA, 19 nt, Artificial Sequence
  Description of Artificial Sequence: Synthetic oligonucleotide
aauuggacucgauauguau

SEQ ID NO: 633434 - RNA, 19 nt, Artificial Sequence
  Description of Artificial Sequence: Synthetic oligonucleotide
uauucuagguacacaauau

SEQ ID NO: 633435 - RNA, 19 nt, Artificial Sequence
  Description of Artificial Sequence: Synthetic oligonucleotide
auauaaguaacugcaccac

SEQ ID NO: 633436 - RNA, 19 nt, Artificial Sequence
  Description of Artificial Sequence: Synthetic oligonucleotide
guaguguuuaauucuacac

SEQ ID NO: 633437 - RNA, 19 nt, Artificial Sequence
  Description of Artificial Sequence: Synthetic oligonucleotide
uuugcgacaagaauuccuc

SEQ ID NO: 633438 - RNA, 19 nt, Artificial Sequence
  Description of Artificial Sequence: Synthetic oligonucleotide
auccaggcgcaucaaagcc

SEQ ID NO: 633439 - RNA, 19 nt, Artificial Sequence
  Description of Artificial Sequence: Synthetic oligonucleotide
uauacacuacuauguacag

SEQ ID NO: 633440 - RNA, 19 nt, Artificial Sequence
  Description of Artificial Sequence: Synthetic oligonucleotide
uauaaguaacugcaccaca

SEQ ID NO: 633441 - RNA, 19 nt, Artificial Sequence
  Description of Artificial Sequence: Synthetic oligonucleotide
  modified_base (3)..(3): a, c, u, g, unknown or other
ugngcaacaagucuuugua

SEQ ID NO: 633442 - RNA, 19 nt, Artificial Sequence
  Description of Artificial Sequence: Synthetic oligonucleotide
uauuguuccgccgaagcag

SEQ ID NO: 633443 - RNA, 19 nt, Artificial Sequence
  Description of Artificial Sequence: Synthetic oligonucleotide
cuccuuucaggcuacaggc

SEQ ID NO: 633444 - RNA, 19 nt, Artificial Sequence
  Description of Artificial Sequence: Synthetic oligonucleotide
  modified_base (9)..(9): a, c, u, g, unknown or other
  modified_base (14)..(14): a, c, u, g, unknown or other
cagggagcnccuunaaggg

SEQ ID NO: 633445 - RNA, 19 nt, Artificial Sequence
  Description of Artificial Sequence: Synthetic oligonucleotide
gaaaugagugcuauagccc

SEQ ID NO: 633446 - RNA, 19 nt, Artificial Sequence
  Description of Artificial Sequence: Synthetic oligonucleotide
guacucuccacuuucauuc

SEQ ID NO: 633447 - RNA, 19 nt, Artificial Sequence
  Description of Artificial Sequence: Synthetic oligonucleotide
uccguaaaacaguagccag

SEQ ID NO: 633448 - RNA, 19 nt, Artificial Sequence
  Description of Artificial Sequence: Synthetic oligonucleotide
aauacgcauacccacguua

SEQ ID NO: 633449 - RNA, 19 nt, Artificial Sequence
  Description of Artificial Sequence: Synthetic oligonucleotide
ucuagguacacaauauaua

SEQ ID NO: 633450 - RNA, 19 nt, Artificial Sequence
  Description of Artificial Sequence: Synthetic oligonucleotide
  modified_base (11)..(11): a, c, u, g, unknown or other
auggauuuugngcaacaag

SEQ ID NO: 633451 - RNA, 19 nt, Artificial Sequence
  Description of Artificial Sequence: Synthetic oligonucleotide
cuaauauuccccacucagc

SEQ ID NO: 633452 - RNA, 19 nt, Artificial Sequence
  Description of Artificial Sequence: Synthetic oligonucleotide
ugcuauagcccauauggga

SEQ ID NO: 633453 - RNA, 19 nt, Artificial Sequence
  Description of Artificial Sequence: Synthetic oligonucleotide
accgugaaaauguauguca

SEQ ID NO: 633454 - RNA, 19 nt, Artificial Sequence
  Description of Artificial Sequence: Synthetic oligonucleotide
ugggugacuuugcagagcc

SEQ ID NO: 633455 - RNA, 19 nt, Artificial Sequence
  Description of Artificial Sequence: Synthetic oligonucleotide
ggugugaauacgcauaccc

SEQ ID NO: 633456 - RNA, 19 nt, Artificial Sequence
  Description of Artificial Sequence: Synthetic oligonucleotide
uccacggacacacgaagag

SEQ ID NO: 633457 - RNA, 19 nt, Artificial Sequence
  Description of Artificial Sequence: Synthetic oligonucleotide
auguacaguaguuagguua

SEQ ID NO: 633458 - RNA, 19 nt, Artificial Sequence
  Description of Artificial Sequence: Synthetic oligonucleotide
ugagucauggaaagugcgc

SEQ ID NO: 633459 - RNA, 19 nt, Artificial Sequence
  Description of Artificial Sequence: Synthetic oligonucleotide
aguaccgugaaaauguaug

SEQ ID NO: 633460 - RNA, 19 nt, Artificial Sequence
  Description of Artificial Sequence: Synthetic oligonucleotide
aucauuauauacacuuaac

SEQ ID NO: 633461 - RNA, 19 nt, Artificial Sequence
  Description of Artificial Sequence: Synthetic oligonucleotide
guggcgucaaaccaucugg

SEQ ID NO: 633462 - RNA, 19 nt, Artificial Sequence
  Description of Artificial Sequence: Synthetic oligonucleotide
ugugcuugugucaaacagu

SEQ ID NO: 633463 - RNA, 19 nt, Artificial Sequence
  Description of Artificial Sequence: Synthetic oligonucleotide
uuuacagcauccaggcgca

SEQ ID NO: 633464 - RNA, 19 nt, Artificial Sequence
  Description of Artificial Sequence: Synthetic oligonucleotide
gagucauggaaagugcgcg

SEQ ID NO: 633465 - RNA, 19 nt, Artificial Sequence
  Description of Artificial Sequence: Synthetic oligonucleotide
uguagcuauuguuccgccg

SEQ ID NO: 633466 - RNA, 19 nt, Artificial Sequence
  Description of Artificial Sequence: Synthetic oligonucleotide
acagcuacuacugagccca

SEQ ID NO: 633467 - RNA, 19 nt, Artificial Sequence
  Description of Artificial Sequence: Synthetic oligonucleotide
agcguauccagcccacagc

SEQ ID NO: 633468 - RNA, 19 nt, Artificial Sequence
  Description of Artificial Sequence: Synthetic oligonucleotide
guaacugcaccacauuaug

SEQ ID NO: 633469 - RNA, 19 nt, Artificial Sequence
  Description of Artificial Sequence: Synthetic oligonucleotide
cauaugggaagcgacagac

SEQ ID NO: 633470 - RNA, 19 nt, Artificial Sequence
  Description of Artificial Sequence: Synthetic oligonucleotide
uuuuagucauacugugucu

SEQ ID NO: 633471 - RNA, 19 nt, Artificial Sequence
  Description of Artificial Sequence: Synthetic oligonucleotide
cuugcauaacuccaccuug

SEQ ID NO: 633472 - RNA, 19 nt, Artificial Sequence
  Description of Artificial Sequence: Synthetic oligonucleotide
cacaaauauguuccggaag

SEQ ID NO: 633473 - RNA, 19 nt, Artificial Sequence
  Description of Artificial Sequence: Synthetic oligonucleotide
ucuaauuugccugcuauuu

SEQ ID NO: 633474 - RNA, 19 nt, Artificial Sequence
  Description of Artificial Sequence: Synthetic oligonucleotide
  modified_base (4)..(4): a, c, u, g, unknown or other
uugngcaacaagucuuugu

SEQ ID NO: 633475 - RNA, 19 nt, Artificial Sequence
  Description of Artificial Sequence: Synthetic oligonucleotide
uuagaccgucccuacauga

SEQ ID NO: 633476 - RNA, 19 nt, Artificial Sequence
  Description of Artificial Sequence: Synthetic oligonucleotide
gaaagugcgcguccauagg

SEQ ID NO: 633477 - RNA, 19 nt, Artificial Sequence
  Description of Artificial Sequence: Synthetic oligonucleotide
gcucuuaacauuuuaguca

SEQ ID NO: 633478 - RNA, 19 nt, Artificial Sequence
  Description of Artificial Sequence: Synthetic oligonucleotide
  modified_base (2)..(2): a, c, u, g, unknown or other
gngcaacaagucuuuguag

SEQ ID NO: 633479 - RNA, 19 nt, Artificial Sequence
  Description of Artificial Sequence: Synthetic oligonucleotide
cacgaagagccacacaaag

SEQ ID NO: 633480 - RNA, 19 nt, Artificial Sequence
  Description of Artificial Sequence: Synthetic oligonucleotide
gaauaggacacggugucgc

SEQ ID NO: 633481 - RNA, 19 nt, Artificial Sequence
  Description of Artificial Sequence: Synthetic oligonucleotide
ugucucaccgucagaagac

SEQ ID NO: 633482 - RNA, 19 nt, Artificial Sequence
  Description of Artificial Sequence: Synthetic oligonucleotide
uacugugucucaccgucag

SEQ ID NO: 633483 - RNA, 19 nt, Artificial Sequence
  Description of Artificial Sequence: Synthetic oligonucleotide
agagccgugagucauggaa

SEQ ID NO: 633484 - RNA, 19 nt, Artificial Sequence
  Description of Artificial Sequence: Synthetic oligonucleotide
aguuagguuaauucuggaa

SEQ ID NO: 633485 - RNA, 19 nt, Artificial Sequence
  Description of Artificial Sequence: Synthetic oligonucleotide
aaggggcccaauugcauug

SEQ ID NO: 633486 - RNA, 19 nt, Artificial Sequence
  Description of Artificial Sequence: Synthetic oligonucleotide
uuuagucauacugugucuc

SEQ ID NO: 633487 - RNA, 19 nt, Artificial Sequence
  Description of Artificial Sequence: Synthetic oligonucleotide
aauaauccggccacgggga

SEQ ID NO: 633488 - RNA, 19 nt, Artificial Sequence
  Description of Artificial Sequence: Synthetic oligonucleotide
gucgaugugccuucugagg

SEQ ID NO: 633489 - RNA, 19 nt, Artificial Sequence
  Description of Artificial Sequence: Synthetic oligonucleotide
caauaucaguuugauauac

SEQ ID NO: 633490 - RNA, 19 nt, Artificial Sequence
  Description of Artificial Sequence: Synthetic oligonucleotide
uguggcgucaaaccaucug

SEQ ID NO: 633491 - RNA, 19 nt, Artificial Sequence
  Description of Artificial Sequence: Synthetic oligonucleotide
  modified_base (7)..(7): a, c, u, g, unknown or other
auuuugngcaacaagucuu

SEQ ID NO: 633492 - RNA, 19 nt, Artificial Sequence
  Description of Artificial Sequence: Synthetic oligonucleotide
gagaugggugacuuugcag

SEQ ID NO: 633493 - RNA, 19 nt, Artificial Sequence
  Description of Artificial Sequence: Synthetic oligonucleotide
auguguagcuauuguuccg

SEQ ID NO: 633494 - RNA, 19 nt, Artificial Sequence
  Description of Artificial Sequence: Synthetic oligonucleotide
  modified_base (8)..(8): a, c, u, g, unknown or other
gauuuugngcaacaagucu

SEQ ID NO: 633495 - RNA, 19 nt, Artificial Sequence
  Description of Artificial Sequence: Synthetic oligonucleotide
uggcgucaaaccaucuggg

SEQ ID NO: 633496 - RNA, 19 nt, Artificial Sequence
  Description of Artificial Sequence: Synthetic oligonucleotide
ugucgaugugccuucugag

SEQ ID NO: 633497 - RNA, 19 nt, Artificial Sequence
  Description of Artificial Sequence: Synthetic oligonucleotide
acauauggcggcuguguag

SEQ ID NO: 633498 - RNA, 19 nt, Artificial Sequence
  Description of Artificial Sequence: Synthetic oligonucleotide
augaaguaccgugaaaaug

SEQ ID NO: 633499 - RNA, 19 nt, Artificial Sequence
  Description of Artificial Sequence: Synthetic oligonucleotide
ugcgacaagaauuccuccu

SEQ ID NO: 633500 - RNA, 19 nt, Artificial Sequence
  Description of Artificial Sequence: Synthetic oligonucleotide
ucuugcauaacuccaccuu

SEQ ID NO: 633501 - RNA, 19 nt, Artificial Sequence
  Description of Artificial Sequence: Synthetic oligonucleotide
uuagucauacugugucuca

SEQ ID NO: 633502 - RNA, 19 nt, Artificial Sequence
  Description of Artificial Sequence: Synthetic oligonucleotide
  modified_base (6)..(6): a, c, u, g, unknown or other
uuuugngcaacaagucuuu

SEQ ID NO: 633503 - RNA, 19 nt, Artificial Sequence
  Description of Artificial Sequence: Synthetic oligonucleotide
aauaucaguuugauauaca

SEQ ID NO: 633504 - RNA, 19 nt, Artificial Sequence
  Description of Artificial Sequence: Synthetic oligonucleotide
uagagccccgaggagaugg

SEQ ID NO: 633505 - RNA, 19 nt, Artificial Sequence
  Description of Artificial Sequence: Synthetic oligonucleotide
auuaacaaugaaguaccgu

SEQ ID NO: 633506 - RNA, 19 nt, Artificial Sequence
  Description of Artificial Sequence: Synthetic oligonucleotide
ugguauggcagcacacuug

SEQ ID NO: 633507 - RNA, 19 nt, Artificial Sequence
  Description of Artificial Sequence: Synthetic oligonucleotide
acgcauacccacguuagac

SEQ ID NO: 633508 - RNA, 19 nt, Artificial Sequence
  Description of Artificial Sequence: Synthetic oligonucleotide
aggcucuuaacauuuuagu

SEQ ID NO: 633509 - RNA, 19 nt, Artificial Sequence
  Description of Artificial Sequence: Synthetic oligonucleotide
acgcuggugacaaugaaag

SEQ ID NO: 633510 - RNA, 19 nt, Artificial Sequence
  Description of Artificial Sequence: Synthetic oligonucleotide
auuguuccgccgaagcagc

SEQ ID NO: 633511 - RNA, 19 nt, Artificial Sequence
  Description of Artificial Sequence: Synthetic oligonucleotide
ggaccuuaggcuuucauca

SEQ ID NO: 633512 - RNA, 19 nt, Artificial Sequence
  Description of Artificial Sequence: Synthetic oligonucleotide
cauauggcggcuguguagc

SEQ ID NO: 633513 - RNA, 19 nt, Artificial Sequence
  Description of Artificial Sequence: Synthetic oligonucleotide
cacugaauaauccggccac

SEQ ID NO: 633514 - RNA, 19 nt, Artificial Sequence
  Description of Artificial Sequence: Synthetic oligonucleotide
cuguaaguuguccacgcug

SEQ ID NO: 633515 - RNA, 19 nt, Artificial Sequence
  Description of Artificial Sequence: Synthetic oligonucleotide
acccacguuagaccguccc

SEQ ID NO: 633516 - RNA, 19 nt, Artificial Sequence
  Description of Artificial Sequence: Synthetic oligonucleotide
uugcauaacuccaccuugu

SEQ ID NO: 633517 - RNA, 19 nt, Artificial Sequence
  Description of Artificial Sequence: Synthetic oligonucleotide
gaggugugaauacgcauac

SEQ ID NO: 633518 - RNA, 19 nt, Artificial Sequence
  Description of Artificial Sequence: Synthetic oligonucleotide
cauccaggcgcaucaaagc

SEQ ID NO: 633519 - RNA, 19 nt, Artificial Sequence
  Description of Artificial Sequence: Synthetic oligonucleotide
guagcuauuguuccgccga

SEQ ID NO: 633520 - RNA, 19 nt, Artificial Sequence
  Description of Artificial Sequence: Synthetic oligonucleotide
gugaauacgcauacccacg

SEQ ID NO: 633521 - RNA, 19 nt, Artificial Sequence
  Description of Artificial Sequence: Synthetic oligonucleotide
gcauacccacguuagaccg

SEQ ID NO: 633522 - RNA, 19 nt, Artificial Sequence
  Description of Artificial Sequence: Synthetic oligonucleotide
gacgggaaguccaauguug

SEQ ID NO: 633523 - RNA, 19 nt, Artificial Sequence
  Description of Artificial Sequence: Synthetic oligonucleotide
accgucagaagacaauagu

SEQ ID NO: 633524 - RNA, 19 nt, Artificial Sequence
  Description of Artificial Sequence: Synthetic oligonucleotide
ucgucaugaggcuggucgg

SEQ ID NO: 633525 - RNA, 19 nt, Artificial Sequence
  Description of Artificial Sequence: Synthetic oligonucleotide
agagaccugugcaaauccc

SEQ ID NO: 633526 - RNA, 19 nt, Artificial Sequence
  Description of Artificial Sequence: Synthetic oligonucleotide
agaccgucccuacaugaag

SEQ ID NO: 633527 - RNA, 19 nt, Artificial Sequence
  Description of Artificial Sequence: Synthetic oligonucleotide
ggaaagugcgcguccauag

SEQ ID NO: 633528 - RNA, 19 nt, Artificial Sequence
  Description of Artificial Sequence: Synthetic oligonucleotide
accgcugaaaucauuauau

SEQ ID NO: 633529 - RNA, 19 nt, Artificial Sequence
  Description of Artificial Sequence: Synthetic oligonucleotide
gacaaugaaaggccacuga

SEQ ID NO: 633530 - RNA, 19 nt, Artificial Sequence
  Description of Artificial Sequence: Synthetic oligonucleotide
ugccguguccuucuccucc

SEQ ID NO: 633531 - RNA, 19 nt, Artificial Sequence
  Description of Artificial Sequence: Synthetic oligonucleotide
aacuccuccguaaaacagu

SEQ ID NO: 633532 - RNA, 19 nt, Artificial Sequence
  Description of Artificial Sequence: Synthetic oligonucleotide
uuuucuaauuugccugcua

SEQ ID NO: 633533 - RNA, 19 nt, Artificial Sequence
  Description of Artificial Sequence: Synthetic oligonucleotide
uguguggcgucaaaccauc

SEQ ID NO: 633534 - RNA, 19 nt, Artificial Sequence
  Description of Artificial Sequence: Synthetic oligonucleotide
caacaagucuuuguagagc

SEQ ID NO: 633535 - RNA, 19 nt, Artificial Sequence
  Description of Artificial Sequence: Synthetic oligonucleotide
ugacaaugaaaggccacug

SEQ ID NO: 633536 - RNA, 19 nt, Artificial Sequence
  Description of Artificial Sequence: Synthetic oligonucleotide
cugaauaauccggccacgg

SEQ ID NO: 633537 - RNA, 19 nt, Artificial Sequence
  Description of Artificial Sequence: Synthetic oligonucleotide
  modified_base (14)..(14): a, c, u, g, unknown or other
gcguccauaggcunuccgg

SEQ ID NO: 633538 - RNA, 19 nt, Artificial Sequence
  Description of Artificial Sequence: Synthetic oligonucleotide
aacuucuguggccugggua

SEQ ID NO: 633539 - RNA, 19 nt, Artificial Sequence
  Description of Artificial Sequence: Synthetic oligonucleotide
gagcguauccagcccacag

SEQ ID NO: 633540 - RNA, 19 nt, Artificial Sequence
  Description of Artificial Sequence: Synthetic oligonucleotide
ucgcccacgagcuucucgc

SEQ ID NO: 633541 - RNA, 19 nt, Artificial Sequence
  Description of Artificial Sequence: Synthetic oligonucleotide
uagcauguguagcuauugu

SEQ ID NO: 633542 - RNA, 19 nt, Artificial Sequence
  Description of Artificial Sequence: Synthetic oligonucleotide
agccgugagucauggaaag

SEQ ID NO: 633543 - RNA, 19 nt, Artificial Sequence
  Description of Artificial Sequence: Synthetic oligonucleotide
  modified_base (14)..(14): a, c, u, g, unknown or other
uacauggauuuugngcaac

SEQ ID NO: 633544 - RNA, 19 nt, Artificial Sequence
  Description of Artificial Sequence: Synthetic oligonucleotide
cucggcaacugcauugcag

SEQ ID NO: 633545 - RNA, 19 nt, Artificial Sequence
  Description of Artificial Sequence: Synthetic oligonucleotide
gaccuuaggcuuucaucag

SEQ ID NO: 633546 - RNA, 19 nt, Artificial Sequence
  Description of Artificial Sequence: Synthetic oligonucleotide
gcaacaagucuuuguagag

SEQ ID NO: 633547 - RNA, 19 nt, Artificial Sequence
  Description of Artificial Sequence: Synthetic oligonucleotide
ucauccacggacacacgaa

SEQ ID NO: 633548 - RNA, 19 nt, Artificial Sequence
  Description of Artificial Sequence: Synthetic oligonucleotide
cuacaugaagauagccaug

SEQ ID NO: 633549 - RNA, 19 nt, Artificial Sequence
  Description of Artificial Sequence: Synthetic oligonucleotide
cgucccuacaugaagauag

SEQ ID NO: 633550 - RNA, 19 nt, Artificial Sequence
  Description of Artificial Sequence: Synthetic oligonucleotide
gauccgccagcuccgaggc

SEQ ID NO: 633551 - RNA, 19 nt, Artificial Sequence
  Description of Artificial Sequence: Synthetic oligonucleotide
auaugggaagcgacagacc

SEQ ID NO: 633552 - RNA, 19 nt, Artificial Sequence
  Description of Artificial Sequence: Synthetic oligonucleotide
ggcucuuaacauuuuaguc

SEQ ID NO: 633553 - RNA, 19 nt, Artificial Sequence
  Description of Artificial Sequence: Synthetic oligonucleotide
auaauccggccacggggac

SEQ ID NO: 633554 - RNA, 19 nt, Artificial Sequence
  Description of Artificial Sequence: Synthetic oligonucleotide
ugccucggcaacugcauug

SEQ ID NO: 633555 - RNA, 19 nt, Artificial Sequence
  Description of Artificial Sequence: Synthetic oligonucleotide
uaguuagguuaauucugga

SEQ ID NO: 633556 - RNA, 19 nt, Artificial Sequence
  Description of Artificial Sequence: Synthetic oligonucleotide
caaauauguuccggaagag

SEQ ID NO: 633557 - RNA, 19 nt, Artificial Sequence
  Description of Artificial Sequence: Synthetic oligonucleotide
uugcgacaagaauuccucc

SEQ ID NO: 633558 - RNA, 19 nt, Artificial Sequence
  Description of Artificial Sequence: Synthetic oligonucleotide
auacgcauacccacguuag

SEQ ID NO: 633559 - RNA, 19 nt, Artificial Sequence
  Description of Artificial Sequence: Synthetic oligonucleotide
acugaauaauccggccacg

SEQ ID NO: 633560 - RNA, 19 nt, Artificial Sequence
  Description of Artificial Sequence: Synthetic oligonucleotide
gcuauuguuccgccgaagc

SEQ ID NO: 633561 - RNA, 19 nt, Artificial Sequence
  Description of Artificial Sequence: Synthetic oligonucleotide
ggggacagcgcugucaucg

SEQ ID NO: 633562 - RNA, 19 nt, Artificial Sequence
  Description of Artificial Sequence: Synthetic oligonucleotide
uagcugucauagcggagcc

SEQ ID NO: 633563 - RNA, 19 nt, Artificial Sequence
  Description of Artificial Sequence: Synthetic oligonucleotide
auacccacguuagaccguc

SEQ ID NO: 633564 - RNA, 19 nt, Artificial Sequence
  Description of Artificial Sequence: Synthetic oligonucleotide
auguaguguuuaauucuac

SEQ ID NO: 633565 - RNA, 19 nt, Artificial Sequence
  Description of Artificial Sequence: Synthetic oligonucleotide
agccucauuucuacgcccc

SEQ ID NO: 633566 - RNA, 19 nt, Artificial Sequence
  Description of Artificial Sequence: Synthetic oligonucleotide
aggaggaccucacauguuu

SEQ ID NO: 633567 - RNA, 19 nt, Artificial Sequence
  Description of Artificial Sequence: Synthetic oligonucleotide
acgggaaguccaauguugg

SEQ ID NO: 633568 - RNA, 19 nt, Artificial Sequence
  Description of Artificial Sequence: Synthetic oligonucleotide
  modified_base (5)..(5): a, c, u, g, unknown or other
uuugngcaacaagucuuug

SEQ ID NO: 633569 - RNA, 19 nt, Artificial Sequence
  Description of Artificial Sequence: Synthetic oligonucleotide
gugucucaccgucagaaga

SEQ ID NO: 633570 - RNA, 19 nt, Artificial Sequence
  Description of Artificial Sequence: Synthetic oligonucleotide
guagcauguguagcuauug

SEQ ID NO: 633571 - RNA, 19 nt, Artificial Sequence
  Description of Artificial Sequence: Synthetic oligonucleotide
ugacuuugcagagccguga

SEQ ID NO: 633572 - RNA, 19 nt, Artificial Sequence
  Description of Artificial Sequence: Synthetic oligonucleotide
agugagguccuuccccaug

SEQ ID NO: 633573 - RNA, 19 nt, Artificial Sequence
  Description of Artificial Sequence: Synthetic oligonucleotide
gggaaguccaauguuggag

SEQ ID NO: 633574 - RNA, 19 nt, Artificial Sequence
  Description of Artificial Sequence: Synthetic oligonucleotide
agucauggaaagugcgcgu

SEQ ID NO: 633575 - RNA, 19 nt, Artificial Sequence
  Description of Artificial Sequence: Synthetic oligonucleotide
guuagaccgucccuacaug

SEQ ID NO: 633576 - RNA, 19 nt, Artificial Sequence
  Description of Artificial Sequence: Synthetic oligonucleotide
guuugauauacacuacuau

SEQ ID NO: 633577 - RNA, 19 nt, Artificial Sequence
  Description of Artificial Sequence: Synthetic oligonucleotide
ucccuacaugaagauagcc

SEQ ID NO: 633578 - RNA, 19 nt, Artificial Sequence
  Description of Artificial Sequence: Synthetic oligonucleotide
aguuugauauacacuacua

SEQ ID NO: 633579 - RNA, 19 nt, Artificial Sequence
  Description of Artificial Sequence: Synthetic oligonucleotide
auguuggaggcaaucacca

SEQ ID NO: 633580 - RNA, 19 nt, Artificial Sequence
  Description of Artificial Sequence: Synthetic oligonucleotide
accuuaggcuuucaucaga

SEQ ID NO: 633581 - RNA, 19 nt, Artificial Sequence
  Description of Artificial Sequence: Synthetic oligonucleotide
uagaccgucccuacaugaa

SEQ ID NO: 633582 - RNA, 19 nt, Artificial Sequence
  Description of Artificial Sequence: Synthetic oligonucleotide
gugcuauagcccauauggg

SEQ ID NO: 633583 - RNA, 19 nt, Artificial Sequence
  Description of Artificial Sequence: Synthetic oligonucleotide
uacgcauacccacguuaga

SEQ ID NO: 633584 - RNA, 19 nt, Artificial Sequence
  Description of Artificial Sequence: Synthetic oligonucleotide
ccgucagaagacaauagug

SEQ ID NO: 633585 - RNA, 19 nt, Artificial Sequence
  Description of Artificial Sequence: Synthetic oligonucleotide
accuugcaguguguggugc

SEQ ID NO: 633586 - RNA, 19 nt, Artificial Sequence
  Description of Artificial Sequence: Synthetic oligonucleotide
uaccgugaaaauguauguc

SEQ ID NO: 633587 - RNA, 19 nt, Artificial Sequence
  Description of Artificial Sequence: Synthetic oligonucleotide
guguuuaauucuacacccc

SEQ ID NO: 633588 - RNA, 19 nt, Artificial Sequence
  Description of Artificial Sequence: Synthetic oligonucleotide
guucauauaucagccacaa

SEQ ID NO: 633589 - RNA, 19 nt, Artificial Sequence
  Description of Artificial Sequence: Synthetic oligonucleotide
uccaauguuggaggcaauc

SEQ ID NO: 633590 - RNA, 19 nt, Artificial Sequence
  Description of Artificial Sequence: Synthetic oligonucleotide
cagaagugcgugacagagc

SEQ ID NO: 633591 - RNA, 19 nt, Artificial Sequence
  Description of Artificial Sequence: Synthetic oligonucleotide
ggaccucacauguuuacac

SEQ ID NO: 633592 - RNA, 19 nt, Artificial Sequence
  Description of Artificial Sequence: Synthetic oligonucleotide
ccuccguaaaacaguagcc

SEQ ID NO: 633593 - RNA, 19 nt, Artificial Sequence
  Description of Artificial Sequence: Synthetic oligonucleotide
agcccauaugggaagcgac

SEQ ID NO: 633594 - RNA, 19 nt, Artificial Sequence
  Description of Artificial Sequence: Synthetic oligonucleotide
aaguccaauguuggaggca

SEQ ID NO: 633595 - RNA, 19 nt, Artificial Sequence
  Description of Artificial Sequence: Synthetic oligonucleotide
uucauauaucagccacaaa

SEQ ID NO: 633596 - RNA, 19 nt, Artificial Sequence
  Description of Artificial Sequence: Synthetic oligonucleotide
uguuugcgacaagaauucc

SEQ ID NO: 633597 - RNA, 19 nt, Artificial Sequence
  Description of Artificial Sequence: Synthetic oligonucleotide
cacggugaaggcagaggcc

SEQ ID NO: 633598 - RNA, 19 nt, Artificial Sequence
  Description of Artificial Sequence: Synthetic oligonucleotide
cuaccaggaccugguaugg

SEQ ID NO: 633599 - RNA, 19 nt, Artificial Sequence
  Description of Artificial Sequence: Synthetic oligonucleotide
cgcugaaaucauuauauac

SEQ ID NO: 633600 - RNA, 19 nt, Artificial Sequence
  Description of Artificial Sequence: Synthetic oligonucleotide
  modified_base (8)..(8): a, c, u, g, unknown or other
  modified_base (13)..(13): a, c, u, g, unknown or other
agggagcnccuunaagggg

SEQ ID NO: 633601 - RNA, 19 nt, Artificial Sequence
  Description of Artificial Sequence: Synthetic oligonucleotide
ugagugcuauagcccauau

SEQ ID NO: 633602 - RNA, 19 nt, Artificial Sequence
  Description of Artificial Sequence: Synthetic oligonucleotide
ugcauaacuccaccuuguu

SEQ ID NO: 633603 - RNA, 19 nt, Artificial Sequence
  Description of Artificial Sequence: Synthetic oligonucleotide
cuccguaaaacaguagcca

SEQ ID NO: 633604 - RNA, 19 nt, Artificial Sequence
  Description of Artificial Sequence: Synthetic oligonucleotide
  modified_base (9)..(9): a, c, u, g, unknown or other
ggauuuugngcaacaaguc

SEQ ID NO: 633605 - RNA, 19 nt, Artificial Sequence
  Description of Artificial Sequence: Synthetic oligonucleotide
auacacuacuauguacagu

SEQ ID NO: 633606 - RNA, 19 nt, Artificial Sequence
  Description of Artificial Sequence: Synthetic oligonucleotide
gagaccugugcaaauccca

SEQ ID NO: 633607 - RNA, 19 nt, Artificial Sequence
  Description of Artificial Sequence: Synthetic oligonucleotide
gacucgauauguauguagu

SEQ ID NO: 633608 - RNA, 19 nt, Artificial Sequence
  Description of Artificial Sequence: Synthetic oligonucleotide
uaugugggaggggugugcu

SEQ ID NO: 633609 - RNA, 19 nt, Artificial Sequence
  Description of Artificial Sequence: Synthetic oligonucleotide
ggaggcaaucaccacggug

SEQ ID NO: 633610 - RNA, 19 nt, Artificial Sequence
  Description of Artificial Sequence: Synthetic oligonucleotide
aagccuaccaggaccuggu

SEQ ID NO: 633611 - RNA, 19 nt, Artificial Sequence
  Description of Artificial Sequence: Synthetic oligonucleotide
cagccucauuucuacgccc

SEQ ID NO: 633612 - RNA, 19 nt, Artificial Sequence
  Description of Artificial Sequence: Synthetic oligonucleotide
guccccucuaauauucccc

SEQ ID NO: 633613 - RNA, 19 nt, Artificial Sequence
  Description of Artificial Sequence: Synthetic oligonucleotide
aagugcgcguccauaggcu

SEQ ID NO: 633614 - RNA, 19 nt, Artificial Sequence
  Description of Artificial Sequence: Synthetic oligonucleotide
guaccgugaaaauguaugu

SEQ ID NO: 633615 - RNA, 19 nt, Artificial Sequence
  Description of Artificial Sequence: Synthetic oligonucleotide
cacguuagaccgucccuac

SEQ ID NO: 633616 - RNA, 19 nt, Artificial Sequence
  Description of Artificial Sequence: Synthetic oligonucleotide
gccacaaauauguuccgga

SEQ ID NO: 633617 - RNA, 19 nt, Artificial Sequence
  Description of Artificial Sequence: Synthetic oligonucleotide
agcgcugucaucgcuggcu

SEQ ID NO: 633618 - RNA, 19 nt, Artificial Sequence
  Description of Artificial Sequence: Synthetic oligonucleotide
gacacacgaagagccacac

SEQ ID NO: 633619 - RNA, 19 nt, Artificial Sequence
  Description of Artificial Sequence: Synthetic oligonucleotide
aaguaccgugaaaauguau

SEQ ID NO: 633620 - RNA, 19 nt, Artificial Sequence
  Description of Artificial Sequence: Synthetic oligonucleotide
gugugaauacgcauaccca

SEQ ID NO: 633621 - RNA, 19 nt, Artificial Sequence
  Description of Artificial Sequence: Synthetic oligonucleotide
cugucgaugugccuucuga

SEQ ID NO: 633622 - RNA, 19 nt, Artificial Sequence
  Description of Artificial Sequence: Synthetic oligonucleotide
agcgcucuccuuuucuaau

SEQ ID NO: 633623 - RNA, 19 nt, Artificial Sequence
  Description of Artificial Sequence: Synthetic oligonucleotide
cauuuuagucauacugugu

SEQ ID NO: 633624 - RNA, 19 nt, Artificial Sequence
  Description of Artificial Sequence: Synthetic oligonucleotide
gucgcccacgagcuucucg

SEQ ID NO: 633625 - RNA, 19 nt, Artificial Sequence
  Description of Artificial Sequence: Synthetic oligonucleotide
uagcccauaugggaagcga

SEQ ID NO: 633626 - RNA, 19 nt, Artificial Sequence
  Description of Artificial Sequence: Synthetic oligonucleotide
acgaagagccacacaaaga

SEQ ID NO: 633627 - RNA, 19 nt, Artificial Sequence
  Description of Artificial Sequence: Synthetic oligonucleotide
uagcuauuguuccgccgaa

SEQ ID NO: 633628 - RNA, 19 nt, Artificial Sequence
  Description of Artificial Sequence: Synthetic oligonucleotide
agccagacugggguggcgg

SEQ ID NO: 633629 - RNA, 19 nt, Artificial Sequence
  Description of Artificial Sequence: Synthetic oligonucleotide
ugguucccugucgaugugc

SEQ ID NO: 633630 - RNA, 19 nt, Artificial Sequence
  Description of Artificial Sequence: Synthetic oligonucleotide
gaccgucccuacaugaaga

SEQ ID NO: 633631 - RNA, 19 nt, Artificial Sequence
  Description of Artificial Sequence: Synthetic oligonucleotide
auguuccggaagaggugcc

SEQ ID NO: 633632 - RNA, 19 nt, Artificial Sequence
  Description of Artificial Sequence: Synthetic oligonucleotide
cucuaauauuccccacuca

SEQ ID NO: 633633 - RNA, 19 nt, Artificial Sequence
  Description of Artificial Sequence: Synthetic oligonucleotide
acacuacuauguacaguag

SEQ ID NO: 633634 - RNA, 19 nt, Artificial Sequence
  Description of Artificial Sequence: Synthetic oligonucleotide
cacgcuggugacaaugaaa

SEQ ID NO: 633635 - RNA, 19 nt, Artificial Sequence
  Description of Artificial Sequence: Synthetic oligonucleotide
cacgccaaaggaaaugagu

SEQ ID NO: 633636 - RNA, 19 nt, Artificial Sequence
  Description of Artificial Sequence: Synthetic oligonucleotide
cugugucucaccgucagaa

SEQ ID NO: 633637 - RNA, 19 nt, Artificial Sequence
  Description of Artificial Sequence: Synthetic oligonucleotide
cguaaaacaguagccagac

SEQ ID NO: 633638 - RNA, 19 nt, Artificial Sequence
  Description of Artificial Sequence: Synthetic oligonucleotide
agagcgcucuccuuuucua

SEQ ID NO: 633639 - RNA, 19 nt, Artificial Sequence
  Description of Artificial Sequence: Synthetic oligonucleotide
agcuauuguuccgccgaag

SEQ ID NO: 633640 - RNA, 19 nt, Artificial Sequence
  Description of Artificial Sequence: Synthetic oligonucleotide
ccucuaauauuccccacuc

SEQ ID NO: 633641 - RNA, 19 nt, Artificial Sequence
  Description of Artificial Sequence: Synthetic oligonucleotide
gcgcaucaaagccucacug

SEQ ID NO: 633642 - RNA, 19 nt, Artificial Sequence
  Description of Artificial Sequence: Synthetic oligonucleotide
  modified_base (19)..(19): a, c, u, g, unknown or other
agugcgcguccauaggcun

SEQ ID NO: 633643 - RNA, 19 nt, Artificial Sequence
  Description of Artificial Sequence: Synthetic oligonucleotide
gaagacaauaguggcucua

SEQ ID NO: 633644 - RNA, 19 nt, Artificial Sequence
  Description of Artificial Sequence: Synthetic oligonucleotide
cccuacaugaagauagcca

SEQ ID NO: 633645 - RNA, 19 nt, Artificial Sequence
  Description of Artificial Sequence: Synthetic oligonucleotide
gcuucaauguuugcgacaa

SEQ ID NO: 633646 - RNA, 19 nt, Artificial Sequence
  Description of Artificial Sequence: Synthetic oligonucleotide
caauguuugcgacaagaau

SEQ ID NO: 633647 - RNA, 19 nt, Artificial Sequence
  Description of Artificial Sequence: Synthetic oligonucleotide
agccacgccaaaggaaaug

SEQ ID NO: 633648 - RNA, 19 nt, Artificial Sequence
  Description of Artificial Sequence: Synthetic oligonucleotide
cgugagucauggaaagugc

SEQ ID NO: 633649 - RNA, 19 nt, Artificial Sequence
  Description of Artificial Sequence: Synthetic oligonucleotide
guuugcgacaagaauuccu

SEQ ID NO: 633650 - RNA, 19 nt, Artificial Sequence
  Description of Artificial Sequence: Synthetic oligonucleotide
ggaauuggacucgauaugu

SEQ ID NO: 633651 - RNA, 19 nt, Artificial Sequence
  Description of Artificial Sequence: Synthetic oligonucleotide
uaauccggccacggggaca

SEQ ID NO: 633652 - RNA, 19 nt, Artificial Sequence
  Description of Artificial Sequence: Synthetic oligonucleotide
cuccuccguaaaacaguag

SEQ ID NO: 633653 - RNA, 19 nt, Artificial Sequence
  Description of Artificial Sequence: Synthetic oligonucleotide
uggugcugacgggaagucc

SEQ ID NO: 633654 - RNA, 19 nt, Artificial Sequence
  Description of Artificial Sequence: Synthetic oligonucleotide
gcauaacuccaccuuguuc

SEQ ID NO: 633655 - RNA, 19 nt, Artificial Sequence
  Description of Artificial Sequence: Synthetic oligonucleotide
cuacuauguacaguaguua

SEQ ID NO: 633656 - RNA, 19 nt, Artificial Sequence
  Description of Artificial Sequence: Synthetic oligonucleotide
guuucaggcucuuaacauu

SEQ ID NO: 633657 - RNA, 19 nt, Artificial Sequence
  Description of Artificial Sequence: Synthetic oligonucleotide
cacuacuauguacaguagu

SEQ ID NO: 633658 - RNA, 19 nt, Artificial Sequence
  Description of Artificial Sequence: Synthetic oligonucleotide
accgucccuacaugaagau

SEQ ID NO: 633659 - RNA, 19 nt, Artificial Sequence
  Description of Artificial Sequence: Synthetic oligonucleotide
acguuagaccgucccuaca

SEQ ID NO: 633660 - RNA, 19 nt, Artificial Sequence
  Description of Artificial Sequence: Synthetic oligonucleotide
acugugucucaccgucaga

SEQ ID NO: 633661 - RNA, 19 nt, Artificial Sequence
  Description of Artificial Sequence: Synthetic oligonucleotide
cagucggguugggugaggg

SEQ ID NO: 633662 - RNA, 19 nt, Artificial Sequence
  Description of Artificial Sequence: Synthetic oligonucleotide
ggugacaaugaaaggccac

SEQ ID NO: 633663 - RNA, 19 nt, Artificial Sequence
  Description of Artificial Sequence: Synthetic oligonucleotide
ggggucgucaugaggcugg

SEQ ID NO: 633664 - RNA, 19 nt, Artificial Sequence
  Description of Artificial Sequence: Synthetic oligonucleotide
ggcgguacucuccacuuuc

SEQ ID NO: 633665 - RNA, 19 nt, Artificial Sequence
  Description of Artificial Sequence: Synthetic oligonucleotide
ccgugagucauggaaagug

SEQ ID NO: 633666 - RNA, 19 nt, Artificial Sequence
  Description of Artificial Sequence: Synthetic oligonucleotide
  modified_base (15)..(15): a, c, u, g, unknown or other
cuacauggauuuugngcaa

SEQ ID NO: 633667 - RNA, 19 nt, Artificial Sequence
  Description of Artificial Sequence: Synthetic oligonucleotide
ugcgugacagagcgcucuc

SEQ ID NO: 633668 - RNA, 19 nt, Artificial Sequence
  Description of Artificial Sequence: Synthetic oligonucleotide
ugcauuccaggcgguacuc

SEQ ID NO: 633669 - RNA, 19 nt, Artificial Sequence
  Description of Artificial Sequence: Synthetic oligonucleotide
gaauuggacucgauaugua

SEQ ID NO: 633670 - RNA, 19 nt, Artificial Sequence
  Description of Artificial Sequence: Synthetic oligonucleotide
gugacaaugaaaggccacu

SEQ ID NO: 633671 - RNA, 19 nt, Artificial Sequence
  Description of Artificial Sequence: Synthetic oligonucleotide
uauggcggcuguguagcau

SEQ ID NO: 633672 - RNA, 19 nt, Artificial Sequence
  Description of Artificial Sequence: Synthetic oligonucleotide
gaaguaccgugaaaaugua

SEQ ID NO: 633673 - RNA, 19 nt, Artificial Sequence
  Description of Artificial Sequence: Synthetic oligonucleotide
gagcgcucuccuuuucuaa

SEQ ID NO: 633674 - RNA, 19 nt, Artificial Sequence
  Description of Artificial Sequence: Synthetic oligonucleotide
auauggcggcuguguagca

SEQ ID NO: 633675 - RNA, 19 nt, Artificial Sequence
  Description of Artificial Sequence: Synthetic oligonucleotide
acggugucgcccacgagcu

SEQ ID NO: 633676 - RNA, 19 nt, Artificial Sequence
  Description of Artificial Sequence: Synthetic oligonucleotide
ccuacaugaagauagccau

SEQ ID NO: 633677 - RNA, 19 nt, Artificial Sequence
  Description of Artificial Sequence: Synthetic oligonucleotide
gucccuacaugaagauagc

SEQ ID NO: 633678 - RNA, 19 nt, Artificial Sequence
  Description of Artificial Sequence: Synthetic oligonucleotide
cauggaaagugcgcgucca

SEQ ID NO: 633679 - RNA, 19 nt, Artificial Sequence
  Description of Artificial Sequence: Synthetic oligonucleotide
ggugguucccugucgaugu

SEQ ID NO: 633680 - RNA, 19 nt, Artificial Sequence
  Description of Artificial Sequence: Synthetic oligonucleotide
agccuuccgagagcguauc

SEQ ID NO: 633681 - RNA, 19 nt, Artificial Sequence
  Description of Artificial Sequence: Synthetic oligonucleotide
auggaaagugcgcguccau

SEQ ID NO: 633682 - RNA, 19 nt, Artificial Sequence
  Description of Artificial Sequence: Synthetic oligonucleotide
acuccuccguaaaacagua

SEQ ID NO: 633683 - RNA, 19 nt, Artificial Sequence
  Description of Artificial Sequence: Synthetic oligonucleotide
  modified_base (12)..(12): a, c, u, g, unknown or other
cauggauuuugngcaacaa

SEQ ID NO: 633684 - RNA, 19 nt, Artificial Sequence
  Description of Artificial Sequence: Synthetic oligonucleotide
cgcauacccacguuagacc

SEQ ID NO: 633685 - RNA, 19 nt, Artificial Sequence
  Description of Artificial Sequence: Synthetic oligonucleotide
cccauaugggaagcgacag

SEQ ID NO: 633686 - RNA, 19 nt, Artificial Sequence
  Description of Artificial Sequence: Synthetic oligonucleotide
ggcuucaauguuugcgaca

SEQ ID NO: 633687 - RNA, 19 nt, Artificial Sequence
  Description of Artificial Sequence: Synthetic oligonucleotide
gcuacauauucuagguaca

SEQ ID NO: 633688 - RNA, 19 nt, Artificial Sequence
  Description of Artificial Sequence: Synthetic oligonucleotide
gcagagccgugagucaugg

SEQ ID NO: 633689 - RNA, 19 nt, Artificial Sequence
  Description of Artificial Sequence: Synthetic oligonucleotide
guggaccucugccgugucc

SEQ ID NO: 633690 - RNA, 19 nt, Artificial Sequence
  Description of Artificial Sequence: Synthetic oligonucleotide
ccuuucaggcuacaggcca

SEQ ID NO: 633691 - RNA, 19 nt, Artificial Sequence
  Description of Artificial Sequence: Synthetic oligonucleotide
gguucccugucgaugugcc

SEQ ID NO: 633692 - RNA, 19 nt, Artificial Sequence
  Description of Artificial Sequence: Synthetic oligonucleotide
uggaggcaaucaccacggu

SEQ ID NO: 633693 - RNA, 19 nt, Artificial Sequence
  Description of Artificial Sequence: Synthetic oligonucleotide
  modified_base (17)..(17): a, c, u, g, unknown or other
ugcgcguccauaggcunuc

SEQ ID NO: 633694 - RNA, 19 nt, Artificial Sequence
  Description of Artificial Sequence: Synthetic oligonucleotide
uagccagacugggguggcg

SEQ ID NO: 633695 - RNA, 19 nt, Artificial Sequence
  Description of Artificial Sequence: Synthetic oligonucleotide
uugccaccgcugaaaucau

SEQ ID NO: 633696 - RNA, 19 nt, Artificial Sequence
  Description of Artificial Sequence: Synthetic oligonucleotide
uggacucgauauguaugua

SEQ ID NO: 633697 - RNA, 19 nt, Artificial Sequence
  Description of Artificial Sequence: Synthetic oligonucleotide
guagccagacugggguggc

SEQ ID NO: 633698 - RNA, 19 nt, Artificial Sequence
  Description of Artificial Sequence: Synthetic oligonucleotide
caccgcugaaaucauuaua

SEQ ID NO: 633699 - RNA, 19 nt, Artificial Sequence
  Description of Artificial Sequence: Synthetic oligonucleotide
ggagaggugugaauacgca

SEQ ID NO: 633700 - RNA, 19 nt, Artificial Sequence
  Description of Artificial Sequence: Synthetic oligonucleotide
ggugacuuugcagagccgu

SEQ ID NO: 633701 - RNA, 19 nt, Artificial Sequence
  Description of Artificial Sequence: Synthetic oligonucleotide
augagugcuauagcccaua

SEQ ID NO: 633702 - RNA, 19 nt, Artificial Sequence
  Description of Artificial Sequence: Synthetic oligonucleotide
ccuggguaagcagugugug

SEQ ID NO: 633703 - RNA, 19 nt, Artificial Sequence
  Description of Artificial Sequence: Synthetic oligonucleotide
acacuggaauuggacucga

SEQ ID NO: 633704 - RNA, 19 nt, Artificial Sequence
  Description of Artificial Sequence: Synthetic oligonucleotide
gcccaauugcauugcuuac

SEQ ID NO: 633705 - RNA, 19 nt, Artificial Sequence
  Description of Artificial Sequence: Synthetic oligonucleotide
cucagcccugaguuuuaca

SEQ ID NO: 633706 - RNA, 19 nt, Artificial Sequence
  Description of Artificial Sequence: Synthetic oligonucleotide
cacauauggcggcugugua

SEQ ID NO: 633707 - RNA, 19 nt, Artificial Sequence
  Description of Artificial Sequence: Synthetic oligonucleotide
ggcggcuucuugcauaacu

SEQ ID NO: 633708 - RNA, 19 nt, Artificial Sequence
  Description of Artificial Sequence: Synthetic oligonucleotide
agagcguauccagcccaca

SEQ ID NO: 633709 - RNA, 19 nt, Artificial Sequence
  Description of Artificial Sequence: Synthetic oligonucleotide
gcguauccagcccacagcu

SEQ ID NO: 633710 - RNA, 19 nt, Artificial Sequence
  Description of Artificial Sequence: Synthetic oligonucleotide
gccacgccaaaggaaauga

SEQ ID NO: 633711 - RNA, 19 nt, Artificial Sequence
  Description of Artificial Sequence: Synthetic oligonucleotide
gucacgaaccaggccacaa

SEQ ID NO: 633712 - RNA, 19 nt, Artificial Sequence
  Description of Artificial Sequence: Synthetic oligonucleotide
acgaaccaggccacaaaua

SEQ ID NO: 633713 - RNA, 19 nt, Artificial Sequence
  Description of Artificial Sequence: Synthetic oligonucleotide
ggaaaagcagguggaccuc

SEQ ID NO: 633714 - RNA, 19 nt, Artificial Sequence
  Description of Artificial Sequence: Synthetic oligonucleotide
acggacacacgaagagcca

SEQ ID NO: 633715 - RNA, 19 nt, Artificial Sequence
  Description of Artificial Sequence: Synthetic oligonucleotide
cugcaccacauuaugucau

SEQ ID NO: 633716 - RNA, 19 nt, Artificial Sequence
  Description of Artificial Sequence: Synthetic oligonucleotide
agcuuuuccucagggccuu

SEQ ID NO: 633717 - RNA, 19 nt, Artificial Sequence
  Description of Artificial Sequence: Synthetic oligonucleotide
ugccaccgcugaaaucauu

SEQ ID NO: 633718 - RNA, 19 nt, Artificial Sequence
  Description of Artificial Sequence: Synthetic oligonucleotide
gacagagcgcucuccuuuu

SEQ ID NO: 633719 - RNA, 19 nt, Artificial Sequence
  Description of Artificial Sequence: Synthetic oligonucleotide
gcgacagacccagcacugg

SEQ ID NO: 633720 - RNA, 19 nt, Artificial Sequence
  Description of Artificial Sequence: Synthetic oligonucleotide
gccucggcaacugcauugc

SEQ ID NO: 633721 - RNA, 19 nt, Artificial Sequence
  Description of Artificial Sequence: Synthetic oligonucleotide
augcacuggcaugccacau

SEQ ID NO: 633722 - RNA, 19 nt, Artificial Sequence
  Description of Artificial Sequence: Synthetic oligonucleotide
ggacacacgaagagccaca

SEQ ID NO: 633723 - RNA, 19 nt, Artificial Sequence
  Description of Artificial Sequence: Synthetic oligonucleotide
ggcaaacagcagccacgcc

SEQ ID NO: 633724 - RNA, 19 nt, Artificial Sequence
  Description of Artificial Sequence: Synthetic oligonucleotide
cauacccacguuagaccgu

SEQ ID NO: 633725 - RNA, 19 nt, Artificial Sequence
  Description of Artificial Sequence: Synthetic oligonucleotide
cugccguguccuucuccuc

SEQ ID NO: 633726 - RNA, 19 nt, Artificial Sequence
  Description of Artificial Sequence: Synthetic oligonucleotide
gccaccgcugaaaucauua

SEQ ID NO: 633727 - RNA, 19 nt, Artificial Sequence
  Description of Artificial Sequence: Synthetic oligonucleotide
gcccauaugggaagcgaca

SEQ ID NO: 633728 - RNA, 19 nt, Artificial Sequence
  Description of Artificial Sequence: Synthetic oligonucleotide
gugauuggagugagguccu

SEQ ID NO: 633729 - RNA, 19 nt, Artificial Sequence
  Description of Artificial Sequence: Synthetic oligonucleotide
gcaaggagggacacuggaa

SEQ ID NO: 633730 - RNA, 19 nt, Artificial Sequence
  Description of Artificial Sequence: Synthetic oligonucleotide
gccuuccgagagcguaucc

SEQ ID NO: 633731 - RNA, 19 nt, Artificial Sequence
  Description of Artificial Sequence: Synthetic oligonucleotide
agccuaccaggaccuggua

SEQ ID NO: 633732 - RNA, 19 nt, Artificial Sequence
  Description of Artificial Sequence: Synthetic oligonucleotide
cagcgcugucaucgcuggc

SEQ ID NO: 633733 - RNA, 19 nt, Artificial Sequence
  Description of Artificial Sequence: Synthetic oligonucleotide
ccuuccgagagcguaucca

SEQ ID NO: 633734 - RNA, 19 nt, Artificial Sequence
  Description of Artificial Sequence: Synthetic oligonucleotide
guggggucgucaugaggcu

SEQ ID NO: 633735 - RNA, 19 nt, Artificial Sequence
  Description of Artificial Sequence: Synthetic oligonucleotide
ggcgcaucaaagccucacu

SEQ ID NO: 633736 - RNA, 19 nt, Artificial Sequence
  Description of Artificial Sequence: Synthetic oligonucleotide
cgucaugaggcuggucggg

SEQ ID NO: 633737 - RNA, 19 nt, Artificial Sequence
  Description of Artificial Sequence: Synthetic oligonucleotide
ggcucuacaggaggaccuc

SEQ ID NO: 633738 - RNA, 19 nt, Artificial Sequence
  Description of Artificial Sequence: Synthetic oligonucleotide
  modified_base (12)..(12): a, c, u, g, unknown or other
  modified_base (17)..(17): a, c, u, g, unknown or other
caccagggagcnccuunaa

SEQ ID NO: 633739 - RNA, 19 nt, Artificial Sequence
  Description of Artificial Sequence: Synthetic oligonucleotide
gccacauauggcggcugug

SEQ ID NO: 633740 - RNA, 19 nt, Artificial Sequence
  Description of Artificial Sequence: Synthetic oligonucleotide
cacuugccaccgcugaaau

SEQ ID NO: 633741 - RNA, 19 nt, Artificial Sequence
  Description of Artificial Sequence: Synthetic oligonucleotide
ccugucgaugugccuucug

SEQ ID NO: 633742 - RNA, 19 nt, Artificial Sequence
  Description of Artificial Sequence: Synthetic oligonucleotide
  modified_base (15)..(15): a, c, u, g, unknown or other
cgcguccauaggcunuccg

SEQ ID NO: 633743 - RNA, 19 nt, Artificial Sequence
  Description of Artificial Sequence: Synthetic oligonucleotide
cggacacacgaagagccac

SEQ ID NO: 633744 - RNA, 19 nt, Artificial Sequence
  Description of Artificial Sequence: Synthetic oligonucleotide
caguguccccucuaauauu

SEQ ID NO: 633745 - RNA, 19 nt, Artificial Sequence
  Description of Artificial Sequence: Synthetic oligonucleotide
gcgugacagagcgcucucc

SEQ ID NO: 633746 - RNA, 19 nt, Artificial Sequence
  Description of Artificial Sequence: Synthetic oligonucleotide
cuggaccuuaggcuuucau

SEQ ID NO: 633747 - RNA, 19 nt, Artificial Sequence
  Description of Artificial Sequence: Synthetic oligonucleotide
cagagccgugagucaugga

SEQ ID NO: 633748 - RNA, 19 nt, Artificial Sequence
  Description of Artificial Sequence: Synthetic oligonucleotide
caggcgcaucaaagccuca

SEQ ID NO: 633749 - RNA, 19 nt, Artificial Sequence
  Description of Artificial Sequence: Synthetic oligonucleotide
cagccuuccgagagcguau

SEQ ID NO: 633750 - RNA, 19 nt, Artificial Sequence
  Description of Artificial Sequence: Synthetic oligonucleotide
ccacguuagaccgucccua

SEQ ID NO: 633751 - RNA, 19 nt, Artificial Sequence
  Description of Artificial Sequence: Synthetic oligonucleotide
uggcggcuucuugcauaac

SEQ ID NO: 633752 - RNA, 19 nt, Artificial Sequence
  Description of Artificial Sequence: Synthetic oligonucleotide
cguuagaccgucccuacau

SEQ ID NO: 633753 - RNA, 19 nt, Artificial Sequence
  Description of Artificial Sequence: Synthetic oligonucleotide
guacaguaguuagguuaau

SEQ ID NO: 633754 - RNA, 19 nt, Artificial Sequence
  Description of Artificial Sequence: Synthetic oligonucleotide
cccagucggguugggugag

SEQ ID NO: 633755 - RNA, 19 nt, Artificial Sequence
  Description of Artificial Sequence: Synthetic oligonucleotide
  modified_base (16)..(16): a, c, u, g, unknown or other
gcgcguccauaggcunucc

SEQ ID NO: 633756 - RNA, 19 nt, Artificial Sequence
  Description of Artificial Sequence: Synthetic oligonucleotide
ccacauauggcggcugugu

SEQ ID NO: 633757 - RNA, 19 nt, Artificial Sequence
  Description of Artificial Sequence: Synthetic oligonucleotide
ccagucggguugggugagg

SEQ ID NO: 633758 - RNA, 19 nt, Artificial Sequence
  Description of Artificial Sequence: Synthetic oligonucleotide
guguggcgucaaaccaucu

SEQ ID NO: 633759 - RNA, 19 nt, Artificial Sequence
  Description of Artificial Sequence: Synthetic oligonucleotide
ccacgcuggugacaaugaa

SEQ ID NO: 633760 - RNA, 19 nt, Artificial Sequence
  Description of Artificial Sequence: Synthetic oligonucleotide
ggucgucaugaggcugguc

SEQ ID NO: 633761 - RNA, 19 nt, Artificial Sequence
  Description of Artificial Sequence: Synthetic oligonucleotide
cccacguuagaccgucccu

SEQ ID NO: 633762 - RNA, 19 nt, Artificial Sequence
  Description of Artificial Sequence: Synthetic oligonucleotide
ccccgaggagaugggugac

SEQ ID NO: 633763 - RNA, 19 nt, Artificial Sequence
  Description of Artificial Sequence: Synthetic oligonucleotide
ccucggcaacugcauugca

SEQ ID NO: 633764 - RNA, 19 nt, Artificial Sequence
  Description of Artificial Sequence: Synthetic oligonucleotide
ccaccgcugaaaucauuau

SEQ ID NO: 633765 - RNA, 19 nt, Artificial Sequence
  Description of Artificial Sequence: Synthetic oligonucleotide
ccgucccuacaugaagaua

SEQ ID NO: 633766 - RNA, 19 nt, Artificial Sequence
  Description of Artificial Sequence: Synthetic oligonucleotide
ccgaggagaugggugacuu

SEQ ID NO: 633767 - RNA, 19 nt, Artificial Sequence
  Description of Artificial Sequence: Synthetic oligonucleotide
gggucgucaugaggcuggu

SEQ ID NO: 633768 - RNA, 19 nt, Artificial Sequence
  Description of Artificial Sequence: Synthetic oligonucleotide
cccgaggagaugggugacu

SEQ ID NO: 633769 - RNA, 19 nt, Artificial Sequence
  Description of Artificial Sequence: Synthetic oligonucleotide
cgcccacgagcuucucgcu

SEQ ID NO: 633770 - RNA, 19 nt, Artificial Sequence
  Description of Artificial Sequence: Synthetic oligonucleotide
cccugucgaugugccuucu

SEQ ID NO: 633771 - RNA, 19 nt, Artificial Sequence
  Description of Artificial Sequence: Synthetic oligonucleotide
aauccaaucagucaucaag

SEQ ID NO: 633772 - RNA, 19 nt, Artificial Sequence
  Description of Artificial Sequence: Synthetic oligonucleotide
uuugauuaagaucagcuca

SEQ ID NO: 633773 - RNA, 19 nt, Artificial Sequence
  Description of Artificial Sequence: Synthetic oligonucleotide
uguaggucaacaucgaugg

SEQ ID NO: 633774 - RNA, 19 nt, Artificial Sequence
  Description of Artificial Sequence: Synthetic oligonucleotide
auucuagugaccuuguuac

SEQ ID NO: 633775 - RNA, 19 nt, Artificial Sequence
  Description of Artificial Sequence: Synthetic oligonucleotide
uuaacuauccucuugggca

SEQ ID NO: 633776 - RNA, 19 nt, Artificial Sequence
  Description of Artificial Sequence: Synthetic oligonucleotide
uaauuuuaucagaucaucg

SEQ ID NO: 633777 - RNA, 19 nt, Artificial Sequence
  Description of Artificial Sequence: Synthetic oligonucleotide
aaaucagaggaccaaagug

SEQ ID NO: 633778 - RNA, 19 nt, Artificial Sequence
  Description of Artificial Sequence: Synthetic oligonucleotide
ugcaauaauuaccacagag

SEQ ID NO: 633779 - RNA, 19 nt, Artificial Sequence
  Description of Artificial Sequence: Synthetic oligonucleotide
aauauuaacagaauugacu

SEQ ID NO: 633780 - RNA, 19 nt, Artificial Sequence
  Description of Artificial Sequence: Synthetic oligonucleotide
aauuuuaucagaucaucga

SEQ ID NO: 633781 - RNA, 19 nt, Artificial Sequence
  Description of Artificial Sequence: Synthetic oligonucleotide
uguuaaaugagugaaacac

SEQ ID NO: 633782 - RNA, 19 nt, Artificial Sequence
  Description of Artificial Sequence: Synthetic oligonucleotide
ucucuguaggucaacaucg

SEQ ID NO: 633783 - RNA, 19 nt, Artificial Sequence
  Description of Artificial Sequence: Synthetic oligonucleotide
acauggaugucuuagcggc

SEQ ID NO: 633784 - RNA, 19 nt, Artificial Sequence
  Description of Artificial Sequence: Synthetic oligonucleotide
aucaucacaaauucucucc

SEQ ID NO: 633785 - RNA, 19 nt, Artificial Sequence
  Description of Artificial Sequence: Synthetic oligonucleotide
uuuagaacucgucuaacag

SEQ ID NO: 633786 - RNA, 19 nt, Artificial Sequence
  Description of Artificial Sequence: Synthetic oligonucleotide
agaugauugaugcagaugu

SEQ ID NO: 633787 - RNA, 19 nt, Artificial Sequence
  Description of Artificial Sequence: Synthetic oligonucleotide
uuuaaugugagauacccaa

SEQ ID NO: 633788 - RNA, 19 nt, Artificial Sequence
  Description of Artificial Sequence: Synthetic oligonucleotide
ugcaauagcaagcuguucc

SEQ ID NO: 633789 - RNA, 19 nt, Artificial Sequence
  Description of Artificial Sequence: Synthetic oligonucleotide
auugugaaaagcucguaac

SEQ ID NO: 633790 - RNA, 19 nt, Artificial Sequence
  Description of Artificial Sequence: Synthetic oligonucleotide
agcgauacgcuugagaucc

SEQ ID NO: 633791 - RNA, 19 nt, Artificial Sequence
  Description of Artificial Sequence: Synthetic oligonucleotide
agaagcuuuagcgauacgc

SEQ ID NO: 633792 - RNA, 19 nt, Artificial Sequence
  Description of Artificial Sequence: Synthetic oligonucleotide
aauaacugauguuggauga

SEQ ID NO: 633793 - RNA, 19 nt, Artificial Sequence
  Description of Artificial Sequence: Synthetic oligonucleotide
auaacauuggccccagucg

SEQ ID NO: 633794 - RNA, 19 nt, Artificial Sequence
  Description of Artificial Sequence: Synthetic oligonucleotide
uuuucaagguauauggaca

SEQ ID NO: 633795 - RNA, 19 nt, Artificial Sequence
  Description of Artificial Sequence: Synthetic oligonucleotide
auuaggaauaacaagaaga

SEQ ID NO: 633796 - RNA, 19 nt, Artificial Sequence
  Description of Artificial Sequence: Synthetic oligonucleotide
ugauugaugcagauguacg

SEQ ID NO: 633797 - RNA, 19 nt, Artificial Sequence
  Description of Artificial Sequence: Synthetic oligonucleotide
acacauaucaucuauccca

SEQ ID NO: 633798 - RNA, 19 nt, Artificial Sequence
  Description of Artificial Sequence: Synthetic oligonucleotide
aguaacuucaggauggugg

SEQ ID NO: 633799 - RNA, 19 nt, Artificial Sequence
  Description of Artificial Sequence: Synthetic oligonucleotide
ugucuugcaagucagccag

SEQ ID NO: 633800 - RNA, 19 nt, Artificial Sequence
  Description of Artificial Sequence: Synthetic oligonucleotide
uguuggaugaauuuucugu

SEQ ID NO: 633801 - RNA, 19 nt, Artificial Sequence
  Description of Artificial Sequence: Synthetic oligonucleotide
agccauaacauucugggag

SEQ ID NO: 633802 - RNA, 19 nt, Artificial Sequence
  Description of Artificial Sequence: Synthetic oligonucleotide
agugcauagccauugauca

SEQ ID NO: 633803 - RNA, 19 nt, Artificial Sequence
  Description of Artificial Sequence: Synthetic oligonucleotide
uaauaacugauguuggaug

SEQ ID NO: 633804 - RNA, 19 nt, Artificial Sequence
  Description of Artificial Sequence: Synthetic oligonucleotide
aacuaugguugguucaaac

SEQ ID NO: 633805 - RNA, 19 nt, Artificial Sequence
  Description of Artificial Sequence: Synthetic oligonucleotide
cacugcuauaaauaaaagg

SEQ ID NO: 633806 - RNA, 19 nt, Artificial Sequence
  Description of Artificial Sequence: Synthetic oligonucleotide
uuuugcauuaacuauccuc

SEQ ID NO: 633807 - RNA, 19 nt, Artificial Sequence
  Description of Artificial Sequence: Synthetic oligonucleotide
uauuccaauaauuuuggaa

SEQ ID NO: 633808 - RNA, 19 nt, Artificial Sequence
  Description of Artificial Sequence: Synthetic oligonucleotide
cucguaagaugauugaugc

SEQ ID NO: 633809 - RNA, 19 nt, Artificial Sequence
  Description of Artificial Sequence: Synthetic oligonucleotide
aacuucaggaugguggccc

SEQ ID NO: 633810 - RNA, 19 nt, Artificial Sequence
  Description of Artificial Sequence: Synthetic oligonucleotide
auuagguucucacugauau

SEQ ID NO: 633811 - RNA, 19 nt, Artificial Sequence
  Description of Artificial Sequence: Synthetic oligonucleotide
ucgucuaacagccauggca

SEQ ID NO: 633812 - RNA, 19 nt, Artificial Sequence
  Description of Artificial Sequence: Synthetic oligonucleotide
gauacccaaggcuacauug

SEQ ID NO: 633813 - RNA, 19 nt, Artificial Sequence
  Description of Artificial Sequence: Synthetic oligonucleotide
ugauauagcgcacugcuuc

SEQ ID NO: 633814 - RNA, 19 nt, Artificial Sequence
  Description of Artificial Sequence: Synthetic oligonucleotide
agaauauuaacagaauuga

SEQ ID NO: 633815 - RNA, 19 nt, Artificial Sequence
  Description of Artificial Sequence: Synthetic oligonucleotide
uuagcgauacgcuugagau

SEQ ID NO: 633816 - RNA, 19 nt, Artificial Sequence
  Description of Artificial Sequence: Synthetic oligonucleotide
auugaucaaaucaagacca

SEQ ID NO: 633817 - RNA, 19 nt, Artificial Sequence
  Description of Artificial Sequence: Synthetic oligonucleotide
gaauugacuggauaucgag

SEQ ID NO: 633818 - RNA, 19 nt, Artificial Sequence
  Description of Artificial Sequence: Synthetic oligonucleotide
uaaagaucgcuccauuuca

SEQ ID NO: 633819 - RNA, 19 nt, Artificial Sequence
  Description of Artificial Sequence: Synthetic oligonucleotide
uccgcugcaauaauuacca

SEQ ID NO: 633820 - RNA, 19 nt, Artificial Sequence
  Description of Artificial Sequence: Synthetic oligonucleotide
uuuucagaagcuccgcugc

SEQ ID NO: 633821 - RNA, 19 nt, Artificial Sequence
  Description of Artificial Sequence: Synthetic oligonucleotide
acugauauagcgcacugcu

SEQ ID NO: 633822 - RNA, 19 nt, Artificial Sequence
  Description of Artificial Sequence: Synthetic oligonucleotide
uuuauccaagccaacuggc

SEQ ID NO: 633823 - RNA, 19 nt, Artificial Sequence
  Description of Artificial Sequence: Synthetic oligonucleotide
uuuaacuaugguugguuca

SEQ ID NO: 633824 - RNA, 19 nt, Artificial Sequence
  Description of Artificial Sequence: Synthetic oligonucleotide
uuuaucgucuuuaguuucc

SEQ ID NO: 633825 - RNA, 19 nt, Artificial Sequence
  Description of Artificial Sequence: Synthetic oligonucleotide
aacaagaagagaccuugca

SEQ ID NO: 633826 - RNA, 19 nt, Artificial Sequence
  Description of Artificial Sequence: Synthetic oligonucleotide
ucugcuugccccagcaugg

SEQ ID NO: 633827 - RNA, 19 nt, Artificial Sequence
  Description of Artificial Sequence: Synthetic oligonucleotide
aauugacuggauaucgagg

SEQ ID NO: 633828 - RNA, 19 nt, Artificial Sequence
  Description of Artificial Sequence: Synthetic oligonucleotide
agacauggaugucuuagcg

SEQ ID NO: 633829 - RNA, 19 nt, Artificial Sequence
  Description of Artificial Sequence: Synthetic oligonucleotide
gacaaagggcccuccaucg

SEQ ID NO: 633830 - RNA, 19 nt, Artificial Sequence
  Description of Artificial Sequence: Synthetic oligonucleotide
auuaagaucagcucaucau

SEQ ID NO: 633831 - RNA, 19 nt, Artificial Sequence
  Description of Artificial Sequence: Synthetic oligonucleotide
uguucuaccuccaguaacu

SEQ ID NO: 633832 - RNA, 19 nt, Artificial Sequence
  Description of Artificial Sequence: Synthetic oligonucleotide
uuugacuccaaaacucucu

SEQ ID NO: 633833 - RNA, 19 nt, Artificial Sequence
  Description of Artificial Sequence: Synthetic oligonucleotide
uucuucgccuuccaaauug

SEQ ID NO: 633834 - RNA, 19 nt, Artificial Sequence
  Description of Artificial Sequence: Synthetic oligonucleotide
ucaucgauucgaagaauag

SEQ ID NO: 633835 - RNA, 19 nt, Artificial Sequence
  Description of Artificial Sequence: Synthetic oligonucleotide
uuaaugugagauacccaag

SEQ ID NO: 633836 - RNA, 19 nt, Artificial Sequence
  Description of Artificial Sequence: Synthetic oligonucleotide
gauuuugacuccaaaacuc

SEQ ID NO: 633837 - RNA, 19 nt, Artificial Sequence
  Description of Artificial Sequence: Synthetic oligonucleotide
ugcauaguuuucaagguau

SEQ ID NO: 633838 - RNA, 19 nt, Artificial Sequence
  Description of Artificial Sequence: Synthetic oligonucleotide
uuuagcgauacgcuugaga

SEQ ID NO: 633839 - RNA, 19 nt, Artificial Sequence
  Description of Artificial Sequence: Synthetic oligonucleotide
ucacuuuaacuaugguugg

SEQ ID NO: 633840 - RNA, 19 nt, Artificial Sequence
  Description of Artificial Sequence: Synthetic oligonucleotide
uuugucuugcaagucagcc

SEQ ID NO: 633841 - RNA, 19 nt, Artificial Sequence
  Description of Artificial Sequence: Synthetic oligonucleotide
augauugaugcagauguac

SEQ ID NO: 633842 - RNA, 19 nt, Artificial Sequence
  Description of Artificial Sequence: Synthetic oligonucleotide
auuagcaaagaaaucacca

SEQ ID NO: 633843 - RNA, 19 nt, Artificial Sequence
  Description of Artificial Sequence: Synthetic oligonucleotide
ugaaacacuaaugugugaa

SEQ ID NO: 633844 - RNA, 19 nt, Artificial Sequence
  Description of Artificial Sequence: Synthetic oligonucleotide
aacuuccauguuuaucguc

SEQ ID NO: 633845 - RNA, 19 nt, Artificial Sequence
  Description of Artificial Sequence: Synthetic oligonucleotide
gucuguguuaauaauuagg

SEQ ID NO: 633846 - RNA, 19 nt, Artificial Sequence
  Description of Artificial Sequence: Synthetic oligonucleotide
uccggguguaauuuuauca

SEQ ID NO: 633847 - RNA, 19 nt, Artificial Sequence
  Description of Artificial Sequence: Synthetic oligonucleotide
aucgauucgaagaauagug

SEQ ID NO: 633848 - RNA, 19 nt, Artificial Sequence
  Description of Artificial Sequence: Synthetic oligonucleotide
uuaucagaucaucgauucg

SEQ ID NO: 633849 - RNA, 19 nt, Artificial Sequence
  Description of Artificial Sequence: Synthetic oligonucleotide
uccaaucagucaucaaggg

SEQ ID NO: 633850 - RNA, 19 nt, Artificial Sequence
  Description of Artificial Sequence: Synthetic oligonucleotide
aaucagacagucucuucca

SEQ ID NO: 633851 - RNA, 19 nt, Artificial Sequence
  Description of Artificial Sequence: Synthetic oligonucleotide
ucacuguacuuuaauguga

SEQ ID NO: 633852 - RNA, 19 nt, Artificial Sequence
  Description of Artificial Sequence: Synthetic oligonucleotide
aggaucuguaauaaccacc

SEQ ID NO: 633853 - RNA, 19 nt, Artificial Sequence
  Description of Artificial Sequence: Synthetic oligonucleotide
uggauaucgaggcuggccu

SEQ ID NO: 633854 - RNA, 19 nt, Artificial Sequence
  Description of Artificial Sequence: Synthetic oligonucleotide
ucagacacauaucaucuau

SEQ ID NO: 633855 - RNA, 19 nt, Artificial Sequence
  Description of Artificial Sequence: Synthetic oligonucleotide
ugcuugacagccaucgccc

SEQ ID NO: 633856 - RNA, 19 nt, Artificial Sequence
  Description of Artificial Sequence: Synthetic oligonucleotide
ucagaauaacauuggcccc

SEQ ID NO: 633857 - RNA, 19 nt, Artificial Sequence
  Description of Artificial Sequence: Synthetic oligonucleotide
cuugcaggcaagccgauag

SEQ ID NO: 633858 - RNA, 19 nt, Artificial Sequence
  Description of Artificial Sequence: Synthetic oligonucleotide
cucacaaagaacuuuagcu

SEQ ID NO: 633859 - RNA, 19 nt, Artificial Sequence
  Description of Artificial Sequence: Synthetic oligonucleotide
uugauuaagaucagcucau

SEQ ID NO: 633860 - RNA, 19 nt, Artificial Sequence
  Description of Artificial Sequence: Synthetic oligonucleotide
agauguacgagcuuuggua

SEQ ID NO: 633861 - RNA, 19 nt, Artificial Sequence
  Description of Artificial Sequence: Synthetic oligonucleotide
cuuccuugcaggcaagccg

SEQ ID NO: 633862 - RNA, 19 nt, Artificial Sequence
  Description of Artificial Sequence: Synthetic oligonucleotide
guacuucagacacauauca

SEQ ID NO: 633863 - RNA, 19 nt, Artificial Sequence
  Description of Artificial Sequence: Synthetic oligonucleotide
aucauuugcuccucguaag

SEQ ID NO: 633864 - RNA, 19 nt, Artificial Sequence
  Description of Artificial Sequence: Synthetic oligonucleotide
uacguucuggguuaacuug

SEQ ID NO: 633865 - RNA, 19 nt, Artificial Sequence
  Description of Artificial Sequence: Synthetic oligonucleotide
cagaauugacuggauaucg

SEQ ID NO: 633866 - RNA, 19 nt, Artificial Sequence
  Description of Artificial Sequence: Synthetic oligonucleotide
gauugaugcagauguacga

SEQ ID NO: 633867 - RNA, 19 nt, Artificial Sequence
  Description of Artificial Sequence: Synthetic oligonucleotide
cuguaggucaacaucgaug

SEQ ID NO: 633868 - RNA, 19 nt, Artificial Sequence
  Description of Artificial Sequence: Synthetic oligonucleotide
cagaucaucgauucgaaga

SEQ ID NO: 633869 - RNA, 19 nt, Artificial Sequence
  Description of Artificial Sequence: Synthetic oligonucleotide
uguuuaucgucuuuaguuu

SEQ ID NO: 633870 - RNA, 19 nt, Artificial Sequence
  Description of Artificial Sequence: Synthetic oligonucleotide
caauguuggcaauggaagc

SEQ ID NO: 633871 - RNA, 19 nt, Artificial Sequence
  Description of Artificial Sequence: Synthetic oligonucleotide
uaggauucuagugaccuug

SEQ ID NO: 633872 - RNA, 19 nt, Artificial Sequence
  Description of Artificial Sequence: Synthetic oligonucleotide
ucgauucgaagaauaguga

SEQ ID NO: 633873 - RNA, 19 nt, Artificial Sequence
  Description of Artificial Sequence: Synthetic oligonucleotide
gguuacaucaccaauguca

SEQ ID NO: 633874 - RNA, 19 nt, Artificial Sequence
  Description of Artificial Sequence: Synthetic oligonucleotide
guaaagaucgcuccauuuc

SEQ ID NO: 633875 - RNA, 19 nt, Artificial Sequence
  Description of Artificial Sequence: Synthetic oligonucleotide
aucagcaugcuuucuaccu

SEQ ID NO: 633876 - RNA, 19 nt, Artificial Sequence
  Description of Artificial Sequence: Synthetic oligonucleotide
ucuagugaccuuguuacac

SEQ ID NO: 633877 - RNA, 19 nt, Artificial Sequence
  Description of Artificial Sequence: Synthetic oligonucleotide
uuuacguucuggguuaacu

SEQ ID NO: 633878 - RNA, 19 nt, Artificial Sequence
  Description of Artificial Sequence: Synthetic oligonucleotide
aaacacuaaugugugaaau

SEQ ID NO: 633879 - RNA, 19 nt, Artificial Sequence
  Description of Artificial Sequence: Synthetic oligonucleotide
uagcaauguguguucagag

SEQ ID NO: 633880 - RNA, 19 nt, Artificial Sequence
  Description of Artificial Sequence: Synthetic oligonucleotide
auugaugcagauguacgag

SEQ ID NO: 633881 - RNA, 19 nt, Artificial Sequence
  Description of Artificial Sequence: Synthetic oligonucleotide
caaucagucaucaagggcu

SEQ ID NO: 633882 - RNA, 19 nt, Artificial Sequence
  Description of Artificial Sequence: Synthetic oligonucleotide
gucuuagcggcauuaauca

SEQ ID NO: 633883 - RNA, 19 nt, Artificial Sequence
  Description of Artificial Sequence: Synthetic oligonucleotide
acagaauugacuggauauc

SEQ ID NO: 633884 - RNA, 19 nt, Artificial Sequence
  Description of Artificial Sequence: Synthetic oligonucleotide
uggucagaauaacauuggc

SEQ ID NO: 633885 - RNA, 19 nt, Artificial Sequence
  Description of Artificial Sequence: Synthetic oligonucleotide
ggagccauugccuugggcc

SEQ ID NO: 633886 - RNA, 19 nt, Artificial Sequence
  Description of Artificial Sequence: Synthetic oligonucleotide
aagaugauugaugcagaug

SEQ ID NO: 633887 - RNA, 19 nt, Artificial Sequence
  Description of Artificial Sequence: Synthetic oligonucleotide
uuguuacacagccuugaga

SEQ ID NO: 633888 - RNA, 19 nt, Artificial Sequence
  Description of Artificial Sequence: Synthetic oligonucleotide
aguguauuaggaauaacaa

SEQ ID NO: 633889 - RNA, 19 nt, Artificial Sequence
  Description of Artificial Sequence: Synthetic oligonucleotide
cauaucaucuaucccacca

SEQ ID NO: 633890 - RNA, 19 nt, Artificial Sequence
  Description of Artificial Sequence: Synthetic oligonucleotide
uuuagcugcaggguguucu

SEQ ID NO: 633891 - RNA, 19 nt, Artificial Sequence
  Description of Artificial Sequence: Synthetic oligonucleotide
gauucuagugaccuuguua

SEQ ID NO: 633892 - RNA, 19 nt, Artificial Sequence
  Description of Artificial Sequence: Synthetic oligonucleotide
auacccaaggcuacauugc

SEQ ID NO: 633893 - RNA, 19 nt, Artificial Sequence
  Description of Artificial Sequence: Synthetic oligonucleotide
caauguguguucagagagg

SEQ ID NO: 633894 - RNA, 19 nt, Artificial Sequence
  Description of Artificial Sequence: Synthetic oligonucleotide
uuaacuaugguugguucaa

SEQ ID NO: 633895 - RNA, 19 nt, Artificial Sequence
  Description of Artificial Sequence: Synthetic oligonucleotide
uucgucuguguuaauaauu

SEQ ID NO: 633896 - RNA, 19 nt, Artificial Sequence
  Description of Artificial Sequence: Synthetic oligonucleotide
aguucgucuguguuaauaa

SEQ ID NO: 633897 - RNA, 19 nt, Artificial Sequence
  Description of Artificial Sequence: Synthetic oligonucleotide
uccccgaacacggacaaag

SEQ ID NO: 633898 - RNA, 19 nt, Artificial Sequence
  Description of Artificial Sequence: Synthetic oligonucleotide
cacauaucaucuaucccac

SEQ ID NO: 633899 - RNA, 19 nt, Artificial Sequence
  Description of Artificial Sequence: Synthetic oligonucleotide
uuaucgucuuuaguuuccg

SEQ ID NO: 633900 - RNA, 19 nt, Artificial Sequence
  Description of Artificial Sequence: Synthetic oligonucleotide
ucagaucaucgauucgaag

SEQ ID NO: 633901 - RNA, 19 nt, Artificial Sequence
  Description of Artificial Sequence: Synthetic oligonucleotide
agcaucuaccaccauauua

SEQ ID NO: 633902 - RNA, 19 nt, Artificial Sequence
  Description of Artificial Sequence: Synthetic oligonucleotide
uuuugacuccaaaacucuc

SEQ ID NO: 633903 - RNA, 19 nt, Artificial Sequence
  Description of Artificial Sequence: Synthetic oligonucleotide
acuaaugugugaaaucaga

SEQ ID NO: 633904 - RNA, 19 nt, Artificial Sequence
  Description of Artificial Sequence: Synthetic oligonucleotide
gacuacagauuuugacucc

SEQ ID NO: 633905 - RNA, 19 nt, Artificial Sequence
  Description of Artificial Sequence: Synthetic oligonucleotide
cugcuauaaauaaaaggga

SEQ ID NO: 633906 - RNA, 19 nt, Artificial Sequence
  Description of Artificial Sequence: Synthetic oligonucleotide
ugacuggauaucgaggcug

SEQ ID NO: 633907 - RNA, 19 nt, Artificial Sequence
  Description of Artificial Sequence: Synthetic oligonucleotide
acugauguuggaugaauuu

SEQ ID NO: 633908 - RNA, 19 nt, Artificial Sequence
  Description of Artificial Sequence: Synthetic oligonucleotide
uugucuugcaagucagcca

SEQ ID NO: 633909 - RNA, 19 nt, Artificial Sequence
  Description of Artificial Sequence: Synthetic oligonucleotide
ucuuagcggcauuaaucag

SEQ ID NO: 633910 - RNA, 19 nt, Artificial Sequence
  Description of Artificial Sequence: Synthetic oligonucleotide
auauggacagggcggcuuc

SEQ ID NO: 633911 - RNA, 19 nt, Artificial Sequence
  Description of Artificial Sequence: Synthetic oligonucleotide
gaucagcaugcuuucuacc

SEQ ID NO: 633912 - RNA, 19 nt, Artificial Sequence
  Description of Artificial Sequence: Synthetic oligonucleotide
aggucaacaucgauggagg

SEQ ID NO: 633913 - RNA, 19 nt, Artificial Sequence
  Description of Artificial Sequence: Synthetic oligonucleotide
aagcuuuagcgauacgcuu

SEQ ID NO: 633914 - RNA, 19 nt, Artificial Sequence
  Description of Artificial Sequence: Synthetic oligonucleotide
cacuaaugugugaaaucag

SEQ ID NO: 633915 - RNA, 19 nt, Artificial Sequence
  Description of Artificial Sequence: Synthetic oligonucleotide
uuaacagaauugacuggau

SEQ ID NO: 633916 - RNA, 19 nt, Artificial Sequence
  Description of Artificial Sequence: Synthetic oligonucleotide
auuuugacuccaaaacucu

SEQ ID NO: 633917 - RNA, 19 nt, Artificial Sequence
  Description of Artificial Sequence: Synthetic oligonucleotide
uuaguuuccggguguaauu

SEQ ID NO: 633918 - RNA, 19 nt, Artificial Sequence
  Description of Artificial Sequence: Synthetic oligonucleotide
gaggaccaaagugagaaca

SEQ ID NO: 633919 - RNA, 19 nt, Artificial Sequence
  Description of Artificial Sequence: Synthetic oligonucleotide
auagcaauguguguucaga

SEQ ID NO: 633920 - RNA, 19 nt, Artificial Sequence
  Description of Artificial Sequence: Synthetic oligonucleotide
guuaauaauuagguucuca

SEQ ID NO: 633921 - RNA, 19 nt, Artificial Sequence
  Description of Artificial Sequence: Synthetic oligonucleotide
gaauaacaagaagagaccu

SEQ ID NO: 633922 - RNA, 19 nt, Artificial Sequence
  Description of Artificial Sequence: Synthetic oligonucleotide
uuaaucagacagucucuuc

SEQ ID NO: 633923 - RNA, 19 nt, Artificial Sequence
  Description of Artificial Sequence: Synthetic oligonucleotide
ggacuacagauuuugacuc

SEQ ID NO: 633924 - RNA, 19 nt, Artificial Sequence
  Description of Artificial Sequence: Synthetic oligonucleotide
caugaaaucauuugcuccu

SEQ ID NO: 633925 - RNA, 19 nt, Artificial Sequence
  Description of Artificial Sequence: Synthetic oligonucleotide
cuaccugacuucuuccaug

SEQ ID NO: 633926 - RNA, 19 nt, Artificial Sequence
  Description of Artificial Sequence: Synthetic oligonucleotide
uuacguucuggguuaacuu

SEQ ID NO: 633927 - RNA, 19 nt, Artificial Sequence
  Description of Artificial Sequence: Synthetic oligonucleotide
aucagaggaccaaagugag

SEQ ID NO: 633928 - RNA, 19 nt, Artificial Sequence
  Description of Artificial Sequence: Synthetic oligonucleotide
cguaagaugauugaugcag

SEQ ID NO: 633929 - RNA, 19 nt, Artificial Sequence
  Description of Artificial Sequence: Synthetic oligonucleotide
uucgaagaauagugauugc

SEQ ID NO: 633930 - RNA, 19 nt, Artificial Sequence
  Description of Artificial Sequence: Synthetic oligonucleotide
gucaacaucgauggaggag

SEQ ID NO: 633931 - RNA, 19 nt, Artificial Sequence
  Description of Artificial Sequence: Synthetic oligonucleotide
uugaucaaaucaagaccaa

SEQ ID NO: 633932 - RNA, 19 nt, Artificial Sequence
  Description of Artificial Sequence: Synthetic oligonucleotide
ugcaggcaagccgauagcc

SEQ ID NO: 633933 - RNA, 19 nt, Artificial Sequence
  Description of Artificial Sequence: Synthetic oligonucleotide
guugguucaaacaccccug

SEQ ID NO: 633934 - RNA, 19 nt, Artificial Sequence
  Description of Artificial Sequence: Synthetic oligonucleotide
ugacuaguucaucugcauu

SEQ ID NO: 633935 - RNA, 19 nt, Artificial Sequence
  Description of Artificial Sequence: Synthetic oligonucleotide
uacuucagacacauaucau

SEQ ID NO: 633936 - RNA, 19 nt, Artificial Sequence
  Description of Artificial Sequence: Synthetic oligonucleotide
ucuaucccaccagugguca

SEQ ID NO: 633937 - RNA, 19 nt, Artificial Sequence
  Description of Artificial Sequence: Synthetic oligonucleotide
cauugugaaaagcucguaa

SEQ ID NO: 633938 - RNA, 19 nt, Artificial Sequence
  Description of Artificial Sequence: Synthetic oligonucleotide
cuuugucuugcaagucagc

SEQ ID NO: 633939 - RNA, 19 nt, Artificial Sequence
  Description of Artificial Sequence: Synthetic oligonucleotide
ucguaagaugauugaugca

SEQ ID NO: 633940 - RNA, 19 nt, Artificial Sequence
  Description of Artificial Sequence: Synthetic oligonucleotide
agcuuuagcgauacgcuug

SEQ ID NO: 633941 - RNA, 19 nt, Artificial Sequence
  Description of Artificial Sequence: Synthetic oligonucleotide
ugucuaauuugguccaauu

SEQ ID NO: 633942 - RNA, 19 nt, Artificial Sequence
  Description of Artificial Sequence: Synthetic oligonucleotide
uguucccgagaccccauac

SEQ ID NO: 633943 - RNA, 19 nt, Artificial Sequence
  Description of Artificial Sequence: Synthetic oligonucleotide
ugaucaaaucaagaccaau

SEQ ID NO: 633944 - RNA, 19 nt, Artificial Sequence
  Description of Artificial Sequence: Synthetic oligonucleotide
aaguucgucuguguuaaua

SEQ ID NO: 633945 - RNA, 19 nt, Artificial Sequence
  Description of Artificial Sequence: Synthetic oligonucleotide
gacuaguucaucugcauuu

SEQ ID NO: 633946 - RNA, 19 nt, Artificial Sequence
  Description of Artificial Sequence: Synthetic oligonucleotide
acuacagauuuugacucca

SEQ ID NO: 633947 - RNA, 19 nt, Artificial Sequence
  Description of Artificial Sequence: Synthetic oligonucleotide
augaaaucauuugcuccuc

SEQ ID NO: 633948 - RNA, 19 nt, Artificial Sequence
  Description of Artificial Sequence: Synthetic oligonucleotide
ucgugguuuuccauugauc

SEQ ID NO: 633949 - RNA, 19 nt, Artificial Sequence
  Description of Artificial Sequence: Synthetic oligonucleotide
ccgaacacggacaaagggc

SEQ ID NO: 633950 - RNA, 19 nt, Artificial Sequence
  Description of Artificial Sequence: Synthetic oligonucleotide
gauguacgagcuuugguau

SEQ ID NO: 633951 - RNA, 19 nt, Artificial Sequence
  Description of Artificial Sequence: Synthetic oligonucleotide
gucucgugguuuuccauug

SEQ ID NO: 633952 - RNA, 19 nt, Artificial Sequence
  Description of Artificial Sequence: Synthetic oligonucleotide
caaaacucucuucaccaca

SEQ ID NO: 633953 - RNA, 19 nt, Artificial Sequence
  Description of Artificial Sequence: Synthetic oligonucleotide
agucgccagaaucuuuuca

SEQ ID NO: 633954 - RNA, 19 nt, Artificial Sequence
  Description of Artificial Sequence: Synthetic oligonucleotide
agugaccuuguuacacagc

SEQ ID NO: 633955 - RNA, 19 nt, Artificial Sequence
  Description of Artificial Sequence: Synthetic oligonucleotide
aguguggacaggauacuug

SEQ ID NO: 633956 - RNA, 19 nt, Artificial Sequence
  Description of Artificial Sequence: Synthetic oligonucleotide
agaauagugauugcagcuu

SEQ ID NO: 633957 - RNA, 19 nt, Artificial Sequence
  Description of Artificial Sequence: Synthetic oligonucleotide
cauaacauucugggagcgg

SEQ ID NO: 633958 - RNA, 19 nt, Artificial Sequence
  Description of Artificial Sequence: Synthetic oligonucleotide
uuccagaacuagccagagc

SEQ ID NO: 633959 - RNA, 19 nt, Artificial Sequence
  Description of Artificial Sequence: Synthetic oligonucleotide
ucguugguaaugguuacau

SEQ ID NO: 633960 - RNA, 19 nt, Artificial Sequence
  Description of Artificial Sequence: Synthetic oligonucleotide
uuuccggguguaauuuuau

SEQ ID NO: 633961 - RNA, 19 nt, Artificial Sequence
  Description of Artificial Sequence: Synthetic oligonucleotide
aaccaggucaguggagucu

SEQ ID NO: 633962 - RNA, 19 nt, Artificial Sequence
  Description of Artificial Sequence: Synthetic oligonucleotide
uucuagugaccuuguuaca

SEQ ID NO: 633963 - RNA, 19 nt, Artificial Sequence
  Description of Artificial Sequence: Synthetic oligonucleotide
caucguugguaaugguuac

SEQ ID NO: 633964 - RNA, 19 nt, Artificial Sequence
  Description of Artificial Sequence: Synthetic oligonucleotide
agccucauugugaaaagcu

SEQ ID NO: 633965 - RNA, 19 nt, Artificial Sequence
  Description of Artificial Sequence: Synthetic oligonucleotide
agccgauagccacuaauaa

SEQ ID NO: 633966 - RNA, 19 nt, Artificial Sequence
  Description of Artificial Sequence: Synthetic oligonucleotide
gagaccuugcaaacucugc

SEQ ID NO: 633967 - RNA, 19 nt, Artificial Sequence
  Description of Artificial Sequence: Synthetic oligonucleotide
gaagcuuuagcgauacgcu

SEQ ID NO: 633968 - RNA, 19 nt, Artificial Sequence
  Description of Artificial Sequence: Synthetic oligonucleotide
uguguucagagaggaugag

SEQ ID NO: 633969 - RNA, 19 nt, Artificial Sequence
  Description of Artificial Sequence: Synthetic oligonucleotide
agaauaacauuggccccag

SEQ ID NO: 633970 - RNA, 19 nt, Artificial Sequence
  Description of Artificial Sequence: Synthetic oligonucleotide
caaagaacuuuagcugcag

SEQ ID NO: 633971 - RNA, 19 nt, Artificial Sequence
  Description of Artificial Sequence: Synthetic oligonucleotide
cuagugaccuuguuacaca

SEQ ID NO: 633972 - RNA, 19 nt, Artificial Sequence
  Description of Artificial Sequence: Synthetic oligonucleotide
ccggguguaauuuuaucag

SEQ ID NO: 633973 - RNA, 19 nt, Artificial Sequence
  Description of Artificial Sequence: Synthetic oligonucleotide
gaaaucauuugcuccucgu

SEQ ID NO: 633974 - RNA, 19 nt, Artificial Sequence
  Description of Artificial Sequence: Synthetic oligonucleotide
ugaccuuguuacacagccu

SEQ ID NO: 633975 - RNA, 19 nt, Artificial Sequence
  Description of Artificial Sequence: Synthetic oligonucleotide
aucgaggcuggccucucag

SEQ ID NO: 633976 - RNA, 19 nt, Artificial Sequence
  Description of Artificial Sequence: Synthetic oligonucleotide
aggaccaaagugagaacag

SEQ ID NO: 633977 - RNA, 19 nt, Artificial Sequence
  Description of Artificial Sequence: Synthetic oligonucleotide
agaagcuccgcugcaauaa

SEQ ID NO: 633978 - RNA, 19 nt, Artificial Sequence
  Description of Artificial Sequence: Synthetic oligonucleotide
gucgccagaaucuuuucaa

SEQ ID NO: 633979 - RNA, 19 nt, Artificial Sequence
  Description of Artificial Sequence: Synthetic oligonucleotide
aagccgauagccacuaaua

SEQ ID NO: 633980 - RNA, 19 nt, Artificial Sequence
  Description of Artificial Sequence: Synthetic oligonucleotide
gagagaacgggcgggacuc

SEQ ID NO: 633981 - RNA, 19 nt, Artificial Sequence
  Description of Artificial Sequence: Synthetic oligonucleotide
uguacgagcuuugguauuu

SEQ ID NO: 633982 - RNA, 19 nt, Artificial Sequence
  Description of Artificial Sequence: Synthetic oligonucleotide
aucuaucccaccagugguc

SEQ ID NO: 633983 - RNA, 19 nt, Artificial Sequence
  Description of Artificial Sequence: Synthetic oligonucleotide
gccauaacauucugggagc

SEQ ID NO: 633984 - RNA, 19 nt, Artificial Sequence
  Description of Artificial Sequence: Synthetic oligonucleotide
aacucgucuaacagccaug

SEQ ID NO: 633985 - RNA, 19 nt, Artificial Sequence
  Description of Artificial Sequence: Synthetic oligonucleotide
ccucguaagaugauugaug

SEQ ID NO: 633986 - RNA, 19 nt, Artificial Sequence
  Description of Artificial Sequence: Synthetic oligonucleotide
uugcaggcaagccgauagc

SEQ ID NO: 633987 - RNA, 19 nt, Artificial Sequence
  Description of Artificial Sequence: Synthetic oligonucleotide
cuucgccuuccaaauuggc

SEQ ID NO: 633988 - RNA, 19 nt, Artificial Sequence
  Description of Artificial Sequence: Synthetic oligonucleotide
aggguguucuaccuccagu

SEQ ID NO: 633989 - RNA, 19 nt, Artificial Sequence
  Description of Artificial Sequence: Synthetic oligonucleotide
cuguaggauucuagugacc

SEQ ID NO: 633990 - RNA, 19 nt, Artificial Sequence
  Description of Artificial Sequence: Synthetic oligonucleotide
uucagacacauaucaucua

SEQ ID NO: 633991 - RNA, 19 nt, Artificial Sequence
  Description of Artificial Sequence: Synthetic oligonucleotide
auacgcuugagaucccuuu

SEQ ID NO: 633992 - RNA, 19 nt, Artificial Sequence
  Description of Artificial Sequence: Synthetic oligonucleotide
cagaacuagccagagccac

SEQ ID NO: 633993 - RNA, 19 nt, Artificial Sequence
  Description of Artificial Sequence: Synthetic oligonucleotide
aagggcccuccaucguuag

SEQ ID NO: 633994 - RNA, 19 nt, Artificial Sequence
  Description of Artificial Sequence: Synthetic oligonucleotide
aaagaucgcuccauuucau

SEQ ID NO: 633995 - RNA, 19 nt, Artificial Sequence
  Description of Artificial Sequence: Synthetic oligonucleotide
caccacacaaagagcauca

SEQ ID NO: 633996 - RNA, 19 nt, Artificial Sequence
  Description of Artificial Sequence: Synthetic oligonucleotide
caacaucgauggaggagcc

SEQ ID NO: 633997 - RNA, 19 nt, Artificial Sequence
  Description of Artificial Sequence: Synthetic oligonucleotide
uacgcuugagaucccuuuu

SEQ ID NO: 633998 - RNA, 19 nt, Artificial Sequence
  Description of Artificial Sequence: Synthetic oligonucleotide
agaauugacuggauaucga

SEQ ID NO: 633999 - RNA, 19 nt, Artificial Sequence
  Description of Artificial Sequence: Synthetic oligonucleotide
gagaccccauacugguugc

SEQ ID NO: 634000 - RNA, 19 nt, Artificial Sequence
  Description of Artificial Sequence: Synthetic oligonucleotide
uccagaagcuuuagcgaua

SEQ ID NO: 634001 - RNA, 19 nt, Artificial Sequence
  Description of Artificial Sequence: Synthetic oligonucleotide
gguauauggacagggcggc

SEQ ID NO: 634002 - RNA, 19 nt, Artificial Sequence
  Description of Artificial Sequence: Synthetic oligonucleotide
gggacuacagauuuugacu

SEQ ID NO: 634003 - RNA, 19 nt, Artificial Sequence
  Description of Artificial Sequence: Synthetic oligonucleotide
agcauucacugccagugua

SEQ ID NO: 634004 - RNA, 19 nt, Artificial Sequence
  Description of Artificial Sequence: Synthetic oligonucleotide
ucucgugguuuuccauuga

SEQ ID NO: 634005 - RNA, 19 nt, Artificial Sequence
  Description of Artificial Sequence: Synthetic oligonucleotide
uccucguaagaugauugau

SEQ ID NO: 634006 - RNA, 19 nt, Artificial Sequence
  Description of Artificial Sequence: Synthetic oligonucleotide
uaauaaccaccugcacacc

SEQ ID NO: 634007 - RNA, 19 nt, Artificial Sequence
  Description of Artificial Sequence: Synthetic oligonucleotide
uauauggacagggcggcuu

SEQ ID NO: 634008 - RNA, 19 nt, Artificial Sequence
  Description of Artificial Sequence: Synthetic oligonucleotide
aucaucgauucgaagaaua

SEQ ID NO: 634009 - RNA, 19 nt, Artificial Sequence
  Description of Artificial Sequence: Synthetic oligonucleotide
uagcgauacgcuugagauc

SEQ ID NO: 634010 - RNA, 19 nt, Artificial Sequence
  Description of Artificial Sequence: Synthetic oligonucleotide
gaccuuguuacacagccuu

SEQ ID NO: 634011 - RNA, 19 nt, Artificial Sequence
  Description of Artificial Sequence: Synthetic oligonucleotide
agagaccuugcaaacucug

SEQ ID NO: 634012 - RNA, 19 nt, Artificial Sequence
  Description of Artificial Sequence: Synthetic oligonucleotide
gagccucauugugaaaagc

SEQ ID NO: 634013 - RNA, 19 nt, Artificial Sequence
  Description of Artificial Sequence: Synthetic oligonucleotide
ugauuaagaucagcucauc

SEQ ID NO: 634014 - RNA, 19 nt, Artificial Sequence
  Description of Artificial Sequence: Synthetic oligonucleotide
gccgauagccacuaauaac

SEQ ID NO: 634015 - RNA, 19 nt, Artificial Sequence
  Description of Artificial Sequence: Synthetic oligonucleotide
uuccggguguaauuuuauc

SEQ ID NO: 634016 - RNA, 19 nt, Artificial Sequence
  Description of Artificial Sequence: Synthetic oligonucleotide
cgucuaacagccauggcac

SEQ ID NO: 634017 - RNA, 19 nt, Artificial Sequence
  Description of Artificial Sequence: Synthetic oligonucleotide
ugguuacaucaccaauguc

SEQ ID NO: 634018 - RNA, 19 nt, Artificial Sequence
  Description of Artificial Sequence: Synthetic oligonucleotide
uaguuuccggguguaauuu

SEQ ID NO: 634019 - RNA, 19 nt, Artificial Sequence
  Description of Artificial Sequence: Synthetic oligonucleotide
uuucuucgccuuccaaauu

SEQ ID NO: 634020 - RNA, 19 nt, Artificial Sequence
  Description of Artificial Sequence: Synthetic oligonucleotide
guuacacagccuugagaga

SEQ ID NO: 634021 - RNA, 19 nt, Artificial Sequence
  Description of Artificial Sequence: Synthetic oligonucleotide
gggcccuccaucguuaggg

SEQ ID NO: 634022 - RNA, 19 nt, Artificial Sequence
  Description of Artificial Sequence: Synthetic oligonucleotide
cccgaacacggacaaaggg

SEQ ID NO: 634023 - RNA, 19 nt, Artificial Sequence
  Description of Artificial Sequence: Synthetic oligonucleotide
auucacugccaguguauua

SEQ ID NO: 634024 - RNA, 19 nt, Artificial Sequence
  Description of Artificial Sequence: Synthetic oligonucleotide
auaacugauguuggaugaa

SEQ ID NO: 634025 - RNA, 19 nt, Artificial Sequence
  Description of Artificial Sequence: Synthetic oligonucleotide
aucagacagucucuuccaa

SEQ ID NO: 634026 - RNA, 19 nt, Artificial Sequence
  Description of Artificial Sequence: Synthetic oligonucleotide
gaacucgucuaacagccau

SEQ ID NO: 634027 - RNA, 19 nt, Artificial Sequence
  Description of Artificial Sequence: Synthetic oligonucleotide
acguucuggguuaacuuga

SEQ ID NO: 634028 - RNA, 19 nt, Artificial Sequence
  Description of Artificial Sequence: Synthetic oligonucleotide
gaacacggacaaagggccc

SEQ ID NO: 634029 - RNA, 19 nt, Artificial Sequence
  Description of Artificial Sequence: Synthetic oligonucleotide
ugcuuguugucucgugguu

SEQ ID NO: 634030 - RNA, 19 nt, Artificial Sequence
  Description of Artificial Sequence: Synthetic oligonucleotide
ccgauagccacuaauaacu

SEQ ID NO: 634031 - RNA, 19 nt, Artificial Sequence
  Description of Artificial Sequence: Synthetic oligonucleotide
ucauugugaaaagcucgua

SEQ ID NO: 634032 - RNA, 19 nt, Artificial Sequence
  Description of Artificial Sequence: Synthetic oligonucleotide
cuaauaacugauguuggau

SEQ ID NO: 634033 - RNA, 19 nt, Artificial Sequence
  Description of Artificial Sequence: Synthetic oligonucleotide
gugaaacacuaauguguga

SEQ ID NO: 634034 - RNA, 19 nt, Artificial Sequence
  Description of Artificial Sequence: Synthetic oligonucleotide
ggaucuguaauaaccaccu

SEQ ID NO: 634035 - RNA, 19 nt, Artificial Sequence
  Description of Artificial Sequence: Synthetic oligonucleotide
aguuuccggguguaauuuu

SEQ ID NO: 634036 - RNA, 19 nt, Artificial Sequence
  Description of Artificial Sequence: Synthetic oligonucleotide
agacagucucuuccaaguu

SEQ ID NO: 634037 - RNA, 19 nt, Artificial Sequence
  Description of Artificial Sequence: Synthetic oligonucleotide
ggacaaagggcccuccauc

SEQ ID NO: 634038 - RNA, 19 nt, Artificial Sequence
  Description of Artificial Sequence: Synthetic oligonucleotide
gugguuuuccauugaucaa

SEQ ID NO: 634039 - RNA, 19 nt, Artificial Sequence
  Description of Artificial Sequence: Synthetic oligonucleotide
cuacauugcaccugacacu

SEQ ID NO: 634040 - RNA, 19 nt, Artificial Sequence
  Description of Artificial Sequence: Synthetic oligonucleotide
gggauagcaauguguguuc

SEQ ID NO: 634041 - RNA, 19 nt, Artificial Sequence
  Description of Artificial Sequence: Synthetic oligonucleotide
ucgaggcuggccucucaga

SEQ ID NO: 634042 - RNA, 19 nt, Artificial Sequence
  Description of Artificial Sequence: Synthetic oligonucleotide
caucuaucccaccaguggu

SEQ ID NO: 634043 - RNA, 19 nt, Artificial Sequence
  Description of Artificial Sequence: Synthetic oligonucleotide
cuccucguaagaugauuga

SEQ ID NO: 634044 - RNA, 19 nt, Artificial Sequence
  Description of Artificial Sequence: Synthetic oligonucleotide
aucguugguaaugguuaca

SEQ ID NO: 634045 - RNA, 19 nt, Artificial Sequence
  Description of Artificial Sequence: Synthetic oligonucleotide
gacucgugguguggcagcc

SEQ ID NO: 634046 - RNA, 19 nt, Artificial Sequence
  Description of Artificial Sequence: Synthetic oligonucleotide
auauagcgcacugcuuccu

SEQ ID NO: 634047 - RNA, 19 nt, Artificial Sequence
  Description of Artificial Sequence: Synthetic oligonucleotide
uuuuacguucuggguuaac

SEQ ID NO: 634048 - RNA, 19 nt, Artificial Sequence
  Description of Artificial Sequence: Synthetic oligonucleotide
agaacuagccagagccaca

SEQ ID NO: 634049 - RNA, 19 nt, Artificial Sequence
  Description of Artificial Sequence: Synthetic oligonucleotide
aucagaucaucgauucgaa

SEQ ID NO: 634050 - RNA, 19 nt, Artificial Sequence
  Description of Artificial Sequence: Synthetic oligonucleotide
acucgugguguggcagccc

SEQ ID NO: 634051 - RNA, 19 nt, Artificial Sequence
  Description of Artificial Sequence: Synthetic oligonucleotide
aaagggcccuccaucguua

SEQ ID NO: 634052 - RNA, 19 nt, Artificial Sequence
  Description of Artificial Sequence: Synthetic oligonucleotide
gcugcgguccccgaacacg

SEQ ID NO: 634053 - RNA, 19 nt, Artificial Sequence
  Description of Artificial Sequence: Synthetic oligonucleotide
acggacaaagggcccucca

SEQ ID NO: 634054 - RNA, 19 nt, Artificial Sequence
  Description of Artificial Sequence: Synthetic oligonucleotide
gaugauugaugcagaugua

SEQ ID NO: 634055 - RNA, 19 nt, Artificial Sequence
  Description of Artificial Sequence: Synthetic oligonucleotide
caucgcccuuaaaggauuc

SEQ ID NO: 634056 - RNA, 19 nt, Artificial Sequence
  Description of Artificial Sequence: Synthetic oligonucleotide
auaucgaggcuggccucuc

SEQ ID NO: 634057 - RNA, 19 nt, Artificial Sequence
  Description of Artificial Sequence: Synthetic oligonucleotide
caggguguucuaccuccag

SEQ ID NO: 634058 - RNA, 19 nt, Artificial Sequence
  Description of Artificial Sequence: Synthetic oligonucleotide
gcuuuagcgauacgcuuga

SEQ ID NO: 634059 - RNA, 19 nt, Artificial Sequence
  Description of Artificial Sequence: Synthetic oligonucleotide
agggcccuccaucguuagg

SEQ ID NO: 634060 - RNA, 19 nt, Artificial Sequence
  Description of Artificial Sequence: Synthetic oligonucleotide
ugcuccucguaagaugauu

SEQ ID NO: 634061 - RNA, 19 nt, Artificial Sequence
  Description of Artificial Sequence: Synthetic oligonucleotide
ggaaauccaaucagucauc

SEQ ID NO: 634062 - RNA, 19 nt, Artificial Sequence
  Description of Artificial Sequence: Synthetic oligonucleotide
ccauaacauucugggagcg

SEQ ID NO: 634063 - RNA, 19 nt, Artificial Sequence
  Description of Artificial Sequence: Synthetic oligonucleotide
ccuugagagaacgggcggg

SEQ ID NO: 634064 - RNA, 19 nt, Artificial Sequence
  Description of Artificial Sequence: Synthetic oligonucleotide
agagaacgggcgggacucg

SEQ ID NO: 634065 - RNA, 19 nt, Artificial Sequence
  Description of Artificial Sequence: Synthetic oligonucleotide
aggauucuagugaccuugu

SEQ ID NO: 634066 - RNA, 19 nt, Artificial Sequence
  Description of Artificial Sequence: Synthetic oligonucleotide
guuuccggguguaauuuua

SEQ ID NO: 634067 - RNA, 19 nt, Artificial Sequence
  Description of Artificial Sequence: Synthetic oligonucleotide
cauuggccccagucgccag

SEQ ID NO: 634068 - RNA, 19 nt, Artificial Sequence
  Description of Artificial Sequence: Synthetic oligonucleotide
caucgauucgaagaauagu

SEQ ID NO: 634069 - RNA, 19 nt, Artificial Sequence
  Description of Artificial Sequence: Synthetic oligonucleotide
ccauugaucagcaugcuuu

SEQ ID NO: 634070 - RNA, 19 nt, Artificial Sequence
  Description of Artificial Sequence: Synthetic oligonucleotide
cauugccuugggccauccc

SEQ ID NO: 634071 - RNA, 19 nt, Artificial Sequence
  Description of Artificial Sequence: Synthetic oligonucleotide
cgagaccccauacugguug

SEQ ID NO: 634072 - RNA, 19 nt, Artificial Sequence
  Description of Artificial Sequence: Synthetic oligonucleotide
cuguguuaauaauuagguu

SEQ ID NO: 634073 - RNA, 19 nt, Artificial Sequence
  Description of Artificial Sequence: Synthetic oligonucleotide
cauaguuuucaagguauau

SEQ ID NO: 634074 - RNA, 19 nt, Artificial Sequence
  Description of Artificial Sequence: Synthetic oligonucleotide
caccaguggucagaauaac

SEQ ID NO: 634075 - RNA, 19 nt, Artificial Sequence
  Description of Artificial Sequence: Synthetic oligonucleotide
caccccugcuugcuuguug

SEQ ID NO: 634076 - RNA, 19 nt, Artificial Sequence
  Description of Artificial Sequence: Synthetic oligonucleotide
guaggucaacaucgaugga

SEQ ID NO: 634077 - RNA, 19 nt, Artificial Sequence
  Description of Artificial Sequence: Synthetic oligonucleotide
aagcuccgcugcaauaauu

SEQ ID NO: 634078 - RNA, 19 nt, Artificial Sequence
  Description of Artificial Sequence: Synthetic oligonucleotide
cuuuagcgauacgcuugag

SEQ ID NO: 634079 - RNA, 19 nt, Artificial Sequence
  Description of Artificial Sequence: Synthetic oligonucleotide
cugcaauaauuaccacaga

SEQ ID NO: 634080 - RNA, 19 nt, Artificial Sequence
  Description of Artificial Sequence: Synthetic oligonucleotide
cagucgccagaaucuuuuc

SEQ ID NO: 634081 - RNA, 19 nt, Artificial Sequence
  Description of Artificial Sequence: Synthetic oligonucleotide
cugcaauagcaagcuguuc

SEQ ID NO: 634082 - RNA, 19 nt, Artificial Sequence
  Description of Artificial Sequence: Synthetic oligonucleotide
caagccgauagccacuaau

SEQ ID NO: 634083 - RNA, 19 nt, Artificial Sequence
  Description of Artificial Sequence: Synthetic oligonucleotide
guucccgagaccccauacu

SEQ ID NO: 634084 - RNA, 19 nt, Artificial Sequence
  Description of Artificial Sequence: Synthetic oligonucleotide
ugcgguccccgaacacgga

SEQ ID NO: 634085 - RNA, 19 nt, Artificial Sequence
  Description of Artificial Sequence: Synthetic oligonucleotide
acuggccccagagaacuuu

SEQ ID NO: 634086 - RNA, 19 nt, Artificial Sequence
  Description of Artificial Sequence: Synthetic oligonucleotide
ggucaacaucgauggagga

SEQ ID NO: 634087 - RNA, 19 nt, Artificial Sequence
  Description of Artificial Sequence: Synthetic oligonucleotide
agaacucgucuaacagcca

SEQ ID NO: 634088 - RNA, 19 nt, Artificial Sequence
  Description of Artificial Sequence: Synthetic oligonucleotide
aucgcccuuaaaggauucu

SEQ ID NO: 634089 - RNA, 19 nt, Artificial Sequence
  Description of Artificial Sequence: Synthetic oligonucleotide
gcccuuaaaggauucuugu

SEQ ID NO: 634090 - RNA, 19 nt, Artificial Sequence
  Description of Artificial Sequence: Synthetic oligonucleotide
ggauaucgaggcuggccuc

SEQ ID NO: 634091 - RNA, 19 nt, Artificial Sequence
  Description of Artificial Sequence: Synthetic oligonucleotide
cgauagccacuaauaacug

SEQ ID NO: 634092 - RNA, 19 nt, Artificial Sequence
  Description of Artificial Sequence: Synthetic oligonucleotide
ggauagcaauguguguuca

SEQ ID NO: 634093 - RNA, 19 nt, Artificial Sequence
  Description of Artificial Sequence: Synthetic oligonucleotide
agccauugaucagcaugcu

SEQ ID NO: 634094 - RNA, 19 nt, Artificial Sequence
  Description of Artificial Sequence: Synthetic oligonucleotide
gaagcuccgcugcaauaau

SEQ ID NO: 634095 - RNA, 19 nt, Artificial Sequence
  Description of Artificial Sequence: Synthetic oligonucleotide
gggacucgugguguggcag

SEQ ID NO: 634096 - RNA, 19 nt, Artificial Sequence
  Description of Artificial Sequence: Synthetic oligonucleotide
ggguguaauuuuaucagau

SEQ ID NO: 634097 - RNA, 19 nt, Artificial Sequence
  Description of Artificial Sequence: Synthetic oligonucleotide
cacggacaaagggcccucc

SEQ ID NO: 634098 - RNA, 19 nt, Artificial Sequence
  Description of Artificial Sequence: Synthetic oligonucleotide
gcaucauguaaagaucgcu

SEQ ID NO: 634099 - RNA, 19 nt, Artificial Sequence
  Description of Artificial Sequence: Synthetic oligonucleotide
ggggauagcaauguguguu

SEQ ID NO: 634100 - RNA, 19 nt, Artificial Sequence
  Description of Artificial Sequence: Synthetic oligonucleotide
ccuuguuacacagccuuga

SEQ ID NO: 634101 - RNA, 19 nt, Artificial Sequence
  Description of Artificial Sequence: Synthetic oligonucleotide
cuugagccucauugugaaa

SEQ ID NO: 634102 - RNA, 19 nt, Artificial Sequence
  Description of Artificial Sequence: Synthetic oligonucleotide
aggcaagccgauagccacu

SEQ ID NO: 634103 - RNA, 19 nt, Artificial Sequence
  Description of Artificial Sequence: Synthetic oligonucleotide
cucgugguuuuccauugau

SEQ ID NO: 634104 - RNA, 19 nt, Artificial Sequence
  Description of Artificial Sequence: Synthetic oligonucleotide
cucgugguguggcagcccu

SEQ ID NO: 634105 - RNA, 19 nt, Artificial Sequence
  Description of Artificial Sequence: Synthetic oligonucleotide
ggagcggaucgccucucca

SEQ ID NO: 634106 - RNA, 19 nt, Artificial Sequence
  Description of Artificial Sequence: Synthetic oligonucleotide
guaggauucuagugaccuu

SEQ ID NO: 634107 - RNA, 19 nt, Artificial Sequence
  Description of Artificial Sequence: Synthetic oligonucleotide
cugauauagcgcacugcuu

SEQ ID NO: 634108 - RNA, 19 nt, Artificial Sequence
  Description of Artificial Sequence: Synthetic oligonucleotide
gcccugagaucccaccaca

SEQ ID NO: 634109 - RNA, 19 nt, Artificial Sequence
  Description of Artificial Sequence: Synthetic oligonucleotide
gcaggcaagccgauagcca

SEQ ID NO: 634110 - RNA, 19 nt, Artificial Sequence
  Description of Artificial Sequence: Synthetic oligonucleotide
cacuuuaacuaugguuggu

SEQ ID NO: 634111 - RNA, 19 nt, Artificial Sequence
  Description of Artificial Sequence: Synthetic oligonucleotide
caaagggcccuccaucguu

SEQ ID NO: 634112 - RNA, 19 nt, Artificial Sequence
  Description of Artificial Sequence: Synthetic oligonucleotide
ggcauuaaucagacagucu

SEQ ID NO: 634113 - RNA, 19 nt, Artificial Sequence
  Description of Artificial Sequence: Synthetic oligonucleotide
cguugguaaugguuacauc

SEQ ID NO: 634114 - RNA, 19 nt, Artificial Sequence
  Description of Artificial Sequence: Synthetic oligonucleotide
ggcgggacucguggugugg

SEQ ID NO: 634115 - RNA, 19 nt, Artificial Sequence
  Description of Artificial Sequence: Synthetic oligonucleotide
gcgguccccgaacacggac

SEQ ID NO: 634116 - RNA, 19 nt, Artificial Sequence
  Description of Artificial Sequence: Synthetic oligonucleotide
cggguguaauuuuaucaga

SEQ ID NO: 634117 - RNA, 19 nt, Artificial Sequence
  Description of Artificial Sequence: Synthetic oligonucleotide
caccagccuccacaaagua

SEQ ID NO: 634118 - RNA, 19 nt, Artificial Sequence
  Description of Artificial Sequence: Synthetic oligonucleotide
gacagccaucgcccuuaaa

SEQ ID NO: 634119 - RNA, 19 nt, Artificial Sequence
  Description of Artificial Sequence: Synthetic oligonucleotide
gcauaguuuucaagguaua

SEQ ID NO: 634120 - RNA, 19 nt, Artificial Sequence
  Description of Artificial Sequence: Synthetic oligonucleotide
cgauucgaagaauagugau

SEQ ID NO: 634121 - RNA, 19 nt, Artificial Sequence
  Description of Artificial Sequence: Synthetic oligonucleotide
cauucacugccaguguauu

SEQ ID NO: 634122 - RNA, 19 nt, Artificial Sequence
  Description of Artificial Sequence: Synthetic oligonucleotide
guauauggacagggcggcu

SEQ ID NO: 634123 - RNA, 19 nt, Artificial Sequence
  Description of Artificial Sequence: Synthetic oligonucleotide
gagaacgggcgggacucgu

SEQ ID NO: 634124 - RNA, 19 nt, Artificial Sequence
  Description of Artificial Sequence: Synthetic oligonucleotide
gcgggacucgugguguggc

SEQ ID NO: 634125 - RNA, 19 nt, Artificial Sequence
  Description of Artificial Sequence: Synthetic oligonucleotide
gcggcauuaaucagacagu

SEQ ID NO: 634126 - RNA, 19 nt, Artificial Sequence
  Description of Artificial Sequence: Synthetic oligonucleotide
cugucuaauuugguccaau

SEQ ID NO: 634127 - RNA, 19 nt, Artificial Sequence
  Description of Artificial Sequence: Synthetic oligonucleotide
ggcuucuacagcaccuccu

SEQ ID NO: 634128 - RNA, 19 nt, Artificial Sequence
  Description of Artificial Sequence: Synthetic oligonucleotide
ggcaagccgauagccacua

SEQ ID NO: 634129 - RNA, 19 nt, Artificial Sequence
  Description of Artificial Sequence: Synthetic oligonucleotide
cccaucguugguaaugguu

SEQ ID NO: 634130 - RNA, 19 nt, Artificial Sequence
  Description of Artificial Sequence: Synthetic oligonucleotide
ccagucgccagaaucuuuu

SEQ ID NO: 634131 - RNA, 19 nt, Artificial Sequence
  Description of Artificial Sequence: Synthetic oligonucleotide
ccgcugcaauaauuaccac

SEQ ID NO: 634132 - RNA, 19 nt, Artificial Sequence
  Description of Artificial Sequence: Synthetic oligonucleotide
gggcgggacucguggugug

SEQ ID NO: 634133 - RNA, 19 nt, Artificial Sequence
  Description of Artificial Sequence: Synthetic oligonucleotide
cuguucccgagaccccaua

SEQ ID NO: 634134 - RNA, 19 nt, Artificial Sequence
  Description of Artificial Sequence: Synthetic oligonucleotide
gccauugaucagcaugcuu

SEQ ID NO: 634135 - RNA, 19 nt, Artificial Sequence
  Description of Artificial Sequence: Synthetic oligonucleotide
ggcaugcccugagauccca

SEQ ID NO: 634136 - RNA, 19 nt, Artificial Sequence
  Description of Artificial Sequence: Synthetic oligonucleotide
gcuugacagccaucgcccu

SEQ ID NO: 634137 - RNA, 19 nt, Artificial Sequence
  Description of Artificial Sequence: Synthetic oligonucleotide
gccaucgcccuuaaaggau

SEQ ID NO: 634138 - RNA, 19 nt, Artificial Sequence
  Description of Artificial Sequence: Synthetic oligonucleotide
ggauucuagugaccuuguu

SEQ ID NO: 634139 - RNA, 19 nt, Artificial Sequence
  Description of Artificial Sequence: Synthetic oligonucleotide
acaccccugcuugcuuguu

SEQ ID NO: 634140 - RNA, 19 nt, Artificial Sequence
  Description of Artificial Sequence: Synthetic oligonucleotide
gguuaacuugagccucauu

SEQ ID NO: 634141 - RNA, 19 nt, Artificial Sequence
  Description of Artificial Sequence: Synthetic oligonucleotide
guacgagcuuugguauuuu

SEQ ID NO: 634142 - RNA, 19 nt, Artificial Sequence
  Description of Artificial Sequence: Synthetic oligonucleotide
ccaucgcccuuaaaggauu

SEQ ID NO: 634143 - RNA, 19 nt, Artificial Sequence
  Description of Artificial Sequence: Synthetic oligonucleotide
ggguuaacuugagccucau

SEQ ID NO: 634144 - RNA, 19 nt, Artificial Sequence
  Description of Artificial Sequence: Synthetic oligonucleotide
cgggacucgugguguggca

SEQ ID NO: 634145 - RNA, 19 nt, Artificial Sequence
  Description of Artificial Sequence: Synthetic oligonucleotide
cccauacugguugcauagu

SEQ ID NO: 634146 - RNA, 19 nt, Artificial Sequence
  Description of Artificial Sequence: Synthetic oligonucleotide
ccuugcaggcaagccgaua

SEQ ID NO: 634147 - RNA, 19 nt, Artificial Sequence
  Description of Artificial Sequence: Synthetic oligonucleotide
cggacaaagggcccuccau

SEQ ID NO: 634148 - RNA, 19 nt, Artificial Sequence
  Description of Artificial Sequence: Synthetic oligonucleotide
cccagucgccagaaucuuu

SEQ ID NO: 634149 - RNA, 19 nt, Artificial Sequence
  Description of Artificial Sequence: Synthetic oligonucleotide
cgggcgggacucguggugu

SEQ ID NO: 634150 - RNA, 19 nt, Artificial Sequence
  Description of Artificial Sequence: Synthetic oligonucleotide
aagaguuucacccgggugg

SEQ ID NO: 634151 - RNA, 19 nt, Artificial Sequence
  Description of Artificial Sequence: Synthetic oligonucleotide
gauucgagcaucuugacgc

SEQ ID NO: 634152 - RNA, 19 nt, Artificial Sequence
  Description of Artificial Sequence: Synthetic oligonucleotide
gaaagaaucauggugacag

SEQ ID NO: 634153 - RNA, 19 nt, Artificial Sequence
  Description of Artificial Sequence: Synthetic oligonucleotide
uguagauucagggagaucc

SEQ ID NO: 634154 - RNA, 19 nt, Artificial Sequence
  Description of Artificial Sequence: Synthetic oligonucleotide
acugcaacauuguagauag

SEQ ID NO: 634155 - RNA, 19 nt, Artificial Sequence
  Description of Artificial Sequence: Synthetic oligonucleotide
aaaagucccacgaugauuc

SEQ ID NO: 634156 - RNA, 19 nt, Artificial Sequence
  Description of Artificial Sequence: Synthetic oligonucleotide
ucauacgcaagaaagauuc

SEQ ID NO: 634157 - RNA, 19 nt, Artificial Sequence
  Description of Artificial Sequence: Synthetic oligonucleotide
aaccagacauacuucuucc

SEQ ID NO: 634158 - RNA, 19 nt, Artificial Sequence
  Description of Artificial Sequence: Synthetic oligonucleotide
agcagauucggacacagcg

SEQ ID NO: 634159 - RNA, 19 nt, Artificial Sequence
  Description of Artificial Sequence: Synthetic oligonucleotide
agugaugagacacaggacu

SEQ ID NO: 634160 - RNA, 19 nt, Artificial Sequence
  Description of Artificial Sequence: Synthetic oligonucleotide
cuuguaaagcaaaugcacg

SEQ ID NO: 634161 - RNA, 19 nt, Artificial Sequence
  Description of Artificial Sequence: Synthetic oligonucleotide
aaagauucccaguagcagu

SEQ ID NO: 634162 - RNA, 19 nt, Artificial Sequence
  Description of Artificial Sequence: Synthetic oligonucleotide
agagccguuccuuauaaac

SEQ ID NO: 634163 - RNA, 19 nt, Artificial Sequence
  Description of Artificial Sequence: Synthetic oligonucleotide
ucuucguuguuguuggugg

SEQ ID NO: 634164 - RNA, 19 nt, Artificial Sequence
  Description of Artificial Sequence: Synthetic oligonucleotide
aaagagcacaaccagagua

SEQ ID NO: 634165 - RNA, 19 nt, Artificial Sequence
  Description of Artificial Sequence: Synthetic oligonucleotide
gucaaauaagacuuggagc

SEQ ID NO: 634166 - RNA, 19 nt, Artificial Sequence
  Description of Artificial Sequence: Synthetic oligonucleotide
guaguuaaaguccuccagg

SEQ ID NO: 634167 - RNA, 19 nt, Artificial Sequence
  Description of Artificial Sequence: Synthetic oligonucleotide
uccauaucgguccaggagc

SEQ ID NO: 634168 - RNA, 19 nt, Artificial Sequence
  Description of Artificial Sequence: Synthetic oligonucleotide
aacuuuccgggcuucaguc

SEQ ID NO: 634169 - RNA, 19 nt, Artificial Sequence
  Description of Artificial Sequence: Synthetic oligonucleotide
auugaugggucauaggucu

SEQ ID NO: 634170 - RNA, 19 nt, Artificial Sequence
  Description of Artificial Sequence: Synthetic oligonucleotide
acuuguaaagcaaaugcac

SEQ ID NO: 634171 - RNA, 19 nt, Artificial Sequence
  Description of Artificial Sequence: Synthetic oligonucleotide
ugcaacauuguagauagcc

SEQ ID NO: 634172 - RNA, 19 nt, Artificial Sequence
  Description of Artificial Sequence: Synthetic oligonucleotide
uuagaaaugcuucgggugu

SEQ ID NO: 634173 - RNA, 19 nt, Artificial Sequence
  Description of Artificial Sequence: Synthetic oligonucleotide
aguauggagacaucaaugu

SEQ ID NO: 634174 - RNA, 19 nt, Artificial Sequence
  Description of Artificial Sequence: Synthetic oligonucleotide
ucuagcugaggcaguaugg

SEQ ID NO: 634175 - RNA, 19 nt, Artificial Sequence
  Description of Artificial Sequence: Synthetic oligonucleotide
cugugcaauugauugaugg

SEQ ID NO: 634176 - RNA, 19 nt, Artificial Sequence
  Description of Artificial Sequence: Synthetic oligonucleotide
uguaaagcaaaugcacgcg

SEQ ID NO: 634177 - RNA, 19 nt, Artificial Sequence
  Description of Artificial Sequence: Synthetic oligonucleotide
ugauucgagcaucuugacg

SEQ ID NO: 634178 - RNA, 19 nt, Artificial Sequence
  Description of Artificial Sequence: Synthetic oligonucleotide
auacgcaagaaagauuccc

SEQ ID NO: 634179 - RNA, 19 nt, Artificial Sequence
  Description of Artificial Sequence: Synthetic oligonucleotide
aaagaguuucacccgggug

SEQ ID NO: 634180 - RNA, 19 nt, Artificial Sequence
  Description of Artificial Sequence: Synthetic oligonucleotide
aauugucagcauaccaccc

SEQ ID NO: 634181 - RNA, 19 nt, Artificial Sequence
  Description of Artificial Sequence: Synthetic oligonucleotide
uccagggucaaauaagacu

SEQ ID NO: 634182 - RNA, 19 nt, Artificial Sequence
  Description of Artificial Sequence: Synthetic oligonucleotide
uggucguugaucuuuucag

SEQ ID NO: 634183 - RNA, 19 nt, Artificial Sequence
  Description of Artificial Sequence: Synthetic oligonucleotide
uguggaguguggcggaugg

SEQ ID NO: 634184 - RNA, 19 nt, Artificial Sequence
  Description of Artificial Sequence: Synthetic oligonucleotide
uuuggucucauacgcaaga

SEQ ID NO: 634185 - RNA, 19 nt, Artificial Sequence
  Description of Artificial Sequence: Synthetic oligonucleotide
ugguuauuguagauucagg

SEQ ID NO: 634186 - RNA, 19 nt, Artificial Sequence
  Description of Artificial Sequence: Synthetic oligonucleotide
uuguaaccauagaaaaugc

SEQ ID NO: 634187 - RNA, 19 nt, Artificial Sequence
  Description of Artificial Sequence: Synthetic oligonucleotide
uguguucggaagaacguug

SEQ ID NO: 634188 - RNA, 19 nt, Artificial Sequence
  Description of Artificial Sequence: Synthetic oligonucleotide
uguuagaaaugcuucgggu

SEQ ID NO: 634189 - RNA, 19 nt, Artificial Sequence
  Description of Artificial Sequence: Synthetic oligonucleotide
uauuguagauucagggaga

SEQ ID NO: 634190 - RNA, 19 nt, Artificial Sequence
  Description of Artificial Sequence: Synthetic oligonucleotide
ggagcugcccaccagaugg

SEQ ID NO: 634191 - RNA, 19 nt, Artificial Sequence
  Description of Artificial Sequence: Synthetic oligonucleotide
aacguuggaaaacgcuguc

SEQ ID NO: 634192 - RNA, 19 nt, Artificial Sequence
  Description of Artificial Sequence: Synthetic oligonucleotide
aauggugugugugugugug

SEQ ID NO: 634193 - RNA, 19 nt, Artificial Sequence
  Description of Artificial Sequence: Synthetic oligonucleotide
gaugauucgagcaucuuga

SEQ ID NO: 634194 - RNA, 19 nt, Artificial Sequence
  Description of Artificial Sequence: Synthetic oligonucleotide
uacgcaagaaagauuccca

SEQ ID NO: 634195 - RNA, 19 nt, Artificial Sequence
  Description of Artificial Sequence: Synthetic oligonucleotide
agcacaaccagaguaaugu

SEQ ID NO: 634196 - RNA, 19 nt, Artificial Sequence
  Description of Artificial Sequence: Synthetic oligonucleotide
guaauguaggaagagaaca

SEQ ID NO: 634197 - RNA, 19 nt, Artificial Sequence
  Description of Artificial Sequence: Synthetic oligonucleotide
cacaaccagaguaauguag

SEQ ID NO: 634198 - RNA, 19 nt, Artificial Sequence
  Description of Artificial Sequence: Synthetic oligonucleotide
aaugcuucggguguuggca

SEQ ID NO: 634199 - RNA, 19 nt, Artificial Sequence
  Description of Artificial Sequence: Synthetic oligonucleotide
gauauggcccuccacugcc

SEQ ID NO: 634200 - RNA, 19 nt, Artificial Sequence
  Description of Artificial Sequence: Synthetic oligonucleotide
gucgguuugacucacccug

SEQ ID NO: 634201 - RNA, 19 nt, Artificial Sequence
  Description of Artificial Sequence: Synthetic oligonucleotide
cucauagaaaagucccacg

SEQ ID NO: 634202 - RNA, 19 nt, Artificial Sequence
  Description of Artificial Sequence: Synthetic oligonucleotide
ucauccagcguugagguga

SEQ ID NO: 634203 - RNA, 19 nt, Artificial Sequence
  Description of Artificial Sequence: Synthetic oligonucleotide
auaccacccaaugaggaac

SEQ ID NO: 634204 - RNA, 19 nt, Artificial Sequence
  Description of Artificial Sequence: Synthetic oligonucleotide
aaccaauugucagcauacc

SEQ ID NO: 634205 - RNA, 19 nt, Artificial Sequence
  Description of Artificial Sequence: Synthetic oligonucleotide
cacugguuauuguagauuc

SEQ ID NO: 634206 - RNA, 19 nt, Artificial Sequence
  Description of Artificial Sequence: Synthetic oligonucleotide
caguauggagacaucaaug

SEQ ID NO: 634207 - RNA, 19 nt, Artificial Sequence
  Description of Artificial Sequence: Synthetic oligonucleotide
cuggucgcgagucaggccg

SEQ ID NO: 634208 - RNA, 19 nt, Artificial Sequence
  Description of Artificial Sequence: Synthetic oligonucleotide
ugcaauugauugauggguc

SEQ ID NO: 634209 - RNA, 19 nt, Artificial Sequence
  Description of Artificial Sequence: Synthetic oligonucleotide
uuuuggucucauacgcaag

SEQ ID NO: 634210 - RNA, 19 nt, Artificial Sequence
  Description of Artificial Sequence: Synthetic oligonucleotide
uccguaauggucugguugu

SEQ ID NO: 634211 - RNA, 19 nt, Artificial Sequence
  Description of Artificial Sequence: Synthetic oligonucleotide
caaucugccagauggcaag

SEQ ID NO: 634212 - RNA, 19 nt, Artificial Sequence
  Description of Artificial Sequence: Synthetic oligonucleotide
agugcucuagcugaggcag

SEQ ID NO: 634213 - RNA, 19 nt, Artificial Sequence
  Description of Artificial Sequence: Synthetic oligonucleotide
agaacguuggaaaacgcug

SEQ ID NO: 634214 - RNA, 19 nt, Artificial Sequence
  Description of Artificial Sequence: Synthetic oligonucleotide
aaugcacgcgacucccauc

SEQ ID NO: 634215 - RNA, 19 nt, Artificial Sequence
  Description of Artificial Sequence: Synthetic oligonucleotide
ucacaucggaaauccaccc

SEQ ID NO: 634216 - RNA, 19 nt, Artificial Sequence
  Description of Artificial Sequence: Synthetic oligonucleotide
caaaugucucgaugguucg

SEQ ID NO: 634217 - RNA, 19 nt, Artificial Sequence
  Description of Artificial Sequence: Synthetic oligonucleotide
ugacuacagaugcuccggg

SEQ ID NO: 634218 - RNA, 19 nt, Artificial Sequence
  Description of Artificial Sequence: Synthetic oligonucleotide
ggaagaacguuggaaaacg

SEQ ID NO: 634219 - RNA, 19 nt, Artificial Sequence
  Description of Artificial Sequence: Synthetic oligonucleotide
ucucauacgcaagaaagau

SEQ ID NO: 634220 - RNA, 19 nt, Artificial Sequence
  Description of Artificial Sequence: Synthetic oligonucleotide
ucggaaauccacccgggcu

SEQ ID NO: 634221 - RNA, 19 nt, Artificial Sequence
  Description of Artificial Sequence: Synthetic oligonucleotide
uacagcuggaucugagaag

SEQ ID NO: 634222 - RNA, 19 nt, Artificial Sequence
  Description of Artificial Sequence: Synthetic oligonucleotide
ggucucauacgcaagaaag

SEQ ID NO: 634223 - RNA, 19 nt, Artificial Sequence
  Description of Artificial Sequence: Synthetic oligonucleotide
aucggaaauccacccgggc

SEQ ID NO: 634224 - RNA, 19 nt, Artificial Sequence
  Description of Artificial Sequence: Synthetic oligonucleotide
aaaacuuuccgggcuucag

SEQ ID NO: 634225 - RNA, 19 nt, Artificial Sequence
  Description of Artificial Sequence: Synthetic oligonucleotide
accaauugucagcauacca

SEQ ID NO: 634226 - RNA, 19 nt, Artificial Sequence
  Description of Artificial Sequence: Synthetic oligonucleotide
cuacccaagcacaccacgg

SEQ ID NO: 634227 - RNA, 19 nt, Artificial Sequence
  Description of Artificial Sequence: Synthetic oligonucleotide
aagaacguuggaaaacgcu

SEQ ID NO: 634228 - RNA, 19 nt, Artificial Sequence
  Description of Artificial Sequence: Synthetic oligonucleotide
ugauauggcccuccacugc

SEQ ID NO: 634229 - RNA, 19 nt, Artificial Sequence
  Description of Artificial Sequence: Synthetic oligonucleotide
aaaacgcugucgguuugac

SEQ ID NO: 634230 - RNA, 19 nt, Artificial Sequence
  Description of Artificial Sequence: Synthetic oligonucleotide
ugcacaccuacccaagcac

SEQ ID NO: 634231 - RNA, 19 nt, Artificial Sequence
  Description of Artificial Sequence: Synthetic oligonucleotide
agccguuccuuauaaaccu

SEQ ID NO: 634232 - RNA, 19 nt, Artificial Sequence
  Description of Artificial Sequence: Synthetic oligonucleotide
aaugucucgaugguucggu

SEQ ID NO: 634233 - RNA, 19 nt, Artificial Sequence
  Description of Artificial Sequence: Synthetic oligonucleotide
cugguuauuguagauucag

SEQ ID NO: 634234 - RNA, 19 nt, Artificial Sequence
  Description of Artificial Sequence: Synthetic oligonucleotide
uccccuacuggcuguaucc

SEQ ID NO: 634235 - RNA, 19 nt, Artificial Sequence
  Description of Artificial Sequence: Synthetic oligonucleotide
gauggauguguucggaaga

SEQ ID NO: 634236 - RNA, 19 nt, Artificial Sequence
  Description of Artificial Sequence: Synthetic oligonucleotide
aaaugucucgaugguucgg

SEQ ID NO: 634237 - RNA, 19 nt, Artificial Sequence
  Description of Artificial Sequence: Synthetic oligonucleotide
cagggcuaaagccaaggcc

SEQ ID NO: 634238 - RNA, 19 nt, Artificial Sequence
  Description of Artificial Sequence: Synthetic oligonucleotide
aaccugcgcaucuugggca

SEQ ID NO: 634239 - RNA, 19 nt, Artificial Sequence
  Description of Artificial Sequence: Synthetic oligonucleotide
acgcaagaaagauucccag

SEQ ID NO: 634240 - RNA, 19 nt, Artificial Sequence
  Description of Artificial Sequence: Synthetic oligonucleotide
guccguaauggucugguug

SEQ ID NO: 634241 - RNA, 19 nt, Artificial Sequence
  Description of Artificial Sequence: Synthetic oligonucleotide
augauucgagcaucuugac

SEQ ID NO: 634242 - RNA, 19 nt, Artificial Sequence
  Description of Artificial Sequence: Synthetic oligonucleotide
caugccgacagcccugugg

SEQ ID NO: 634243 - RNA, 19 nt, Artificial Sequence
  Description of Artificial Sequence: Synthetic oligonucleotide
ugucucgaugguucggugc

SEQ ID NO: 634244 - RNA, 19 nt, Artificial Sequence
  Description of Artificial Sequence: Synthetic oligonucleotide
aucuugacgcuucagguuu

SEQ ID NO: 634245 - RNA, 19 nt, Artificial Sequence
  Description of Artificial Sequence: Synthetic oligonucleotide
gagccguuccuuauaaacc

SEQ ID NO: 634246 - RNA, 19 nt, Artificial Sequence
  Description of Artificial Sequence: Synthetic oligonucleotide
aauucacgguucucuuucu

SEQ ID NO: 634247 - RNA, 19 nt, Artificial Sequence
  Description of Artificial Sequence: Synthetic oligonucleotide
ccaauugucagcauaccac

SEQ ID NO: 634248 - RNA, 19 nt, Artificial Sequence
  Description of Artificial Sequence: Synthetic oligonucleotide
agaguaauguaggaagaga

SEQ ID NO: 634249 - RNA, 19 nt, Artificial Sequence
  Description of Artificial Sequence: Synthetic oligonucleotide
aaaugcacgcgacucccau

SEQ ID NO: 634250 - RNA, 19 nt, Artificial Sequence
  Description of Artificial Sequence: Synthetic oligonucleotide
cacgcgacucccaucacag

SEQ ID NO: 634251 - RNA, 19 nt, Artificial Sequence
  Description of Artificial Sequence: Synthetic oligonucleotide
gauucggacacagcggcug

SEQ ID NO: 634252 - RNA, 19 nt, Artificial Sequence
  Description of Artificial Sequence: Synthetic oligonucleotide
ucccacgaugauucgagca

SEQ ID NO: 634253 - RNA, 19 nt, Artificial Sequence
  Description of Artificial Sequence: Synthetic oligonucleotide
uggaucugagaagaaacuc

SEQ ID NO: 634254 - RNA, 19 nt, Artificial Sequence
  Description of Artificial Sequence: Synthetic oligonucleotide
guaaagcaaaugcacgcga

SEQ ID NO: 634255 - RNA, 19 nt, Artificial Sequence
  Description of Artificial Sequence: Synthetic oligonucleotide
cugacuacagaugcuccgg

SEQ ID NO: 634256 - RNA, 19 nt, Artificial Sequence
  Description of Artificial Sequence: Synthetic oligonucleotide
gaagaaacucuggcggaag

SEQ ID NO: 634257 - RNA, 19 nt, Artificial Sequence
  Description of Artificial Sequence: Synthetic oligonucleotide
uaccacccaaugaggaacc

SEQ ID NO: 634258 - RNA, 19 nt, Artificial Sequence
  Description of Artificial Sequence: Synthetic oligonucleotide
gucacaucggaaauccacc

SEQ ID NO: 634259 - RNA, 19 nt, Artificial Sequence
  Description of Artificial Sequence: Synthetic oligonucleotide
augcacgcgacucccauca

SEQ ID NO: 634260 - RNA, 19 nt, Artificial Sequence
  Description of Artificial Sequence: Synthetic oligonucleotide
cacaucggaaauccacccg

SEQ ID NO: 634261 - RNA, 19 nt, Artificial Sequence
  Description of Artificial Sequence: Synthetic oligonucleotide
gaccuacuguggcauacag

SEQ ID NO: 634262 - RNA, 19 nt, Artificial Sequence
  Description of Artificial Sequence: Synthetic oligonucleotide
ggauggauguguucggaag

SEQ ID NO: 634263 - RNA, 19 nt, Artificial Sequence
  Description of Artificial Sequence: Synthetic oligonucleotide
cauacgcaagaaagauucc

SEQ ID NO: 634264 - RNA, 19 nt, Artificial Sequence
  Description of Artificial Sequence: Synthetic oligonucleotide
acaauggugugugugugug

SEQ ID NO: 634265 - RNA, 19 nt, Artificial Sequence
  Description of Artificial Sequence: Synthetic oligonucleotide
cugucgguuugacucaccc

SEQ ID NO: 634266 - RNA, 19 nt, Artificial Sequence
  Description of Artificial Sequence: Synthetic oligonucleotide
cuuuuggucucauacgcaa

SEQ ID NO: 634267 - RNA, 19 nt, Artificial Sequence
  Description of Artificial Sequence: Synthetic oligonucleotide
ggauuguggaguguggcgg

SEQ ID NO: 634268 - RNA, 19 nt, Artificial Sequence
  Description of Artificial Sequence: Synthetic oligonucleotide
uuggaaaacgcugucgguu

SEQ ID NO: 634269 - RNA, 19 nt, Artificial Sequence
  Description of Artificial Sequence: Synthetic oligonucleotide
gaagaacguuggaaaacgc

SEQ ID NO: 634270 - RNA, 19 nt, Artificial Sequence
  Description of Artificial Sequence: Synthetic oligonucleotide
aagucggggucacaucgga

SEQ ID NO: 634271 - RNA, 19 nt, Artificial Sequence
  Description of Artificial Sequence: Synthetic oligonucleotide
uguucggaagaacguugga

SEQ ID NO: 634272 - RNA, 19 nt, Artificial Sequence
  Description of Artificial Sequence: Synthetic oligonucleotide
caaccugcgcaucuugggc

SEQ ID NO: 634273 - RNA, 19 nt, Artificial Sequence
  Description of Artificial Sequence: Synthetic oligonucleotide
agaguuucacccggguggg

SEQ ID NO: 634274 - RNA, 19 nt, Artificial Sequence
  Description of Artificial Sequence: Synthetic oligonucleotide
caucggaaauccacccggg

SEQ ID NO: 634275 - RNA, 19 nt, Artificial Sequence
  Description of Artificial Sequence: Synthetic oligonucleotide
agcauaccacccaaugagg

SEQ ID NO: 634276 - RNA, 19 nt, Artificial Sequence
  Description of Artificial Sequence: Synthetic oligonucleotide
ugugugugugugugugugc

SEQ ID NO: 634277 - RNA, 19 nt, Artificial Sequence
  Description of Artificial Sequence: Synthetic oligonucleotide
ugccaagccauguauucau

SEQ ID NO: 634278 - RNA, 19 nt, Artificial Sequence
  Description of Artificial Sequence: Synthetic oligonucleotide
uggaaaacgcugucgguuu

SEQ ID NO: 634279 - RNA, 19 nt, Artificial Sequence
  Description of Artificial Sequence: Synthetic oligonucleotide
agaaaagucccacgaugau

SEQ ID NO: 634280 - RNA, 19 nt, Artificial Sequence
  Description of Artificial Sequence: Synthetic oligonucleotide
uccauccagagcagggaga

SEQ ID NO: 634281 - RNA, 19 nt, Artificial Sequence
  Description of Artificial Sequence: Synthetic oligonucleotide
cucuagcugaggcaguaug

SEQ ID NO: 634282 - RNA, 19 nt, Artificial Sequence
  Description of Artificial Sequence: Synthetic oligonucleotide
gagauccccacccgucagg

SEQ ID NO: 634283 - RNA, 19 nt, Artificial Sequence
  Description of Artificial Sequence: Synthetic oligonucleotide
ugggauuguggaguguggc

SEQ ID NO: 634284 - RNA, 19 nt, Artificial Sequence
  Description of Artificial Sequence: Synthetic oligonucleotide
uggcaaaugucucgauggu

SEQ ID NO: 634285 - RNA, 19 nt, Artificial Sequence
  Description of Artificial Sequence: Synthetic oligonucleotide
uggugugugugugugugug

SEQ ID NO: 634286 - RNA, 19 nt, Artificial Sequence
  Description of Artificial Sequence: Synthetic oligonucleotide
aaacgcugucgguuugacu

SEQ ID NO: 634287 - RNA, 19 nt, Artificial Sequence
  Description of Artificial Sequence: Synthetic oligonucleotide
cacccgaacggccaccucc

SEQ ID NO: 634288 - RNA, 19 nt, Artificial Sequence
  Description of Artificial Sequence: Synthetic oligonucleotide
uuaacagguacagcuggau

SEQ ID NO: 634289 - RNA, 19 nt, Artificial Sequence
  Description of Artificial Sequence: Synthetic oligonucleotide
guguucggaagaacguugg

SEQ ID NO: 634290 - RNA, 19 nt, Artificial Sequence
  Description of Artificial Sequence: Synthetic oligonucleotide
guauccuucuugauacccc

SEQ ID NO: 634291 - RNA, 19 nt, Artificial Sequence
  Description of Artificial Sequence: Synthetic oligonucleotide
uguccauaucgguccagga

SEQ ID NO: 634292 - RNA, 19 nt, Artificial Sequence
  Description of Artificial Sequence: Synthetic oligonucleotide
gggauuguggaguguggcg

SEQ ID NO: 634293 - RNA, 19 nt, Artificial Sequence
  Description of Artificial Sequence: Synthetic oligonucleotide
gaagucggggucacaucgg

SEQ ID NO: 634294 - RNA, 19 nt, Artificial Sequence
  Description of Artificial Sequence: Synthetic oligonucleotide
gugaugagacacaggacug

SEQ ID NO: 634295 - RNA, 19 nt, Artificial Sequence
  Description of Artificial Sequence: Synthetic oligonucleotide
ugugugugugugugugccc

SEQ ID NO: 634296 - RNA, 19 nt, Artificial Sequence
  Description of Artificial Sequence: Synthetic oligonucleotide
acccaccagaucuuggggu

SEQ ID NO: 634297 - RNA, 19 nt, Artificial Sequence
  Description of Artificial Sequence: Synthetic oligonucleotide
gcaucauaggccaauggug

SEQ ID NO: 634298 - RNA, 19 nt, Artificial Sequence
  Description of Artificial Sequence: Synthetic oligonucleotide
uccccucgggugaucaacc

SEQ ID NO: 634299 - RNA, 19 nt, Artificial Sequence
  Description of Artificial Sequence: Synthetic oligonucleotide
ggcaagagucagaacaucc

SEQ ID NO: 634300 - RNA, 19 nt, Artificial Sequence
  Description of Artificial Sequence: Synthetic oligonucleotide
acccaaugaggaaccagac

SEQ ID NO: 634301 - RNA, 19 nt, Artificial Sequence
  Description of Artificial Sequence: Synthetic oligonucleotide
agcccuguggucguugauc

SEQ ID NO: 634302 - RNA, 19 nt, Artificial Sequence
  Description of Artificial Sequence: Synthetic oligonucleotide
ugucgguuugacucacccu

SEQ ID NO: 634303 - RNA, 19 nt, Artificial Sequence
  Description of Artificial Sequence: Synthetic oligonucleotide
gugugugugugugugugcc

SEQ ID NO: 634304 - RNA, 19 nt, Artificial Sequence
  Description of Artificial Sequence: Synthetic oligonucleotide
gcaaaugucucgaugguuc

SEQ ID NO: 634305 - RNA, 19 nt, Artificial Sequence
  Description of Artificial Sequence: Synthetic oligonucleotide
ggugauauggcccuccacu

SEQ ID NO: 634306 - RNA, 19 nt, Artificial Sequence
  Description of Artificial Sequence: Synthetic oligonucleotide
uuucacccgggugggauug

SEQ ID NO: 634307 - RNA, 19 nt, Artificial Sequence
  Description of Artificial Sequence: Synthetic oligonucleotide
guguccauaucgguccagg

SEQ ID NO: 634308 - RNA, 19 nt, Artificial Sequence
  Description of Artificial Sequence: Synthetic oligonucleotide
ugugugugugugugugugu

SEQ ID NO: 634309 - RNA, 19 nt, Artificial Sequence
  Description of Artificial Sequence: Synthetic oligonucleotide
ccucgggugaucaaccugc

SEQ ID NO: 634310 - RNA, 19 nt, Artificial Sequence
  Description of Artificial Sequence: Synthetic oligonucleotide
gucucgaugguucggugca

SEQ ID NO: 634311 - RNA, 19 nt, Artificial Sequence
  Description of Artificial Sequence: Synthetic oligonucleotide
ccugacuacagaugcuccg

SEQ ID NO: 634312 - RNA, 19 nt, Artificial Sequence
  Description of Artificial Sequence: Synthetic oligonucleotide
ucacugguuauuguagauu

SEQ ID NO: 634313 - RNA, 19 nt, Artificial Sequence
  Description of Artificial Sequence: Synthetic oligonucleotide
gugugugugugugugugug

SEQ ID NO: 634314 - RNA, 19 nt, Artificial Sequence
  Description of Artificial Sequence: Synthetic oligonucleotide
aagucccacgaugauucga

SEQ ID NO: 634315 - RNA, 19 nt, Artificial Sequence
  Description of Artificial Sequence: Synthetic oligonucleotide
gugugugugcccuccuccc

SEQ ID NO: 634316 - RNA, 19 nt, Artificial Sequence
  Description of Artificial Sequence: Synthetic oligonucleotide
auaucgguccaggagccgu

SEQ ID NO: 634317 - RNA, 19 nt, Artificial Sequence
  Description of Artificial Sequence: Synthetic oligonucleotide
aggcgcacacccgaacggc

SEQ ID NO: 634318 - RNA, 19 nt, Artificial Sequence
  Description of Artificial Sequence: Synthetic oligonucleotide
ggagccguuggccaggcac

SEQ ID NO: 634319 - RNA, 19 nt, Artificial Sequence
  Description of Artificial Sequence: Synthetic oligonucleotide
caggcgcacacccgaacgg

SEQ ID NO: 634320 - RNA, 19 nt, Artificial Sequence
  Description of Artificial Sequence: Synthetic oligonucleotide
ucggggucacaucggaaau

SEQ ID NO: 634321 - RNA, 19 nt, Artificial Sequence
  Description of Artificial Sequence: Synthetic oligonucleotide
cuguauccuucuugauacc

SEQ ID NO: 634322 - RNA, 19 nt, Artificial Sequence
  Description of Artificial Sequence: Synthetic oligonucleotide
ccgugaacgaagcugcugc

SEQ ID NO: 634323 - RNA, 19 nt, Artificial Sequence
  Description of Artificial Sequence: Synthetic oligonucleotide
aagagccguuccuuauaaa

SEQ ID NO: 634324 - RNA, 19 nt, Artificial Sequence
  Description of Artificial Sequence: Synthetic oligonucleotide
gaguguggcggauggaugu

SEQ ID NO: 634325 - RNA, 19 nt, Artificial Sequence
  Description of Artificial Sequence: Synthetic oligonucleotide
cacgguucucuuucuccag

SEQ ID NO: 634326 - RNA, 19 nt, Artificial Sequence
  Description of Artificial Sequence: Synthetic oligonucleotide
ucgggugaucaaccugcgc

SEQ ID NO: 634327 - RNA, 19 nt, Artificial Sequence
  Description of Artificial Sequence: Synthetic oligonucleotide
uggugauauggcccuccac

SEQ ID NO: 634328 - RNA, 19 nt, Artificial Sequence
  Description of Artificial Sequence: Synthetic oligonucleotide
accacggcacaauggugug

SEQ ID NO: 634329 - RNA, 19 nt, Artificial Sequence
  Description of Artificial Sequence: Synthetic oligonucleotide
guucggaagaacguuggaa

SEQ ID NO: 634330 - RNA, 19 nt, Artificial Sequence
  Description of Artificial Sequence: Synthetic oligonucleotide
caaccagaguaauguagga

SEQ ID NO: 634331 - RNA, 19 nt, Artificial Sequence
  Description of Artificial Sequence: Synthetic oligonucleotide
cauaccacccaaugaggaa

SEQ ID NO: 634332 - RNA, 19 nt, Artificial Sequence
  Description of Artificial Sequence: Synthetic oligonucleotide
gagcacaaccagaguaaug

SEQ ID NO: 634333 - RNA, 19 nt, Artificial Sequence
  Description of Artificial Sequence: Synthetic oligonucleotide
ugugugugugugcccuccu

SEQ ID NO: 634334 - RNA, 19 nt, Artificial Sequence
  Description of Artificial Sequence: Synthetic oligonucleotide
gcaauugauugauggguca

SEQ ID NO: 634335 - RNA, 19 nt, Artificial Sequence
  Description of Artificial Sequence: Synthetic oligonucleotide
acgcgacucccaucacagc

SEQ ID NO: 634336 - RNA, 19 nt, Artificial Sequence
  Description of Artificial Sequence: Synthetic oligonucleotide
ugcugccgagacuggagcu

SEQ ID NO: 634337 - RNA, 19 nt, Artificial Sequence
  Description of Artificial Sequence: Synthetic oligonucleotide
ccuacccaagcacaccacg

SEQ ID NO: 634338 - RNA, 19 nt, Artificial Sequence
  Description of Artificial Sequence: Synthetic oligonucleotide
gaacguuggaaaacgcugu

SEQ ID NO: 634339 - RNA, 19 nt, Artificial Sequence
  Description of Artificial Sequence: Synthetic oligonucleotide
augucucgaugguucggug

SEQ ID NO: 634340 - RNA, 19 nt, Artificial Sequence
  Description of Artificial Sequence: Synthetic oligonucleotide
cccaccagauggaagucgg

SEQ ID NO: 634341 - RNA, 19 nt, Artificial Sequence
  Description of Artificial Sequence: Synthetic oligonucleotide
ucgcgagucaggccgcggu

SEQ ID NO: 634342 - RNA, 19 nt, Artificial Sequence
  Description of Artificial Sequence: Synthetic oligonucleotide
gaaaacgcugucgguuuga

SEQ ID NO: 634343 - RNA, 19 nt, Artificial Sequence
  Description of Artificial Sequence: Synthetic oligonucleotide
gguucggugcaagggaucc

SEQ ID NO: 634344 - RNA, 19 nt, Artificial Sequence
  Description of Artificial Sequence: Synthetic oligonucleotide
gacccugucuucauggugu

SEQ ID NO: 634345 - RNA, 19 nt, Artificial Sequence
  Description of Artificial Sequence: Synthetic oligonucleotide
gugggauuguggagugugg

SEQ ID NO: 634346 - RNA, 19 nt, Artificial Sequence
  Description of Artificial Sequence: Synthetic oligonucleotide
cagcuaagccggucagggg

SEQ ID NO: 634347 - RNA, 19 nt, Artificial Sequence
  Description of Artificial Sequence: Synthetic oligonucleotide
gacauugccuccacccauc

SEQ ID NO: 634348 - RNA, 19 nt, Artificial Sequence
  Description of Artificial Sequence: Synthetic oligonucleotide
auggauguguucggaagaa

SEQ ID NO: 634349 - RNA, 19 nt, Artificial Sequence
  Description of Artificial Sequence: Synthetic oligonucleotide
aguagcaguagcagccccu

SEQ ID NO: 634350 - RNA, 19 nt, Artificial Sequence
  Description of Artificial Sequence: Synthetic oligonucleotide
cagaccuacuguggcauac

SEQ ID NO: 634351 - RNA, 19 nt, Artificial Sequence
  Description of Artificial Sequence: Synthetic oligonucleotide
augccaagccauguauuca

SEQ ID NO: 634352 - RNA, 19 nt, Artificial Sequence
  Description of Artificial Sequence: Synthetic oligonucleotide
gcaaaugcacgcgacuccc

SEQ ID NO: 634353 - RNA, 19 nt, Artificial Sequence
  Description of Artificial Sequence: Synthetic oligonucleotide
uggauguguucggaagaac

SEQ ID NO: 634354 - RNA, 19 nt, Artificial Sequence
  Description of Artificial Sequence: Synthetic oligonucleotide
ccauaucgguccaggagcc

SEQ ID NO: 634355 - RNA, 19 nt, Artificial Sequence
  Description of Artificial Sequence: Synthetic oligonucleotide
uguggcggauggauguguu

SEQ ID NO: 634356 - RNA, 19 nt, Artificial Sequence
  Description of Artificial Sequence: Synthetic oligonucleotide
uccgggagcugcccaccag

SEQ ID NO: 634357 - RNA, 19 nt, Artificial Sequence
  Description of Artificial Sequence: Synthetic oligonucleotide
uccaggcgcacacccgaac

SEQ ID NO: 634358 - RNA, 19 nt, Artificial Sequence
  Description of Artificial Sequence: Synthetic oligonucleotide
ggcaucauaggccaauggu

SEQ ID NO: 634359 - RNA, 19 nt, Artificial Sequence
  Description of Artificial Sequence: Synthetic oligonucleotide
auguguucggaagaacguu

SEQ ID NO: 634360 - RNA, 19 nt, Artificial Sequence
  Description of Artificial Sequence: Synthetic oligonucleotide
cuggaucugagaagaaacu

SEQ ID NO: 634361 - RNA, 19 nt, Artificial Sequence
  Description of Artificial Sequence: Synthetic oligonucleotide
ccuacuggcuguauccuuc

SEQ ID NO: 634362 - RNA, 19 nt, Artificial Sequence
  Description of Artificial Sequence: Synthetic oligonucleotide
agagcacaaccagaguaau

SEQ ID NO: 634363 - RNA, 19 nt, Artificial Sequence
  Description of Artificial Sequence: Synthetic oligonucleotide
cauaucgguccaggagccg

SEQ ID NO: 634364 - RNA, 19 nt, Artificial Sequence
  Description of Artificial Sequence: Synthetic oligonucleotide
cccgucaggaaaaccuucc

SEQ ID NO: 634365 - RNA, 19 nt, Artificial Sequence
  Description of Artificial Sequence: Synthetic oligonucleotide
auggugugugugugugugu

SEQ ID NO: 634366 - RNA, 19 nt, Artificial Sequence
  Description of Artificial Sequence: Synthetic oligonucleotide
ggcggauggauguguucgg

SEQ ID NO: 634367 - RNA, 19 nt, Artificial Sequence
  Description of Artificial Sequence: Synthetic oligonucleotide
cugcacaccuacccaagca

SEQ ID NO: 634368 - RNA, 19 nt, Artificial Sequence
  Description of Artificial Sequence: Synthetic oligonucleotide
ggaaaacgcugucgguuug

SEQ ID NO: 634369 - RNA, 19 nt, Artificial Sequence
  Description of Artificial Sequence: Synthetic oligonucleotide
caccuggucgcgagucagg

SEQ ID NO: 634370 - RNA, 19 nt, Artificial Sequence
  Description of Artificial Sequence: Synthetic oligonucleotide
ggcgccgugaacgaagcug

SEQ ID NO: 634371 - RNA, 19 nt, Artificial Sequence
  Description of Artificial Sequence: Synthetic oligonucleotide
acgcugucgguuugacuca

SEQ ID NO: 634372 - RNA, 19 nt, Artificial Sequence
  Description of Artificial Sequence: Synthetic oligonucleotide
ugggguccguaauggucug

SEQ ID NO: 634373 - RNA, 19 nt, Artificial Sequence
  Description of Artificial Sequence: Synthetic oligonucleotide
uagaaaugcuucggguguu

SEQ ID NO: 634374 - RNA, 19 nt, Artificial Sequence
  Description of Artificial Sequence: Synthetic oligonucleotide
agauccccacccgucagga

SEQ ID NO: 634375 - RNA, 19 nt, Artificial Sequence
  Description of Artificial Sequence: Synthetic oligonucleotide
cauugccuccacccaucag

SEQ ID NO: 634376 - RNA, 19 nt, Artificial Sequence
  Description of Artificial Sequence: Synthetic oligonucleotide
caccacggcacaauggugu

SEQ ID NO: 634377 - RNA, 19 nt, Artificial Sequence
  Description of Artificial Sequence: Synthetic oligonucleotide
caccagaucuugggguccg

SEQ ID NO: 634378 - RNA, 19 nt, Artificial Sequence
  Description of Artificial Sequence: Synthetic oligonucleotide
ugcucuagcugaggcagua

SEQ ID NO: 634379 - RNA, 19 nt, Artificial Sequence
  Description of Artificial Sequence: Synthetic oligonucleotide
ugugugugugugugcccuc

SEQ ID NO: 634380 - RNA, 19 nt, Artificial Sequence
  Description of Artificial Sequence: Synthetic oligonucleotide
uaucgguccaggagccguu

SEQ ID NO: 634381 - RNA, 19 nt, Artificial Sequence
  Description of Artificial Sequence: Synthetic oligonucleotide
gguggcgccgugaacgaag

SEQ ID NO: 634382 - RNA, 19 nt, Artificial Sequence
  Description of Artificial Sequence: Synthetic oligonucleotide
ugaucaaccugcgcaucuu

SEQ ID NO: 634383 - RNA, 19 nt, Artificial Sequence
  Description of Artificial Sequence: Synthetic oligonucleotide
ggagauccccacccgucag

SEQ ID NO: 634384 - RNA, 19 nt, Artificial Sequence
  Description of Artificial Sequence: Synthetic oligonucleotide
ccaggcgcacacccgaacg

SEQ ID NO: 634385 - RNA, 19 nt, Artificial Sequence
  Description of Artificial Sequence: Synthetic oligonucleotide
gugugugugugugcccucc

SEQ ID NO: 634386 - RNA, 19 nt, Artificial Sequence
  Description of Artificial Sequence: Synthetic oligonucleotide
gcggaaggugaucucaauc

SEQ ID NO: 634387 - RNA, 19 nt, Artificial Sequence
  Description of Artificial Sequence: Synthetic oligonucleotide
gcaagagucagaacaucca

SEQ ID NO: 634388 - RNA, 19 nt, Artificial Sequence
  Description of Artificial Sequence: Synthetic oligonucleotide
gucccacgaugauucgagc

SEQ ID NO: 634389 - RNA, 19 nt, Artificial Sequence
  Description of Artificial Sequence: Synthetic oligonucleotide
caagagucagaacauccau

SEQ ID NO: 634390 - RNA, 19 nt, Artificial Sequence
  Description of Artificial Sequence: Synthetic oligonucleotide
ugguggcaaucuucuucca

SEQ ID NO: 634391 - RNA, 19 nt, Artificial Sequence
  Description of Artificial Sequence: Synthetic oligonucleotide
uggucgcgagucaggccgc

SEQ ID NO: 634392 - RNA, 19 nt, Artificial Sequence
  Description of Artificial Sequence: Synthetic oligonucleotide
ccagggucaaauaagacuu

SEQ ID NO: 634393 - RNA, 19 nt, Artificial Sequence
  Description of Artificial Sequence: Synthetic oligonucleotide
gaacggccaccuccuccag

SEQ ID NO: 634394 - RNA, 19 nt, Artificial Sequence
  Description of Artificial Sequence: Synthetic oligonucleotide
cugcaacauuguagauagc

SEQ ID NO: 634395 - RNA, 19 nt, Artificial Sequence
  Description of Artificial Sequence: Synthetic oligonucleotide
cuccccuacuggcuguauc

SEQ ID NO: 634396 - RNA, 19 nt, Artificial Sequence
  Description of Artificial Sequence: Synthetic oligonucleotide
gcauaccacccaaugagga

SEQ ID NO: 634397 - RNA, 19 nt, Artificial Sequence
  Description of Artificial Sequence: Synthetic oligonucleotide
caaaugcacgcgacuccca

SEQ ID NO: 634398 - RNA, 19 nt, Artificial Sequence
  Description of Artificial Sequence: Synthetic oligonucleotide
ggaaagaaucauggugaca

SEQ ID NO: 634399 - RNA, 19 nt, Artificial Sequence
  Description of Artificial Sequence: Synthetic oligonucleotide
cccugacuacagaugcucc

SEQ ID NO: 634400 - RNA, 19 nt, Artificial Sequence
  Description of Artificial Sequence: Synthetic oligonucleotide
acacccgaacggccaccuc

SEQ ID NO: 634401 - RNA, 19 nt, Artificial Sequence
  Description of Artificial Sequence: Synthetic oligonucleotide
guggcggauggauguguuc

SEQ ID NO: 634402 - RNA, 19 nt, Artificial Sequence
  Description of Artificial Sequence: Synthetic oligonucleotide
caaagaguuucacccgggu

SEQ ID NO: 634403 - RNA, 19 nt, Artificial Sequence
  Description of Artificial Sequence: Synthetic oligonucleotide
cgaugguucggugcaaggg

SEQ ID NO: 634404 - RNA, 19 nt, Artificial Sequence
  Description of Artificial Sequence: Synthetic oligonucleotide
gucauaggucuugaaccaa

SEQ ID NO: 634405 - RNA, 19 nt, Artificial Sequence
  Description of Artificial Sequence: Synthetic oligonucleotide
cucauacgcaagaaagauu

SEQ ID NO: 634406 - RNA, 19 nt, Artificial Sequence
  Description of Artificial Sequence: Synthetic oligonucleotide
gcgccgugaacgaagcugc

SEQ ID NO: 634407 - RNA, 19 nt, Artificial Sequence
  Description of Artificial Sequence: Synthetic oligonucleotide
cacgaugauucgagcaucu

SEQ ID NO: 634408 - RNA, 19 nt, Artificial Sequence
  Description of Artificial Sequence: Synthetic oligonucleotide
cgggugaucaaccugcgca

SEQ ID NO: 634409 - RNA, 19 nt, Artificial Sequence
  Description of Artificial Sequence: Synthetic oligonucleotide
ugcacgcgacucccaucac

SEQ ID NO: 634410 - RNA, 19 nt, Artificial Sequence
  Description of Artificial Sequence: Synthetic oligonucleotide
agauucggacacagcggcu

SEQ ID NO: 634411 - RNA, 19 nt, Artificial Sequence
  Description of Artificial Sequence: Synthetic oligonucleotide
caucuugacgcuucagguu

SEQ ID NO: 634412 - RNA, 19 nt, Artificial Sequence
  Description of Artificial Sequence: Synthetic oligonucleotide
auccugcuggcuggaaaga

SEQ ID NO: 634413 - RNA, 19 nt, Artificial Sequence
  Description of Artificial Sequence: Synthetic oligonucleotide
gagacaccacagugugaaa

SEQ ID NO: 634414 - RNA, 19 nt, Artificial Sequence
  Description of Artificial Sequence: Synthetic oligonucleotide
uucgagcaucuugacgcuu

SEQ ID NO: 634415 - RNA, 19 nt, Artificial Sequence
  Description of Artificial Sequence: Synthetic oligonucleotide
ucucgaugguucggugcaa

SEQ ID NO: 634416 - RNA, 19 nt, Artificial Sequence
  Description of Artificial Sequence: Synthetic oligonucleotide
guagauucagggagauccu

SEQ ID NO: 634417 - RNA, 19 nt, Artificial Sequence
  Description of Artificial Sequence: Synthetic oligonucleotide
cguuccuuauaaaccucac

SEQ ID NO: 634418 - RNA, 19 nt, Artificial Sequence
  Description of Artificial Sequence: Synthetic oligonucleotide
acggcacaauggugugugu

SEQ ID NO: 634419 - RNA, 19 nt, Artificial Sequence
  Description of Artificial Sequence: Synthetic oligonucleotide
cacaauggugugugugugu

SEQ ID NO: 634420 - RNA, 19 nt, Artificial Sequence
  Description of Artificial Sequence: Synthetic oligonucleotide
gugugugugugugugcccu

SEQ ID NO: 634421 - RNA, 19 nt, Artificial Sequence
  Description of Artificial Sequence: Synthetic oligonucleotide
ccgaacggccaccuccucc

SEQ ID NO: 634422 - RNA, 19 nt, Artificial Sequence
  Description of Artificial Sequence: Synthetic oligonucleotide
ccaccagauggaagucggg

SEQ ID NO: 634423 - RNA, 19 nt, Artificial Sequence
  Description of Artificial Sequence: Synthetic oligonucleotide
caguccaucugcacaccua

SEQ ID NO: 634424 - RNA, 19 nt, Artificial Sequence
  Description of Artificial Sequence: Synthetic oligonucleotide
gauggaagucggggucaca

SEQ ID NO: 634425 - RNA, 19 nt, Artificial Sequence
  Description of Artificial Sequence: Synthetic oligonucleotide
auauggcccuccacugccu

SEQ ID NO: 634426 - RNA, 19 nt, Artificial Sequence
  Description of Artificial Sequence: Synthetic oligonucleotide
ggcaguauggagacaucaa

SEQ ID NO: 634427 - RNA, 19 nt, Artificial Sequence
  Description of Artificial Sequence: Synthetic oligonucleotide
cauccagcguugaggugaa

SEQ ID NO: 634428 - RNA, 19 nt, Artificial Sequence
  Description of Artificial Sequence: Synthetic oligonucleotide
accacccaaugaggaacca

SEQ ID NO: 634429 - RNA, 19 nt, Artificial Sequence
  Description of Artificial Sequence: Synthetic oligonucleotide
gauccccacccgucaggaa

SEQ ID NO: 634430 - RNA, 19 nt, Artificial Sequence
  Description of Artificial Sequence: Synthetic oligonucleotide
gucgcgagucaggccgcgg

SEQ ID NO: 634431 - RNA, 19 nt, Artificial Sequence
  Description of Artificial Sequence: Synthetic oligonucleotide
gcacgcgacucccaucaca

SEQ ID NO: 634432 - RNA, 19 nt, Artificial Sequence
  Description of Artificial Sequence: Synthetic oligonucleotide
acgaugauucgagcaucuu

SEQ ID NO: 634433 - RNA, 19 nt, Artificial Sequence
  Description of Artificial Sequence: Synthetic oligonucleotide
cugccgagacuggagcuga

SEQ ID NO: 634434 - RNA, 19 nt, Artificial Sequence
  Description of Artificial Sequence: Synthetic oligonucleotide
ccacccaaugaggaaccag

SEQ ID NO: 634435 - RNA, 19 nt, Artificial Sequence
  Description of Artificial Sequence: Synthetic oligonucleotide
gccgugaacgaagcugcug

SEQ ID NO: 634436 - RNA, 19 nt, Artificial Sequence
  Description of Artificial Sequence: Synthetic oligonucleotide
caauggugugugugugugu

SEQ ID NO: 634437 - RNA, 19 nt, Artificial Sequence
  Description of Artificial Sequence: Synthetic oligonucleotide
cccucacuuguaaagcaaa

SEQ ID NO: 634438 - RNA, 19 nt, Artificial Sequence
  Description of Artificial Sequence: Synthetic oligonucleotide
cucuggcggaaggugaucu

SEQ ID NO: 634439 - RNA, 19 nt, Artificial Sequence
  Description of Artificial Sequence: Synthetic oligonucleotide
agcggcuggguguguccau

SEQ ID NO: 634440 - RNA, 19 nt, Artificial Sequence
  Description of Artificial Sequence: Synthetic oligonucleotide
ccacgaugauucgagcauc

SEQ ID NO: 634441 - RNA, 19 nt, Artificial Sequence
  Description of Artificial Sequence: Synthetic oligonucleotide
ggacauugccuccacccau

SEQ ID NO: 634442 - RNA, 19 nt, Artificial Sequence
  Description of Artificial Sequence: Synthetic oligonucleotide
guucggugcaagggaucca

SEQ ID NO: 634443 - RNA, 19 nt, Artificial Sequence
  Description of Artificial Sequence: Synthetic oligonucleotide
agucggggucacaucggaa

SEQ ID NO: 634444 - RNA, 19 nt, Artificial Sequence
  Description of Artificial Sequence: Synthetic oligonucleotide
uucacccgggugggauugu

SEQ ID NO: 634445 - RNA, 19 nt, Artificial Sequence
  Description of Artificial Sequence: Synthetic oligonucleotide
cgaacggccaccuccucca

SEQ ID NO: 634446 - RNA, 19 nt, Artificial Sequence
  Description of Artificial Sequence: Synthetic oligonucleotide
cccucgggugaucaaccug

SEQ ID NO: 634447 - RNA, 19 nt, Artificial Sequence
  Description of Artificial Sequence: Synthetic oligonucleotide
gggguccguaauggucugg

SEQ ID NO: 634448 - RNA, 19 nt, Artificial Sequence
  Description of Artificial Sequence: Synthetic oligonucleotide
ccaauggugccuccuggaa

SEQ ID NO: 634449 - RNA, 19 nt, Artificial Sequence
  Description of Artificial Sequence: Synthetic oligonucleotide
ggugugugugugugugugu

SEQ ID NO: 634450 - RNA, 19 nt, Artificial Sequence
  Description of Artificial Sequence: Synthetic oligonucleotide
ggucgcgagucaggccgcg

SEQ ID NO: 634451 - RNA, 19 nt, Artificial Sequence
  Description of Artificial Sequence: Synthetic oligonucleotide
gggguggcgccgugaacga

SEQ ID NO: 634452 - RNA, 19 nt, Artificial Sequence
  Description of Artificial Sequence: Synthetic oligonucleotide
cuccaggcgcacacccgaa

SEQ ID NO: 634453 - RNA, 19 nt, Artificial Sequence
  Description of Artificial Sequence: Synthetic oligonucleotide
gcggauggauguguucgga

SEQ ID NO: 634454 - RNA, 19 nt, Artificial Sequence
  Description of Artificial Sequence: Synthetic oligonucleotide
cccacccgucaggaaaacc

SEQ ID NO: 634455 - RNA, 19 nt, Artificial Sequence
  Description of Artificial Sequence: Synthetic oligonucleotide
cagcggcugggugugucca

SEQ ID NO: 634456 - RNA, 19 nt, Artificial Sequence
  Description of Artificial Sequence: Synthetic oligonucleotide
guguggcggauggaugugu

SEQ ID NO: 634457 - RNA, 19 nt, Artificial Sequence
  Description of Artificial Sequence: Synthetic oligonucleotide
gggccccaccaccucgcgc

SEQ ID NO: 634458 - RNA, 19 nt, Artificial Sequence
  Description of Artificial Sequence: Synthetic oligonucleotide
ggguccguaauggucuggu

SEQ ID NO: 634459 - RNA, 19 nt, Artificial Sequence
  Description of Artificial Sequence: Synthetic oligonucleotide
cagagacacgcuccucuuu

SEQ ID NO: 634460 - RNA, 19 nt, Artificial Sequence
  Description of Artificial Sequence: Synthetic oligonucleotide
gggucacaucggaaaucca

SEQ ID NO: 634461 - RNA, 19 nt, Artificial Sequence
  Description of Artificial Sequence: Synthetic oligonucleotide
gcagaccuacuguggcaua

SEQ ID NO: 634462 - RNA, 19 nt, Artificial Sequence
  Description of Artificial Sequence: Synthetic oligonucleotide
cggauggauguguucggaa

SEQ ID NO: 634463 - RNA, 19 nt, Artificial Sequence
  Description of Artificial Sequence: Synthetic oligonucleotide
acacagcggcugggugugu

SEQ ID NO: 634464 - RNA, 19 nt, Artificial Sequence
  Description of Artificial Sequence: Synthetic oligonucleotide
gguccguaauggucugguu

SEQ ID NO: 634465 - RNA, 19 nt, Artificial Sequence
  Description of Artificial Sequence: Synthetic oligonucleotide
cuucggguguuggcagggu

SEQ ID NO: 634466 - RNA, 19 nt, Artificial Sequence
  Description of Artificial Sequence: Synthetic oligonucleotide
gcagccccuuguaaccaua

SEQ ID NO: 634467 - RNA, 19 nt, Artificial Sequence
  Description of Artificial Sequence: Synthetic oligonucleotide
cgcugucgguuugacucac

SEQ ID NO: 634468 - RNA, 19 nt, Artificial Sequence
  Description of Artificial Sequence: Synthetic oligonucleotide
ggcccugacuacagaugcu

SEQ ID NO: 634469 - RNA, 19 nt, Artificial Sequence
  Description of Artificial Sequence: Synthetic oligonucleotide
gcggcuggguguguccaua

SEQ ID NO: 634470 - RNA, 19 nt, Artificial Sequence
  Description of Artificial Sequence: Synthetic oligonucleotide
ccaugccgacagcccugug

SEQ ID NO: 634471 - RNA, 19 nt, Artificial Sequence
  Description of Artificial Sequence: Synthetic oligonucleotide
cagcccuguggucguugau

SEQ ID NO: 634472 - RNA, 19 nt, Artificial Sequence
  Description of Artificial Sequence: Synthetic oligonucleotide
ccaucacagcuaagccggu

SEQ ID NO: 634473 - RNA, 19 nt, Artificial Sequence
  Description of Artificial Sequence: Synthetic oligonucleotide
cccuacuggcuguauccuu

SEQ ID NO: 634474 - RNA, 19 nt, Artificial Sequence
  Description of Artificial Sequence: Synthetic oligonucleotide
ggguggcgccgugaacgaa

SEQ ID NO: 634475 - RNA, 19 nt, Artificial Sequence
  Description of Artificial Sequence: Synthetic oligonucleotide
ccccucgggugaucaaccu

SEQ ID NO: 634476 - RNA, 19 nt, Artificial Sequence
  Description of Artificial Sequence: Synthetic oligonucleotide
gccauuccccucgggugau

SEQ ID NO: 634477 - RNA, 19 nt, Artificial Sequence
  Description of Artificial Sequence: Synthetic oligonucleotide
ccacggcacaauggugugu

SEQ ID NO: 634478 - RNA, 19 nt, Artificial Sequence
  Description of Artificial Sequence: Synthetic oligonucleotide
ccguaauggucugguuguu

SEQ ID NO: 634479 - RNA, 19 nt, Artificial Sequence
  Description of Artificial Sequence: Synthetic oligonucleotide
cccuguggucguugaucuu

SEQ ID NO: 634480 - RNA, 19 nt, Artificial Sequence
  Description of Artificial Sequence: Synthetic oligonucleotide
cggcuggguguguccauau

SEQ ID NO: 634481 - RNA, 19 nt, Artificial Sequence
  Description of Artificial Sequence: Synthetic oligonucleotide
ccuccccuacuggcuguau

SEQ ID NO: 634482 - RNA, 19 nt, Artificial Sequence
  Description of Artificial Sequence: Synthetic oligonucleotide
aaguacauaaaaucgaagc

SEQ ID NO: 634483 - RNA, 19 nt, Artificial Sequence
  Description of Artificial Sequence: Synthetic oligonucleotide
ugaaguuugacuaugguag

SEQ ID NO: 634484 - RNA, 19 nt, Artificial Sequence
  Description of Artificial Sequence: Synthetic oligonucleotide
uacaauaugauaaagcagc

SEQ ID NO: 634485 - RNA, 19 nt, Artificial Sequence
  Description of Artificial Sequence: Synthetic oligonucleotide
auaaauaugaacuaucugu

SEQ ID NO: 634486 - RNA, 19 nt, Artificial Sequence
  Description of Artificial Sequence: Synthetic oligonucleotide
acugcaauaaaucagaagu

SEQ ID NO: 634487 - RNA, 19 nt, Artificial Sequence
  Description of Artificial Sequence: Synthetic oligonucleotide
uuuacuuauaaccagcugu

SEQ ID NO: 634488 - RNA, 19 nt, Artificial Sequence
  Description of Artificial Sequence: Synthetic oligonucleotide
aacacuagaguccuacacc

SEQ ID NO: 634489 - RNA, 19 nt, Artificial Sequence
  Description of Artificial Sequence: Synthetic oligonucleotide
agcacaauaagcuucaaag

SEQ ID NO: 634490 - RNA, 19 nt, Artificial Sequence
  Description of Artificial Sequence: Synthetic oligonucleotide
uacaauauagcaucaaugc

SEQ ID NO: 634491 - RNA, 19 nt, Artificial Sequence
  Description of Artificial Sequence: Synthetic oligonucleotide
ucaauuauacgacagacaa

SEQ ID NO: 634492 - RNA, 19 nt, Artificial Sequence
  Description of Artificial Sequence: Synthetic oligonucleotide
cauuuguugaguuacaggc

SEQ ID NO: 634493 - RNA, 19 nt, Artificial Sequence
  Description of Artificial Sequence: Synthetic oligonucleotide
auuaccacaacacuaaucu

SEQ ID NO: 634494 - RNA, 19 nt, Artificial Sequence
  Description of Artificial Sequence: Synthetic oligonucleotide
uguuauuuaacagagcugc

SEQ ID NO: 634495 - RNA, 19 nt, Artificial Sequence
  Description of Artificial Sequence: Synthetic oligonucleotide
aauuauacgacagacaaau

SEQ ID NO: 634496 - RNA, 19 nt, Artificial Sequence
  Description of Artificial Sequence: Synthetic oligonucleotide
ugaguuacaggcaaggcag

SEQ ID NO: 634497 - RNA, 19 nt, Artificial Sequence
  Description of Artificial Sequence: Synthetic oligonucleotide
aauaugaacuaucuguaca

SEQ ID NO: 634498 - RNA, 19 nt, Artificial Sequence
  Description of Artificial Sequence: Synthetic oligonucleotide
aauagcaugauuaugugca

SEQ ID NO: 634499 - RNA, 19 nt, Artificial Sequence
  Description of Artificial Sequence: Synthetic oligonucleotide
gaugauaacaggcauuacc

SEQ ID NO: 634500 - RNA, 19 nt, Artificial Sequence
  Description of Artificial Sequence: Synthetic oligonucleotide
ugcauguuauuuaacagag

SEQ ID NO: 634501 - RNA, 19 nt, Artificial Sequence
  Description of Artificial Sequence: Synthetic oligonucleotide
uggaacuaaauuuuguucc

SEQ ID NO: 634502 - RNA, 19 nt, Artificial Sequence
  Description of Artificial Sequence: Synthetic oligonucleotide
aauucugccuguaacaaac

SEQ ID NO: 634503 - RNA, 19 nt, Artificial Sequence
  Description of Artificial Sequence: Synthetic oligonucleotide
uauaccuugauuacauucc

SEQ ID NO: 634504 - RNA, 19 nt, Artificial Sequence
  Description of Artificial Sequence: Synthetic oligonucleotide
aagauuaucucaggcaccc

SEQ ID NO: 634505 - RNA, 19 nt, Artificial Sequence
  Description of Artificial Sequence: Synthetic oligonucleotide
acgacagacaaauauaaag

SEQ ID NO: 634506 - RNA, 19 nt, Artificial Sequence
  Description of Artificial Sequence: Synthetic oligonucleotide
acuauacucauuuauauau

SEQ ID NO: 634507 - RNA, 19 nt, Artificial Sequence
  Description of Artificial Sequence: Synthetic oligonucleotide
aaaacuaggacugaacacu

SEQ ID NO: 634508 - RNA, 19 nt, Artificial Sequence
  Description of Artificial Sequence: Synthetic oligonucleotide
agaacuaaaguacauaaaa

SEQ ID NO: 634509 - RNA, 19 nt, Artificial Sequence
  Description of Artificial Sequence: Synthetic oligonucleotide
uauuguacaaugcuguaga

SEQ ID NO: 634510 - RNA, 19 nt, Artificial Sequence
  Description of Artificial Sequence: Synthetic oligonucleotide
caauauagcaucaaugcug

SEQ ID NO: 634511 - RNA, 19 nt, Artificial Sequence
  Description of Artificial Sequence: Synthetic oligonucleotide
uuauacgacagacaaauau

SEQ ID NO: 634512 - RNA, 19 nt, Artificial Sequence
  Description of Artificial Sequence: Synthetic oligonucleotide
uaugguaguagacugccag

SEQ ID NO: 634513 - RNA, 19 nt, Artificial Sequence
  Description of Artificial Sequence: Synthetic oligonucleotide
acuauuuacagaugauaac

SEQ ID NO: 634514 - RNA, 19 nt, Artificial Sequence
  Description of Artificial Sequence: Synthetic oligonucleotide
uguacuacauagcaugggc

SEQ ID NO: 634515 - RNA, 19 nt, Artificial Sequence
  Description of Artificial Sequence: Synthetic oligonucleotide
caaauuuccacaucggcag

SEQ ID NO: 634516 - RNA, 19 nt, Artificial Sequence
  Description of Artificial Sequence: Synthetic oligonucleotide
uucuacacauaaaacaucu

SEQ ID NO: 634517 - RNA, 19 nt, Artificial Sequence
  Description of Artificial Sequence: Synthetic oligonucleotide
uaauugacagcuuuuagaa

SEQ ID NO: 634518 - RNA, 19 nt, Artificial Sequence
  Description of Artificial Sequence: Synthetic oligonucleotide
ucuaacucagaacuaaagu

SEQ ID NO: 634519 - RNA, 19 nt, Artificial Sequence
  Description of Artificial Sequence: Synthetic oligonucleotide
uucuuuguagcaaacagaa

SEQ ID NO: 634520 - RNA, 19 nt, Artificial Sequence
  Description of Artificial Sequence: Synthetic oligonucleotide
augcaauacacccaagaac

SEQ ID NO: 634521 - RNA, 19 nt, Artificial Sequence
  Description of Artificial Sequence: Synthetic oligonucleotide
aaugcagauaucuucuggu

SEQ ID NO: 634522 - RNA, 19 nt, Artificial Sequence
  Description of Artificial Sequence: Synthetic oligonucleotide
acuuauaaccagcugugac

SEQ ID NO: 634523 - RNA, 19 nt, Artificial Sequence
  Description of Artificial Sequence: Synthetic oligonucleotide
ucuaacuauacucauuuau

SEQ ID NO: 634524 - RNA, 19 nt, Artificial Sequence
  Description of Artificial Sequence: Synthetic oligonucleotide
uccaauuuuauugagggga

SEQ ID NO: 634525 - RNA, 19 nt, Artificial Sequence
  Description of Artificial Sequence: Synthetic oligonucleotide
uuaaggugaaguuugacua

SEQ ID NO: 634526 - RNA, 19 nt, Artificial Sequence
  Description of Artificial Sequence: Synthetic oligonucleotide
uauuuaacagagcugcugu

SEQ ID NO: 634527 - RNA, 19 nt, Artificial Sequence
  Description of Artificial Sequence: Synthetic oligonucleotide
uccuguacuacauagcaug

SEQ ID NO: 634528 - RNA, 19 nt, Artificial Sequence
  Description of Artificial Sequence: Synthetic oligonucleotide
uguaugugaaaaccaaaca

SEQ ID NO: 634529 - RNA, 19 nt, Artificial Sequence
  Description of Artificial Sequence: Synthetic oligonucleotide
cugccuguaacaaacaccc

SEQ ID NO: 634530 - RNA, 19 nt, Artificial Sequence
  Description of Artificial Sequence: Synthetic oligonucleotide
uaguagagaaugcagauau

SEQ ID NO: 634531 - RNA, 19 nt, Artificial Sequence
  Description of Artificial Sequence: Synthetic oligonucleotide
auuaaggugaaguuugacu

SEQ ID NO: 634532 - RNA, 19 nt, Artificial Sequence
  Description of Artificial Sequence: Synthetic oligonucleotide
uuuccuacgauauauuaaa

SEQ ID NO: 634533 - RNA, 19 nt, Artificial Sequence
  Description of Artificial Sequence: Synthetic oligonucleotide
aagaacacuagaguccuac

SEQ ID NO: 634534 - RNA, 19 nt, Artificial Sequence
  Description of Artificial Sequence: Synthetic oligonucleotide
ugcaauaaaucagaaguag

SEQ ID NO: 634535 - RNA, 19 nt, Artificial Sequence
  Description of Artificial Sequence: Synthetic oligonucleotide
caaagauuaucucaggcac

SEQ ID NO: 634536 - RNA, 19 nt, Artificial Sequence
  Description of Artificial Sequence: Synthetic oligonucleotide
aauguccuaauugacagcu

SEQ ID NO: 634537 - RNA, 19 nt, Artificial Sequence
  Description of Artificial Sequence: Synthetic oligonucleotide
ucauuuguugaguuacagg

SEQ ID NO: 634538 - RNA, 19 nt, Artificial Sequence
  Description of Artificial Sequence: Synthetic oligonucleotide
uuguuauuguacaaugcug

SEQ ID NO: 634539 - RNA, 19 nt, Artificial Sequence
  Description of Artificial Sequence: Synthetic oligonucleotide
uuaugauuuuccaugcaga

SEQ ID NO: 634540 - RNA, 19 nt, Artificial Sequence
  Description of Artificial Sequence: Synthetic oligonucleotide
uaccuuucgaagaaugucc

SEQ ID NO: 634541 - RNA, 19 nt, Artificial Sequence
  Description of Artificial Sequence: Synthetic oligonucleotide
acuaaagaagucuacugca

SEQ ID NO: 634542 - RNA, 19 nt, Artificial Sequence
  Description of Artificial Sequence: Synthetic oligonucleotide
guaaacaaauccuagugca

SEQ ID NO: 634543 - RNA, 19 nt, Artificial Sequence
  Description of Artificial Sequence: Synthetic oligonucleotide
guaucuauccaauucugcc

SEQ ID NO: 634544 - RNA, 19 nt, Artificial Sequence
  Description of Artificial Sequence: Synthetic oligonucleotide
cauuuaauuuggcacgugg

SEQ ID NO: 634545 - RNA, 19 nt, Artificial Sequence
  Description of Artificial Sequence: Synthetic oligonucleotide
uguuuaaacuagcauccgc

SEQ ID NO: 634546 - RNA, 19 nt, Artificial Sequence
  Description of Artificial Sequence: Synthetic oligonucleotide
uuauaccuugauuacauuc

SEQ ID NO: 634547 - RNA, 19 nt, Artificial Sequence
  Description of Artificial Sequence: Synthetic oligonucleotide
uacagaugcagaaucugag

SEQ ID NO: 634548 - RNA, 19 nt, Artificial Sequence
  Description of Artificial Sequence: Synthetic oligonucleotide
ccuaaaauaucaauuauac

SEQ ID NO: 634549 - RNA, 19 nt, Artificial Sequence
  Description of Artificial Sequence: Synthetic oligonucleotide
agaugcauguuauuuaaca

SEQ ID NO: 634550 - RNA, 19 nt, Artificial Sequence
  Description of Artificial Sequence: Synthetic oligonucleotide
uacauacuuaacuauuuac

SEQ ID NO: 634551 - RNA, 19 nt, Artificial Sequence
  Description of Artificial Sequence: Synthetic oligonucleotide
uauacgacagacaaauaua

SEQ ID NO: 634552 - RNA, 19 nt, Artificial Sequence
  Description of Artificial Sequence: Synthetic oligonucleotide
aauauagcaucaaugcuga

SEQ ID NO: 634553 - RNA, 19 nt, Artificial Sequence
  Description of Artificial Sequence: Synthetic oligonucleotide
acuaugguaguagacugcc

SEQ ID NO: 634554 - RNA, 19 nt, Artificial Sequence
  Description of Artificial Sequence: Synthetic oligonucleotide
agggcauauacauuuguag

SEQ ID NO: 634555 - RNA, 19 nt, Artificial Sequence
  Description of Artificial Sequence: Synthetic oligonucleotide
agaagugauauuaccagac

SEQ ID NO: 634556 - RNA, 19 nt, Artificial Sequence
  Description of Artificial Sequence: Synthetic oligonucleotide
uguaucuauccaauucugc

SEQ ID NO: 634557 - RNA, 19 nt, Artificial Sequence
  Description of Artificial Sequence: Synthetic oligonucleotide
aacggugaaguccacaaaa

SEQ ID NO: 634558 - RNA, 19 nt, Artificial Sequence
  Description of Artificial Sequence: Synthetic oligonucleotide
uaucaauuauacgacagac

SEQ ID NO: 634559 - RNA, 19 nt, Artificial Sequence
  Description of Artificial Sequence: Synthetic oligonucleotide
uuuuccuacgauauauuaa

SEQ ID NO: 634560 - RNA, 19 nt, Artificial Sequence
  Description of Artificial Sequence: Synthetic oligonucleotide
agucauguugaaauuaagg

SEQ ID NO: 634561 - RNA, 19 nt, Artificial Sequence
  Description of Artificial Sequence: Synthetic oligonucleotide
aguauacugccuuuucuag

SEQ ID NO: 634562 - RNA, 19 nt, Artificial Sequence
  Description of Artificial Sequence: Synthetic oligonucleotide
uaacuauacucauuuauau

SEQ ID NO: 634563 - RNA, 19 nt, Artificial Sequence
  Description of Artificial Sequence: Synthetic oligonucleotide
uguuggaaccacuagcugu

SEQ ID NO: 634564 - RNA, 19 nt, Artificial Sequence
  Description of Artificial Sequence: Synthetic oligonucleotide
ugacuaugguaguagacug

SEQ ID NO: 634565 - RNA, 19 nt, Artificial Sequence
  Description of Artificial Sequence: Synthetic oligonucleotide
gauaaugcagcccaugcaa

SEQ ID NO: 634566 - RNA, 19 nt, Artificial Sequence
  Description of Artificial Sequence: Synthetic oligonucleotide
ugauauuaccagacaagca

SEQ ID NO: 634567 - RNA, 19 nt, Artificial Sequence
  Description of Artificial Sequence: Synthetic oligonucleotide
ugguuuuacuuauaaccag

SEQ ID NO: 634568 - RNA, 19 nt, Artificial Sequence
  Description of Artificial Sequence: Synthetic oligonucleotide
cucuggagaacaucaaagg

SEQ ID NO: 634569 - RNA, 19 nt, Artificial Sequence
  Description of Artificial Sequence: Synthetic oligonucleotide
gauauuaccagacaagcau

SEQ ID NO: 634570 - RNA, 19 nt, Artificial Sequence
  Description of Artificial Sequence: Synthetic oligonucleotide
uuaauguuuuccuacgaua

SEQ ID NO: 634571 - RNA, 19 nt, Artificial Sequence
  Description of Artificial Sequence: Synthetic oligonucleotide
uuaaacuagcauccgcucu

SEQ ID NO: 634572 - RNA, 19 nt, Artificial Sequence
  Description of Artificial Sequence: Synthetic oligonucleotide
aaaucuaacucagaacuaa

SEQ ID NO: 634573 - RNA, 19 nt, Artificial Sequence
  Description of Artificial Sequence: Synthetic oligonucleotide
uuaacagagcugcuguaug

SEQ ID NO: 634574 - RNA, 19 nt, Artificial Sequence
  Description of Artificial Sequence: Synthetic oligonucleotide
aguuguuauuguacaaugc

SEQ ID NO: 634575 - RNA, 19 nt, Artificial Sequence
  Description of Artificial Sequence: Synthetic oligonucleotide
aacuaaauuuuguuccuau

SEQ ID NO: 634576 - RNA, 19 nt, Artificial Sequence
  Description of Artificial Sequence: Synthetic oligonucleotide
acaacacuaaucuaacuau

SEQ ID NO: 634577 - RNA, 19 nt, Artificial Sequence
  Description of Artificial Sequence: Synthetic oligonucleotide
acaauauagcaucaaugcu

SEQ ID NO: 634578 - RNA, 19 nt, Artificial Sequence
  Description of Artificial Sequence: Synthetic oligonucleotide
uguucagauaccuuugcaa

SEQ ID NO: 634579 - RNA, 19 nt, Artificial Sequence
  Description of Artificial Sequence: Synthetic oligonucleotide
auacuuaacuauuuacaga

SEQ ID NO: 634580 - RNA, 19 nt, Artificial Sequence
  Description of Artificial Sequence: Synthetic oligonucleotide
uuugacuaugguaguagac

SEQ ID NO: 634581 - RNA, 19 nt, Artificial Sequence
  Description of Artificial Sequence: Synthetic oligonucleotide
aaguauacugccuuuucua

SEQ ID NO: 634582 - RNA, 19 nt, Artificial Sequence
  Description of Artificial Sequence: Synthetic oligonucleotide
aauuaacuguucagauacc

SEQ ID NO: 634583 - RNA, 19 nt, Artificial Sequence
  Description of Artificial Sequence: Synthetic oligonucleotide
ugaacuaucuguacacauc

SEQ ID NO: 634584 - RNA, 19 nt, Artificial Sequence
  Description of Artificial Sequence: Synthetic oligonucleotide
caucagugaaguauacugc

SEQ ID NO: 634585 - RNA, 19 nt, Artificial Sequence
  Description of Artificial Sequence: Synthetic oligonucleotide
acuaaucuaacuauacuca

SEQ ID NO: 634586 - RNA, 19 nt, Artificial Sequence
  Description of Artificial Sequence: Synthetic oligonucleotide
uugacuaugguaguagacu

SEQ ID NO: 634587 - RNA, 19 nt, Artificial Sequence
  Description of Artificial Sequence: Synthetic oligonucleotide
aggauuccccauaaaagcc

SEQ ID NO: 634588 - RNA, 19 nt, Artificial Sequence
  Description of Artificial Sequence: Synthetic oligonucleotide
uaaacuagcauccgcucuc

SEQ ID NO: 634589 - RNA, 19 nt, Artificial Sequence
  Description of Artificial Sequence: Synthetic oligonucleotide
uguaaggccaacuuucuuu

SEQ ID NO: 634590 - RNA, 19 nt, Artificial Sequence
  Description of Artificial Sequence: Synthetic oligonucleotide
uggauaccacuaaagaagu

SEQ ID NO: 634591 - RNA, 19 nt, Artificial Sequence
  Description of Artificial Sequence: Synthetic oligonucleotide
acccaaaacauccuaaaau

SEQ ID NO: 634592 - RNA, 19 nt, Artificial Sequence
  Description of Artificial Sequence: Synthetic oligonucleotide
ugugaaaaccaaacagagu

SEQ ID NO: 634593 - RNA, 19 nt, Artificial Sequence
  Description of Artificial Sequence: Synthetic oligonucleotide
agugauauuaccagacaag

SEQ ID NO: 634594 - RNA, 19 nt, Artificial Sequence
  Description of Artificial Sequence: Synthetic oligonucleotide
uuauaaccagcugugacgu

SEQ ID NO: 634595 - RNA, 19 nt, Artificial Sequence
  Description of Artificial Sequence: Synthetic oligonucleotide
gugauauuaccagacaagc

SEQ ID NO: 634596 - RNA, 19 nt, Artificial Sequence
  Description of Artificial Sequence: Synthetic oligonucleotide
ugacguuaccuuucgaaga

SEQ ID NO: 634597 - RNA, 19 nt, Artificial Sequence
  Description of Artificial Sequence: Synthetic oligonucleotide
cagaguaacggugaagucc

SEQ ID NO: 634598 - RNA, 19 nt, Artificial Sequence
  Description of Artificial Sequence: Synthetic oligonucleotide
uacacccaaauacaauaug

SEQ ID NO: 634599 - RNA, 19 nt, Artificial Sequence
  Description of Artificial Sequence: Synthetic oligonucleotide
acaaugcuguagauaaugc

SEQ ID NO: 634600 - RNA, 19 nt, Artificial Sequence
  Description of Artificial Sequence: Synthetic oligonucleotide
ucugcuuuguaaucauaug

SEQ ID NO: 634601 - RNA, 19 nt, Artificial Sequence
  Description of Artificial Sequence: Synthetic oligonucleotide
uuucgggguaguuauuuug

SEQ ID NO: 634602 - RNA, 19 nt, Artificial Sequence
  Description of Artificial Sequence: Synthetic oligonucleotide
augauaacaggcauuacca

SEQ ID NO: 634603 - RNA, 19 nt, Artificial Sequence
  Description of Artificial Sequence: Synthetic oligonucleotide
gugaaaaccaaacagaguu

SEQ ID NO: 634604 - RNA, 19 nt, Artificial Sequence
  Description of Artificial Sequence: Synthetic oligonucleotide
acauacuuaacuauuuaca

SEQ ID NO: 634605 - RNA, 19 nt, Artificial Sequence
  Description of Artificial Sequence: Synthetic oligonucleotide
auaccuuugcaacuuaaaa

SEQ ID NO: 634606 - RNA, 19 nt, Artificial Sequence
  Description of Artificial Sequence: Synthetic oligonucleotide
gugacguuaccuuucgaag

SEQ ID NO: 634607 - RNA, 19 nt, Artificial Sequence
  Description of Artificial Sequence: Synthetic oligonucleotide
uuuaaacuagcauccgcuc

SEQ ID NO: 634608 - RNA, 19 nt, Artificial Sequence
  Description of Artificial Sequence: Synthetic oligonucleotide
uguugguuaugauuuucca

SEQ ID NO: 634609 - RNA, 19 nt, Artificial Sequence
  Description of Artificial Sequence: Synthetic oligonucleotide
cauagcaugggcccugggg

SEQ ID NO: 634610 - RNA, 19 nt, Artificial Sequence
  Description of Artificial Sequence: Synthetic oligonucleotide
uucagauaccuuugcaacu

SEQ ID NO: 634611 - RNA, 19 nt, Artificial Sequence
  Description of Artificial Sequence: Synthetic oligonucleotide
acaguugugcuugucagag

SEQ ID NO: 634612 - RNA, 19 nt, Artificial Sequence
  Description of Artificial Sequence: Synthetic oligonucleotide
uaugauaaagcagcccucu

SEQ ID NO: 634613 - RNA, 19 nt, Artificial Sequence
  Description of Artificial Sequence: Synthetic oligonucleotide
uauagcaucaaugcugaau

SEQ ID NO: 634614 - RNA, 19 nt, Artificial Sequence
  Description of Artificial Sequence: Synthetic oligonucleotide
uuacaggcaaggcagccac

SEQ ID NO: 634615 - RNA, 19 nt, Artificial Sequence
  Description of Artificial Sequence: Synthetic oligonucleotide
uuaaccaggcuuacacaug

SEQ ID NO: 634616 - RNA, 19 nt, Artificial Sequence
  Description of Artificial Sequence: Synthetic oligonucleotide
ucuacacauaaaacaucug

SEQ ID NO: 634617 - RNA, 19 nt, Artificial Sequence
  Description of Artificial Sequence: Synthetic oligonucleotide
acuagcuguccccauuggg

SEQ ID NO: 634618 - RNA, 19 nt, Artificial Sequence
  Description of Artificial Sequence: Synthetic oligonucleotide
acacuaaucuaacuauacu

SEQ ID NO: 634619 - RNA, 19 nt, Artificial Sequence
  Description of Artificial Sequence: Synthetic oligonucleotide
ugcuguaugugaaaaccaa

SEQ ID NO: 634620 - RNA, 19 nt, Artificial Sequence
  Description of Artificial Sequence: Synthetic oligonucleotide
auauuaccagacaagcauc

SEQ ID NO: 634621 - RNA, 19 nt, Artificial Sequence
  Description of Artificial Sequence: Synthetic oligonucleotide
cugaauagcaugauuaugu

SEQ ID NO: 634622 - RNA, 19 nt, Artificial Sequence
  Description of Artificial Sequence: Synthetic oligonucleotide
uuuuaaguuacaggcacau

SEQ ID NO: 634623 - RNA, 19 nt, Artificial Sequence
  Description of Artificial Sequence: Synthetic oligonucleotide
guugaaauuaaggugaagu

SEQ ID NO: 634624 - RNA, 19 nt, Artificial Sequence
  Description of Artificial Sequence: Synthetic oligonucleotide
uucgggguaguuauuuugu

SEQ ID NO: 634625 - RNA, 19 nt, Artificial Sequence
  Description of Artificial Sequence: Synthetic oligonucleotide
uccuagugcaguucugugc

SEQ ID NO: 634626 - RNA, 19 nt, Artificial Sequence
  Description of Artificial Sequence: Synthetic oligonucleotide
aaauucagaugcauguuau

SEQ ID NO: 634627 - RNA, 19 nt, Artificial Sequence
  Description of Artificial Sequence: Synthetic oligonucleotide
ugagguaggacuguuggaa

SEQ ID NO: 634628 - RNA, 19 nt, Artificial Sequence
  Description of Artificial Sequence: Synthetic oligonucleotide
ucuaguuguuauuguacaa

SEQ ID NO: 634629 - RNA, 19 nt, Artificial Sequence
  Description of Artificial Sequence: Synthetic oligonucleotide
aacaaauccuagugcaguu

SEQ ID NO: 634630 - RNA, 19 nt, Artificial Sequence
  Description of Artificial Sequence: Synthetic oligonucleotide
aguccuuuucugguguacc

SEQ ID NO: 634631 - RNA, 19 nt, Artificial Sequence
  Description of Artificial Sequence: Synthetic oligonucleotide
gauaccacuaaagaagucu

SEQ ID NO: 634632 - RNA, 19 nt, Artificial Sequence
  Description of Artificial Sequence: Synthetic oligonucleotide
acugcagccauguugguua

SEQ ID NO: 634633 - RNA, 19 nt, Artificial Sequence
  Description of Artificial Sequence: Synthetic oligonucleotide
cuguagauaaugcagccca

SEQ ID NO: 634634 - RNA, 19 nt, Artificial Sequence
  Description of Artificial Sequence: Synthetic oligonucleotide
cacaguuguuuaaacuagc

SEQ ID NO: 634635 - RNA, 19 nt, Artificial Sequence
  Description of Artificial Sequence: Synthetic oligonucleotide
ugauaacaggcauuaccac

SEQ ID NO: 634636 - RNA, 19 nt, Artificial Sequence
  Description of Artificial Sequence: Synthetic oligonucleotide
ugacuugaugguuuuacuu

SEQ ID NO: 634637 - RNA, 19 nt, Artificial Sequence
  Description of Artificial Sequence: Synthetic oligonucleotide
uuuguccuaggauucccca

SEQ ID NO: 634638 - RNA, 19 nt, Artificial Sequence
  Description of Artificial Sequence: Synthetic oligonucleotide
cauuaccacaacacuaauc

SEQ ID NO: 634639 - RNA, 19 nt, Artificial Sequence
  Description of Artificial Sequence: Synthetic oligonucleotide
uccacaucggcagucaaac

SEQ ID NO: 634640 - RNA, 19 nt, Artificial Sequence
  Description of Artificial Sequence: Synthetic oligonucleotide
gaagugauauuaccagaca

SEQ ID NO: 634641 - RNA, 19 nt, Artificial Sequence
  Description of Artificial Sequence: Synthetic oligonucleotide
uaugugcaauacauaaaua

SEQ ID NO: 634642 - RNA, 19 nt, Artificial Sequence
  Description of Artificial Sequence: Synthetic oligonucleotide
cacuagccaaagauuauac

SEQ ID NO: 634643 - RNA, 19 nt, Artificial Sequence
  Description of Artificial Sequence: Synthetic oligonucleotide
uacaggcacauaacacuag

SEQ ID NO: 634644 - RNA, 19 nt, Artificial Sequence
  Description of Artificial Sequence: Synthetic oligonucleotide
acacccaagaacacuagag

SEQ ID NO: 634645 - RNA, 19 nt, Artificial Sequence
  Description of Artificial Sequence: Synthetic oligonucleotide
cauccuguacuacauagca

SEQ ID NO: 634646 - RNA, 19 nt, Artificial Sequence
  Description of Artificial Sequence: Synthetic oligonucleotide
agaguaacggugaagucca

SEQ ID NO: 634647 - RNA, 19 nt, Artificial Sequence
  Description of Artificial Sequence: Synthetic oligonucleotide
acacccaaauacaauauga

SEQ ID NO: 634648 - RNA, 19 nt, Artificial Sequence
  Description of Artificial Sequence: Synthetic oligonucleotide
uucauuuaauuuggcacgu

SEQ ID NO: 634649 - RNA, 19 nt, Artificial Sequence
  Description of Artificial Sequence: Synthetic oligonucleotide
cuguaucuauccaauucug

SEQ ID NO: 634650 - RNA, 19 nt, Artificial Sequence
  Description of Artificial Sequence: Synthetic oligonucleotide
acuguuggaaccacuagcu

SEQ ID NO: 634651 - RNA, 19 nt, Artificial Sequence
  Description of Artificial Sequence: Synthetic oligonucleotide
uuuggcacguggaacuaaa

SEQ ID NO: 634652 - RNA, 19 nt, Artificial Sequence
  Description of Artificial Sequence: Synthetic oligonucleotide
guccaauuuuauugagggg

SEQ ID NO: 634653 - RNA, 19 nt, Artificial Sequence
  Description of Artificial Sequence: Synthetic oligonucleotide
uaugaacuaucuguacaca

SEQ ID NO: 634654 - RNA, 19 nt, Artificial Sequence
  Description of Artificial Sequence: Synthetic oligonucleotide
acuagcauccgcucucugu

SEQ ID NO: 634655 - RNA, 19 nt, Artificial Sequence
  Description of Artificial Sequence: Synthetic oligonucleotide
cacaacacuaaucuaacua

SEQ ID NO: 634656 - RNA, 19 nt, Artificial Sequence
  Description of Artificial Sequence: Synthetic oligonucleotide
agcaugauuaugugcaaua

SEQ ID NO: 634657 - RNA, 19 nt, Artificial Sequence
  Description of Artificial Sequence: Synthetic oligonucleotide
acuagaguccuacacccaa

SEQ ID NO: 634658 - RNA, 19 nt, Artificial Sequence
  Description of Artificial Sequence: Synthetic oligonucleotide
agauuauaccuugauuaca

SEQ ID NO: 634659 - RNA, 19 nt, Artificial Sequence
  Description of Artificial Sequence: Synthetic oligonucleotide
uuauaacacagaagugaua

SEQ ID NO: 634660 - RNA, 19 nt, Artificial Sequence
  Description of Artificial Sequence: Synthetic oligonucleotide
auaacaggcauuaccacaa

SEQ ID NO: 634661 - RNA, 19 nt, Artificial Sequence
  Description of Artificial Sequence: Synthetic oligonucleotide
acaaauccuagugcaguuc

SEQ ID NO: 634662 - RNA, 19 nt, Artificial Sequence
  Description of Artificial Sequence: Synthetic oligonucleotide
gguuuuacuuauaaccagc

SEQ ID NO: 634663 - RNA, 19 nt, Artificial Sequence
  Description of Artificial Sequence: Synthetic oligonucleotide
cuugucagaguaacgguga

SEQ ID NO: 634664 - RNA, 19 nt, Artificial Sequence
  Description of Artificial Sequence: Synthetic oligonucleotide
acuaaauuuuguuccuauu

SEQ ID NO: 634665 - RNA, 19 nt, Artificial Sequence
  Description of Artificial Sequence: Synthetic oligonucleotide
uguccuaggauuccccaua

SEQ ID NO: 634666 - RNA, 19 nt, Artificial Sequence
  Description of Artificial Sequence: Synthetic oligonucleotide
uguugaaauuaaggugaag

SEQ ID NO: 634667 - RNA, 19 nt, Artificial Sequence
  Description of Artificial Sequence: Synthetic oligonucleotide
auacgacagacaaauauaa

SEQ ID NO: 634668 - RNA, 19 nt, Artificial Sequence
  Description of Artificial Sequence: Synthetic oligonucleotide
gauuauaccuugauuacau

SEQ ID NO: 634669 - RNA, 19 nt, Artificial Sequence
  Description of Artificial Sequence: Synthetic oligonucleotide
gacguuaccuuucgaagaa

SEQ ID NO: 634670 - RNA, 19 nt, Artificial Sequence
  Description of Artificial Sequence: Synthetic oligonucleotide
uuucgaagaauguccuaau

SEQ ID NO: 634671 - RNA, 19 nt, Artificial Sequence
  Description of Artificial Sequence: Synthetic oligonucleotide
aaguagugccuuguguaca

SEQ ID NO: 634672 - RNA, 19 nt, Artificial Sequence
  Description of Artificial Sequence: Synthetic oligonucleotide
uagaguccuacacccaaau

SEQ ID NO: 634673 - RNA, 19 nt, Artificial Sequence
  Description of Artificial Sequence: Synthetic oligonucleotide
uuaguagagaaugcagaua

SEQ ID NO: 634674 - RNA, 19 nt, Artificial Sequence
  Description of Artificial Sequence: Synthetic oligonucleotide
acggugaaguccacaaaac

SEQ ID NO: 634675 - RNA, 19 nt, Artificial Sequence
  Description of Artificial Sequence: Synthetic oligonucleotide
gagguaggacuguuggaac

SEQ ID NO: 634676 - RNA, 19 nt, Artificial Sequence
  Description of Artificial Sequence: Synthetic oligonucleotide
aaucuaacucagaacuaaa

SEQ ID NO: 634677 - RNA, 19 nt, Artificial Sequence
  Description of Artificial Sequence: Synthetic oligonucleotide
uuugggcagcucaggagcu

SEQ ID NO: 634678 - RNA, 19 nt, Artificial Sequence
  Description of Artificial Sequence: Synthetic oligonucleotide
uuccuacgauauauuaaaa

SEQ ID NO: 634679 - RNA, 19 nt, Artificial Sequence
  Description of Artificial Sequence: Synthetic oligonucleotide
auaacacuagccaaagauu

SEQ ID NO: 634680 - RNA, 19 nt, Artificial Sequence
  Description of Artificial Sequence: Synthetic oligonucleotide
aacacccaaaacauccuaa

SEQ ID NO: 634681 - RNA, 19 nt, Artificial Sequence
  Description of Artificial Sequence: Synthetic oligonucleotide
uaaccagcugugacguuac

SEQ ID NO: 634682 - RNA, 19 nt, Artificial Sequence
  Description of Artificial Sequence: Synthetic oligonucleotide
guuuaaacuagcauccgcu

SEQ ID NO: 634683 - RNA, 19 nt, Artificial Sequence
  Description of Artificial Sequence: Synthetic oligonucleotide
uggcacguggaacuaaauu

SEQ ID NO: 634684 - RNA, 19 nt, Artificial Sequence
  Description of Artificial Sequence: Synthetic oligonucleotide
uuuauauucucuggaucuu

SEQ ID NO: 634685 - RNA, 19 nt, Artificial Sequence
  Description of Artificial Sequence: Synthetic oligonucleotide
guuugacuaugguaguaga

SEQ ID NO: 634686 - RNA, 19 nt, Artificial Sequence
  Description of Artificial Sequence: Synthetic oligonucleotide
aaacaaaguuucagucucu

SEQ ID NO: 634687 - RNA, 19 nt, Artificial Sequence
  Description of Artificial Sequence: Synthetic oligonucleotide
ccuacgauauauuaaaaua

SEQ ID NO: 634688 - RNA, 19 nt, Artificial Sequence
  Description of Artificial Sequence: Synthetic oligonucleotide
uccuaauugacagcuuuua

SEQ ID NO: 634689 - RNA, 19 nt, Artificial Sequence
  Description of Artificial Sequence: Synthetic oligonucleotide
uggggucugguuaguuucc

SEQ ID NO: 634690 - RNA, 19 nt, Artificial Sequence
  Description of Artificial Sequence: Synthetic oligonucleotide
ccaauuuuauugaggggag

SEQ ID NO: 634691 - RNA, 19 nt, Artificial Sequence
  Description of Artificial Sequence: Synthetic oligonucleotide
guugaguuacaggcaaggc

SEQ ID NO: 634692 - RNA, 19 nt, Artificial Sequence
  Description of Artificial Sequence: Synthetic oligonucleotide
augguaguagacugccagu

SEQ ID NO: 634693 - RNA, 19 nt, Artificial Sequence
  Description of Artificial Sequence: Synthetic oligonucleotide
ggcuguaucuauccaauuc

SEQ ID NO: 634694 - RNA, 19 nt, Artificial Sequence
  Description of Artificial Sequence: Synthetic oligonucleotide
gauuccccauaaaagccac

SEQ ID NO: 634695 - RNA, 19 nt, Artificial Sequence
  Description of Artificial Sequence: Synthetic oligonucleotide
auuaccagacaagcaucag

SEQ ID NO: 634696 - RNA, 19 nt, Artificial Sequence
  Description of Artificial Sequence: Synthetic oligonucleotide
auaaccagcugugacguua

SEQ ID NO: 634697 - RNA, 19 nt, Artificial Sequence
  Description of Artificial Sequence: Synthetic oligonucleotide
agaugauaacaggcauuac

SEQ ID NO: 634698 - RNA, 19 nt, Artificial Sequence
  Description of Artificial Sequence: Synthetic oligonucleotide
uccccauugggcucauucu

SEQ ID NO: 634699 - RNA, 19 nt, Artificial Sequence
  Description of Artificial Sequence: Synthetic oligonucleotide
auccuagugcaguucugug

SEQ ID NO: 634700 - RNA, 19 nt, Artificial Sequence
  Description of Artificial Sequence: Synthetic oligonucleotide
caaaacucuggagaacauc

SEQ ID NO: 634701 - RNA, 19 nt, Artificial Sequence
  Description of Artificial Sequence: Synthetic oligonucleotide
auagcaugauuaugugcaa

SEQ ID NO: 634702 - RNA, 19 nt, Artificial Sequence
  Description of Artificial Sequence: Synthetic oligonucleotide
uaacggugaaguccacaaa

SEQ ID NO: 634703 - RNA, 19 nt, Artificial Sequence
  Description of Artificial Sequence: Synthetic oligonucleotide
cauguugguuaugauuuuc

SEQ ID NO: 634704 - RNA, 19 nt, Artificial Sequence
  Description of Artificial Sequence: Synthetic oligonucleotide
acauaacacuagccaaaga

SEQ ID NO: 634705 - RNA, 19 nt, Artificial Sequence
  Description of Artificial Sequence: Synthetic oligonucleotide
aaguuugacuaugguagua

SEQ ID NO: 634706 - RNA, 19 nt, Artificial Sequence
  Description of Artificial Sequence: Synthetic oligonucleotide
acucggcugagugacaacu

SEQ ID NO: 634707 - RNA, 19 nt, Artificial Sequence
  Description of Artificial Sequence: Synthetic oligonucleotide
auacugccuuuucuaguug

SEQ ID NO: 634708 - RNA, 19 nt, Artificial Sequence
  Description of Artificial Sequence: Synthetic oligonucleotide
cucucuguacagaugcaga

SEQ ID NO: 634709 - RNA, 19 nt, Artificial Sequence
  Description of Artificial Sequence: Synthetic oligonucleotide
ccuguacuacauagcaugg

SEQ ID NO: 634710 - RNA, 19 nt, Artificial Sequence
  Description of Artificial Sequence: Synthetic oligonucleotide
aucagaaguagugccuugu

SEQ ID NO: 634711 - RNA, 19 nt, Artificial Sequence
  Description of Artificial Sequence: Synthetic oligonucleotide
ccauaaaagccacauccug

SEQ ID NO: 634712 - RNA, 19 nt, Artificial Sequence
  Description of Artificial Sequence: Synthetic oligonucleotide
ccuaauugacagcuuuuag

SEQ ID NO: 634713 - RNA, 19 nt, Artificial Sequence
  Description of Artificial Sequence: Synthetic oligonucleotide
guacagaugcagaaucuga

SEQ ID NO: 634714 - RNA, 19 nt, Artificial Sequence
  Description of Artificial Sequence: Synthetic oligonucleotide
accagacaagcaucaguga

SEQ ID NO: 634715 - RNA, 19 nt, Artificial Sequence
  Description of Artificial Sequence: Synthetic oligonucleotide
uuuucgggguaguuauuuu

SEQ ID NO: 634716 - RNA, 19 nt, Artificial Sequence
  Description of Artificial Sequence: Synthetic oligonucleotide
gaaguuugacuaugguagu

SEQ ID NO: 634717 - RNA, 19 nt, Artificial Sequence
  Description of Artificial Sequence: Synthetic oligonucleotide
cugcuguaugugaaaacca

SEQ ID NO: 634718 - RNA, 19 nt, Artificial Sequence
  Description of Artificial Sequence: Synthetic oligonucleotide
aacuagcauccgcucucug

SEQ ID NO: 634719 - RNA, 19 nt, Artificial Sequence
  Description of Artificial Sequence: Synthetic oligonucleotide
cuguuggaaccacuagcug

SEQ ID NO: 634720 - RNA, 19 nt, Artificial Sequence
  Description of Artificial Sequence: Synthetic oligonucleotide
aguaacggugaaguccaca

SEQ ID NO: 634721 - RNA, 19 nt, Artificial Sequence
  Description of Artificial Sequence: Synthetic oligonucleotide
ucgggguaguuauuuuguc

SEQ ID NO: 634722 - RNA, 19 nt, Artificial Sequence
  Description of Artificial Sequence: Synthetic oligonucleotide
cgaagaauguccuaauuga

SEQ ID NO: 634723 - RNA, 19 nt, Artificial Sequence
  Description of Artificial Sequence: Synthetic oligonucleotide
agcauccgcucucuguaca

SEQ ID NO: 634724 - RNA, 19 nt, Artificial Sequence
  Description of Artificial Sequence: Synthetic oligonucleotide
uuuaaguuacaggcacaua

SEQ ID NO: 634725 - RNA, 19 nt, Artificial Sequence
  Description of Artificial Sequence: Synthetic oligonucleotide
acaucggcagucaaacccu

SEQ ID NO: 634726 - RNA, 19 nt, Artificial Sequence
  Description of Artificial Sequence: Synthetic oligonucleotide
gcuauaauuuuaguagaga

SEQ ID NO: 634727 - RNA, 19 nt, Artificial Sequence
  Description of Artificial Sequence: Synthetic oligonucleotide
accucuguuuucgggguag

SEQ ID NO: 634728 - RNA, 19 nt, Artificial Sequence
  Description of Artificial Sequence: Synthetic oligonucleotide
gcuugucagaguaacggug

SEQ ID NO: 634729 - RNA, 19 nt, Artificial Sequence
  Description of Artificial Sequence: Synthetic oligonucleotide
acacuagccaaagauuaua

SEQ ID NO: 634730 - RNA, 19 nt, Artificial Sequence
  Description of Artificial Sequence: Synthetic oligonucleotide
aggcauuaccacaacacua

SEQ ID NO: 634731 - RNA, 19 nt, Artificial Sequence
  Description of Artificial Sequence: Synthetic oligonucleotide
ccgcucucuguacagaugc

SEQ ID NO: 634732 - RNA, 19 nt, Artificial Sequence
  Description of Artificial Sequence: Synthetic oligonucleotide
cucggcugagugacaacug

SEQ ID NO: 634733 - RNA, 19 nt, Artificial Sequence
  Description of Artificial Sequence: Synthetic oligonucleotide
accuuucgaagaauguccu

SEQ ID NO: 634734 - RNA, 19 nt, Artificial Sequence
  Description of Artificial Sequence: Synthetic oligonucleotide
cacuagcuguccccauugg

SEQ ID NO: 634735 - RNA, 19 nt, Artificial Sequence
  Description of Artificial Sequence: Synthetic oligonucleotide
guauacugccuuuucuagu

SEQ ID NO: 634736 - RNA, 19 nt, Artificial Sequence
  Description of Artificial Sequence: Synthetic oligonucleotide
ugccuguaacaaacaccca

SEQ ID NO: 634737 - RNA, 19 nt, Artificial Sequence
  Description of Artificial Sequence: Synthetic oligonucleotide
uagcaugauuaugugcaau

SEQ ID NO: 634738 - RNA, 19 nt, Artificial Sequence
  Description of Artificial Sequence: Synthetic oligonucleotide
uucagacgugcugccagca

SEQ ID NO: 634739 - RNA, 19 nt, Artificial Sequence
  Description of Artificial Sequence: Synthetic oligonucleotide
uauugaggggagggcauau

SEQ ID NO: 634740 - RNA, 19 nt, Artificial Sequence
  Description of Artificial Sequence: Synthetic oligonucleotide
auacacccaagaacacuag

SEQ ID NO: 634741 - RNA, 19 nt, Artificial Sequence
  Description of Artificial Sequence: Synthetic oligonucleotide
ggcacguggaacuaaauuu

SEQ ID NO: 634742 - RNA, 19 nt, Artificial Sequence
  Description of Artificial Sequence: Synthetic oligonucleotide
gaacuaaauuuuguuccua

SEQ ID NO: 634743 - RNA, 19 nt, Artificial Sequence
  Description of Artificial Sequence: Synthetic oligonucleotide
cuacauagcaugggcccug

SEQ ID NO: 634744 - RNA, 19 nt, Artificial Sequence
  Description of Artificial Sequence: Synthetic oligonucleotide
ccuaggauuccccauaaaa

SEQ ID NO: 634745 - RNA, 19 nt, Artificial Sequence
  Description of Artificial Sequence: Synthetic oligonucleotide
uauggacaguugugcuugu

SEQ ID NO: 634746 - RNA, 19 nt, Artificial Sequence
  Description of Artificial Sequence: Synthetic oligonucleotide
guuacaggcaaggcagcca

SEQ ID NO: 634747 - RNA, 19 nt, Artificial Sequence
  Description of Artificial Sequence: Synthetic oligonucleotide
acauagcaugggcccuggg

SEQ ID NO: 634748 - RNA, 19 nt, Artificial Sequence
  Description of Artificial Sequence: Synthetic oligonucleotide
agaguccuacacccaaaua

SEQ ID NO: 634749 - RNA, 19 nt, Artificial Sequence
  Description of Artificial Sequence: Synthetic oligonucleotide
acccuguaaggccaacuuu

SEQ ID NO: 634750 - RNA, 19 nt, Artificial Sequence
  Description of Artificial Sequence: Synthetic oligonucleotide
uguuuucgggguaguuauu

SEQ ID NO: 634751 - RNA, 19 nt, Artificial Sequence
  Description of Artificial Sequence: Synthetic oligonucleotide
gcuguagauaaugcagccc

SEQ ID NO: 634752 - RNA, 19 nt, Artificial Sequence
  Description of Artificial Sequence: Synthetic oligonucleotide
uccuaggauuccccauaaa

SEQ ID NO: 634753 - RNA, 19 nt, Artificial Sequence
  Description of Artificial Sequence: Synthetic oligonucleotide
cguuaccuuucgaagaaug

SEQ ID NO: 634754 - RNA, 19 nt, Artificial Sequence
  Description of Artificial Sequence: Synthetic oligonucleotide
aggcuuacacauggcacca

SEQ ID NO: 634755 - RNA, 19 nt, Artificial Sequence
  Description of Artificial Sequence: Synthetic oligonucleotide
caucggcagucaaacccug

SEQ ID NO: 634756 - RNA, 19 nt, Artificial Sequence
  Description of Artificial Sequence: Synthetic oligonucleotide
agauaccuuugcaacuuaa

SEQ ID NO: 634757 - RNA, 19 nt, Artificial Sequence
  Description of Artificial Sequence: Synthetic oligonucleotide
cuaugguaguagacugcca

SEQ ID NO: 634758 - RNA, 19 nt, Artificial Sequence
  Description of Artificial Sequence: Synthetic oligonucleotide
ggauuccccauaaaagcca

SEQ ID NO: 634759 - RNA, 19 nt, Artificial Sequence
  Description of Artificial Sequence: Synthetic oligonucleotide
cgggguaguuauuuugucc

SEQ ID NO: 634760 - RNA, 19 nt, Artificial Sequence
  Description of Artificial Sequence: Synthetic oligonucleotide
uggcaccaaaauacugguu

SEQ ID NO: 634761 - RNA, 19 nt, Artificial Sequence
  Description of Artificial Sequence: Synthetic oligonucleotide
caauuuaaccaggcuuaca

SEQ ID NO: 634762 - RNA, 19 nt, Artificial Sequence
  Description of Artificial Sequence: Synthetic oligonucleotide
uccuauuaucuguguuauu

SEQ ID NO: 634763 - RNA, 19 nt, Artificial Sequence
  Description of Artificial Sequence: Synthetic oligonucleotide
gcauccgcucucuguacag

SEQ ID NO: 634764 - RNA, 19 nt, Artificial Sequence
  Description of Artificial Sequence: Synthetic oligonucleotide
guuguugacuugaugguuu

SEQ ID NO: 634765 - RNA, 19 nt, Artificial Sequence
  Description of Artificial Sequence: Synthetic oligonucleotide
cauugggcucauucugcca

SEQ ID NO: 634766 - RNA, 19 nt, Artificial Sequence
  Description of Artificial Sequence: Synthetic oligonucleotide
auucugccuguaacaaaca

SEQ ID NO: 634767 - RNA, 19 nt, Artificial Sequence
  Description of Artificial Sequence: Synthetic oligonucleotide
gcauguuauuuaacagagc

SEQ ID NO: 634768 - RNA, 19 nt, Artificial Sequence
  Description of Artificial Sequence: Synthetic oligonucleotide
uauaaccagcugugacguu

SEQ ID NO: 634769 - RNA, 19 nt, Artificial Sequence
  Description of Artificial Sequence: Synthetic oligonucleotide
cagcacaauaagcuucaaa

SEQ ID NO: 634770 - RNA, 19 nt, Artificial Sequence
  Description of Artificial Sequence: Synthetic oligonucleotide
ccagacaagcaucagugaa

SEQ ID NO: 634771 - RNA, 19 nt, Artificial Sequence
  Description of Artificial Sequence: Synthetic oligonucleotide
auuuggcacguggaacuaa

SEQ ID NO: 634772 - RNA, 19 nt, Artificial Sequence
  Description of Artificial Sequence: Synthetic oligonucleotide
guuauuuaacagagcugcu

SEQ ID NO: 634773 - RNA, 19 nt, Artificial Sequence
  Description of Artificial Sequence: Synthetic oligonucleotide
auuauacgacagacaaaua

SEQ ID NO: 634774 - RNA, 19 nt, Artificial Sequence
  Description of Artificial Sequence: Synthetic oligonucleotide
guagcaaacagaacacauu

SEQ ID NO: 634775 - RNA, 19 nt, Artificial Sequence
  Description of Artificial Sequence: Synthetic oligonucleotide
ggguaguuauuuuguccuc

SEQ ID NO: 634776 - RNA, 19 nt, Artificial Sequence
  Description of Artificial Sequence: Synthetic oligonucleotide
agauuaucucaggcacccu

SEQ ID NO: 634777 - RNA, 19 nt, Artificial Sequence
  Description of Artificial Sequence: Synthetic oligonucleotide
ccuauuaucuguguuauuu

SEQ ID NO: 634778 - RNA, 19 nt, Artificial Sequence
  Description of Artificial Sequence: Synthetic oligonucleotide
guuuucgggguaguuauuu

SEQ ID NO: 634779 - RNA, 19 nt, Artificial Sequence
  Description of Artificial Sequence: Synthetic oligonucleotide
gugccuuguguacauacuu

SEQ ID NO: 634780 - RNA, 19 nt, Artificial Sequence
  Description of Artificial Sequence: Synthetic oligonucleotide
gcuguaugugaaaaccaaa

SEQ ID NO: 634781 - RNA, 19 nt, Artificial Sequence
  Description of Artificial Sequence: Synthetic oligonucleotide
cugccacuauucuguuguc

SEQ ID NO: 634782 - RNA, 19 nt, Artificial Sequence
  Description of Artificial Sequence: Synthetic oligonucleotide
auuccccauaaaagccaca

SEQ ID NO: 634783 - RNA, 19 nt, Artificial Sequence
  Description of Artificial Sequence: Synthetic oligonucleotide
cagaaggguacaguuacau

SEQ ID NO: 634784 - RNA, 19 nt, Artificial Sequence
  Description of Artificial Sequence: Synthetic oligonucleotide
acguuaccuuucgaagaau

SEQ ID NO: 634785 - RNA, 19 nt, Artificial Sequence
  Description of Artificial Sequence: Synthetic oligonucleotide
ggauaccacuaaagaaguc

SEQ ID NO: 634786 - RNA, 19 nt, Artificial Sequence
  Description of Artificial Sequence: Synthetic oligonucleotide
aucggcagucaaacccugu

SEQ ID NO: 634787 - RNA, 19 nt, Artificial Sequence
  Description of Artificial Sequence: Synthetic oligonucleotide
ggagaacaucaaaggaaaa

SEQ ID NO: 634788 - RNA, 19 nt, Artificial Sequence
  Description of Artificial Sequence: Synthetic oligonucleotide
gaguaacggugaaguccac

SEQ ID NO: 634789 - RNA, 19 nt, Artificial Sequence
  Description of Artificial Sequence: Synthetic oligonucleotide
gacgugcugccagcagcac

SEQ ID NO: 634790 - RNA, 19 nt, Artificial Sequence
  Description of Artificial Sequence: Synthetic oligonucleotide
cagauaccuuugcaacuua

SEQ ID NO: 634791 - RNA, 19 nt, Artificial Sequence
  Description of Artificial Sequence: Synthetic oligonucleotide
ggcucauucugccacuauu

SEQ ID NO: 634792 - RNA, 19 nt, Artificial Sequence
  Description of Artificial Sequence: Synthetic oligonucleotide
auguccuaauugacagcuu

SEQ ID NO: 634793 - RNA, 19 nt, Artificial Sequence
  Description of Artificial Sequence: Synthetic oligonucleotide
ggacucggcugagugacaa

SEQ ID NO: 634794 - RNA, 19 nt, Artificial Sequence
  Description of Artificial Sequence: Synthetic oligonucleotide
caagaacacuagaguccua

SEQ ID NO: 634795 - RNA, 19 nt, Artificial Sequence
  Description of Artificial Sequence: Synthetic oligonucleotide
gcacguggaacuaaauuuu

SEQ ID NO: 634796 - RNA, 19 nt, Artificial Sequence
  Description of Artificial Sequence: Synthetic oligonucleotide
caguugugcuugucagagu

SEQ ID NO: 634797 - RNA, 19 nt, Artificial Sequence
  Description of Artificial Sequence: Synthetic oligonucleotide
ccuuucgaagaauguccua

SEQ ID NO: 634798 - RNA, 19 nt, Artificial Sequence
  Description of Artificial Sequence: Synthetic oligonucleotide
ccagcacaauaagcuucaa

SEQ ID NO: 634799 - RNA, 19 nt, Artificial Sequence
  Description of Artificial Sequence: Synthetic oligonucleotide
aaaugcaaaguauugaagg

SEQ ID NO: 634800 - RNA, 19 nt, Artificial Sequence
  Description of Artificial Sequence: Synthetic oligonucleotide
ugcaauaacauggagaggg

SEQ ID NO: 634801 - RNA, 19 nt, Artificial Sequence
  Description of Artificial Sequence: Synthetic oligonucleotide
aaguauugaaggcacuugc

SEQ ID NO: 634802 - RNA, 19 nt, Artificial Sequence
  Description of Artificial Sequence: Synthetic oligonucleotide
aacggucacaaucacaugg

SEQ ID NO: 634803 - RNA, 19 nt, Artificial Sequence
  Description of Artificial Sequence: Synthetic oligonucleotide
ucgaauucaaggaagaucu

SEQ ID NO: 634804 - RNA, 19 nt, Artificial Sequence
  Description of Artificial Sequence: Synthetic oligonucleotide
aauuucauccuacagacaa

SEQ ID NO: 634805 - RNA, 19 nt, Artificial Sequence
  Description of Artificial Sequence: Synthetic oligonucleotide
aaauuacgaguacaugggc

SEQ ID NO: 634806 - RNA, 19 nt, Artificial Sequence
  Description of Artificial Sequence: Synthetic oligonucleotide
guagauaggauucccaugg

SEQ ID NO: 634807 - RNA, 19 nt, Artificial Sequence
  Description of Artificial Sequence: Synthetic oligonucleotide
ggaaauuacgaguacaugg

SEQ ID NO: 634808 - RNA, 19 nt, Artificial Sequence
  Description of Artificial Sequence: Synthetic oligonucleotide
aguaacaucugugaagccc

SEQ ID NO: 634809 - RNA, 19 nt, Artificial Sequence
  Description of Artificial Sequence: Synthetic oligonucleotide
gaaauuacgaguacauggg

SEQ ID NO: 634810 - RNA, 19 nt, Artificial Sequence
  Description of Artificial Sequence: Synthetic oligonucleotide
aacugagagggucauccgc

SEQ ID NO: 634811 - RNA, 19 nt, Artificial Sequence
  Description of Artificial Sequence: Synthetic oligonucleotide
aaagcuauagggccagguc

SEQ ID NO: 634812 - RNA, 19 nt, Artificial Sequence
  Description of Artificial Sequence: Synthetic oligonucleotide
gaccucguuguauaaaucg

SEQ ID NO: 634813 - RNA, 19 nt, Artificial Sequence
  Description of Artificial Sequence: Synthetic oligonucleotide
auaggauucccaugggacc

SEQ ID NO: 634814 - RNA, 19 nt, Artificial Sequence
  Description of Artificial Sequence: Synthetic oligonucleotide
ucauccuacagacaaucag

SEQ ID NO: 634815 - RNA, 19 nt, Artificial Sequence
  Description of Artificial Sequence: Synthetic oligonucleotide
cauccuacagacaaucagg

SEQ ID NO: 634816 - RNA, 19 nt, Artificial Sequence
  Description of Artificial Sequence: Synthetic oligonucleotide
acaacggacagguuucccc

SEQ ID NO: 634817 - RNA, 19 nt, Artificial Sequence
  Description of Artificial Sequence: Synthetic oligonucleotide
aagcuauagggccaggucu

SEQ ID NO: 634818 - RNA, 19 nt, Artificial Sequence
  Description of Artificial Sequence: Synthetic oligonucleotide
aaaaugcaaaguauugaag

SEQ ID NO: 634819 - RNA, 19 nt, Artificial Sequence
  Description of Artificial Sequence: Synthetic oligonucleotide
uauaaaucgcugaauuccu

SEQ ID NO: 634820 - RNA, 19 nt, Artificial Sequence
  Description of Artificial Sequence: Synthetic oligonucleotide
uaucccaaaaugcaaagua

SEQ ID NO: 634821 - RNA, 19 nt, Artificial Sequence
  Description of Artificial Sequence: Synthetic oligonucleotide
ucaaccacguccuugggga

SEQ ID NO: 634822 - RNA, 19 nt, Artificial Sequence
  Description of Artificial Sequence: Synthetic oligonucleotide
ucucgguacaucucgauga

SEQ ID NO: 634823 - RNA, 19 nt, Artificial Sequence
  Description of Artificial Sequence: Synthetic oligonucleotide
uuguauaaaucgcugaauu

SEQ ID NO: 634824 - RNA, 19 nt, Artificial Sequence
  Description of Artificial Sequence: Synthetic oligonucleotide
uccguacucaccuucuagg

SEQ ID NO: 634825 - RNA, 19 nt, Artificial Sequence
  Description of Artificial Sequence: Synthetic oligonucleotide
uucuccguaggccacaacu

SEQ ID NO: 634826 - RNA, 19 nt, Artificial Sequence
  Description of Artificial Sequence: Synthetic oligonucleotide
cucgcacaaagccugaggg

SEQ ID NO: 634827 - RNA, 19 nt, Artificial Sequence
  Description of Artificial Sequence: Synthetic oligonucleotide
aagccucgagcacaguaac

SEQ ID NO: 634828 - RNA, 19 nt, Artificial Sequence
  Description of Artificial Sequence: Synthetic oligonucleotide
gauaggauucccaugggac

SEQ ID NO: 634829 - RNA, 19 nt, Artificial Sequence
  Description of Artificial Sequence: Synthetic oligonucleotide
uguccacuacaaaagauau

SEQ ID NO: 634830 - RNA, 19 nt, Artificial Sequence
  Description of Artificial Sequence: Synthetic oligonucleotide
auggauugcugccccaggc

SEQ ID NO: 634831 - RNA, 19 nt, Artificial Sequence
  Description of Artificial Sequence: Synthetic oligonucleotide
ucugaagacagcccagugu

SEQ ID NO: 634832 - RNA, 19 nt, Artificial Sequence
  Description of Artificial Sequence: Synthetic oligonucleotide
aauuacgaguacaugggca

SEQ ID NO: 634833 - RNA, 19 nt, Artificial Sequence
  Description of Artificial Sequence: Synthetic oligonucleotide
aggguucgaucucaggacc

SEQ ID NO: 634834 - RNA, 19 nt, Artificial Sequence
  Description of Artificial Sequence: Synthetic oligonucleotide
aguguugcgauugugguca

SEQ ID NO: 634835 - RNA, 19 nt, Artificial Sequence
  Description of Artificial Sequence: Synthetic oligonucleotide
acaggguucgaucucagga

SEQ ID NO: 634836 - RNA, 19 nt, Artificial Sequence
  Description of Artificial Sequence: Synthetic oligonucleotide
aagucucacgcucuguaca

SEQ ID NO: 634837 - RNA, 19 nt, Artificial Sequence
  Description of Artificial Sequence: Synthetic oligonucleotide
augggcgcugucuuggagc

SEQ ID NO: 634838 - RNA, 19 nt, Artificial Sequence
  Description of Artificial Sequence: Synthetic oligonucleotide
aguaguggcugaugcggcc

SEQ ID NO: 634839 - RNA, 19 nt, Artificial Sequence
  Description of Artificial Sequence: Synthetic oligonucleotide
uugucggugguaccaaugc

SEQ ID NO: 634840 - RNA, 19 nt, Artificial Sequence
  Description of Artificial Sequence: Synthetic oligonucleotide
acaauccucgcacuccacg

SEQ ID NO: 634841 - RNA, 19 nt, Artificial Sequence
  Description of Artificial Sequence: Synthetic oligonucleotide
ucucacgcucuguacacgg

SEQ ID NO: 634842 - RNA, 19 nt, Artificial Sequence
  Description of Artificial Sequence: Synthetic oligonucleotide
uccacaacucgcacaaagc

SEQ ID NO: 634843 - RNA, 19 nt, Artificial Sequence
  Description of Artificial Sequence: Synthetic oligonucleotide
auuacgaguacaugggcaa

SEQ ID NO: 634844 - RNA, 19 nt, Artificial Sequence
  Description of Artificial Sequence: Synthetic oligonucleotide
caacuuugcauaccguccg

SEQ ID NO: 634845 - RNA, 19 nt, Artificial Sequence
  Description of Artificial Sequence: Synthetic oligonucleotide
uucgccgagguuuugguac

SEQ ID NO: 634846 - RNA, 19 nt, Artificial Sequence
  Description of Artificial Sequence: Synthetic oligonucleotide
agucucacgcucuguacac

SEQ ID NO: 634847 - RNA, 19 nt, Artificial Sequence
  Description of Artificial Sequence: Synthetic oligonucleotide
gauaagugaggguacagcu

SEQ ID NO: 634848 - RNA, 19 nt, Artificial Sequence
  Description of Artificial Sequence: Synthetic oligonucleotide
uuauagaccucguuguaua

SEQ ID NO: 634849 - RNA, 19 nt, Artificial Sequence
  Description of Artificial Sequence: Synthetic oligonucleotide
uuugcauaccguccguacu

SEQ ID NO: 634850 - RNA, 19 nt, Artificial Sequence
  Description of Artificial Sequence: Synthetic oligonucleotide
gauacaacggacagguuuc

SEQ ID NO: 634851 - RNA, 19 nt, Artificial Sequence
  Description of Artificial Sequence: Synthetic oligonucleotide
agcagucacgaguuagugg

SEQ ID NO: 634852 - RNA, 19 nt, Artificial Sequence
  Description of Artificial Sequence: Synthetic oligonucleotide
agcauugacugguuuacca

SEQ ID NO: 634853 - RNA, 19 nt, Artificial Sequence
  Description of Artificial Sequence: Synthetic oligonucleotide
gagacgagcugccucacgc

SEQ ID NO: 634854 - RNA, 19 nt, Artificial Sequence
  Description of Artificial Sequence: Synthetic oligonucleotide
gaugcgauugcgcaccuuc

SEQ ID NO: 634855 - RNA, 19 nt, Artificial Sequence
  Description of Artificial Sequence: Synthetic oligonucleotide
gaggggaugaugugauggg

SEQ ID NO: 634856 - RNA, 19 nt, Artificial Sequence
  Description of Artificial Sequence: Synthetic oligonucleotide
acuugcaauaacauggaga

SEQ ID NO: 634857 - RNA, 19 nt, Artificial Sequence
  Description of Artificial Sequence: Synthetic oligonucleotide
ggaaguauggauugcugcc

SEQ ID NO: 634858 - RNA, 19 nt, Artificial Sequence
  Description of Artificial Sequence: Synthetic oligonucleotide
ucaucuauacugugagaac

SEQ ID NO: 634859 - RNA, 19 nt, Artificial Sequence
  Description of Artificial Sequence: Synthetic oligonucleotide
uacaucucgaugagacgag

SEQ ID NO: 634860 - RNA, 19 nt, Artificial Sequence
  Description of Artificial Sequence: Synthetic oligonucleotide
uaucuugcgguaccagagc

SEQ ID NO: 634861 - RNA, 19 nt, Artificial Sequence
  Description of Artificial Sequence: Synthetic oligonucleotide
auaucuugcgguaccagag

SEQ ID NO: 634862 - RNA, 19 nt, Artificial Sequence
  Description of Artificial Sequence: Synthetic oligonucleotide
gaaguauggauugcugccc

SEQ ID NO: 634863 - RNA, 19 nt, Artificial Sequence
  Description of Artificial Sequence: Synthetic oligonucleotide
ucccaaaaugcaaaguauu

SEQ ID NO: 634864 - RNA, 19 nt, Artificial Sequence
  Description of Artificial Sequence: Synthetic oligonucleotide
auaccguccguacucaccu

SEQ ID NO: 634865 - RNA, 19 nt, Artificial Sequence
  Description of Artificial Sequence: Synthetic oligonucleotide
cucguuguauaaaucgcug

SEQ ID NO: 634866 - RNA, 19 nt, Artificial Sequence
  Description of Artificial Sequence: Synthetic oligonucleotide
accucguuguauaaaucgc

SEQ ID NO: 634867 - RNA, 19 nt, Artificial Sequence
  Description of Artificial Sequence: Synthetic oligonucleotide
ugguuuaccauggcggaag

SEQ ID NO: 634868 - RNA, 19 nt, Artificial Sequence
  Description of Artificial Sequence: Synthetic oligonucleotide
gguacauugggauucccug

SEQ ID NO: 634869 - RNA, 19 nt, Artificial Sequence
  Description of Artificial Sequence: Synthetic oligonucleotide
auacugugagaacugcucu

SEQ ID NO: 634870 - RNA, 19 nt, Artificial Sequence
  Description of Artificial Sequence: Synthetic oligonucleotide
uacgaguacaugggcaagg

SEQ ID NO: 634871 - RNA, 19 nt, Artificial Sequence
  Description of Artificial Sequence: Synthetic oligonucleotide
ucucgaugagacgagcugc

SEQ ID NO: 634872 - RNA, 19 nt, Artificial Sequence
  Description of Artificial Sequence: Synthetic oligonucleotide
uggccuaaagaaacuggug

SEQ ID NO: 634873 - RNA, 19 nt, Artificial Sequence
  Description of Artificial Sequence: Synthetic oligonucleotide
ucacgcucuguacacggcc

SEQ ID NO: 634874 - RNA, 19 nt, Artificial Sequence
  Description of Artificial Sequence: Synthetic oligonucleotide
cucaccggagaacagcacc

SEQ ID NO: 634875 - RNA, 19 nt, Artificial Sequence
  Description of Artificial Sequence: Synthetic oligonucleotide
acaaucacauggucggcug

SEQ ID NO: 634876 - RNA, 19 nt, Artificial Sequence
  Description of Artificial Sequence: Synthetic oligonucleotide
uugcauaccguccguacuc

SEQ ID NO: 634877 - RNA, 19 nt, Artificial Sequence
  Description of Artificial Sequence: Synthetic oligonucleotide
ugugcagaucucagccacg

SEQ ID NO: 634878 - RNA, 19 nt, Artificial Sequence
  Description of Artificial Sequence: Synthetic oligonucleotide
ugugucuggaagccucgag

SEQ ID NO: 634879 - RNA, 19 nt, Artificial Sequence
  Description of Artificial Sequence: Synthetic oligonucleotide
guugcgauuguggucaccc

SEQ ID NO: 634880 - RNA, 19 nt, Artificial Sequence
  Description of Artificial Sequence: Synthetic oligonucleotide
gacaaucaggaaauuacga

SEQ ID NO: 634881 - RNA, 19 nt, Artificial Sequence
  Description of Artificial Sequence: Synthetic oligonucleotide
accggagaacagcaccugc

SEQ ID NO: 634882 - RNA, 19 nt, Artificial Sequence
  Description of Artificial Sequence: Synthetic oligonucleotide
uucgcgagcggccucggcc

SEQ ID NO: 634883 - RNA, 19 nt, Artificial Sequence
  Description of Artificial Sequence: Synthetic oligonucleotide
acucgcacaaagccugagg

SEQ ID NO: 634884 - RNA, 19 nt, Artificial Sequence
  Description of Artificial Sequence: Synthetic oligonucleotide
accucggaaguauggauug

SEQ ID NO: 634885 - RNA, 19 nt, Artificial Sequence
  Description of Artificial Sequence: Synthetic oligonucleotide
cauuacccagccuagagaa

SEQ ID NO: 634886 - RNA, 19 nt, Artificial Sequence
  Description of Artificial Sequence: Synthetic oligonucleotide
auaagugaggguacagcuc

SEQ ID NO: 634887 - RNA, 19 nt, Artificial Sequence
  Description of Artificial Sequence: Synthetic oligonucleotide
uaggauucccaugggaccc

SEQ ID NO: 634888 - RNA, 19 nt, Artificial Sequence
  Description of Artificial Sequence: Synthetic oligonucleotide
aaggcgcucagagacaccu

SEQ ID NO: 634889 - RNA, 19 nt, Artificial Sequence
  Description of Artificial Sequence: Synthetic oligonucleotide
uucauccuacagacaauca

SEQ ID NO: 634890 - RNA, 19 nt, Artificial Sequence
  Description of Artificial Sequence: Synthetic oligonucleotide
cacuggauucacaacuuug

SEQ ID NO: 634891 - RNA, 19 nt, Artificial Sequence
  Description of Artificial Sequence: Synthetic oligonucleotide
cucgaauucaaggaagauc

SEQ ID NO: 634892 - RNA, 19 nt, Artificial Sequence
  Description of Artificial Sequence: Synthetic oligonucleotide
acugguuuaccauggcgga

SEQ ID NO: 634893 - RNA, 19 nt, Artificial Sequence
  Description of Artificial Sequence: Synthetic oligonucleotide
cuuugcauaccguccguac

SEQ ID NO: 634894 - RNA, 19 nt, Artificial Sequence
  Description of Artificial Sequence: Synthetic oligonucleotide
ucccaguggauacaacgga

SEQ ID NO: 634895 - RNA, 19 nt, Artificial Sequence
  Description of Artificial Sequence: Synthetic oligonucleotide
aguggauacaacggacagg

SEQ ID NO: 634896 - RNA, 19 nt, Artificial Sequence
  Description of Artificial Sequence: Synthetic oligonucleotide
ugguacauugggauucccu

SEQ ID NO: 634897 - RNA, 19 nt, Artificial Sequence
  Description of Artificial Sequence: Synthetic oligonucleotide
caggccacgccauucuugg

SEQ ID NO: 634898 - RNA, 19 nt, Artificial Sequence
  Description of Artificial Sequence: Synthetic oligonucleotide
cauaccguccguacucacc

SEQ ID NO: 634899 - RNA, 19 nt, Artificial Sequence
  Description of Artificial Sequence: Synthetic oligonucleotide
uaguacuugcggugcgugg

SEQ ID NO: 634900 - RNA, 19 nt, Artificial Sequence
  Description of Artificial Sequence: Synthetic oligonucleotide
cagcgaaacggucacaauc

SEQ ID NO: 634901 - RNA, 19 nt, Artificial Sequence
  Description of Artificial Sequence: Synthetic oligonucleotide
uccaaaaggccauuagcuu

SEQ ID NO: 634902 - RNA, 19 nt, Artificial Sequence
  Description of Artificial Sequence: Synthetic oligonucleotide
ugucggugguaccaaugcc

SEQ ID NO: 634903 - RNA, 19 nt, Artificial Sequence
  Description of Artificial Sequence: Synthetic oligonucleotide
ucgagcacaguaacaucug

SEQ ID NO: 634904 - RNA, 19 nt, Artificial Sequence
  Description of Artificial Sequence: Synthetic oligonucleotide
aaacggucacaaucacaug

SEQ ID NO: 634905 - RNA, 19 nt, Artificial Sequence
  Description of Artificial Sequence: Synthetic oligonucleotide
ugcgguaccagagcucagg

SEQ ID NO: 634906 - RNA, 19 nt, Artificial Sequence
  Description of Artificial Sequence: Synthetic oligonucleotide
cacggccucaucaucacac

SEQ ID NO: 634907 - RNA, 19 nt, Artificial Sequence
  Description of Artificial Sequence: Synthetic oligonucleotide
ucgaagccacauaucuugc

SEQ ID NO: 634908 - RNA, 19 nt, Artificial Sequence
  Description of Artificial Sequence: Synthetic oligonucleotide
uuaucccaaaaugcaaagu

SEQ ID NO: 634909 - RNA, 19 nt, Artificial Sequence
  Description of Artificial Sequence: Synthetic oligonucleotide
caguggauacaacggacag

SEQ ID NO: 634910 - RNA, 19 nt, Artificial Sequence
  Description of Artificial Sequence: Synthetic oligonucleotide
guauugaaggcacuugcaa

SEQ ID NO: 634911 - RNA, 19 nt, Artificial Sequence
  Description of Artificial Sequence: Synthetic oligonucleotide
gaguaguacuugcggugcg

SEQ ID NO: 634912 - RNA, 19 nt, Artificial Sequence
  Description of Artificial Sequence: Synthetic oligonucleotide
cucgaugagacgagcugcc

SEQ ID NO: 634913 - RNA, 19 nt, Artificial Sequence
  Description of Artificial Sequence: Synthetic oligonucleotide
agucacgaguuagugguuc

SEQ ID NO: 634914 - RNA, 19 nt, Artificial Sequence
  Description of Artificial Sequence: Synthetic oligonucleotide
agcgaaacggucacaauca

SEQ ID NO: 634915 - RNA, 19 nt, Artificial Sequence
  Description of Artificial Sequence: Synthetic oligonucleotide
auagcgcucugguggguac

SEQ ID NO: 634916 - RNA, 19 nt, Artificial Sequence
  Description of Artificial Sequence: Synthetic oligonucleotide
caggguucgaucucaggac

SEQ ID NO: 634917 - RNA, 19 nt, Artificial Sequence
  Description of Artificial Sequence: Synthetic oligonucleotide
aucuugcgguaccagagcu

SEQ ID NO: 634918 - RNA, 19 nt, Artificial Sequence
  Description of Artificial Sequence: Synthetic oligonucleotide
aacuuugcauaccguccgu

SEQ ID NO: 634919 - RNA, 19 nt, Artificial Sequence
  Description of Artificial Sequence: Synthetic oligonucleotide
ugagacgagcugccucacg

SEQ ID NO: 634920 - RNA, 19 nt, Artificial Sequence
  Description of Artificial Sequence: Synthetic oligonucleotide
caccacacgaggcuguccc

SEQ ID NO: 634921 - RNA, 19 nt, Artificial Sequence
  Description of Artificial Sequence: Synthetic oligonucleotide
gucccaguggauacaacgg

SEQ ID NO: 634922 - RNA, 19 nt, Artificial Sequence
  Description of Artificial Sequence: Synthetic oligonucleotide
uggauugcugccccaggcu

SEQ ID NO: 634923 - RNA, 19 nt, Artificial Sequence
  Description of Artificial Sequence: Synthetic oligonucleotide
cuugucggugguaccaaug

SEQ ID NO: 634924 - RNA, 19 nt, Artificial Sequence
  Description of Artificial Sequence: Synthetic oligonucleotide
aaucccaccugggcauuac

SEQ ID NO: 634925 - RNA, 19 nt, Artificial Sequence
  Description of Artificial Sequence: Synthetic oligonucleotide
gguagauaggauucccaug

SEQ ID NO: 634926 - RNA, 19 nt, Artificial Sequence
  Description of Artificial Sequence: Synthetic oligonucleotide
auacaacggacagguuucc

SEQ ID NO: 634927 - RNA, 19 nt, Artificial Sequence
  Description of Artificial Sequence: Synthetic oligonucleotide
aggaaauuacgaguacaug

SEQ ID NO: 634928 - RNA, 19 nt, Artificial Sequence
  Description of Artificial Sequence: Synthetic oligonucleotide
accguccguacucaccuuc

SEQ ID NO: 634929 - RNA, 19 nt, Artificial Sequence
  Description of Artificial Sequence: Synthetic oligonucleotide
cuaggagccuuucccugcg

SEQ ID NO: 634930 - RNA, 19 nt, Artificial Sequence
  Description of Artificial Sequence: Synthetic oligonucleotide
ucgcugaauuccucaacca

SEQ ID NO: 634931 - RNA, 19 nt, Artificial Sequence
  Description of Artificial Sequence: Synthetic oligonucleotide
aguauugaaggcacuugca

SEQ ID NO: 634932 - RNA, 19 nt, Artificial Sequence
  Description of Artificial Sequence: Synthetic oligonucleotide
acgcucuguacacggcccc

SEQ ID NO: 634933 - RNA, 19 nt, Artificial Sequence
  Description of Artificial Sequence: Synthetic oligonucleotide
aucuauacugugagaacug

SEQ ID NO: 634934 - RNA, 19 nt, Artificial Sequence
  Description of Artificial Sequence: Synthetic oligonucleotide
ugcucgagaagugcucuag

SEQ ID NO: 634935 - RNA, 19 nt, Artificial Sequence
  Description of Artificial Sequence: Synthetic oligonucleotide
ccaaaaggccauuagcuuc

SEQ ID NO: 634936 - RNA, 19 nt, Artificial Sequence
  Description of Artificial Sequence: Synthetic oligonucleotide
gaucuugucggugguacca

SEQ ID NO: 634937 - RNA, 19 nt, Artificial Sequence
  Description of Artificial Sequence: Synthetic oligonucleotide
caagucucacgcucuguac

SEQ ID NO: 634938 - RNA, 19 nt, Artificial Sequence
  Description of Artificial Sequence: Synthetic oligonucleotide
gauuguggucacccucacc

SEQ ID NO: 634939 - RNA, 19 nt, Artificial Sequence
  Description of Artificial Sequence: Synthetic oligonucleotide
gaagacagcccagugucca

SEQ ID NO: 634940 - RNA, 19 nt, Artificial Sequence
  Description of Artificial Sequence: Synthetic oligonucleotide
guccguacucaccuucuag

SEQ ID NO: 634941 - RNA, 19 nt, Artificial Sequence
  Description of Artificial Sequence: Synthetic oligonucleotide
uuacgaguacaugggcaag

SEQ ID NO: 634942 - RNA, 19 nt, Artificial Sequence
  Description of Artificial Sequence: Synthetic oligonucleotide
gacgagcugccucacgcug

SEQ ID NO: 634943 - RNA, 19 nt, Artificial Sequence
  Description of Artificial Sequence: Synthetic oligonucleotide
ugaaggcacuugcaauaac

SEQ ID NO: 634944 - RNA, 19 nt, Artificial Sequence
  Description of Artificial Sequence: Synthetic oligonucleotide
ugcgcuccccaucuguugu

SEQ ID NO: 634945 - RNA, 19 nt, Artificial Sequence
  Description of Artificial Sequence: Synthetic oligonucleotide
auaggaaccucggaaguau

SEQ ID NO: 634946 - RNA, 19 nt, Artificial Sequence
  Description of Artificial Sequence: Synthetic oligonucleotide
guggauacaacggacaggu

SEQ ID NO: 634947 - RNA, 19 nt, Artificial Sequence
  Description of Artificial Sequence: Synthetic oligonucleotide
aguuauagaccucguugua

SEQ ID NO: 634948 - RNA, 19 nt, Artificial Sequence
  Description of Artificial Sequence: Synthetic oligonucleotide
gacccgacggccccgguug

SEQ ID NO: 634949 - RNA, 19 nt, Artificial Sequence
  Description of Artificial Sequence: Synthetic oligonucleotide
acccucaccacaggguucg

SEQ ID NO: 634950 - RNA, 19 nt, Artificial Sequence
  Description of Artificial Sequence: Synthetic oligonucleotide
caacugagagggucauccg

SEQ ID NO: 634951 - RNA, 19 nt, Artificial Sequence
  Description of Artificial Sequence: Synthetic oligonucleotide
ucacaacuuugcauaccgu

SEQ ID NO: 634952 - RNA, 19 nt, Artificial Sequence
  Description of Artificial Sequence: Synthetic oligonucleotide
cucgguacaucucgaugag

SEQ ID NO: 634953 - RNA, 19 nt, Artificial Sequence
  Description of Artificial Sequence: Synthetic oligonucleotide
gaucaccaccacacgaggc

SEQ ID NO: 634954 - RNA, 19 nt, Artificial Sequence
  Description of Artificial Sequence: Synthetic oligonucleotide
cuagaugguagauaggauu

SEQ ID NO: 634955 - RNA, 19 nt, Artificial Sequence
  Description of Artificial Sequence: Synthetic oligonucleotide
acacccucagggccccugc

SEQ ID NO: 634956 - RNA, 19 nt, Artificial Sequence
  Description of Artificial Sequence: Synthetic oligonucleotide
guacaggacaucgaagcca

SEQ ID NO: 634957 - RNA, 19 nt, Artificial Sequence
  Description of Artificial Sequence: Synthetic oligonucleotide
agcccugcucgagaagugc

SEQ ID NO: 634958 - RNA, 19 nt, Artificial Sequence
  Description of Artificial Sequence: Synthetic oligonucleotide
ugcgauugcgcaccuucuc

SEQ ID NO: 634959 - RNA, 19 nt, Artificial Sequence
  Description of Artificial Sequence: Synthetic oligonucleotide
aaaggcgcucagagacacc

SEQ ID NO: 634960 - RNA, 19 nt, Artificial Sequence
  Description of Artificial Sequence: Synthetic oligonucleotide
uguaggguagaggcuuggc

SEQ ID NO: 634961 - RNA, 19 nt, Artificial Sequence
  Description of Artificial Sequence: Synthetic oligonucleotide
ucuugcgguaccagagcuc

SEQ ID NO: 634962 - RNA, 19 nt, Artificial Sequence
  Description of Artificial Sequence: Synthetic oligonucleotide
ggauaagugaggguacagc

SEQ ID NO: 634963 - RNA, 19 nt, Artificial Sequence
  Description of Artificial Sequence: Synthetic oligonucleotide
gguguacugccucuugagc

SEQ ID NO: 634964 - RNA, 19 nt, Artificial Sequence
  Description of Artificial Sequence: Synthetic oligonucleotide
aaccucggaaguauggauu

SEQ ID NO: 634965 - RNA, 19 nt, Artificial Sequence
  Description of Artificial Sequence: Synthetic oligonucleotide
uugagcacgcccagcgaaa

SEQ ID NO: 634966 - RNA, 19 nt, Artificial Sequence
  Description of Artificial Sequence: Synthetic oligonucleotide
cuuggggacccgacggccc

SEQ ID NO: 634967 - RNA, 19 nt, Artificial Sequence
  Description of Artificial Sequence: Synthetic oligonucleotide
ugagcgcaggauucgccga

SEQ ID NO: 634968 - RNA, 19 nt, Artificial Sequence
  Description of Artificial Sequence: Synthetic oligonucleotide
agcuauagggccaggucug

SEQ ID NO: 634969 - RNA, 19 nt, Artificial Sequence
  Description of Artificial Sequence: Synthetic oligonucleotide
cuugcgguaccagagcuca

SEQ ID NO: 634970 - RNA, 19 nt, Artificial Sequence
  Description of Artificial Sequence: Synthetic oligonucleotide
gcagucacgaguuaguggu

SEQ ID NO: 634971 - RNA, 19 nt, Artificial Sequence
  Description of Artificial Sequence: Synthetic oligonucleotide
gaagccucgagcacaguaa

SEQ ID NO: 634972 - RNA, 19 nt, Artificial Sequence
  Description of Artificial Sequence: Synthetic oligonucleotide
caucccugaugcgauugcg

SEQ ID NO: 634973 - RNA, 19 nt, Artificial Sequence
  Description of Artificial Sequence: Synthetic oligonucleotide
acauggucggcuggaauca

SEQ ID NO: 634974 - RNA, 19 nt, Artificial Sequence
  Description of Artificial Sequence: Synthetic oligonucleotide
agaccucguuguauaaauc

SEQ ID NO: 634975 - RNA, 19 nt, Artificial Sequence
  Description of Artificial Sequence: Synthetic oligonucleotide
caucuauacugugagaacu

SEQ ID NO: 634976 - RNA, 19 nt, Artificial Sequence
  Description of Artificial Sequence: Synthetic oligonucleotide
gagcgcaggauucgccgag

SEQ ID NO: 634977 - RNA, 19 nt, Artificial Sequence
  Description of Artificial Sequence: Synthetic oligonucleotide
uucccugcggagccgggga

SEQ ID NO: 634978 - RNA, 19 nt, Artificial Sequence
  Description of Artificial Sequence: Synthetic oligonucleotide
gaguaguggcugaugcggc

SEQ ID NO: 634979 - RNA, 19 nt, Artificial Sequence
  Description of Artificial Sequence: Synthetic oligonucleotide
guaacaucugugaagcccu

SEQ ID NO: 634980 - RNA, 19 nt, Artificial Sequence
  Description of Artificial Sequence: Synthetic oligonucleotide
ggcuccucgaauucaagga

SEQ ID NO: 634981 - RNA, 19 nt, Artificial Sequence
  Description of Artificial Sequence: Synthetic oligonucleotide
ggccacgccauucuuggag

SEQ ID NO: 634982 - RNA, 19 nt, Artificial Sequence
  Description of Artificial Sequence: Synthetic oligonucleotide
ggcguguccaagucucacg

SEQ ID NO: 634983 - RNA, 19 nt, Artificial Sequence
  Description of Artificial Sequence: Synthetic oligonucleotide
ggaguaguacuugcggugc

SEQ ID NO: 634984 - RNA, 19 nt, Artificial Sequence
  Description of Artificial Sequence: Synthetic oligonucleotide
ggccuaaagaaacuggugu

SEQ ID NO: 634985 - RNA, 19 nt, Artificial Sequence
  Description of Artificial Sequence: Synthetic oligonucleotide
ggaucucuguccauucucc

SEQ ID NO: 634986 - RNA, 19 nt, Artificial Sequence
  Description of Artificial Sequence: Synthetic oligonucleotide
caugggaagggucacuucu

SEQ ID NO: 634987 - RNA, 19 nt, Artificial Sequence
  Description of Artificial Sequence: Synthetic oligonucleotide
uacaacggacagguuuccc

SEQ ID NO: 634988 - RNA, 19 nt, Artificial Sequence
  Description of Artificial Sequence: Synthetic oligonucleotide
cgguacaucucgaugagac

SEQ ID NO: 634989 - RNA, 19 nt, Artificial Sequence
  Description of Artificial Sequence: Synthetic oligonucleotide
ugcauaccguccguacuca

SEQ ID NO: 634990 - RNA, 19 nt, Artificial Sequence
  Description of Artificial Sequence: Synthetic oligonucleotide
guaguacuugcggugcgug

SEQ ID NO: 634991 - RNA, 19 nt, Artificial Sequence
  Description of Artificial Sequence: Synthetic oligonucleotide
acugucgccacuggauuca

SEQ ID NO: 634992 - RNA, 19 nt, Artificial Sequence
  Description of Artificial Sequence: Synthetic oligonucleotide
cacauauggcagugaggac

SEQ ID NO: 634993 - RNA, 19 nt, Artificial Sequence
  Description of Artificial Sequence: Synthetic oligonucleotide
ccaugggacccauggaucc

SEQ ID NO: 634994 - RNA, 19 nt, Artificial Sequence
  Description of Artificial Sequence: Synthetic oligonucleotide
ucccgggugaacaccccga

SEQ ID NO: 634995 - RNA, 19 nt, Artificial Sequence
  Description of Artificial Sequence: Synthetic oligonucleotide
guacuugcggugcguggcc

SEQ ID NO: 634996 - RNA, 19 nt, Artificial Sequence
  Description of Artificial Sequence: Synthetic oligonucleotide
acccauggauccagguggc

SEQ ID NO: 634997 - RNA, 19 nt, Artificial Sequence
  Description of Artificial Sequence: Synthetic oligonucleotide
gcaauaacauggagagggg

SEQ ID NO: 634998 - RNA, 19 nt, Artificial Sequence
  Description of Artificial Sequence: Synthetic oligonucleotide
aguaguacuugcggugcgu

SEQ ID NO: 634999 - RNA, 19 nt, Artificial Sequence
  Description of Artificial Sequence: Synthetic oligonucleotide
ucauccgcacugucgccac

SEQ ID NO: 635000 - RNA, 19 nt, Artificial Sequence
  Description of Artificial Sequence: Synthetic oligonucleotide
gcguguccaagucucacgc

SEQ ID NO: 635001 - RNA, 19 nt, Artificial Sequence
  Description of Artificial Sequence: Synthetic oligonucleotide
agccaagccagcaccgauc

SEQ ID NO: 635002 - RNA, 19 nt, Artificial Sequence
  Description of Artificial Sequence: Synthetic oligonucleotide
guaguggcugaugcggccc

SEQ ID NO: 635003 - RNA, 19 nt, Artificial Sequence
  Description of Artificial Sequence: Synthetic oligonucleotide
cucacgcucuguacacggc

SEQ ID NO: 635004 - RNA, 19 nt, Artificial Sequence
  Description of Artificial Sequence: Synthetic oligonucleotide
augguagauaggauuccca

SEQ ID NO: 635005 - RNA, 19 nt, Artificial Sequence
  Description of Artificial Sequence: Synthetic oligonucleotide
auagaccucguuguauaaa

SEQ ID NO: 635006 - RNA, 19 nt, Artificial Sequence
  Description of Artificial Sequence: Synthetic oligonucleotide
ggauacaacggacagguuu

SEQ ID NO: 635007 - RNA, 19 nt, Artificial Sequence
  Description of Artificial Sequence: Synthetic oligonucleotide
ccgagguuuugguacauug

SEQ ID NO: 635008 - RNA, 19 nt, Artificial Sequence
  Description of Artificial Sequence: Synthetic oligonucleotide
aggacaucgaagccacaua

SEQ ID NO: 635009 - RNA, 19 nt, Artificial Sequence
  Description of Artificial Sequence: Synthetic oligonucleotide
agacgagcugccucacgcu

SEQ ID NO: 635010 - RNA, 19 nt, Artificial Sequence
  Description of Artificial Sequence: Synthetic oligonucleotide
ucgccgagguuuugguaca

SEQ ID NO: 635011 - RNA, 19 nt, Artificial Sequence
  Description of Artificial Sequence: Synthetic oligonucleotide
gcgauugcgcaccuucucc

SEQ ID NO: 635012 - RNA, 19 nt, Artificial Sequence
  Description of Artificial Sequence: Synthetic oligonucleotide
gggagcgucuucgcgagcg

SEQ ID NO: 635013 - RNA, 19 nt, Artificial Sequence
  Description of Artificial Sequence: Synthetic oligonucleotide
cacugucgccacuggauuc

SEQ ID NO: 635014 - RNA, 19 nt, Artificial Sequence
  Description of Artificial Sequence: Synthetic oligonucleotide
ccugaugcgauugcgcacc

SEQ ID NO: 635015 - RNA, 19 nt, Artificial Sequence
  Description of Artificial Sequence: Synthetic oligonucleotide
ggauucgccgagguuuugg

SEQ ID NO: 635016 - RNA, 19 nt, Artificial Sequence
  Description of Artificial Sequence: Synthetic oligonucleotide
cucccgggugaacaccccg

SEQ ID NO: 635017 - RNA, 19 nt, Artificial Sequence
  Description of Artificial Sequence: Synthetic oligonucleotide
gccccaaaagggcuccucg

SEQ ID NO: 635018 - RNA, 19 nt, Artificial Sequence
  Description of Artificial Sequence: Synthetic oligonucleotide
gacggccccgguugguaag

SEQ ID NO: 635019 - RNA, 19 nt, Artificial Sequence
  Description of Artificial Sequence: Synthetic oligonucleotide
gccauagcgcucugguggg

SEQ ID NO: 635020 - RNA, 19 nt, Artificial Sequence
  Description of Artificial Sequence: Synthetic oligonucleotide
guacauugggauucccugu

SEQ ID NO: 635021 - RNA, 19 nt, Artificial Sequence
  Description of Artificial Sequence: Synthetic oligonucleotide
cuggaucauggcgagcuuc

SEQ ID NO: 635022 - RNA, 19 nt, Artificial Sequence
  Description of Artificial Sequence: Synthetic oligonucleotide
ugagcacgcccagcgaaac

SEQ ID NO: 635023 - RNA, 19 nt, Artificial Sequence
  Description of Artificial Sequence: Synthetic oligonucleotide
gaaccucggaaguauggau

SEQ ID NO: 635024 - RNA, 19 nt, Artificial Sequence
  Description of Artificial Sequence: Synthetic oligonucleotide
ucgcgagcggccucggccu

SEQ ID NO: 635025 - RNA, 19 nt, Artificial Sequence
  Description of Artificial Sequence: Synthetic oligonucleotide
ccacauaucuugcgguacc

SEQ ID NO: 635026 - RNA, 19 nt, Artificial Sequence
  Description of Artificial Sequence: Synthetic oligonucleotide
gauucgccgagguuuuggu

SEQ ID NO: 635027 - RNA, 19 nt, Artificial Sequence
  Description of Artificial Sequence: Synthetic oligonucleotide
caugggcgcugucuuggag

SEQ ID NO: 635028 - RNA, 19 nt, Artificial Sequence
  Description of Artificial Sequence: Synthetic oligonucleotide
guccccuucuccguaggcc

SEQ ID NO: 635029 - RNA, 19 nt, Artificial Sequence
  Description of Artificial Sequence: Synthetic oligonucleotide
gucuucgcgagcggccucg

SEQ ID NO: 635030 - RNA, 19 nt, Artificial Sequence
  Description of Artificial Sequence: Synthetic oligonucleotide
agcccacuuguguguauga

SEQ ID NO: 635031 - RNA, 19 nt, Artificial Sequence
  Description of Artificial Sequence: Synthetic oligonucleotide
gucucacgcucuguacacg

SEQ ID NO: 635032 - RNA, 19 nt, Artificial Sequence
  Description of Artificial Sequence: Synthetic oligonucleotide
guuauagaccucguuguau

SEQ ID NO: 635033 - RNA, 19 nt, Artificial Sequence
  Description of Artificial Sequence: Synthetic oligonucleotide
augagacgagcugccucac

SEQ ID NO: 635034 - RNA, 19 nt, Artificial Sequence
  Description of Artificial Sequence: Synthetic oligonucleotide
agccggggagcgucuucgc

SEQ ID NO: 635035 - RNA, 19 nt, Artificial Sequence
  Description of Artificial Sequence: Synthetic oligonucleotide
agguggcguguccaagucu

SEQ ID NO: 635036 - RNA, 19 nt, Artificial Sequence
  Description of Artificial Sequence: Synthetic oligonucleotide
uugguacauugggauuccc

SEQ ID NO: 635037 - RNA, 19 nt, Artificial Sequence
  Description of Artificial Sequence: Synthetic oligonucleotide
ugucgccacuggauucaca

SEQ ID NO: 635038 - RNA, 19 nt, Artificial Sequence
  Description of Artificial Sequence: Synthetic oligonucleotide
auauggcagugaggacacc

SEQ ID NO: 635039 - RNA, 19 nt, Artificial Sequence
  Description of Artificial Sequence: Synthetic oligonucleotide
ccccaaugugucuggaagc

SEQ ID NO: 635040 - RNA, 19 nt, Artificial Sequence
  Description of Artificial Sequence: Synthetic oligonucleotide
gcauuacccagccuagaga

SEQ ID NO: 635041 - RNA, 19 nt, Artificial Sequence
  Description of Artificial Sequence: Synthetic oligonucleotide
augggcgccagggaucucu

SEQ ID NO: 635042 - RNA, 19 nt, Artificial Sequence
  Description of Artificial Sequence: Synthetic oligonucleotide
ugcggugcguggccucacc

SEQ ID NO: 635043 - RNA, 19 nt, Artificial Sequence
  Description of Artificial Sequence: Synthetic oligonucleotide
cagggucaucccugaugcg

SEQ ID NO: 635044 - RNA, 19 nt, Artificial Sequence
  Description of Artificial Sequence: Synthetic oligonucleotide
ugccucacgcuggccagag

SEQ ID NO: 635045 - RNA, 19 nt, Artificial Sequence
  Description of Artificial Sequence: Synthetic oligonucleotide
cagcauugacugguuuacc

SEQ ID NO: 635046 - RNA, 19 nt, Artificial Sequence
  Description of Artificial Sequence: Synthetic oligonucleotide
aagcccugcucgagaagug

SEQ ID NO: 635047 - RNA, 19 nt, Artificial Sequence
  Description of Artificial Sequence: Synthetic oligonucleotide
guagcaggccacgccauuc

SEQ ID NO: 635048 - RNA, 19 nt, Artificial Sequence
  Description of Artificial Sequence: Synthetic oligonucleotide
auucgccgagguuuuggua

SEQ ID NO: 635049 - RNA, 19 nt, Artificial Sequence
  Description of Artificial Sequence: Synthetic oligonucleotide
gggauaagugaggguacag

SEQ ID NO: 635050 - RNA, 19 nt, Artificial Sequence
  Description of Artificial Sequence: Synthetic oligonucleotide
gccccgguugguaagguag

SEQ ID NO: 635051 - RNA, 19 nt, Artificial Sequence
  Description of Artificial Sequence: Synthetic oligonucleotide
ggacaucgaagccacauau

SEQ ID NO: 635052 - RNA, 19 nt, Artificial Sequence
  Description of Artificial Sequence: Synthetic oligonucleotide
uggcguguccaagucucac

SEQ ID NO: 635053 - RNA, 19 nt, Artificial Sequence
  Description of Artificial Sequence: Synthetic oligonucleotide
gagcgucuucgcgagcggc

SEQ ID NO: 635054 - RNA, 19 nt, Artificial Sequence
  Description of Artificial Sequence: Synthetic oligonucleotide
agcgcaggauucgccgagg

SEQ ID NO: 635055 - RNA, 19 nt, Artificial Sequence
  Description of Artificial Sequence: Synthetic oligonucleotide
acguccuuggggacccgac

SEQ ID NO: 635056 - RNA, 19 nt, Artificial Sequence
  Description of Artificial Sequence: Synthetic oligonucleotide
ggaagccucgagcacagua

SEQ ID NO: 635057 - RNA, 19 nt, Artificial Sequence
  Description of Artificial Sequence: Synthetic oligonucleotide
augaugugaugggcgccag

SEQ ID NO: 635058 - RNA, 19 nt, Artificial Sequence
  Description of Artificial Sequence: Synthetic oligonucleotide
gguacagcucucugccuca

SEQ ID NO: 635059 - RNA, 19 nt, Artificial Sequence
  Description of Artificial Sequence: Synthetic oligonucleotide
caaccacguccuuggggac

SEQ ID NO: 635060 - RNA, 19 nt, Artificial Sequence
  Description of Artificial Sequence: Synthetic oligonucleotide
gcucgagaagugcucuagc

SEQ ID NO: 635061 - RNA, 19 nt, Artificial Sequence
  Description of Artificial Sequence: Synthetic oligonucleotide
uggucccaguggauacaac

SEQ ID NO: 635062 - RNA, 19 nt, Artificial Sequence
  Description of Artificial Sequence: Synthetic oligonucleotide
gacgcuguucugacucuca

SEQ ID NO: 635063 - RNA, 19 nt, Artificial Sequence
  Description of Artificial Sequence: Synthetic oligonucleotide
uaccaaugcccaggcggug

SEQ ID NO: 635064 - RNA, 19 nt, Artificial Sequence
  Description of Artificial Sequence: Synthetic oligonucleotide
caucucgaugagacgagcu

SEQ ID NO: 635065 - RNA, 19 nt, Artificial Sequence
  Description of Artificial Sequence: Synthetic oligonucleotide
gcuccucgaauucaaggaa

SEQ ID NO: 635066 - RNA, 19 nt, Artificial Sequence
  Description of Artificial Sequence: Synthetic oligonucleotide
ggcggugaauggcagccac

SEQ ID NO: 635067 - RNA, 19 nt, Artificial Sequence
  Description of Artificial Sequence: Synthetic oligonucleotide
acuuugcauaccguccgua

SEQ ID NO: 635068 - RNA, 19 nt, Artificial Sequence
  Description of Artificial Sequence: Synthetic oligonucleotide
ggugcguggccucaccgga

SEQ ID NO: 635069 - RNA, 19 nt, Artificial Sequence
  Description of Artificial Sequence: Synthetic oligonucleotide
cacgcccagcgaaacgguc

SEQ ID NO: 635070 - RNA, 19 nt, Artificial Sequence
  Description of Artificial Sequence: Synthetic oligonucleotide
ucacgaguuagugguucuu

SEQ ID NO: 635071 - RNA, 19 nt, Artificial Sequence
  Description of Artificial Sequence: Synthetic oligonucleotide
uacuugcggugcguggccu

SEQ ID NO: 635072 - RNA, 19 nt, Artificial Sequence
  Description of Artificial Sequence: Synthetic oligonucleotide
ucuucgcgagcggccucgg

SEQ ID NO: 635073 - RNA, 19 nt, Artificial Sequence
  Description of Artificial Sequence: Synthetic oligonucleotide
cgauugcgcaccuucuccc

SEQ ID NO: 635074 - RNA, 19 nt, Artificial Sequence
  Description of Artificial Sequence: Synthetic oligonucleotide
uggauacaacggacagguu

SEQ ID NO: 635075 - RNA, 19 nt, Artificial Sequence
  Description of Artificial Sequence: Synthetic oligonucleotide
acggccccgguugguaagg

SEQ ID NO: 635076 - RNA, 19 nt, Artificial Sequence
  Description of Artificial Sequence: Synthetic oligonucleotide
ggacagguuuccccagcug

SEQ ID NO: 635077 - RNA, 19 nt, Artificial Sequence
  Description of Artificial Sequence: Synthetic oligonucleotide
ggcgccagggaucucuguc

SEQ ID NO: 635078 - RNA, 19 nt, Artificial Sequence
  Description of Artificial Sequence: Synthetic oligonucleotide
aucuugucggugguaccaa

SEQ ID NO: 635079 - RNA, 19 nt, Artificial Sequence
  Description of Artificial Sequence: Synthetic oligonucleotide
ggagcgucuucgcgagcgg

SEQ ID NO: 635080 - RNA, 19 nt, Artificial Sequence
  Description of Artificial Sequence: Synthetic oligonucleotide
gguuuaccauggcggaaga

SEQ ID NO: 635081 - RNA, 19 nt, Artificial Sequence
  Description of Artificial Sequence: Synthetic oligonucleotide
auuacccagccuagagaaa

SEQ ID NO: 635082 - RNA, 19 nt, Artificial Sequence
  Description of Artificial Sequence: Synthetic oligonucleotide
augcgauugcgcaccuucu

SEQ ID NO: 635083 - RNA, 19 nt, Artificial Sequence
  Description of Artificial Sequence: Synthetic oligonucleotide
guaccaaugcccaggcggu

SEQ ID NO: 635084 - RNA, 19 nt, Artificial Sequence
  Description of Artificial Sequence: Synthetic oligonucleotide
gucacgaguuagugguucu

SEQ ID NO: 635085 - RNA, 19 nt, Artificial Sequence
  Description of Artificial Sequence: Synthetic oligonucleotide
gaacaccccgacgcuguuc

SEQ ID NO: 635086 - RNA, 19 nt, Artificial Sequence
  Description of Artificial Sequence: Synthetic oligonucleotide
gcgaaacggucacaaucac

SEQ ID NO: 635087 - RNA, 19 nt, Artificial Sequence
  Description of Artificial Sequence: Synthetic oligonucleotide
cauggucggcuggaaucac

SEQ ID NO: 635088 - RNA, 19 nt, Artificial Sequence
  Description of Artificial Sequence: Synthetic oligonucleotide
ggucauccgcacugucgcc

SEQ ID NO: 635089 - RNA, 19 nt, Artificial Sequence
  Description of Artificial Sequence: Synthetic oligonucleotide
gcggugcguggccucaccg

SEQ ID NO: 635090 - RNA, 19 nt, Artificial Sequence
  Description of Artificial Sequence: Synthetic oligonucleotide
agcaggccacgccauucuu

SEQ ID NO: 635091 - RNA, 19 nt, Artificial Sequence
  Description of Artificial Sequence: Synthetic oligonucleotide
agccucgagcacaguaaca

SEQ ID NO: 635092 - RNA, 19 nt, Artificial Sequence
  Description of Artificial Sequence: Synthetic oligonucleotide
cagagacaccucaucuaua

SEQ ID NO: 635093 - RNA, 19 nt, Artificial Sequence
  Description of Artificial Sequence: Synthetic oligonucleotide
guuuaccauggcggaagaa

SEQ ID NO: 635094 - RNA, 19 nt, Artificial Sequence
  Description of Artificial Sequence: Synthetic oligonucleotide
cuucgcgagcggccucggc

SEQ ID NO: 635095 - RNA, 19 nt, Artificial Sequence
  Description of Artificial Sequence: Synthetic oligonucleotide
ggcaggccuggccuaaaga

SEQ ID NO: 635096 - RNA, 19 nt, Artificial Sequence
  Description of Artificial Sequence: Synthetic oligonucleotide
cuucuccguaggccacaac

SEQ ID NO: 635097 - RNA, 19 nt, Artificial Sequence
  Description of Artificial Sequence: Synthetic oligonucleotide
ccguacucaccuucuagga

SEQ ID NO: 635098 - RNA, 19 nt, Artificial Sequence
  Description of Artificial Sequence: Synthetic oligonucleotide
guccacuacaaaagauaua

SEQ ID NO: 635099 - RNA, 19 nt, Artificial Sequence
  Description of Artificial Sequence: Synthetic oligonucleotide
accacgggccacugcucau

SEQ ID NO: 635100 - RNA, 19 nt, Artificial Sequence
  Description of Artificial Sequence: Synthetic oligonucleotide
caucgaagccacauaucuu

SEQ ID NO: 635101 - RNA, 19 nt, Artificial Sequence
  Description of Artificial Sequence: Synthetic oligonucleotide
ccucguuguauaaaucgcu

SEQ ID NO: 635102 - RNA, 19 nt, Artificial Sequence
  Description of Artificial Sequence: Synthetic oligonucleotide
ccggagaacagcaccugca

SEQ ID NO: 635103 - RNA, 19 nt, Artificial Sequence
  Description of Artificial Sequence: Synthetic oligonucleotide
caugggacccauggaucca

SEQ ID NO: 635104 - RNA, 19 nt, Artificial Sequence
  Description of Artificial Sequence: Synthetic oligonucleotide
cacgcugcgcuccccaucu

SEQ ID NO: 635105 - RNA, 19 nt, Artificial Sequence
  Description of Artificial Sequence: Synthetic oligonucleotide
ccccgguugguaagguagc

SEQ ID NO: 635106 - RNA, 19 nt, Artificial Sequence
  Description of Artificial Sequence: Synthetic oligonucleotide
gugcguggccucaccggag

SEQ ID NO: 635107 - RNA, 19 nt, Artificial Sequence
  Description of Artificial Sequence: Synthetic oligonucleotide
ccgggugaacaccccgacg

SEQ ID NO: 635108 - RNA, 19 nt, Artificial Sequence
  Description of Artificial Sequence: Synthetic oligonucleotide
cgcacaaagccugagggga

SEQ ID NO: 635109 - RNA, 19 nt, Artificial Sequence
  Description of Artificial Sequence: Synthetic oligonucleotide
cgaugagacgagcugccuc

SEQ ID NO: 635110 - RNA, 19 nt, Artificial Sequence
  Description of Artificial Sequence: Synthetic oligonucleotide
cugguuuaccauggcggaa

SEQ ID NO: 635111 - RNA, 19 nt, Artificial Sequence
  Description of Artificial Sequence: Synthetic oligonucleotide
cgaaacggucacaaucaca

SEQ ID NO: 635112 - RNA, 19 nt, Artificial Sequence
  Description of Artificial Sequence: Synthetic oligonucleotide
cauagcgcucuggugggua

SEQ ID NO: 635113 - RNA, 19 nt, Artificial Sequence
  Description of Artificial Sequence: Synthetic oligonucleotide
gcauaccguccguacucac

SEQ ID NO: 635114 - RNA, 19 nt, Artificial Sequence
  Description of Artificial Sequence: Synthetic oligonucleotide
uaccguccguacucaccuu

SEQ ID NO: 635115 - RNA, 19 nt, Artificial Sequence
  Description of Artificial Sequence: Synthetic oligonucleotide
ggcugagcgcaggauucgc

SEQ ID NO: 635116 - RNA, 19 nt, Artificial Sequence
  Description of Artificial Sequence: Synthetic oligonucleotide
cuauagggccaggucugaa

SEQ ID NO: 635117 - RNA, 19 nt, Artificial Sequence
  Description of Artificial Sequence: Synthetic oligonucleotide
ccaaaucccaccugggcau

SEQ ID NO: 635118 - RNA, 19 nt, Artificial Sequence
  Description of Artificial Sequence: Synthetic oligonucleotide
aggcggugaauggcagcca

SEQ ID NO: 635119 - RNA, 19 nt, Artificial Sequence
  Description of Artificial Sequence: Synthetic oligonucleotide
cccugcucgagaagugcuc

SEQ ID NO: 635120 - RNA, 19 nt, Artificial Sequence
  Description of Artificial Sequence: Synthetic oligonucleotide
ugaugcgauugcgcaccuu

SEQ ID NO: 635121 - RNA, 19 nt, Artificial Sequence
  Description of Artificial Sequence: Synthetic oligonucleotide
gccucgagcacaguaacau

SEQ ID NO: 635122 - RNA, 19 nt, Artificial Sequence
  Description of Artificial Sequence: Synthetic oligonucleotide
ccucaccggagaacagcac

SEQ ID NO: 635123 - RNA, 19 nt, Artificial Sequence
  Description of Artificial Sequence: Synthetic oligonucleotide
cggugcguggccucaccgg

SEQ ID NO: 635124 - RNA, 19 nt, Artificial Sequence
  Description of Artificial Sequence: Synthetic oligonucleotide
gcggugaauggcagccacc

SEQ ID NO: 635125 - RNA, 19 nt, Artificial Sequence
  Description of Artificial Sequence: Synthetic oligonucleotide
ggcgagcugaggccugguc

SEQ ID NO: 635126 - RNA, 19 nt, Artificial Sequence
  Description of Artificial Sequence: Synthetic oligonucleotide
cugcucgagaagugcucua

SEQ ID NO: 635127 - RNA, 19 nt, Artificial Sequence
  Description of Artificial Sequence: Synthetic oligonucleotide
ccccaaaagggcuccucga

SEQ ID NO: 635128 - RNA, 19 nt, Artificial Sequence
  Description of Artificial Sequence: Synthetic oligonucleotide
cccacuggagcccacuugu

SEQ ID NO: 635129 - RNA, 19 nt, Artificial Sequence
  Description of Artificial Sequence: Synthetic oligonucleotide
caggauucgccgagguuuu

SEQ ID NO: 635130 - RNA, 19 nt, Artificial Sequence
  Description of Artificial Sequence: Synthetic oligonucleotide
gcuauagggccaggucuga

SEQ ID NO: 635131 - RNA, 19 nt, Artificial Sequence
  Description of Artificial Sequence: Synthetic oligonucleotide
cccgggugaacaccccgac

SEQ ID NO: 635132 - RNA, 19 nt, Artificial Sequence
  Description of Artificial Sequence: Synthetic oligonucleotide
acgcugcgcuccccaucug

SEQ ID NO: 635133 - RNA, 19 nt, Artificial Sequence
  Description of Artificial Sequence: Synthetic oligonucleotide
cccagcgaaacggucacaa

SEQ ID NO: 635134 - RNA, 19 nt, Artificial Sequence
  Description of Artificial Sequence: Synthetic oligonucleotide
cacgaguuagugguucuuu

SEQ ID NO: 635135 - RNA, 19 nt, Artificial Sequence
  Description of Artificial Sequence: Synthetic oligonucleotide
cgauuguggucacccucac

SEQ ID NO: 635136 - RNA, 19 nt, Artificial Sequence
  Description of Artificial Sequence: Synthetic oligonucleotide
gggcauuacccagccuaga

SEQ ID NO: 635137 - RNA, 19 nt, Artificial Sequence
  Description of Artificial Sequence: Synthetic oligonucleotide
cacguccuuggggacccga

SEQ ID NO: 635138 - RNA, 19 nt, Artificial Sequence
  Description of Artificial Sequence: Synthetic oligonucleotide
cgcccagcgaaacggucac

SEQ ID NO: 635139 - RNA, 19 nt, Artificial Sequence
  Description of Artificial Sequence: Synthetic oligonucleotide
cguggccauagcgcucugg

SEQ ID NO: 635140 - RNA, 19 nt, Artificial Sequence
  Description of Artificial Sequence: Synthetic oligonucleotide
cugaugcgauugcgcaccu

SEQ ID NO: 635141 - RNA, 19 nt, Artificial Sequence
  Description of Artificial Sequence: Synthetic oligonucleotide
ggggagcgucuucgcgagc

SEQ ID NO: 635142 - RNA, 19 nt, Artificial Sequence
  Description of Artificial Sequence: Synthetic oligonucleotide
cagguuuccccagcuggau

SEQ ID NO: 635143 - RNA, 19 nt, Artificial Sequence
  Description of Artificial Sequence: Synthetic oligonucleotide
gcgcuccccaucuguuguc

SEQ ID NO: 635144 - RNA, 19 nt, Artificial Sequence
  Description of Artificial Sequence: Synthetic oligonucleotide
ggacagcagucacgaguua

SEQ ID NO: 635145 - RNA, 19 nt, Artificial Sequence
  Description of Artificial Sequence: Synthetic oligonucleotide
gaugggcgccagggaucuc

SEQ ID NO: 635146 - RNA, 19 nt, Artificial Sequence
  Description of Artificial Sequence: Synthetic oligonucleotide
ggcgcuugguagccucugu

SEQ ID NO: 635147 - RNA, 19 nt, Artificial Sequence
  Description of Artificial Sequence: Synthetic oligonucleotide
cagucacgaguuagugguu

SEQ ID NO: 635148 - RNA, 19 nt, Artificial Sequence
  Description of Artificial Sequence: Synthetic oligonucleotide
ccugcucgagaagugcucu

SEQ ID NO: 635149 - RNA, 19 nt, Artificial Sequence
  Description of Artificial Sequence: Synthetic oligonucleotide
cccgguugguaagguagca

SEQ ID NO: 635150 - RNA, 19 nt, Artificial Sequence
  Description of Artificial Sequence: Synthetic oligonucleotide
ggccccgguugguaaggua

SEQ ID NO: 635151 - RNA, 19 nt, Artificial Sequence
  Description of Artificial Sequence: Synthetic oligonucleotide
cgagcacaguaacaucugu

SEQ ID NO: 635152 - RNA, 19 nt, Artificial Sequence
  Description of Artificial Sequence: Synthetic oligonucleotide
gcgcaggauucgccgaggu

SEQ ID NO: 635153 - RNA, 19 nt, Artificial Sequence
  Description of Artificial Sequence: Synthetic oligonucleotide
cauccgcacugucgccacu

SEQ ID NO: 635154 - RNA, 19 nt, Artificial Sequence
  Description of Artificial Sequence: Synthetic oligonucleotide
cgacgcuguucugacucuc

SEQ ID NO: 635155 - RNA, 19 nt, Artificial Sequence
  Description of Artificial Sequence: Synthetic oligonucleotide
gcguggccucaccggagaa

SEQ ID NO: 635156 - RNA, 19 nt, Artificial Sequence
  Description of Artificial Sequence: Synthetic oligonucleotide
ccguccguacucaccuucu

SEQ ID NO: 635157 - RNA, 19 nt, Artificial Sequence
  Description of Artificial Sequence: Synthetic oligonucleotide
ccucgaauucaaggaagau

SEQ ID NO: 635158 - RNA, 19 nt, Artificial Sequence
  Description of Artificial Sequence: Synthetic oligonucleotide
ggacccgacggccccgguu

SEQ ID NO: 635159 - RNA, 19 nt, Artificial Sequence
  Description of Artificial Sequence: Synthetic oligonucleotide
gccucacgcuggccagaga

SEQ ID NO: 635160 - RNA, 19 nt, Artificial Sequence
  Description of Artificial Sequence: Synthetic oligonucleotide
cguguccaagucucacgcu

SEQ ID NO: 635161 - RNA, 19 nt, Artificial Sequence
  Description of Artificial Sequence: Synthetic oligonucleotide
gcacgcccagcgaaacggu

SEQ ID NO: 635162 - RNA, 19 nt, Artificial Sequence
  Description of Artificial Sequence: Synthetic oligonucleotide
cguccguacucaccuucua

SEQ ID NO: 635163 - RNA, 19 nt, Artificial Sequence
  Description of Artificial Sequence: Synthetic oligonucleotide
gccgagguuuugguacauu

SEQ ID NO: 635164 - RNA, 19 nt, Artificial Sequence
  Description of Artificial Sequence: Synthetic oligonucleotide
ccgacggccccgguuggua

SEQ ID NO: 635165 - RNA, 19 nt, Artificial Sequence
  Description of Artificial Sequence: Synthetic oligonucleotide
cgagcggccucggccucuc

SEQ ID NO: 635166 - RNA, 19 nt, Artificial Sequence
  Description of Artificial Sequence: Synthetic oligonucleotide
cugcggagccggggagcgu

SEQ ID NO: 635167 - RNA, 19 nt, Artificial Sequence
  Description of Artificial Sequence: Synthetic oligonucleotide
ccauagcgcucuggugggu

SEQ ID NO: 635168 - RNA, 19 nt, Artificial Sequence
  Description of Artificial Sequence: Synthetic oligonucleotide
gggacccgacggccccggu

SEQ ID NO: 635169 - RNA, 19 nt, Artificial Sequence
  Description of Artificial Sequence: Synthetic oligonucleotide
cgcaggauucgccgagguu

SEQ ID NO: 635170 - RNA, 19 nt, Artificial Sequence
  Description of Artificial Sequence: Synthetic oligonucleotide
cccgacggccccgguuggu

SEQ ID NO: 635171 - RNA, 19 nt, Artificial Sequence
  Description of Artificial Sequence: Synthetic oligonucleotide
cgccgagguuuugguacau

SEQ ID NO: 635172 - RNA, 19 nt, Artificial Sequence
  Description of Artificial Sequence: Synthetic oligonucleotide
cggccccgguugguaaggu

SEQ ID NO: 635173 - RNA, 19 nt, Artificial Sequence
  Description of Artificial Sequence: Synthetic oligonucleotide
aaucuauauagucuggucc

SEQ ID NO: 635174 - RNA, 19 nt, Artificial Sequence
  Description of Artificial Sequence: Synthetic oligonucleotide
ggaagaauaaucuauauag

SEQ ID NO: 635175 - RNA, 19 nt, Artificial Sequence
  Description of Artificial Sequence: Synthetic oligonucleotide
uuuaauuuucaauauggga

SEQ ID NO: 635176 - RNA, 19 nt, Artificial Sequence
  Description of Artificial Sequence: Synthetic oligonucleotide
aucuauauagucugguccc

SEQ ID NO: 635177 - RNA, 19 nt, Artificial Sequence
  Description of Artificial Sequence: Synthetic oligonucleotide
uuaauaugacuucagaaaa

SEQ ID NO: 635178 - RNA, 19 nt, Artificial Sequence
  Description of Artificial Sequence: Synthetic oligonucleotide
ucaacuagggaaaauguca

SEQ ID NO: 635179 - RNA, 19 nt, Artificial Sequence
  Description of Artificial Sequence: Synthetic oligonucleotide
aagaguaggaagaauaauc

SEQ ID NO: 635180 - RNA, 19 nt, Artificial Sequence
  Description of Artificial Sequence: Synthetic oligonucleotide
auuaauaugacuucagaaa

SEQ ID NO: 635181 - RNA, 19 nt, Artificial Sequence
  Description of Artificial Sequence: Synthetic oligonucleotide
acuagagaagguuggaccc

SEQ ID NO: 635182 - RNA, 19 nt, Artificial Sequence
  Description of Artificial Sequence: Synthetic oligonucleotide
uaaguuucaguuuggagag

SEQ ID NO: 635183 - RNA, 19 nt, Artificial Sequence
  Description of Artificial Sequence: Synthetic oligonucleotide
guuugaauucauaauaugg

SEQ ID NO: 635184 - RNA, 19 nt, Artificial Sequence
  Description of Artificial Sequence: Synthetic oligonucleotide
aaccaaauuccuuuucaac

SEQ ID NO: 635185 - RNA, 19 nt, Artificial Sequence
  Description of Artificial Sequence: Synthetic oligonucleotide
gaauauagaagcgagaaca

SEQ ID NO: 635186 - RNA, 19 nt, Artificial Sequence
  Description of Artificial Sequence: Synthetic oligonucleotide
aauggauuuucagagaaug

SEQ ID NO: 635187 - RNA, 19 nt, Artificial Sequence
  Description of Artificial Sequence: Synthetic oligonucleotide
uuuguuggaacacuugagc

SEQ ID NO: 635188 - RNA, 19 nt, Artificial Sequence
  Description of Artificial Sequence: Synthetic oligonucleotide
guaacaagaacauuauggc

SEQ ID NO: 635189 - RNA, 19 nt, Artificial Sequence
  Description of Artificial Sequence: Synthetic oligonucleotide
ugaauuguggugauaacac

SEQ ID NO: 635190 - RNA, 19 nt, Artificial Sequence
  Description of Artificial Sequence: Synthetic oligonucleotide
auaggcacuaacuaaaaga

SEQ ID NO: 635191 - RNA, 19 nt, Artificial Sequence
  Description of Artificial Sequence: Synthetic oligonucleotide
uuugaaagggacgugagug

SEQ ID NO: 635192 - RNA, 19 nt, Artificial Sequence
  Description of Artificial Sequence: Synthetic oligonucleotide
auacaaaucgucauacugc

SEQ ID NO: 635193 - RNA, 19 nt, Artificial Sequence
  Description of Artificial Sequence: Synthetic oligonucleotide
gauucuugaguuuaauuac

SEQ ID NO: 635194 - RNA, 19 nt, Artificial Sequence
  Description of Artificial Sequence: Synthetic oligonucleotide
aaggguacaagcaaauagg

SEQ ID NO: 635195 - RNA, 19 nt, Artificial Sequence
  Description of Artificial Sequence: Synthetic oligonucleotide
uaaugaaagagcgauuucc

SEQ ID NO: 635196 - RNA, 19 nt, Artificial Sequence
  Description of Artificial Sequence: Synthetic oligonucleotide
aaugaauuguggugauaac

SEQ ID NO: 635197 - RNA, 19 nt, Artificial Sequence
  Description of Artificial Sequence: Synthetic oligonucleotide
uggauuuguagaaaaugag

SEQ ID NO: 635198 - RNA, 19 nt, Artificial Sequence
  Description of Artificial Sequence: Synthetic oligonucleotide
aauauagaagcgagaacac

SEQ ID NO: 635199 - RNA, 19 nt, Artificial Sequence
  Description of Artificial Sequence: Synthetic oligonucleotide
uuugcacuagagaagguug

SEQ ID NO: 635200 - RNA, 19 nt, Artificial Sequence
  Description of Artificial Sequence: Synthetic oligonucleotide
uuacauaaccuuuugcacu

SEQ ID NO: 635201 - RNA, 19 nt, Artificial Sequence
  Description of Artificial Sequence: Synthetic oligonucleotide
ugugaauuaguccuacaga

SEQ ID NO: 635202 - RNA, 19 nt, Artificial Sequence
  Description of Artificial Sequence: Synthetic oligonucleotide
caaaccaucaacuagggaa

SEQ ID NO: 635203 - RNA, 19 nt, Artificial Sequence
  Description of Artificial Sequence: Synthetic oligonucleotide
aauuacaguaaucuucuuu

SEQ ID NO: 635204 - RNA, 19 nt, Artificial Sequence
  Description of Artificial Sequence: Synthetic oligonucleotide
auuacaguaaucuucuuua

SEQ ID NO: 635205 - RNA, 19 nt, Artificial Sequence
  Description of Artificial Sequence: Synthetic oligonucleotide
uuuaagccaaacuuugcug

SEQ ID NO: 635206 - RNA, 19 nt, Artificial Sequence
  Description of Artificial Sequence: Synthetic oligonucleotide
ucugccaacguuuaaauuu

SEQ ID NO: 635207 - RNA, 19 nt, Artificial Sequence
  Description of Artificial Sequence: Synthetic oligonucleotide
aggaggucuauuuauaaug

SEQ ID NO: 635208 - RNA, 19 nt, Artificial Sequence
  Description of Artificial Sequence: Synthetic oligonucleotide
gauaacacauucuggaauc

SEQ ID NO: 635209 - RNA, 19 nt, Artificial Sequence
  Description of Artificial Sequence: Synthetic oligonucleotide
agcaauaugcagcaggucu

SEQ ID NO: 635210 - RNA, 19 nt, Artificial Sequence
  Description of Artificial Sequence: Synthetic oligonucleotide
gguacaagcaaauaggcac

SEQ ID NO: 635211 - RNA, 19 nt, Artificial Sequence
  Description of Artificial Sequence: Synthetic oligonucleotide
aacacauacaaaucgucau

SEQ ID NO: 635212 - RNA, 19 nt, Artificial Sequence
  Description of Artificial Sequence: Synthetic oligonucleotide
ugaagauauggcucagugg

SEQ ID NO: 635213 - RNA, 19 nt, Artificial Sequence
  Description of Artificial Sequence: Synthetic oligonucleotide
ucuccgcaaaugcauaugg

SEQ ID NO: 635214 - RNA, 19 nt, Artificial Sequence
  Description of Artificial Sequence: Synthetic oligonucleotide
caaggguacaagcaaauag

SEQ ID NO: 635215 - RNA, 19 nt, Artificial Sequence
  Description of Artificial Sequence: Synthetic oligonucleotide
uaugggaaaauuaggugcu

SEQ ID NO: 635216 - RNA, 19 nt, Artificial Sequence
  Description of Artificial Sequence: Synthetic oligonucleotide
uugaauauagaagcgagaa

SEQ ID NO: 635217 - RNA, 19 nt, Artificial Sequence
  Description of Artificial Sequence: Synthetic oligonucleotide
gaggguaaguuucaguuug

SEQ ID NO: 635218 - RNA, 19 nt, Artificial Sequence
  Description of Artificial Sequence: Synthetic oligonucleotide
acuuggauggugcacaaug

SEQ ID NO: 635219 - RNA, 19 nt, Artificial Sequence
  Description of Artificial Sequence: Synthetic oligonucleotide
aacaagaacauuauggcuu

SEQ ID NO: 635220 - RNA, 19 nt, Artificial Sequence
  Description of Artificial Sequence: Synthetic oligonucleotide
auauggguuuuccuccucc

SEQ ID NO: 635221 - RNA, 19 nt, Artificial Sequence
  Description of Artificial Sequence: Synthetic oligonucleotide
caaaucgucauacugcuuc

SEQ ID NO: 635222 - RNA, 19 nt, Artificial Sequence
  Description of Artificial Sequence: Synthetic oligonucleotide
ugaaagagcgauuuccagu

SEQ ID NO: 635223 - RNA, 19 nt, Artificial Sequence
  Description of Artificial Sequence: Synthetic oligonucleotide
aaauguuuggcgauucuug

SEQ ID NO: 635224 - RNA, 19 nt, Artificial Sequence
  Description of Artificial Sequence: Synthetic oligonucleotide
gaacacuugagcuauguaa

SEQ ID NO: 635225 - RNA, 19 nt, Artificial Sequence
  Description of Artificial Sequence: Synthetic oligonucleotide
uacaaaucgucauacugcu

SEQ ID NO: 635226 - RNA, 19 nt, Artificial Sequence
  Description of Artificial Sequence: Synthetic oligonucleotide
uugaaagggacgugagugg

SEQ ID NO: 635227 - RNA, 19 nt, Artificial Sequence
  Description of Artificial Sequence: Synthetic oligonucleotide
uguuuggcgauucuugagu

SEQ ID NO: 635228 - RNA, 19 nt, Artificial Sequence
  Description of Artificial Sequence: Synthetic oligonucleotide
cacuagagaagguuggacc

SEQ ID NO: 635229 - RNA, 19 nt, Artificial Sequence
  Description of Artificial Sequence: Synthetic oligonucleotide
uaugguaucucaugcuuga

SEQ ID NO: 635230 - RNA, 19 nt, Artificial Sequence
  Description of Artificial Sequence: Synthetic oligonucleotide
uugcacuagagaagguugg

SEQ ID NO: 635231 - RNA, 19 nt, Artificial Sequence
  Description of Artificial Sequence: Synthetic oligonucleotide
gaugcuuuaagccaaacuu

SEQ ID NO: 635232 - RNA, 19 nt, Artificial Sequence
  Description of Artificial Sequence: Synthetic oligonucleotide
gaacuuaucaucaacagau

SEQ ID NO: 635233 - RNA, 19 nt, Artificial Sequence
  Description of Artificial Sequence: Synthetic oligonucleotide
gagguuugaauucauaaua

SEQ ID NO: 635234 - RNA, 19 nt, Artificial Sequence
  Description of Artificial Sequence: Synthetic oligonucleotide
ucuuuacacucuuacuggc

SEQ ID NO: 635235 - RNA, 19 nt, Artificial Sequence
  Description of Artificial Sequence: Synthetic oligonucleotide
aaugaaagagcgauuucca

SEQ ID NO: 635236 - RNA, 19 nt, Artificial Sequence
  Description of Artificial Sequence: Synthetic oligonucleotide
uagaggguggauuuguaga

SEQ ID NO: 635237 - RNA, 19 nt, Artificial Sequence
  Description of Artificial Sequence: Synthetic oligonucleotide
gguuacauaaccuuuugca

SEQ ID NO: 635238 - RNA, 19 nt, Artificial Sequence
  Description of Artificial Sequence: Synthetic oligonucleotide
cuggucuaaacucuugccc

SEQ ID NO: 635239 - RNA, 19 nt, Artificial Sequence
  Description of Artificial Sequence: Synthetic oligonucleotide
uguggugauaacacauucu

SEQ ID NO: 635240 - RNA, 19 nt, Artificial Sequence
  Description of Artificial Sequence: Synthetic oligonucleotide
gaagcuaucuggaaacaug

SEQ ID NO: 635241 - RNA, 19 nt, Artificial Sequence
  Description of Artificial Sequence: Synthetic oligonucleotide
cucgcacugagauaacucc

SEQ ID NO: 635242 - RNA, 19 nt, Artificial Sequence
  Description of Artificial Sequence: Synthetic oligonucleotide
cauccguauucuuuguucc

SEQ ID NO: 635243 - RNA, 19 nt, Artificial Sequence
  Description of Artificial Sequence: Synthetic oligonucleotide
ugaaagggacgugaguggg

SEQ ID NO: 635244 - RNA, 19 nt, Artificial Sequence
  Description of Artificial Sequence: Synthetic oligonucleotide
uaaucuauauagucugguc

SEQ ID NO: 635245 - RNA, 19 nt, Artificial Sequence
  Description of Artificial Sequence: Synthetic oligonucleotide
aggguacaagcaaauaggc

SEQ ID NO: 635246 - RNA, 19 nt, Artificial Sequence
  Description of Artificial Sequence: Synthetic oligonucleotide
aguaucaugucguacucau

SEQ ID NO: 635247 - RNA, 19 nt, Artificial Sequence
  Description of Artificial Sequence: Synthetic oligonucleotide
ugaaccauccguauucuuu

SEQ ID NO: 635248 - RNA, 19 nt, Artificial Sequence
  Description of Artificial Sequence: Synthetic oligonucleotide
uccauagacauuuucccau

SEQ ID NO: 635249 - RNA, 19 nt, Artificial Sequence
  Description of Artificial Sequence: Synthetic oligonucleotide
ucauaauaugguaucucau

SEQ ID NO: 635250 - RNA, 19 nt, Artificial Sequence
  Description of Artificial Sequence: Synthetic oligonucleotide
acauucuaaacggacuuuc

SEQ ID NO: 635251 - RNA, 19 nt, Artificial Sequence
  Description of Artificial Sequence: Synthetic oligonucleotide
agaguaggaagaauaaucu

SEQ ID NO: 635252 - RNA, 19 nt, Artificial Sequence
  Description of Artificial Sequence: Synthetic oligonucleotide
aagcaaauaggcacuaacu

SEQ ID NO: 635253 - RNA, 19 nt, Artificial Sequence
  Description of Artificial Sequence: Synthetic oligonucleotide
acuaacuaaaagaagcuau

SEQ ID NO: 635254 - RNA, 19 nt, Artificial Sequence
  Description of Artificial Sequence: Synthetic oligonucleotide
agcaaauaggcacuaacua

SEQ ID NO: 635255 - RNA, 19 nt, Artificial Sequence
  Description of Artificial Sequence: Synthetic oligonucleotide
caagcaaauaggcacuaac

SEQ ID NO: 635256 - RNA, 19 nt, Artificial Sequence
  Description of Artificial Sequence: Synthetic oligonucleotide
aaaucgucauacugcuucu

SEQ ID NO: 635257 - RNA, 19 nt, Artificial Sequence
  Description of Artificial Sequence: Synthetic oligonucleotide
gaagguuggacccucuauc

SEQ ID NO: 635258 - RNA, 19 nt, Artificial Sequence
  Description of Artificial Sequence: Synthetic oligonucleotide
uugucucgcacugagauaa

SEQ ID NO: 635259 - RNA, 19 nt, Artificial Sequence
  Description of Artificial Sequence: Synthetic oligonucleotide
ugaguuuaucauaugcauu

SEQ ID NO: 635260 - RNA, 19 nt, Artificial Sequence
  Description of Artificial Sequence: Synthetic oligonucleotide
aaagagcgauuuccaguuc

SEQ ID NO: 635261 - RNA, 19 nt, Artificial Sequence
  Description of Artificial Sequence: Synthetic oligonucleotide
uguuucauccagauaucaa

SEQ ID NO: 635262 - RNA, 19 nt, Artificial Sequence
  Description of Artificial Sequence: Synthetic oligonucleotide
caaauaggcacuaacuaaa

SEQ ID NO: 635263 - RNA, 19 nt, Artificial Sequence
  Description of Artificial Sequence: Synthetic oligonucleotide
uguggguaguauuaccacu

SEQ ID NO: 635264 - RNA, 19 nt, Artificial Sequence
  Description of Artificial Sequence: Synthetic oligonucleotide
uucuuugaaagggacguga

SEQ ID NO: 635265 - RNA, 19 nt, Artificial Sequence
  Description of Artificial Sequence: Synthetic oligonucleotide
uacauaaccuuuugcacua

SEQ ID NO: 635266 - RNA, 19 nt, Artificial Sequence
  Description of Artificial Sequence: Synthetic oligonucleotide
uagccugcauuuaacuuug

SEQ ID NO: 635267 - RNA, 19 nt, Artificial Sequence
  Description of Artificial Sequence: Synthetic oligonucleotide
uuguggugauaacacauuc

SEQ ID NO: 635268 - RNA, 19 nt, Artificial Sequence
  Description of Artificial Sequence: Synthetic oligonucleotide
aguucaugaugaaauacug

SEQ ID NO: 635269 - RNA, 19 nt, Artificial Sequence
  Description of Artificial Sequence: Synthetic oligonucleotide
agaugcuuuaagccaaacu

SEQ ID NO: 635270 - RNA, 19 nt, Artificial Sequence
  Description of Artificial Sequence: Synthetic oligonucleotide
uagggaaaaugucaauaaa

SEQ ID NO: 635271 - RNA, 19 nt, Artificial Sequence
  Description of Artificial Sequence: Synthetic oligonucleotide
uccguauucuuuguuccgg

SEQ ID NO: 635272 - RNA, 19 nt, Artificial Sequence
  Description of Artificial Sequence: Synthetic oligonucleotide
uauguaaggugucguuucu

SEQ ID NO: 635273 - RNA, 19 nt, Artificial Sequence
  Description of Artificial Sequence: Synthetic oligonucleotide
uuugaggguaaguuucagu

SEQ ID NO: 635274 - RNA, 19 nt, Artificial Sequence
  Description of Artificial Sequence: Synthetic oligonucleotide
uauuguugaagggacuacu

SEQ ID NO: 635275 - RNA, 19 nt, Artificial Sequence
  Description of Artificial Sequence: Synthetic oligonucleotide
ugggagaggcuccugugag

SEQ ID NO: 635276 - RNA, 19 nt, Artificial Sequence
  Description of Artificial Sequence: Synthetic oligonucleotide
ucgucauacugcuucucag

SEQ ID NO: 635277 - RNA, 19 nt, Artificial Sequence
  Description of Artificial Sequence: Synthetic oligonucleotide
guagaggguggauuuguag

SEQ ID NO: 635278 - RNA, 19 nt, Artificial Sequence
  Description of Artificial Sequence: Synthetic oligonucleotide
auaaucuauauagucuggu

SEQ ID NO: 635279 - RNA, 19 nt, Artificial Sequence
  Description of Artificial Sequence: Synthetic oligonucleotide
uguuggaacacuugagcua

SEQ ID NO: 635280 - RNA, 19 nt, Artificial Sequence
  Description of Artificial Sequence: Synthetic oligonucleotide
ugucucauuauuucugcua

SEQ ID NO: 635281 - RNA, 19 nt, Artificial Sequence
  Description of Artificial Sequence: Synthetic oligonucleotide
aggaagaauaaucuauaua

SEQ ID NO: 635282 - RNA, 19 nt, Artificial Sequence
  Description of Artificial Sequence: Synthetic oligonucleotide
aaaccaucaacuagggaaa

SEQ ID NO: 635283 - RNA, 19 nt, Artificial Sequence
  Description of Artificial Sequence: Synthetic oligonucleotide
uuucccaacaaugcugucu

SEQ ID NO: 635284 - RNA, 19 nt, Artificial Sequence
  Description of Artificial Sequence: Synthetic oligonucleotide
cuuagggagacuguagaac

SEQ ID NO: 635285 - RNA, 19 nt, Artificial Sequence
  Description of Artificial Sequence: Synthetic oligonucleotide
caauaugggaaaauuaggu

SEQ ID NO: 635286 - RNA, 19 nt, Artificial Sequence
  Description of Artificial Sequence: Synthetic oligonucleotide
auuauggcuuaaaugugag

SEQ ID NO: 635287 - RNA, 19 nt, Artificial Sequence
  Description of Artificial Sequence: Synthetic oligonucleotide
ucuucccgaguucaugaug

SEQ ID NO: 635288 - RNA, 19 nt, Artificial Sequence
  Description of Artificial Sequence: Synthetic oligonucleotide
uaggaagaauaaucuauau

SEQ ID NO: 635289 - RNA, 19 nt, Artificial Sequence
  Description of Artificial Sequence: Synthetic oligonucleotide
gucugaaccauccguauuc

SEQ ID NO: 635290 - RNA, 19 nt, Artificial Sequence
  Description of Artificial Sequence: Synthetic oligonucleotide
gcuuguuucauccagauau

SEQ ID NO: 635291 - RNA, 19 nt, Artificial Sequence
  Description of Artificial Sequence: Synthetic oligonucleotide
auccguauucuuuguuccg

SEQ ID NO: 635292 - RNA, 19 nt, Artificial Sequence
  Description of Artificial Sequence: Synthetic oligonucleotide
ucgaccucuggcaggcugg

SEQ ID NO: 635293 - RNA, 19 nt, Artificial Sequence
  Description of Artificial Sequence: Synthetic oligonucleotide
cugcuaauguuuuggauca

SEQ ID NO: 635294 - RNA, 19 nt, Artificial Sequence
  Description of Artificial Sequence: Synthetic oligonucleotide
uuaguccuacagaucagaa

SEQ ID NO: 635295 - RNA, 19 nt, Artificial Sequence
  Description of Artificial Sequence: Synthetic oligonucleotide
aagccaaacuuugcugcac

SEQ ID NO: 635296 - RNA, 19 nt, Artificial Sequence
  Description of Artificial Sequence: Synthetic oligonucleotide
aauuaguccuacagaucag

SEQ ID NO: 635297 - RNA, 19 nt, Artificial Sequence
  Description of Artificial Sequence: Synthetic oligonucleotide
gguuugaauucauaauaug

SEQ ID NO: 635298 - RNA, 19 nt, Artificial Sequence
  Description of Artificial Sequence: Synthetic oligonucleotide
auagugcuugguuaacacu

SEQ ID NO: 635299 - RNA, 19 nt, Artificial Sequence
  Description of Artificial Sequence: Synthetic oligonucleotide
cacaauggugaguuuauca

SEQ ID NO: 635300 - RNA, 19 nt, Artificial Sequence
  Description of Artificial Sequence: Synthetic oligonucleotide
caacaaugcugucucguag

SEQ ID NO: 635301 - RNA, 19 nt, Artificial Sequence
  Description of Artificial Sequence: Synthetic oligonucleotide
caggaaugaacacauacaa

SEQ ID NO: 635302 - RNA, 19 nt, Artificial Sequence
  Description of Artificial Sequence: Synthetic oligonucleotide
ucucgcacugagauaacuc

SEQ ID NO: 635303 - RNA, 19 nt, Artificial Sequence
  Description of Artificial Sequence: Synthetic oligonucleotide
uuucccaucugccaacguu

SEQ ID NO: 635304 - RNA, 19 nt, Artificial Sequence
  Description of Artificial Sequence: Synthetic oligonucleotide
cuagggaaaaugucaauaa

SEQ ID NO: 635305 - RNA, 19 nt, Artificial Sequence
  Description of Artificial Sequence: Synthetic oligonucleotide
ucguaguuggcguagcuuu

SEQ ID NO: 635306 - RNA, 19 nt, Artificial Sequence
  Description of Artificial Sequence: Synthetic oligonucleotide
ucuugcccgguucugacau

SEQ ID NO: 635307 - RNA, 19 nt, Artificial Sequence
  Description of Artificial Sequence: Synthetic oligonucleotide
uuguggguaguauuaccac

SEQ ID NO: 635308 - RNA, 19 nt, Artificial Sequence
  Description of Artificial Sequence: Synthetic oligonucleotide
uuuugcacuagagaagguu

SEQ ID NO: 635309 - RNA, 19 nt, Artificial Sequence
  Description of Artificial Sequence: Synthetic oligonucleotide
uuacacucuuacuggccag

SEQ ID NO: 635310 - RNA, 19 nt, Artificial Sequence
  Description of Artificial Sequence: Synthetic oligonucleotide
cuucccgaguucaugauga

SEQ ID NO: 635311 - RNA, 19 nt, Artificial Sequence
  Description of Artificial Sequence: Synthetic oligonucleotide
ugguaucucaugcuugaau

SEQ ID NO: 635312 - RNA, 19 nt, Artificial Sequence
  Description of Artificial Sequence: Synthetic oligonucleotide
augagguaacauccucuuc

SEQ ID NO: 635313 - RNA, 19 nt, Artificial Sequence
  Description of Artificial Sequence: Synthetic oligonucleotide
agguuggacccucuauccg

SEQ ID NO: 635314 - RNA, 19 nt, Artificial Sequence
  Description of Artificial Sequence: Synthetic oligonucleotide
agaggguggauuuguagaa

SEQ ID NO: 635315 - RNA, 19 nt, Artificial Sequence
  Description of Artificial Sequence: Synthetic oligonucleotide
uuauggcuuaaaugugaga

SEQ ID NO: 635316 - RNA, 19 nt, Artificial Sequence
  Description of Artificial Sequence: Synthetic oligonucleotide
acuagggaaaaugucaaua

SEQ ID NO: 635317 - RNA, 19 nt, Artificial Sequence
  Description of Artificial Sequence: Synthetic oligonucleotide
cuugaauauagaagcgaga

SEQ ID NO: 635318 - RNA, 19 nt, Artificial Sequence
  Description of Artificial Sequence: Synthetic oligonucleotide
ucgcacugagauaacucca

SEQ ID NO: 635319 - RNA, 19 nt, Artificial Sequence
  Description of Artificial Sequence: Synthetic oligonucleotide
cugccaacguuuaaauuuc

SEQ ID NO: 635320 - RNA, 19 nt, Artificial Sequence
  Description of Artificial Sequence: Synthetic oligonucleotide
aacuagggaaaaugucaau

SEQ ID NO: 635321 - RNA, 19 nt, Artificial Sequence
  Description of Artificial Sequence: Synthetic oligonucleotide
ugcugucucguaguuggcg

SEQ ID NO: 635322 - RNA, 19 nt, Artificial Sequence
  Description of Artificial Sequence: Synthetic oligonucleotide
caugucguacucauuguca

SEQ ID NO: 635323 - RNA, 19 nt, Artificial Sequence
  Description of Artificial Sequence: Synthetic oligonucleotide
gaaagagcgauuuccaguu

SEQ ID NO: 635324 - RNA, 19 nt, Artificial Sequence
  Description of Artificial Sequence: Synthetic oligonucleotide
ugaagggacuacuguacaa

SEQ ID NO: 635325 - RNA, 19 nt, Artificial Sequence
  Description of Artificial Sequence: Synthetic oligonucleotide
ugugaguugcuuucugcau

SEQ ID NO: 635326 - RNA, 19 nt, Artificial Sequence
  Description of Artificial Sequence: Synthetic oligonucleotide
uggguaguauuaccacuug

SEQ ID NO: 635327 - RNA, 19 nt, Artificial Sequence
  Description of Artificial Sequence: Synthetic oligonucleotide
uucugacauucuaaacgga

SEQ ID NO: 635328 - RNA, 19 nt, Artificial Sequence
  Description of Artificial Sequence: Synthetic oligonucleotide
caaugaauuguggugauaa

SEQ ID NO: 635329 - RNA, 19 nt, Artificial Sequence
  Description of Artificial Sequence: Synthetic oligonucleotide
uggacccucuauccgagcu

SEQ ID NO: 635330 - RNA, 19 nt, Artificial Sequence
  Description of Artificial Sequence: Synthetic oligonucleotide
uucccaucugccaacguuu

SEQ ID NO: 635331 - RNA, 19 nt, Artificial Sequence
  Description of Artificial Sequence: Synthetic oligonucleotide
uccuacagaucagaaacuc

SEQ ID NO: 635332 - RNA, 19 nt, Artificial Sequence
  Description of Artificial Sequence: Synthetic oligonucleotide
aauuccuuuucaacuugga

SEQ ID NO: 635333 - RNA, 19 nt, Artificial Sequence
  Description of Artificial Sequence: Synthetic oligonucleotide
uaguccuacagaucagaaa

SEQ ID NO: 635334 - RNA, 19 nt, Artificial Sequence
  Description of Artificial Sequence: Synthetic oligonucleotide
cuccgcaaaugcauauggg

SEQ ID NO: 635335 - RNA, 19 nt, Artificial Sequence
  Description of Artificial Sequence: Synthetic oligonucleotide
aaauaggcacuaacuaaaa

SEQ ID NO: 635336 - RNA, 19 nt, Artificial Sequence
  Description of Artificial Sequence: Synthetic oligonucleotide
ucaguggcauagugcuugg

SEQ ID NO: 635337 - RNA, 19 nt, Artificial Sequence
  Description of Artificial Sequence: Synthetic oligonucleotide
cuaaacucuugcccgguuc

SEQ ID NO: 635338 - RNA, 19 nt, Artificial Sequence
  Description of Artificial Sequence: Synthetic oligonucleotide
auaugguaucucaugcuug

SEQ ID NO: 635339 - RNA, 19 nt, Artificial Sequence
  Description of Artificial Sequence: Synthetic oligonucleotide
augucguacucauugucau

SEQ ID NO: 635340 - RNA, 19 nt, Artificial Sequence
  Description of Artificial Sequence: Synthetic oligonucleotide
uauauagucuggucccaua

SEQ ID NO: 635341 - RNA, 19 nt, Artificial Sequence
  Description of Artificial Sequence: Synthetic oligonucleotide
uuuguuccggcugcccagg

SEQ ID NO: 635342 - RNA, 19 nt, Artificial Sequence
  Description of Artificial Sequence: Synthetic oligonucleotide
uucuaguugggaggcagca

SEQ ID NO: 635343 - RNA, 19 nt, Artificial Sequence
  Description of Artificial Sequence: Synthetic oligonucleotide
gguaucucaugcuugaaua

SEQ ID NO: 635344 - RNA, 19 nt, Artificial Sequence
  Description of Artificial Sequence: Synthetic oligonucleotide
aucaacagauugucuucug

SEQ ID NO: 635345 - RNA, 19 nt, Artificial Sequence
  Description of Artificial Sequence: Synthetic oligonucleotide
cucaugcuugaauauagaa

SEQ ID NO: 635346 - RNA, 19 nt, Artificial Sequence
  Description of Artificial Sequence: Synthetic oligonucleotide
uggcauagugcuugguuaa

SEQ ID NO: 635347 - RNA, 19 nt, Artificial Sequence
  Description of Artificial Sequence: Synthetic oligonucleotide
aagcacuaugguaccaaug

SEQ ID NO: 635348 - RNA, 19 nt, Artificial Sequence
  Description of Artificial Sequence: Synthetic oligonucleotide
cuuuaagccaaacuuugcu

SEQ ID NO: 635349 - RNA, 19 nt, Artificial Sequence
  Description of Artificial Sequence: Synthetic oligonucleotide
ggguaguauuaccacuugg

SEQ ID NO: 635350 - RNA, 19 nt, Artificial Sequence
  Description of Artificial Sequence: Synthetic oligonucleotide
uugagcuauguaagguguc

SEQ ID NO: 635351 - RNA, 19 nt, Artificial Sequence
  Description of Artificial Sequence: Synthetic oligonucleotide
ucuaguugggaggcagcag

SEQ ID NO: 635352 - RNA, 19 nt, Artificial Sequence
  Description of Artificial Sequence: Synthetic oligonucleotide
gcaaauaggcacuaacuaa

SEQ ID NO: 635353 - RNA, 19 nt, Artificial Sequence
  Description of Artificial Sequence: Synthetic oligonucleotide
gguaguauuaccacuugga

SEQ ID NO: 635354 - RNA, 19 nt, Artificial Sequence
  Description of Artificial Sequence: Synthetic oligonucleotide
uuggcgauucuugaguuua

SEQ ID NO: 635355 - RNA, 19 nt, Artificial Sequence
  Description of Artificial Sequence: Synthetic oligonucleotide
ugaagcacuaugguaccaa

SEQ ID NO: 635356 - RNA, 19 nt, Artificial Sequence
  Description of Artificial Sequence: Synthetic oligonucleotide
uggugcacaauggugaguu

SEQ ID NO: 635357 - RNA, 19 nt, Artificial Sequence
  Description of Artificial Sequence: Synthetic oligonucleotide
aagggacgugagugggccg

SEQ ID NO: 635358 - RNA, 19 nt, Artificial Sequence
  Description of Artificial Sequence: Synthetic oligonucleotide
uguugggagcucucuggug

SEQ ID NO: 635359 - RNA, 19 nt, Artificial Sequence
  Description of Artificial Sequence: Synthetic oligonucleotide
ucccuugugaggugaggug

SEQ ID NO: 635360 - RNA, 19 nt, Artificial Sequence
  Description of Artificial Sequence: Synthetic oligonucleotide
caacuagggaaaaugucaa

SEQ ID NO: 635361 - RNA, 19 nt, Artificial Sequence
  Description of Artificial Sequence: Synthetic oligonucleotide
uguguagaggguggauuug

SEQ ID NO: 635362 - RNA, 19 nt, Artificial Sequence
  Description of Artificial Sequence: Synthetic oligonucleotide
ggugaguuuaucauaugca

SEQ ID NO: 635363 - RNA, 19 nt, Artificial Sequence
  Description of Artificial Sequence: Synthetic oligonucleotide
agccaaacuuugcugcaca

SEQ ID NO: 635364 - RNA, 19 nt, Artificial Sequence
  Description of Artificial Sequence: Synthetic oligonucleotide
ucucguaguuggcguagcu

SEQ ID NO: 635365 - RNA, 19 nt, Artificial Sequence
  Description of Artificial Sequence: Synthetic oligonucleotide
ccuacagaucagaaacucc

SEQ ID NO: 635366 - RNA, 19 nt, Artificial Sequence
  Description of Artificial Sequence: Synthetic oligonucleotide
caugaauucuucaaagauu

SEQ ID NO: 635367 - RNA, 19 nt, Artificial Sequence
  Description of Artificial Sequence: Synthetic oligonucleotide
guaggaagaauaaucuaua

SEQ ID NO: 635368 - RNA, 19 nt, Artificial Sequence
  Description of Artificial Sequence: Synthetic oligonucleotide
ucguacucauugucaucag

SEQ ID NO: 635369 - RNA, 19 nt, Artificial Sequence
  Description of Artificial Sequence: Synthetic oligonucleotide
cuugagcuauguaaggugu

SEQ ID NO: 635370 - RNA, 19 nt, Artificial Sequence
  Description of Artificial Sequence: Synthetic oligonucleotide
cucuuacuggccaguauca

SEQ ID NO: 635371 - RNA, 19 nt, Artificial Sequence
  Description of Artificial Sequence: Synthetic oligonucleotide
agauauggcucaguggcau

SEQ ID NO: 635372 - RNA, 19 nt, Artificial Sequence
  Description of Artificial Sequence: Synthetic oligonucleotide
uccagaccacucuuuccca

SEQ ID NO: 635373 - RNA, 19 nt, Artificial Sequence
  Description of Artificial Sequence: Synthetic oligonucleotide
ccuucuacaugugaauuag

SEQ ID NO: 635374 - RNA, 19 nt, Artificial Sequence
  Description of Artificial Sequence: Synthetic oligonucleotide
ucugugugucuucccgagu

SEQ ID NO: 635375 - RNA, 19 nt, Artificial Sequence
  Description of Artificial Sequence: Synthetic oligonucleotide
guaguauuaccacuuggau

SEQ ID NO: 635376 - RNA, 19 nt, Artificial Sequence
  Description of Artificial Sequence: Synthetic oligonucleotide
aggcacuaacuaaaagaag

SEQ ID NO: 635377 - RNA, 19 nt, Artificial Sequence
  Description of Artificial Sequence: Synthetic oligonucleotide
agggacgugagugggccgg

SEQ ID NO: 635378 - RNA, 19 nt, Artificial Sequence
  Description of Artificial Sequence: Synthetic oligonucleotide
uauccgagcuuugucuggu

SEQ ID NO: 635379 - RNA, 19 nt, Artificial Sequence
  Description of Artificial Sequence: Synthetic oligonucleotide
aggcuuguuucauccagau

SEQ ID NO: 635380 - RNA, 19 nt, Artificial Sequence
  Description of Artificial Sequence: Synthetic oligonucleotide
ugccaacguuuaaauuucu

SEQ ID NO: 635381 - RNA, 19 nt, Artificial Sequence
  Description of Artificial Sequence: Synthetic oligonucleotide
ucuaaacucuugcccgguu

SEQ ID NO: 635382 - RNA, 19 nt, Artificial Sequence
  Description of Artificial Sequence: Synthetic oligonucleotide
agaagcuaucuggaaacau

SEQ ID NO: 635383 - RNA, 19 nt, Artificial Sequence
  Description of Artificial Sequence: Synthetic oligonucleotide
agucuccgcaaaugcauau

SEQ ID NO: 635384 - RNA, 19 nt, Artificial Sequence
  Description of Artificial Sequence: Synthetic oligonucleotide
gcgauuuccaguucuuuuc

SEQ ID NO: 635385 - RNA, 19 nt, Artificial Sequence
  Description of Artificial Sequence: Synthetic oligonucleotide
ucaaggguacaagcaaaua

SEQ ID NO: 635386 - RNA, 19 nt, Artificial Sequence
  Description of Artificial Sequence: Synthetic oligonucleotide
aacuuaucaucaacagauu

SEQ ID NO: 635387 - RNA, 19 nt, Artificial Sequence
  Description of Artificial Sequence: Synthetic oligonucleotide
uuuggcgauucuugaguuu

SEQ ID NO: 635388 - RNA, 19 nt, Artificial Sequence
  Description of Artificial Sequence: Synthetic oligonucleotide
guuggacccucuauccgag

SEQ ID NO: 635389 - RNA, 19 nt, Artificial Sequence
  Description of Artificial Sequence: Synthetic oligonucleotide
acaaugcugucucguaguu

SEQ ID NO: 635390 - RNA, 19 nt, Artificial Sequence
  Description of Artificial Sequence: Synthetic oligonucleotide
cugacauucuaaacggacu

SEQ ID NO: 635391 - RNA, 19 nt, Artificial Sequence
  Description of Artificial Sequence: Synthetic oligonucleotide
aggucugaaccauccguau

SEQ ID NO: 635392 - RNA, 19 nt, Artificial Sequence
  Description of Artificial Sequence: Synthetic oligonucleotide
cuagccugcauuuaacuuu

SEQ ID NO: 635393 - RNA, 19 nt, Artificial Sequence
  Description of Artificial Sequence: Synthetic oligonucleotide
guuucuuagggagacugua

SEQ ID NO: 635394 - RNA, 19 nt, Artificial Sequence
  Description of Artificial Sequence: Synthetic oligonucleotide
uccgagcuuugucugguuu

SEQ ID NO: 635395 - RNA, 19 nt, Artificial Sequence
  Description of Artificial Sequence: Synthetic oligonucleotide
aggaaugaacacauacaaa

SEQ ID NO: 635396 - RNA, 19 nt, Artificial Sequence
  Description of Artificial Sequence: Synthetic oligonucleotide
gguuggacccucuauccga

SEQ ID NO: 635397 - RNA, 19 nt, Artificial Sequence
  Description of Artificial Sequence: Synthetic oligonucleotide
gcaauaugcagcaggucug

SEQ ID NO: 635398 - RNA, 19 nt, Artificial Sequence
  Description of Artificial Sequence: Synthetic oligonucleotide
caccaucgaccucuggcag

SEQ ID NO: 635399 - RNA, 19 nt, Artificial Sequence
  Description of Artificial Sequence: Synthetic oligonucleotide
cacuaugguaccaaugaau

SEQ ID NO: 635400 - RNA, 19 nt, Artificial Sequence
  Description of Artificial Sequence: Synthetic oligonucleotide
gaucuuucuugcagcagaa

SEQ ID NO: 635401 - RNA, 19 nt, Artificial Sequence
  Description of Artificial Sequence: Synthetic oligonucleotide
ucuuacuggccaguaucau

SEQ ID NO: 635402 - RNA, 19 nt, Artificial Sequence
  Description of Artificial Sequence: Synthetic oligonucleotide
gcccagugguuacauaacc

SEQ ID NO: 635403 - RNA, 19 nt, Artificial Sequence
  Description of Artificial Sequence: Synthetic oligonucleotide
gaagggacuacuguacaau

SEQ ID NO: 635404 - RNA, 19 nt, Artificial Sequence
  Description of Artificial Sequence: Synthetic oligonucleotide
caaugcugucucguaguug

SEQ ID NO: 635405 - RNA, 19 nt, Artificial Sequence
  Description of Artificial Sequence: Synthetic oligonucleotide
uugcccgguucugacauuc

SEQ ID NO: 635406 - RNA, 19 nt, Artificial Sequence
  Description of Artificial Sequence: Synthetic oligonucleotide
gcuuuaagccaaacuuugc

SEQ ID NO: 635407 - RNA, 19 nt, Artificial Sequence
  Description of Artificial Sequence: Synthetic oligonucleotide
gagaggcuccugugaguug

SEQ ID NO: 635408 - RNA, 19 nt, Artificial Sequence
  Description of Artificial Sequence: Synthetic oligonucleotide
gccaguaucaugucguacu

SEQ ID NO: 635409 - RNA, 19 nt, Artificial Sequence
  Description of Artificial Sequence: Synthetic oligonucleotide
gucuccgcaaaugcauaug

SEQ ID NO: 635410 - RNA, 19 nt, Artificial Sequence
  Description of Artificial Sequence: Synthetic oligonucleotide
cacuaacuaaaagaagcua

SEQ ID NO: 635411 - RNA, 19 nt, Artificial Sequence
  Description of Artificial Sequence: Synthetic oligonucleotide
gagguaacauccucuucau

SEQ ID NO: 635412 - RNA, 19 nt, Artificial Sequence
  Description of Artificial Sequence: Synthetic oligonucleotide
guaguuggcguagcuuuuc

SEQ ID NO: 635413 - RNA, 19 nt, Artificial Sequence
  Description of Artificial Sequence: Synthetic oligonucleotide
ccgucugugugucuucccg

SEQ ID NO: 635414 - RNA, 19 nt, Artificial Sequence
  Description of Artificial Sequence: Synthetic oligonucleotide
ugucucgcacugagauaac

SEQ ID NO: 635415 - RNA, 19 nt, Artificial Sequence
  Description of Artificial Sequence: Synthetic oligonucleotide
gaagcacuaugguaccaau

SEQ ID NO: 635416 - RNA, 19 nt, Artificial Sequence
  Description of Artificial Sequence: Synthetic oligonucleotide
caguucuuuucuuuacacu

SEQ ID NO: 635417 - RNA, 19 nt, Artificial Sequence
  Description of Artificial Sequence: Synthetic oligonucleotide
guaugggagaggcuccugu

SEQ ID NO: 635418 - RNA, 19 nt, Artificial Sequence
  Description of Artificial Sequence: Synthetic oligonucleotide
gcaggaggucuauuuauaa

SEQ ID NO: 635419 - RNA, 19 nt, Artificial Sequence
  Description of Artificial Sequence: Synthetic oligonucleotide
gcaucaauuccaggaauga

SEQ ID NO: 635420 - RNA, 19 nt, Artificial Sequence
  Description of Artificial Sequence: Synthetic oligonucleotide
aguaugggagaggcuccug

SEQ ID NO: 635421 - RNA, 19 nt, Artificial Sequence
  Description of Artificial Sequence: Synthetic oligonucleotide
ggguacaagcaaauaggca

SEQ ID NO: 635422 - RNA, 19 nt, Artificial Sequence
  Description of Artificial Sequence: Synthetic oligonucleotide
uaggugcuuccauggcaaa

SEQ ID NO: 635423 - RNA, 19 nt, Artificial Sequence
  Description of Artificial Sequence: Synthetic oligonucleotide
agcaggaggucuauuuaua

SEQ ID NO: 635424 - RNA, 19 nt, Artificial Sequence
  Description of Artificial Sequence: Synthetic oligonucleotide
ccaguaucaugucguacuc

SEQ ID NO: 635425 - RNA, 19 nt, Artificial Sequence
  Description of Artificial Sequence: Synthetic oligonucleotide
cuugucucgcacugagaua

SEQ ID NO: 635426 - RNA, 19 nt, Artificial Sequence
  Description of Artificial Sequence: Synthetic oligonucleotide
gacagaggacugucauuua

SEQ ID NO: 635427 - RNA, 19 nt, Artificial Sequence
  Description of Artificial Sequence: Synthetic oligonucleotide
ugcccgguucugacauucu

SEQ ID NO: 635428 - RNA, 19 nt, Artificial Sequence
  Description of Artificial Sequence: Synthetic oligonucleotide
gaauggauuuucagagaau

SEQ ID NO: 635429 - RNA, 19 nt, Artificial Sequence
  Description of Artificial Sequence: Synthetic oligonucleotide
aggugcuuccauggcaaaa

SEQ ID NO: 635430 - RNA, 19 nt, Artificial Sequence
  Description of Artificial Sequence: Synthetic oligonucleotide
caguaucaugucguacuca

SEQ ID NO: 635431 - RNA, 19 nt, Artificial Sequence
  Description of Artificial Sequence: Synthetic oligonucleotide
gcgagaacaccaucaagcu

SEQ ID NO: 635432 - RNA, 19 nt, Artificial Sequence
  Description of Artificial Sequence: Synthetic oligonucleotide
cccgaguucaugaugaaau

SEQ ID NO: 635433 - RNA, 19 nt, Artificial Sequence
  Description of Artificial Sequence: Synthetic oligonucleotide
cagcaauaugcagcagguc

SEQ ID NO: 635434 - RNA, 19 nt, Artificial Sequence
  Description of Artificial Sequence: Synthetic oligonucleotide
cuagagcuucauccauaga

SEQ ID NO: 635435 - RNA, 19 nt, Artificial Sequence
  Description of Artificial Sequence: Synthetic oligonucleotide
guggguaguauuaccacuu

SEQ ID NO: 635436 - RNA, 19 nt, Artificial Sequence
  Description of Artificial Sequence: Synthetic oligonucleotide
ugcuaauguuuuggaucau

SEQ ID NO: 635437 - RNA, 19 nt, Artificial Sequence
  Description of Artificial Sequence: Synthetic oligonucleotide
ccucuauccgagcuuuguc

SEQ ID NO: 635438 - RNA, 19 nt, Artificial Sequence
  Description of Artificial Sequence: Synthetic oligonucleotide
cugugugucuucccgaguu

SEQ ID NO: 635439 - RNA, 19 nt, Artificial Sequence
  Description of Artificial Sequence: Synthetic oligonucleotide
augguaucucaugcuugaa

SEQ ID NO: 635440 - RNA, 19 nt, Artificial Sequence
  Description of Artificial Sequence: Synthetic oligonucleotide
agucuaggaggaagcuuau

SEQ ID NO: 635441 - RNA, 19 nt, Artificial Sequence
  Description of Artificial Sequence: Synthetic oligonucleotide
gccaacguuuaaauuucuc

SEQ ID NO: 635442 - RNA, 19 nt, Artificial Sequence
  Description of Artificial Sequence: Synthetic oligonucleotide
gcugucucguaguuggcgu

SEQ ID NO: 635443 - RNA, 19 nt, Artificial Sequence
  Description of Artificial Sequence: Synthetic oligonucleotide
acaaaucgucauacugcuu

SEQ ID NO: 635444 - RNA, 19 nt, Artificial Sequence
  Description of Artificial Sequence: Synthetic oligonucleotide
ggcauagugcuugguuaac

SEQ ID NO: 635445 - RNA, 19 nt, Artificial Sequence
  Description of Artificial Sequence: Synthetic oligonucleotide
cugucucguaguuggcgua

SEQ ID NO: 635446 - RNA, 19 nt, Artificial Sequence
  Description of Artificial Sequence: Synthetic oligonucleotide
cgguucugacauucuaaac

SEQ ID NO: 635447 - RNA, 19 nt, Artificial Sequence
  Description of Artificial Sequence: Synthetic oligonucleotide
uccggcugcccagguugcc

SEQ ID NO: 635448 - RNA, 19 nt, Artificial Sequence
  Description of Artificial Sequence: Synthetic oligonucleotide
ggccaguaucaugucguac

SEQ ID NO: 635449 - RNA, 19 nt, Artificial Sequence
  Description of Artificial Sequence: Synthetic oligonucleotide
cucccuugugaggugaggu

SEQ ID NO: 635450 - RNA, 19 nt, Artificial Sequence
  Description of Artificial Sequence: Synthetic oligonucleotide
gcuagccugcauuuaacuu

SEQ ID NO: 635451 - RNA, 19 nt, Artificial Sequence
  Description of Artificial Sequence: Synthetic oligonucleotide
gucucgcacugagauaacu

SEQ ID NO: 635452 - RNA, 19 nt, Artificial Sequence
  Description of Artificial Sequence: Synthetic oligonucleotide
gcgauucuugaguuuaauu

SEQ ID NO: 635453 - RNA, 19 nt, Artificial Sequence
  Description of Artificial Sequence: Synthetic oligonucleotide
gucugugcuccgucugugu

SEQ ID NO: 635454 - RNA, 19 nt, Artificial Sequence
  Description of Artificial Sequence: Synthetic oligonucleotide
cugucugugcuccgucugu

SEQ ID NO: 635455 - RNA, 19 nt, Artificial Sequence
  Description of Artificial Sequence: Synthetic oligonucleotide
gucuaaacucuugcccggu

SEQ ID NO: 635456 - RNA, 19 nt, Artificial Sequence
  Description of Artificial Sequence: Synthetic oligonucleotide
cccauaauuuugcuagccu

SEQ ID NO: 635457 - RNA, 19 nt, Artificial Sequence
  Description of Artificial Sequence: Synthetic oligonucleotide
ggcuuguuucauccagaua

SEQ ID NO: 635458 - RNA, 19 nt, Artificial Sequence
  Description of Artificial Sequence: Synthetic oligonucleotide
ggacgugagugggccgggg

SEQ ID NO: 635459 - RNA, 19 nt, Artificial Sequence
  Description of Artificial Sequence: Synthetic oligonucleotide
ccgaguucaugaugaaaua

SEQ ID NO: 635460 - RNA, 19 nt, Artificial Sequence
  Description of Artificial Sequence: Synthetic oligonucleotide
gagcgauuuccaguucuuu

SEQ ID NO: 635461 - RNA, 19 nt, Artificial Sequence
  Description of Artificial Sequence: Synthetic oligonucleotide
gggacgugagugggccggg

SEQ ID NO: 635462 - RNA, 19 nt, Artificial Sequence
  Description of Artificial Sequence: Synthetic oligonucleotide
cacucuuacuggccaguau

SEQ ID NO: 635463 - RNA, 19 nt, Artificial Sequence
  Description of Artificial Sequence: Synthetic oligonucleotide
agguugccccugagcacug

SEQ ID NO: 635464 - RNA, 19 nt, Artificial Sequence
  Description of Artificial Sequence: Synthetic oligonucleotide
ggucugaaccauccguauu

SEQ ID NO: 635465 - RNA, 19 nt, Artificial Sequence
  Description of Artificial Sequence: Synthetic oligonucleotide
acccucuauccgagcuuug

SEQ ID NO: 635466 - RNA, 19 nt, Artificial Sequence
  Description of Artificial Sequence: Synthetic oligonucleotide
cuuucccaucugccaacgu

SEQ ID NO: 635467 - RNA, 19 nt, Artificial Sequence
  Description of Artificial Sequence: Synthetic oligonucleotide
cucguaguuggcguagcuu

SEQ ID NO: 635468 - RNA, 19 nt, Artificial Sequence
  Description of Artificial Sequence: Synthetic oligonucleotide
guauuaccacuuggauggu

SEQ ID NO: 635469 - RNA, 19 nt, Artificial Sequence
  Description of Artificial Sequence: Synthetic oligonucleotide
guaucaugucguacucauu

SEQ ID NO: 635470 - RNA, 19 nt, Artificial Sequence
  Description of Artificial Sequence: Synthetic oligonucleotide
caguaugggagaggcuccu

SEQ ID NO: 635471 - RNA, 19 nt, Artificial Sequence
  Description of Artificial Sequence: Synthetic oligonucleotide
agccugcauuuaacuuuga

SEQ ID NO: 635472 - RNA, 19 nt, Artificial Sequence
  Description of Artificial Sequence: Synthetic oligonucleotide
cugcaguaugggagaggcu

SEQ ID NO: 635473 - RNA, 19 nt, Artificial Sequence
  Description of Artificial Sequence: Synthetic oligonucleotide
gucuaggaggaagcuuauu

SEQ ID NO: 635474 - RNA, 19 nt, Artificial Sequence
  Description of Artificial Sequence: Synthetic oligonucleotide
ggacccucuauccgagcuu

SEQ ID NO: 635475 - RNA, 19 nt, Artificial Sequence
  Description of Artificial Sequence: Synthetic oligonucleotide
ccaaugaauuguggugaua

SEQ ID NO: 635476 - RNA, 19 nt, Artificial Sequence
  Description of Artificial Sequence: Synthetic oligonucleotide
cuugcccgguucugacauu

SEQ ID NO: 635477 - RNA, 19 nt, Artificial Sequence
  Description of Artificial Sequence: Synthetic oligonucleotide
cccucuauccgagcuuugu

SEQ ID NO: 635478 - RNA, 19 nt, Artificial Sequence
  Description of Artificial Sequence: Synthetic oligonucleotide
cacuuggauggugcacaau

SEQ ID NO: 635479 - RNA, 19 nt, Artificial Sequence
  Description of Artificial Sequence: Synthetic oligonucleotide
cccuauguccccagcccuu

SEQ ID NO: 635480 - RNA, 19 nt, Artificial Sequence
  Description of Artificial Sequence: Synthetic oligonucleotide
cagaggcggucugcaguau

SEQ ID NO: 635481 - RNA, 19 nt, Artificial Sequence
  Description of Artificial Sequence: Synthetic oligonucleotide
caucgaccucuggcaggcu

SEQ ID NO: 635482 - RNA, 19 nt, Artificial Sequence
  Description of Artificial Sequence: Synthetic oligonucleotide
ucgauugccaccaacaacg

SEQ ID NO: 635483 - RNA, 19 nt, Artificial Sequence
  Description of Artificial Sequence: Synthetic oligonucleotide
auuuaccaggucuagaggc

SEQ ID NO: 635484 - RNA, 19 nt, Artificial Sequence
  Description of Artificial Sequence: Synthetic oligonucleotide
ucuaucuacaaacugauuc

SEQ ID NO: 635485 - RNA, 19 nt, Artificial Sequence
  Description of Artificial Sequence: Synthetic oligonucleotide
aacaacguggcacaaaacu

SEQ ID NO: 635486 - RNA, 19 nt, Artificial Sequence
  Description of Artificial Sequence: Synthetic oligonucleotide
uguggaaaggcuuaguucu

SEQ ID NO: 635487 - RNA, 19 nt, Artificial Sequence
  Description of Artificial Sequence: Synthetic oligonucleotide
uucacggcgacaaacaggc

SEQ ID NO: 635488 - RNA, 19 nt, Artificial Sequence
  Description of Artificial Sequence: Synthetic oligonucleotide
augcucaacagagagaacc

SEQ ID NO: 635489 - RNA, 19 nt, Artificial Sequence
  Description of Artificial Sequence: Synthetic oligonucleotide
ugauucuacauuuccuugg

SEQ ID NO: 635490 - RNA, 19 nt, Artificial Sequence
  Description of Artificial Sequence: Synthetic oligonucleotide
caaccaagcagguugaggg

SEQ ID NO: 635491 - RNA, 19 nt, Artificial Sequence
  Description of Artificial Sequence: Synthetic oligonucleotide
acgucaaacacguccaccc

SEQ ID NO: 635492 - RNA, 19 nt, Artificial Sequence
  Description of Artificial Sequence: Synthetic oligonucleotide
ucacuuuugagcuccacag

SEQ ID NO: 635493 - RNA, 19 nt, Artificial Sequence
  Description of Artificial Sequence: Synthetic oligonucleotide
uauacauggaaugucucgg

SEQ ID NO: 635494 - RNA, 19 nt, Artificial Sequence
  Description of Artificial Sequence: Synthetic oligonucleotide
cuugagucuucuaaggucc

SEQ ID NO: 635495 - RNA, 19 nt, Artificial Sequence
  Description of Artificial Sequence: Synthetic oligonucleotide
uugacaucgaaguugcuug

SEQ ID NO: 635496 - RNA, 19 nt, Artificial Sequence
  Description of Artificial Sequence: Synthetic oligonucleotide
acaaaacgccguuugcucc

SEQ ID NO: 635497 - RNA, 19 nt, Artificial Sequence
  Description of Artificial Sequence: Synthetic oligonucleotide
acgcacgucaaacacgucc

SEQ ID NO: 635498 - RNA, 19 nt, Artificial Sequence
  Description of Artificial Sequence: Synthetic oligonucleotide
ucuuauggaggauagccug

SEQ ID NO: 635499 - RNA, 19 nt, Artificial Sequence
  Description of Artificial Sequence: Synthetic oligonucleotide
guugcuaugagcuggcagc

SEQ ID NO: 635500 - RNA, 19 nt, Artificial Sequence
  Description of Artificial Sequence: Synthetic oligonucleotide
ugaaucucguagcaaagga

SEQ ID NO: 635501 - RNA, 19 nt, Artificial Sequence
  Description of Artificial Sequence: Synthetic oligonucleotide
gcccauaugagccacaugg

SEQ ID NO: 635502 - RNA, 19 nt, Artificial Sequence
  Description of Artificial Sequence: Synthetic oligonucleotide
acaaacuagccucugccuc

SEQ ID NO: 635503 - RNA, 19 nt, Artificial Sequence
  Description of Artificial Sequence: Synthetic oligonucleotide
gugaguuggucuuagcagg

SEQ ID NO: 635504 - RNA, 19 nt, Artificial Sequence
  Description of Artificial Sequence: Synthetic oligonucleotide
cauaugagccacaugguug

SEQ ID NO: 635505 - RNA, 19 nt, Artificial Sequence
  Description of Artificial Sequence: Synthetic oligonucleotide
aauauacauggaaugucuc

SEQ ID NO: 635506 - RNA, 19 nt, Artificial Sequence
  Description of Artificial Sequence: Synthetic oligonucleotide
uacauggaaugucucggcg

SEQ ID NO: 635507 - RNA, 19 nt, Artificial Sequence
  Description of Artificial Sequence: Synthetic oligonucleotide
agugggauuuaccaggucu

SEQ ID NO: 635508 - RNA, 19 nt, Artificial Sequence
  Description of Artificial Sequence: Synthetic oligonucleotide
aaugucucggcguguugcg

SEQ ID NO: 635509 - RNA, 19 nt, Artificial Sequence
  Description of Artificial Sequence: Synthetic oligonucleotide
auacauggaaugucucggc

SEQ ID NO: 635510 - RNA, 19 nt, Artificial Sequence
  Description of Artificial Sequence: Synthetic oligonucleotide
aggcuuaguucucugaauc

SEQ ID NO: 635511 - RNA, 19 nt, Artificial Sequence
  Description of Artificial Sequence: Synthetic oligonucleotide
caugguugaaguuggucgg

SEQ ID NO: 635512 - RNA, 19 nt, Artificial Sequence
  Description of Artificial Sequence: Synthetic oligonucleotide
acuacaggcgacaggagcc

SEQ ID NO: 635513 - RNA, 19 nt, Artificial Sequence
  Description of Artificial Sequence: Synthetic oligonucleotide
uguacacugucacauggga

SEQ ID NO: 635514 - RNA, 19 nt, Artificial Sequence
  Description of Artificial Sequence: Synthetic oligonucleotide
uugaacacggccauccacu

SEQ ID NO: 635515 - RNA, 19 nt, Artificial Sequence
  Description of Artificial Sequence: Synthetic oligonucleotide
aguucaaaggucguauccg

SEQ ID NO: 635516 - RNA, 19 nt, Artificial Sequence
  Description of Artificial Sequence: Synthetic oligonucleotide
ugaggguccacguacaguc

SEQ ID NO: 635517 - RNA, 19 nt, Artificial Sequence
  Description of Artificial Sequence: Synthetic oligonucleotide
ugagccacaugguugaagu

SEQ ID NO: 635518 - RNA, 19 nt, Artificial Sequence
  Description of Artificial Sequence: Synthetic oligonucleotide
uguugcuaugagcuggcag

SEQ ID NO: 635519 - RNA, 19 nt, Artificial Sequence
  Description of Artificial Sequence: Synthetic oligonucleotide
caacguggcacaaaacugc

SEQ ID NO: 635520 - RNA, 19 nt, Artificial Sequence
  Description of Artificial Sequence: Synthetic oligonucleotide
ggauuuaccaggucuagag

SEQ ID NO: 635521 - RNA, 19 nt, Artificial Sequence
  Description of Artificial Sequence: Synthetic oligonucleotide
uccacguacagucccaugu

SEQ ID NO: 635522 - RNA, 19 nt, Artificial Sequence
  Description of Artificial Sequence: Synthetic oligonucleotide
aaaagacugcugugagagg

SEQ ID NO: 635523 - RNA, 19 nt, Artificial Sequence
  Description of Artificial Sequence: Synthetic oligonucleotide
acugcacguguccuggugc

SEQ ID NO: 635524 - RNA, 19 nt, Artificial Sequence
  Description of Artificial Sequence: Synthetic oligonucleotide
aaguuggucggguuggaga

SEQ ID NO: 635525 - RNA, 19 nt, Artificial Sequence
  Description of Artificial Sequence: Synthetic oligonucleotide
ugaauauacauggaauguc

SEQ ID NO: 635526 - RNA, 19 nt, Artificial Sequence
  Description of Artificial Sequence: Synthetic oligonucleotide
auaugagccacaugguuga

SEQ ID NO: 635527 - RNA, 19 nt, Artificial Sequence
  Description of Artificial Sequence: Synthetic oligonucleotide
cucaaugacguagaguccc

SEQ ID NO: 635528 - RNA, 19 nt, Artificial Sequence
  Description of Artificial Sequence: Synthetic oligonucleotide
uuagcaggcgaaccuaaga

SEQ ID NO: 635529 - RNA, 19 nt, Artificial Sequence
  Description of Artificial Sequence: Synthetic oligonucleotide
uucuuauggaggauagccu

SEQ ID NO: 635530 - RNA, 19 nt, Artificial Sequence
  Description of Artificial Sequence: Synthetic oligonucleotide
ugcucaacagagagaaccc

SEQ ID NO: 635531 - RNA, 19 nt, Artificial Sequence
  Description of Artificial Sequence: Synthetic oligonucleotide
acucgcuguacacugucac

SEQ ID NO: 635532 - RNA, 19 nt, Artificial Sequence
  Description of Artificial Sequence: Synthetic oligonucleotide
ugucaggaugagcagugag

SEQ ID NO: 635533 - RNA, 19 nt, Artificial Sequence
  Description of Artificial Sequence: Synthetic oligonucleotide
ucuugcaaucagcagcucu

SEQ ID NO: 635534 - RNA, 19 nt, Artificial Sequence
  Description of Artificial Sequence: Synthetic oligonucleotide
aaacggaacaguguugccu

SEQ ID NO: 635535 - RNA, 19 nt, Artificial Sequence
  Description of Artificial Sequence: Synthetic oligonucleotide
uuugcuccgaguccgcagc

SEQ ID NO: 635536 - RNA, 19 nt, Artificial Sequence
  Description of Artificial Sequence: Synthetic oligonucleotide
uggucgauugccaccaaca

SEQ ID NO: 635537 - RNA, 19 nt, Artificial Sequence
  Description of Artificial Sequence: Synthetic oligonucleotide
caaacuagccucugccucc

SEQ ID NO: 635538 - RNA, 19 nt, Artificial Sequence
  Description of Artificial Sequence: Synthetic oligonucleotide
cuaggguuggagcuauugg

SEQ ID NO: 635539 - RNA, 19 nt, Artificial Sequence
  Description of Artificial Sequence: Synthetic oligonucleotide
ucguagcaaaggaucagcc

SEQ ID NO: 635540 - RNA, 19 nt, Artificial Sequence
  Description of Artificial Sequence: Synthetic oligonucleotide
ugcaacuacaggcgacagg

SEQ ID NO: 635541 - RNA, 19 nt, Artificial Sequence
  Description of Artificial Sequence: Synthetic oligonucleotide
uuggaucucaauucugggu

SEQ ID NO: 635542 - RNA, 19 nt, Artificial Sequence
  Description of Artificial Sequence: Synthetic oligonucleotide
ucagccgguucuuauggag

SEQ ID NO: 635543 - RNA, 19 nt, Artificial Sequence
  Description of Artificial Sequence: Synthetic oligonucleotide
aaguugcuugcuucugcuc

SEQ ID NO: 635544 - RNA, 19 nt, Artificial Sequence
  Description of Artificial Sequence: Synthetic oligonucleotide
gacaaaacgccguuugcuc

SEQ ID NO: 635545 - RNA, 19 nt, Artificial Sequence
  Description of Artificial Sequence: Synthetic oligonucleotide
ugccaucggaguucaaagg

SEQ ID NO: 635546 - RNA, 19 nt, Artificial Sequence
  Description of Artificial Sequence: Synthetic oligonucleotide
caaaacgccguuugcuccg

SEQ ID NO: 635547 - RNA, 19 nt, Artificial Sequence
  Description of Artificial Sequence: Synthetic oligonucleotide
cuugacacuggggugacgc

SEQ ID NO: 635548 - RNA, 19 nt, Artificial Sequence
  Description of Artificial Sequence: Synthetic oligonucleotide
ugaguuggucuuagcaggc

SEQ ID NO: 635549 - RNA, 19 nt, Artificial Sequence
  Description of Artificial Sequence: Synthetic oligonucleotide
acaugcacuaccuggcucu

SEQ ID NO: 635550 - RNA, 19 nt, Artificial Sequence
  Description of Artificial Sequence: Synthetic oligonucleotide
uuaguucucugaaucucgu

SEQ ID NO: 635551 - RNA, 19 nt, Artificial Sequence
  Description of Artificial Sequence: Synthetic oligonucleotide
gcgacaaacaggcaggugc

SEQ ID NO: 635552 - RNA, 19 nt, Artificial Sequence
  Description of Artificial Sequence: Synthetic oligonucleotide
uugguggaauccgaguccg

SEQ ID NO: 635553 - RNA, 19 nt, Artificial Sequence
  Description of Artificial Sequence: Synthetic oligonucleotide
gcaaucagcagcucugacg

SEQ ID NO: 635554 - RNA, 19 nt, Artificial Sequence
  Description of Artificial Sequence: Synthetic oligonucleotide
gaggccgucacccugaaua

SEQ ID NO: 635555 - RNA, 19 nt, Artificial Sequence
  Description of Artificial Sequence: Synthetic oligonucleotide
ggcgacaugcacuaccugg

SEQ ID NO: 635556 - RNA, 19 nt, Artificial Sequence
  Description of Artificial Sequence: Synthetic oligonucleotide
auacucgcuguacacuguc

SEQ ID NO: 635557 - RNA, 19 nt, Artificial Sequence
  Description of Artificial Sequence: Synthetic oligonucleotide
gaaugucucggcguguugc

SEQ ID NO: 635558 - RNA, 19 nt, Artificial Sequence
  Description of Artificial Sequence: Synthetic oligonucleotide
aguggcagaguacugucgu

SEQ ID NO: 635559 - RNA, 19 nt, Artificial Sequence
  Description of Artificial Sequence: Synthetic oligonucleotide
ugagcucaaugacguagag

SEQ ID NO: 635560 - RNA, 19 nt, Artificial Sequence
  Description of Artificial Sequence: Synthetic oligonucleotide
uuggauggaguugagugcu

SEQ ID NO: 635561 - RNA, 19 nt, Artificial Sequence
  Description of Artificial Sequence: Synthetic oligonucleotide
aucgaaaagacugcuguga

SEQ ID NO: 635562 - RNA, 19 nt, Artificial Sequence
  Description of Artificial Sequence: Synthetic oligonucleotide
cagacgaacacaucugguc

SEQ ID NO: 635563 - RNA, 19 nt, Artificial Sequence
  Description of Artificial Sequence: Synthetic oligonucleotide
accaucucacugaacuucc

SEQ ID NO: 635564 - RNA, 19 nt, Artificial Sequence
  Description of Artificial Sequence: Synthetic oligonucleotide
aggcgaaccuaagagagag

SEQ ID NO: 635565 - RNA, 19 nt, Artificial Sequence
  Description of Artificial Sequence: Synthetic oligonucleotide
gacgaucacaucccgugug

SEQ ID NO: 635566 - RNA, 19 nt, Artificial Sequence
  Description of Artificial Sequence: Synthetic oligonucleotide
cuguggaaaggcuuaguuc

SEQ ID NO: 635567 - RNA, 19 nt, Artificial Sequence
  Description of Artificial Sequence: Synthetic oligonucleotide
uucguuuccggaagcuuga

SEQ ID NO: 635568 - RNA, 19 nt, Artificial Sequence
  Description of Artificial Sequence: Synthetic oligonucleotide
cauggaaugucucggcgug

SEQ ID NO: 635569 - RNA, 19 nt, Artificial Sequence
  Description of Artificial Sequence: Synthetic oligonucleotide
gcgagaacggucuugauga

SEQ ID NO: 635570 - RNA, 19 nt, Artificial Sequence
  Description of Artificial Sequence: Synthetic oligonucleotide
acgccguuugcuccgaguc

SEQ ID NO: 635571 - RNA, 19 nt, Artificial Sequence
  Description of Artificial Sequence: Synthetic oligonucleotide
agauuauuuuaucuaucua

SEQ ID NO: 635572 - RNA, 19 nt, Artificial Sequence
  Description of Artificial Sequence: Synthetic oligonucleotide
agcuauuggauggaguuga

SEQ ID NO: 635573 - RNA, 19 nt, Artificial Sequence
  Description of Artificial Sequence: Synthetic oligonucleotide
ggucguauccgccucaggc

SEQ ID NO: 635574 - RNA, 19 nt, Artificial Sequence
  Description of Artificial Sequence: Synthetic oligonucleotide
caggucuagaggcugcccg

SEQ ID NO: 635575 - RNA, 19 nt, Artificial Sequence
  Description of Artificial Sequence: Synthetic oligonucleotide
ugguacaccuucuugcaau

SEQ ID NO: 635576 - RNA, 19 nt, Artificial Sequence
  Description of Artificial Sequence: Synthetic oligonucleotide
acauggaaugucucggcgu

SEQ ID NO: 635577 - RNA, 19 nt, Artificial Sequence
  Description of Artificial Sequence: Synthetic oligonucleotide
cuuacggcugugcagacga

SEQ ID NO: 635578 - RNA, 19 nt, Artificial Sequence
  Description of Artificial Sequence: Synthetic oligonucleotide
uggcagaguacugucguag

SEQ ID NO: 635579 - RNA, 19 nt, Artificial Sequence
  Description of Artificial Sequence: Synthetic oligonucleotide
agauguagggcuugcuccu

SEQ ID NO: 635580 - RNA, 19 nt, Artificial Sequence
  Description of Artificial Sequence: Synthetic oligonucleotide
uugaugaguggcagaguac

SEQ ID NO: 635581 - RNA, 19 nt, Artificial Sequence
  Description of Artificial Sequence: Synthetic oligonucleotide
gucagggcuaaguaaauaa

SEQ ID NO: 635582 - RNA, 19 nt, Artificial Sequence
  Description of Artificial Sequence: Synthetic oligonucleotide
aguuggucggguuggagau

SEQ ID NO: 635583 - RNA, 19 nt, Artificial Sequence
  Description of Artificial Sequence: Synthetic oligonucleotide
ugcacccacuccaugguac

SEQ ID NO: 635584 - RNA, 19 nt, Artificial Sequence
  Description of Artificial Sequence: Synthetic oligonucleotide
agggcaucgaaaagacugc

SEQ ID NO: 635585 - RNA, 19 nt, Artificial Sequence
  Description of Artificial Sequence: Synthetic oligonucleotide
cuaccuggcucuucagccg

SEQ ID NO: 635586 - RNA, 19 nt, Artificial Sequence
  Description of Artificial Sequence: Synthetic oligonucleotide
ugacaucgaaguugcuugc

SEQ ID NO: 635587 - RNA, 19 nt, Artificial Sequence
  Description of Artificial Sequence: Synthetic oligonucleotide
cacguacagucccaugugg

SEQ ID NO: 635588 - RNA, 19 nt, Artificial Sequence
  Description of Artificial Sequence: Synthetic oligonucleotide
aaaggucguauccgccuca

SEQ ID NO: 635589 - RNA, 19 nt, Artificial Sequence
  Description of Artificial Sequence: Synthetic oligonucleotide
aucccaacccacuuccucu

SEQ ID NO: 635590 - RNA, 19 nt, Artificial Sequence
  Description of Artificial Sequence: Synthetic oligonucleotide
gucguauccgccucaggcc

SEQ ID NO: 635591 - RNA, 19 nt, Artificial Sequence
  Description of Artificial Sequence: Synthetic oligonucleotide
uugccuuacggcugugcag

SEQ ID NO: 635592 - RNA, 19 nt, Artificial Sequence
  Description of Artificial Sequence: Synthetic oligonucleotide
caucgaaguugcuugcuuc

SEQ ID NO: 635593 - RNA, 19 nt, Artificial Sequence
  Description of Artificial Sequence: Synthetic oligonucleotide
ucuuagcaggcgaaccuaa

SEQ ID NO: 635594 - RNA, 19 nt, Artificial Sequence
  Description of Artificial Sequence: Synthetic oligonucleotide
ugccuuacggcugugcaga

SEQ ID NO: 635595 - RNA, 19 nt, Artificial Sequence
  Description of Artificial Sequence: Synthetic oligonucleotide
aguuggucuuagcaggcga

SEQ ID NO: 635596 - RNA, 19 nt, Artificial Sequence
  Description of Artificial Sequence: Synthetic oligonucleotide
auccgccucaggccgaugg

SEQ ID NO: 635597 - RNA, 19 nt, Artificial Sequence
  Description of Artificial Sequence: Synthetic oligonucleotide
ucucguagcaaaggaucag

SEQ ID NO: 635598 - RNA, 19 nt, Artificial Sequence
  Description of Artificial Sequence: Synthetic oligonucleotide
agccuuucguuuccggaag

SEQ ID NO: 635599 - RNA, 19 nt, Artificial Sequence
  Description of Artificial Sequence: Synthetic oligonucleotide
cagccgguucuuauggagg

SEQ ID NO: 635600 - RNA, 19 nt, Artificial Sequence
  Description of Artificial Sequence: Synthetic oligonucleotide
ucaaugacguagagucccu

SEQ ID NO: 635601 - RNA, 19 nt, Artificial Sequence
  Description of Artificial Sequence: Synthetic oligonucleotide
ugucucggcguguugcgug

SEQ ID NO: 635602 - RNA, 19 nt, Artificial Sequence
  Description of Artificial Sequence: Synthetic oligonucleotide
cucguagcaaaggaucagc

SEQ ID NO: 635603 - RNA, 19 nt, Artificial Sequence
  Description of Artificial Sequence: Synthetic oligonucleotide
ucguucucauucucuguca

SEQ ID NO: 635604 - RNA, 19 nt, Artificial Sequence
  Description of Artificial Sequence: Synthetic oligonucleotide
uggucgggaucagacaugc

SEQ ID NO: 635605 - RNA, 19 nt, Artificial Sequence
  Description of Artificial Sequence: Synthetic oligonucleotide
gaucccaacccacuuccuc

SEQ ID NO: 635606 - RNA, 19 nt, Artificial Sequence
  Description of Artificial Sequence: Synthetic oligonucleotide
ugacgaucacaucccgugu

SEQ ID NO: 635607 - RNA, 19 nt, Artificial Sequence
  Description of Artificial Sequence: Synthetic oligonucleotide
ugggauuuaccaggucuag

SEQ ID NO: 635608 - RNA, 19 nt, Artificial Sequence
  Description of Artificial Sequence: Synthetic oligonucleotide
cacaaaacugcucauuaua

SEQ ID NO: 635609 - RNA, 19 nt, Artificial Sequence
  Description of Artificial Sequence: Synthetic oligonucleotide
uggucuuagcaggcgaacc

SEQ ID NO: 635610 - RNA, 19 nt, Artificial Sequence
  Description of Artificial Sequence: Synthetic oligonucleotide
cuaugcuggccaucucagg

SEQ ID NO: 635611 - RNA, 19 nt, Artificial Sequence
  Description of Artificial Sequence: Synthetic oligonucleotide
gacgaacacaucuggucga

SEQ ID NO: 635612 - RNA, 19 nt, Artificial Sequence
  Description of Artificial Sequence: Synthetic oligonucleotide
guuugcuccgaguccgcag

SEQ ID NO: 635613 - RNA, 19 nt, Artificial Sequence
  Description of Artificial Sequence: Synthetic oligonucleotide
aacgcaagcgaggggucag

SEQ ID NO: 635614 - RNA, 19 nt, Artificial Sequence
  Description of Artificial Sequence: Synthetic oligonucleotide
aacgccguuugcuccgagu

SEQ ID NO: 635615 - RNA, 19 nt, Artificial Sequence
  Description of Artificial Sequence: Synthetic oligonucleotide
ucccauguggcugaagcaa

SEQ ID NO: 635616 - RNA, 19 nt, Artificial Sequence
  Description of Artificial Sequence: Synthetic oligonucleotide
gcaggcgaaccuaagagag

SEQ ID NO: 635617 - RNA, 19 nt, Artificial Sequence
  Description of Artificial Sequence: Synthetic oligonucleotide
caaacaggcaggugcacga

SEQ ID NO: 635618 - RNA, 19 nt, Artificial Sequence
  Description of Artificial Sequence: Synthetic oligonucleotide
uugcuaugagcuggcagcc

SEQ ID NO: 635619 - RNA, 19 nt, Artificial Sequence
  Description of Artificial Sequence: Synthetic oligonucleotide
acggcgacaaacaggcagg

SEQ ID NO: 635620 - RNA, 19 nt, Artificial Sequence
  Description of Artificial Sequence: Synthetic oligonucleotide
ucgcuguacacugucacau

SEQ ID NO: 635621 - RNA, 19 nt, Artificial Sequence
  Description of Artificial Sequence: Synthetic oligonucleotide
gaggauagccuguagcccu

SEQ ID NO: 635622 - RNA, 19 nt, Artificial Sequence
  Description of Artificial Sequence: Synthetic oligonucleotide
aacguggcacaaaacugcu

SEQ ID NO: 635623 - RNA, 19 nt, Artificial Sequence
  Description of Artificial Sequence: Synthetic oligonucleotide
aaacaggcaggugcacgag

SEQ ID NO: 635624 - RNA, 19 nt, Artificial Sequence
  Description of Artificial Sequence: Synthetic oligonucleotide
ggaccaggggcacaggugc

SEQ ID NO: 635625 - RNA, 19 nt, Artificial Sequence
  Description of Artificial Sequence: Synthetic oligonucleotide
ggaugcucaacagagagaa

SEQ ID NO: 635626 - RNA, 19 nt, Artificial Sequence
  Description of Artificial Sequence: Synthetic oligonucleotide
gcgaaccuaagagagaggc

SEQ ID NO: 635627 - RNA, 19 nt, Artificial Sequence
  Description of Artificial Sequence: Synthetic oligonucleotide
caaacggaacaguguugcc

SEQ ID NO: 635628 - RNA, 19 nt, Artificial Sequence
  Description of Artificial Sequence: Synthetic oligonucleotide
guugccuuacggcugugca

SEQ ID NO: 635629 - RNA, 19 nt, Artificial Sequence
  Description of Artificial Sequence: Synthetic oligonucleotide
cuccgauggggagaguugg

SEQ ID NO: 635630 - RNA, 19 nt, Artificial Sequence
  Description of Artificial Sequence: Synthetic oligonucleotide
uccaugguacgcacgucaa

SEQ ID NO: 635631 - RNA, 19 nt, Artificial Sequence
  Description of Artificial Sequence: Synthetic oligonucleotide
gaguuggucuuagcaggcg

SEQ ID NO: 635632 - RNA, 19 nt, Artificial Sequence
  Description of Artificial Sequence: Synthetic oligonucleotide
gguacgcacgucaaacacg

SEQ ID NO: 635633 - RNA, 19 nt, Artificial Sequence
  Description of Artificial Sequence: Synthetic oligonucleotide
acgaucacaucccguguga

SEQ ID NO: 635634 - RNA, 19 nt, Artificial Sequence
  Description of Artificial Sequence: Synthetic oligonucleotide
ggaucagacaugcuucuca

SEQ ID NO: 635635 - RNA, 19 nt, Artificial Sequence
  Description of Artificial Sequence: Synthetic oligonucleotide
uuuccggaagcuugacauc

SEQ ID NO: 635636 - RNA, 19 nt, Artificial Sequence
  Description of Artificial Sequence: Synthetic oligonucleotide
caggccgauggucugcacc

SEQ ID NO: 635637 - RNA, 19 nt, Artificial Sequence
  Description of Artificial Sequence: Synthetic oligonucleotide
gucgggcacauugagaaca

SEQ ID NO: 635638 - RNA, 19 nt, Artificial Sequence
  Description of Artificial Sequence: Synthetic oligonucleotide
aucuggucgauugccacca

SEQ ID NO: 635639 - RNA, 19 nt, Artificial Sequence
  Description of Artificial Sequence: Synthetic oligonucleotide
guacagucccauguggcug

SEQ ID NO: 635640 - RNA, 19 nt, Artificial Sequence
  Description of Artificial Sequence: Synthetic oligonucleotide
aaggucguauccgccucag

SEQ ID NO: 635641 - RNA, 19 nt, Artificial Sequence
  Description of Artificial Sequence: Synthetic oligonucleotide
ggcagaguacugucguagg

SEQ ID NO: 635642 - RNA, 19 nt, Artificial Sequence
  Description of Artificial Sequence: Synthetic oligonucleotide
cacguggcggcuccggccg

SEQ ID NO: 635643 - RNA, 19 nt, Artificial Sequence
  Description of Artificial Sequence: Synthetic oligonucleotide
uguagggcuugcuccugga

SEQ ID NO: 635644 - RNA, 19 nt, Artificial Sequence
  Description of Artificial Sequence: Synthetic oligonucleotide
cugcacguguccuggugcc

SEQ ID NO: 635645 - RNA, 19 nt, Artificial Sequence
  Description of Artificial Sequence: Synthetic oligonucleotide
caaaggucguauccgccuc

SEQ ID NO: 635646 - RNA, 19 nt, Artificial Sequence
  Description of Artificial Sequence: Synthetic oligonucleotide
ccauacucgcuguacacug

SEQ ID NO: 635647 - RNA, 19 nt, Artificial Sequence
  Description of Artificial Sequence: Synthetic oligonucleotide
gucucggcguguugcgugg

SEQ ID NO: 635648 - RNA, 19 nt, Artificial Sequence
  Description of Artificial Sequence: Synthetic oligonucleotide
uucagccgguucuuaugga

SEQ ID NO: 635649 - RNA, 19 nt, Artificial Sequence
  Description of Artificial Sequence: Synthetic oligonucleotide
caacaacguggcacaaaac

SEQ ID NO: 635650 - RNA, 19 nt, Artificial Sequence
  Description of Artificial Sequence: Synthetic oligonucleotide
auagccuguagcccuucaa

SEQ ID NO: 635651 - RNA, 19 nt, Artificial Sequence
  Description of Artificial Sequence: Synthetic oligonucleotide
aggucuagaggcugcccgu

SEQ ID NO: 635652 - RNA, 19 nt, Artificial Sequence
  Description of Artificial Sequence: Synthetic oligonucleotide
uguugccuuacggcugugc

SEQ ID NO: 635653 - RNA, 19 nt, Artificial Sequence
  Description of Artificial Sequence: Synthetic oligonucleotide
gccaccaacaacguggcac

SEQ ID NO: 635654 - RNA, 19 nt, Artificial Sequence
  Description of Artificial Sequence: Synthetic oligonucleotide
ccgugugagcucaaugacg

SEQ ID NO: 635655 - RNA, 19 nt, Artificial Sequence
  Description of Artificial Sequence: Synthetic oligonucleotide
uuggucuuagcaggcgaac

SEQ ID NO: 635656 - RNA, 19 nt, Artificial Sequence
  Description of Artificial Sequence: Synthetic oligonucleotide
gagggcuuagggccacacc

SEQ ID NO: 635657 - RNA, 19 nt, Artificial Sequence
  Description of Artificial Sequence: Synthetic oligonucleotide
aaccuaagagagaggccgu

SEQ ID NO: 635658 - RNA, 19 nt, Artificial Sequence
  Description of Artificial Sequence: Synthetic oligonucleotide
gcaucgaaaagacugcugu

SEQ ID NO: 635659 - RNA, 19 nt, Artificial Sequence
  Description of Artificial Sequence: Synthetic oligonucleotide
caggccgacugcaauccug

SEQ ID NO: 635660 - RNA, 19 nt, Artificial Sequence
  Description of Artificial Sequence: Synthetic oligonucleotide
ugucagggcuaaguaaaua

SEQ ID NO: 635661 - RNA, 19 nt, Artificial Sequence
  Description of Artificial Sequence: Synthetic oligonucleotide
cuccaucaaaggaggacca

SEQ ID NO: 635662 - RNA, 19 nt, Artificial Sequence
  Description of Artificial Sequence: Synthetic oligonucleotide
uccccggggcccauaugag

SEQ ID NO: 635663 - RNA, 19 nt, Artificial Sequence
  Description of Artificial Sequence: Synthetic oligonucleotide
uacggcugugcagacgaac

SEQ ID NO: 635664 - RNA, 19 nt, Artificial Sequence
  Description of Artificial Sequence: Synthetic oligonucleotide
caaaguccuggucgggauc

SEQ ID NO: 635665 - RNA, 19 nt, Artificial Sequence
  Description of Artificial Sequence: Synthetic oligonucleotide
aaacgccguuugcuccgag

SEQ ID NO: 635666 - RNA, 19 nt, Artificial Sequence
  Description of Artificial Sequence: Synthetic oligonucleotide
gccguuugcuccgaguccg

SEQ ID NO: 635667 - RNA, 19 nt, Artificial Sequence
  Description of Artificial Sequence: Synthetic oligonucleotide
gauguagggcuugcuccug

SEQ ID NO: 635668 - RNA, 19 nt, Artificial Sequence
  Description of Artificial Sequence: Synthetic oligonucleotide
gucuagaggcugcccgucc

SEQ ID NO: 635669 - RNA, 19 nt, Artificial Sequence
  Description of Artificial Sequence: Synthetic oligonucleotide
ugucgggcacauugagaac

SEQ ID NO: 635670 - RNA, 19 nt, Artificial Sequence
  Description of Artificial Sequence: Synthetic oligonucleotide
guugcguggaugacaucug

SEQ ID NO: 635671 - RNA, 19 nt, Artificial Sequence
  Description of Artificial Sequence: Synthetic oligonucleotide
gauagccuguagcccuuca

SEQ ID NO: 635672 - RNA, 19 nt, Artificial Sequence
  Description of Artificial Sequence: Synthetic oligonucleotide
gaucucaauucugggucuc

SEQ ID NO: 635673 - RNA, 19 nt, Artificial Sequence
  Description of Artificial Sequence: Synthetic oligonucleotide
cuggucgauugccaccaac

SEQ ID NO: 635674 - RNA, 19 nt, Artificial Sequence
  Description of Artificial Sequence: Synthetic oligonucleotide
aggguuggagcuauuggau

SEQ ID NO: 635675 - RNA, 19 nt, Artificial Sequence
  Description of Artificial Sequence: Synthetic oligonucleotide
gucgggaucagacaugcuu

SEQ ID NO: 635676 - RNA, 19 nt, Artificial Sequence
  Description of Artificial Sequence: Synthetic oligonucleotide
cuggacgagggcugccgag

SEQ ID NO: 635677 - RNA, 19 nt, Artificial Sequence
  Description of Artificial Sequence: Synthetic oligonucleotide
gaguccggcucucugucaa

SEQ ID NO: 635678 - RNA, 19 nt, Artificial Sequence
  Description of Artificial Sequence: Synthetic oligonucleotide
aaaacgccguuugcuccga

SEQ ID NO: 635679 - RNA, 19 nt, Artificial Sequence
  Description of Artificial Sequence: Synthetic oligonucleotide
gaaucucguagcaaaggau

SEQ ID NO: 635680 - RNA, 19 nt, Artificial Sequence
  Description of Artificial Sequence: Synthetic oligonucleotide
cuuauggaggauagccugu

SEQ ID NO: 635681 - RNA, 19 nt, Artificial Sequence
  Description of Artificial Sequence: Synthetic oligonucleotide
gacugcaauccugucucca

SEQ ID NO: 635682 - RNA, 19 nt, Artificial Sequence
  Description of Artificial Sequence: Synthetic oligonucleotide
cacauugagaacagcuccu

SEQ ID NO: 635683 - RNA, 19 nt, Artificial Sequence
  Description of Artificial Sequence: Synthetic oligonucleotide
gcuuaguucucugaaucuc

SEQ ID NO: 635684 - RNA, 19 nt, Artificial Sequence
  Description of Artificial Sequence: Synthetic oligonucleotide
guacgcacgucaaacacgu

SEQ ID NO: 635685 - RNA, 19 nt, Artificial Sequence
  Description of Artificial Sequence: Synthetic oligonucleotide
cucgcuguacacugucaca

SEQ ID NO: 635686 - RNA, 19 nt, Artificial Sequence
  Description of Artificial Sequence: Synthetic oligonucleotide
uugcuccgaguccgcagca

SEQ ID NO: 635687 - RNA, 19 nt, Artificial Sequence
  Description of Artificial Sequence: Synthetic oligonucleotide
cccuguugcuaugagcugg

SEQ ID NO: 635688 - RNA, 19 nt, Artificial Sequence
  Description of Artificial Sequence: Synthetic oligonucleotide
ucggaguucaaaggucgua

SEQ ID NO: 635689 - RNA, 19 nt, Artificial Sequence
  Description of Artificial Sequence: Synthetic oligonucleotide
gugcaaacggaacaguguu

SEQ ID NO: 635690 - RNA, 19 nt, Artificial Sequence
  Description of Artificial Sequence: Synthetic oligonucleotide
gucccauguggcugaagca

SEQ ID NO: 635691 - RNA, 19 nt, Artificial Sequence
  Description of Artificial Sequence: Synthetic oligonucleotide
guagggcuugcuccuggac

SEQ ID NO: 635692 - RNA, 19 nt, Artificial Sequence
  Description of Artificial Sequence: Synthetic oligonucleotide
ucggcguguugcguggaug

SEQ ID NO: 635693 - RNA, 19 nt, Artificial Sequence
  Description of Artificial Sequence: Synthetic oligonucleotide
gucacaugggaggggcugc

SEQ ID NO: 635694 - RNA, 19 nt, Artificial Sequence
  Description of Artificial Sequence: Synthetic oligonucleotide
gugcacgagcucuucuuga

SEQ ID NO: 635695 - RNA, 19 nt, Artificial Sequence
  Description of Artificial Sequence: Synthetic oligonucleotide
gccgucacccugaauauac

SEQ ID NO: 635696 - RNA, 19 nt, Artificial Sequence
  Description of Artificial Sequence: Synthetic oligonucleotide
gcucugacgaucacauccc

SEQ ID NO: 635697 - RNA, 19 nt, Artificial Sequence
  Description of Artificial Sequence: Synthetic oligonucleotide
ggacgagggcugccgaggg

SEQ ID NO: 635698 - RNA, 19 nt, Artificial Sequence
  Description of Artificial Sequence: Synthetic oligonucleotide
ugcgugaccuccggccuug

SEQ ID NO: 635699 - RNA, 19 nt, Artificial Sequence
  Description of Artificial Sequence: Synthetic oligonucleotide
ugucuccauccacgauagc

SEQ ID NO: 635700 - RNA, 19 nt, Artificial Sequence
  Description of Artificial Sequence: Synthetic oligonucleotide
gaacgcaagcgagggguca

SEQ ID NO: 635701 - RNA, 19 nt, Artificial Sequence
  Description of Artificial Sequence: Synthetic oligonucleotide
gcgacaugcacuaccuggc

SEQ ID NO: 635702 - RNA, 19 nt, Artificial Sequence
  Description of Artificial Sequence: Synthetic oligonucleotide
augagauguagggcuugcu

SEQ ID NO: 635703 - RNA, 19 nt, Artificial Sequence
  Description of Artificial Sequence: Synthetic oligonucleotide
caccugcaucccauccccg

SEQ ID NO: 635704 - RNA, 19 nt, Artificial Sequence
  Description of Artificial Sequence: Synthetic oligonucleotide
aguugagugcuugguggaa

SEQ ID NO: 635705 - RNA, 19 nt, Artificial Sequence
  Description of Artificial Sequence: Synthetic oligonucleotide
gaggugucgggcacauuga

SEQ ID NO: 635706 - RNA, 19 nt, Artificial Sequence
  Description of Artificial Sequence: Synthetic oligonucleotide
cuugacaucgaaguugcuu

SEQ ID NO: 635707 - RNA, 19 nt, Artificial Sequence
  Description of Artificial Sequence: Synthetic oligonucleotide
agccgcuucacggcgacaa

SEQ ID NO: 635708 - RNA, 19 nt, Artificial Sequence
  Description of Artificial Sequence: Synthetic oligonucleotide
guuggucuuagcaggcgaa

SEQ ID NO: 635709 - RNA, 19 nt, Artificial Sequence
  Description of Artificial Sequence: Synthetic oligonucleotide
cugcaacuacaggcgacag

SEQ ID NO: 635710 - RNA, 19 nt, Artificial Sequence
  Description of Artificial Sequence: Synthetic oligonucleotide
acguggcacaaaacugcuc

SEQ ID NO: 635711 - RNA, 19 nt, Artificial Sequence
  Description of Artificial Sequence: Synthetic oligonucleotide
ggcaucgaaaagacugcug

SEQ ID NO: 635712 - RNA, 19 nt, Artificial Sequence
  Description of Artificial Sequence: Synthetic oligonucleotide
ggucgauugccaccaacaa

SEQ ID NO: 635713 - RNA, 19 nt, Artificial Sequence
  Description of Artificial Sequence: Synthetic oligonucleotide
aggccgacugcaauccugu

SEQ ID NO: 635714 - RNA, 19 nt, Artificial Sequence
  Description of Artificial Sequence: Synthetic oligonucleotide
ccugcaucccauccccggg

SEQ ID NO: 635715 - RNA, 19 nt, Artificial Sequence
  Description of Artificial Sequence: Synthetic oligonucleotide
gccaucggaguucaaaggu

SEQ ID NO: 635716 - RNA, 19 nt, Artificial Sequence
  Description of Artificial Sequence: Synthetic oligonucleotide
caggcgaaccuaagagaga

SEQ ID NO: 635717 - RNA, 19 nt, Artificial Sequence
  Description of Artificial Sequence: Synthetic oligonucleotide
ggucuuagcaggcgaaccu

SEQ ID NO: 635718 - RNA, 19 nt, Artificial Sequence
  Description of Artificial Sequence: Synthetic oligonucleotide
ggaaugucucggcguguug

SEQ ID NO: 635719 - RNA, 19 nt, Artificial Sequence
  Description of Artificial Sequence: Synthetic oligonucleotide
caaugacguagagucccuc

SEQ ID NO: 635720 - RNA, 19 nt, Artificial Sequence
  Description of Artificial Sequence: Synthetic oligonucleotide
cgguucuuauggaggauag

SEQ ID NO: 635721 - RNA, 19 nt, Artificial Sequence
  Description of Artificial Sequence: Synthetic oligonucleotide
uuacggcugugcagacgaa

SEQ ID NO: 635722 - RNA, 19 nt, Artificial Sequence
  Description of Artificial Sequence: Synthetic oligonucleotide
aucggaguucaaaggucgu

SEQ ID NO: 635723 - RNA, 19 nt, Artificial Sequence
  Description of Artificial Sequence: Synthetic oligonucleotide
acgcacaacuugagucuuc

SEQ ID NO: 635724 - RNA, 19 nt, Artificial Sequence
  Description of Artificial Sequence: Synthetic oligonucleotide
acgaacacaucuggucgau

SEQ ID NO: 635725 - RNA, 19 nt, Artificial Sequence
  Description of Artificial Sequence: Synthetic oligonucleotide
ucuggucgauugccaccaa

SEQ ID NO: 635726 - RNA, 19 nt, Artificial Sequence
  Description of Artificial Sequence: Synthetic oligonucleotide
augcacuaccuggcucuuc

SEQ ID NO: 635727 - RNA, 19 nt, Artificial Sequence
  Description of Artificial Sequence: Synthetic oligonucleotide
ugcacguguccuggugcca

SEQ ID NO: 635728 - RNA, 19 nt, Artificial Sequence
  Description of Artificial Sequence: Synthetic oligonucleotide
ucguuuccggaagcuugac

SEQ ID NO: 635729 - RNA, 19 nt, Artificial Sequence
  Description of Artificial Sequence: Synthetic oligonucleotide
gcugcaacuacaggcgaca

SEQ ID NO: 635730 - RNA, 19 nt, Artificial Sequence
  Description of Artificial Sequence: Synthetic oligonucleotide
uaugagccacaugguugaa

SEQ ID NO: 635731 - RNA, 19 nt, Artificial Sequence
  Description of Artificial Sequence: Synthetic oligonucleotide
ccacguacagucccaugug

SEQ ID NO: 635732 - RNA, 19 nt, Artificial Sequence
  Description of Artificial Sequence: Synthetic oligonucleotide
aucuaucuacaaacugauu

SEQ ID NO: 635733 - RNA, 19 nt, Artificial Sequence
  Description of Artificial Sequence: Synthetic oligonucleotide
ggggugacgcacaacuuga

SEQ ID NO: 635734 - RNA, 19 nt, Artificial Sequence
  Description of Artificial Sequence: Synthetic oligonucleotide
gucuuagcaggcgaaccua

SEQ ID NO: 635735 - RNA, 19 nt, Artificial Sequence
  Description of Artificial Sequence: Synthetic oligonucleotide
gaguacugucguaggccuc

SEQ ID NO: 635736 - RNA, 19 nt, Artificial Sequence
  Description of Artificial Sequence: Synthetic oligonucleotide
uacgcacgucaaacacguc

SEQ ID NO: 635737 - RNA, 19 nt, Artificial Sequence
  Description of Artificial Sequence: Synthetic oligonucleotide
gcagcgagaacggucuuga

SEQ ID NO: 635738 - RNA, 19 nt, Artificial Sequence
  Description of Artificial Sequence: Synthetic oligonucleotide
acguggcggcuccggccgc

SEQ ID NO: 635739 - RNA, 19 nt, Artificial Sequence
  Description of Artificial Sequence: Synthetic oligonucleotide
cggaagcuugacaucgaag

SEQ ID NO: 635740 - RNA, 19 nt, Artificial Sequence
  Description of Artificial Sequence: Synthetic oligonucleotide
ggaucucaauucugggucu

SEQ ID NO: 635741 - RNA, 19 nt, Artificial Sequence
  Description of Artificial Sequence: Synthetic oligonucleotide
ggcgaaccuaagagagagg

SEQ ID NO: 635742 - RNA, 19 nt, Artificial Sequence
  Description of Artificial Sequence: Synthetic oligonucleotide
cauacucgcuguacacugu

SEQ ID NO: 635743 - RNA, 19 nt, Artificial Sequence
  Description of Artificial Sequence: Synthetic oligonucleotide
ggugacgcacaacuugagu

SEQ ID NO: 635744 - RNA, 19 nt, Artificial Sequence
  Description of Artificial Sequence: Synthetic oligonucleotide
gucggguuggagaucauuu

SEQ ID NO: 635745 - RNA, 19 nt, Artificial Sequence
  Description of Artificial Sequence: Synthetic oligonucleotide
augucucggcguguugcgu

SEQ ID NO: 635746 - RNA, 19 nt, Artificial Sequence
  Description of Artificial Sequence: Synthetic oligonucleotide
gggauuuaccaggucuaga

SEQ ID NO: 635747 - RNA, 19 nt, Artificial Sequence
  Description of Artificial Sequence: Synthetic oligonucleotide
uucuugcaaucagcagcuc

SEQ ID NO: 635748 - RNA, 19 nt, Artificial Sequence
  Description of Artificial Sequence: Synthetic oligonucleotide
gcacguggcggcuccggcc

SEQ ID NO: 635749 - RNA, 19 nt, Artificial Sequence
  Description of Artificial Sequence: Synthetic oligonucleotide
gugcacguggcggcuccgg

SEQ ID NO: 635750 - RNA, 19 nt, Artificial Sequence
  Description of Artificial Sequence: Synthetic oligonucleotide
ugcugcuaugcuggccauc

SEQ ID NO: 635751 - RNA, 19 nt, Artificial Sequence
  Description of Artificial Sequence: Synthetic oligonucleotide
cugagcaucucucgccgcu

SEQ ID NO: 635752 - RNA, 19 nt, Artificial Sequence
  Description of Artificial Sequence: Synthetic oligonucleotide
cuauuggauggaguugagu

SEQ ID NO: 635753 - RNA, 19 nt, Artificial Sequence
  Description of Artificial Sequence: Synthetic oligonucleotide
agcaaaggaucagccgcuu

SEQ ID NO: 635754 - RNA, 19 nt, Artificial Sequence
  Description of Artificial Sequence: Synthetic oligonucleotide
cuccugggcgacaugcacu

SEQ ID NO: 635755 - RNA, 19 nt, Artificial Sequence
  Description of Artificial Sequence: Synthetic oligonucleotide
augcgugaccuccggccuu

SEQ ID NO: 635756 - RNA, 19 nt, Artificial Sequence
  Description of Artificial Sequence: Synthetic oligonucleotide
acguguccuggugccacca

SEQ ID NO: 635757 - RNA, 19 nt, Artificial Sequence
  Description of Artificial Sequence: Synthetic oligonucleotide
cuccgaguccgcagcaucu

SEQ ID NO: 635758 - RNA, 19 nt, Artificial Sequence
  Description of Artificial Sequence: Synthetic oligonucleotide
gcuccgauggggagaguug

SEQ ID NO: 635759 - RNA, 19 nt, Artificial Sequence
  Description of Artificial Sequence: Synthetic oligonucleotide
guagcccuucaaggauccc

SEQ ID NO: 635760 - RNA, 19 nt, Artificial Sequence
  Description of Artificial Sequence: Synthetic oligonucleotide
caugugcaaacggaacagu

SEQ ID NO: 635761 - RNA, 19 nt, Artificial Sequence
  Description of Artificial Sequence: Synthetic oligonucleotide
cgcacgucaaacacgucca

SEQ ID NO: 635762 - RNA, 19 nt, Artificial Sequence
  Description of Artificial Sequence: Synthetic oligonucleotide
ccuuacggcugugcagacg

SEQ ID NO: 635763 - RNA, 19 nt, Artificial Sequence
  Description of Artificial Sequence: Synthetic oligonucleotide
gcacgucaaacacguccac

SEQ ID NO: 635764 - RNA, 19 nt, Artificial Sequence
  Description of Artificial Sequence: Synthetic oligonucleotide
cagcucgaucugguacacc

SEQ ID NO: 635765 - RNA, 19 nt, Artificial Sequence
  Description of Artificial Sequence: Synthetic oligonucleotide
ggcccauaugagccacaug

SEQ ID NO: 635766 - RNA, 19 nt, Artificial Sequence
  Description of Artificial Sequence: Synthetic oligonucleotide
ccauagggagcuggcuccg

SEQ ID NO: 635767 - RNA, 19 nt, Artificial Sequence
  Description of Artificial Sequence: Synthetic oligonucleotide
cauccccggggcccauaug

SEQ ID NO: 635768 - RNA, 19 nt, Artificial Sequence
  Description of Artificial Sequence: Synthetic oligonucleotide
ggcgacaaacaggcaggug

SEQ ID NO: 635769 - RNA, 19 nt, Artificial Sequence
  Description of Artificial Sequence: Synthetic oligonucleotide
gacgcacaacuugagucuu

SEQ ID NO: 635770 - RNA, 19 nt, Artificial Sequence
  Description of Artificial Sequence: Synthetic oligonucleotide
gcaucccauccccggggcc

SEQ ID NO: 635771 - RNA, 19 nt, Artificial Sequence
  Description of Artificial Sequence: Synthetic oligonucleotide
agaggccgucacccugaau

SEQ ID NO: 635772 - RNA, 19 nt, Artificial Sequence
  Description of Artificial Sequence: Synthetic oligonucleotide
ggagggccacuaggguugg

SEQ ID NO: 635773 - RNA, 19 nt, Artificial Sequence
  Description of Artificial Sequence: Synthetic oligonucleotide
ccuaagagagaggccguca

SEQ ID NO: 635774 - RNA, 19 nt, Artificial Sequence
  Description of Artificial Sequence: Synthetic oligonucleotide
ggucuagaggcugcccguc

SEQ ID NO: 635775 - RNA, 19 nt, Artificial Sequence
  Description of Artificial Sequence: Synthetic oligonucleotide
gggcgacaugcacuaccug

SEQ ID NO: 635776 - RNA, 19 nt, Artificial Sequence
  Description of Artificial Sequence: Synthetic oligonucleotide
ggaacgcaagcgagggguc

SEQ ID NO: 635777 - RNA, 19 nt, Artificial Sequence
  Description of Artificial Sequence: Synthetic oligonucleotide
ccgaguccggcucucuguc

SEQ ID NO: 635778 - RNA, 19 nt, Artificial Sequence
  Description of Artificial Sequence: Synthetic oligonucleotide
ccgcuucacggcgacaaac

SEQ ID NO: 635779 - RNA, 19 nt, Artificial Sequence
  Description of Artificial Sequence: Synthetic oligonucleotide
cuuucguuuccggaagcuu

SEQ ID NO: 635780 - RNA, 19 nt, Artificial Sequence
  Description of Artificial Sequence: Synthetic oligonucleotide
acgcaagcgaggggucagu

SEQ ID NO: 635781 - RNA, 19 nt, Artificial Sequence
  Description of Artificial Sequence: Synthetic oligonucleotide
cgcuucacggcgacaaaca

SEQ ID NO: 635782 - RNA, 19 nt, Artificial Sequence
  Description of Artificial Sequence: Synthetic oligonucleotide
cuaugagcuggcagccuuu

SEQ ID NO: 635783 - RNA, 19 nt, Artificial Sequence
  Description of Artificial Sequence: Synthetic oligonucleotide
guguugcguggaugacauc

SEQ ID NO: 635784 - RNA, 19 nt, Artificial Sequence
  Description of Artificial Sequence: Synthetic oligonucleotide
ccgcaggccacaugagcuc

SEQ ID NO: 635785 - RNA, 19 nt, Artificial Sequence
  Description of Artificial Sequence: Synthetic oligonucleotide
ggugcggcacucagaggca

SEQ ID NO: 635786 - RNA, 19 nt, Artificial Sequence
  Description of Artificial Sequence: Synthetic oligonucleotide
cgccguuugcuccgagucc

SEQ ID NO: 635787 - RNA, 19 nt, Artificial Sequence
  Description of Artificial Sequence: Synthetic oligonucleotide
cgaucacaucccgugugag

SEQ ID NO: 635788 - RNA, 19 nt, Artificial Sequence
  Description of Artificial Sequence: Synthetic oligonucleotide
caaacacguccaccccaua

SEQ ID NO: 635789 - RNA, 19 nt, Artificial Sequence
  Description of Artificial Sequence: Synthetic oligonucleotide
gcagacgaacacaucuggu

SEQ ID NO: 635790 - RNA, 19 nt, Artificial Sequence
  Description of Artificial Sequence: Synthetic oligonucleotide
ccagcucgaucugguacac

SEQ ID NO: 635791 - RNA, 19 nt, Artificial Sequence
  Description of Artificial Sequence: Synthetic oligonucleotide
ggcguguugcguggaugac

SEQ ID NO: 635792 - RNA, 19 nt, Artificial Sequence
  Description of Artificial Sequence: Synthetic oligonucleotide
cguguugcguggaugacau

SEQ ID NO: 635793 - RNA, 19 nt, Artificial Sequence
  Description of Artificial Sequence: Synthetic oligonucleotide
caggugcacgagcucuucu

SEQ ID NO: 635794 - RNA, 19 nt, Artificial Sequence
  Description of Artificial Sequence: Synthetic oligonucleotide
cggcguguugcguggauga

SEQ ID NO: 635795 - RNA, 19 nt, Artificial Sequence
  Description of Artificial Sequence: Synthetic oligonucleotide
caggggcacaggugcacgu

SEQ ID NO: 635796 - RNA, 19 nt, Artificial Sequence
  Description of Artificial Sequence: Synthetic oligonucleotide
ggccuugaggguccacgua

SEQ ID NO: 635797 - RNA, 19 nt, Artificial Sequence
  Description of Artificial Sequence: Synthetic oligonucleotide
guguugccuuacggcugug

SEQ ID NO: 635798 - RNA, 19 nt, Artificial Sequence
  Description of Artificial Sequence: Synthetic oligonucleotide
ccgucacccugaauauaca

SEQ ID NO: 635799 - RNA, 19 nt, Artificial Sequence
  Description of Artificial Sequence: Synthetic oligonucleotide
ccggaagcuugacaucgaa

SEQ ID NO: 635800 - RNA, 19 nt, Artificial Sequence
  Description of Artificial Sequence: Synthetic oligonucleotide
ccgguucuuauggaggaua

SEQ ID NO: 635801 - RNA, 19 nt, Artificial Sequence
  Description of Artificial Sequence: Synthetic oligonucleotide
ccggccgcacaggaggaug

SEQ ID NO: 635802 - RNA, 19 nt, Artificial Sequence
  Description of Artificial Sequence: Synthetic oligonucleotide
ccaugguacgcacgucaaa

SEQ ID NO: 635803 - RNA, 19 nt, Artificial Sequence
  Description of Artificial Sequence: Synthetic oligonucleotide
caccaacaacguggcacaa

SEQ ID NO: 635804 - RNA, 19 nt, Artificial Sequence
  Description of Artificial Sequence: Synthetic oligonucleotide
ccgccucaggccgaugguc

SEQ ID NO: 635805 - RNA, 19 nt, Artificial Sequence
  Description of Artificial Sequence: Synthetic oligonucleotide
guacugucguaggccuccu

SEQ ID NO: 635806 - RNA, 19 nt, Artificial Sequence
  Description of Artificial Sequence: Synthetic oligonucleotide
cccauacucgcuguacacu

SEQ ID NO: 635807 - RNA, 19 nt, Artificial Sequence
  Description of Artificial Sequence: Synthetic oligonucleotide
ccuuucguuuccggaagcu

SEQ ID NO: 635808 - RNA, 19 nt, Artificial Sequence
  Description of Artificial Sequence: Synthetic oligonucleotide
gccgcuucacggcgacaaa

SEQ ID NO: 635809 - RNA, 19 nt, Artificial Sequence
  Description of Artificial Sequence: Synthetic oligonucleotide
ccggggcccauaugagcca

SEQ ID NO: 635810 - RNA, 19 nt, Artificial Sequence
  Description of Artificial Sequence: Synthetic oligonucleotide
ggucggguuggagaucauu

SEQ ID NO: 635811 - RNA, 19 nt, Artificial Sequence
  Description of Artificial Sequence: Synthetic oligonucleotide
cucggcguguugcguggau

SEQ ID NO: 635812 - RNA, 19 nt, Artificial Sequence
  Description of Artificial Sequence: Synthetic oligonucleotide
cggaguucaaaggucguau

SEQ ID NO: 635813 - RNA, 19 nt, Artificial Sequence
  Description of Artificial Sequence: Synthetic oligonucleotide
ggaucccaacccacuuccu

SEQ ID NO: 635814 - RNA, 19 nt, Artificial Sequence
  Description of Artificial Sequence: Synthetic oligonucleotide
caugcacuaccuggcucuu

SEQ ID NO: 635815 - RNA, 19 nt, Artificial Sequence
  Description of Artificial Sequence: Synthetic oligonucleotide
cguauccgccucaggccga

SEQ ID NO: 635816 - RNA, 19 nt, Artificial Sequence
  Description of Artificial Sequence: Synthetic oligonucleotide
cagcgagaacggucuugau

SEQ ID NO: 635817 - RNA, 19 nt, Artificial Sequence
  Description of Artificial Sequence: Synthetic oligonucleotide
ggccuuccauagggagcug

SEQ ID NO: 635818 - RNA, 19 nt, Artificial Sequence
  Description of Artificial Sequence: Synthetic oligonucleotide
cgaguccggcucucuguca

SEQ ID NO: 635819 - RNA, 19 nt, Artificial Sequence
  Description of Artificial Sequence: Synthetic oligonucleotide
ccugggcgacaugcacuac

SEQ ID NO: 635820 - RNA, 19 nt, Artificial Sequence
  Description of Artificial Sequence: Synthetic oligonucleotide
cgauugccaccaacaacgu

SEQ ID NO: 635821 - RNA, 19 nt, Artificial Sequence
  Description of Artificial Sequence: Synthetic oligonucleotide
cguuugcuccgaguccgca

SEQ ID NO: 635822 - RNA, 19 nt, Artificial Sequence
  Description of Artificial Sequence: Synthetic oligonucleotide
cgacaugcacuaccuggcu

SEQ ID NO: 635823 - RNA, 19 nt, Artificial Sequence
  Description of Artificial Sequence: Synthetic oligonucleotide
cagccgcuucacggcgaca

SEQ ID NO: 635824 - RNA, 19 nt, Artificial Sequence
  Description of Artificial Sequence: Synthetic oligonucleotide
ccacuaggguuggagcuau

SEQ ID NO: 635825 - RNA, 19 nt, Artificial Sequence
  Description of Artificial Sequence: Synthetic oligonucleotide
cacuaggguuggagcuauu

SEQ ID NO: 635826 - RNA, 19 nt, Artificial Sequence
  Description of Artificial Sequence: Synthetic oligonucleotide
ggucgggaucagacaugcu

SEQ ID NO: 635827 - RNA, 19 nt, Artificial Sequence
  Description of Artificial Sequence: Synthetic oligonucleotide
cuccggccuugagggucca

SEQ ID NO: 635828 - RNA, 19 nt, Artificial Sequence
  Description of Artificial Sequence: Synthetic oligonucleotide
cggccuugaggguccacgu

SEQ ID NO: 635829 - RNA, 19 nt, Artificial Sequence
  Description of Artificial Sequence: Synthetic oligonucleotide
cagcagcgagaacggucuu

SEQ ID NO: 635830 - RNA, 19 nt, Artificial Sequence
  Description of Artificial Sequence: Synthetic oligonucleotide
ccauccccggggcccauau

SEQ ID NO: 635831 - RNA, 19 nt, Artificial Sequence
  Description of Artificial Sequence: Synthetic oligonucleotide
cguccaccccauacucgcu

SEQ ID NO: 635832 - RNA, 19 nt, Artificial Sequence
  Description of Artificial Sequence: Synthetic oligonucleotide
gcgugaccuccggccuuga

SEQ ID NO: 635833 - RNA, 19 nt, Artificial Sequence
  Description of Artificial Sequence: Synthetic oligonucleotide
cguggcggcuccggccgca

SEQ ID NO: 635834 - RNA, 19 nt, Artificial Sequence
  Description of Artificial Sequence: Synthetic oligonucleotide
cggcgacaaacaggcaggu

SEQ ID NO: 635835 - RNA, 19 nt, Artificial Sequence
  Description of Artificial Sequence: Synthetic oligonucleotide
ucuauugaaauuucgcugg

SEQ ID NO: 635836 - RNA, 19 nt, Artificial Sequence
  Description of Artificial Sequence: Synthetic oligonucleotide
ugaguuaucuauaaggucu

SEQ ID NO: 635837 - RNA, 19 nt, Artificial Sequence
  Description of Artificial Sequence: Synthetic oligonucleotide
acagcaugcucuuauaucc

SEQ ID NO: 635838 - RNA, 19 nt, Artificial Sequence
  Description of Artificial Sequence: Synthetic oligonucleotide
aauagggacuaccucaaac

SEQ ID NO: 635839 - RNA, 19 nt, Artificial Sequence
  Description of Artificial Sequence: Synthetic oligonucleotide
uuggcuacaacauagguga

SEQ ID NO: 635840 - RNA, 19 nt, Artificial Sequence
  Description of Artificial Sequence: Synthetic oligonucleotide
uacuaggugguguagaugg

SEQ ID NO: 635841 - RNA, 19 nt, Artificial Sequence
  Description of Artificial Sequence: Synthetic oligonucleotide
auagggacuaccucaaacc

SEQ ID NO: 635842 - RNA, 19 nt, Artificial Sequence
  Description of Artificial Sequence: Synthetic oligonucleotide
uuuggaagaggcaauaaca

SEQ ID NO: 635843 - RNA, 19 nt, Artificial Sequence
  Description of Artificial Sequence: Synthetic oligonucleotide
aagucagugacugagguuc

SEQ ID NO: 635844 - RNA, 19 nt, Artificial Sequence
  Description of Artificial Sequence: Synthetic oligonucleotide
uuuagccugaacuucaacc

SEQ ID NO: 635845 - RNA, 19 nt, Artificial Sequence
  Description of Artificial Sequence: Synthetic oligonucleotide
uauugacucauccucauca

SEQ ID NO: 635846 - RNA, 19 nt, Artificial Sequence
  Description of Artificial Sequence: Synthetic oligonucleotide
auagaugucauccguuggc

SEQ ID NO: 635847 - RNA, 19 nt, Artificial Sequence
  Description of Artificial Sequence: Synthetic oligonucleotide
ucaucuauugaaauuucgc

SEQ ID NO: 635848 - RNA, 19 nt, Artificial Sequence
  Description of Artificial Sequence: Synthetic oligonucleotide
aaaauucgauguuucacug

SEQ ID NO: 635849 - RNA, 19 nt, Artificial Sequence
  Description of Artificial Sequence: Synthetic oligonucleotide
uccuuaaaggcaaacuuag

SEQ ID NO: 635850 - RNA, 19 nt, Artificial Sequence
  Description of Artificial Sequence: Synthetic oligonucleotide
aaugcguaccgguugaaug

SEQ ID NO: 635851 - RNA, 19 nt, Artificial Sequence
  Description of Artificial Sequence: Synthetic oligonucleotide
uuacugucaaccuugucag

SEQ ID NO: 635852 - RNA, 19 nt, Artificial Sequence
  Description of Artificial Sequence: Synthetic oligonucleotide
aaaggcaaacuuaggaucg

SEQ ID NO: 635853 - RNA, 19 nt, Artificial Sequence
  Description of Artificial Sequence: Synthetic oligonucleotide
gaaaacaaccaccacgggc

SEQ ID NO: 635854 - RNA, 19 nt, Artificial Sequence
  Description of Artificial Sequence: Synthetic oligonucleotide
aaugaguuaucuauaaggu

SEQ ID NO: 635855 - RNA, 19 nt, Artificial Sequence
  Description of Artificial Sequence: Synthetic oligonucleotide
aaauucgauguuucacugg

SEQ ID NO: 635856 - RNA, 19 nt, Artificial Sequence
  Description of Artificial Sequence: Synthetic oligonucleotide
ucuuguagagacuucgcag

SEQ ID NO: 635857 - RNA, 19 nt, Artificial Sequence
  Description of Artificial Sequence: Synthetic oligonucleotide
aguugugccaccuuuucuc

SEQ ID NO: 635858 - RNA, 19 nt, Artificial Sequence
  Description of Artificial Sequence: Synthetic oligonucleotide
uuaucuauaaggucucucu

SEQ ID NO: 635859 - RNA, 19 nt, Artificial Sequence
  Description of Artificial Sequence: Synthetic oligonucleotide
uuugucaccaacucgguaa

SEQ ID NO: 635860 - RNA, 19 nt, Artificial Sequence
  Description of Artificial Sequence: Synthetic oligonucleotide
auaaagagugaggucaccc

SEQ ID NO: 635861 - RNA, 19 nt, Artificial Sequence
  Description of Artificial Sequence: Synthetic oligonucleotide
auuaaaugcguaccgguug

SEQ ID NO: 635862 - RNA, 19 nt, Artificial Sequence
  Description of Artificial Sequence: Synthetic oligonucleotide
aauagaaaccccaggcagg

SEQ ID NO: 635863 - RNA, 19 nt, Artificial Sequence
  Description of Artificial Sequence: Synthetic oligonucleotide
uguuacuuccucuagcaac

SEQ ID NO: 635864 - RNA, 19 nt, Artificial Sequence
  Description of Artificial Sequence: Synthetic oligonucleotide
gaauuuacugucaaccuug

SEQ ID NO: 635865 - RNA, 19 nt, Artificial Sequence
  Description of Artificial Sequence: Synthetic oligonucleotide
agagacuucgcaguugugc

SEQ ID NO: 635866 - RNA, 19 nt, Artificial Sequence
  Description of Artificial Sequence: Synthetic oligonucleotide
acuaccuugaauugaccuc

SEQ ID NO: 635867 - RNA, 19 nt, Artificial Sequence
  Description of Artificial Sequence: Synthetic oligonucleotide
uuuuggaagaggcaauaac

SEQ ID NO: 635868 - RNA, 19 nt, Artificial Sequence
  Description of Artificial Sequence: Synthetic oligonucleotide
ucaguagagaccuuaguuc

SEQ ID NO: 635869 - RNA, 19 nt, Artificial Sequence
  Description of Artificial Sequence: Synthetic oligonucleotide
uguccugacagcaugcucu

SEQ ID NO: 635870 - RNA, 19 nt, Artificial Sequence
  Description of Artificial Sequence: Synthetic oligonucleotide
gaucgaagaauuuacuguc

SEQ ID NO: 635871 - RNA, 19 nt, Artificial Sequence
  Description of Artificial Sequence: Synthetic oligonucleotide
ugaaugaguuaucuauaag

SEQ ID NO: 635872 - RNA, 19 nt, Artificial Sequence
  Description of Artificial Sequence: Synthetic oligonucleotide
cucaguuguagcuggaugc

SEQ ID NO: 635873 - RNA, 19 nt, Artificial Sequence
  Description of Artificial Sequence: Synthetic oligonucleotide
gaacggaaaacuuuuguga

SEQ ID NO: 635874 - RNA, 19 nt, Artificial Sequence
  Description of Artificial Sequence: Synthetic oligonucleotide
uuagccugaacuucaaccu

SEQ ID NO: 635875 - RNA, 19 nt, Artificial Sequence
  Description of Artificial Sequence: Synthetic oligonucleotide
uauauccucaguuguagcu

SEQ ID NO: 635876 - RNA, 19 nt, Artificial Sequence
  Description of Artificial Sequence: Synthetic oligonucleotide
ugagguucggugauaaaga

SEQ ID NO: 635877 - RNA, 19 nt, Artificial Sequence
  Description of Artificial Sequence: Synthetic oligonucleotide
aacggaaaacuuuugugau

SEQ ID NO: 635878 - RNA, 19 nt, Artificial Sequence
  Description of Artificial Sequence: Synthetic oligonucleotide
uucauuaaaugcguaccgg

SEQ ID NO: 635879 - RNA, 19 nt, Artificial Sequence
  Description of Artificial Sequence: Synthetic oligonucleotide
uuuauuucccgccagcguu

SEQ ID NO: 635880 - RNA, 19 nt, Artificial Sequence
  Description of Artificial Sequence: Synthetic oligonucleotide
uuaaaugcguaccgguuga

SEQ ID NO: 635881 - RNA, 19 nt, Artificial Sequence
  Description of Artificial Sequence: Synthetic oligonucleotide
aacucgguaacaguuuuag

SEQ ID NO: 635882 - RNA, 19 nt, Artificial Sequence
  Description of Artificial Sequence: Synthetic oligonucleotide
ucggugauaaagagugagg

SEQ ID NO: 635883 - RNA, 19 nt, Artificial Sequence
  Description of Artificial Sequence: Synthetic oligonucleotide
ucauuaaaugcguaccggu

SEQ ID NO: 635884 - RNA, 19 nt, Artificial Sequence
  Description of Artificial Sequence: Synthetic oligonucleotide
ucugagauauccacagugu

SEQ ID NO: 635885 - RNA, 19 nt, Artificial Sequence
  Description of Artificial Sequence: Synthetic oligonucleotide
ugcagauucauggcgagag

SEQ ID NO: 635886 - RNA, 19 nt, Artificial Sequence
  Description of Artificial Sequence: Synthetic oligonucleotide
gugauaaagagugagguca

SEQ ID NO: 635887 - RNA, 19 nt, Artificial Sequence
  Description of Artificial Sequence: Synthetic oligonucleotide
aaacaaccaccacgggccc

SEQ ID NO: 635888 - RNA, 19 nt, Artificial Sequence
  Description of Artificial Sequence: Synthetic oligonucleotide
cucgcaagaagucagugac

SEQ ID NO: 635889 - RNA, 19 nt, Artificial Sequence
  Description of Artificial Sequence: Synthetic oligonucleotide
auugacucauccucaucac

SEQ ID NO: 635890 - RNA, 19 nt, Artificial Sequence
  Description of Artificial Sequence: Synthetic oligonucleotide
uucucguucugagauaucc

SEQ ID NO: 635891 - RNA, 19 nt, Artificial Sequence
  Description of Artificial Sequence: Synthetic oligonucleotide
uguagcuggaugcugugcu

SEQ ID NO: 635892 - RNA, 19 nt, Artificial Sequence
  Description of Artificial Sequence: Synthetic oligonucleotide
uucggugauaaagagugag

SEQ ID NO: 635893 - RNA, 19 nt, Artificial Sequence
  Description of Artificial Sequence: Synthetic oligonucleotide
uuuuggcuacaacauaggu

SEQ ID NO: 635894 - RNA, 19 nt, Artificial Sequence
  Description of Artificial Sequence: Synthetic oligonucleotide
aaucccacugaagccgucc

SEQ ID NO: 635895 - RNA, 19 nt, Artificial Sequence
  Description of Artificial Sequence: Synthetic oligonucleotide
cuuagggaccucauucugg

SEQ ID NO: 635896 - RNA, 19 nt, Artificial Sequence
  Description of Artificial Sequence: Synthetic oligonucleotide
ucgguaacaguuuuagccu

SEQ ID NO: 635897 - RNA, 19 nt, Artificial Sequence
  Description of Artificial Sequence: Synthetic oligonucleotide
uagggacuaccucaaaccc

SEQ ID NO: 635898 - RNA, 19 nt, Artificial Sequence
  Description of Artificial Sequence: Synthetic oligonucleotide
acgacucuugagcagcagc

SEQ ID NO: 635899 - RNA, 19 nt, Artificial Sequence
  Description of Artificial Sequence: Synthetic oligonucleotide
cuuauauccucaguuguag

SEQ ID NO: 635900 - RNA, 19 nt, Artificial Sequence
  Description of Artificial Sequence: Synthetic oligonucleotide
gguucggugauaaagagug

SEQ ID NO: 635901 - RNA, 19 nt, Artificial Sequence
  Description of Artificial Sequence: Synthetic oligonucleotide
ucaggauccaaaauucgau

SEQ ID NO: 635902 - RNA, 19 nt, Artificial Sequence
  Description of Artificial Sequence: Synthetic oligonucleotide
cuggaagauccauagcagg

SEQ ID NO: 635903 - RNA, 19 nt, Artificial Sequence
  Description of Artificial Sequence: Synthetic oligonucleotide
gaccuuaguucuuugcgcc

SEQ ID NO: 635904 - RNA, 19 nt, Artificial Sequence
  Description of Artificial Sequence: Synthetic oligonucleotide
ugaaauuucgcuggccuug

SEQ ID NO: 635905 - RNA, 19 nt, Artificial Sequence
  Description of Artificial Sequence: Synthetic oligonucleotide
cauccuagaguccacuacc

SEQ ID NO: 635906 - RNA, 19 nt, Artificial Sequence
  Description of Artificial Sequence: Synthetic oligonucleotide
ucagcuauugacucauccu

SEQ ID NO: 635907 - RNA, 19 nt, Artificial Sequence
  Description of Artificial Sequence: Synthetic oligonucleotide
uucgauguuucacuggguc

SEQ ID NO: 635908 - RNA, 19 nt, Artificial Sequence
  Description of Artificial Sequence: Synthetic oligonucleotide
acuuuugugaugaaaacaa

SEQ ID NO: 635909 - RNA, 19 nt, Artificial Sequence
  Description of Artificial Sequence: Synthetic oligonucleotide
aauucaguagagaccuuag

SEQ ID NO: 635910 - RNA, 19 nt, Artificial Sequence
  Description of Artificial Sequence: Synthetic oligonucleotide
guaauguucuacuuccuuc

SEQ ID NO: 635911 - RNA, 19 nt, Artificial Sequence
  Description of Artificial Sequence: Synthetic oligonucleotide
uucgcuugauaccacggga

SEQ ID NO: 635912 - RNA, 19 nt, Artificial Sequence
  Description of Artificial Sequence: Synthetic oligonucleotide
gcaauaacagcaccuagag

SEQ ID NO: 635913 - RNA, 19 nt, Artificial Sequence
  Description of Artificial Sequence: Synthetic oligonucleotide
ucucgaagcaauuucuuuu

SEQ ID NO: 635914 - RNA, 19 nt, Artificial Sequence
  Description of Artificial Sequence: Synthetic oligonucleotide
agaucagacagaaaugugu

SEQ ID NO: 635915 - RNA, 19 nt, Artificial Sequence
  Description of Artificial Sequence: Synthetic oligonucleotide
ugauaaagagugaggucac

SEQ ID NO: 635916 - RNA, 19 nt, Artificial Sequence
  Description of Artificial Sequence: Synthetic oligonucleotide
gagguucggugauaaagag

SEQ ID NO: 635917 - RNA, 19 nt, Artificial Sequence
  Description of Artificial Sequence: Synthetic oligonucleotide
uuauauccucaguuguagc

SEQ ID NO: 635918 - RNA, 19 nt, Artificial Sequence
  Description of Artificial Sequence: Synthetic oligonucleotide
cauagaugucauccguugg

SEQ ID NO: 635919 - RNA, 19 nt, Artificial Sequence
  Description of Artificial Sequence: Synthetic oligonucleotide
ucauccuagaguccacuac

SEQ ID NO: 635920 - RNA, 19 nt, Artificial Sequence
  Description of Artificial Sequence: Synthetic oligonucleotide
uuucgcuggccuuggaaag

SEQ ID NO: 635921 - RNA, 19 nt, Artificial Sequence
  Description of Artificial Sequence: Synthetic oligonucleotide
ucugccuuagaaccucggc

SEQ ID NO: 635922 - RNA, 19 nt, Artificial Sequence
  Description of Artificial Sequence: Synthetic oligonucleotide
ucgauguuucacugggucc

SEQ ID NO: 635923 - RNA, 19 nt, Artificial Sequence
  Description of Artificial Sequence: Synthetic oligonucleotide
acucgguaacaguuuuagc

SEQ ID NO: 635924 - RNA, 19 nt, Artificial Sequence
  Description of Artificial Sequence: Synthetic oligonucleotide
accuuaguucuuugcgccc

SEQ ID NO: 635925 - RNA, 19 nt, Artificial Sequence
  Description of Artificial Sequence: Synthetic oligonucleotide
ugucaaccuugucaggagc

SEQ ID NO: 635926 - RNA, 19 nt, Artificial Sequence
  Description of Artificial Sequence: Synthetic oligonucleotide
cacuugagcagacugcaag

SEQ ID NO: 635927 - RNA, 19 nt, Artificial Sequence
  Description of Artificial Sequence: Synthetic oligonucleotide
uccgguaauguucuacuuc

SEQ ID NO: 635928 - RNA, 19 nt, Artificial Sequence
  Description of Artificial Sequence: Synthetic oligonucleotide
gauauccacaguguucacc

SEQ ID NO: 635929 - RNA, 19 nt, Artificial Sequence
  Description of Artificial Sequence: Synthetic oligonucleotide
cucguucugagauauccac

SEQ ID NO: 635930 - RNA, 19 nt, Artificial Sequence
  Description of Artificial Sequence: Synthetic oligonucleotide
ggaacggaaaacuuuugug

SEQ ID NO: 635931 - RNA, 19 nt, Artificial Sequence
  Description of Artificial Sequence: Synthetic oligonucleotide
auaaggucucucuuugccu

SEQ ID NO: 635932 - RNA, 19 nt, Artificial Sequence
  Description of Artificial Sequence: Synthetic oligonucleotide
gaccuuacggccuacaccu

SEQ ID NO: 635933 - RNA, 19 nt, Artificial Sequence
  Description of Artificial Sequence: Synthetic oligonucleotide
ucagcauccgacacauaga

SEQ ID NO: 635934 - RNA, 19 nt, Artificial Sequence
  Description of Artificial Sequence: Synthetic oligonucleotide
guugugccaccuuuucucg

SEQ ID NO: 635935 - RNA, 19 nt, Artificial Sequence
  Description of Artificial Sequence: Synthetic oligonucleotide
uucugacgacucuugagca

SEQ ID NO: 635936 - RNA, 19 nt, Artificial Sequence
  Description of Artificial Sequence: Synthetic oligonucleotide
uguucagucuucagacuac

SEQ ID NO: 635937 - RNA, 19 nt, Artificial Sequence
  Description of Artificial Sequence: Synthetic oligonucleotide
ugugcuaacucuucaucau

SEQ ID NO: 635938 - RNA, 19 nt, Artificial Sequence
  Description of Artificial Sequence: Synthetic oligonucleotide
uuuucucguucugagauau

SEQ ID NO: 635939 - RNA, 19 nt, Artificial Sequence
  Description of Artificial Sequence: Synthetic oligonucleotide
uacgcagggaaaacaugcc

SEQ ID NO: 635940 - RNA, 19 nt, Artificial Sequence
  Description of Artificial Sequence: Synthetic oligonucleotide
ucugacgacucuugagcag

SEQ ID NO: 635941 - RNA, 19 nt, Artificial Sequence
  Description of Artificial Sequence: Synthetic oligonucleotide
ugacugaucuccagggccu

SEQ ID NO: 635942 - RNA, 19 nt, Artificial Sequence
  Description of Artificial Sequence: Synthetic oligonucleotide
uuucccgccagcguuuccg

SEQ ID NO: 635943 - RNA, 19 nt, Artificial Sequence
  Description of Artificial Sequence: Synthetic oligonucleotide
ugcguuuauuucccgccag

SEQ ID NO: 635944 - RNA, 19 nt, Artificial Sequence
  Description of Artificial Sequence: Synthetic oligonucleotide
gaaauuucgcuggccuugg

SEQ ID NO: 635945 - RNA, 19 nt, Artificial Sequence
  Description of Artificial Sequence: Synthetic oligonucleotide
uauugaaauuucgcuggcc

SEQ ID NO: 635946 - RNA, 19 nt, Artificial Sequence
  Description of Artificial Sequence: Synthetic oligonucleotide
cuucgcuugauaccacggg

SEQ ID NO: 635947 - RNA, 19 nt, Artificial Sequence
  Description of Artificial Sequence: Synthetic oligonucleotide
caggauccaaaauucgaug

SEQ ID NO: 635948 - RNA, 19 nt, Artificial Sequence
  Description of Artificial Sequence: Synthetic oligonucleotide
uucuucuagugguaccagc

SEQ ID NO: 635949 - RNA, 19 nt, Artificial Sequence
  Description of Artificial Sequence: Synthetic oligonucleotide
ucguucugagauauccaca

SEQ ID NO: 635950 - RNA, 19 nt, Artificial Sequence
  Description of Artificial Sequence: Synthetic oligonucleotide
augcguaccgguugaauga

SEQ ID NO: 635951 - RNA, 19 nt, Artificial Sequence
  Description of Artificial Sequence: Synthetic oligonucleotide
accgccgaaguuuuguucu

SEQ ID NO: 635952 - RNA, 19 nt, Artificial Sequence
  Description of Artificial Sequence: Synthetic oligonucleotide
cuauugaaauuucgcuggc

SEQ ID NO: 635953 - RNA, 19 nt, Artificial Sequence
  Description of Artificial Sequence: Synthetic oligonucleotide
uuuuggccacauaccgccg

SEQ ID NO: 635954 - RNA, 19 nt, Artificial Sequence
  Description of Artificial Sequence: Synthetic oligonucleotide
guuucuccuugccaagucc

SEQ ID NO: 635955 - RNA, 19 nt, Artificial Sequence
  Description of Artificial Sequence: Synthetic oligonucleotide
acggaaaacuuuugugaug

SEQ ID NO: 635956 - RNA, 19 nt, Artificial Sequence
  Description of Artificial Sequence: Synthetic oligonucleotide
caaaauucgauguuucacu

SEQ ID NO: 635957 - RNA, 19 nt, Artificial Sequence
  Description of Artificial Sequence: Synthetic oligonucleotide
ucggcuucgcuugauacca

SEQ ID NO: 635958 - RNA, 19 nt, Artificial Sequence
  Description of Artificial Sequence: Synthetic oligonucleotide
acugucaaccuugucagga

SEQ ID NO: 635959 - RNA, 19 nt, Artificial Sequence
  Description of Artificial Sequence: Synthetic oligonucleotide
cauccacuugagcagacug

SEQ ID NO: 635960 - RNA, 19 nt, Artificial Sequence
  Description of Artificial Sequence: Synthetic oligonucleotide
uauccggugcugcuucucc

SEQ ID NO: 635961 - RNA, 19 nt, Artificial Sequence
  Description of Artificial Sequence: Synthetic oligonucleotide
caacauaggugaccuggcg

SEQ ID NO: 635962 - RNA, 19 nt, Artificial Sequence
  Description of Artificial Sequence: Synthetic oligonucleotide
cugcaauagaaaccccagg

SEQ ID NO: 635963 - RNA, 19 nt, Artificial Sequence
  Description of Artificial Sequence: Synthetic oligonucleotide
auauccucaguuguagcug

SEQ ID NO: 635964 - RNA, 19 nt, Artificial Sequence
  Description of Artificial Sequence: Synthetic oligonucleotide
acuacuaggugguguagau

SEQ ID NO: 635965 - RNA, 19 nt, Artificial Sequence
  Description of Artificial Sequence: Synthetic oligonucleotide
gagccagaaacccuuggca

SEQ ID NO: 635966 - RNA, 19 nt, Artificial Sequence
  Description of Artificial Sequence: Synthetic oligonucleotide
uaccgguugaaugaguuau

SEQ ID NO: 635967 - RNA, 19 nt, Artificial Sequence
  Description of Artificial Sequence: Synthetic oligonucleotide
gaauugaccucugacucca

SEQ ID NO: 635968 - RNA, 19 nt, Artificial Sequence
  Description of Artificial Sequence: Synthetic oligonucleotide
aaccuccuuaaaggcaaac

SEQ ID NO: 635969 - RNA, 19 nt, Artificial Sequence
  Description of Artificial Sequence: Synthetic oligonucleotide
aguuuuagccugaacuuca

SEQ ID NO: 635970 - RNA, 19 nt, Artificial Sequence
  Description of Artificial Sequence: Synthetic oligonucleotide
uugucaccaacucgguaac

SEQ ID NO: 635971 - RNA, 19 nt, Artificial Sequence
  Description of Artificial Sequence: Synthetic oligonucleotide
ucagacuacuagguggugu

SEQ ID NO: 635972 - RNA, 19 nt, Artificial Sequence
  Description of Artificial Sequence: Synthetic oligonucleotide
ccgguaauguucuacuucc

SEQ ID NO: 635973 - RNA, 19 nt, Artificial Sequence
  Description of Artificial Sequence: Synthetic oligonucleotide
acauaggugaccuggcguu

SEQ ID NO: 635974 - RNA, 19 nt, Artificial Sequence
  Description of Artificial Sequence: Synthetic oligonucleotide
caucaucuauugaaauuuc

SEQ ID NO: 635975 - RNA, 19 nt, Artificial Sequence
  Description of Artificial Sequence: Synthetic oligonucleotide
agucacgggaacggaaaac

SEQ ID NO: 635976 - RNA, 19 nt, Artificial Sequence
  Description of Artificial Sequence: Synthetic oligonucleotide
gcauccgacacauagaugu

SEQ ID NO: 635977 - RNA, 19 nt, Artificial Sequence
  Description of Artificial Sequence: Synthetic oligonucleotide
aguucuacucgcucccgcu

SEQ ID NO: 635978 - RNA, 19 nt, Artificial Sequence
  Description of Artificial Sequence: Synthetic oligonucleotide
auagaaaccccaggcaggu

SEQ ID NO: 635979 - RNA, 19 nt, Artificial Sequence
  Description of Artificial Sequence: Synthetic oligonucleotide
uccgacacauagaugucau

SEQ ID NO: 635980 - RNA, 19 nt, Artificial Sequence
  Description of Artificial Sequence: Synthetic oligonucleotide
ugucucagcuauugacuca

SEQ ID NO: 635981 - RNA, 19 nt, Artificial Sequence
  Description of Artificial Sequence: Synthetic oligonucleotide
cucggcuucgcuugauacc

SEQ ID NO: 635982 - RNA, 19 nt, Artificial Sequence
  Description of Artificial Sequence: Synthetic oligonucleotide
ggaagauccauagcagggg

SEQ ID NO: 635983 - RNA, 19 nt, Artificial Sequence
  Description of Artificial Sequence: Synthetic oligonucleotide
ugcaagcacuuccuguccu

SEQ ID NO: 635984 - RNA, 19 nt, Artificial Sequence
  Description of Artificial Sequence: Synthetic oligonucleotide
aagagugaggucacccuca

SEQ ID NO: 635985 - RNA, 19 nt, Artificial Sequence
  Description of Artificial Sequence: Synthetic oligonucleotide
ucgcuugauaccacgggau

SEQ ID NO: 635986 - RNA, 19 nt, Artificial Sequence
  Description of Artificial Sequence: Synthetic oligonucleotide
uagugguaccagcaaugga

SEQ ID NO: 635987 - RNA, 19 nt, Artificial Sequence
  Description of Artificial Sequence: Synthetic oligonucleotide
uggccgccggaccuuacgg

SEQ ID NO: 635988 - RNA, 19 nt, Artificial Sequence
  Description of Artificial Sequence: Synthetic oligonucleotide
uguugugcucucugguccu

SEQ ID NO: 635989 - RNA, 19 nt, Artificial Sequence
  Description of Artificial Sequence: Synthetic oligonucleotide
ccuucaggauccaaaauuc

SEQ ID NO: 635990 - RNA, 19 nt, Artificial Sequence
  Description of Artificial Sequence: Synthetic oligonucleotide
uugaaauuucgcuggccuu

SEQ ID NO: 635991 - RNA, 19 nt, Artificial Sequence
  Description of Artificial Sequence: Synthetic oligonucleotide
uuuugaugggccgugcguu

SEQ ID NO: 635992 - RNA, 19 nt, Artificial Sequence
  Description of Artificial Sequence: Synthetic oligonucleotide
cuuguagagacuucgcagu

SEQ ID NO: 635993 - RNA, 19 nt, Artificial Sequence
  Description of Artificial Sequence: Synthetic oligonucleotide
aguuguagcuggaugcugu

SEQ ID NO: 635994 - RNA, 19 nt, Artificial Sequence
  Description of Artificial Sequence: Synthetic oligonucleotide
ggaucgaagaauuuacugu

SEQ ID NO: 635995 - RNA, 19 nt, Artificial Sequence
  Description of Artificial Sequence: Synthetic oligonucleotide
uuauuucccgccagcguuu

SEQ ID NO: 635996 - RNA, 19 nt, Artificial Sequence
  Description of Artificial Sequence: Synthetic oligonucleotide
cuuggagaaccacagguua

SEQ ID NO: 635997 - RNA, 19 nt, Artificial Sequence
  Description of Artificial Sequence: Synthetic oligonucleotide
cuugccaaguccagccuuc

SEQ ID NO: 635998 - RNA, 19 nt, Artificial Sequence
  Description of Artificial Sequence: Synthetic oligonucleotide
gaguuaucuauaaggucuc

SEQ ID NO: 635999 - RNA, 19 nt, Artificial Sequence
  Description of Artificial Sequence: Synthetic oligonucleotide
guucuuugcgccccagaac

SEQ ID NO: 636000 - RNA, 19 nt, Artificial Sequence
  Description of Artificial Sequence: Synthetic oligonucleotide
guuuccgguaauguucuac

SEQ ID NO: 636001 - RNA, 19 nt, Artificial Sequence
  Description of Artificial Sequence: Synthetic oligonucleotide
auccguuggcagaucagac

SEQ ID NO: 636002 - RNA, 19 nt, Artificial Sequence
  Description of Artificial Sequence: Synthetic oligonucleotide
cuucguggccuggacacgg

SEQ ID NO: 636003 - RNA, 19 nt, Artificial Sequence
  Description of Artificial Sequence: Synthetic oligonucleotide
agaaaugugucugcagcau

SEQ ID NO: 636004 - RNA, 19 nt, Artificial Sequence
  Description of Artificial Sequence: Synthetic oligonucleotide
cauggcgagaggccugggg

SEQ ID NO: 636005 - RNA, 19 nt, Artificial Sequence
  Description of Artificial Sequence: Synthetic oligonucleotide
caggucacuuuccagagaa

SEQ ID NO: 636006 - RNA, 19 nt, Artificial Sequence
  Description of Artificial Sequence: Synthetic oligonucleotide
cuuagaaccucggcuucgc

SEQ ID NO: 636007 - RNA, 19 nt, Artificial Sequence
  Description of Artificial Sequence: Synthetic oligonucleotide
aaaugcguaccgguugaau

SEQ ID NO: 636008 - RNA, 19 nt, Artificial Sequence
  Description of Artificial Sequence: Synthetic oligonucleotide
ugcguaccgguugaaugag

SEQ ID NO: 636009 - RNA, 19 nt, Artificial Sequence
  Description of Artificial Sequence: Synthetic oligonucleotide
ucgcaagaagucagugacu

SEQ ID NO: 636010 - RNA, 19 nt, Artificial Sequence
  Description of Artificial Sequence: Synthetic oligonucleotide
cagugacugagguucggug

SEQ ID NO: 636011 - RNA, 19 nt, Artificial Sequence
  Description of Artificial Sequence: Synthetic oligonucleotide
ggaccuuacggccuacacc

SEQ ID NO: 636012 - RNA, 19 nt, Artificial Sequence
  Description of Artificial Sequence: Synthetic oligonucleotide
aagauccauagcaggggcu

SEQ ID NO: 636013 - RNA, 19 nt, Artificial Sequence
  Description of Artificial Sequence: Synthetic oligonucleotide
agcauucaugucuccuugu

SEQ ID NO: 636014 - RNA, 19 nt, Artificial Sequence
  Description of Artificial Sequence: Synthetic oligonucleotide
gacuucgcaguugugccac

SEQ ID NO: 636015 - RNA, 19 nt, Artificial Sequence
  Description of Artificial Sequence: Synthetic oligonucleotide
cugccagcucuucugaauc

SEQ ID NO: 636016 - RNA, 19 nt, Artificial Sequence
  Description of Artificial Sequence: Synthetic oligonucleotide
ccuugaauugaccucugac

SEQ ID NO: 636017 - RNA, 19 nt, Artificial Sequence
  Description of Artificial Sequence: Synthetic oligonucleotide
aaauuucgcuggccuugga

SEQ ID NO: 636018 - RNA, 19 nt, Artificial Sequence
  Description of Artificial Sequence: Synthetic oligonucleotide
uagucacgggaacggaaaa

SEQ ID NO: 636019 - RNA, 19 nt, Artificial Sequence
  Description of Artificial Sequence: Synthetic oligonucleotide
ccguuggcagaucagacag

SEQ ID NO: 636020 - RNA, 19 nt, Artificial Sequence
  Description of Artificial Sequence: Synthetic oligonucleotide
uuagaaccucggcuucgcu

SEQ ID NO: 636021 - RNA, 19 nt, Artificial Sequence
  Description of Artificial Sequence: Synthetic oligonucleotide
caguagagaccuuaguucu

SEQ ID NO: 636022 - RNA, 19 nt, Artificial Sequence
  Description of Artificial Sequence: Synthetic oligonucleotide
ugggccgugcguuuauuuc

SEQ ID NO: 636023 - RNA, 19 nt, Artificial Sequence
  Description of Artificial Sequence: Synthetic oligonucleotide
gauagucacgggaacggaa

SEQ ID NO: 636024 - RNA, 19 nt, Artificial Sequence
  Description of Artificial Sequence: Synthetic oligonucleotide
agcuauugacucauccuca

SEQ ID NO: 636025 - RNA, 19 nt, Artificial Sequence
  Description of Artificial Sequence: Synthetic oligonucleotide
ugacgacucuugagcagca

SEQ ID NO: 636026 - RNA, 19 nt, Artificial Sequence
  Description of Artificial Sequence: Synthetic oligonucleotide
aaggcaaacuuaggaucga

SEQ ID NO: 636027 - RNA, 19 nt, Artificial Sequence
  Description of Artificial Sequence: Synthetic oligonucleotide
cugcaagcacuuccugucc

SEQ ID NO: 636028 - RNA, 19 nt, Artificial Sequence
  Description of Artificial Sequence: Synthetic oligonucleotide
agacuucgcaguugugcca

SEQ ID NO: 636029 - RNA, 19 nt, Artificial Sequence
  Description of Artificial Sequence: Synthetic oligonucleotide
ucugcucacuuccgcuugu

SEQ ID NO: 636030 - RNA, 19 nt, Artificial Sequence
  Description of Artificial Sequence: Synthetic oligonucleotide
auagucacgggaacggaaa

SEQ ID NO: 636031 - RNA, 19 nt, Artificial Sequence
  Description of Artificial Sequence: Synthetic oligonucleotide
ugcucacuuccgcuugugu

SEQ ID NO: 636032 - RNA, 19 nt, Artificial Sequence
  Description of Artificial Sequence: Synthetic oligonucleotide
ucacgggaacggaaaacuu

SEQ ID NO: 636033 - RNA, 19 nt, Artificial Sequence
  Description of Artificial Sequence: Synthetic oligonucleotide
gucacuuuccagagaaguc

SEQ ID NO: 636034 - RNA, 19 nt, Artificial Sequence
  Description of Artificial Sequence: Synthetic oligonucleotide
gacuacuaggugguguaga

SEQ ID NO: 636035 - RNA, 19 nt, Artificial Sequence
  Description of Artificial Sequence: Synthetic oligonucleotide
cgcagggaaaacaugcccg

SEQ ID NO: 636036 - RNA, 19 nt, Artificial Sequence
  Description of Artificial Sequence: Synthetic oligonucleotide
uuucagcauccuccguuuc

SEQ ID NO: 636037 - RNA, 19 nt, Artificial Sequence
  Description of Artificial Sequence: Synthetic oligonucleotide
cucuuauauccucaguugu

SEQ ID NO: 636038 - RNA, 19 nt, Artificial Sequence
  Description of Artificial Sequence: Synthetic oligonucleotide
uuugaugggccgugcguuu

SEQ ID NO: 636039 - RNA, 19 nt, Artificial Sequence
  Description of Artificial Sequence: Synthetic oligonucleotide
auccgacacauagauguca

SEQ ID NO: 636040 - RNA, 19 nt, Artificial Sequence
  Description of Artificial Sequence: Synthetic oligonucleotide
ucgcaguugugccaccuuu

SEQ ID NO: 636041 - RNA, 19 nt, Artificial Sequence
  Description of Artificial Sequence: Synthetic oligonucleotide
ggcuucgcuugauaccacg

SEQ ID NO: 636042 - RNA, 19 nt, Artificial Sequence
  Description of Artificial Sequence: Synthetic oligonucleotide
uaccgccgaaguuuuguuc

SEQ ID NO: 636043 - RNA, 19 nt, Artificial Sequence
  Description of Artificial Sequence: Synthetic oligonucleotide
caguucuacucgcucccgc

SEQ ID NO: 636044 - RNA, 19 nt, Artificial Sequence
  Description of Artificial Sequence: Synthetic oligonucleotide
uagagacuucgcaguugug

SEQ ID NO: 636045 - RNA, 19 nt, Artificial Sequence
  Description of Artificial Sequence: Synthetic oligonucleotide
cagcaccuagagcaaggcc

SEQ ID NO: 636046 - RNA, 19 nt, Artificial Sequence
  Description of Artificial Sequence: Synthetic oligonucleotide
gucauccguuggcagauca

SEQ ID NO: 636047 - RNA, 19 nt, Artificial Sequence
  Description of Artificial Sequence: Synthetic oligonucleotide
augcucuuauauccucagu

SEQ ID NO: 636048 - RNA, 19 nt, Artificial Sequence
  Description of Artificial Sequence: Synthetic oligonucleotide
ccuucugacgacucuugag

SEQ ID NO: 636049 - RNA, 19 nt, Artificial Sequence
  Description of Artificial Sequence: Synthetic oligonucleotide
gggccgugcguuuauuucc

SEQ ID NO: 636050 - RNA, 19 nt, Artificial Sequence
  Description of Artificial Sequence: Synthetic oligonucleotide
cacuaccuugaauugaccu

SEQ ID NO: 636051 - RNA, 19 nt, Artificial Sequence
  Description of Artificial Sequence: Synthetic oligonucleotide
gaggcaauaacagcaccua

SEQ ID NO: 636052 - RNA, 19 nt, Artificial Sequence
  Description of Artificial Sequence: Synthetic oligonucleotide
cauccgacacauagauguc

SEQ ID NO: 636053 - RNA, 19 nt, Artificial Sequence
  Description of Artificial Sequence: Synthetic oligonucleotide
aguuaucuauaaggucucu

SEQ ID NO: 636054 - RNA, 19 nt, Artificial Sequence
  Description of Artificial Sequence: Synthetic oligonucleotide
gaaccacagguuagcuugc

SEQ ID NO: 636055 - RNA, 19 nt, Artificial Sequence
  Description of Artificial Sequence: Synthetic oligonucleotide
agucagugacugagguucg

SEQ ID NO: 636056 - RNA, 19 nt, Artificial Sequence
  Description of Artificial Sequence: Synthetic oligonucleotide
gcuugauaccacgggaugc

SEQ ID NO: 636057 - RNA, 19 nt, Artificial Sequence
  Description of Artificial Sequence: Synthetic oligonucleotide
cuacuaggugguguagaug

SEQ ID NO: 636058 - RNA, 19 nt, Artificial Sequence
  Description of Artificial Sequence: Synthetic oligonucleotide
uccuagaguccacuaccuu

SEQ ID NO: 636059 - RNA, 19 nt, Artificial Sequence
  Description of Artificial Sequence: Synthetic oligonucleotide
uuccgguaauguucuacuu

SEQ ID NO: 636060 - RNA, 19 nt, Artificial Sequence
  Description of Artificial Sequence: Synthetic oligonucleotide
guuuauuucccgccagcgu

SEQ ID NO: 636061 - RNA, 19 nt, Artificial Sequence
  Description of Artificial Sequence: Synthetic oligonucleotide
cucuagcaacugcugcccc

SEQ ID NO: 636062 - RNA, 19 nt, Artificial Sequence
  Description of Artificial Sequence: Synthetic oligonucleotide
uugugccaccuuuucucgu

SEQ ID NO: 636063 - RNA, 19 nt, Artificial Sequence
  Description of Artificial Sequence: Synthetic oligonucleotide
agcucgcaagaagucagug

SEQ ID NO: 636064 - RNA, 19 nt, Artificial Sequence
  Description of Artificial Sequence: Synthetic oligonucleotide
aaugggcagcuggcguauc

SEQ ID NO: 636065 - RNA, 19 nt, Artificial Sequence
  Description of Artificial Sequence: Synthetic oligonucleotide
cagacuacuagguggugua

SEQ ID NO: 636066 - RNA, 19 nt, Artificial Sequence
  Description of Artificial Sequence: Synthetic oligonucleotide
agggacuaccucaaaccca

SEQ ID NO: 636067 - RNA, 19 nt, Artificial Sequence
  Description of Artificial Sequence: Synthetic oligonucleotide
ggcuacaacauaggugacc

SEQ ID NO: 636068 - RNA, 19 nt, Artificial Sequence
  Description of Artificial Sequence: Synthetic oligonucleotide
accgguugaaugaguuauc

SEQ ID NO: 636069 - RNA, 19 nt, Artificial Sequence
  Description of Artificial Sequence: Synthetic oligonucleotide
cgugcguuuauuucccgcc

SEQ ID NO: 636070 - RNA, 19 nt, Artificial Sequence
  Description of Artificial Sequence: Synthetic oligonucleotide
uuucucguucugagauauc

SEQ ID NO: 636071 - RNA, 19 nt, Artificial Sequence
  Description of Artificial Sequence: Synthetic oligonucleotide
caauucaguagagaccuua

SEQ ID NO: 636072 - RNA, 19 nt, Artificial Sequence
  Description of Artificial Sequence: Synthetic oligonucleotide
gcagcucgcaagaagucag

SEQ ID NO: 636073 - RNA, 19 nt, Artificial Sequence
  Description of Artificial Sequence: Synthetic oligonucleotide
uucagacuacuagguggug

SEQ ID NO: 636074 - RNA, 19 nt, Artificial Sequence
  Description of Artificial Sequence: Synthetic oligonucleotide
uagaguccacuaccuugaa

SEQ ID NO: 636075 - RNA, 19 nt, Artificial Sequence
  Description of Artificial Sequence: Synthetic oligonucleotide
auccuagaguccacuaccu

SEQ ID NO: 636076 - RNA, 19 nt, Artificial Sequence
  Description of Artificial Sequence: Synthetic oligonucleotide
cauccguuggcagaucaga

SEQ ID NO: 636077 - RNA, 19 nt, Artificial Sequence
  Description of Artificial Sequence: Synthetic oligonucleotide
aauugaccucugacuccag

SEQ ID NO: 636078 - RNA, 19 nt, Artificial Sequence
  Description of Artificial Sequence: Synthetic oligonucleotide
ugaccuggcguuucuccuu

SEQ ID NO: 636079 - RNA, 19 nt, Artificial Sequence
  Description of Artificial Sequence: Synthetic oligonucleotide
cuggccgccggaccuuacg

SEQ ID NO: 636080 - RNA, 19 nt, Artificial Sequence
  Description of Artificial Sequence: Synthetic oligonucleotide
uggcuacaacauaggugac

SEQ ID NO: 636081 - RNA, 19 nt, Artificial Sequence
  Description of Artificial Sequence: Synthetic oligonucleotide
cauuaaaugcguaccgguu

SEQ ID NO: 636082 - RNA, 19 nt, Artificial Sequence
  Description of Artificial Sequence: Synthetic oligonucleotide
cuucuagugguaccagcaa

SEQ ID NO: 636083 - RNA, 19 nt, Artificial Sequence
  Description of Artificial Sequence: Synthetic oligonucleotide
gcuucgcuugauaccacgg

SEQ ID NO: 636084 - RNA, 19 nt, Artificial Sequence
  Description of Artificial Sequence: Synthetic oligonucleotide
gugcguuuauuucccgcca

SEQ ID NO: 636085 - RNA, 19 nt, Artificial Sequence
  Description of Artificial Sequence: Synthetic oligonucleotide
auaccgccgaaguuuuguu

SEQ ID NO: 636086 - RNA, 19 nt, Artificial Sequence
  Description of Artificial Sequence: Synthetic oligonucleotide
gucacgggaacggaaaacu

SEQ ID NO: 636087 - RNA, 19 nt, Artificial Sequence
  Description of Artificial Sequence: Synthetic oligonucleotide
aaccaccacgggcccaaaa

SEQ ID NO: 636088 - RNA, 19 nt, Artificial Sequence
  Description of Artificial Sequence: Synthetic oligonucleotide
accacgggaugcuuuccaa

SEQ ID NO: 636089 - RNA, 19 nt, Artificial Sequence
  Description of Artificial Sequence: Synthetic oligonucleotide
aucugccuuagaaccucgg

SEQ ID NO: 636090 - RNA, 19 nt, Artificial Sequence
  Description of Artificial Sequence: Synthetic oligonucleotide
gcuacaacauaggugaccu

SEQ ID NO: 636091 - RNA, 19 nt, Artificial Sequence
  Description of Artificial Sequence: Synthetic oligonucleotide
gacgacucuugagcagcag

SEQ ID NO: 636092 - RNA, 19 nt, Artificial Sequence
  Description of Artificial Sequence: Synthetic oligonucleotide
uggcguauccggugcugcu

SEQ ID NO: 636093 - RNA, 19 nt, Artificial Sequence
  Description of Artificial Sequence: Synthetic oligonucleotide
ucuuugcgccccagaacuu

SEQ ID NO: 636094 - RNA, 19 nt, Artificial Sequence
  Description of Artificial Sequence: Synthetic oligonucleotide
uaaaugcguaccgguugaa

SEQ ID NO: 636095 - RNA, 19 nt, Artificial Sequence
  Description of Artificial Sequence: Synthetic oligonucleotide
uucgcaguugugccaccuu

SEQ ID NO: 636096 - RNA, 19 nt, Artificial Sequence
  Description of Artificial Sequence: Synthetic oligonucleotide
gaacuucaaccuccuuaaa

SEQ ID NO: 636097 - RNA, 19 nt, Artificial Sequence
  Description of Artificial Sequence: Synthetic oligonucleotide
cuuuucucguucugagaua

SEQ ID NO: 636098 - RNA, 19 nt, Artificial Sequence
  Description of Artificial Sequence: Synthetic oligonucleotide
ccucaguuguagcuggaug

SEQ ID NO: 636099 - RNA, 19 nt, Artificial Sequence
  Description of Artificial Sequence: Synthetic oligonucleotide
cacgggaugcuuuccaacu

SEQ ID NO: 636100 - RNA, 19 nt, Artificial Sequence
  Description of Artificial Sequence: Synthetic oligonucleotide
gcguuuauuucccgccagc

SEQ ID NO: 636101 - RNA, 19 nt, Artificial Sequence
  Description of Artificial Sequence: Synthetic oligonucleotide
ucacuuccgcuuguguuuu

SEQ ID NO: 636102 - RNA, 19 nt, Artificial Sequence
  Description of Artificial Sequence: Synthetic oligonucleotide
cuugauaccacgggaugcu

SEQ ID NO: 636103 - RNA, 19 nt, Artificial Sequence
  Description of Artificial Sequence: Synthetic oligonucleotide
caucuucauuaaaugcgua

SEQ ID NO: 636104 - RNA, 19 nt, Artificial Sequence
  Description of Artificial Sequence: Synthetic oligonucleotide
uucguggccuggacacggu

SEQ ID NO: 636105 - RNA, 19 nt, Artificial Sequence
  Description of Artificial Sequence: Synthetic oligonucleotide
gcucgcaagaagucaguga

SEQ ID NO: 636106 - RNA, 19 nt, Artificial Sequence
  Description of Artificial Sequence: Synthetic oligonucleotide
gccagaaacccuuggcaga

SEQ ID NO: 636107 - RNA, 19 nt, Artificial Sequence
  Description of Artificial Sequence: Synthetic oligonucleotide
ccguuguugugcucucugg

SEQ ID NO: 636108 - RNA, 19 nt, Artificial Sequence
  Description of Artificial Sequence: Synthetic oligonucleotide
auucgauguuucacugggu

SEQ ID NO: 636109 - RNA, 19 nt, Artificial Sequence
  Description of Artificial Sequence: Synthetic oligonucleotide
augggccgugcguuuauuu

SEQ ID NO: 636110 - RNA, 19 nt, Artificial Sequence
  Description of Artificial Sequence: Synthetic oligonucleotide
ccuagggucaaugacagcu

SEQ ID NO: 636111 - RNA, 19 nt, Artificial Sequence
  Description of Artificial Sequence: Synthetic oligonucleotide
gggaacggaaaacuuuugu

SEQ ID NO: 636112 - RNA, 19 nt, Artificial Sequence
  Description of Artificial Sequence: Synthetic oligonucleotide
accaacucgguaacaguuu

SEQ ID NO: 636113 - RNA, 19 nt, Artificial Sequence
  Description of Artificial Sequence: Synthetic oligonucleotide
cagcauccgacacauagau

SEQ ID NO: 636114 - RNA, 19 nt, Artificial Sequence
  Description of Artificial Sequence: Synthetic oligonucleotide
agcauccgacacauagaug

SEQ ID NO: 636115 - RNA, 19 nt, Artificial Sequence
  Description of Artificial Sequence: Synthetic oligonucleotide
ggugguguagauggcucug

SEQ ID NO: 636116 - RNA, 19 nt, Artificial Sequence
  Description of Artificial Sequence: Synthetic oligonucleotide
cuuugucaccaacucggua

SEQ ID NO: 636117 - RNA, 19 nt, Artificial Sequence
  Description of Artificial Sequence: Synthetic oligonucleotide
guaccgguugaaugaguua

SEQ ID NO: 636118 - RNA, 19 nt, Artificial Sequence
  Description of Artificial Sequence: Synthetic oligonucleotide
ccagaaacccuuggcagac

SEQ ID NO: 636119 - RNA, 19 nt, Artificial Sequence
  Description of Artificial Sequence: Synthetic oligonucleotide
gguaacaguuuuagccuga

SEQ ID NO: 636120 - RNA, 19 nt, Artificial Sequence
  Description of Artificial Sequence: Synthetic oligonucleotide
gccuucaggauccaaaauu

SEQ ID NO: 636121 - RNA, 19 nt, Artificial Sequence
  Description of Artificial Sequence: Synthetic oligonucleotide
uccauagcaggggcuggau

SEQ ID NO: 636122 - RNA, 19 nt, Artificial Sequence
  Description of Artificial Sequence: Synthetic oligonucleotide
gugacugagguucggugau

SEQ ID NO: 636123 - RNA, 19 nt, Artificial Sequence
  Description of Artificial Sequence: Synthetic oligonucleotide
gggcuggauagucacggga

SEQ ID NO: 636124 - RNA, 19 nt, Artificial Sequence
  Description of Artificial Sequence: Synthetic oligonucleotide
guagcuggaugcugugcua

SEQ ID NO: 636125 - RNA, 19 nt, Artificial Sequence
  Description of Artificial Sequence: Synthetic oligonucleotide
caccaacucgguaacaguu

SEQ ID NO: 636126 - RNA, 19 nt, Artificial Sequence
  Description of Artificial Sequence: Synthetic oligonucleotide
cauaccgccgaaguuuugu

SEQ ID NO: 636127 - RNA, 19 nt, Artificial Sequence
  Description of Artificial Sequence: Synthetic oligonucleotide
aggcaaacuuaggaucgaa

SEQ ID NO: 636128 - RNA, 19 nt, Artificial Sequence
  Description of Artificial Sequence: Synthetic oligonucleotide
gccuuggaaagaaagucaa

SEQ ID NO: 636129 - RNA, 19 nt, Artificial Sequence
  Description of Artificial Sequence: Synthetic oligonucleotide
agcuggcguauccggugcu

SEQ ID NO: 636130 - RNA, 19 nt, Artificial Sequence
  Description of Artificial Sequence: Synthetic oligonucleotide
ccgugcguuuauuucccgc

SEQ ID NO: 636131 - RNA, 19 nt, Artificial Sequence
  Description of Artificial Sequence: Synthetic oligonucleotide
cacgggaacggaaaacuuu

SEQ ID NO: 636132 - RNA, 19 nt, Artificial Sequence
  Description of Artificial Sequence: Synthetic oligonucleotide
uccugacuccugccagcuc

SEQ ID NO: 636133 - RNA, 19 nt, Artificial Sequence
  Description of Artificial Sequence: Synthetic oligonucleotide
ggaugguacgcagggaaaa

SEQ ID NO: 636134 - RNA, 19 nt, Artificial Sequence
  Description of Artificial Sequence: Synthetic oligonucleotide
ccacuaccuugaauugacc

SEQ ID NO: 636135 - RNA, 19 nt, Artificial Sequence
  Description of Artificial Sequence: Synthetic oligonucleotide
ggcagcucgcaagaaguca

SEQ ID NO: 636136 - RNA, 19 nt, Artificial Sequence
  Description of Artificial Sequence: Synthetic oligonucleotide
guagagaccuuaguucuuu

SEQ ID NO: 636137 - RNA, 19 nt, Artificial Sequence
  Description of Artificial Sequence: Synthetic oligonucleotide
gcgccccagaacuuugaug

SEQ ID NO: 636138 - RNA, 19 nt, Artificial Sequence
  Description of Artificial Sequence: Synthetic oligonucleotide
ggcuggauagucacgggaa

SEQ ID NO: 636139 - RNA, 19 nt, Artificial Sequence
  Description of Artificial Sequence: Synthetic oligonucleotide
guucggugauaaagaguga

SEQ ID NO: 636140 - RNA, 19 nt, Artificial Sequence
  Description of Artificial Sequence: Synthetic oligonucleotide
gcaagaagucagugacuga

SEQ ID NO: 636141 - RNA, 19 nt, Artificial Sequence
  Description of Artificial Sequence: Synthetic oligonucleotide
ccacgggaugcuuuccaac

SEQ ID NO: 636142 - RNA, 19 nt, Artificial Sequence
  Description of Artificial Sequence: Synthetic oligonucleotide
ggccgugcguuuauuuccc

SEQ ID NO: 636143 - RNA, 19 nt, Artificial Sequence
  Description of Artificial Sequence: Synthetic oligonucleotide
accucggcuucgcuugaua

SEQ ID NO: 636144 - RNA, 19 nt, Artificial Sequence
  Description of Artificial Sequence: Synthetic oligonucleotide
gccuuagaaccucggcuuc

SEQ ID NO: 636145 - RNA, 19 nt, Artificial Sequence
  Description of Artificial Sequence: Synthetic oligonucleotide
cagcaugcucuuauauccu

SEQ ID NO: 636146 - RNA, 19 nt, Artificial Sequence
  Description of Artificial Sequence: Synthetic oligonucleotide
caauagggacuaccucaaa

SEQ ID NO: 636147 - RNA, 19 nt, Artificial Sequence
  Description of Artificial Sequence: Synthetic oligonucleotide
gccgugcguuuauuucccg

SEQ ID NO: 636148 - RNA, 19 nt, Artificial Sequence
  Description of Artificial Sequence: Synthetic oligonucleotide
guauccggugcugcuucuc

SEQ ID NO: 636149 - RNA, 19 nt, Artificial Sequence
  Description of Artificial Sequence: Synthetic oligonucleotide
cuuacggccuacaccuuuu

SEQ ID NO: 636150 - RNA, 19 nt, Artificial Sequence
  Description of Artificial Sequence: Synthetic oligonucleotide
gcguauccggugcugcuuc

SEQ ID NO: 636151 - RNA, 19 nt, Artificial Sequence
  Description of Artificial Sequence: Synthetic oligonucleotide
cuagggucaaugacagcuu

SEQ ID NO: 636152 - RNA, 19 nt, Artificial Sequence
  Description of Artificial Sequence: Synthetic oligonucleotide
ugucauccguuggcagauc

SEQ ID NO: 636153 - RNA, 19 nt, Artificial Sequence
  Description of Artificial Sequence: Synthetic oligonucleotide
ggauagucacgggaacgga

SEQ ID NO: 636154 - RNA, 19 nt, Artificial Sequence
  Description of Artificial Sequence: Synthetic oligonucleotide
gcuauugacucauccucau

SEQ ID NO: 636155 - RNA, 19 nt, Artificial Sequence
  Description of Artificial Sequence: Synthetic oligonucleotide
gggacuaccucaaacccau

SEQ ID NO: 636156 - RNA, 19 nt, Artificial Sequence
  Description of Artificial Sequence: Synthetic oligonucleotide
cacauaccgccgaaguuuu

SEQ ID NO: 636157 - RNA, 19 nt, Artificial Sequence
  Description of Artificial Sequence: Synthetic oligonucleotide
ccggaugguacgcagggaa

SEQ ID NO: 636158 - RNA, 19 nt, Artificial Sequence
  Description of Artificial Sequence: Synthetic oligonucleotide
ggccacauaccgccgaagu

SEQ ID NO: 636159 - RNA, 19 nt, Artificial Sequence
  Description of Artificial Sequence: Synthetic oligonucleotide
acauaccgccgaaguuuug

SEQ ID NO: 636160 - RNA, 19 nt, Artificial Sequence
  Description of Artificial Sequence: Synthetic oligonucleotide
cgcuugauaccacgggaug

SEQ ID NO: 636161 - RNA, 19 nt, Artificial Sequence
  Description of Artificial Sequence: Synthetic oligonucleotide
cuucauccuagaguccacu

SEQ ID NO: 636162 - RNA, 19 nt, Artificial Sequence
  Description of Artificial Sequence: Synthetic oligonucleotide
uccuuccguuguugugcuc

SEQ ID NO: 636163 - RNA, 19 nt, Artificial Sequence
  Description of Artificial Sequence: Synthetic oligonucleotide
caaccuccuuaaaggcaaa

SEQ ID NO: 636164 - RNA, 19 nt, Artificial Sequence
  Description of Artificial Sequence: Synthetic oligonucleotide
ggaauguguccugacuccu

SEQ ID NO: 636165 - RNA, 19 nt, Artificial Sequence
  Description of Artificial Sequence: Synthetic oligonucleotide
agggucugguuaagcugcu

SEQ ID NO: 636166 - RNA, 19 nt, Artificial Sequence
  Description of Artificial Sequence: Synthetic oligonucleotide
gcucacuuccgcuuguguu

SEQ ID NO: 636167 - RNA, 19 nt, Artificial Sequence
  Description of Artificial Sequence: Synthetic oligonucleotide
gggcuucguggccuggaca

SEQ ID NO: 636168 - RNA, 19 nt, Artificial Sequence
  Description of Artificial Sequence: Synthetic oligonucleotide
ccccucaucuucauuaaau

SEQ ID NO: 636169 - RNA, 19 nt, Artificial Sequence
  Description of Artificial Sequence: Synthetic oligonucleotide
cagcguuuccgguaauguu

SEQ ID NO: 636170 - RNA, 19 nt, Artificial Sequence
  Description of Artificial Sequence: Synthetic oligonucleotide
caccuagagcaaggccuuc

SEQ ID NO: 636171 - RNA, 19 nt, Artificial Sequence
  Description of Artificial Sequence: Synthetic oligonucleotide
cgggaacggaaaacuuuug

SEQ ID NO: 636172 - RNA, 19 nt, Artificial Sequence
  Description of Artificial Sequence: Synthetic oligonucleotide
gcuggcguauccggugcug

SEQ ID NO: 636173 - RNA, 19 nt, Artificial Sequence
  Description of Artificial Sequence: Synthetic oligonucleotide
cguuucuuucuggccuugg

SEQ ID NO: 636174 - RNA, 19 nt, Artificial Sequence
  Description of Artificial Sequence: Synthetic oligonucleotide
cggaccuuacggccuacac

SEQ ID NO: 636175 - RNA, 19 nt, Artificial Sequence
  Description of Artificial Sequence: Synthetic oligonucleotide
cggugauaaagagugaggu

SEQ ID NO: 636176 - RNA, 19 nt, Artificial Sequence
  Description of Artificial Sequence: Synthetic oligonucleotide
cuuugcgccccagaacuuu

SEQ ID NO: 636177 - RNA, 19 nt, Artificial Sequence
  Description of Artificial Sequence: Synthetic oligonucleotide
ccgaaguuuuguucuccaa

SEQ ID NO: 636178 - RNA, 19 nt, Artificial Sequence
  Description of Artificial Sequence: Synthetic oligonucleotide
cccuagggucaaugacagc

SEQ ID NO: 636179 - RNA, 19 nt, Artificial Sequence
  Description of Artificial Sequence: Synthetic oligonucleotide
cuucgcaguugugccaccu

SEQ ID NO: 636180 - RNA, 19 nt, Artificial Sequence
  Description of Artificial Sequence: Synthetic oligonucleotide
cagcucgcaagaagucagu

SEQ ID NO: 636181 - RNA, 19 nt, Artificial Sequence
  Description of Artificial Sequence: Synthetic oligonucleotide
cgccgaaguuuuguucucc

SEQ ID NO: 636182 - RNA, 19 nt, Artificial Sequence
  Description of Artificial Sequence: Synthetic oligonucleotide
ccgccgaaguuuuguucuc

SEQ ID NO: 636183 - RNA, 19 nt, Artificial Sequence
  Description of Artificial Sequence: Synthetic oligonucleotide
ccgguugaaugaguuaucu

SEQ ID NO: 636184 - RNA, 19 nt, Artificial Sequence
  Description of Artificial Sequence: Synthetic oligonucleotide
gccacauaccgccgaaguu

SEQ ID NO: 636185 - RNA, 19 nt, Artificial Sequence
  Description of Artificial Sequence: Synthetic oligonucleotide
agccguccuuggagaacca

SEQ ID NO: 636186 - RNA, 19 nt, Artificial Sequence
  Description of Artificial Sequence: Synthetic oligonucleotide
cauaggugaccuggcguuu

SEQ ID NO: 636187 - RNA, 19 nt, Artificial Sequence
  Description of Artificial Sequence: Synthetic oligonucleotide
ccagcguuuccgguaaugu

SEQ ID NO: 636188 - RNA, 19 nt, Artificial Sequence
  Description of Artificial Sequence: Synthetic oligonucleotide
cguaccgguugaaugaguu

SEQ ID NO: 636189 - RNA, 19 nt, Artificial Sequence
  Description of Artificial Sequence: Synthetic oligonucleotide
gcaagcacuuccuguccuu

SEQ ID NO: 636190 - RNA, 19 nt, Artificial Sequence
  Description of Artificial Sequence: Synthetic oligonucleotide
gaugggccgugcguuuauu

SEQ ID NO: 636191 - RNA, 19 nt, Artificial Sequence
  Description of Artificial Sequence: Synthetic oligonucleotide
accuuacggccuacaccuu

SEQ ID NO: 636192 - RNA, 19 nt, Artificial Sequence
  Description of Artificial Sequence: Synthetic oligonucleotide
cgguugaaugaguuaucua

SEQ ID NO: 636193 - RNA, 19 nt, Artificial Sequence
  Description of Artificial Sequence: Synthetic oligonucleotide
agcuggccgccggaccuua

SEQ ID NO: 636194 - RNA, 19 nt, Artificial Sequence
  Description of Artificial Sequence: Synthetic oligonucleotide
cggaugguacgcagggaaa

SEQ ID NO: 636195 - RNA, 19 nt, Artificial Sequence
  Description of Artificial Sequence: Synthetic oligonucleotide
ggacuaccucaaacccauc

SEQ ID NO: 636196 - RNA, 19 nt, Artificial Sequence
  Description of Artificial Sequence: Synthetic oligonucleotide
cucgcucccgcugcuuccu

SEQ ID NO: 636197 - RNA, 19 nt, Artificial Sequence
  Description of Artificial Sequence: Synthetic oligonucleotide
ccuuacggccuacaccuuu

SEQ ID NO: 636198 - RNA, 19 nt, Artificial Sequence
  Description of Artificial Sequence: Synthetic oligonucleotide
guugugcucucugguccuu

SEQ ID NO: 636199 - RNA, 19 nt, Artificial Sequence
  Description of Artificial Sequence: Synthetic oligonucleotide
ccgccagcguuuccgguaa

SEQ ID NO: 636200 - RNA, 19 nt, Artificial Sequence
  Description of Artificial Sequence: Synthetic oligonucleotide
cggcuucgcuugauaccac

SEQ ID NO: 636201 - RNA, 19 nt, Artificial Sequence
  Description of Artificial Sequence: Synthetic oligonucleotide
ggcguauccggugcugcuu

SEQ ID NO: 636202 - RNA, 19 nt, Artificial Sequence
  Description of Artificial Sequence: Synthetic oligonucleotide
cccggaugguacgcaggga

SEQ ID NO: 636203 - RNA, 19 nt, Artificial Sequence
  Description of Artificial Sequence: Synthetic oligonucleotide
caaccaccacgggcccaaa

SEQ ID NO: 636204 - RNA, 19 nt, Artificial Sequence
  Description of Artificial Sequence: Synthetic oligonucleotide
gcguaccgguugaaugagu

SEQ ID NO: 636205 - RNA, 19 nt, Artificial Sequence
  Description of Artificial Sequence: Synthetic oligonucleotide
gcuggccgccggaccuuac

SEQ ID NO: 636206 - RNA, 19 nt, Artificial Sequence
  Description of Artificial Sequence: Synthetic oligonucleotide
gccggaccuuacggccuac

SEQ ID NO: 636207 - RNA, 19 nt, Artificial Sequence
  Description of Artificial Sequence: Synthetic oligonucleotide
ccaauucaguagagaccuu

SEQ ID NO: 636208 - RNA, 19 nt, Artificial Sequence
  Description of Artificial Sequence: Synthetic oligonucleotide
ccgccggaccuuacggccu

SEQ ID NO: 636209 - RNA, 19 nt, Artificial Sequence
  Description of Artificial Sequence: Synthetic oligonucleotide
cguuuccgguaauguucua

SEQ ID NO: 636210 - RNA, 19 nt, Artificial Sequence
  Description of Artificial Sequence: Synthetic oligonucleotide
cgccagcguuuccgguaau

SEQ ID NO: 636211 - RNA, 19 nt, Artificial Sequence
  Description of Artificial Sequence: Synthetic oligonucleotide
aaaugaaacaccccgcagc

SEQ ID NO: 636212 - RNA, 19 nt, Artificial Sequence
  Description of Artificial Sequence: Synthetic oligonucleotide
uaugaaauuaauuaaggac

SEQ ID NO: 636213 - RNA, 19 nt, Artificial Sequence
  Description of Artificial Sequence: Synthetic oligonucleotide
aagaagauggaucaaaccu

SEQ ID NO: 636214 - RNA, 19 nt, Artificial Sequence
  Description of Artificial Sequence: Synthetic oligonucleotide
uauacaggggccuauauag

SEQ ID NO: 636215 - RNA, 19 nt, Artificial Sequence
  Description of Artificial Sequence: Synthetic oligonucleotide
aaucccuacagauucuggc

SEQ ID NO: 636216 - RNA, 19 nt, Artificial Sequence
  Description of Artificial Sequence: Synthetic oligonucleotide
uguuuaagcuaaaaccucg

SEQ ID NO: 636217 - RNA, 19 nt, Artificial Sequence
  Description of Artificial Sequence: Synthetic oligonucleotide
uacuuaggaaugcugaagg

SEQ ID NO: 636218 - RNA, 19 nt, Artificial Sequence
  Description of Artificial Sequence: Synthetic oligonucleotide
cuaccuacuaauuauuggg

SEQ ID NO: 636219 - RNA, 19 nt, Artificial Sequence
  Description of Artificial Sequence: Synthetic oligonucleotide
uuugcuaguacaaugccac

SEQ ID NO: 636220 - RNA, 19 nt, Artificial Sequence
  Description of Artificial Sequence: Synthetic oligonucleotide
uauggucguaguaugaaag

SEQ ID NO: 636221 - RNA, 19 nt, Artificial Sequence
  Description of Artificial Sequence: Synthetic oligonucleotide
uuugaucagacccuuuugc

SEQ ID NO: 636222 - RNA, 19 nt, Artificial Sequence
  Description of Artificial Sequence: Synthetic oligonucleotide
ugauaaagauugaaugugc

SEQ ID NO: 636223 - RNA, 19 nt, Artificial Sequence
  Description of Artificial Sequence: Synthetic oligonucleotide
aaaaccucggcugcaaugg

SEQ ID NO: 636224 - RNA, 19 nt, Artificial Sequence
  Description of Artificial Sequence: Synthetic oligonucleotide
aacuacugagagcagaaca

SEQ ID NO: 636225 - RNA, 19 nt, Artificial Sequence
  Description of Artificial Sequence: Synthetic oligonucleotide
aguaaugcaaguaacggag

SEQ ID NO: 636226 - RNA, 19 nt, Artificial Sequence
  Description of Artificial Sequence: Synthetic oligonucleotide
aaaaugaaacaccccgcag

SEQ ID NO: 636227 - RNA, 19 nt, Artificial Sequence
  Description of Artificial Sequence: Synthetic oligonucleotide
aacggagagaauucccugg

SEQ ID NO: 636228 - RNA, 19 nt, Artificial Sequence
  Description of Artificial Sequence: Synthetic oligonucleotide
ucuccccugaguaagauga

SEQ ID NO: 636229 - RNA, 19 nt, Artificial Sequence
  Description of Artificial Sequence: Synthetic oligonucleotide
cuugcggugcuuuuaaucc

SEQ ID NO: 636230 - RNA, 19 nt, Artificial Sequence
  Description of Artificial Sequence: Synthetic oligonucleotide
aaugacucaccagugaucu

SEQ ID NO: 636231 - RNA, 19 nt, Artificial Sequence
  Description of Artificial Sequence: Synthetic oligonucleotide
uuaauuauggucguaguau

SEQ ID NO: 636232 - RNA, 19 nt, Artificial Sequence
  Description of Artificial Sequence: Synthetic oligonucleotide
agguaaugaaacuucagcu

SEQ ID NO: 636233 - RNA, 19 nt, Artificial Sequence
  Description of Artificial Sequence: Synthetic oligonucleotide
aauuagugguuuuaauuau

SEQ ID NO: 636234 - RNA, 19 nt, Artificial Sequence
  Description of Artificial Sequence: Synthetic oligonucleotide
gaauuagugguuuuaauua

SEQ ID NO: 636235 - RNA, 19 nt, Artificial Sequence
  Description of Artificial Sequence: Synthetic oligonucleotide
aguuauagauacuugcggu

SEQ ID NO: 636236 - RNA, 19 nt, Artificial Sequence
  Description of Artificial Sequence: Synthetic oligonucleotide
aguaagaugauugcaucac

SEQ ID NO: 636237 - RNA, 19 nt, Artificial Sequence
  Description of Artificial Sequence: Synthetic oligonucleotide
uauaaugucugcucgcugu

SEQ ID NO: 636238 - RNA, 19 nt, Artificial Sequence
  Description of Artificial Sequence: Synthetic oligonucleotide
ugcaucacgaggcauggag

SEQ ID NO: 636239 - RNA, 19 nt, Artificial Sequence
  Description of Artificial Sequence: Synthetic oligonucleotide
aaccaacaaagccccaugg

SEQ ID NO: 636240 - RNA, 19 nt, Artificial Sequence
  Description of Artificial Sequence: Synthetic oligonucleotide
aucccuacagauucuggcc

SEQ ID NO: 636241 - RNA, 19 nt, Artificial Sequence
  Description of Artificial Sequence: Synthetic oligonucleotide
cuauauagugcuuggaguc

SEQ ID NO: 636242 - RNA, 19 nt, Artificial Sequence
  Description of Artificial Sequence: Synthetic oligonucleotide
uuuaauuauggucguagua

SEQ ID NO: 636243 - RNA, 19 nt, Artificial Sequence
  Description of Artificial Sequence: Synthetic oligonucleotide
uaauuauggucguaguaug

SEQ ID NO: 636244 - RNA, 19 nt, Artificial Sequence
  Description of Artificial Sequence: Synthetic oligonucleotide
uuuugcuaguacaaugcca

SEQ ID NO: 636245 - RNA, 19 nt, Artificial Sequence
  Description of Artificial Sequence: Synthetic oligonucleotide
auggcguaguucuugugcc

SEQ ID NO: 636246 - RNA, 19 nt, Artificial Sequence
  Description of Artificial Sequence: Synthetic oligonucleotide
uucuugauccacuagggaa

SEQ ID NO: 636247 - RNA, 19 nt, Artificial Sequence
  Description of Artificial Sequence: Synthetic oligonucleotide
ugugccaauucacugggug

SEQ ID NO: 636248 - RNA, 19 nt, Artificial Sequence
  Description of Artificial Sequence: Synthetic oligonucleotide
agcuuaugacaucacaaag

SEQ ID NO: 636249 - RNA, 19 nt, Artificial Sequence
  Description of Artificial Sequence: Synthetic oligonucleotide
caguuauagauacuugcgg

SEQ ID NO: 636250 - RNA, 19 nt, Artificial Sequence
  Description of Artificial Sequence: Synthetic oligonucleotide
uuauagauacuugcggugc

SEQ ID NO: 636251 - RNA, 19 nt, Artificial Sequence
  Description of Artificial Sequence: Synthetic oligonucleotide
aacuccaagcucaugugcg

SEQ ID NO: 636252 - RNA, 19 nt, Artificial Sequence
  Description of Artificial Sequence: Synthetic oligonucleotide
uaaagauugaaugugcauu

SEQ ID NO: 636253 - RNA, 19 nt, Artificial Sequence
  Description of Artificial Sequence: Synthetic oligonucleotide
ucuugauccacuagggaaa

SEQ ID NO: 636254 - RNA, 19 nt, Artificial Sequence
  Description of Artificial Sequence: Synthetic oligonucleotide
augaaauuagcuuuccuua

SEQ ID NO: 636255 - RNA, 19 nt, Artificial Sequence
  Description of Artificial Sequence: Synthetic oligonucleotide
uguuaggcgagaaaaugaa

SEQ ID NO: 636256 - RNA, 19 nt, Artificial Sequence
  Description of Artificial Sequence: Synthetic oligonucleotide
cucgguuagucucagacac

SEQ ID NO: 636257 - RNA, 19 nt, Artificial Sequence
  Description of Artificial Sequence: Synthetic oligonucleotide
gaaccaugcaagcuccacg

SEQ ID NO: 636258 - RNA, 19 nt, Artificial Sequence
  Description of Artificial Sequence: Synthetic oligonucleotide
aggcaacggaaccaaaugg

SEQ ID NO: 636259 - RNA, 19 nt, Artificial Sequence
  Description of Artificial Sequence: Synthetic oligonucleotide
gcuuucugaguguagagcg

SEQ ID NO: 636260 - RNA, 19 nt, Artificial Sequence
  Description of Artificial Sequence: Synthetic oligonucleotide
uuuuaauuauggucguagu

SEQ ID NO: 636261 - RNA, 19 nt, Artificial Sequence
  Description of Artificial Sequence: Synthetic oligonucleotide
ugaaugacucaccagugau

SEQ ID NO: 636262 - RNA, 19 nt, Artificial Sequence
  Description of Artificial Sequence: Synthetic oligonucleotide
auggucguaguaugaaagg

SEQ ID NO: 636263 - RNA, 19 nt, Artificial Sequence
  Description of Artificial Sequence: Synthetic oligonucleotide
uuaaacuacugagagcaga

SEQ ID NO: 636264 - RNA, 19 nt, Artificial Sequence
  Description of Artificial Sequence: Synthetic oligonucleotide
ugcuaguacaaugccacgg

SEQ ID NO: 636265 - RNA, 19 nt, Artificial Sequence
  Description of Artificial Sequence: Synthetic oligonucleotide
uuguuuaagcuaaaaccuc

SEQ ID NO: 636266 - RNA, 19 nt, Artificial Sequence
  Description of Artificial Sequence: Synthetic oligonucleotide
ugcuguaauuugaauauau

SEQ ID NO: 636267 - RNA, 19 nt, Artificial Sequence
  Description of Artificial Sequence: Synthetic oligonucleotide
ugacuauuccugguaaggg

SEQ ID NO: 636268 - RNA, 19 nt, Artificial Sequence
  Description of Artificial Sequence: Synthetic oligonucleotide
agaacagcgagcaggcugc

SEQ ID NO: 636269 - RNA, 19 nt, Artificial Sequence
  Description of Artificial Sequence: Synthetic oligonucleotide
ucaaacgcacaguaagcgc

SEQ ID NO: 636270 - RNA, 19 nt, Artificial Sequence
  Description of Artificial Sequence: Synthetic oligonucleotide
aguaacggagagaauuccc

SEQ ID NO: 636271 - RNA, 19 nt, Artificial Sequence
  Description of Artificial Sequence: Synthetic oligonucleotide
uggucguaguaugaaaggg

SEQ ID NO: 636272 - RNA, 19 nt, Artificial Sequence
  Description of Artificial Sequence: Synthetic oligonucleotide
aggcgagaaaaugaaacac

SEQ ID NO: 636273 - RNA, 19 nt, Artificial Sequence
  Description of Artificial Sequence: Synthetic oligonucleotide
cucaaacgcacaguaagcg

SEQ ID NO: 636274 - RNA, 19 nt, Artificial Sequence
  Description of Artificial Sequence: Synthetic oligonucleotide
cuuccauauuccucggucc

SEQ ID NO: 636275 - RNA, 19 nt, Artificial Sequence
  Description of Artificial Sequence: Synthetic oligonucleotide
cacaguaagcgccaugagc

SEQ ID NO: 636276 - RNA, 19 nt, Artificial Sequence
  Description of Artificial Sequence: Synthetic oligonucleotide
uaccuacuaauuauugggu

SEQ ID NO: 636277 - RNA, 19 nt, Artificial Sequence
  Description of Artificial Sequence: Synthetic oligonucleotide
agagcgaaaaugucugaug

SEQ ID NO: 636278 - RNA, 19 nt, Artificial Sequence
  Description of Artificial Sequence: Synthetic oligonucleotide
aaacuacugagagcagaac

SEQ ID NO: 636279 - RNA, 19 nt, Artificial Sequence
  Description of Artificial Sequence: Synthetic oligonucleotide
ugugacuauuccugguaag

SEQ ID NO: 636280 - RNA, 19 nt, Artificial Sequence
  Description of Artificial Sequence: Synthetic oligonucleotide
accaguaaugcaaguaacg

SEQ ID NO: 636281 - RNA, 19 nt, Artificial Sequence
  Description of Artificial Sequence: Synthetic oligonucleotide
aagauugaaugugcauuuc

SEQ ID NO: 636282 - RNA, 19 nt, Artificial Sequence
  Description of Artificial Sequence: Synthetic oligonucleotide
uauugggucuagaucugug

SEQ ID NO: 636283 - RNA, 19 nt, Artificial Sequence
  Description of Artificial Sequence: Synthetic oligonucleotide
ucuacuuaggaaugcugaa

SEQ ID NO: 636284 - RNA, 19 nt, Artificial Sequence
  Description of Artificial Sequence: Synthetic oligonucleotide
caagguaaugaaacuucag

SEQ ID NO: 636285 - RNA, 19 nt, Artificial Sequence
  Description of Artificial Sequence: Synthetic oligonucleotide
gugacuauuccugguaagg

SEQ ID NO: 636286 - RNA, 19 nt, Artificial Sequence
  Description of Artificial Sequence: Synthetic oligonucleotide
ugaaucccauugcaguuca

SEQ ID NO: 636287 - RNA, 19 nt, Artificial Sequence
  Description of Artificial Sequence: Synthetic oligonucleotide
ugaauagcccuucuuccaa

SEQ ID NO: 636288 - RNA, 19 nt, Artificial Sequence
  Description of Artificial Sequence: Synthetic oligonucleotide
guuuaagcuaaaaccucgg

SEQ ID NO: 636289 - RNA, 19 nt, Artificial Sequence
  Description of Artificial Sequence: Synthetic oligonucleotide
gcuaccuacuaauuauugg

SEQ ID NO: 636290 - RNA, 19 nt, Artificial Sequence
  Description of Artificial Sequence: Synthetic oligonucleotide
uuccauauuccucggucca

SEQ ID NO: 636291 - RNA, 19 nt, Artificial Sequence
  Description of Artificial Sequence: Synthetic oligonucleotide
ccaguuauagauacuugcg

SEQ ID NO: 636292 - RNA, 19 nt, Artificial Sequence
  Description of Artificial Sequence: Synthetic oligonucleotide
cacucgguuagucucagac

SEQ ID NO: 636293 - RNA, 19 nt, Artificial Sequence
  Description of Artificial Sequence: Synthetic oligonucleotide
aauuauggucguaguauga

SEQ ID NO: 636294 - RNA, 19 nt, Artificial Sequence
  Description of Artificial Sequence: Synthetic oligonucleotide
ucgguccaguuauagauac

SEQ ID NO: 636295 - RNA, 19 nt, Artificial Sequence
  Description of Artificial Sequence: Synthetic oligonucleotide
cacuagggaaacaucuggc

SEQ ID NO: 636296 - RNA, 19 nt, Artificial Sequence
  Description of Artificial Sequence: Synthetic oligonucleotide
aucaaaccuuccauauucc

SEQ ID NO: 636297 - RNA, 19 nt, Artificial Sequence
  Description of Artificial Sequence: Synthetic oligonucleotide
uggccaaagugaauagccc

SEQ ID NO: 636298 - RNA, 19 nt, Artificial Sequence
  Description of Artificial Sequence: Synthetic oligonucleotide
aacugugacuauuccuggu

SEQ ID NO: 636299 - RNA, 19 nt, Artificial Sequence
  Description of Artificial Sequence: Synthetic oligonucleotide
agacccuuuugcuaguaca

SEQ ID NO: 636300 - RNA, 19 nt, Artificial Sequence
  Description of Artificial Sequence: Synthetic oligonucleotide
auugaaucccauugcaguu

SEQ ID NO: 636301 - RNA, 19 nt, Artificial Sequence
  Description of Artificial Sequence: Synthetic oligonucleotide
auugcaucacgaggcaugg

SEQ ID NO: 636302 - RNA, 19 nt, Artificial Sequence
  Description of Artificial Sequence: Synthetic oligonucleotide
uuauggucguaguaugaaa

SEQ ID NO: 636303 - RNA, 19 nt, Artificial Sequence
  Description of Artificial Sequence: Synthetic oligonucleotide
ccagaaagccugaaaacgg

SEQ ID NO: 636304 - RNA, 19 nt, Artificial Sequence
  Description of Artificial Sequence: Synthetic oligonucleotide
auaaugucugcucgcugug

SEQ ID NO: 636305 - RNA, 19 nt, Artificial Sequence
  Description of Artificial Sequence: Synthetic oligonucleotide
cuacuuaggaaugcugaag

SEQ ID NO: 636306 - RNA, 19 nt, Artificial Sequence
  Description of Artificial Sequence: Synthetic oligonucleotide
aguguagagcgaaaauguc

SEQ ID NO: 636307 - RNA, 19 nt, Artificial Sequence
  Description of Artificial Sequence: Synthetic oligonucleotide
cuauuccugguaaggggcc

SEQ ID NO: 636308 - RNA, 19 nt, Artificial Sequence
  Description of Artificial Sequence: Synthetic oligonucleotide
cacgggagaccuuugauca

SEQ ID NO: 636309 - RNA, 19 nt, Artificial Sequence
  Description of Artificial Sequence: Synthetic oligonucleotide
uugcuaguacaaugccacg

SEQ ID NO: 636310 - RNA, 19 nt, Artificial Sequence
  Description of Artificial Sequence: Synthetic oligonucleotide
cucgguaggcaacggaacc

SEQ ID NO: 636311 - RNA, 19 nt, Artificial Sequence
  Description of Artificial Sequence: Synthetic oligonucleotide
gccuauauagugcuuggag

SEQ ID NO: 636312 - RNA, 19 nt, Artificial Sequence
  Description of Artificial Sequence: Synthetic oligonucleotide
uucagcacucgguuagucu

SEQ ID NO: 636313 - RNA, 19 nt, Artificial Sequence
  Description of Artificial Sequence: Synthetic oligonucleotide
agauugacucgguaggcaa

SEQ ID NO: 636314 - RNA, 19 nt, Artificial Sequence
  Description of Artificial Sequence: Synthetic oligonucleotide
ucuauacaggggccuauau

SEQ ID NO: 636315 - RNA, 19 nt, Artificial Sequence
  Description of Artificial Sequence: Synthetic oligonucleotide
cguaguaugaaagggaacc

SEQ ID NO: 636316 - RNA, 19 nt, Artificial Sequence
  Description of Artificial Sequence: Synthetic oligonucleotide
ugguuuuaauuauggucgu

SEQ ID NO: 636317 - RNA, 19 nt, Artificial Sequence
  Description of Artificial Sequence: Synthetic oligonucleotide
cuuaaacuacugagagcag

SEQ ID NO: 636318 - RNA, 19 nt, Artificial Sequence
  Description of Artificial Sequence: Synthetic oligonucleotide
caucacgaggcauggaguc

SEQ ID NO: 636319 - RNA, 19 nt, Artificial Sequence
  Description of Artificial Sequence: Synthetic oligonucleotide
aguguagagcugugcuuuc

SEQ ID NO: 636320 - RNA, 19 nt, Artificial Sequence
  Description of Artificial Sequence: Synthetic oligonucleotide
uaaugucugcucgcugugg

SEQ ID NO: 636321 - RNA, 19 nt, Artificial Sequence
  Description of Artificial Sequence: Synthetic oligonucleotide
aucacgaggcauggagucc

SEQ ID NO: 636322 - RNA, 19 nt, Artificial Sequence
  Description of Artificial Sequence: Synthetic oligonucleotide
uagaucugugaauccaaau

SEQ ID NO: 636323 - RNA, 19 nt, Artificial Sequence
  Description of Artificial Sequence: Synthetic oligonucleotide
ugcggugcuuuuaauccac

SEQ ID NO: 636324 - RNA, 19 nt, Artificial Sequence
  Description of Artificial Sequence: Synthetic oligonucleotide
caguaaugcaaguaacgga

SEQ ID NO: 636325 - RNA, 19 nt, Artificial Sequence
  Description of Artificial Sequence: Synthetic oligonucleotide
agaugccuacauggcaucc

SEQ ID NO: 636326 - RNA, 19 nt, Artificial Sequence
  Description of Artificial Sequence: Synthetic oligonucleotide
ccaguaaugcaaguaacgg

SEQ ID NO: 636327 - RNA, 19 nt, Artificial Sequence
  Description of Artificial Sequence: Synthetic oligonucleotide
uuucugaguguagagcgaa

SEQ ID NO: 636328 - RNA, 19 nt, Artificial Sequence
  Description of Artificial Sequence: Synthetic oligonucleotide
auuauggucguaguaugaa

SEQ ID NO: 636329 - RNA, 19 nt, Artificial Sequence
  Description of Artificial Sequence: Synthetic oligonucleotide
guaagcgccaugagcagcc

SEQ ID NO: 636330 - RNA, 19 nt, Artificial Sequence
  Description of Artificial Sequence: Synthetic oligonucleotide
acaagguaaugaaacuuca

SEQ ID NO: 636331 - RNA, 19 nt, Artificial Sequence
  Description of Artificial Sequence: Synthetic oligonucleotide
agaugaagaacgguguuuu

SEQ ID NO: 636332 - RNA, 19 nt, Artificial Sequence
  Description of Artificial Sequence: Synthetic oligonucleotide
acucgguuagucucagaca

SEQ ID NO: 636333 - RNA, 19 nt, Artificial Sequence
  Description of Artificial Sequence: Synthetic oligonucleotide
augauugcaucacgaggca

SEQ ID NO: 636334 - RNA, 19 nt, Artificial Sequence
  Description of Artificial Sequence: Synthetic oligonucleotide
cuauaaugucugcucgcug

SEQ ID NO: 636335 - RNA, 19 nt, Artificial Sequence
  Description of Artificial Sequence: Synthetic oligonucleotide
ugugcggcugugaucaguu

SEQ ID NO: 636336 - RNA, 19 nt, Artificial Sequence
  Description of Artificial Sequence: Synthetic oligonucleotide
uuccgugcaaacugaucga

SEQ ID NO: 636337 - RNA, 19 nt, Artificial Sequence
  Description of Artificial Sequence: Synthetic oligonucleotide
agaaucccuacagauucug

SEQ ID NO: 636338 - RNA, 19 nt, Artificial Sequence
  Description of Artificial Sequence: Synthetic oligonucleotide
auacuugcggugcuuuuaa

SEQ ID NO: 636339 - RNA, 19 nt, Artificial Sequence
  Description of Artificial Sequence: Synthetic oligonucleotide
cacggaacugugacuauuc

SEQ ID NO: 636340 - RNA, 19 nt, Artificial Sequence
  Description of Artificial Sequence: Synthetic oligonucleotide
ugacucgguaggcaacgga

SEQ ID NO: 636341 - RNA, 19 nt, Artificial Sequence
  Description of Artificial Sequence: Synthetic oligonucleotide
gaagaacgguguuuucauc

SEQ ID NO: 636342 - RNA, 19 nt, Artificial Sequence
  Description of Artificial Sequence: Synthetic oligonucleotide
ugguccuuaacagcuuaug

SEQ ID NO: 636343 - RNA, 19 nt, Artificial Sequence
  Description of Artificial Sequence: Synthetic oligonucleotide
uugcggugcuuuuaaucca

SEQ ID NO: 636344 - RNA, 19 nt, Artificial Sequence
  Description of Artificial Sequence: Synthetic oligonucleotide
gaugaagaacgguguuuuc

SEQ ID NO: 636345 - RNA, 19 nt, Artificial Sequence
  Description of Artificial Sequence: Synthetic oligonucleotide
ucacgaggcauggagucca

SEQ ID NO: 636346 - RNA, 19 nt, Artificial Sequence
  Description of Artificial Sequence: Synthetic oligonucleotide
acucgguaggcaacggaac

SEQ ID NO: 636347 - RNA, 19 nt, Artificial Sequence
  Description of Artificial Sequence: Synthetic oligonucleotide
gaaugacucaccagugauc

SEQ ID NO: 636348 - RNA, 19 nt, Artificial Sequence
  Description of Artificial Sequence: Synthetic oligonucleotide
agcuaccuacuaauuauug

SEQ ID NO: 636349 - RNA, 19 nt, Artificial Sequence
  Description of Artificial Sequence: Synthetic oligonucleotide
cuaggagcuauacaaucaa

SEQ ID NO: 636350 - RNA, 19 nt, Artificial Sequence
  Description of Artificial Sequence: Synthetic oligonucleotide
ugccacggaacugugacua

SEQ ID NO: 636351 - RNA, 19 nt, Artificial Sequence
  Description of Artificial Sequence: Synthetic oligonucleotide
uggagucuaggagcuauac

SEQ ID NO: 636352 - RNA, 19 nt, Artificial Sequence
  Description of Artificial Sequence: Synthetic oligonucleotide
aaacgcacaguaagcgcca

SEQ ID NO: 636353 - RNA, 19 nt, Artificial Sequence
  Description of Artificial Sequence: Synthetic oligonucleotide
uccacgggagaccuuugau

SEQ ID NO: 636354 - RNA, 19 nt, Artificial Sequence
  Description of Artificial Sequence: Synthetic oligonucleotide
ucgguaggcaacggaacca

SEQ ID NO: 636355 - RNA, 19 nt, Artificial Sequence
  Description of Artificial Sequence: Synthetic oligonucleotide
guaguaugaaagggaacca

SEQ ID NO: 636356 - RNA, 19 nt, Artificial Sequence
  Description of Artificial Sequence: Synthetic oligonucleotide
cuugauccacuagggaaac

SEQ ID NO: 636357 - RNA, 19 nt, Artificial Sequence
  Description of Artificial Sequence: Synthetic oligonucleotide
gucguaguaugaaagggaa

SEQ ID NO: 636358 - RNA, 19 nt, Artificial Sequence
  Description of Artificial Sequence: Synthetic oligonucleotide
gcuaccgcuccaaauaagc

SEQ ID NO: 636359 - RNA, 19 nt, Artificial Sequence
  Description of Artificial Sequence: Synthetic oligonucleotide
aaaaggagugaagcagcua

SEQ ID NO: 636360 - RNA, 19 nt, Artificial Sequence
  Description of Artificial Sequence: Synthetic oligonucleotide
aacaccccgcagcaaggau

SEQ ID NO: 636361 - RNA, 19 nt, Artificial Sequence
  Description of Artificial Sequence: Synthetic oligonucleotide
caacggaaccaaauggaaa

SEQ ID NO: 636362 - RNA, 19 nt, Artificial Sequence
  Description of Artificial Sequence: Synthetic oligonucleotide
ccccuuugagucaugacug

SEQ ID NO: 636363 - RNA, 19 nt, Artificial Sequence
  Description of Artificial Sequence: Synthetic oligonucleotide
cuuucugaguguagagcga

SEQ ID NO: 636364 - RNA, 19 nt, Artificial Sequence
  Description of Artificial Sequence: Synthetic oligonucleotide
ugccauguuaggcgagaaa

SEQ ID NO: 636365 - RNA, 19 nt, Artificial Sequence
  Description of Artificial Sequence: Synthetic oligonucleotide
cacggcggcgaacacggcc

SEQ ID NO: 636366 - RNA, 19 nt, Artificial Sequence
  Description of Artificial Sequence: Synthetic oligonucleotide
gacucgguaggcaacggaa

SEQ ID NO: 636367 - RNA, 19 nt, Artificial Sequence
  Description of Artificial Sequence: Synthetic oligonucleotide
gauacuugcggugcuuuua

SEQ ID NO: 636368 - RNA, 19 nt, Artificial Sequence
  Description of Artificial Sequence: Synthetic oligonucleotide
ugccaauucacuggguguu

SEQ ID NO: 636369 - RNA, 19 nt, Artificial Sequence
  Description of Artificial Sequence: Synthetic oligonucleotide
gggccuauauagugcuugg

SEQ ID NO: 636370 - RNA, 19 nt, Artificial Sequence
  Description of Artificial Sequence: Synthetic oligonucleotide
cucaugugcggcugugauc

SEQ ID NO: 636371 - RNA, 19 nt, Artificial Sequence
  Description of Artificial Sequence: Synthetic oligonucleotide
gguaaugaaacuucagcuu

SEQ ID NO: 636372 - RNA, 19 nt, Artificial Sequence
  Description of Artificial Sequence: Synthetic oligonucleotide
caccccgcagcaaggauuc

SEQ ID NO: 636373 - RNA, 19 nt, Artificial Sequence
  Description of Artificial Sequence: Synthetic oligonucleotide
gcuaguacaaugccacgga

SEQ ID NO: 636374 - RNA, 19 nt, Artificial Sequence
  Description of Artificial Sequence: Synthetic oligonucleotide
agaaagugauaaagauuga

SEQ ID NO: 636375 - RNA, 19 nt, Artificial Sequence
  Description of Artificial Sequence: Synthetic oligonucleotide
ggucuagaucugugaaucc

SEQ ID NO: 636376 - RNA, 19 nt, Artificial Sequence
  Description of Artificial Sequence: Synthetic oligonucleotide
acgggagaccuuugaucag

SEQ ID NO: 636377 - RNA, 19 nt, Artificial Sequence
  Description of Artificial Sequence: Synthetic oligonucleotide
cuauacaggggccuauaua

SEQ ID NO: 636378 - RNA, 19 nt, Artificial Sequence
  Description of Artificial Sequence: Synthetic oligonucleotide
guagagcgaaaaugucuga

SEQ ID NO: 636379 - RNA, 19 nt, Artificial Sequence
  Description of Artificial Sequence: Synthetic oligonucleotide
ugcaaguaacggagagaau

SEQ ID NO: 636380 - RNA, 19 nt, Artificial Sequence
  Description of Artificial Sequence: Synthetic oligonucleotide
gaauucccuggcaaaucuc

SEQ ID NO: 636381 - RNA, 19 nt, Artificial Sequence
  Description of Artificial Sequence: Synthetic oligonucleotide
guaaugcaaguaacggaga

SEQ ID NO: 636382 - RNA, 19 nt, Artificial Sequence
  Description of Artificial Sequence: Synthetic oligonucleotide
uccgugcaaacugaucgau

SEQ ID NO: 636383 - RNA, 19 nt, Artificial Sequence
  Description of Artificial Sequence: Synthetic oligonucleotide
ggucguaguaugaaaggga

SEQ ID NO: 636384 - RNA, 19 nt, Artificial Sequence
  Description of Artificial Sequence: Synthetic oligonucleotide
agucuaggagcuauacaau

SEQ ID NO: 636385 - RNA, 19 nt, Artificial Sequence
  Description of Artificial Sequence: Synthetic oligonucleotide
gccauuuuaauuugccugu

SEQ ID NO: 636386 - RNA, 19 nt, Artificial Sequence
  Description of Artificial Sequence: Synthetic oligonucleotide
cuacuaauuauugggucua

SEQ ID NO: 636387 - RNA, 19 nt, Artificial Sequence
  Description of Artificial Sequence: Synthetic oligonucleotide
caauggaccacugccaugu

SEQ ID NO: 636388 - RNA, 19 nt, Artificial Sequence
  Description of Artificial Sequence: Synthetic oligonucleotide
cagaugccuacauggcauc

SEQ ID NO: 636389 - RNA, 19 nt, Artificial Sequence
  Description of Artificial Sequence: Synthetic oligonucleotide
agcauccgcucgcaggcga

SEQ ID NO: 636390 - RNA, 19 nt, Artificial Sequence
  Description of Artificial Sequence: Synthetic oligonucleotide
auagcccuucuuccaaguu

SEQ ID NO: 636391 - RNA, 19 nt, Artificial Sequence
  Description of Artificial Sequence: Synthetic oligonucleotide
ugauugcaucacgaggcau

SEQ ID NO: 636392 - RNA, 19 nt, Artificial Sequence
  Description of Artificial Sequence: Synthetic oligonucleotide
cuaguacaaugccacggaa

SEQ ID NO: 636393 - RNA, 19 nt, Artificial Sequence
  Description of Artificial Sequence: Synthetic oligonucleotide
agauacuugcggugcuuuu

SEQ ID NO: 636394 - RNA, 19 nt, Artificial Sequence
  Description of Artificial Sequence: Synthetic oligonucleotide
ggggccuauauagugcuug

SEQ ID NO: 636395 - RNA, 19 nt, Artificial Sequence
  Description of Artificial Sequence: Synthetic oligonucleotide
cagacccuuuugcuaguac

SEQ ID NO: 636396 - RNA, 19 nt, Artificial Sequence
  Description of Artificial Sequence: Synthetic oligonucleotide
agccacggcggcgaacacg

SEQ ID NO: 636397 - RNA, 19 nt, Artificial Sequence
  Description of Artificial Sequence: Synthetic oligonucleotide
agggugaacacggcagcca

SEQ ID NO: 636398 - RNA, 19 nt, Artificial Sequence
  Description of Artificial Sequence: Synthetic oligonucleotide
agcuaccgcuccaaauaag

SEQ ID NO: 636399 - RNA, 19 nt, Artificial Sequence
  Description of Artificial Sequence: Synthetic oligonucleotide
ccuauauagugcuuggagu

SEQ ID NO: 636400 - RNA, 19 nt, Artificial Sequence
  Description of Artificial Sequence: Synthetic oligonucleotide
ccuacuaauuauugggucu

SEQ ID NO: 636401 - RNA, 19 nt, Artificial Sequence
  Description of Artificial Sequence: Synthetic oligonucleotide
cacuggguguuccucuuga

SEQ ID NO: 636402 - RNA, 19 nt, Artificial Sequence
  Description of Artificial Sequence: Synthetic oligonucleotide
agguuuccgugcaaacuga

SEQ ID NO: 636403 - RNA, 19 nt, Artificial Sequence
  Description of Artificial Sequence: Synthetic oligonucleotide
gugccaauucacugggugu

SEQ ID NO: 636404 - RNA, 19 nt, Artificial Sequence
  Description of Artificial Sequence: Synthetic oligonucleotide
uacuugcggugcuuuuaau

SEQ ID NO: 636405 - RNA, 19 nt, Artificial Sequence
  Description of Artificial Sequence: Synthetic oligonucleotide
cucgcaggcgauggcguag

SEQ ID NO: 636406 - RNA, 19 nt, Artificial Sequence
  Description of Artificial Sequence: Synthetic oligonucleotide
acgcacaguaagcgccaug

SEQ ID NO: 636407 - RNA, 19 nt, Artificial Sequence
  Description of Artificial Sequence: Synthetic oligonucleotide
ccacgggagaccuuugauc

SEQ ID NO: 636408 - RNA, 19 nt, Artificial Sequence
  Description of Artificial Sequence: Synthetic oligonucleotide
ggccaaagugaauagcccu

SEQ ID NO: 636409 - RNA, 19 nt, Artificial Sequence
  Description of Artificial Sequence: Synthetic oligonucleotide
cucgguccaguuauagaua

SEQ ID NO: 636410 - RNA, 19 nt, Artificial Sequence
  Description of Artificial Sequence: Synthetic oligonucleotide
gcaauggaccacugccaug

SEQ ID NO: 636411 - RNA, 19 nt, Artificial Sequence
  Description of Artificial Sequence: Synthetic oligonucleotide
ccaauucacuggguguucc

SEQ ID NO: 636412 - RNA, 19 nt, Artificial Sequence
  Description of Artificial Sequence: Synthetic oligonucleotide
cagcuaccgcuccaaauaa

SEQ ID NO: 636413 - RNA, 19 nt, Artificial Sequence
  Description of Artificial Sequence: Synthetic oligonucleotide
ccaaguugggucaccuuca

SEQ ID NO: 636414 - RNA, 19 nt, Artificial Sequence
  Description of Artificial Sequence: Synthetic oligonucleotide
aacgcacaguaagcgccau

SEQ ID NO: 636415 - RNA, 19 nt, Artificial Sequence
  Description of Artificial Sequence: Synthetic oligonucleotide
gcggcugugaucaguuccc

SEQ ID NO: 636416 - RNA, 19 nt, Artificial Sequence
  Description of Artificial Sequence: Synthetic oligonucleotide
gcaacggaaccaaauggaa

SEQ ID NO: 636417 - RNA, 19 nt, Artificial Sequence
  Description of Artificial Sequence: Synthetic oligonucleotide
ccagcuaccuacuaauuau

SEQ ID NO: 636418 - RNA, 19 nt, Artificial Sequence
  Description of Artificial Sequence: Synthetic oligonucleotide
acaccccgcagcaaggauu

SEQ ID NO: 636419 - RNA, 19 nt, Artificial Sequence
  Description of Artificial Sequence: Synthetic oligonucleotide
caggggccuauauagugcu

SEQ ID NO: 636420 - RNA, 19 nt, Artificial Sequence
  Description of Artificial Sequence: Synthetic oligonucleotide
gcagccagcuaccuacuaa

SEQ ID NO: 636421 - RNA, 19 nt, Artificial Sequence
  Description of Artificial Sequence: Synthetic oligonucleotide
gcuauaaugucugcucgcu

SEQ ID NO: 636422 - RNA, 19 nt, Artificial Sequence
  Description of Artificial Sequence: Synthetic oligonucleotide
gaacagcgagcaggcugcc

SEQ ID NO: 636423 - RNA, 19 nt, Artificial Sequence
  Description of Artificial Sequence: Synthetic oligonucleotide
ugcucgcugugggucacuc

SEQ ID NO: 636424 - RNA, 19 nt, Artificial Sequence
  Description of Artificial Sequence: Synthetic oligonucleotide
gaaugcagacaagcuucua

SEQ ID NO: 636425 - RNA, 19 nt, Artificial Sequence
  Description of Artificial Sequence: Synthetic oligonucleotide
ggccucuacuuaggaaugc

SEQ ID NO: 636426 - RNA, 19 nt, Artificial Sequence
  Description of Artificial Sequence: Synthetic oligonucleotide
caauucacuggguguuccu

SEQ ID NO: 636427 - RNA, 19 nt, Artificial Sequence
  Description of Artificial Sequence: Synthetic oligonucleotide
ccccauggauacaagguaa

SEQ ID NO: 636428 - RNA, 19 nt, Artificial Sequence
  Description of Artificial Sequence: Synthetic oligonucleotide
gccccauggauacaaggua

SEQ ID NO: 636429 - RNA, 19 nt, Artificial Sequence
  Description of Artificial Sequence: Synthetic oligonucleotide
cacaaguguggccaucuuu

SEQ ID NO: 636430 - RNA, 19 nt, Artificial Sequence
  Description of Artificial Sequence: Synthetic oligonucleotide
gguuuuaauuauggucgua

SEQ ID NO: 636431 - RNA, 19 nt, Artificial Sequence
  Description of Artificial Sequence: Synthetic oligonucleotide
ggaucaaaccuuccauauu

SEQ ID NO: 636432 - RNA, 19 nt, Artificial Sequence
  Description of Artificial Sequence: Synthetic oligonucleotide
gugcggcugugaucaguuc

SEQ ID NO: 636433 - RNA, 19 nt, Artificial Sequence
  Description of Artificial Sequence: Synthetic oligonucleotide
ggccuauauagugcuugga

SEQ ID NO: 636434 - RNA, 19 nt, Artificial Sequence
  Description of Artificial Sequence: Synthetic oligonucleotide
caccuucaugaauuccuau

SEQ ID NO: 636435 - RNA, 19 nt, Artificial Sequence
  Description of Artificial Sequence: Synthetic oligonucleotide
gcaucacgaggcauggagu

SEQ ID NO: 636436 - RNA, 19 nt, Artificial Sequence
  Description of Artificial Sequence: Synthetic oligonucleotide
cuacagauucuggccucua

SEQ ID NO: 636437 - RNA, 19 nt, Artificial Sequence
  Description of Artificial Sequence: Synthetic oligonucleotide
cagccacggcggcgaacac

SEQ ID NO: 636438 - RNA, 19 nt, Artificial Sequence
  Description of Artificial Sequence: Synthetic oligonucleotide
aggggccuauauagugcuu

SEQ ID NO: 636439 - RNA, 19 nt, Artificial Sequence
  Description of Artificial Sequence: Synthetic oligonucleotide
ggcuagccaccagugugaa

SEQ ID NO: 636440 - RNA, 19 nt, Artificial Sequence
  Description of Artificial Sequence: Synthetic oligonucleotide
gcuccacgggagaccuuug

SEQ ID NO: 636441 - RNA, 19 nt, Artificial Sequence
  Description of Artificial Sequence: Synthetic oligonucleotide
gcacucgguuagucucaga

SEQ ID NO: 636442 - RNA, 19 nt, Artificial Sequence
  Description of Artificial Sequence: Synthetic oligonucleotide
gcucgcaggcgauggcgua

SEQ ID NO: 636443 - RNA, 19 nt, Artificial Sequence
  Description of Artificial Sequence: Synthetic oligonucleotide
cgguaggcaacggaaccaa

SEQ ID NO: 636444 - RNA, 19 nt, Artificial Sequence
  Description of Artificial Sequence: Synthetic oligonucleotide
ccacggcggcgaacacggc

SEQ ID NO: 636445 - RNA, 19 nt, Artificial Sequence
  Description of Artificial Sequence: Synthetic oligonucleotide
cugcucgcugugggucacu

SEQ ID NO: 636446 - RNA, 19 nt, Artificial Sequence
  Description of Artificial Sequence: Synthetic oligonucleotide
aaguaaaccuauuagcucc

SEQ ID NO: 636447 - RNA, 19 nt, Artificial Sequence
  Description of Artificial Sequence: Synthetic oligonucleotide
uauauauacaaccugggug

SEQ ID NO: 636448 - RNA, 19 nt, Artificial Sequence
  Description of Artificial Sequence: Synthetic oligonucleotide
aaauauauauacaaccugg

SEQ ID NO: 636449 - RNA, 19 nt, Artificial Sequence
  Description of Artificial Sequence: Synthetic oligonucleotide
aacaccaccaaaguaaacc

SEQ ID NO: 636450 - RNA, 19 nt, Artificial Sequence
  Description of Artificial Sequence: Synthetic oligonucleotide
aauggcaguagcuuauggc

SEQ ID NO: 636451 - RNA, 19 nt, Artificial Sequence
  Description of Artificial Sequence: Synthetic oligonucleotide
aaaguaaaccuauuagcuc

SEQ ID NO: 636452 - RNA, 19 nt, Artificial Sequence
  Description of Artificial Sequence: Synthetic oligonucleotide
uuaguuuugugcaagguga

SEQ ID NO: 636453 - RNA, 19 nt, Artificial Sequence
  Description of Artificial Sequence: Synthetic oligonucleotide
gauaucuagguccauaagc

SEQ ID NO: 636454 - RNA, 19 nt, Artificial Sequence
  Description of Artificial Sequence: Synthetic oligonucleotide
ucaguugugauuuaaaaua

SEQ ID NO: 636455 - RNA, 19 nt, Artificial Sequence
  Description of Artificial Sequence: Synthetic oligonucleotide
ugauauggcucccuggugg

SEQ ID NO: 636456 - RNA, 19 nt, Artificial Sequence
  Description of Artificial Sequence: Synthetic oligonucleotide
agagcacuaaucuagagga

SEQ ID NO: 636457 - RNA, 19 nt, Artificial Sequence
  Description of Artificial Sequence: Synthetic oligonucleotide
acaaaguccauucaguugu

SEQ ID NO: 636458 - RNA, 19 nt, Artificial Sequence
  Description of Artificial Sequence: Synthetic oligonucleotide
accaaaguaaaccuauuag

SEQ ID NO: 636459 - RNA, 19 nt, Artificial Sequence
  Description of Artificial Sequence: Synthetic oligonucleotide
uaaucuagaggacagcaga

SEQ ID NO: 636460 - RNA, 19 nt, Artificial Sequence
  Description of Artificial Sequence: Synthetic oligonucleotide
ucuuaggggauucagcuca

SEQ ID NO: 636461 - RNA, 19 nt, Artificial Sequence
  Description of Artificial Sequence: Synthetic oligonucleotide
aaaccuauuagcucccaug

SEQ ID NO: 636462 - RNA, 19 nt, Artificial Sequence
  Description of Artificial Sequence: Synthetic oligonucleotide
gagagcacuaaucuagagg

SEQ ID NO: 636463 - RNA, 19 nt, Artificial Sequence
  Description of Artificial Sequence: Synthetic oligonucleotide
acagggguagcugugaucc

SEQ ID NO: 636464 - RNA, 19 nt, Artificial Sequence
  Description of Artificial Sequence: Synthetic oligonucleotide
agauucauaagggaaucgc

SEQ ID NO: 636465 - RNA, 19 nt, Artificial Sequence
  Description of Artificial Sequence: Synthetic oligonucleotide
ucugagauagucaccaagu

SEQ ID NO: 636466 - RNA, 19 nt, Artificial Sequence
  Description of Artificial Sequence: Synthetic oligonucleotide
aauagguuccugcccagag

SEQ ID NO: 636467 - RNA, 19 nt, Artificial Sequence
  Description of Artificial Sequence: Synthetic oligonucleotide
ugagauagucaccaaguca

SEQ ID NO: 636468 - RNA, 19 nt, Artificial Sequence
  Description of Artificial Sequence: Synthetic oligonucleotide
aaaguuucugucuccgaug

SEQ ID NO: 636469 - RNA, 19 nt, Artificial Sequence
  Description of Artificial Sequence: Synthetic oligonucleotide
aaccuauuagcucccauga

SEQ ID NO: 636470 - RNA, 19 nt, Artificial Sequence
  Description of Artificial Sequence: Synthetic oligonucleotide
caaauucauccuuugggcg

SEQ ID NO: 636471 - RNA, 19 nt, Artificial Sequence
  Description of Artificial Sequence: Synthetic oligonucleotide
auaagggaaucgcagaaug

SEQ ID NO: 636472 - RNA, 19 nt, Artificial Sequence
  Description of Artificial Sequence: Synthetic oligonucleotide
cacuguaaggcccaugugg

SEQ ID NO: 636473 - RNA, 19 nt, Artificial Sequence
  Description of Artificial Sequence: Synthetic oligonucleotide
uaagggaaucgcagaaugg

SEQ ID NO: 636474 - RNA, 19 nt, Artificial Sequence
  Description of Artificial Sequence: Synthetic oligonucleotide
ucaagaggcaacagcaucu

SEQ ID NO: 636475 - RNA, 19 nt, Artificial Sequence
  Description of Artificial Sequence: Synthetic oligonucleotide
uucugagauagucaccaag

SEQ ID NO: 636476 - RNA, 19 nt, Artificial Sequence
  Description of Artificial Sequence: Synthetic oligonucleotide
auucuuuggcacuugggag

SEQ ID NO: 636477 - RNA, 19 nt, Artificial Sequence
  Description of Artificial Sequence: Synthetic oligonucleotide
uccggaauugucauguucu

SEQ ID NO: 636478 - RNA, 19 nt, Artificial Sequence
  Description of Artificial Sequence: Synthetic oligonucleotide
ucuagguccauaagcagac

SEQ ID NO: 636479 - RNA, 19 nt, Artificial Sequence
  Description of Artificial Sequence: Synthetic oligonucleotide
gaaaggcuuggauaggcag

SEQ ID NO: 636480 - RNA, 19 nt, Artificial Sequence
  Description of Artificial Sequence: Synthetic oligonucleotide
aguagcuuauggcuguagg

SEQ ID NO: 636481 - RNA, 19 nt, Artificial Sequence
  Description of Artificial Sequence: Synthetic oligonucleotide
guagacuccagccugagca

SEQ ID NO: 636482 - RNA, 19 nt, Artificial Sequence
  Description of Artificial Sequence: Synthetic oligonucleotide
cuagcauuaagugaccagc

SEQ ID NO: 636483 - RNA, 19 nt, Artificial Sequence
  Description of Artificial Sequence: Synthetic oligonucleotide
aaucuagaggacagcagac

SEQ ID NO: 636484 - RNA, 19 nt, Artificial Sequence
  Description of Artificial Sequence: Synthetic oligonucleotide
guguagaagcaaucgaccg

SEQ ID NO: 636485 - RNA, 19 nt, Artificial Sequence
  Description of Artificial Sequence: Synthetic oligonucleotide
uccccuaugaauccucucc

SEQ ID NO: 636486 - RNA, 19 nt, Artificial Sequence
  Description of Artificial Sequence: Synthetic oligonucleotide
aaaggcagauaccacuaga

SEQ ID NO: 636487 - RNA, 19 nt, Artificial Sequence
  Description of Artificial Sequence: Synthetic oligonucleotide
agcaugucgcaccuucucc

SEQ ID NO: 636488 - RNA, 19 nt, Artificial Sequence
  Description of Artificial Sequence: Synthetic oligonucleotide
auucagcucaucccuauag

SEQ ID NO: 636489 - RNA, 19 nt, Artificial Sequence
  Description of Artificial Sequence: Synthetic oligonucleotide
gaagcaaucgaccgugcgc

SEQ ID NO: 636490 - RNA, 19 nt, Artificial Sequence
  Description of Artificial Sequence: Synthetic oligonucleotide
aaagucuuaggggauucag

SEQ ID NO: 636491 - RNA, 19 nt, Artificial Sequence
  Description of Artificial Sequence: Synthetic oligonucleotide
uguagaagcaaucgaccgu

SEQ ID NO: 636492 - RNA, 19 nt, Artificial Sequence
  Description of Artificial Sequence: Synthetic oligonucleotide
cuaugaauccucucccagg

SEQ ID NO: 636493 - RNA, 19 nt, Artificial Sequence
  Description of Artificial Sequence: Synthetic oligonucleotide
gacuccaugcuguggacgg

SEQ ID NO: 636494 - RNA, 19 nt, Artificial Sequence
  Description of Artificial Sequence: Synthetic oligonucleotide
guaccuagcauuaagugac

SEQ ID NO: 636495 - RNA, 19 nt, Artificial Sequence
  Description of Artificial Sequence: Synthetic oligonucleotide
ucgaucauggugaugccga

SEQ ID NO: 636496 - RNA, 19 nt, Artificial Sequence
  Description of Artificial Sequence: Synthetic oligonucleotide
cauaagcagacguuucugc

SEQ ID NO: 636497 - RNA, 19 nt, Artificial Sequence
  Description of Artificial Sequence: Synthetic oligonucleotide
aaucucgcccaggaugucc

SEQ ID NO: 636498 - RNA, 19 nt, Artificial Sequence
  Description of Artificial Sequence: Synthetic oligonucleotide
aagcagacguuucugcucu

SEQ ID NO: 636499 - RNA, 19 nt, Artificial Sequence
  Description of Artificial Sequence: Synthetic oligonucleotide
uauaguguguccucagcac

SEQ ID NO: 636500 - RNA, 19 nt, Artificial Sequence
  Description of Artificial Sequence: Synthetic oligonucleotide
cacagaguccaccagguag

SEQ ID NO: 636501 - RNA, 19 nt, Artificial Sequence
  Description of Artificial Sequence: Synthetic oligonucleotide
uuggccuguccacagaagc

SEQ ID NO: 636502 - RNA, 19 nt, Artificial Sequence
  Description of Artificial Sequence: Synthetic oligonucleotide
uucuuaguuuugugcaagg

SEQ ID NO: 636503 - RNA, 19 nt, Artificial Sequence
  Description of Artificial Sequence: Synthetic oligonucleotide
uugauaucuagguccauaa

SEQ ID NO: 636504 - RNA, 19 nt, Artificial Sequence
  Description of Artificial Sequence: Synthetic oligonucleotide
auaucuagguccauaagca

SEQ ID NO: 636505 - RNA, 19 nt, Artificial Sequence
  Description of Artificial Sequence: Synthetic oligonucleotide
gacgguguagaagcaaucg

SEQ ID NO: 636506 - RNA, 19 nt, Artificial Sequence
  Description of Artificial Sequence: Synthetic oligonucleotide
ugauaucuagguccauaag

SEQ ID NO: 636507 - RNA, 19 nt, Artificial Sequence
  Description of Artificial Sequence: Synthetic oligonucleotide
aaagucgcacaucuucaca

SEQ ID NO: 636508 - RNA, 19 nt, Artificial Sequence
  Description of Artificial Sequence: Synthetic oligonucleotide
ugguaccuagcauuaagug

SEQ ID NO: 636509 - RNA, 19 nt, Artificial Sequence
  Description of Artificial Sequence: Synthetic oligonucleotide
agggauacgggaugcuggc

SEQ ID NO: 636510 - RNA, 19 nt, Artificial Sequence
  Description of Artificial Sequence: Synthetic oligonucleotide
aaaccagcgacacccacaa

SEQ ID NO: 636511 - RNA, 19 nt, Artificial Sequence
  Description of Artificial Sequence: Synthetic oligonucleotide
guggagagcacuaaucuag

SEQ ID NO: 636512 - RNA, 19 nt, Artificial Sequence
  Description of Artificial Sequence: Synthetic oligonucleotide
ugaauccucucccaggauc

SEQ ID NO: 636513 - RNA, 19 nt, Artificial Sequence
  Description of Artificial Sequence: Synthetic oligonucleotide
ucuagaggacagcagacua

SEQ ID NO: 636514 - RNA, 19 nt, Artificial Sequence
  Description of Artificial Sequence: Synthetic oligonucleotide
caaaguaaaccuauuagcu

SEQ ID NO: 636515 - RNA, 19 nt, Artificial Sequence
  Description of Artificial Sequence: Synthetic oligonucleotide
agcaauagguuccugccca

SEQ ID NO: 636516 - RNA, 19 nt, Artificial Sequence
  Description of Artificial Sequence: Synthetic oligonucleotide
gaauggcaguagcuuaugg

SEQ ID NO: 636517 - RNA, 19 nt, Artificial Sequence
  Description of Artificial Sequence: Synthetic oligonucleotide
gaugccgaggcuccagacg

SEQ ID NO: 636518 - RNA, 19 nt, Artificial Sequence
  Description of Artificial Sequence: Synthetic oligonucleotide
ugccacucugagcaugucg

SEQ ID NO: 636519 - RNA, 19 nt, Artificial Sequence
  Description of Artificial Sequence: Synthetic oligonucleotide
aggcagauaccacuagagg

SEQ ID NO: 636520 - RNA, 19 nt, Artificial Sequence
  Description of Artificial Sequence: Synthetic oligonucleotide
acuguaaggcccauguggg

SEQ ID NO: 636521 - RNA, 19 nt, Artificial Sequence
  Description of Artificial Sequence: Synthetic oligonucleotide
agaagcaaucgaccgugcg

SEQ ID NO: 636522 - RNA, 19 nt, Artificial Sequence
  Description of Artificial Sequence: Synthetic oligonucleotide
auaagcagacguuucugcu

SEQ ID NO: 636523 - RNA, 19 nt, Artificial Sequence
  Description of Artificial Sequence: Synthetic oligonucleotide
ugagaucccaggccggucc

SEQ ID NO: 636524 - RNA, 19 nt, Artificial Sequence
  Description of Artificial Sequence: Synthetic oligonucleotide
cauugucuuugccacagag

SEQ ID NO: 636525 - RNA, 19 nt, Artificial Sequence
  Description of Artificial Sequence: Synthetic oligonucleotide
aagcaaucgaccgugcgca

SEQ ID NO: 636526 - RNA, 19 nt, Artificial Sequence
  Description of Artificial Sequence: Synthetic oligonucleotide
aguaaaccuauuagcuccc

SEQ ID NO: 636527 - RNA, 19 nt, Artificial Sequence
  Description of Artificial Sequence: Synthetic oligonucleotide
uagguccauaagcagacgu

SEQ ID NO: 636528 - RNA, 19 nt, Artificial Sequence
  Description of Artificial Sequence: Synthetic oligonucleotide
agagaugucccugauccag

SEQ ID NO: 636529 - RNA, 19 nt, Artificial Sequence
  Description of Artificial Sequence: Synthetic oligonucleotide
agagcuaguugccaagcca

SEQ ID NO: 636530 - RNA, 19 nt, Artificial Sequence
  Description of Artificial Sequence: Synthetic oligonucleotide
uagcauuaagugaccagcu

SEQ ID NO: 636531 - RNA, 19 nt, Artificial Sequence
  Description of Artificial Sequence: Synthetic oligonucleotide
guagaagcaaucgaccgug

SEQ ID NO: 636532 - RNA, 19 nt, Artificial Sequence
  Description of Artificial Sequence: Synthetic oligonucleotide
acuacaccgaggccgggcg

SEQ ID NO: 636533 - RNA, 19 nt, Artificial Sequence
  Description of Artificial Sequence: Synthetic oligonucleotide
gggagaacuugucagcugg

SEQ ID NO: 636534 - RNA, 19 nt, Artificial Sequence
  Description of Artificial Sequence: Synthetic oligonucleotide
uuaagugaccagcuucaaa

SEQ ID NO: 636535 - RNA, 19 nt, Artificial Sequence
  Description of Artificial Sequence: Synthetic oligonucleotide
gaaaggcagauaccacuag

SEQ ID NO: 636536 - RNA, 19 nt, Artificial Sequence
  Description of Artificial Sequence: Synthetic oligonucleotide
gagggauacgggaugcugg

SEQ ID NO: 636537 - RNA, 19 nt, Artificial Sequence
  Description of Artificial Sequence: Synthetic oligonucleotide
ucgaccgugcgcauguuga

SEQ ID NO: 636538 - RNA, 19 nt, Artificial Sequence
  Description of Artificial Sequence: Synthetic oligonucleotide
aaucgcagaauggccaucu

SEQ ID NO: 636539 - RNA, 19 nt, Artificial Sequence
  Description of Artificial Sequence: Synthetic oligonucleotide
gauauggcucccugguggc

SEQ ID NO: 636540 - RNA, 19 nt, Artificial Sequence
  Description of Artificial Sequence: Synthetic oligonucleotide
gauucauaagggaaucgca

SEQ ID NO: 636541 - RNA, 19 nt, Artificial Sequence
  Description of Artificial Sequence: Synthetic oligonucleotide
agcacuaaucuagaggaca

SEQ ID NO: 636542 - RNA, 19 nt, Artificial Sequence
  Description of Artificial Sequence: Synthetic oligonucleotide
gaugggugaaggccuuagg

SEQ ID NO: 636543 - RNA, 19 nt, Artificial Sequence
  Description of Artificial Sequence: Synthetic oligonucleotide
uaagcagacguuucugcuc

SEQ ID NO: 636544 - RNA, 19 nt, Artificial Sequence
  Description of Artificial Sequence: Synthetic oligonucleotide
ccuauuagcucccaugagc

SEQ ID NO: 636545 - RNA, 19 nt, Artificial Sequence
  Description of Artificial Sequence: Synthetic oligonucleotide
cagcuucaaaccaugcaag

SEQ ID NO: 636546 - RNA, 19 nt, Artificial Sequence
  Description of Artificial Sequence: Synthetic oligonucleotide
agcucaugcgcuccgcagg

SEQ ID NO: 636547 - RNA, 19 nt, Artificial Sequence
  Description of Artificial Sequence: Synthetic oligonucleotide
agggaaguguccaugagcu

SEQ ID NO: 636548 - RNA, 19 nt, Artificial Sequence
  Description of Artificial Sequence: Synthetic oligonucleotide
agcauccauugucuuugcc

SEQ ID NO: 636549 - RNA, 19 nt, Artificial Sequence
  Description of Artificial Sequence: Synthetic oligonucleotide
uauacaaccuggguggcau

SEQ ID NO: 636550 - RNA, 19 nt, Artificial Sequence
  Description of Artificial Sequence: Synthetic oligonucleotide
ucacagacagcuugcugug

SEQ ID NO: 636551 - RNA, 19 nt, Artificial Sequence
  Description of Artificial Sequence: Synthetic oligonucleotide
aucccuauaguguguccuc

SEQ ID NO: 636552 - RNA, 19 nt, Artificial Sequence
  Description of Artificial Sequence: Synthetic oligonucleotide
acgauagacacagcaaucu

SEQ ID NO: 636553 - RNA, 19 nt, Artificial Sequence
  Description of Artificial Sequence: Synthetic oligonucleotide
aauucauccuuugggcgga

SEQ ID NO: 636554 - RNA, 19 nt, Artificial Sequence
  Description of Artificial Sequence: Synthetic oligonucleotide
cuagaggacagcagacuac

SEQ ID NO: 636555 - RNA, 19 nt, Artificial Sequence
  Description of Artificial Sequence: Synthetic oligonucleotide
uaggggcuaggucagugug

SEQ ID NO: 636556 - RNA, 19 nt, Artificial Sequence
  Description of Artificial Sequence: Synthetic oligonucleotide
gauagagaugucccugauc

SEQ ID NO: 636557 - RNA, 19 nt, Artificial Sequence
  Description of Artificial Sequence: Synthetic oligonucleotide
aggguugauccucucagga

SEQ ID NO: 636558 - RNA, 19 nt, Artificial Sequence
  Description of Artificial Sequence: Synthetic oligonucleotide
gguaccuagcauuaaguga

SEQ ID NO: 636559 - RNA, 19 nt, Artificial Sequence
  Description of Artificial Sequence: Synthetic oligonucleotide
cuauggaucacagacagcu

SEQ ID NO: 636560 - RNA, 19 nt, Artificial Sequence
  Description of Artificial Sequence: Synthetic oligonucleotide
uugcaaccagcauccauug

SEQ ID NO: 636561 - RNA, 19 nt, Artificial Sequence
  Description of Artificial Sequence: Synthetic oligonucleotide
uggagagcacuaaucuaga

SEQ ID NO: 636562 - RNA, 19 nt, Artificial Sequence
  Description of Artificial Sequence: Synthetic oligonucleotide
uccuccggaauugucaugu

SEQ ID NO: 636563 - RNA, 19 nt, Artificial Sequence
  Description of Artificial Sequence: Synthetic oligonucleotide
aaacaccaccaaaguaaac

SEQ ID NO: 636564 - RNA, 19 nt, Artificial Sequence
  Description of Artificial Sequence: Synthetic oligonucleotide
agcagacuacaccgaggcc

SEQ ID NO: 636565 - RNA, 19 nt, Artificial Sequence
  Description of Artificial Sequence: Synthetic oligonucleotide
ucuuaguuuugugcaaggu

SEQ ID NO: 636566 - RNA, 19 nt, Artificial Sequence
  Description of Artificial Sequence: Synthetic oligonucleotide
gucgcacaucuucacaugc

SEQ ID NO: 636567 - RNA, 19 nt, Artificial Sequence
  Description of Artificial Sequence: Synthetic oligonucleotide
ucaaaguuucugucuccga

SEQ ID NO: 636568 - RNA, 19 nt, Artificial Sequence
  Description of Artificial Sequence: Synthetic oligonucleotide
aggauagagaugucccuga

SEQ ID NO: 636569 - RNA, 19 nt, Artificial Sequence
  Description of Artificial Sequence: Synthetic oligonucleotide
agcuuauggcuguagguaa

SEQ ID NO: 636570 - RNA, 19 nt, Artificial Sequence
  Description of Artificial Sequence: Synthetic oligonucleotide
gaugaggacauuggacggc

SEQ ID NO: 636571 - RNA, 19 nt, Artificial Sequence
  Description of Artificial Sequence: Synthetic oligonucleotide
agaggcaacagcaucugca

SEQ ID NO: 636572 - RNA, 19 nt, Artificial Sequence
  Description of Artificial Sequence: Synthetic oligonucleotide
ggugaagaaaggguguucc

SEQ ID NO: 636573 - RNA, 19 nt, Artificial Sequence
  Description of Artificial Sequence: Synthetic oligonucleotide
gugaguucacaguggcccg

SEQ ID NO: 636574 - RNA, 19 nt, Artificial Sequence
  Description of Artificial Sequence: Synthetic oligonucleotide
uauuagcucccaugagcug

SEQ ID NO: 636575 - RNA, 19 nt, Artificial Sequence
  Description of Artificial Sequence: Synthetic oligonucleotide
cacgauagacacagcaauc

SEQ ID NO: 636576 - RNA, 19 nt, Artificial Sequence
  Description of Artificial Sequence: Synthetic oligonucleotide
cuuggaggguugauauggc

SEQ ID NO: 636577 - RNA, 19 nt, Artificial Sequence
  Description of Artificial Sequence: Synthetic oligonucleotide
uagcuuauggcuguaggua

SEQ ID NO: 636578 - RNA, 19 nt, Artificial Sequence
  Description of Artificial Sequence: Synthetic oligonucleotide
auggugaugccgaggcucc

SEQ ID NO: 636579 - RNA, 19 nt, Artificial Sequence
  Description of Artificial Sequence: Synthetic oligonucleotide
cuauuagcucccaugagcu

SEQ ID NO: 636580 - RNA, 19 nt, Artificial Sequence
  Description of Artificial Sequence: Synthetic oligonucleotide
guugccaagccagacagga

SEQ ID NO: 636581 - RNA, 19 nt, Artificial Sequence
  Description of Artificial Sequence: Synthetic oligonucleotide
uguagacuccagccugagc

SEQ ID NO: 636582 - RNA, 19 nt, Artificial Sequence
  Description of Artificial Sequence: Synthetic oligonucleotide
gguugauauggcucccugg

SEQ ID NO: 636583 - RNA, 19 nt, Artificial Sequence
  Description of Artificial Sequence: Synthetic oligonucleotide
acgguguagaagcaaucga

SEQ ID NO: 636584 - RNA, 19 nt, Artificial Sequence
  Description of Artificial Sequence: Synthetic oligonucleotide
guugauauggcucccuggu

SEQ ID NO: 636585 - RNA, 19 nt, Artificial Sequence
  Description of Artificial Sequence: Synthetic oligonucleotide
cugagauagucaccaaguc

SEQ ID NO: 636586 - RNA, 19 nt, Artificial Sequence
  Description of Artificial Sequence: Synthetic oligonucleotide
ggauacgggaugcuggcag

SEQ ID NO: 636587 - RNA, 19 nt, Artificial Sequence
  Description of Artificial Sequence: Synthetic oligonucleotide
acacagguuauccguaaau

SEQ ID NO: 636588 - RNA, 19 nt, Artificial Sequence
  Description of Artificial Sequence: Synthetic oligonucleotide
cauuggacggcuucacauc

SEQ ID NO: 636589 - RNA, 19 nt, Artificial Sequence
  Description of Artificial Sequence: Synthetic oligonucleotide
gcauuaagugaccagcuuc

SEQ ID NO: 636590 - RNA, 19 nt, Artificial Sequence
  Description of Artificial Sequence: Synthetic oligonucleotide
gguguagaagcaaucgacc

SEQ ID NO: 636591 - RNA, 19 nt, Artificial Sequence
  Description of Artificial Sequence: Synthetic oligonucleotide
aucuagguccauaagcaga

SEQ ID NO: 636592 - RNA, 19 nt, Artificial Sequence
  Description of Artificial Sequence: Synthetic oligonucleotide
uacaaccuggguggcaucc

SEQ ID NO: 636593 - RNA, 19 nt, Artificial Sequence
  Description of Artificial Sequence: Synthetic oligonucleotide
uuggaggguugauauggcu

SEQ ID NO: 636594 - RNA, 19 nt, Artificial Sequence
  Description of Artificial Sequence: Synthetic oligonucleotide
auagguuccugcccagaga

SEQ ID NO: 636595 - RNA, 19 nt, Artificial Sequence
  Description of Artificial Sequence: Synthetic oligonucleotide
uggggaugguuccuccacc

SEQ ID NO: 636596 - RNA, 19 nt, Artificial Sequence
  Description of Artificial Sequence: Synthetic oligonucleotide
gcaaccagcauccauuguc

SEQ ID NO: 636597 - RNA, 19 nt, Artificial Sequence
  Description of Artificial Sequence: Synthetic oligonucleotide
cugagcaugucgcaccuuc

SEQ ID NO: 636598 - RNA, 19 nt, Artificial Sequence
  Description of Artificial Sequence: Synthetic oligonucleotide
acgggaugcuggcagacca

SEQ ID NO: 636599 - RNA, 19 nt, Artificial Sequence
  Description of Artificial Sequence: Synthetic oligonucleotide
aggcaacagcaucugcagg

SEQ ID NO: 636600 - RNA, 19 nt, Artificial Sequence
  Description of Artificial Sequence: Synthetic oligonucleotide
agccauguaaggcuugcaa

SEQ ID NO: 636601 - RNA, 19 nt, Artificial Sequence
  Description of Artificial Sequence: Synthetic oligonucleotide
cacagguuauccguaaauc

SEQ ID NO: 636602 - RNA, 19 nt, Artificial Sequence
  Description of Artificial Sequence: Synthetic oligonucleotide
uaccuagcauuaagugacc

SEQ ID NO: 636603 - RNA, 19 nt, Artificial Sequence
  Description of Artificial Sequence: Synthetic oligonucleotide
agucgcacaucuucacaug

SEQ ID NO: 636604 - RNA, 19 nt, Artificial Sequence
  Description of Artificial Sequence: Synthetic oligonucleotide
aguuuugugcaaggugaag

SEQ ID NO: 636605 - RNA, 19 nt, Artificial Sequence
  Description of Artificial Sequence: Synthetic oligonucleotide
uuagcucccaugagcuggu

SEQ ID NO: 636606 - RNA, 19 nt, Artificial Sequence
  Description of Artificial Sequence: Synthetic oligonucleotide
cugugauccugcugguacc

SEQ ID NO: 636607 - RNA, 19 nt, Artificial Sequence
  Description of Artificial Sequence: Synthetic oligonucleotide
accgugcgcauguugauau

SEQ ID NO: 636608 - RNA, 19 nt, Artificial Sequence
  Description of Artificial Sequence: Synthetic oligonucleotide
aaaguccauucaguuguga

SEQ ID NO: 636609 - RNA, 19 nt, Artificial Sequence
  Description of Artificial Sequence: Synthetic oligonucleotide
uguccuccggaauugucau

SEQ ID NO: 636610 - RNA, 19 nt, Artificial Sequence
  Description of Artificial Sequence: Synthetic oligonucleotide
cuguagguaagugcugccc

SEQ ID NO: 636611 - RNA, 19 nt, Artificial Sequence
  Description of Artificial Sequence: Synthetic oligonucleotide
ugaugccaaagucgcacau

SEQ ID NO: 636612 - RNA, 19 nt, Artificial Sequence
  Description of Artificial Sequence: Synthetic oligonucleotide
uuugugcaaggugaagaaa

SEQ ID NO: 636613 - RNA, 19 nt, Artificial Sequence
  Description of Artificial Sequence: Synthetic oligonucleotide
cagcaauagguuccugccc

SEQ ID NO: 636614 - RNA, 19 nt, Artificial Sequence
  Description of Artificial Sequence: Synthetic oligonucleotide
ggcaccauagaaagugacg

SEQ ID NO: 636615 - RNA, 19 nt, Artificial Sequence
  Description of Artificial Sequence: Synthetic oligonucleotide
caggguugauccucucagg

SEQ ID NO: 636616 - RNA, 19 nt, Artificial Sequence
  Description of Artificial Sequence: Synthetic oligonucleotide
accccguaggcuccucggc

SEQ ID NO: 636617 - RNA, 19 nt, Artificial Sequence
  Description of Artificial Sequence: Synthetic oligonucleotide
acaugccccuccuuguuga

SEQ ID NO: 636618 - RNA, 19 nt, Artificial Sequence
  Description of Artificial Sequence: Synthetic oligonucleotide
ggcagauaccacuagaggu

SEQ ID NO: 636619 - RNA, 19 nt, Artificial Sequence
  Description of Artificial Sequence: Synthetic oligonucleotide
uggacggucgcgguggaga

SEQ ID NO: 636620 - RNA, 19 nt, Artificial Sequence
  Description of Artificial Sequence: Synthetic oligonucleotide
gauacgggaugcuggcaga

SEQ ID NO: 636621 - RNA, 19 nt, Artificial Sequence
  Description of Artificial Sequence: Synthetic oligonucleotide
aggaccagaauggcaguag

SEQ ID NO: 636622 - RNA, 19 nt, Artificial Sequence
  Description of Artificial Sequence: Synthetic oligonucleotide
cuaguugccaagccagaca

SEQ ID NO: 636623 - RNA, 19 nt, Artificial Sequence
  Description of Artificial Sequence: Synthetic oligonucleotide
auacgggaugcuggcagac

SEQ ID NO: 636624 - RNA, 19 nt, Artificial Sequence
  Description of Artificial Sequence: Synthetic oligonucleotide
agcauuaagugaccagcuu

SEQ ID NO: 636625 - RNA, 19 nt, Artificial Sequence
  Description of Artificial Sequence: Synthetic oligonucleotide
aucuagaggacagcagacu

SEQ ID NO: 636626 - RNA, 19 nt, Artificial Sequence
  Description of Artificial Sequence: Synthetic oligonucleotide
cauucaguugugauuuaaa

SEQ ID NO: 636627 - RNA, 19 nt, Artificial Sequence
  Description of Artificial Sequence: Synthetic oligonucleotide
uagguaagugcugccccag

SEQ ID NO: 636628 - RNA, 19 nt, Artificial Sequence
  Description of Artificial Sequence: Synthetic oligonucleotide
augugggccuggcuggaag

SEQ ID NO: 636629 - RNA, 19 nt, Artificial Sequence
  Description of Artificial Sequence: Synthetic oligonucleotide
cuguggacggucgcggugg

SEQ ID NO: 636630 - RNA, 19 nt, Artificial Sequence
  Description of Artificial Sequence: Synthetic oligonucleotide
guagcuuauggcuguaggu

SEQ ID NO: 636631 - RNA, 19 nt, Artificial Sequence
  Description of Artificial Sequence: Synthetic oligonucleotide
aggcaacaaggauaauagu

SEQ ID NO: 636632 - RNA, 19 nt, Artificial Sequence
  Description of Artificial Sequence: Synthetic oligonucleotide
uagagaugucccugaucca

SEQ ID NO: 636633 - RNA, 19 nt, Artificial Sequence
  Description of Artificial Sequence: Synthetic oligonucleotide
gccauguaaggcuugcaac

SEQ ID NO: 636634 - RNA, 19 nt, Artificial Sequence
  Description of Artificial Sequence: Synthetic oligonucleotide
gcggcuaggggcuagguca

SEQ ID NO: 636635 - RNA, 19 nt, Artificial Sequence
  Description of Artificial Sequence: Synthetic oligonucleotide
auacaaccuggguggcauc

SEQ ID NO: 636636 - RNA, 19 nt, Artificial Sequence
  Description of Artificial Sequence: Synthetic oligonucleotide
guagguaagugcugcccca

SEQ ID NO: 636637 - RNA, 19 nt, Artificial Sequence
  Description of Artificial Sequence: Synthetic oligonucleotide
caugauggugccacucuga

SEQ ID NO: 636638 - RNA, 19 nt, Artificial Sequence
  Description of Artificial Sequence: Synthetic oligonucleotide
cuccgauggugaugaaggc

SEQ ID NO: 636639 - RNA, 19 nt, Artificial Sequence
  Description of Artificial Sequence: Synthetic oligonucleotide
gagcaugucgcaccuucuc

SEQ ID NO: 636640 - RNA, 19 nt, Artificial Sequence
  Description of Artificial Sequence: Synthetic oligonucleotide
ggagagcacuaaucuagag

SEQ ID NO: 636641 - RNA, 19 nt, Artificial Sequence
  Description of Artificial Sequence: Synthetic oligonucleotide
ggguugauccucucaggag

SEQ ID NO: 636642 - RNA, 19 nt, Artificial Sequence
  Description of Artificial Sequence: Synthetic oligonucleotide
caaaguccauucaguugug

SEQ ID NO: 636643 - RNA, 19 nt, Artificial Sequence
  Description of Artificial Sequence: Synthetic oligonucleotide
cuccggaauugucauguuc

SEQ ID NO: 636644 - RNA, 19 nt, Artificial Sequence
  Description of Artificial Sequence: Synthetic oligonucleotide
agaccauuggccagugaug

SEQ ID NO: 636645 - RNA, 19 nt, Artificial Sequence
  Description of Artificial Sequence: Synthetic oligonucleotide
agccugagcacagggguag

SEQ ID NO: 636646 - RNA, 19 nt, Artificial Sequence
  Description of Artificial Sequence: Synthetic oligonucleotide
ccuagcauuaagugaccag

SEQ ID NO: 636647 - RNA, 19 nt, Artificial Sequence
  Description of Artificial Sequence: Synthetic oligonucleotide
gcacuaaucuagaggacag

SEQ ID NO: 636648 - RNA, 19 nt, Artificial Sequence
  Description of Artificial Sequence: Synthetic oligonucleotide
cacaggccccuccaaauuc

SEQ ID NO: 636649 - RNA, 19 nt, Artificial Sequence
  Description of Artificial Sequence: Synthetic oligonucleotide
ccuaugaauccucucccag

SEQ ID NO: 636650 - RNA, 19 nt, Artificial Sequence
  Description of Artificial Sequence: Synthetic oligonucleotide
augaggacauuggacggcu

SEQ ID NO: 636651 - RNA, 19 nt, Artificial Sequence
  Description of Artificial Sequence: Synthetic oligonucleotide
agaauggcaguagcuuaug

SEQ ID NO: 636652 - RNA, 19 nt, Artificial Sequence
  Description of Artificial Sequence: Synthetic oligonucleotide
ucccuauaguguguccuca

SEQ ID NO: 636653 - RNA, 19 nt, Artificial Sequence
  Description of Artificial Sequence: Synthetic oligonucleotide
caagcuggccgguggacuc

SEQ ID NO: 636654 - RNA, 19 nt, Artificial Sequence
  Description of Artificial Sequence: Synthetic oligonucleotide
guugauaucuagguccaua

SEQ ID NO: 636655 - RNA, 19 nt, Artificial Sequence
  Description of Artificial Sequence: Synthetic oligonucleotide
cagaagcaccagcugacuc

SEQ ID NO: 636656 - RNA, 19 nt, Artificial Sequence
  Description of Artificial Sequence: Synthetic oligonucleotide
aucgaccgugcgcauguug

SEQ ID NO: 636657 - RNA, 19 nt, Artificial Sequence
  Description of Artificial Sequence: Synthetic oligonucleotide
cacuaaucuagaggacagc

SEQ ID NO: 636658 - RNA, 19 nt, Artificial Sequence
  Description of Artificial Sequence: Synthetic oligonucleotide
cauguaaggcuugcaacca

SEQ ID NO: 636659 - RNA, 19 nt, Artificial Sequence
  Description of Artificial Sequence: Synthetic oligonucleotide
aggacauuggacggcuuca

SEQ ID NO: 636660 - RNA, 19 nt, Artificial Sequence
  Description of Artificial Sequence: Synthetic oligonucleotide
aagcuggccgguggacucg

SEQ ID NO: 636661 - RNA, 19 nt, Artificial Sequence
  Description of Artificial Sequence: Synthetic oligonucleotide
ugcaaccagcauccauugu

SEQ ID NO: 636662 - RNA, 19 nt, Artificial Sequence
  Description of Artificial Sequence: Synthetic oligonucleotide
aggcagcucaacacacccc

SEQ ID NO: 636663 - RNA, 19 nt, Artificial Sequence
  Description of Artificial Sequence: Synthetic oligonucleotide
gucuuaggggauucagcuc

SEQ ID NO: 636664 - RNA, 19 nt, Artificial Sequence
  Description of Artificial Sequence: Synthetic oligonucleotide
acggucgcgguggagagca

SEQ ID NO: 636665 - RNA, 19 nt, Artificial Sequence
  Description of Artificial Sequence: Synthetic oligonucleotide
gacggcuucacaucucuau

SEQ ID NO: 636666 - RNA, 19 nt, Artificial Sequence
  Description of Artificial Sequence: Synthetic oligonucleotide
cuagguccauaagcagacg

SEQ ID NO: 636667 - RNA, 19 nt, Artificial Sequence
  Description of Artificial Sequence: Synthetic oligonucleotide
aggccuuaggcagcucaac

SEQ ID NO: 636668 - RNA, 19 nt, Artificial Sequence
  Description of Artificial Sequence: Synthetic oligonucleotide
guaaggcuugcaaccagca

SEQ ID NO: 636669 - RNA, 19 nt, Artificial Sequence
  Description of Artificial Sequence: Synthetic oligonucleotide
caccccguaggcuccucgg

SEQ ID NO: 636670 - RNA, 19 nt, Artificial Sequence
  Description of Artificial Sequence: Synthetic oligonucleotide
gcucaugcgcuccgcaggg

SEQ ID NO: 636671 - RNA, 19 nt, Artificial Sequence
  Description of Artificial Sequence: Synthetic oligonucleotide
gcgcauguugauaucuagg

SEQ ID NO: 636672 - RNA, 19 nt, Artificial Sequence
  Description of Artificial Sequence: Synthetic oligonucleotide
cacucugagcaugucgcac

SEQ ID NO: 636673 - RNA, 19 nt, Artificial Sequence
  Description of Artificial Sequence: Synthetic oligonucleotide
gggagagcuaguugccaag

SEQ ID NO: 636674 - RNA, 19 nt, Artificial Sequence
  Description of Artificial Sequence: Synthetic oligonucleotide
cuuuggccuguccacagaa

SEQ ID NO: 636675 - RNA, 19 nt, Artificial Sequence
  Description of Artificial Sequence: Synthetic oligonucleotide
ugaaggcccgggaguccag

SEQ ID NO: 636676 - RNA, 19 nt, Artificial Sequence
  Description of Artificial Sequence: Synthetic oligonucleotide
agguuauccguaaauccuu

SEQ ID NO: 636677 - RNA, 19 nt, Artificial Sequence
  Description of Artificial Sequence: Synthetic oligonucleotide
agugagaucccaggccggu

SEQ ID NO: 636678 - RNA, 19 nt, Artificial Sequence
  Description of Artificial Sequence: Synthetic oligonucleotide
ggcuguagguaagugcugc

SEQ ID NO: 636679 - RNA, 19 nt, Artificial Sequence
  Description of Artificial Sequence: Synthetic oligonucleotide
aguuucugucuccgauggu

SEQ ID NO: 636680 - RNA, 19 nt, Artificial Sequence
  Description of Artificial Sequence: Synthetic oligonucleotide
ucccugauccaggccagug

SEQ ID NO: 636681 - RNA, 19 nt, Artificial Sequence
  Description of Artificial Sequence: Synthetic oligonucleotide
gcccgcacgauagacacag

SEQ ID NO: 636682 - RNA, 19 nt, Artificial Sequence
  Description of Artificial Sequence: Synthetic oligonucleotide
accuagcauuaagugacca

SEQ ID NO: 636683 - RNA, 19 nt, Artificial Sequence
  Description of Artificial Sequence: Synthetic oligonucleotide
uacgggaugcuggcagacc

SEQ ID NO: 636684 - RNA, 19 nt, Artificial Sequence
  Description of Artificial Sequence: Synthetic oligonucleotide
guccauucaguugugauuu

SEQ ID NO: 636685 - RNA, 19 nt, Artificial Sequence
  Description of Artificial Sequence: Synthetic oligonucleotide
gagcacuaaucuagaggac

SEQ ID NO: 636686 - RNA, 19 nt, Artificial Sequence
  Description of Artificial Sequence: Synthetic oligonucleotide
auuaagugaccagcuucaa

SEQ ID NO: 636687 - RNA, 19 nt, Artificial Sequence
  Description of Artificial Sequence: Synthetic oligonucleotide
gauucagcucaucccuaua

SEQ ID NO: 636688 - RNA, 19 nt, Artificial Sequence
  Description of Artificial Sequence: Synthetic oligonucleotide
cacagggguagcugugauc

SEQ ID NO: 636689 - RNA, 19 nt, Artificial Sequence
  Description of Artificial Sequence: Synthetic oligonucleotide
ggcaacaaggauaauaguu

SEQ ID NO: 636690 - RNA, 19 nt, Artificial Sequence
  Description of Artificial Sequence: Synthetic oligonucleotide
cucaggguugauccucuca

SEQ ID NO: 636691 - RNA, 19 nt, Artificial Sequence
  Description of Artificial Sequence: Synthetic oligonucleotide
aguugccaagccagacagg

SEQ ID NO: 636692 - RNA, 19 nt, Artificial Sequence
  Description of Artificial Sequence: Synthetic oligonucleotide
aaggccuuaggcagcucaa

SEQ ID NO: 636693 - RNA, 19 nt, Artificial Sequence
  Description of Artificial Sequence: Synthetic oligonucleotide
cagcucaucccuauagugu

SEQ ID NO: 636694 - RNA, 19 nt, Artificial Sequence
  Description of Artificial Sequence: Synthetic oligonucleotide
uggacucgcggcgggagac

SEQ ID NO: 636695 - RNA, 19 nt, Artificial Sequence
  Description of Artificial Sequence: Synthetic oligonucleotide
ggcacuguaaggcccaugu

SEQ ID NO: 636696 - RNA, 19 nt, Artificial Sequence
  Description of Artificial Sequence: Synthetic oligonucleotide
gggaaucgcagaauggcca

SEQ ID NO: 636697 - RNA, 19 nt, Artificial Sequence
  Description of Artificial Sequence: Synthetic oligonucleotide
uagagaccauuggccagug

SEQ ID NO: 636698 - RNA, 19 nt, Artificial Sequence
  Description of Artificial Sequence: Synthetic oligonucleotide
cccggauucgcuucacagc

SEQ ID NO: 636699 - RNA, 19 nt, Artificial Sequence
  Description of Artificial Sequence: Synthetic oligonucleotide
guccauaagcagacguuuc

SEQ ID NO: 636700 - RNA, 19 nt, Artificial Sequence
  Description of Artificial Sequence: Synthetic oligonucleotide
augaauccucucccaggau

SEQ ID NO: 636701 - RNA, 19 nt, Artificial Sequence
  Description of Artificial Sequence: Synthetic oligonucleotide
ggguugauauggcucccug

SEQ ID NO: 636702 - RNA, 19 nt, Artificial Sequence
  Description of Artificial Sequence: Synthetic oligonucleotide
caucucuauggaucacaga

SEQ ID NO: 636703 - RNA, 19 nt, Artificial Sequence
  Description of Artificial Sequence: Synthetic oligonucleotide
gcuuauggcuguagguaag

SEQ ID NO: 636704 - RNA, 19 nt, Artificial Sequence
  Description of Artificial Sequence: Synthetic oligonucleotide
aggcuuggauaggcaggcc

SEQ ID NO: 636705 - RNA, 19 nt, Artificial Sequence
  Description of Artificial Sequence: Synthetic oligonucleotide
gcaugucgcaccuucucca

SEQ ID NO: 636706 - RNA, 19 nt, Artificial Sequence
  Description of Artificial Sequence: Synthetic oligonucleotide
uguggacggucgcggugga

SEQ ID NO: 636707 - RNA, 19 nt, Artificial Sequence
  Description of Artificial Sequence: Synthetic oligonucleotide
uccauucaguugugauuua

SEQ ID NO: 636708 - RNA, 19 nt, Artificial Sequence
  Description of Artificial Sequence: Synthetic oligonucleotide
ugcuguggacggucgcggu

SEQ ID NO: 636709 - RNA, 19 nt, Artificial Sequence
  Description of Artificial Sequence: Synthetic oligonucleotide
auccaggccaguguacaaa

SEQ ID NO: 636710 - RNA, 19 nt, Artificial Sequence
  Description of Artificial Sequence: Synthetic oligonucleotide
ggccagugaugggugaagg

SEQ ID NO: 636711 - RNA, 19 nt, Artificial Sequence
  Description of Artificial Sequence: Synthetic oligonucleotide
caguagcuuauggcuguag

SEQ ID NO: 636712 - RNA, 19 nt, Artificial Sequence
  Description of Artificial Sequence: Synthetic oligonucleotide
ggccuuaggcagcucaaca

SEQ ID NO: 636713 - RNA, 19 nt, Artificial Sequence
  Description of Artificial Sequence: Synthetic oligonucleotide
gcaacaaggauaauaguuu

SEQ ID NO: 636714 - RNA, 19 nt, Artificial Sequence
  Description of Artificial Sequence: Synthetic oligonucleotide
ccuuaggcagcucaacaca

SEQ ID NO: 636715 - RNA, 19 nt, Artificial Sequence
  Description of Artificial Sequence: Synthetic oligonucleotide
ggggagaacuugucagcug

SEQ ID NO: 636716 - RNA, 19 nt, Artificial Sequence
  Description of Artificial Sequence: Synthetic oligonucleotide
aucucgcccaggauguccu

SEQ ID NO: 636717 - RNA, 19 nt, Artificial Sequence
  Description of Artificial Sequence: Synthetic oligonucleotide
caccuuccgguagaacuug

SEQ ID NO: 636718 - RNA, 19 nt, Artificial Sequence
  Description of Artificial Sequence: Synthetic oligonucleotide
agguccauaagcagacguu

SEQ ID NO: 636719 - RNA, 19 nt, Artificial Sequence
  Description of Artificial Sequence: Synthetic oligonucleotide
caaucgaccgugcgcaugu

SEQ ID NO: 636720 - RNA, 19 nt, Artificial Sequence
  Description of Artificial Sequence: Synthetic oligonucleotide
gcuaguugccaagccagac

SEQ ID NO: 636721 - RNA, 19 nt, Artificial Sequence
  Description of Artificial Sequence: Synthetic oligonucleotide
cuggcagaccagugagauc

SEQ ID NO: 636722 - RNA, 19 nt, Artificial Sequence
  Description of Artificial Sequence: Synthetic oligonucleotide
gcagagggauacgggaugc

SEQ ID NO: 636723 - RNA, 19 nt, Artificial Sequence
  Description of Artificial Sequence: Synthetic oligonucleotide
guaaaccuauuagcuccca

SEQ ID NO: 636724 - RNA, 19 nt, Artificial Sequence
  Description of Artificial Sequence: Synthetic oligonucleotide
aggguugauauggcucccu

SEQ ID NO: 636725 - RNA, 19 nt, Artificial Sequence
  Description of Artificial Sequence: Synthetic oligonucleotide
gcggcgggagacuccaugc

SEQ ID NO: 636726 - RNA, 19 nt, Artificial Sequence
  Description of Artificial Sequence: Synthetic oligonucleotide
accgaggccgggcgcgcuc

SEQ ID NO: 636727 - RNA, 19 nt, Artificial Sequence
  Description of Artificial Sequence: Synthetic oligonucleotide
uuaggggauucagcucauc

SEQ ID NO: 636728 - RNA, 19 nt, Artificial Sequence
  Description of Artificial Sequence: Synthetic oligonucleotide
ugaggacauuggacggcuu

SEQ ID NO: 636729 - RNA, 19 nt, Artificial Sequence
  Description of Artificial Sequence: Synthetic oligonucleotide
caucccuauaguguguccu

SEQ ID NO: 636730 - RNA, 19 nt, Artificial Sequence
  Description of Artificial Sequence: Synthetic oligonucleotide
guccuccggaauugucaug

SEQ ID NO: 636731 - RNA, 19 nt, Artificial Sequence
  Description of Artificial Sequence: Synthetic oligonucleotide
cacacuuggaggguugaua

SEQ ID NO: 636732 - RNA, 19 nt, Artificial Sequence
  Description of Artificial Sequence: Synthetic oligonucleotide
acucgcggcgggagacucc

SEQ ID NO: 636733 - RNA, 19 nt, Artificial Sequence
  Description of Artificial Sequence: Synthetic oligonucleotide
agcuaguugccaagccaga

SEQ ID NO: 636734 - RNA, 19 nt, Artificial Sequence
  Description of Artificial Sequence: Synthetic oligonucleotide
cuagagaccauuggccagu

SEQ ID NO: 636735 - RNA, 19 nt, Artificial Sequence
  Description of Artificial Sequence: Synthetic oligonucleotide
uuggcacuugggagagcua

SEQ ID NO: 636736 - RNA, 19 nt, Artificial Sequence
  Description of Artificial Sequence: Synthetic oligonucleotide
ggcccgggaguccagguuc

SEQ ID NO: 636737 - RNA, 19 nt, Artificial Sequence
  Description of Artificial Sequence: Synthetic oligonucleotide
gcuguggacggucgcggug

SEQ ID NO: 636738 - RNA, 19 nt, Artificial Sequence
  Description of Artificial Sequence: Synthetic oligonucleotide
agcaaucgaccgugcgcau

SEQ ID NO: 636739 - RNA, 19 nt, Artificial Sequence
  Description of Artificial Sequence: Synthetic oligonucleotide
ggcaguagcuuauggcugu

SEQ ID NO: 636740 - RNA, 19 nt, Artificial Sequence
  Description of Artificial Sequence: Synthetic oligonucleotide
cagggcccgcacgauagac

SEQ ID NO: 636741 - RNA, 19 nt, Artificial Sequence
  Description of Artificial Sequence: Synthetic oligonucleotide
gcuaggggcuaggucagug

SEQ ID NO: 636742 - RNA, 19 nt, Artificial Sequence
  Description of Artificial Sequence: Synthetic oligonucleotide
cuuauggcuguagguaagu

SEQ ID NO: 636743 - RNA, 19 nt, Artificial Sequence
  Description of Artificial Sequence: Synthetic oligonucleotide
gccgguccccuaugaaucc

SEQ ID NO: 636744 - RNA, 19 nt, Artificial Sequence
  Description of Artificial Sequence: Synthetic oligonucleotide
ggccgguccccuaugaauc

SEQ ID NO: 636745 - RNA, 19 nt, Artificial Sequence
  Description of Artificial Sequence: Synthetic oligonucleotide
guuauccguaaauccuuuu

SEQ ID NO: 636746 - RNA, 19 nt, Artificial Sequence
  Description of Artificial Sequence: Synthetic oligonucleotide
ccuuuggucugaggcaagc

SEQ ID NO: 636747 - RNA, 19 nt, Artificial Sequence
  Description of Artificial Sequence: Synthetic oligonucleotide
ggcuuggauaggcaggccu

SEQ ID NO: 636748 - RNA, 19 nt, Artificial Sequence
  Description of Artificial Sequence: Synthetic oligonucleotide
augcgcuccgcaggguucu

SEQ ID NO: 636749 - RNA, 19 nt, Artificial Sequence
  Description of Artificial Sequence: Synthetic oligonucleotide
gagccauguaaggcuugca

SEQ ID NO: 636750 - RNA, 19 nt, Artificial Sequence
  Description of Artificial Sequence: Synthetic oligonucleotide
gggcaccauagaaagugac

SEQ ID NO: 636751 - RNA, 19 nt, Artificial Sequence
  Description of Artificial Sequence: Synthetic oligonucleotide
gacucgcggcgggagacuc

SEQ ID NO: 636752 - RNA, 19 nt, Artificial Sequence
  Description of Artificial Sequence: Synthetic oligonucleotide
ccgcacgauagacacagca

SEQ ID NO: 636753 - RNA, 19 nt, Artificial Sequence
  Description of Artificial Sequence: Synthetic oligonucleotide
gacggucgcgguggagagc

SEQ ID NO: 636754 - RNA, 19 nt, Artificial Sequence
  Description of Artificial Sequence: Synthetic oligonucleotide
acgucagacuugacauugu

SEQ ID NO: 636755 - RNA, 19 nt, Artificial Sequence
  Description of Artificial Sequence: Synthetic oligonucleotide
gugacgguguagaagcaau

SEQ ID NO: 636756 - RNA, 19 nt, Artificial Sequence
  Description of Artificial Sequence: Synthetic oligonucleotide
gcaaucucgcccaggaugu

SEQ ID NO: 636757 - RNA, 19 nt, Artificial Sequence
  Description of Artificial Sequence: Synthetic oligonucleotide
agggcccgcacgauagaca

SEQ ID NO: 636758 - RNA, 19 nt, Artificial Sequence
  Description of Artificial Sequence: Synthetic oligonucleotide
ccgguagaacuuguccagg

SEQ ID NO: 636759 - RNA, 19 nt, Artificial Sequence
  Description of Artificial Sequence: Synthetic oligonucleotide
gcaaucgaccgugcgcaug

SEQ ID NO: 636760 - RNA, 19 nt, Artificial Sequence
  Description of Artificial Sequence: Synthetic oligonucleotide
auggugccacucugagcau

SEQ ID NO: 636761 - RNA, 19 nt, Artificial Sequence
  Description of Artificial Sequence: Synthetic oligonucleotide
cggcccaguucugagauag

SEQ ID NO: 636762 - RNA, 19 nt, Artificial Sequence
  Description of Artificial Sequence: Synthetic oligonucleotide
cucggcccaguucugagau

SEQ ID NO: 636763 - RNA, 19 nt, Artificial Sequence
  Description of Artificial Sequence: Synthetic oligonucleotide
gaccgugcgcauguugaua

SEQ ID NO: 636764 - RNA, 19 nt, Artificial Sequence
  Description of Artificial Sequence: Synthetic oligonucleotide
gcgguggagagcacuaauc

SEQ ID NO: 636765 - RNA, 19 nt, Artificial Sequence
  Description of Artificial Sequence: Synthetic oligonucleotide
ggaaucgcagaauggccau

SEQ ID NO: 636766 - RNA, 19 nt, Artificial Sequence
  Description of Artificial Sequence: Synthetic oligonucleotide
guggcggcuaggggcuagg

SEQ ID NO: 636767 - RNA, 19 nt, Artificial Sequence
  Description of Artificial Sequence: Synthetic oligonucleotide
ugguggccuugugcaaaga

SEQ ID NO: 636768 - RNA, 19 nt, Artificial Sequence
  Description of Artificial Sequence: Synthetic oligonucleotide
guggacucgcggcgggaga

SEQ ID NO: 636769 - RNA, 19 nt, Artificial Sequence
  Description of Artificial Sequence: Synthetic oligonucleotide
ucgcgguggagagcacuaa

SEQ ID NO: 636770 - RNA, 19 nt, Artificial Sequence
  Description of Artificial Sequence: Synthetic oligonucleotide
cucgcggcgggagacucca

SEQ ID NO: 636771 - RNA, 19 nt, Artificial Sequence
  Description of Artificial Sequence: Synthetic oligonucleotide
ggcggcuaggggcuagguc

SEQ ID NO: 636772 - RNA, 19 nt, Artificial Sequence
  Description of Artificial Sequence: Synthetic oligonucleotide
ucggcccaguucugagaua

SEQ ID NO: 636773 - RNA, 19 nt, Artificial Sequence
  Description of Artificial Sequence: Synthetic oligonucleotide
ggauucagcucaucccuau

SEQ ID NO: 636774 - RNA, 19 nt, Artificial Sequence
  Description of Artificial Sequence: Synthetic oligonucleotide
aaucgaccgugcgcauguu

SEQ ID NO: 636775 - RNA, 19 nt, Artificial Sequence
  Description of Artificial Sequence: Synthetic oligonucleotide
cgcuccgcaggguucuucc

SEQ ID NO: 636776 - RNA, 19 nt, Artificial Sequence
  Description of Artificial Sequence: Synthetic oligonucleotide
cgaucauggugaugccgag

SEQ ID NO: 636777 - RNA, 19 nt, Artificial Sequence
  Description of Artificial Sequence: Synthetic oligonucleotide
gcuuuggccuguccacaga

SEQ ID NO: 636778 - RNA, 19 nt, Artificial Sequence
  Description of Artificial Sequence: Synthetic oligonucleotide
ccccuccuuguugaugagg

SEQ ID NO: 636779 - RNA, 19 nt, Artificial Sequence
  Description of Artificial Sequence: Synthetic oligonucleotide
agcagacguuucugcucuu

SEQ ID NO: 636780 - RNA, 19 nt, Artificial Sequence
  Description of Artificial Sequence: Synthetic oligonucleotide
gugcgcauguugauaucua

SEQ ID NO: 636781 - RNA, 19 nt, Artificial Sequence
  Description of Artificial Sequence: Synthetic oligonucleotide
gucgcgguggagagcacua

SEQ ID NO: 636782 - RNA, 19 nt, Artificial Sequence
  Description of Artificial Sequence: Synthetic oligonucleotide
cgcacgauagacacagcaa

SEQ ID NO: 636783 - RNA, 19 nt, Artificial Sequence
  Description of Artificial Sequence: Synthetic oligonucleotide
caggaccagaauggcagua

SEQ ID NO: 636784 - RNA, 19 nt, Artificial Sequence
  Description of Artificial Sequence: Synthetic oligonucleotide
uggcggcuaggggcuaggu

SEQ ID NO: 636785 - RNA, 19 nt, Artificial Sequence
  Description of Artificial Sequence: Synthetic oligonucleotide
gcuugcaaccagcauccau

SEQ ID NO: 636786 - RNA, 19 nt, Artificial Sequence
  Description of Artificial Sequence: Synthetic oligonucleotide
guggacggucgcgguggag

SEQ ID NO: 636787 - RNA, 19 nt, Artificial Sequence
  Description of Artificial Sequence: Synthetic oligonucleotide
gaauggccaucucgaucau

SEQ ID NO: 636788 - RNA, 19 nt, Artificial Sequence
  Description of Artificial Sequence: Synthetic oligonucleotide
cggaauugucauguucuuc

SEQ ID NO: 636789 - RNA, 19 nt, Artificial Sequence
  Description of Artificial Sequence: Synthetic oligonucleotide
ggcaagcuggccgguggac

SEQ ID NO: 636790 - RNA, 19 nt, Artificial Sequence
  Description of Artificial Sequence: Synthetic oligonucleotide
ggcagaccagugagauccc

SEQ ID NO: 636791 - RNA, 19 nt, Artificial Sequence
  Description of Artificial Sequence: Synthetic oligonucleotide
cuuggauaggcaggccuuu

SEQ ID NO: 636792 - RNA, 19 nt, Artificial Sequence
  Description of Artificial Sequence: Synthetic oligonucleotide
ccgcaggguucuuccuuag

SEQ ID NO: 636793 - RNA, 19 nt, Artificial Sequence
  Description of Artificial Sequence: Synthetic oligonucleotide
gguuauccguaaauccuuu

SEQ ID NO: 636794 - RNA, 19 nt, Artificial Sequence
  Description of Artificial Sequence: Synthetic oligonucleotide
gggauacgggaugcuggca

SEQ ID NO: 636795 - RNA, 19 nt, Artificial Sequence
  Description of Artificial Sequence: Synthetic oligonucleotide
gcgggagacuccaugcugu

SEQ ID NO: 636796 - RNA, 19 nt, Artificial Sequence
  Description of Artificial Sequence: Synthetic oligonucleotide
ccgguggacucgcggcggg

SEQ ID NO: 636797 - RNA, 19 nt, Artificial Sequence
  Description of Artificial Sequence: Synthetic oligonucleotide
cgggagacuccaugcugug

SEQ ID NO: 636798 - RNA, 19 nt, Artificial Sequence
  Description of Artificial Sequence: Synthetic oligonucleotide
gcccgggaguccagguucc

SEQ ID NO: 636799 - RNA, 19 nt, Artificial Sequence
  Description of Artificial Sequence: Synthetic oligonucleotide
ccuuaggcacuggcuggug

SEQ ID NO: 636800 - RNA, 19 nt, Artificial Sequence
  Description of Artificial Sequence: Synthetic oligonucleotide
ggccgggcgcgcucauggc

SEQ ID NO: 636801 - RNA, 19 nt, Artificial Sequence
  Description of Artificial Sequence: Synthetic oligonucleotide
ccucggcccaguucugaga

SEQ ID NO: 636802 - RNA, 19 nt, Artificial Sequence
  Description of Artificial Sequence: Synthetic oligonucleotide
gcaagcuggccgguggacu

SEQ ID NO: 636803 - RNA, 19 nt, Artificial Sequence
  Description of Artificial Sequence: Synthetic oligonucleotide
caugugggccuggcuggaa

SEQ ID NO: 636804 - RNA, 19 nt, Artificial Sequence
  Description of Artificial Sequence: Synthetic oligonucleotide
gcuuggauaggcaggccuu

SEQ ID NO: 636805 - RNA, 19 nt, Artificial Sequence
  Description of Artificial Sequence: Synthetic oligonucleotide
ccccucaauuccuccugga

SEQ ID NO: 636806 - RNA, 19 nt, Artificial Sequence
  Description of Artificial Sequence: Synthetic oligonucleotide
cgguccccuaugaauccuc

SEQ ID NO: 636807 - RNA, 19 nt, Artificial Sequence
  Description of Artificial Sequence: Synthetic oligonucleotide
ccgugcgcauguugauauc

SEQ ID NO: 636808 - RNA, 19 nt, Artificial Sequence
  Description of Artificial Sequence: Synthetic oligonucleotide
cccgcacgauagacacagc

SEQ ID NO: 636809 - RNA, 19 nt, Artificial Sequence
  Description of Artificial Sequence: Synthetic oligonucleotide
ucgcggcgggagacuccau

SEQ ID NO: 636810 - RNA, 19 nt, Artificial Sequence
  Description of Artificial Sequence: Synthetic oligonucleotide
cagggguagcugugauccu

SEQ ID NO: 636811 - RNA, 19 nt, Artificial Sequence
  Description of Artificial Sequence: Synthetic oligonucleotide
caugccccuccuuguugau

SEQ ID NO: 636812 - RNA, 19 nt, Artificial Sequence
  Description of Artificial Sequence: Synthetic oligonucleotide
ggucgcgguggagagcacu

SEQ ID NO: 636813 - RNA, 19 nt, Artificial Sequence
  Description of Artificial Sequence: Synthetic oligonucleotide
cagcaaucucgcccaggau

SEQ ID NO: 636814 - RNA, 19 nt, Artificial Sequence
  Description of Artificial Sequence: Synthetic oligonucleotide
ccaggccgguccccuauga

SEQ ID NO: 636815 - RNA, 19 nt, Artificial Sequence
  Description of Artificial Sequence: Synthetic oligonucleotide
caguggcccggauucgcuu

SEQ ID NO: 636816 - RNA, 19 nt, Artificial Sequence
  Description of Artificial Sequence: Synthetic oligonucleotide
gcucaucccuauagugugu

SEQ ID NO: 636817 - RNA, 19 nt, Artificial Sequence
  Description of Artificial Sequence: Synthetic oligonucleotide
gguugggugcagguggcuu

SEQ ID NO: 636818 - RNA, 19 nt, Artificial Sequence
  Description of Artificial Sequence: Synthetic oligonucleotide
cgugcgcauguugauaucu

SEQ ID NO: 636819 - RNA, 19 nt, Artificial Sequence
  Description of Artificial Sequence: Synthetic oligonucleotide
gcuggccgguggacucgcg

SEQ ID NO: 636820 - RNA, 19 nt, Artificial Sequence
  Description of Artificial Sequence: Synthetic oligonucleotide
gcaguagcuuauggcugua

SEQ ID NO: 636821 - RNA, 19 nt, Artificial Sequence
  Description of Artificial Sequence: Synthetic oligonucleotide
ccggaauugucauguucuu

SEQ ID NO: 636822 - RNA, 19 nt, Artificial Sequence
  Description of Artificial Sequence: Synthetic oligonucleotide
gcgcuccgcaggguucuuc

SEQ ID NO: 636823 - RNA, 19 nt, Artificial Sequence
  Description of Artificial Sequence: Synthetic oligonucleotide
ggacucgcggcgggagacu

SEQ ID NO: 636824 - RNA, 19 nt, Artificial Sequence
  Description of Artificial Sequence: Synthetic oligonucleotide
ggguugggugcagguggcu

SEQ ID NO: 636825 - RNA, 19 nt, Artificial Sequence
  Description of Artificial Sequence: Synthetic oligonucleotide
cgcgguggagagcacuaau

SEQ ID NO: 636826 - RNA, 19 nt, Artificial Sequence
  Description of Artificial Sequence: Synthetic oligonucleotide
ccgaggccgggcgcgcuca

SEQ ID NO: 636827 - RNA, 19 nt, Artificial Sequence
  Description of Artificial Sequence: Synthetic oligonucleotide
ccuccggaauugucauguu

SEQ ID NO: 636828 - RNA, 19 nt, Artificial Sequence
  Description of Artificial Sequence: Synthetic oligonucleotide
cgaccgugcgcauguugau

SEQ ID NO: 636829 - RNA, 19 nt, Artificial Sequence
  Description of Artificial Sequence: Synthetic oligonucleotide
ccgguccccuaugaauccu

SEQ ID NO: 636830 - RNA, 19 nt, Artificial Sequence
  Description of Artificial Sequence: Synthetic oligonucleotide
caccgaggccgggcgcgcu

SEQ ID NO: 636831 - RNA, 19 nt, Artificial Sequence
  Description of Artificial Sequence: Synthetic oligonucleotide
cggucgcgguggagagcac

SEQ ID NO: 636832 - RNA, 19 nt, Artificial Sequence
  Description of Artificial Sequence: Synthetic oligonucleotide
uauaaaauagacuaaagga

SEQ ID NO: 636833 - RNA, 19 nt, Artificial Sequence
  Description of Artificial Sequence: Synthetic oligonucleotide
aguaucaagaguuuuauac

SEQ ID NO: 636834 - RNA, 19 nt, Artificial Sequence
  Description of Artificial Sequence: Synthetic oligonucleotide
auuaaucccacacagggcc

SEQ ID NO: 636835 - RNA, 19 nt, Artificial Sequence
  Description of Artificial Sequence: Synthetic oligonucleotide
aacaggacaugauagaaac

SEQ ID NO: 636836 - RNA, 19 nt, Artificial Sequence
  Description of Artificial Sequence: Synthetic oligonucleotide
aauaaaagguucuggagag

SEQ ID NO: 636837 - RNA, 19 nt, Artificial Sequence
  Description of Artificial Sequence: Synthetic oligonucleotide
aggaaaauaauuugcaugg

SEQ ID NO: 636838 - RNA, 19 nt, Artificial Sequence
  Description of Artificial Sequence: Synthetic oligonucleotide
uaaaaguggggucaggugg

SEQ ID NO: 636839 - RNA, 19 nt, Artificial Sequence
  Description of Artificial Sequence: Synthetic oligonucleotide
aaacuauagcuaaugaugc

SEQ ID NO: 636840 - RNA, 19 nt, Artificial Sequence
  Description of Artificial Sequence: Synthetic oligonucleotide
uugauaaauguacacgugg

SEQ ID NO: 636841 - RNA, 19 nt, Artificial Sequence
  Description of Artificial Sequence: Synthetic oligonucleotide
ucuaacagcguaauaaaag

SEQ ID NO: 636842 - RNA, 19 nt, Artificial Sequence
  Description of Artificial Sequence: Synthetic oligonucleotide
aaauaauuugcauggaggu

SEQ ID NO: 636843 - RNA, 19 nt, Artificial Sequence
  Description of Artificial Sequence: Synthetic oligonucleotide
uaauaaaagguucuggaga

SEQ ID NO: 636844 - RNA, 19 nt, Artificial Sequence
  Description of Artificial Sequence: Synthetic oligonucleotide
aggaguagggcucacacgc

SEQ ID NO: 636845 - RNA, 19 nt, Artificial Sequence
  Description of Artificial Sequence: Synthetic oligonucleotide
augauuaucucugugaggg

SEQ ID NO: 636846 - RNA, 19 nt, Artificial Sequence
  Description of Artificial Sequence: Synthetic oligonucleotide
aauauaagguaucucacaa

SEQ ID NO: 636847 - RNA, 19 nt, Artificial Sequence
  Description of Artificial Sequence: Synthetic oligonucleotide
uaaaauagacuaaaggaaa

SEQ ID NO: 636848 - RNA, 19 nt, Artificial Sequence
  Description of Artificial Sequence: Synthetic oligonucleotide
cuaacagcguaauaaaagg

SEQ ID NO: 636849 - RNA, 19 nt, Artificial Sequence
  Description of Artificial Sequence: Synthetic oligonucleotide
aucacauaagugcugaccg

SEQ ID NO: 636850 - RNA, 19 nt, Artificial Sequence
  Description of Artificial Sequence: Synthetic oligonucleotide
caaguuauaaaauagacua

SEQ ID NO: 636851 - RNA, 19 nt, Artificial Sequence
  Description of Artificial Sequence: Synthetic oligonucleotide
ucucggaucacauaagugc

SEQ ID NO: 636852 - RNA, 19 nt, Artificial Sequence
  Description of Artificial Sequence: Synthetic oligonucleotide
uuauacaaguugauaaaug

SEQ ID NO: 636853 - RNA, 19 nt, Artificial Sequence
  Description of Artificial Sequence: Synthetic oligonucleotide
agugauagcacauucuugu

SEQ ID NO: 636854 - RNA, 19 nt, Artificial Sequence
  Description of Artificial Sequence: Synthetic oligonucleotide
uuauuaauacuugucacug

SEQ ID NO: 636855 - RNA, 19 nt, Artificial Sequence
  Description of Artificial Sequence: Synthetic oligonucleotide
aaugaugcauccuucaguu

SEQ ID NO: 636856 - RNA, 19 nt, Artificial Sequence
  Description of Artificial Sequence: Synthetic oligonucleotide
uauacuggaaggugggagg

SEQ ID NO: 636857 - RNA, 19 nt, Artificial Sequence
  Description of Artificial Sequence: Synthetic oligonucleotide
auguuaguaauaaaagugg

SEQ ID NO: 636858 - RNA, 19 nt, Artificial Sequence
  Description of Artificial Sequence: Synthetic oligonucleotide
ugaugcauccuucaguuac

SEQ ID NO: 636859 - RNA, 19 nt, Artificial Sequence
  Description of Artificial Sequence: Synthetic oligonucleotide
cuuaaacuuauagggaucg

SEQ ID NO: 636860 - RNA, 19 nt, Artificial Sequence
  Description of Artificial Sequence: Synthetic oligonucleotide
uauuaauacuugucacugg

SEQ ID NO: 636861 - RNA, 19 nt, Artificial Sequence
  Description of Artificial Sequence: Synthetic oligonucleotide
ucuuuacauccacagauga

SEQ ID NO: 636862 - RNA, 19 nt, Artificial Sequence
  Description of Artificial Sequence: Synthetic oligonucleotide
aauauuuaccaguccucug

SEQ ID NO: 636863 - RNA, 19 nt, Artificial Sequence
  Description of Artificial Sequence: Synthetic oligonucleotide
gauugccccacucaucucg

SEQ ID NO: 636864 - RNA, 19 nt, Artificial Sequence
  Description of Artificial Sequence: Synthetic oligonucleotide
aguaauaaaagugggguca

SEQ ID NO: 636865 - RNA, 19 nt, Artificial Sequence
  Description of Artificial Sequence: Synthetic oligonucleotide
uuaucuuuaucucgcuugc

SEQ ID NO: 636866 - RNA, 19 nt, Artificial Sequence
  Description of Artificial Sequence: Synthetic oligonucleotide
acuuauagggaucgggauc

SEQ ID NO: 636867 - RNA, 19 nt, Artificial Sequence
  Description of Artificial Sequence: Synthetic oligonucleotide
auccagauuugauugcccc

SEQ ID NO: 636868 - RNA, 19 nt, Artificial Sequence
  Description of Artificial Sequence: Synthetic oligonucleotide
ucuuuugggagguaauacc

SEQ ID NO: 636869 - RNA, 19 nt, Artificial Sequence
  Description of Artificial Sequence: Synthetic oligonucleotide
uuacaaucaaggcauuugu

SEQ ID NO: 636870 - RNA, 19 nt, Artificial Sequence
  Description of Artificial Sequence: Synthetic oligonucleotide
uucauauauucucaucaca

SEQ ID NO: 636871 - RNA, 19 nt, Artificial Sequence
  Description of Artificial Sequence: Synthetic oligonucleotide
agggcuuggaaacuauagc

SEQ ID NO: 636872 - RNA, 19 nt, Artificial Sequence
  Description of Artificial Sequence: Synthetic oligonucleotide
uuuucuucagucacacgcc

SEQ ID NO: 636873 - RNA, 19 nt, Artificial Sequence
  Description of Artificial Sequence: Synthetic oligonucleotide
uauagcuaaugaugcaucc

SEQ ID NO: 636874 - RNA, 19 nt, Artificial Sequence
  Description of Artificial Sequence: Synthetic oligonucleotide
ucaagagggaagaugugug

SEQ ID NO: 636875 - RNA, 19 nt, Artificial Sequence
  Description of Artificial Sequence: Synthetic oligonucleotide
uuacagaagagcaggauua

SEQ ID NO: 636876 - RNA, 19 nt, Artificial Sequence
  Description of Artificial Sequence: Synthetic oligonucleotide
cucucuuaucuuuaucucg

SEQ ID NO: 636877 - RNA, 19 nt, Artificial Sequence
  Description of Artificial Sequence: Synthetic oligonucleotide
auaagugcugaccgucucc

SEQ ID NO: 636878 - RNA, 19 nt, Artificial Sequence
  Description of Artificial Sequence: Synthetic oligonucleotide
uaaugaugcauccuucagu

SEQ ID NO: 636879 - RNA, 19 nt, Artificial Sequence
  Description of Artificial Sequence: Synthetic oligonucleotide
gauuaucucugugagggag

SEQ ID NO: 636880 - RNA, 19 nt, Artificial Sequence
  Description of Artificial Sequence: Synthetic oligonucleotide
caaguugauaaauguacac

SEQ ID NO: 636881 - RNA, 19 nt, Artificial Sequence
  Description of Artificial Sequence: Synthetic oligonucleotide
uugguaggggccuuuaucu

SEQ ID NO: 636882 - RNA, 19 nt, Artificial Sequence
  Description of Artificial Sequence: Synthetic oligonucleotide
uuguacauuaccuucucau

SEQ ID NO: 636883 - RNA, 19 nt, Artificial Sequence
  Description of Artificial Sequence: Synthetic oligonucleotide
agauccagauuugauugcc

SEQ ID NO: 636884 - RNA, 19 nt, Artificial Sequence
  Description of Artificial Sequence: Synthetic oligonucleotide
cuucaguuacaaucaaggc

SEQ ID NO: 636885 - RNA, 19 nt, Artificial Sequence
  Description of Artificial Sequence: Synthetic oligonucleotide
uaaauguacacguggcggu

SEQ ID NO: 636886 - RNA, 19 nt, Artificial Sequence
  Description of Artificial Sequence: Synthetic oligonucleotide
gguaccaaucaucacagcc

SEQ ID NO: 636887 - RNA, 19 nt, Artificial Sequence
  Description of Artificial Sequence: Synthetic oligonucleotide
aaacuuauagggaucggga

SEQ ID NO: 636888 - RNA, 19 nt, Artificial Sequence
  Description of Artificial Sequence: Synthetic oligonucleotide
auaaaaguggggucaggug

SEQ ID NO: 636889 - RNA, 19 nt, Artificial Sequence
  Description of Artificial Sequence: Synthetic oligonucleotide
uggaaacuauagcuaauga

SEQ ID NO: 636890 - RNA, 19 nt, Artificial Sequence
  Description of Artificial Sequence: Synthetic oligonucleotide
aaaauagacuaaaggaaaa

SEQ ID NO: 636891 - RNA, 19 nt, Artificial Sequence
  Description of Artificial Sequence: Synthetic oligonucleotide
aacuauagcuaaugaugca

SEQ ID NO: 636892 - RNA, 19 nt, Artificial Sequence
  Description of Artificial Sequence: Synthetic oligonucleotide
uuucaaucgcacuuuugga

SEQ ID NO: 636893 - RNA, 19 nt, Artificial Sequence
  Description of Artificial Sequence: Synthetic oligonucleotide
aacuuauagggaucgggau

SEQ ID NO: 636894 - RNA, 19 nt, Artificial Sequence
  Description of Artificial Sequence: Synthetic oligonucleotide
uuggaaacuauagcuaaug

SEQ ID NO: 636895 - RNA, 19 nt, Artificial Sequence
  Description of Artificial Sequence: Synthetic oligonucleotide
gaucacauaagugcugacc

SEQ ID NO: 636896 - RNA, 19 nt, Artificial Sequence
  Description of Artificial Sequence: Synthetic oligonucleotide
uucagucacacgccguggg

SEQ ID NO: 636897 - RNA, 19 nt, Artificial Sequence
  Description of Artificial Sequence: Synthetic oligonucleotide
uucaaucgcacuuuuggau

SEQ ID NO: 636898 - RNA, 19 nt, Artificial Sequence
  Description of Artificial Sequence: Synthetic oligonucleotide
gcaggauuagaacacaacc

SEQ ID NO: 636899 - RNA, 19 nt, Artificial Sequence
  Description of Artificial Sequence: Synthetic oligonucleotide
ucaaucgcacuuuuggauc

SEQ ID NO: 636900 - RNA, 19 nt, Artificial Sequence
  Description of Artificial Sequence: Synthetic oligonucleotide
acagcguaauaaaagguuc

SEQ ID NO: 636901 - RNA, 19 nt, Artificial Sequence
  Description of Artificial Sequence: Synthetic oligonucleotide
uaccugaccuccuuggcag

SEQ ID NO: 636902 - RNA, 19 nt, Artificial Sequence
  Description of Artificial Sequence: Synthetic oligonucleotide
uguacauuaccuucucauc

SEQ ID NO: 636903 - RNA, 19 nt, Artificial Sequence
  Description of Artificial Sequence: Synthetic oligonucleotide
uuuccgggagcauugguga

SEQ ID NO: 636904 - RNA, 19 nt, Artificial Sequence
  Description of Artificial Sequence: Synthetic oligonucleotide
ggagcauccagagugauag

SEQ ID NO: 636905 - RNA, 19 nt, Artificial Sequence
  Description of Artificial Sequence: Synthetic oligonucleotide
aaccaaguuauaaaauaga

SEQ ID NO: 636906 - RNA, 19 nt, Artificial Sequence
  Description of Artificial Sequence: Synthetic oligonucleotide
uaaaagguucuggagagaa

SEQ ID NO: 636907 - RNA, 19 nt, Artificial Sequence
  Description of Artificial Sequence: Synthetic oligonucleotide
aggagcggccauuaauccc

SEQ ID NO: 636908 - RNA, 19 nt, Artificial Sequence
  Description of Artificial Sequence: Synthetic oligonucleotide
cuuggggcugggaugacgg

SEQ ID NO: 636909 - RNA, 19 nt, Artificial Sequence
  Description of Artificial Sequence: Synthetic oligonucleotide
guuuuaggucuguucagag

SEQ ID NO: 636910 - RNA, 19 nt, Artificial Sequence
  Description of Artificial Sequence: Synthetic oligonucleotide
cauuaaucccacacagggc

SEQ ID NO: 636911 - RNA, 19 nt, Artificial Sequence
  Description of Artificial Sequence: Synthetic oligonucleotide
uuaucuuggcacacuuggc

SEQ ID NO: 636912 - RNA, 19 nt, Artificial Sequence
  Description of Artificial Sequence: Synthetic oligonucleotide
cuaaugaugcauccuucag

SEQ ID NO: 636913 - RNA, 19 nt, Artificial Sequence
  Description of Artificial Sequence: Synthetic oligonucleotide
agggguucccaguuuugcc

SEQ ID NO: 636914 - RNA, 19 nt, Artificial Sequence
  Description of Artificial Sequence: Synthetic oligonucleotide
cuuuugggagguaauacca

SEQ ID NO: 636915 - RNA, 19 nt, Artificial Sequence
  Description of Artificial Sequence: Synthetic oligonucleotide
gauaacuggacuuggggcu

SEQ ID NO: 636916 - RNA, 19 nt, Artificial Sequence
  Description of Artificial Sequence: Synthetic oligonucleotide
agucacacgccgugggagc

SEQ ID NO: 636917 - RNA, 19 nt, Artificial Sequence
  Description of Artificial Sequence: Synthetic oligonucleotide
uugugcagagguucgggag

SEQ ID NO: 636918 - RNA, 19 nt, Artificial Sequence
  Description of Artificial Sequence: Synthetic oligonucleotide
cuauagcuaaugaugcauc

SEQ ID NO: 636919 - RNA, 19 nt, Artificial Sequence
  Description of Artificial Sequence: Synthetic oligonucleotide
auacuggaaggugggaggc

SEQ ID NO: 636920 - RNA, 19 nt, Artificial Sequence
  Description of Artificial Sequence: Synthetic oligonucleotide
aagguagugccauuucuuu

SEQ ID NO: 636921 - RNA, 19 nt, Artificial Sequence
  Description of Artificial Sequence: Synthetic oligonucleotide
uuaaacuuauagggaucgg

SEQ ID NO: 636922 - RNA, 19 nt, Artificial Sequence
  Description of Artificial Sequence: Synthetic oligonucleotide
gauuagaacacaaccaagu

SEQ ID NO: 636923 - RNA, 19 nt, Artificial Sequence
  Description of Artificial Sequence: Synthetic oligonucleotide
gaucauagggcucccguca

SEQ ID NO: 636924 - RNA, 19 nt, Artificial Sequence
  Description of Artificial Sequence: Synthetic oligonucleotide
ucucucuucucucucuccu

SEQ ID NO: 636925 - RNA, 19 nt, Artificial Sequence
  Description of Artificial Sequence: Synthetic oligonucleotide
ucacagccgaucauagggc

SEQ ID NO: 636926 - RNA, 19 nt, Artificial Sequence
  Description of Artificial Sequence: Synthetic oligonucleotide
ggauaacuggacuuggggc

SEQ ID NO: 636927 - RNA, 19 nt, Artificial Sequence
  Description of Artificial Sequence: Synthetic oligonucleotide
cuaucccaucuuucaaucg

SEQ ID NO: 636928 - RNA, 19 nt, Artificial Sequence
  Description of Artificial Sequence: Synthetic oligonucleotide
uccgucaccacgcuacgca

SEQ ID NO: 636929 - RNA, 19 nt, Artificial Sequence
  Description of Artificial Sequence: Synthetic oligonucleotide
ggugaacaggacaugauag

SEQ ID NO: 636930 - RNA, 19 nt, Artificial Sequence
  Description of Artificial Sequence: Synthetic oligonucleotide
caucucuuccggaggagcg

SEQ ID NO: 636931 - RNA, 19 nt, Artificial Sequence
  Description of Artificial Sequence: Synthetic oligonucleotide
ucucucuuaucuuuaucuc

SEQ ID NO: 636932 - RNA, 19 nt, Artificial Sequence
  Description of Artificial Sequence: Synthetic oligonucleotide
ugggagguaauaccagcug

SEQ ID NO: 636933 - RNA, 19 nt, Artificial Sequence
  Description of Artificial Sequence: Synthetic oligonucleotide
acuauagcuaaugaugcau

SEQ ID NO: 636934 - RNA, 19 nt, Artificial Sequence
  Description of Artificial Sequence: Synthetic oligonucleotide
uuuucucucuucucucucu

SEQ ID NO: 636935 - RNA, 19 nt, Artificial Sequence
  Description of Artificial Sequence: Synthetic oligonucleotide
gaggaguagggcucacacg

SEQ ID NO: 636936 - RNA, 19 nt, Artificial Sequence
  Description of Artificial Sequence: Synthetic oligonucleotide
gaggugcuagcccucaggc

SEQ ID NO: 636937 - RNA, 19 nt, Artificial Sequence
  Description of Artificial Sequence: Synthetic oligonucleotide
uguuucagaagggagcauc

SEQ ID NO: 636938 - RNA, 19 nt, Artificial Sequence
  Description of Artificial Sequence: Synthetic oligonucleotide
cuuaguaucaagaguuuua

SEQ ID NO: 636939 - RNA, 19 nt, Artificial Sequence
  Description of Artificial Sequence: Synthetic oligonucleotide
gggauaacuggacuugggg

SEQ ID NO: 636940 - RNA, 19 nt, Artificial Sequence
  Description of Artificial Sequence: Synthetic oligonucleotide
guaauaaaaguggggucag

SEQ ID NO: 636941 - RNA, 19 nt, Artificial Sequence
  Description of Artificial Sequence: Synthetic oligonucleotide
uuaauacuugucacuggua

SEQ ID NO: 636942 - RNA, 19 nt, Artificial Sequence
  Description of Artificial Sequence: Synthetic oligonucleotide
uacuugucacugguaauag

SEQ ID NO: 636943 - RNA, 19 nt, Artificial Sequence
  Description of Artificial Sequence: Synthetic oligonucleotide
cucaucucggaucacauaa

SEQ ID NO: 636944 - RNA, 19 nt, Artificial Sequence
  Description of Artificial Sequence: Synthetic oligonucleotide
uaauaaaaguggggucagg

SEQ ID NO: 636945 - RNA, 19 nt, Artificial Sequence
  Description of Artificial Sequence: Synthetic oligonucleotide
guugauaaauguacacgug

SEQ ID NO: 636946 - RNA, 19 nt, Artificial Sequence
  Description of Artificial Sequence: Synthetic oligonucleotide
cugguaauaggcauaugga

SEQ ID NO: 636947 - RNA, 19 nt, Artificial Sequence
  Description of Artificial Sequence: Synthetic oligonucleotide
aucucacaaaagccugaac

SEQ ID NO: 636948 - RNA, 19 nt, Artificial Sequence
  Description of Artificial Sequence: Synthetic oligonucleotide
aacaaagguagugccauuu

SEQ ID NO: 636949 - RNA, 19 nt, Artificial Sequence
  Description of Artificial Sequence: Synthetic oligonucleotide
aaaagguucuggagagaag

SEQ ID NO: 636950 - RNA, 19 nt, Artificial Sequence
  Description of Artificial Sequence: Synthetic oligonucleotide
aaccggcccagcccaaccg

SEQ ID NO: 636951 - RNA, 19 nt, Artificial Sequence
  Description of Artificial Sequence: Synthetic oligonucleotide
agcaggauuagaacacaac

SEQ ID NO: 636952 - RNA, 19 nt, Artificial Sequence
  Description of Artificial Sequence: Synthetic oligonucleotide
uccagauuugauugcccca

SEQ ID NO: 636953 - RNA, 19 nt, Artificial Sequence
  Description of Artificial Sequence: Synthetic oligonucleotide
acaaguugauaaauguaca

SEQ ID NO: 636954 - RNA, 19 nt, Artificial Sequence
  Description of Artificial Sequence: Synthetic oligonucleotide
uuggcgcagaaccacugca

SEQ ID NO: 636955 - RNA, 19 nt, Artificial Sequence
  Description of Artificial Sequence: Synthetic oligonucleotide
auaagguaucucacaaaag

SEQ ID NO: 636956 - RNA, 19 nt, Artificial Sequence
  Description of Artificial Sequence: Synthetic oligonucleotide
ucucgaucuuucuucuugu

SEQ ID NO: 636957 - RNA, 19 nt, Artificial Sequence
  Description of Artificial Sequence: Synthetic oligonucleotide
auaccccuugugcagaggu

SEQ ID NO: 636958 - RNA, 19 nt, Artificial Sequence
  Description of Artificial Sequence: Synthetic oligonucleotide
auguguggugucuuuauua

SEQ ID NO: 636959 - RNA, 19 nt, Artificial Sequence
  Description of Artificial Sequence: Synthetic oligonucleotide
ucucacuaucccaucuuuc

SEQ ID NO: 636960 - RNA, 19 nt, Artificial Sequence
  Description of Artificial Sequence: Synthetic oligonucleotide
aaagguagugccauuucuu

SEQ ID NO: 636961 - RNA, 19 nt, Artificial Sequence
  Description of Artificial Sequence: Synthetic oligonucleotide
gaaauggagggagaagaga

SEQ ID NO: 636962 - RNA, 19 nt, Artificial Sequence
  Description of Artificial Sequence: Synthetic oligonucleotide
guugguaggggccuuuauc

SEQ ID NO: 636963 - RNA, 19 nt, Artificial Sequence
  Description of Artificial Sequence: Synthetic oligonucleotide
guuucagaagggagcaucc

SEQ ID NO: 636964 - RNA, 19 nt, Artificial Sequence
  Description of Artificial Sequence: Synthetic oligonucleotide
cacuuuuggaucaaugucu

SEQ ID NO: 636965 - RNA, 19 nt, Artificial Sequence
  Description of Artificial Sequence: Synthetic oligonucleotide
gacgucagugcgcacggug

SEQ ID NO: 636966 - RNA, 19 nt, Artificial Sequence
  Description of Artificial Sequence: Synthetic oligonucleotide
uuucucucuucucucucuc

SEQ ID NO: 636967 - RNA, 19 nt, Artificial Sequence
  Description of Artificial Sequence: Synthetic oligonucleotide
aggcccauguguuucagaa

SEQ ID NO: 636968 - RNA, 19 nt, Artificial Sequence
  Description of Artificial Sequence: Synthetic oligonucleotide
agcuuucuccucauacccc

SEQ ID NO: 636969 - RNA, 19 nt, Artificial Sequence
  Description of Artificial Sequence: Synthetic oligonucleotide
gagugauagcacauucuug

SEQ ID NO: 636970 - RNA, 19 nt, Artificial Sequence
  Description of Artificial Sequence: Synthetic oligonucleotide
uaauuugcauggaggugaa

SEQ ID NO: 636971 - RNA, 19 nt, Artificial Sequence
  Description of Artificial Sequence: Synthetic oligonucleotide
uggggauaacuggacuugg

SEQ ID NO: 636972 - RNA, 19 nt, Artificial Sequence
  Description of Artificial Sequence: Synthetic oligonucleotide
cagauccagauuugauugc

SEQ ID NO: 636973 - RNA, 19 nt, Artificial Sequence
  Description of Artificial Sequence: Synthetic oligonucleotide
ucacauaagugcugaccgu

SEQ ID NO: 636974 - RNA, 19 nt, Artificial Sequence
  Description of Artificial Sequence: Synthetic oligonucleotide
agcguaauaaaagguucug

SEQ ID NO: 636975 - RNA, 19 nt, Artificial Sequence
  Description of Artificial Sequence: Synthetic oligonucleotide
caucuaacagcguaauaaa

SEQ ID NO: 636976 - RNA, 19 nt, Artificial Sequence
  Description of Artificial Sequence: Synthetic oligonucleotide
accgucuccgucaccacgc

SEQ ID NO: 636977 - RNA, 19 nt, Artificial Sequence
  Description of Artificial Sequence: Synthetic oligonucleotide
auagcuaaugaugcauccu

SEQ ID NO: 636978 - RNA, 19 nt, Artificial Sequence
  Description of Artificial Sequence: Synthetic oligonucleotide
accccuugugcagagguuc

SEQ ID NO: 636979 - RNA, 19 nt, Artificial Sequence
  Description of Artificial Sequence: Synthetic oligonucleotide
uucucucuucucucucucc

SEQ ID NO: 636980 - RNA, 19 nt, Artificial Sequence
  Description of Artificial Sequence: Synthetic oligonucleotide
cuuccauggguaccugacc

SEQ ID NO: 636981 - RNA, 19 nt, Artificial Sequence
  Description of Artificial Sequence: Synthetic oligonucleotide
gguaucucacaaaagccug

SEQ ID NO: 636982 - RNA, 19 nt, Artificial Sequence
  Description of Artificial Sequence: Synthetic oligonucleotide
auagggaucgggaucuuca

SEQ ID NO: 636983 - RNA, 19 nt, Artificial Sequence
  Description of Artificial Sequence: Synthetic oligonucleotide
agcuaaugaugcauccuuc

SEQ ID NO: 636984 - RNA, 19 nt, Artificial Sequence
  Description of Artificial Sequence: Synthetic oligonucleotide
acgucagugcgcacggugc

SEQ ID NO: 636985 - RNA, 19 nt, Artificial Sequence
  Description of Artificial Sequence: Synthetic oligonucleotide
ucagucacacgccguggga

SEQ ID NO: 636986 - RNA, 19 nt, Artificial Sequence
  Description of Artificial Sequence: Synthetic oligonucleotide
agauguguggugucuuuau

SEQ ID NO: 636987 - RNA, 19 nt, Artificial Sequence
  Description of Artificial Sequence: Synthetic oligonucleotide
aaaguggggucaggugggg

SEQ ID NO: 636988 - RNA, 19 nt, Artificial Sequence
  Description of Artificial Sequence: Synthetic oligonucleotide
cugacgucagugcgcacgg

SEQ ID NO: 636989 - RNA, 19 nt, Artificial Sequence
  Description of Artificial Sequence: Synthetic oligonucleotide
ugauuaucucugugaggga

SEQ ID NO: 636990 - RNA, 19 nt, Artificial Sequence
  Description of Artificial Sequence: Synthetic oligonucleotide
ucauaccccuugugcagag

SEQ ID NO: 636991 - RNA, 19 nt, Artificial Sequence
  Description of Artificial Sequence: Synthetic oligonucleotide
ugggaugacgggcuccacu

SEQ ID NO: 636992 - RNA, 19 nt, Artificial Sequence
  Description of Artificial Sequence: Synthetic oligonucleotide
gauccagauuugauugccc

SEQ ID NO: 636993 - RNA, 19 nt, Artificial Sequence
  Description of Artificial Sequence: Synthetic oligonucleotide
cucgcuugcuucguucucg

SEQ ID NO: 636994 - RNA, 19 nt, Artificial Sequence
  Description of Artificial Sequence: Synthetic oligonucleotide
cuggcuuagccucgggagc

SEQ ID NO: 636995 - RNA, 19 nt, Artificial Sequence
  Description of Artificial Sequence: Synthetic oligonucleotide
auuccuuccauggguaccu

SEQ ID NO: 636996 - RNA, 19 nt, Artificial Sequence
  Description of Artificial Sequence: Synthetic oligonucleotide
gauggcagaaccggcccag

SEQ ID NO: 636997 - RNA, 19 nt, Artificial Sequence
  Description of Artificial Sequence: Synthetic oligonucleotide
uucccaguuuugccuuccg

SEQ ID NO: 636998 - RNA, 19 nt, Artificial Sequence
  Description of Artificial Sequence: Synthetic oligonucleotide
auuuaccaguccucugacu

SEQ ID NO: 636999 - RNA, 19 nt, Artificial Sequence
  Description of Artificial Sequence: Synthetic oligonucleotide
uacgcacuggggcuuuggc

SEQ ID NO: 637000 - RNA, 19 nt, Artificial Sequence
  Description of Artificial Sequence: Synthetic oligonucleotide
gcuggcuuagccucgggag

SEQ ID NO: 637001 - RNA, 19 nt, Artificial Sequence
  Description of Artificial Sequence: Synthetic oligonucleotide
ucucuucucucucuccuuu

SEQ ID NO: 637002 - RNA, 19 nt, Artificial Sequence
  Description of Artificial Sequence: Synthetic oligonucleotide
cugaacaaagguagugcca

SEQ ID NO: 637003 - RNA, 19 nt, Artificial Sequence
  Description of Artificial Sequence: Synthetic oligonucleotide
cacauaagugcugaccguc

SEQ ID NO: 637004 - RNA, 19 nt, Artificial Sequence
  Description of Artificial Sequence: Synthetic oligonucleotide
gaguagggcucacacgcac

SEQ ID NO: 637005 - RNA, 19 nt, Artificial Sequence
  Description of Artificial Sequence: Synthetic oligonucleotide
gguaggggccuuuaucuug

SEQ ID NO: 637006 - RNA, 19 nt, Artificial Sequence
  Description of Artificial Sequence: Synthetic oligonucleotide
ggauuagaacacaaccaag

SEQ ID NO: 637007 - RNA, 19 nt, Artificial Sequence
  Description of Artificial Sequence: Synthetic oligonucleotide
cuucucaucuaacagcgua

SEQ ID NO: 637008 - RNA, 19 nt, Artificial Sequence
  Description of Artificial Sequence: Synthetic oligonucleotide
gagguucgggagugggagg

SEQ ID NO: 637009 - RNA, 19 nt, Artificial Sequence
  Description of Artificial Sequence: Synthetic oligonucleotide
ugggagcucaggcccaugu

SEQ ID NO: 637010 - RNA, 19 nt, Artificial Sequence
  Description of Artificial Sequence: Synthetic oligonucleotide
acauuaccuucucaucuaa

SEQ ID NO: 637011 - RNA, 19 nt, Artificial Sequence
  Description of Artificial Sequence: Synthetic oligonucleotide
uggguaccugaccuccuug

SEQ ID NO: 637012 - RNA, 19 nt, Artificial Sequence
  Description of Artificial Sequence: Synthetic oligonucleotide
cuuggcgcagaaccacugc

SEQ ID NO: 637013 - RNA, 19 nt, Artificial Sequence
  Description of Artificial Sequence: Synthetic oligonucleotide
uuucagaagggagcaucca

SEQ ID NO: 637014 - RNA, 19 nt, Artificial Sequence
  Description of Artificial Sequence: Synthetic oligonucleotide
cacgcugacgucagugcgc

SEQ ID NO: 637015 - RNA, 19 nt, Artificial Sequence
  Description of Artificial Sequence: Synthetic oligonucleotide
uuuaucucgcuugcuucgu

SEQ ID NO: 637016 - RNA, 19 nt, Artificial Sequence
  Description of Artificial Sequence: Synthetic oligonucleotide
aucucgcuugcuucguucu

SEQ ID NO: 637017 - RNA, 19 nt, Artificial Sequence
  Description of Artificial Sequence: Synthetic oligonucleotide
gcguaauaaaagguucugg

SEQ ID NO: 637018 - RNA, 19 nt, Artificial Sequence
  Description of Artificial Sequence: Synthetic oligonucleotide
ucgcagagucaaccugggg

SEQ ID NO: 637019 - RNA, 19 nt, Artificial Sequence
  Description of Artificial Sequence: Synthetic oligonucleotide
agcccaaccggcgcggggc

SEQ ID NO: 637020 - RNA, 19 nt, Artificial Sequence
  Description of Artificial Sequence: Synthetic oligonucleotide
ccaaugguaccaaucauca

SEQ ID NO: 637021 - RNA, 19 nt, Artificial Sequence
  Description of Artificial Sequence: Synthetic oligonucleotide
cacauugcagccugggcga

SEQ ID NO: 637022 - RNA, 19 nt, Artificial Sequence
  Description of Artificial Sequence: Synthetic oligonucleotide
auguacacguggcggugag

SEQ ID NO: 637023 - RNA, 19 nt, Artificial Sequence
  Description of Artificial Sequence: Synthetic oligonucleotide
cuuauagggaucgggaucu

SEQ ID NO: 637024 - RNA, 19 nt, Artificial Sequence
  Description of Artificial Sequence: Synthetic oligonucleotide
cauaagugcugaccgucuc

SEQ ID NO: 637025 - RNA, 19 nt, Artificial Sequence
  Description of Artificial Sequence: Synthetic oligonucleotide
caaucgcacuuuuggauca

SEQ ID NO: 637026 - RNA, 19 nt, Artificial Sequence
  Description of Artificial Sequence: Synthetic oligonucleotide
ccgucaucaggcuuguugc

SEQ ID NO: 637027 - RNA, 19 nt, Artificial Sequence
  Description of Artificial Sequence: Synthetic oligonucleotide
aucucggaucacauaagug

SEQ ID NO: 637028 - RNA, 19 nt, Artificial Sequence
  Description of Artificial Sequence: Synthetic oligonucleotide
guaccugaccuccuuggca

SEQ ID NO: 637029 - RNA, 19 nt, Artificial Sequence
  Description of Artificial Sequence: Synthetic oligonucleotide
gcuaaugaugcauccuuca

SEQ ID NO: 637030 - RNA, 19 nt, Artificial Sequence
  Description of Artificial Sequence: Synthetic oligonucleotide
cuggggauaacuggacuug

SEQ ID NO: 637031 - RNA, 19 nt, Artificial Sequence
  Description of Artificial Sequence: Synthetic oligonucleotide
auuaucucugugagggaga

SEQ ID NO: 637032 - RNA, 19 nt, Artificial Sequence
  Description of Artificial Sequence: Synthetic oligonucleotide
ggaaacuauagcuaaugau

SEQ ID NO: 637033 - RNA, 19 nt, Artificial Sequence
  Description of Artificial Sequence: Synthetic oligonucleotide
ggaguuucauauauucuca

SEQ ID NO: 637034 - RNA, 19 nt, Artificial Sequence
  Description of Artificial Sequence: Synthetic oligonucleotide
aagauguguggugucuuua

SEQ ID NO: 637035 - RNA, 19 nt, Artificial Sequence
  Description of Artificial Sequence: Synthetic oligonucleotide
gcaguuuacagaagagcag

SEQ ID NO: 637036 - RNA, 19 nt, Artificial Sequence
  Description of Artificial Sequence: Synthetic oligonucleotide
caggcuuguugcacccugg

SEQ ID NO: 637037 - RNA, 19 nt, Artificial Sequence
  Description of Artificial Sequence: Synthetic oligonucleotide
ggguuuuaggucuguucag

SEQ ID NO: 637038 - RNA, 19 nt, Artificial Sequence
  Description of Artificial Sequence: Synthetic oligonucleotide
uguugguaggggccuuuau

SEQ ID NO: 637039 - RNA, 19 nt, Artificial Sequence
  Description of Artificial Sequence: Synthetic oligonucleotide
ggagguaauaccagcugug

SEQ ID NO: 637040 - RNA, 19 nt, Artificial Sequence
  Description of Artificial Sequence: Synthetic oligonucleotide
ugggcagauccagauuuga

SEQ ID NO: 637041 - RNA, 19 nt, Artificial Sequence
  Description of Artificial Sequence: Synthetic oligonucleotide
gaaccggcccagcccaacc

SEQ ID NO: 637042 - RNA, 19 nt, Artificial Sequence
  Description of Artificial Sequence: Synthetic oligonucleotide
cagcuguguugguaggggc

SEQ ID NO: 637043 - RNA, 19 nt, Artificial Sequence
  Description of Artificial Sequence: Synthetic oligonucleotide
uacacguggcggugagaag

SEQ ID NO: 637044 - RNA, 19 nt, Artificial Sequence
  Description of Artificial Sequence: Synthetic oligonucleotide
accuggggauaacuggacu

SEQ ID NO: 637045 - RNA, 19 nt, Artificial Sequence
  Description of Artificial Sequence: Synthetic oligonucleotide
uaccaguccucugacugac

SEQ ID NO: 637046 - RNA, 19 nt, Artificial Sequence
  Description of Artificial Sequence: Synthetic oligonucleotide
cuugugcagagguucggga

SEQ ID NO: 637047 - RNA, 19 nt, Artificial Sequence
  Description of Artificial Sequence: Synthetic oligonucleotide
agguagugccauuucuuuu

SEQ ID NO: 637048 - RNA, 19 nt, Artificial Sequence
  Description of Artificial Sequence: Synthetic oligonucleotide
cacaaaagccugaacauuu

SEQ ID NO: 637049 - RNA, 19 nt, Artificial Sequence
  Description of Artificial Sequence: Synthetic oligonucleotide
gcggccauuaaucccacac

SEQ ID NO: 637050 - RNA, 19 nt, Artificial Sequence
  Description of Artificial Sequence: Synthetic oligonucleotide
accggcccagcccaaccgg

SEQ ID NO: 637051 - RNA, 19 nt, Artificial Sequence
  Description of Artificial Sequence: Synthetic oligonucleotide
acgcacuggggcuuuggca

SEQ ID NO: 637052 - RNA, 19 nt, Artificial Sequence
  Description of Artificial Sequence: Synthetic oligonucleotide
agagucaaccuggggauaa

SEQ ID NO: 637053 - RNA, 19 nt, Artificial Sequence
  Description of Artificial Sequence: Synthetic oligonucleotide
uggggcauucuuuccuuau

SEQ ID NO: 637054 - RNA, 19 nt, Artificial Sequence
  Description of Artificial Sequence: Synthetic oligonucleotide
cucggaucacauaagugcu

SEQ ID NO: 637055 - RNA, 19 nt, Artificial Sequence
  Description of Artificial Sequence: Synthetic oligonucleotide
cauguuggaagggguuccc

SEQ ID NO: 637056 - RNA, 19 nt, Artificial Sequence
  Description of Artificial Sequence: Synthetic oligonucleotide
uggcgcagaaccacugcau

SEQ ID NO: 637057 - RNA, 19 nt, Artificial Sequence
  Description of Artificial Sequence: Synthetic oligonucleotide
uccauggguaccugaccuc

SEQ ID NO: 637058 - RNA, 19 nt, Artificial Sequence
  Description of Artificial Sequence: Synthetic oligonucleotide
aguuacaaucaaggcauuu

SEQ ID NO: 637059 - RNA, 19 nt, Artificial Sequence
  Description of Artificial Sequence: Synthetic oligonucleotide
ccaacucgcagagucaacc

SEQ ID NO: 637060 - RNA, 19 nt, Artificial Sequence
  Description of Artificial Sequence: Synthetic oligonucleotide
ggugucuuuauuaauacuu

SEQ ID NO: 637061 - RNA, 19 nt, Artificial Sequence
  Description of Artificial Sequence: Synthetic oligonucleotide
uccaacucgcagagucaac

SEQ ID NO: 637062 - RNA, 19 nt, Artificial Sequence
  Description of Artificial Sequence: Synthetic oligonucleotide
cagucacacgccgugggag

SEQ ID NO: 637063 - RNA, 19 nt, Artificial Sequence
  Description of Artificial Sequence: Synthetic oligonucleotide
acauaagugcugaccgucu

SEQ ID NO: 637064 - RNA, 19 nt, Artificial Sequence
  Description of Artificial Sequence: Synthetic oligonucleotide
ggaggagcggccauuaauc

SEQ ID NO: 637065 - RNA, 19 nt, Artificial Sequence
  Description of Artificial Sequence: Synthetic oligonucleotide
aucauagggcucccgucau

SEQ ID NO: 637066 - RNA, 19 nt, Artificial Sequence
  Description of Artificial Sequence: Synthetic oligonucleotide
ccuuaugauuaucucugug

SEQ ID NO: 637067 - RNA, 19 nt, Artificial Sequence
  Description of Artificial Sequence: Synthetic oligonucleotide
uagggaucgggaucuucau

SEQ ID NO: 637068 - RNA, 19 nt, Artificial Sequence
  Description of Artificial Sequence: Synthetic oligonucleotide
aagugcugaccgucuccgu

SEQ ID NO: 637069 - RNA, 19 nt, Artificial Sequence
  Description of Artificial Sequence: Synthetic oligonucleotide
ugccccacucaucucggau

SEQ ID NO: 637070 - RNA, 19 nt, Artificial Sequence
  Description of Artificial Sequence: Synthetic oligonucleotide
cagcuuagcuuucuccuca

SEQ ID NO: 637071 - RNA, 19 nt, Artificial Sequence
  Description of Artificial Sequence: Synthetic oligonucleotide
caaagguagugccauuucu

SEQ ID NO: 637072 - RNA, 19 nt, Artificial Sequence
  Description of Artificial Sequence: Synthetic oligonucleotide
guaucucacaaaagccuga

SEQ ID NO: 637073 - RNA, 19 nt, Artificial Sequence
  Description of Artificial Sequence: Synthetic oligonucleotide
gcauauggaggugcuagcc

SEQ ID NO: 637074 - RNA, 19 nt, Artificial Sequence
  Description of Artificial Sequence: Synthetic oligonucleotide
caaauucucugaucuuaaa

SEQ ID NO: 637075 - RNA, 19 nt, Artificial Sequence
  Description of Artificial Sequence: Synthetic oligonucleotide
gccauuaaucccacacagg

SEQ ID NO: 637076 - RNA, 19 nt, Artificial Sequence
  Description of Artificial Sequence: Synthetic oligonucleotide
cccgucaucaggcuuguug

SEQ ID NO: 637077 - RNA, 19 nt, Artificial Sequence
  Description of Artificial Sequence: Synthetic oligonucleotide
ucgcuugcuucguucucga

SEQ ID NO: 637078 - RNA, 19 nt, Artificial Sequence
  Description of Artificial Sequence: Synthetic oligonucleotide
ggcauauggaggugcuagc

SEQ ID NO: 637079 - RNA, 19 nt, Artificial Sequence
  Description of Artificial Sequence: Synthetic oligonucleotide
ggaucaaugucuucaaauu

SEQ ID NO: 637080 - RNA, 19 nt, Artificial Sequence
  Description of Artificial Sequence: Synthetic oligonucleotide
uccgggaugcgcaguccac

SEQ ID NO: 637081 - RNA, 19 nt, Artificial Sequence
  Description of Artificial Sequence: Synthetic oligonucleotide
aacuuagucuucaguucuu

SEQ ID NO: 637082 - RNA, 19 nt, Artificial Sequence
  Description of Artificial Sequence: Synthetic oligonucleotide
ggagcggccauuaauccca

SEQ ID NO: 637083 - RNA, 19 nt, Artificial Sequence
  Description of Artificial Sequence: Synthetic oligonucleotide
aucccaucuuucaaucgca

SEQ ID NO: 637084 - RNA, 19 nt, Artificial Sequence
  Description of Artificial Sequence: Synthetic oligonucleotide
ucagugcgcacggugcuuc

SEQ ID NO: 637085 - RNA, 19 nt, Artificial Sequence
  Description of Artificial Sequence: Synthetic oligonucleotide
agguucgggagugggagga

SEQ ID NO: 637086 - RNA, 19 nt, Artificial Sequence
  Description of Artificial Sequence: Synthetic oligonucleotide
agaaccggcccagcccaac

SEQ ID NO: 637087 - RNA, 19 nt, Artificial Sequence
  Description of Artificial Sequence: Synthetic oligonucleotide
cuuucucacuaucccaucu

SEQ ID NO: 637088 - RNA, 19 nt, Artificial Sequence
  Description of Artificial Sequence: Synthetic oligonucleotide
ugcugaccgucuccgucac

SEQ ID NO: 637089 - RNA, 19 nt, Artificial Sequence
  Description of Artificial Sequence: Synthetic oligonucleotide
ugcgcacggugcuuccucu

SEQ ID NO: 637090 - RNA, 19 nt, Artificial Sequence
  Description of Artificial Sequence: Synthetic oligonucleotide
uuccgggagcauuggugac

SEQ ID NO: 637091 - RNA, 19 nt, Artificial Sequence
  Description of Artificial Sequence: Synthetic oligonucleotide
cagcguaauaaaagguucu

SEQ ID NO: 637092 - RNA, 19 nt, Artificial Sequence
  Description of Artificial Sequence: Synthetic oligonucleotide
gagguaauaccagcugugu

SEQ ID NO: 637093 - RNA, 19 nt, Artificial Sequence
  Description of Artificial Sequence: Synthetic oligonucleotide
ccacgcuacgcacuggggc

SEQ ID NO: 637094 - RNA, 19 nt, Artificial Sequence
  Description of Artificial Sequence: Synthetic oligonucleotide
cguggcggugagaagaggc

SEQ ID NO: 637095 - RNA, 19 nt, Artificial Sequence
  Description of Artificial Sequence: Synthetic oligonucleotide
ggggauaacuggacuuggg

SEQ ID NO: 637096 - RNA, 19 nt, Artificial Sequence
  Description of Artificial Sequence: Synthetic oligonucleotide
cagagugauagcacauucu

SEQ ID NO: 637097 - RNA, 19 nt, Artificial Sequence
  Description of Artificial Sequence: Synthetic oligonucleotide
aaucgcacuuuuggaucaa

SEQ ID NO: 637098 - RNA, 19 nt, Artificial Sequence
  Description of Artificial Sequence: Synthetic oligonucleotide
caucucggaucacauaagu

SEQ ID NO: 637099 - RNA, 19 nt, Artificial Sequence
  Description of Artificial Sequence: Synthetic oligonucleotide
uguugcacccugggcagau

SEQ ID NO: 637100 - RNA, 19 nt, Artificial Sequence
  Description of Artificial Sequence: Synthetic oligonucleotide
uggcggugagaagaggcuc

SEQ ID NO: 637101 - RNA, 19 nt, Artificial Sequence
  Description of Artificial Sequence: Synthetic oligonucleotide
ugauugccccacucaucuc

SEQ ID NO: 637102 - RNA, 19 nt, Artificial Sequence
  Description of Artificial Sequence: Synthetic oligonucleotide
gaugacgggcuccacuuuu

SEQ ID NO: 637103 - RNA, 19 nt, Artificial Sequence
  Description of Artificial Sequence: Synthetic oligonucleotide
cauaccccuugugcagagg

SEQ ID NO: 637104 - RNA, 19 nt, Artificial Sequence
  Description of Artificial Sequence: Synthetic oligonucleotide
cucccuaucucucugcuuu

SEQ ID NO: 637105 - RNA, 19 nt, Artificial Sequence
  Description of Artificial Sequence: Synthetic oligonucleotide
gggcugaacaaagguagug

SEQ ID NO: 637106 - RNA, 19 nt, Artificial Sequence
  Description of Artificial Sequence: Synthetic oligonucleotide
cugacugacuggggcauuc

SEQ ID NO: 637107 - RNA, 19 nt, Artificial Sequence
  Description of Artificial Sequence: Synthetic oligonucleotide
cuacgcacuggggcuuugg

SEQ ID NO: 637108 - RNA, 19 nt, Artificial Sequence
  Description of Artificial Sequence: Synthetic oligonucleotide
acccucacugcugcagaag

SEQ ID NO: 637109 - RNA, 19 nt, Artificial Sequence
  Description of Artificial Sequence: Synthetic oligonucleotide
ggcuuguugcacccugggc

SEQ ID NO: 637110 - RNA, 19 nt, Artificial Sequence
  Description of Artificial Sequence: Synthetic oligonucleotide
uguacacguggcggugaga

SEQ ID NO: 637111 - RNA, 19 nt, Artificial Sequence
  Description of Artificial Sequence: Synthetic oligonucleotide
gggcgagaagugguggugg

SEQ ID NO: 637112 - RNA, 19 nt, Artificial Sequence
  Description of Artificial Sequence: Synthetic oligonucleotide
cacuaucccaucuuucaau

SEQ ID NO: 637113 - RNA, 19 nt, Artificial Sequence
  Description of Artificial Sequence: Synthetic oligonucleotide
ccauggguaccugaccucc

SEQ ID NO: 637114 - RNA, 19 nt, Artificial Sequence
  Description of Artificial Sequence: Synthetic oligonucleotide
acgcugacgucagugcgca

SEQ ID NO: 637115 - RNA, 19 nt, Artificial Sequence
  Description of Artificial Sequence: Synthetic oligonucleotide
uaccccuugugcagagguu

SEQ ID NO: 637116 - RNA, 19 nt, Artificial Sequence
  Description of Artificial Sequence: Synthetic oligonucleotide
ggcggugagaagaggcucc

SEQ ID NO: 637117 - RNA, 19 nt, Artificial Sequence
  Description of Artificial Sequence: Synthetic oligonucleotide
ggcgcagaaccacugcauc

SEQ ID NO: 637118 - RNA, 19 nt, Artificial Sequence
  Description of Artificial Sequence: Synthetic oligonucleotide
gcucccgucaucaggcuug

SEQ ID NO: 637119 - RNA, 19 nt, Artificial Sequence
  Description of Artificial Sequence: Synthetic oligonucleotide
gggagguaauaccagcugu

SEQ ID NO: 637120 - RNA, 19 nt, Artificial Sequence
  Description of Artificial Sequence: Synthetic oligonucleotide
accacgcuacgcacugggg

SEQ ID NO: 637121 - RNA, 19 nt, Artificial Sequence
  Description of Artificial Sequence: Synthetic oligonucleotide
aggacaugauagaaaccuu

SEQ ID NO: 637122 - RNA, 19 nt, Artificial Sequence
  Description of Artificial Sequence: Synthetic oligonucleotide
cagagguucgggaguggga

SEQ ID NO: 637123 - RNA, 19 nt, Artificial Sequence
  Description of Artificial Sequence: Synthetic oligonucleotide
agggcugaacaaagguagu

SEQ ID NO: 637124 - RNA, 19 nt, Artificial Sequence
  Description of Artificial Sequence: Synthetic oligonucleotide
ccuugugcagagguucggg

SEQ ID NO: 637125 - RNA, 19 nt, Artificial Sequence
  Description of Artificial Sequence: Synthetic oligonucleotide
accggcgcggggcaucagu

SEQ ID NO: 637126 - RNA, 19 nt, Artificial Sequence
  Description of Artificial Sequence: Synthetic oligonucleotide
gagucaaccuggggauaac

SEQ ID NO: 637127 - RNA, 19 nt, Artificial Sequence
  Description of Artificial Sequence: Synthetic oligonucleotide
agccgaucauagggcuccc

SEQ ID NO: 637128 - RNA, 19 nt, Artificial Sequence
  Description of Artificial Sequence: Synthetic oligonucleotide
cucauaccccuugugcaga

SEQ ID NO: 637129 - RNA, 19 nt, Artificial Sequence
  Description of Artificial Sequence: Synthetic oligonucleotide
gacccucacugcugcagaa

SEQ ID NO: 637130 - RNA, 19 nt, Artificial Sequence
  Description of Artificial Sequence: Synthetic oligonucleotide
cacgcuacgcacuggggcu

SEQ ID NO: 637131 - RNA, 19 nt, Artificial Sequence
  Description of Artificial Sequence: Synthetic oligonucleotide
augcauccuucaguuacaa

SEQ ID NO: 637132 - RNA, 19 nt, Artificial Sequence
  Description of Artificial Sequence: Synthetic oligonucleotide
acauugcagccugggcgag

SEQ ID NO: 637133 - RNA, 19 nt, Artificial Sequence
  Description of Artificial Sequence: Synthetic oligonucleotide
ucccuaucucucugcuuuu

SEQ ID NO: 637134 - RNA, 19 nt, Artificial Sequence
  Description of Artificial Sequence: Synthetic oligonucleotide
cagugcgcacggugcuucc

SEQ ID NO: 637135 - RNA, 19 nt, Artificial Sequence
  Description of Artificial Sequence: Synthetic oligonucleotide
cuccaacucgcagagucaa

SEQ ID NO: 637136 - RNA, 19 nt, Artificial Sequence
  Description of Artificial Sequence: Synthetic oligonucleotide
ccccuugugcagagguucg

SEQ ID NO: 637137 - RNA, 19 nt, Artificial Sequence
  Description of Artificial Sequence: Synthetic oligonucleotide
cacagccgaucauagggcu

SEQ ID NO: 637138 - RNA, 19 nt, Artificial Sequence
  Description of Artificial Sequence: Synthetic oligonucleotide
guucgggagugggaggaga

SEQ ID NO: 637139 - RNA, 19 nt, Artificial Sequence
  Description of Artificial Sequence: Synthetic oligonucleotide
guaggggccuuuaucuugu

SEQ ID NO: 637140 - RNA, 19 nt, Artificial Sequence
  Description of Artificial Sequence: Synthetic oligonucleotide
cauucuuguccuugccccu

SEQ ID NO: 637141 - RNA, 19 nt, Artificial Sequence
  Description of Artificial Sequence: Synthetic oligonucleotide
acguggcggugagaagagg

SEQ ID NO: 637142 - RNA, 19 nt, Artificial Sequence
  Description of Artificial Sequence: Synthetic oligonucleotide
ggggccuuuaucuugucuu

SEQ ID NO: 637143 - RNA, 19 nt, Artificial Sequence
  Description of Artificial Sequence: Synthetic oligonucleotide
cuccgucaccacgcuacgc

SEQ ID NO: 637144 - RNA, 19 nt, Artificial Sequence
  Description of Artificial Sequence: Synthetic oligonucleotide
cggggcaucaguccugccc

SEQ ID NO: 637145 - RNA, 19 nt, Artificial Sequence
  Description of Artificial Sequence: Synthetic oligonucleotide
cuccgggaugcgcagucca

SEQ ID NO: 637146 - RNA, 19 nt, Artificial Sequence
  Description of Artificial Sequence: Synthetic oligonucleotide
ugggacccucacugcugca

SEQ ID NO: 637147 - RNA, 19 nt, Artificial Sequence
  Description of Artificial Sequence: Synthetic oligonucleotide
cagcccaaccggcgcgggg

SEQ ID NO: 637148 - RNA, 19 nt, Artificial Sequence
  Description of Artificial Sequence: Synthetic oligonucleotide
uugccccuccgggaugcgc

SEQ ID NO: 637149 - RNA, 19 nt, Artificial Sequence
  Description of Artificial Sequence: Synthetic oligonucleotide
gggaggcauguuggaaggg

SEQ ID NO: 637150 - RNA, 19 nt, Artificial Sequence
  Description of Artificial Sequence: Synthetic oligonucleotide
gcacccugggcagauccag

SEQ ID NO: 637151 - RNA, 19 nt, Artificial Sequence
  Description of Artificial Sequence: Synthetic oligonucleotide
ggacccucacugcugcaga

SEQ ID NO: 637152 - RNA, 19 nt, Artificial Sequence
  Description of Artificial Sequence: Synthetic oligonucleotide
ccaucuuucaaucgcacuu

SEQ ID NO: 637153 - RNA, 19 nt, Artificial Sequence
  Description of Artificial Sequence: Synthetic oligonucleotide
agaacacaaccaaguuaua

SEQ ID NO: 637154 - RNA, 19 nt, Artificial Sequence
  Description of Artificial Sequence: Synthetic oligonucleotide
ucugacugacuggggcauu

SEQ ID NO: 637155 - RNA, 19 nt, Artificial Sequence
  Description of Artificial Sequence: Synthetic oligonucleotide
ccacacagggccaauggua

SEQ ID NO: 637156 - RNA, 19 nt, Artificial Sequence
  Description of Artificial Sequence: Synthetic oligonucleotide
agugcgcacggugcuuccu

SEQ ID NO: 637157 - RNA, 19 nt, Artificial Sequence
  Description of Artificial Sequence: Synthetic oligonucleotide
uuauagggaucgggaucuu

SEQ ID NO: 637158 - RNA, 19 nt, Artificial Sequence
  Description of Artificial Sequence: Synthetic oligonucleotide
cacugguaauaggcauaug

SEQ ID NO: 637159 - RNA, 19 nt, Artificial Sequence
  Description of Artificial Sequence: Synthetic oligonucleotide
cgggguuuuaggucuguuc

SEQ ID NO: 637160 - RNA, 19 nt, Artificial Sequence
  Description of Artificial Sequence: Synthetic oligonucleotide
cgaucauagggcucccguc

SEQ ID NO: 637161 - RNA, 19 nt, Artificial Sequence
  Description of Artificial Sequence: Synthetic oligonucleotide
gacugacuggggcauucuu

SEQ ID NO: 637162 - RNA, 19 nt, Artificial Sequence
  Description of Artificial Sequence: Synthetic oligonucleotide
augacgggcuccacuuuua

SEQ ID NO: 637163 - RNA, 19 nt, Artificial Sequence
  Description of Artificial Sequence: Synthetic oligonucleotide
gggaugacgggcuccacuu

SEQ ID NO: 637164 - RNA, 19 nt, Artificial Sequence
  Description of Artificial Sequence: Synthetic oligonucleotide
ugacgucagugcgcacggu

SEQ ID NO: 637165 - RNA, 19 nt, Artificial Sequence
  Description of Artificial Sequence: Synthetic oligonucleotide
gagcggccauuaaucccac

SEQ ID NO: 637166 - RNA, 19 nt, Artificial Sequence
  Description of Artificial Sequence: Synthetic oligonucleotide
ccgucaccacgcuacgcac

SEQ ID NO: 637167 - RNA, 19 nt, Artificial Sequence
  Description of Artificial Sequence: Synthetic oligonucleotide
guggcggugagaagaggcu

SEQ ID NO: 637168 - RNA, 19 nt, Artificial Sequence
  Description of Artificial Sequence: Synthetic oligonucleotide
gacgggcuccacuuuuauu

SEQ ID NO: 637169 - RNA, 19 nt, Artificial Sequence
  Description of Artificial Sequence: Synthetic oligonucleotide
cgggaugcgcaguccacag

SEQ ID NO: 637170 - RNA, 19 nt, Artificial Sequence
  Description of Artificial Sequence: Synthetic oligonucleotide
gccauuucuuuugggaggu

SEQ ID NO: 637171 - RNA, 19 nt, Artificial Sequence
  Description of Artificial Sequence: Synthetic oligonucleotide
cuggggcauucuuuccuua

SEQ ID NO: 637172 - RNA, 19 nt, Artificial Sequence
  Description of Artificial Sequence: Synthetic oligonucleotide
caugccuccacuggaguuu

SEQ ID NO: 637173 - RNA, 19 nt, Artificial Sequence
  Description of Artificial Sequence: Synthetic oligonucleotide
gcgcagaaccacugcaucu

SEQ ID NO: 637174 - RNA, 19 nt, Artificial Sequence
  Description of Artificial Sequence: Synthetic oligonucleotide
cauggguaccugaccuccu

SEQ ID NO: 637175 - RNA, 19 nt, Artificial Sequence
  Description of Artificial Sequence: Synthetic oligonucleotide
ugcccacgcugacgucagu

SEQ ID NO: 637176 - RNA, 19 nt, Artificial Sequence
  Description of Artificial Sequence: Synthetic oligonucleotide
gggaagauguguggugucu

SEQ ID NO: 637177 - RNA, 19 nt, Artificial Sequence
  Description of Artificial Sequence: Synthetic oligonucleotide
gccgaucauagggcucccg

SEQ ID NO: 637178 - RNA, 19 nt, Artificial Sequence
  Description of Artificial Sequence: Synthetic oligonucleotide
cccuugugcagagguucgg

SEQ ID NO: 637179 - RNA, 19 nt, Artificial Sequence
  Description of Artificial Sequence: Synthetic oligonucleotide
caucaguccugcccacgcu

SEQ ID NO: 637180 - RNA, 19 nt, Artificial Sequence
  Description of Artificial Sequence: Synthetic oligonucleotide
ggaaaucaagagggaagau

SEQ ID NO: 637181 - RNA, 19 nt, Artificial Sequence
  Description of Artificial Sequence: Synthetic oligonucleotide
ccggcccagcccaaccggc

SEQ ID NO: 637182 - RNA, 19 nt, Artificial Sequence
  Description of Artificial Sequence: Synthetic oligonucleotide
gcgcaguccacagggccug

SEQ ID NO: 637183 - RNA, 19 nt, Artificial Sequence
  Description of Artificial Sequence: Synthetic oligonucleotide
cucucuucucucucuccuu

SEQ ID NO: 637184 - RNA, 19 nt, Artificial Sequence
  Description of Artificial Sequence: Synthetic oligonucleotide
cugggaugacgggcuccac

SEQ ID NO: 637185 - RNA, 19 nt, Artificial Sequence
  Description of Artificial Sequence: Synthetic oligonucleotide
aaccggcgcggggcaucag

SEQ ID NO: 637186 - RNA, 19 nt, Artificial Sequence
  Description of Artificial Sequence: Synthetic oligonucleotide
gucacacgccgugggagcu

SEQ ID NO: 637187 - RNA, 19 nt, Artificial Sequence
  Description of Artificial Sequence: Synthetic oligonucleotide
acgcuacgcacuggggcuu

SEQ ID NO: 637188 - RNA, 19 nt, Artificial Sequence
  Description of Artificial Sequence: Synthetic oligonucleotide
aggcgggguuuuaggucug

SEQ ID NO: 637189 - RNA, 19 nt, Artificial Sequence
  Description of Artificial Sequence: Synthetic oligonucleotide
cagagucaaccuggggaua

SEQ ID NO: 637190 - RNA, 19 nt, Artificial Sequence
  Description of Artificial Sequence: Synthetic oligonucleotide
cggccauuaaucccacaca

SEQ ID NO: 637191 - RNA, 19 nt, Artificial Sequence
  Description of Artificial Sequence: Synthetic oligonucleotide
cccuccgggaugcgcaguc

SEQ ID NO: 637192 - RNA, 19 nt, Artificial Sequence
  Description of Artificial Sequence: Synthetic oligonucleotide
gcugaccgucuccgucacc

SEQ ID NO: 637193 - RNA, 19 nt, Artificial Sequence
  Description of Artificial Sequence: Synthetic oligonucleotide
ggaagauguguggugucuu

SEQ ID NO: 637194 - RNA, 19 nt, Artificial Sequence
  Description of Artificial Sequence: Synthetic oligonucleotide
gccccuccgggaugcgcag

SEQ ID NO: 637195 - RNA, 19 nt, Artificial Sequence
  Description of Artificial Sequence: Synthetic oligonucleotide
caaccggcgcggggcauca

SEQ ID NO: 637196 - RNA, 19 nt, Artificial Sequence
  Description of Artificial Sequence: Synthetic oligonucleotide
caguuacaaucaaggcauu

SEQ ID NO: 637197 - RNA, 19 nt, Artificial Sequence
  Description of Artificial Sequence: Synthetic oligonucleotide
ccgaucauagggcucccgu

SEQ ID NO: 637198 - RNA, 19 nt, Artificial Sequence
  Description of Artificial Sequence: Synthetic oligonucleotide
gggagcauccagagugaua

SEQ ID NO: 637199 - RNA, 19 nt, Artificial Sequence
  Description of Artificial Sequence: Synthetic oligonucleotide
cgcacggugcuuccucuuc

SEQ ID NO: 637200 - RNA, 19 nt, Artificial Sequence
  Description of Artificial Sequence: Synthetic oligonucleotide
gugacaaggcaggcagcau

SEQ ID NO: 637201 - RNA, 19 nt, Artificial Sequence
  Description of Artificial Sequence: Synthetic oligonucleotide
cagaaccggcccagcccaa

SEQ ID NO: 637202 - RNA, 19 nt, Artificial Sequence
  Description of Artificial Sequence: Synthetic oligonucleotide
ggaucgggaucuucaucuu

SEQ ID NO: 637203 - RNA, 19 nt, Artificial Sequence
  Description of Artificial Sequence: Synthetic oligonucleotide
ccuccgggaugcgcagucc

SEQ ID NO: 637204 - RNA, 19 nt, Artificial Sequence
  Description of Artificial Sequence: Synthetic oligonucleotide
gggcagauccagauuugau

SEQ ID NO: 637205 - RNA, 19 nt, Artificial Sequence
  Description of Artificial Sequence: Synthetic oligonucleotide
gcuacgcacuggggcuuug

SEQ ID NO: 637206 - RNA, 19 nt, Artificial Sequence
  Description of Artificial Sequence: Synthetic oligonucleotide
ccgggaugcgcaguccaca

SEQ ID NO: 637207 - RNA, 19 nt, Artificial Sequence
  Description of Artificial Sequence: Synthetic oligonucleotide
cgcggggcaucaguccugc

SEQ ID NO: 637208 - RNA, 19 nt, Artificial Sequence
  Description of Artificial Sequence: Synthetic oligonucleotide
ccaaccggcgcggggcauc

SEQ ID NO: 637209 - RNA, 19 nt, Artificial Sequence
  Description of Artificial Sequence: Synthetic oligonucleotide
ccagcccaaccggcgcggg

SEQ ID NO: 637210 - RNA, 19 nt, Artificial Sequence
  Description of Artificial Sequence: Synthetic oligonucleotide
ggaugacgggcuccacuuu

SEQ ID NO: 637211 - RNA, 19 nt, Artificial Sequence
  Description of Artificial Sequence: Synthetic oligonucleotide
gucagugcgcacggugcuu

SEQ ID NO: 637212 - RNA, 19 nt, Artificial Sequence
  Description of Artificial Sequence: Synthetic oligonucleotide
gcccaaccggcgcggggca

SEQ ID NO: 637213 - RNA, 19 nt, Artificial Sequence
  Description of Artificial Sequence: Synthetic oligonucleotide
gcgcggggcaucaguccug

SEQ ID NO: 637214 - RNA, 19 nt, Artificial Sequence
  Description of Artificial Sequence: Synthetic oligonucleotide
ggcucccgucaucaggcuu

SEQ ID NO: 637215 - RNA, 19 nt, Artificial Sequence
  Description of Artificial Sequence: Synthetic oligonucleotide
cucccgucaucaggcuugu

SEQ ID NO: 637216 - RNA, 19 nt, Artificial Sequence
  Description of Artificial Sequence: Synthetic oligonucleotide
ucccgucaucaggcuuguu

SEQ ID NO: 637217 - RNA, 19 nt, Artificial Sequence
  Description of Artificial Sequence: Synthetic oligonucleotide
ggcgggguuuuaggucugu

SEQ ID NO: 637218 - RNA, 19 nt, Artificial Sequence
  Description of Artificial Sequence: Synthetic oligonucleotide
cagcuccaacucgcagagu

SEQ ID NO: 637219 - RNA, 19 nt, Artificial Sequence
  Description of Artificial Sequence: Synthetic oligonucleotide
gcgcacggugcuuccucuu

SEQ ID NO: 637220 - RNA, 19 nt, Artificial Sequence
  Description of Artificial Sequence: Synthetic oligonucleotide
caucagggcugggcacauu

SEQ ID NO: 637221 - RNA, 19 nt, Artificial Sequence
  Description of Artificial Sequence: Synthetic oligonucleotide
gcgggguuuuaggucuguu

SEQ ID NO: 637222 - RNA, 19 nt, Artificial Sequence
  Description of Artificial Sequence: Synthetic oligonucleotide
cgucuccgucaccacgcua

SEQ ID NO: 637223 - RNA, 19 nt, Artificial Sequence
  Description of Artificial Sequence: Synthetic oligonucleotide
ccgucuccgucaccacgcu

SEQ ID NO: 637224 - RNA, 19 nt, Artificial Sequence
  Description of Artificial Sequence: Synthetic oligonucleotide
ccccuccgggaugcgcagu

SEQ ID NO: 637225 - RNA, 19 nt, Artificial Sequence
  Description of Artificial Sequence: Synthetic oligonucleotide
cccaaccggcgcggggcau

SEQ ID NO: 637226 - RNA, 19 nt, Artificial Sequence
  Description of Artificial Sequence: Synthetic oligonucleotide
cgcuacgcacuggggcuuu

SEQ ID NO: 637227 - RNA, 19 nt, Artificial Sequence
  Description of Artificial Sequence: Synthetic oligonucleotide
aaaccuaggguuuaggugg

SEQ ID NO: 637228 - RNA, 19 nt, Artificial Sequence
  Description of Artificial Sequence: Synthetic oligonucleotide
cuaaaugagacuacgaagg

SEQ ID NO: 637229 - RNA, 19 nt, Artificial Sequence
  Description of Artificial Sequence: Synthetic oligonucleotide
aaauccaacagguacguuc

SEQ ID NO: 637230 - RNA, 19 nt, Artificial Sequence
  Description of Artificial Sequence: Synthetic oligonucleotide
gaugauuaaauccaacagg

SEQ ID NO: 637231 - RNA, 19 nt, Artificial Sequence
  Description of Artificial Sequence: Synthetic oligonucleotide
aaugagauagcuauggaac

SEQ ID NO: 637232 - RNA, 19 nt, Artificial Sequence
  Description of Artificial Sequence: Synthetic oligonucleotide
ucuuuagucagcaaaauga

SEQ ID NO: 637233 - RNA, 19 nt, Artificial Sequence
  Description of Artificial Sequence: Synthetic oligonucleotide
aaauauaucaaaaccuagg

SEQ ID NO: 637234 - RNA, 19 nt, Artificial Sequence
  Description of Artificial Sequence: Synthetic oligonucleotide
uagauuaucaguucaaucu

SEQ ID NO: 637235 - RNA, 19 nt, Artificial Sequence
  Description of Artificial Sequence: Synthetic oligonucleotide
ucuauaaugagcucuuuag

SEQ ID NO: 637236 - RNA, 19 nt, Artificial Sequence
  Description of Artificial Sequence: Synthetic oligonucleotide
cauucuauuaaaauguuac

SEQ ID NO: 637237 - RNA, 19 nt, Artificial Sequence
  Description of Artificial Sequence: Synthetic oligonucleotide
ugaugauuaaauccaacag

SEQ ID NO: 637238 - RNA, 19 nt, Artificial Sequence
  Description of Artificial Sequence: Synthetic oligonucleotide
aaagccagaagacacagga

SEQ ID NO: 637239 - RNA, 19 nt, Artificial Sequence
  Description of Artificial Sequence: Synthetic oligonucleotide
guaugcucaaaauugaucc

SEQ ID NO: 637240 - RNA, 19 nt, Artificial Sequence
  Description of Artificial Sequence: Synthetic oligonucleotide
aaagcuucaaggucuacag

SEQ ID NO: 637241 - RNA, 19 nt, Artificial Sequence
  Description of Artificial Sequence: Synthetic oligonucleotide
acguaacaggaauagaugc

SEQ ID NO: 637242 - RNA, 19 nt, Artificial Sequence
  Description of Artificial Sequence: Synthetic oligonucleotide
ugcacuauuaauauugcac

SEQ ID NO: 637243 - RNA, 19 nt, Artificial Sequence
  Description of Artificial Sequence: Synthetic oligonucleotide
aaaaccuaggguuuaggug

SEQ ID NO: 637244 - RNA, 19 nt, Artificial Sequence
  Description of Artificial Sequence: Synthetic oligonucleotide
ugcuuauauaauuugcuag

SEQ ID NO: 637245 - RNA, 19 nt, Artificial Sequence
  Description of Artificial Sequence: Synthetic oligonucleotide
aaauuccgauguuaguagc

SEQ ID NO: 637246 - RNA, 19 nt, Artificial Sequence
  Description of Artificial Sequence: Synthetic oligonucleotide
uugacuagaaacaguauca

SEQ ID NO: 637247 - RNA, 19 nt, Artificial Sequence
  Description of Artificial Sequence: Synthetic oligonucleotide
acuaaaugagacuacgaag

SEQ ID NO: 637248 - RNA, 19 nt, Artificial Sequence
  Description of Artificial Sequence: Synthetic oligonucleotide
ucugauuacaaguaaacau

SEQ ID NO: 637249 - RNA, 19 nt, Artificial Sequence
  Description of Artificial Sequence: Synthetic oligonucleotide
uauacuaaaugagacuacg

SEQ ID NO: 637250 - RNA, 19 nt, Artificial Sequence
  Description of Artificial Sequence: Synthetic oligonucleotide
uagaauuauagauauacau

SEQ ID NO: 637251 - RNA, 19 nt, Artificial Sequence
  Description of Artificial Sequence: Synthetic oligonucleotide
aagaaguuaccuucuuacg

SEQ ID NO: 637252 - RNA, 19 nt, Artificial Sequence
  Description of Artificial Sequence: Synthetic oligonucleotide
acguucaagacucauuuac

SEQ ID NO: 637253 - RNA, 19 nt, Artificial Sequence
  Description of Artificial Sequence: Synthetic oligonucleotide
uuuuauggcuuuuaaauau

SEQ ID NO: 637254 - RNA, 19 nt, Artificial Sequence
  Description of Artificial Sequence: Synthetic oligonucleotide
uccauauacuaaaugagac

SEQ ID NO: 637255 - RNA, 19 nt, Artificial Sequence
  Description of Artificial Sequence: Synthetic oligonucleotide
uauaaugagcucuuuaguc

SEQ ID NO: 637256 - RNA, 19 nt, Artificial Sequence
  Description of Artificial Sequence: Synthetic oligonucleotide
uauaauuugcuagucacug

SEQ ID NO: 637257 - RNA, 19 nt, Artificial Sequence
  Description of Artificial Sequence: Synthetic oligonucleotide
ucuauuauauguucuacaa

SEQ ID NO: 637258 - RNA, 19 nt, Artificial Sequence
  Description of Artificial Sequence: Synthetic oligonucleotide
agauauacauuuuaagcca

SEQ ID NO: 637259 - RNA, 19 nt, Artificial Sequence
  Description of Artificial Sequence: Synthetic oligonucleotide
uuacuaguaaaauuuuaug

SEQ ID NO: 637260 - RNA, 19 nt, Artificial Sequence
  Description of Artificial Sequence: Synthetic oligonucleotide
agugacacgaacaaaauug

SEQ ID NO: 637261 - RNA, 19 nt, Artificial Sequence
  Description of Artificial Sequence: Synthetic oligonucleotide
agacauguguccuccagcc

SEQ ID NO: 637262 - RNA, 19 nt, Artificial Sequence
  Description of Artificial Sequence: Synthetic oligonucleotide
ugauuacaaguaaacauga

SEQ ID NO: 637263 - RNA, 19 nt, Artificial Sequence
  Description of Artificial Sequence: Synthetic oligonucleotide
auaaccgaacucuucacuc

SEQ ID NO: 637264 - RNA, 19 nt, Artificial Sequence
  Description of Artificial Sequence: Synthetic oligonucleotide
aaugagacuacgaaggaca

SEQ ID NO: 637265 - RNA, 19 nt, Artificial Sequence
  Description of Artificial Sequence: Synthetic oligonucleotide
uacauaaagcuagaaagag

SEQ ID NO: 637266 - RNA, 19 nt, Artificial Sequence
  Description of Artificial Sequence: Synthetic oligonucleotide
uuuuaagccacuuuugcau

SEQ ID NO: 637267 - RNA, 19 nt, Artificial Sequence
  Description of Artificial Sequence: Synthetic oligonucleotide
aaugcacuauuaauauugc

SEQ ID NO: 637268 - RNA, 19 nt, Artificial Sequence
  Description of Artificial Sequence: Synthetic oligonucleotide
aaaugagacuacgaaggac

SEQ ID NO: 637269 - RNA, 19 nt, Artificial Sequence
  Description of Artificial Sequence: Synthetic oligonucleotide
aaacagacauguguccucc

SEQ ID NO: 637270 - RNA, 19 nt, Artificial Sequence
  Description of Artificial Sequence: Synthetic oligonucleotide
caaaagucuagcuuccugc

SEQ ID NO: 637271 - RNA, 19 nt, Artificial Sequence
  Description of Artificial Sequence: Synthetic oligonucleotide
aauaaccgaacucuucacu

SEQ ID NO: 637272 - RNA, 19 nt, Artificial Sequence
  Description of Artificial Sequence: Synthetic oligonucleotide
uacuaaaugagacuacgaa

SEQ ID NO: 637273 - RNA, 19 nt, Artificial Sequence
  Description of Artificial Sequence: Synthetic oligonucleotide
uuugcaucgguauuuuggc

SEQ ID NO: 637274 - RNA, 19 nt, Artificial Sequence
  Description of Artificial Sequence: Synthetic oligonucleotide
aagacucauuuacaguuag

SEQ ID NO: 637275 - RNA, 19 nt, Artificial Sequence
  Description of Artificial Sequence: Synthetic oligonucleotide
aaaacuugcuugaacuggg

SEQ ID NO: 637276 - RNA, 19 nt, Artificial Sequence
  Description of Artificial Sequence: Synthetic oligonucleotide
uuaucgaucaugucuaaaa

SEQ ID NO: 637277 - RNA, 19 nt, Artificial Sequence
  Description of Artificial Sequence: Synthetic oligonucleotide
agaaguuaccuucuuacgu

SEQ ID NO: 637278 - RNA, 19 nt, Artificial Sequence
  Description of Artificial Sequence: Synthetic oligonucleotide
acagguacguucaagacuc

SEQ ID NO: 637279 - RNA, 19 nt, Artificial Sequence
  Description of Artificial Sequence: Synthetic oligonucleotide
gauacuaggacauuuaauu

SEQ ID NO: 637280 - RNA, 19 nt, Artificial Sequence
  Description of Artificial Sequence: Synthetic oligonucleotide
uacguaacaggaauagaug

SEQ ID NO: 637281 - RNA, 19 nt, Artificial Sequence
  Description of Artificial Sequence: Synthetic oligonucleotide
uugaucacaccuuuugggc

SEQ ID NO: 637282 - RNA, 19 nt, Artificial Sequence
  Description of Artificial Sequence: Synthetic oligonucleotide
uggaacuagauuaucaguu

SEQ ID NO: 637283 - RNA, 19 nt, Artificial Sequence
  Description of Artificial Sequence: Synthetic oligonucleotide
cacauaacacucacuaggg

SEQ ID NO: 637284 - RNA, 19 nt, Artificial Sequence
  Description of Artificial Sequence: Synthetic oligonucleotide
cugcuagucacaaagugag

SEQ ID NO: 637285 - RNA, 19 nt, Artificial Sequence
  Description of Artificial Sequence: Synthetic oligonucleotide
aaaccaaauuccuguagga

SEQ ID NO: 637286 - RNA, 19 nt, Artificial Sequence
  Description of Artificial Sequence: Synthetic oligonucleotide
guaguaauacuguaguuuc

SEQ ID NO: 637287 - RNA, 19 nt, Artificial Sequence
  Description of Artificial Sequence: Synthetic oligonucleotide
acuugaaugacaaugaauu

SEQ ID NO: 637288 - RNA, 19 nt, Artificial Sequence
  Description of Artificial Sequence: Synthetic oligonucleotide
cuuuagucagcaaaaugac

SEQ ID NO: 637289 - RNA, 19 nt, Artificial Sequence
  Description of Artificial Sequence: Synthetic oligonucleotide
gaauuugacagccggguac

SEQ ID NO: 637290 - RNA, 19 nt, Artificial Sequence
  Description of Artificial Sequence: Synthetic oligonucleotide
ugacuuuccauauacuaaa

SEQ ID NO: 637291 - RNA, 19 nt, Artificial Sequence
  Description of Artificial Sequence: Synthetic oligonucleotide
auuugcuagucacugcuag

SEQ ID NO: 637292 - RNA, 19 nt, Artificial Sequence
  Description of Artificial Sequence: Synthetic oligonucleotide
aaccgaacucuucacucgg

SEQ ID NO: 637293 - RNA, 19 nt, Artificial Sequence
  Description of Artificial Sequence: Synthetic oligonucleotide
gaauagaugcugauccugg

SEQ ID NO: 637294 - RNA, 19 nt, Artificial Sequence
  Description of Artificial Sequence: Synthetic oligonucleotide
cuguaaagccagaagacac

SEQ ID NO: 637295 - RNA, 19 nt, Artificial Sequence
  Description of Artificial Sequence: Synthetic oligonucleotide
uaaccgaacucuucacucg

SEQ ID NO: 637296 - RNA, 19 nt, Artificial Sequence
  Description of Artificial Sequence: Synthetic oligonucleotide
uauuacuaguaaaauuuua

SEQ ID NO: 637297 - RNA, 19 nt, Artificial Sequence
  Description of Artificial Sequence: Synthetic oligonucleotide
gaugacaggaauuauuacu

SEQ ID NO: 637298 - RNA, 19 nt, Artificial Sequence
  Description of Artificial Sequence: Synthetic oligonucleotide
acucggcagaauuugacag

SEQ ID NO: 637299 - RNA, 19 nt, Artificial Sequence
  Description of Artificial Sequence: Synthetic oligonucleotide
auucuauuaaaauguuaca

SEQ ID NO: 637300 - RNA, 19 nt, Artificial Sequence
  Description of Artificial Sequence: Synthetic oligonucleotide
uguggaaaugcacuauuaa

SEQ ID NO: 637301 - RNA, 19 nt, Artificial Sequence
  Description of Artificial Sequence: Synthetic oligonucleotide
acgcuagagaaguaaacag

SEQ ID NO: 637302 - RNA, 19 nt, Artificial Sequence
  Description of Artificial Sequence: Synthetic oligonucleotide
aauauugacuagaaacagu

SEQ ID NO: 637303 - RNA, 19 nt, Artificial Sequence
  Description of Artificial Sequence: Synthetic oligonucleotide
aggugguagaauuauagau

SEQ ID NO: 637304 - RNA, 19 nt, Artificial Sequence
  Description of Artificial Sequence: Synthetic oligonucleotide
auagcuauggaacuagauu

SEQ ID NO: 637305 - RNA, 19 nt, Artificial Sequence
  Description of Artificial Sequence: Synthetic oligonucleotide
ugcaucgguauuuuggcca

SEQ ID NO: 637306 - RNA, 19 nt, Artificial Sequence
  Description of Artificial Sequence: Synthetic oligonucleotide
cuagauuaucaguucaauc

SEQ ID NO: 637307 - RNA, 19 nt, Artificial Sequence
  Description of Artificial Sequence: Synthetic oligonucleotide
caauauugacuagaaacag

SEQ ID NO: 637308 - RNA, 19 nt, Artificial Sequence
  Description of Artificial Sequence: Synthetic oligonucleotide
aggaauuauuacuaguaaa

SEQ ID NO: 637309 - RNA, 19 nt, Artificial Sequence
  Description of Artificial Sequence: Synthetic oligonucleotide
auuacuaguaaaauuuuau

SEQ ID NO: 637310 - RNA, 19 nt, Artificial Sequence
  Description of Artificial Sequence: Synthetic oligonucleotide
aguaugcucaaaauugauc

SEQ ID NO: 637311 - RNA, 19 nt, Artificial Sequence
  Description of Artificial Sequence: Synthetic oligonucleotide
aaagugagucagcauucug

SEQ ID NO: 637312 - RNA, 19 nt, Artificial Sequence
  Description of Artificial Sequence: Synthetic oligonucleotide
acgaaggacagcuguaaag

SEQ ID NO: 637313 - RNA, 19 nt, Artificial Sequence
  Description of Artificial Sequence: Synthetic oligonucleotide
aauagaugcugauccuggu

SEQ ID NO: 637314 - RNA, 19 nt, Artificial Sequence
  Description of Artificial Sequence: Synthetic oligonucleotide
uacaaugaacacauucuau

SEQ ID NO: 637315 - RNA, 19 nt, Artificial Sequence
  Description of Artificial Sequence: Synthetic oligonucleotide
acacgaacaaaauugccaa

SEQ ID NO: 637316 - RNA, 19 nt, Artificial Sequence
  Description of Artificial Sequence: Synthetic oligonucleotide
cauaaagcuagaaagagau

SEQ ID NO: 637317 - RNA, 19 nt, Artificial Sequence
  Description of Artificial Sequence: Synthetic oligonucleotide
accaaauuccuguaggaaa

SEQ ID NO: 637318 - RNA, 19 nt, Artificial Sequence
  Description of Artificial Sequence: Synthetic oligonucleotide
guucuuaucgaucaugucu

SEQ ID NO: 637319 - RNA, 19 nt, Artificial Sequence
  Description of Artificial Sequence: Synthetic oligonucleotide
aagucuagcuuccugcuua

SEQ ID NO: 637320 - RNA, 19 nt, Artificial Sequence
  Description of Artificial Sequence: Synthetic oligonucleotide
cuacucucagaccugguag

SEQ ID NO: 637321 - RNA, 19 nt, Artificial Sequence
  Description of Artificial Sequence: Synthetic oligonucleotide
ugacacgaacaaaauugcc

SEQ ID NO: 637322 - RNA, 19 nt, Artificial Sequence
  Description of Artificial Sequence: Synthetic oligonucleotide
ugauacuaggacauuuaau

SEQ ID NO: 637323 - RNA, 19 nt, Artificial Sequence
  Description of Artificial Sequence: Synthetic oligonucleotide
uucaagacucauuuacagu

SEQ ID NO: 637324 - RNA, 19 nt, Artificial Sequence
  Description of Artificial Sequence: Synthetic oligonucleotide
gacacgaacaaaauugcca

SEQ ID NO: 637325 - RNA, 19 nt, Artificial Sequence
  Description of Artificial Sequence: Synthetic oligonucleotide
accugguagaauucugagg

SEQ ID NO: 637326 - RNA, 19 nt, Artificial Sequence
  Description of Artificial Sequence: Synthetic oligonucleotide
auaagguguuuucuguucu

SEQ ID NO: 637327 - RNA, 19 nt, Artificial Sequence
  Description of Artificial Sequence: Synthetic oligonucleotide
cagcaaagaaaucuucccc

SEQ ID NO: 637328 - RNA, 19 nt, Artificial Sequence
  Description of Artificial Sequence: Synthetic oligonucleotide
aggucuacagcaaagaaau

SEQ ID NO: 637329 - RNA, 19 nt, Artificial Sequence
  Description of Artificial Sequence: Synthetic oligonucleotide
uguuaguagcugaccauac

SEQ ID NO: 637330 - RNA, 19 nt, Artificial Sequence
  Description of Artificial Sequence: Synthetic oligonucleotide
agccuuuuaauacauuaaa

SEQ ID NO: 637331 - RNA, 19 nt, Artificial Sequence
  Description of Artificial Sequence: Synthetic oligonucleotide
uagaauucugaggucacca

SEQ ID NO: 637332 - RNA, 19 nt, Artificial Sequence
  Description of Artificial Sequence: Synthetic oligonucleotide
uuagcuucugagcaaccaa

SEQ ID NO: 637333 - RNA, 19 nt, Artificial Sequence
  Description of Artificial Sequence: Synthetic oligonucleotide
aaagcuagaaagagaucug

SEQ ID NO: 637334 - RNA, 19 nt, Artificial Sequence
  Description of Artificial Sequence: Synthetic oligonucleotide
auauugacuagaaacagua

SEQ ID NO: 637335 - RNA, 19 nt, Artificial Sequence
  Description of Artificial Sequence: Synthetic oligonucleotide
uucuauuaaauaugauuuu

SEQ ID NO: 637336 - RNA, 19 nt, Artificial Sequence
  Description of Artificial Sequence: Synthetic oligonucleotide
gagauagcuauggaacuag

SEQ ID NO: 637337 - RNA, 19 nt, Artificial Sequence
  Description of Artificial Sequence: Synthetic oligonucleotide
aaacuugcuugaacugggc

SEQ ID NO: 637338 - RNA, 19 nt, Artificial Sequence
  Description of Artificial Sequence: Synthetic oligonucleotide
accuuuugggccuguauug

SEQ ID NO: 637339 - RNA, 19 nt, Artificial Sequence
  Description of Artificial Sequence: Synthetic oligonucleotide
uaggugguagaauuauaga

SEQ ID NO: 637340 - RNA, 19 nt, Artificial Sequence
  Description of Artificial Sequence: Synthetic oligonucleotide
uuacuuccugguuauauuu

SEQ ID NO: 637341 - RNA, 19 nt, Artificial Sequence
  Description of Artificial Sequence: Synthetic oligonucleotide
uccugguuauauuuaauuu

SEQ ID NO: 637342 - RNA, 19 nt, Artificial Sequence
  Description of Artificial Sequence: Synthetic oligonucleotide
gaaguuaccuucuuacgua

SEQ ID NO: 637343 - RNA, 19 nt, Artificial Sequence
  Description of Artificial Sequence: Synthetic oligonucleotide
auuauauguucuacaauga

SEQ ID NO: 637344 - RNA, 19 nt, Artificial Sequence
  Description of Artificial Sequence: Synthetic oligonucleotide
ugguagagaaggaucuaga

SEQ ID NO: 637345 - RNA, 19 nt, Artificial Sequence
  Description of Artificial Sequence: Synthetic oligonucleotide
uggucagugacacgaacaa

SEQ ID NO: 637346 - RNA, 19 nt, Artificial Sequence
  Description of Artificial Sequence: Synthetic oligonucleotide
gaccugguagaauucugag

SEQ ID NO: 637347 - RNA, 19 nt, Artificial Sequence
  Description of Artificial Sequence: Synthetic oligonucleotide
cucuuuagucagcaaaaug

SEQ ID NO: 637348 - RNA, 19 nt, Artificial Sequence
  Description of Artificial Sequence: Synthetic oligonucleotide
agauagcuuuugaucagcc

SEQ ID NO: 637349 - RNA, 19 nt, Artificial Sequence
  Description of Artificial Sequence: Synthetic oligonucleotide
aacuugaaugacaaugaau

SEQ ID NO: 637350 - RNA, 19 nt, Artificial Sequence
  Description of Artificial Sequence: Synthetic oligonucleotide
guaaagccagaagacacag

SEQ ID NO: 637351 - RNA, 19 nt, Artificial Sequence
  Description of Artificial Sequence: Synthetic oligonucleotide
ucggcagaauuugacagcc

SEQ ID NO: 637352 - RNA, 19 nt, Artificial Sequence
  Description of Artificial Sequence: Synthetic oligonucleotide
uuuacuuccugguuauauu

SEQ ID NO: 637353 - RNA, 19 nt, Artificial Sequence
  Description of Artificial Sequence: Synthetic oligonucleotide
ucacgcuagagaaguaaac

SEQ ID NO: 637354 - RNA, 19 nt, Artificial Sequence
  Description of Artificial Sequence: Synthetic oligonucleotide
aauuccgauguuaguagcu

SEQ ID NO: 637355 - RNA, 19 nt, Artificial Sequence
  Description of Artificial Sequence: Synthetic oligonucleotide
gggcauuccggguaaaacg

SEQ ID NO: 637356 - RNA, 19 nt, Artificial Sequence
  Description of Artificial Sequence: Synthetic oligonucleotide
ucacccgccuuguaaauga

SEQ ID NO: 637357 - RNA, 19 nt, Artificial Sequence
  Description of Artificial Sequence: Synthetic oligonucleotide
cucgcugggagaaagagaa

SEQ ID NO: 637358 - RNA, 19 nt, Artificial Sequence
  Description of Artificial Sequence: Synthetic oligonucleotide
ugucauggugccucgacuc

SEQ ID NO: 637359 - RNA, 19 nt, Artificial Sequence
  Description of Artificial Sequence: Synthetic oligonucleotide
ccauucauggcuucggucc

SEQ ID NO: 637360 - RNA, 19 nt, Artificial Sequence
  Description of Artificial Sequence: Synthetic oligonucleotide
uccgauguuaguagcugac

SEQ ID NO: 637361 - RNA, 19 nt, Artificial Sequence
  Description of Artificial Sequence: Synthetic oligonucleotide
ugauuguggaaaugcacua

SEQ ID NO: 637362 - RNA, 19 nt, Artificial Sequence
  Description of Artificial Sequence: Synthetic oligonucleotide
ggaauuauuacuaguaaaa

SEQ ID NO: 637363 - RNA, 19 nt, Artificial Sequence
  Description of Artificial Sequence: Synthetic oligonucleotide
gagacuacgaaggacagcu

SEQ ID NO: 637364 - RNA, 19 nt, Artificial Sequence
  Description of Artificial Sequence: Synthetic oligonucleotide
ccaaauuccuguaggaaag

SEQ ID NO: 637365 - RNA, 19 nt, Artificial Sequence
  Description of Artificial Sequence: Synthetic oligonucleotide
agacgcguuccuccggacc

SEQ ID NO: 637366 - RNA, 19 nt, Artificial Sequence
  Description of Artificial Sequence: Synthetic oligonucleotide
uauugacuagaaacaguau

SEQ ID NO: 637367 - RNA, 19 nt, Artificial Sequence
  Description of Artificial Sequence: Synthetic oligonucleotide
gacuagaaacaguaucaga

SEQ ID NO: 637368 - RNA, 19 nt, Artificial Sequence
  Description of Artificial Sequence: Synthetic oligonucleotide
guauggagcugcuggcugg

SEQ ID NO: 637369 - RNA, 19 nt, Artificial Sequence
  Description of Artificial Sequence: Synthetic oligonucleotide
aggguugucauggugccuc

SEQ ID NO: 637370 - RNA, 19 nt, Artificial Sequence
  Description of Artificial Sequence: Synthetic oligonucleotide
gcacuauuaauauugcaca

SEQ ID NO: 637371 - RNA, 19 nt, Artificial Sequence
  Description of Artificial Sequence: Synthetic oligonucleotide
agguggcagaguuucgcac

SEQ ID NO: 637372 - RNA, 19 nt, Artificial Sequence
  Description of Artificial Sequence: Synthetic oligonucleotide
acucacuagggaauucuac

SEQ ID NO: 637373 - RNA, 19 nt, Artificial Sequence
  Description of Artificial Sequence: Synthetic oligonucleotide
cuaaugauuuucuugacuu

SEQ ID NO: 637374 - RNA, 19 nt, Artificial Sequence
  Description of Artificial Sequence: Synthetic oligonucleotide
cacugcuagucacaaagug

SEQ ID NO: 637375 - RNA, 19 nt, Artificial Sequence
  Description of Artificial Sequence: Synthetic oligonucleotide
gaugcugauccugguagag

SEQ ID NO: 637376 - RNA, 19 nt, Artificial Sequence
  Description of Artificial Sequence: Synthetic oligonucleotide
auuguggaaaugcacuauu

SEQ ID NO: 637377 - RNA, 19 nt, Artificial Sequence
  Description of Artificial Sequence: Synthetic oligonucleotide
caaugagauagcuauggaa

SEQ ID NO: 637378 - RNA, 19 nt, Artificial Sequence
  Description of Artificial Sequence: Synthetic oligonucleotide
uagauagcuuuugaucagc

SEQ ID NO: 637379 - RNA, 19 nt, Artificial Sequence
  Description of Artificial Sequence: Synthetic oligonucleotide
uacucucagaccugguaga

SEQ ID NO: 637380 - RNA, 19 nt, Artificial Sequence
  Description of Artificial Sequence: Synthetic oligonucleotide
acaggaauuauuacuagua

SEQ ID NO: 637381 - RNA, 19 nt, Artificial Sequence
  Description of Artificial Sequence: Synthetic oligonucleotide
ucucugcuccuaaugauuu

SEQ ID NO: 637382 - RNA, 19 nt, Artificial Sequence
  Description of Artificial Sequence: Synthetic oligonucleotide
acaaugagauagcuaugga

SEQ ID NO: 637383 - RNA, 19 nt, Artificial Sequence
  Description of Artificial Sequence: Synthetic oligonucleotide
uuguggaaaugcacuauua

SEQ ID NO: 637384 - RNA, 19 nt, Artificial Sequence
  Description of Artificial Sequence: Synthetic oligonucleotide
aaccaaauuccuguaggaa

SEQ ID NO: 637385 - RNA, 19 nt, Artificial Sequence
  Description of Artificial Sequence: Synthetic oligonucleotide
ugcuagucacugcuaguca

SEQ ID NO: 637386 - RNA, 19 nt, Artificial Sequence
  Description of Artificial Sequence: Synthetic oligonucleotide
uuugcuagucacugcuagu

SEQ ID NO: 637387 - RNA, 19 nt, Artificial Sequence
  Description of Artificial Sequence: Synthetic oligonucleotide
gugacacgaacaaaauugc

SEQ ID NO: 637388 - RNA, 19 nt, Artificial Sequence
  Description of Artificial Sequence: Synthetic oligonucleotide
caauaaccgaacucuucac

SEQ ID NO: 637389 - RNA, 19 nt, Artificial Sequence
  Description of Artificial Sequence: Synthetic oligonucleotide
gaugucacgcuagagaagu

SEQ ID NO: 637390 - RNA, 19 nt, Artificial Sequence
  Description of Artificial Sequence: Synthetic oligonucleotide
aagugauuguggaaaugca

SEQ ID NO: 637391 - RNA, 19 nt, Artificial Sequence
  Description of Artificial Sequence: Synthetic oligonucleotide
caguucaaucuauuuccag

SEQ ID NO: 637392 - RNA, 19 nt, Artificial Sequence
  Description of Artificial Sequence: Synthetic oligonucleotide
aacuagauuaucaguucaa

SEQ ID NO: 637393 - RNA, 19 nt, Artificial Sequence
  Description of Artificial Sequence: Synthetic oligonucleotide
augacaggaauuauuacua

SEQ ID NO: 637394 - RNA, 19 nt, Artificial Sequence
  Description of Artificial Sequence: Synthetic oligonucleotide
cucggcagaauuugacagc

SEQ ID NO: 637395 - RNA, 19 nt, Artificial Sequence
  Description of Artificial Sequence: Synthetic oligonucleotide
auauaauuugcuagucacu

SEQ ID NO: 637396 - RNA, 19 nt, Artificial Sequence
  Description of Artificial Sequence: Synthetic oligonucleotide
uucacucggcagaauuuga

SEQ ID NO: 637397 - RNA, 19 nt, Artificial Sequence
  Description of Artificial Sequence: Synthetic oligonucleotide
acauaacacucacuaggga

SEQ ID NO: 637398 - RNA, 19 nt, Artificial Sequence
  Description of Artificial Sequence: Synthetic oligonucleotide
aauugaucccaaugccauu

SEQ ID NO: 637399 - RNA, 19 nt, Artificial Sequence
  Description of Artificial Sequence: Synthetic oligonucleotide
uugcuagucacugcuaguc

SEQ ID NO: 637400 - RNA, 19 nt, Artificial Sequence
  Description of Artificial Sequence: Synthetic oligonucleotide
uuccggguaaaacgacugc

SEQ ID NO: 637401 - RNA, 19 nt, Artificial Sequence
  Description of Artificial Sequence: Synthetic oligonucleotide
aaaacgacugcuggcccca

SEQ ID NO: 637402 - RNA, 19 nt, Artificial Sequence
  Description of Artificial Sequence: Synthetic oligonucleotide
acauaaagcuagaaagaga

SEQ ID NO: 637403 - RNA, 19 nt, Artificial Sequence
  Description of Artificial Sequence: Synthetic oligonucleotide
auaaagcuagaaagagauc

SEQ ID NO: 637404 - RNA, 19 nt, Artificial Sequence
  Description of Artificial Sequence: Synthetic oligonucleotide
ucagacgcguuccuccgga

SEQ ID NO: 637405 - RNA, 19 nt, Artificial Sequence
  Description of Artificial Sequence: Synthetic oligonucleotide
auaacacucacuagggaau

SEQ ID NO: 637406 - RNA, 19 nt, Artificial Sequence
  Description of Artificial Sequence: Synthetic oligonucleotide
gaagcggcgccagucauug

SEQ ID NO: 637407 - RNA, 19 nt, Artificial Sequence
  Description of Artificial Sequence: Synthetic oligonucleotide
augcacuauuaauauugca

SEQ ID NO: 637408 - RNA, 19 nt, Artificial Sequence
  Description of Artificial Sequence: Synthetic oligonucleotide
aauuccuguaggaaagcuu

SEQ ID NO: 637409 - RNA, 19 nt, Artificial Sequence
  Description of Artificial Sequence: Synthetic oligonucleotide
guagaauuauagauauaca

SEQ ID NO: 637410 - RNA, 19 nt, Artificial Sequence
  Description of Artificial Sequence: Synthetic oligonucleotide
cauucauggcuucgguccc

SEQ ID NO: 637411 - RNA, 19 nt, Artificial Sequence
  Description of Artificial Sequence: Synthetic oligonucleotide
auuccgauguuaguagcug

SEQ ID NO: 637412 - RNA, 19 nt, Artificial Sequence
  Description of Artificial Sequence: Synthetic oligonucleotide
ugauccugguagagaagga

SEQ ID NO: 637413 - RNA, 19 nt, Artificial Sequence
  Description of Artificial Sequence: Synthetic oligonucleotide
uguucuuaucgaucauguc

SEQ ID NO: 637414 - RNA, 19 nt, Artificial Sequence
  Description of Artificial Sequence: Synthetic oligonucleotide
uuucaagacauugccuaaa

SEQ ID NO: 637415 - RNA, 19 nt, Artificial Sequence
  Description of Artificial Sequence: Synthetic oligonucleotide
agccguucccacucucccc

SEQ ID NO: 637416 - RNA, 19 nt, Artificial Sequence
  Description of Artificial Sequence: Synthetic oligonucleotide
augaaccaugauaaggugu

SEQ ID NO: 637417 - RNA, 19 nt, Artificial Sequence
  Description of Artificial Sequence: Synthetic oligonucleotide
cuucacucggcagaauuug

SEQ ID NO: 637418 - RNA, 19 nt, Artificial Sequence
  Description of Artificial Sequence: Synthetic oligonucleotide
uacuuccugguuauauuua

SEQ ID NO: 637419 - RNA, 19 nt, Artificial Sequence
  Description of Artificial Sequence: Synthetic oligonucleotide
ugucacgcuagagaaguaa

SEQ ID NO: 637420 - RNA, 19 nt, Artificial Sequence
  Description of Artificial Sequence: Synthetic oligonucleotide
ucgguauuuuggccaauuc

SEQ ID NO: 637421 - RNA, 19 nt, Artificial Sequence
  Description of Artificial Sequence: Synthetic oligonucleotide
ggaacuagauuaucaguuc

SEQ ID NO: 637422 - RNA, 19 nt, Artificial Sequence
  Description of Artificial Sequence: Synthetic oligonucleotide
uccggguaaaacgacugcu

SEQ ID NO: 637423 - RNA, 19 nt, Artificial Sequence
  Description of Artificial Sequence: Synthetic oligonucleotide
ugagauagcuauggaacua

SEQ ID NO: 637424 - RNA, 19 nt, Artificial Sequence
  Description of Artificial Sequence: Synthetic oligonucleotide
auugaucccaaugccauuu

SEQ ID NO: 637425 - RNA, 19 nt, Artificial Sequence
  Description of Artificial Sequence: Synthetic oligonucleotide
guggcaaggcagaucaugc

SEQ ID NO: 637426 - RNA, 19 nt, Artificial Sequence
  Description of Artificial Sequence: Synthetic oligonucleotide
gaaggaucuagagggaaaa

SEQ ID NO: 637427 - RNA, 19 nt, Artificial Sequence
  Description of Artificial Sequence: Synthetic oligonucleotide
uacgaaggacagcuguaaa

SEQ ID NO: 637428 - RNA, 19 nt, Artificial Sequence
  Description of Artificial Sequence: Synthetic oligonucleotide
uagcuuuugaucagccguu

SEQ ID NO: 637429 - RNA, 19 nt, Artificial Sequence
  Description of Artificial Sequence: Synthetic oligonucleotide
cagguauggagcugcuggc

SEQ ID NO: 637430 - RNA, 19 nt, Artificial Sequence
  Description of Artificial Sequence: Synthetic oligonucleotide
auacuaaaugagacuacga

SEQ ID NO: 637431 - RNA, 19 nt, Artificial Sequence
  Description of Artificial Sequence: Synthetic oligonucleotide
guugucauggugccucgac

SEQ ID NO: 637432 - RNA, 19 nt, Artificial Sequence
  Description of Artificial Sequence: Synthetic oligonucleotide
gacauguguccuccagccc

SEQ ID NO: 637433 - RNA, 19 nt, Artificial Sequence
  Description of Artificial Sequence: Synthetic oligonucleotide
gacgcguuccuccggacca

SEQ ID NO: 637434 - RNA, 19 nt, Artificial Sequence
  Description of Artificial Sequence: Synthetic oligonucleotide
gacuacgaaggacagcugu

SEQ ID NO: 637435 - RNA, 19 nt, Artificial Sequence
  Description of Artificial Sequence: Synthetic oligonucleotide
cuugaaugacaaugaauua

SEQ ID NO: 637436 - RNA, 19 nt, Artificial Sequence
  Description of Artificial Sequence: Synthetic oligonucleotide
gaucccaaugccauuuuaa

SEQ ID NO: 637437 - RNA, 19 nt, Artificial Sequence
  Description of Artificial Sequence: Synthetic oligonucleotide
aguuagcuucugagcaacc

SEQ ID NO: 637438 - RNA, 19 nt, Artificial Sequence
  Description of Artificial Sequence: Synthetic oligonucleotide
agaagaguauuuacuaaua

SEQ ID NO: 637439 - RNA, 19 nt, Artificial Sequence
  Description of Artificial Sequence: Synthetic oligonucleotide
gcuuauauaauuugcuagu

SEQ ID NO: 637440 - RNA, 19 nt, Artificial Sequence
  Description of Artificial Sequence: Synthetic oligonucleotide
cacgcuagagaaguaaaca

SEQ ID NO: 637441 - RNA, 19 nt, Artificial Sequence
  Description of Artificial Sequence: Synthetic oligonucleotide
ggaauagaugcugauccug

SEQ ID NO: 637442 - RNA, 19 nt, Artificial Sequence
  Description of Artificial Sequence: Synthetic oligonucleotide
agaauuugacagccgggua

SEQ ID NO: 637443 - RNA, 19 nt, Artificial Sequence
  Description of Artificial Sequence: Synthetic oligonucleotide
caggaauuauuacuaguaa

SEQ ID NO: 637444 - RNA, 19 nt, Artificial Sequence
  Description of Artificial Sequence: Synthetic oligonucleotide
gcuagucacaaagugaguc

SEQ ID NO: 637445 - RNA, 19 nt, Artificial Sequence
  Description of Artificial Sequence: Synthetic oligonucleotide
aggucauagauagcuuuug

SEQ ID NO: 637446 - RNA, 19 nt, Artificial Sequence
  Description of Artificial Sequence: Synthetic oligonucleotide
cagcaaagagcucgcuggg

SEQ ID NO: 637447 - RNA, 19 nt, Artificial Sequence
  Description of Artificial Sequence: Synthetic oligonucleotide
ugagacuacgaaggacagc

SEQ ID NO: 637448 - RNA, 19 nt, Artificial Sequence
  Description of Artificial Sequence: Synthetic oligonucleotide
guacguucaagacucauuu

SEQ ID NO: 637449 - RNA, 19 nt, Artificial Sequence
  Description of Artificial Sequence: Synthetic oligonucleotide
aguuucgcacagaugucag

SEQ ID NO: 637450 - RNA, 19 nt, Artificial Sequence
  Description of Artificial Sequence: Synthetic oligonucleotide
ccucgacucgcucagacgc

SEQ ID NO: 637451 - RNA, 19 nt, Artificial Sequence
  Description of Artificial Sequence: Synthetic oligonucleotide
guuucgcacagaugucagc

SEQ ID NO: 637452 - RNA, 19 nt, Artificial Sequence
  Description of Artificial Sequence: Synthetic oligonucleotide
agaguuucgcacagauguc

SEQ ID NO: 637453 - RNA, 19 nt, Artificial Sequence
  Description of Artificial Sequence: Synthetic oligonucleotide
ugaucccaaugccauuuua

SEQ ID NO: 637454 - RNA, 19 nt, Artificial Sequence
  Description of Artificial Sequence: Synthetic oligonucleotide
guagaauucugaggucacc

SEQ ID NO: 637455 - RNA, 19 nt, Artificial Sequence
  Description of Artificial Sequence: Synthetic oligonucleotide
ugcuagucacaaagugagu

SEQ ID NO: 637456 - RNA, 19 nt, Artificial Sequence
  Description of Artificial Sequence: Synthetic oligonucleotide
cucacuagggaauucuacu

SEQ ID NO: 637457 - RNA, 19 nt, Artificial Sequence
  Description of Artificial Sequence: Synthetic oligonucleotide
gauguuaguagcugaccau

SEQ ID NO: 637458 - RNA, 19 nt, Artificial Sequence
  Description of Artificial Sequence: Synthetic oligonucleotide
ugccucgacucgcucagac

SEQ ID NO: 637459 - RNA, 19 nt, Artificial Sequence
  Description of Artificial Sequence: Synthetic oligonucleotide
ucuuaucgaucaugucuaa

SEQ ID NO: 637460 - RNA, 19 nt, Artificial Sequence
  Description of Artificial Sequence: Synthetic oligonucleotide
aaacaguaucagagauguc

SEQ ID NO: 637461 - RNA, 19 nt, Artificial Sequence
  Description of Artificial Sequence: Synthetic oligonucleotide
uucacccgccuuguaaaug

SEQ ID NO: 637462 - RNA, 19 nt, Artificial Sequence
  Description of Artificial Sequence: Synthetic oligonucleotide
cacaaagugagucagcauu

SEQ ID NO: 637463 - RNA, 19 nt, Artificial Sequence
  Description of Artificial Sequence: Synthetic oligonucleotide
augagacuacgaaggacag

SEQ ID NO: 637464 - RNA, 19 nt, Artificial Sequence
  Description of Artificial Sequence: Synthetic oligonucleotide
cuagucacugcuagucaca

SEQ ID NO: 637465 - RNA, 19 nt, Artificial Sequence
  Description of Artificial Sequence: Synthetic oligonucleotide
cucgacucgcucagacgcg

SEQ ID NO: 637466 - RNA, 19 nt, Artificial Sequence
  Description of Artificial Sequence: Synthetic oligonucleotide
cuucuuacguaacaggaau

SEQ ID NO: 637467 - RNA, 19 nt, Artificial Sequence
  Description of Artificial Sequence: Synthetic oligonucleotide
augucaauauugacuagaa

SEQ ID NO: 637468 - RNA, 19 nt, Artificial Sequence
  Description of Artificial Sequence: Synthetic oligonucleotide
agcggcgccagucauugau

SEQ ID NO: 637469 - RNA, 19 nt, Artificial Sequence
  Description of Artificial Sequence: Synthetic oligonucleotide
auguuaguagcugaccaua

SEQ ID NO: 637470 - RNA, 19 nt, Artificial Sequence
  Description of Artificial Sequence: Synthetic oligonucleotide
gcuguaguaauacuguagu

SEQ ID NO: 637471 - RNA, 19 nt, Artificial Sequence
  Description of Artificial Sequence: Synthetic oligonucleotide
gcuagucacugcuagucac

SEQ ID NO: 637472 - RNA, 19 nt, Artificial Sequence
  Description of Artificial Sequence: Synthetic oligonucleotide
caaaaccuaggguuuaggu

SEQ ID NO: 637473 - RNA, 19 nt, Artificial Sequence
  Description of Artificial Sequence: Synthetic oligonucleotide
ccaauaaccgaacucuuca

SEQ ID NO: 637474 - RNA, 19 nt, Artificial Sequence
  Description of Artificial Sequence: Synthetic oligonucleotide
cuaggguuuaggugguaga

SEQ ID NO: 637475 - RNA, 19 nt, Artificial Sequence
  Description of Artificial Sequence: Synthetic oligonucleotide
cucagaccugguagaauuc

SEQ ID NO: 637476 - RNA, 19 nt, Artificial Sequence
  Description of Artificial Sequence: Synthetic oligonucleotide
aaguagagcugagucugau

SEQ ID NO: 637477 - RNA, 19 nt, Artificial Sequence
  Description of Artificial Sequence: Synthetic oligonucleotide
uacguucaagacucauuua

SEQ ID NO: 637478 - RNA, 19 nt, Artificial Sequence
  Description of Artificial Sequence: Synthetic oligonucleotide
acauucuauuaaaauguua

SEQ ID NO: 637479 - RNA, 19 nt, Artificial Sequence
  Description of Artificial Sequence: Synthetic oligonucleotide
cauuagacaguaugcucaa

SEQ ID NO: 637480 - RNA, 19 nt, Artificial Sequence
  Description of Artificial Sequence: Synthetic oligonucleotide
auauugcacauaacacuca

SEQ ID NO: 637481 - RNA, 19 nt, Artificial Sequence
  Description of Artificial Sequence: Synthetic oligonucleotide
ugacuucuauaaugagcuc

SEQ ID NO: 637482 - RNA, 19 nt, Artificial Sequence
  Description of Artificial Sequence: Synthetic oligonucleotide
ugugaacacuaaagcuaau

SEQ ID NO: 637483 - RNA, 19 nt, Artificial Sequence
  Description of Artificial Sequence: Synthetic oligonucleotide
aguagagcugagucugauu

SEQ ID NO: 637484 - RNA, 19 nt, Artificial Sequence
  Description of Artificial Sequence: Synthetic oligonucleotide
aauuugcuagucacugcua

SEQ ID NO: 637485 - RNA, 19 nt, Artificial Sequence
  Description of Artificial Sequence: Synthetic oligonucleotide
ugcuccuaaugauuuucuu

SEQ ID NO: 637486 - RNA, 19 nt, Artificial Sequence
  Description of Artificial Sequence: Synthetic oligonucleotide
ucgcugucuucacuaugac

SEQ ID NO: 637487 - RNA, 19 nt, Artificial Sequence
  Description of Artificial Sequence: Synthetic oligonucleotide
accgaacucuucacucggc

SEQ ID NO: 637488 - RNA, 19 nt, Artificial Sequence
  Description of Artificial Sequence: Synthetic oligonucleotide
gcagaauuugacagccggg

SEQ ID NO: 637489 - RNA, 19 nt, Artificial Sequence
  Description of Artificial Sequence: Synthetic oligonucleotide
gauuaucaguucaaucuau

SEQ ID NO: 637490 - RNA, 19 nt, Artificial Sequence
  Description of Artificial Sequence: Synthetic oligonucleotide
gggugucaugucaauauug

SEQ ID NO: 637491 - RNA, 19 nt, Artificial Sequence
  Description of Artificial Sequence: Synthetic oligonucleotide
agaaggaucuagagggaaa

SEQ ID NO: 637492 - RNA, 19 nt, Artificial Sequence
  Description of Artificial Sequence: Synthetic oligonucleotide
uucuacucucagaccuggu

SEQ ID NO: 637493 - RNA, 19 nt, Artificial Sequence
  Description of Artificial Sequence: Synthetic oligonucleotide
cagaucgcugucuucacua

SEQ ID NO: 637494 - RNA, 19 nt, Artificial Sequence
  Description of Artificial Sequence: Synthetic oligonucleotide
gacagccggguacucugug

SEQ ID NO: 637495 - RNA, 19 nt, Artificial Sequence
  Description of Artificial Sequence: Synthetic oligonucleotide
ucgcuggugcuguaguaau

SEQ ID NO: 637496 - RNA, 19 nt, Artificial Sequence
  Description of Artificial Sequence: Synthetic oligonucleotide
agggugucaugucaauauu

SEQ ID NO: 637497 - RNA, 19 nt, Artificial Sequence
  Description of Artificial Sequence: Synthetic oligonucleotide
agaucgcugucuucacuau

SEQ ID NO: 637498 - RNA, 19 nt, Artificial Sequence
  Description of Artificial Sequence: Synthetic oligonucleotide
uaacacucacuagggaauu

SEQ ID NO: 637499 - RNA, 19 nt, Artificial Sequence
  Description of Artificial Sequence: Synthetic oligonucleotide
gcugaccauacauuagaca

SEQ ID NO: 637500 - RNA, 19 nt, Artificial Sequence
  Description of Artificial Sequence: Synthetic oligonucleotide
gauagcuauggaacuagau

SEQ ID NO: 637501 - RNA, 19 nt, Artificial Sequence
  Description of Artificial Sequence: Synthetic oligonucleotide
auucacccgccuuguaaau

SEQ ID NO: 637502 - RNA, 19 nt, Artificial Sequence
  Description of Artificial Sequence: Synthetic oligonucleotide
ucaauucacccgccuugua

SEQ ID NO: 637503 - RNA, 19 nt, Artificial Sequence
  Description of Artificial Sequence: Synthetic oligonucleotide
cucagacgcguuccuccgg

SEQ ID NO: 637504 - RNA, 19 nt, Artificial Sequence
  Description of Artificial Sequence: Synthetic oligonucleotide
uugaucccaaugccauuuu

SEQ ID NO: 637505 - RNA, 19 nt, Artificial Sequence
  Description of Artificial Sequence: Synthetic oligonucleotide
gacucgcucagacgcguuc

SEQ ID NO: 637506 - RNA, 19 nt, Artificial Sequence
  Description of Artificial Sequence: Synthetic oligonucleotide
uggccccaauaaccgaacu

SEQ ID NO: 637507 - RNA, 19 nt, Artificial Sequence
  Description of Artificial Sequence: Synthetic oligonucleotide
ugacagccggguacucugu

SEQ ID NO: 637508 - RNA, 19 nt, Artificial Sequence
  Description of Artificial Sequence: Synthetic oligonucleotide
augucagcaccaagacuuc

SEQ ID NO: 637509 - RNA, 19 nt, Artificial Sequence
  Description of Artificial Sequence: Synthetic oligonucleotide
ccuaaaagggugucauguc

SEQ ID NO: 637510 - RNA, 19 nt, Artificial Sequence
  Description of Artificial Sequence: Synthetic oligonucleotide
ggcauuccggguaaaacga

SEQ ID NO: 637511 - RNA, 19 nt, Artificial Sequence
  Description of Artificial Sequence: Synthetic oligonucleotide
ugaagcggcgccagucauu

SEQ ID NO: 637512 - RNA, 19 nt, Artificial Sequence
  Description of Artificial Sequence: Synthetic oligonucleotide
cggguaaaacgacugcugg

SEQ ID NO: 637513 - RNA, 19 nt, Artificial Sequence
  Description of Artificial Sequence: Synthetic oligonucleotide
guuuaggugguagaauuau

SEQ ID NO: 637514 - RNA, 19 nt, Artificial Sequence
  Description of Artificial Sequence: Synthetic oligonucleotide
gcucagacgcguuccuccg

SEQ ID NO: 637515 - RNA, 19 nt, Artificial Sequence
  Description of Artificial Sequence: Synthetic oligonucleotide
aaccuaggguuuagguggu

SEQ ID NO: 637516 - RNA, 19 nt, Artificial Sequence
  Description of Artificial Sequence: Synthetic oligonucleotide
cauugccuaaaaggguguc

SEQ ID NO: 637517 - RNA, 19 nt, Artificial Sequence
  Description of Artificial Sequence: Synthetic oligonucleotide
agauagcuauggaacuaga

SEQ ID NO: 637518 - RNA, 19 nt, Artificial Sequence
  Description of Artificial Sequence: Synthetic oligonucleotide
ucgacucgcucagacgcgu

SEQ ID NO: 637519 - RNA, 19 nt, Artificial Sequence
  Description of Artificial Sequence: Synthetic oligonucleotide
cacuagggaauucuacucu

SEQ ID NO: 637520 - RNA, 19 nt, Artificial Sequence
  Description of Artificial Sequence: Synthetic oligonucleotide
acuacgaaggacagcugua

SEQ ID NO: 637521 - RNA, 19 nt, Artificial Sequence
  Description of Artificial Sequence: Synthetic oligonucleotide
agcaaagagcucgcuggga

SEQ ID NO: 637522 - RNA, 19 nt, Artificial Sequence
  Description of Artificial Sequence: Synthetic oligonucleotide
aacgacugcuggccccaau

SEQ ID NO: 637523 - RNA, 19 nt, Artificial Sequence
  Description of Artificial Sequence: Synthetic oligonucleotide
cauuccggguaaaacgacu

SEQ ID NO: 637524 - RNA, 19 nt, Artificial Sequence
  Description of Artificial Sequence: Synthetic oligonucleotide
uccccgggaugccaucuuc

SEQ ID NO: 637525 - RNA, 19 nt, Artificial Sequence
  Description of Artificial Sequence: Synthetic oligonucleotide
gaacugggcccuucugaaa

SEQ ID NO: 637526 - RNA, 19 nt, Artificial Sequence
  Description of Artificial Sequence: Synthetic oligonucleotide
ggugcuguaguaauacugu

SEQ ID NO: 637527 - RNA, 19 nt, Artificial Sequence
  Description of Artificial Sequence: Synthetic oligonucleotide
aucgguauuuuggccaauu

SEQ ID NO: 637528 - RNA, 19 nt, Artificial Sequence
  Description of Artificial Sequence: Synthetic oligonucleotide
cuacgaaggacagcuguaa

SEQ ID NO: 637529 - RNA, 19 nt, Artificial Sequence
  Description of Artificial Sequence: Synthetic oligonucleotide
gucacgcuagagaaguaaa

SEQ ID NO: 637530 - RNA, 19 nt, Artificial Sequence
  Description of Artificial Sequence: Synthetic oligonucleotide
gcuucgguccccgggaugc

SEQ ID NO: 637531 - RNA, 19 nt, Artificial Sequence
  Description of Artificial Sequence: Synthetic oligonucleotide
ugcuugaagcggcgccagu

SEQ ID NO: 637532 - RNA, 19 nt, Artificial Sequence
  Description of Artificial Sequence: Synthetic oligonucleotide
cuuaucgaucaugucuaaa

SEQ ID NO: 637533 - RNA, 19 nt, Artificial Sequence
  Description of Artificial Sequence: Synthetic oligonucleotide
cacccgccuuguaaaugag

SEQ ID NO: 637534 - RNA, 19 nt, Artificial Sequence
  Description of Artificial Sequence: Synthetic oligonucleotide
ccuaggguuuaggugguag

SEQ ID NO: 637535 - RNA, 19 nt, Artificial Sequence
  Description of Artificial Sequence: Synthetic oligonucleotide
gccucgacucgcucagacg

SEQ ID NO: 637536 - RNA, 19 nt, Artificial Sequence
  Description of Artificial Sequence: Synthetic oligonucleotide
ggccccaauaaccgaacuc

SEQ ID NO: 637537 - RNA, 19 nt, Artificial Sequence
  Description of Artificial Sequence: Synthetic oligonucleotide
auuagacaguaugcucaaa

SEQ ID NO: 637538 - RNA, 19 nt, Artificial Sequence
  Description of Artificial Sequence: Synthetic oligonucleotide
gccuaaaagggugucaugu

SEQ ID NO: 637539 - RNA, 19 nt, Artificial Sequence
  Description of Artificial Sequence: Synthetic oligonucleotide
cgaacaaaauugccaauca

SEQ ID NO: 637540 - RNA, 19 nt, Artificial Sequence
  Description of Artificial Sequence: Synthetic oligonucleotide
agguacguucaagacucau

SEQ ID NO: 637541 - RNA, 19 nt, Artificial Sequence
  Description of Artificial Sequence: Synthetic oligonucleotide
cuagaacacugacaucagu

SEQ ID NO: 637542 - RNA, 19 nt, Artificial Sequence
  Description of Artificial Sequence: Synthetic oligonucleotide
agccggguacucuguggca

SEQ ID NO: 637543 - RNA, 19 nt, Artificial Sequence
  Description of Artificial Sequence: Synthetic oligonucleotide
gccauucauggcuucgguc

SEQ ID NO: 637544 - RNA, 19 nt, Artificial Sequence
  Description of Artificial Sequence: Synthetic oligonucleotide
ucgguccccgggaugccau

SEQ ID NO: 637545 - RNA, 19 nt, Artificial Sequence
  Description of Artificial Sequence: Synthetic oligonucleotide
ccgauguuaguagcugacc

SEQ ID NO: 637546 - RNA, 19 nt, Artificial Sequence
  Description of Artificial Sequence: Synthetic oligonucleotide
cgcucagacgcguuccucc

SEQ ID NO: 637547 - RNA, 19 nt, Artificial Sequence
  Description of Artificial Sequence: Synthetic oligonucleotide
cguucaagacucauuuaca

SEQ ID NO: 637548 - RNA, 19 nt, Artificial Sequence
  Description of Artificial Sequence: Synthetic oligonucleotide
cagucauugaucacaccuu

SEQ ID NO: 637549 - RNA, 19 nt, Artificial Sequence
  Description of Artificial Sequence: Synthetic oligonucleotide
ccuccggaccagcagcugc

SEQ ID NO: 637550 - RNA, 19 nt, Artificial Sequence
  Description of Artificial Sequence: Synthetic oligonucleotide
agacuacgaaggacagcug

SEQ ID NO: 637551 - RNA, 19 nt, Artificial Sequence
  Description of Artificial Sequence: Synthetic oligonucleotide
cuuccugguuauauuuaau

SEQ ID NO: 637552 - RNA, 19 nt, Artificial Sequence
  Description of Artificial Sequence: Synthetic oligonucleotide
gcgccagucauugaucaca

SEQ ID NO: 637553 - RNA, 19 nt, Artificial Sequence
  Description of Artificial Sequence: Synthetic oligonucleotide
auccaacagguacguucaa

SEQ ID NO: 637554 - RNA, 19 nt, Artificial Sequence
  Description of Artificial Sequence: Synthetic oligonucleotide
cugcuccuaaugauuuucu

SEQ ID NO: 637555 - RNA, 19 nt, Artificial Sequence
  Description of Artificial Sequence: Synthetic oligonucleotide
gguuuaggugguagaauua

SEQ ID NO: 637556 - RNA, 19 nt, Artificial Sequence
  Description of Artificial Sequence: Synthetic oligonucleotide
caccuuuugggccuguauu

SEQ ID NO: 637557 - RNA, 19 nt, Artificial Sequence
  Description of Artificial Sequence: Synthetic oligonucleotide
cagacgcguuccuccggac

SEQ ID NO: 637558 - RNA, 19 nt, Artificial Sequence
  Description of Artificial Sequence: Synthetic oligonucleotide
gcaucgguauuuuggccaa

SEQ ID NO: 637559 - RNA, 19 nt, Artificial Sequence
  Description of Artificial Sequence: Synthetic oligonucleotide
gcagaucaugcagccauuc

SEQ ID NO: 637560 - RNA, 19 nt, Artificial Sequence
  Description of Artificial Sequence: Synthetic oligonucleotide
aagcggcgccagucauuga

SEQ ID NO: 637561 - RNA, 19 nt, Artificial Sequence
  Description of Artificial Sequence: Synthetic oligonucleotide
ucgcucagacgcguuccuc

SEQ ID NO: 637562 - RNA, 19 nt, Artificial Sequence
  Description of Artificial Sequence: Synthetic oligonucleotide
gccaaucaauucacccgcc

SEQ ID NO: 637563 - RNA, 19 nt, Artificial Sequence
  Description of Artificial Sequence: Synthetic oligonucleotide
acgcguuccuccggaccag

SEQ ID NO: 637564 - RNA, 19 nt, Artificial Sequence
  Description of Artificial Sequence: Synthetic oligonucleotide
ggcgccagucauugaucac

SEQ ID NO: 637565 - RNA, 19 nt, Artificial Sequence
  Description of Artificial Sequence: Synthetic oligonucleotide
aaacgacugcuggccccaa

SEQ ID NO: 637566 - RNA, 19 nt, Artificial Sequence
  Description of Artificial Sequence: Synthetic oligonucleotide
ccggguacucuguggcaag

SEQ ID NO: 637567 - RNA, 19 nt, Artificial Sequence
  Description of Artificial Sequence: Synthetic oligonucleotide
ccgaacucuucacucggca

SEQ ID NO: 637568 - RNA, 19 nt, Artificial Sequence
  Description of Artificial Sequence: Synthetic oligonucleotide
accauacauuagacaguau

SEQ ID NO: 637569 - RNA, 19 nt, Artificial Sequence
  Description of Artificial Sequence: Synthetic oligonucleotide
ccuuuugggccuguauuga

SEQ ID NO: 637570 - RNA, 19 nt, Artificial Sequence
  Description of Artificial Sequence: Synthetic oligonucleotide
cagguacguucaagacuca

SEQ ID NO: 637571 - RNA, 19 nt, Artificial Sequence
  Description of Artificial Sequence: Synthetic oligonucleotide
gguacguucaagacucauu

SEQ ID NO: 637572 - RNA, 19 nt, Artificial Sequence
  Description of Artificial Sequence: Synthetic oligonucleotide
cgguauuuuggccaauucu

SEQ ID NO: 637573 - RNA, 19 nt, Artificial Sequence
  Description of Artificial Sequence: Synthetic oligonucleotide
augucacgcuagagaagua

SEQ ID NO: 637574 - RNA, 19 nt, Artificial Sequence
  Description of Artificial Sequence: Synthetic oligonucleotide
gccggguacucuguggcaa

SEQ ID NO: 637575 - RNA, 19 nt, Artificial Sequence
  Description of Artificial Sequence: Synthetic oligonucleotide
cccaaacaaugagauagcu

SEQ ID NO: 637576 - RNA, 19 nt, Artificial Sequence
  Description of Artificial Sequence: Synthetic oligonucleotide
ccgccuuguaaaugagcaa

SEQ ID NO: 637577 - RNA, 19 nt, Artificial Sequence
  Description of Artificial Sequence: Synthetic oligonucleotide
cggcgccagucauugauca

SEQ ID NO: 637578 - RNA, 19 nt, Artificial Sequence
  Description of Artificial Sequence: Synthetic oligonucleotide
ggucaccagaagacaauuu

SEQ ID NO: 637579 - RNA, 19 nt, Artificial Sequence
  Description of Artificial Sequence: Synthetic oligonucleotide
gcggcgccagucauugauc

SEQ ID NO: 637580 - RNA, 19 nt, Artificial Sequence
  Description of Artificial Sequence: Synthetic oligonucleotide
caccagcaaagagcucgcu

SEQ ID NO: 637581 - RNA, 19 nt, Artificial Sequence
  Description of Artificial Sequence: Synthetic oligonucleotide
guccccgggaugccaucuu

SEQ ID NO: 637582 - RNA, 19 nt, Artificial Sequence
  Description of Artificial Sequence: Synthetic oligonucleotide
caucgguauuuuggccaau

SEQ ID NO: 637583 - RNA, 19 nt, Artificial Sequence
  Description of Artificial Sequence: Synthetic oligonucleotide
ccuucuccgcuggggaucu

SEQ ID NO: 637584 - RNA, 19 nt, Artificial Sequence
  Description of Artificial Sequence: Synthetic oligonucleotide
cgguccccgggaugccauc

SEQ ID NO: 637585 - RNA, 19 nt, Artificial Sequence
  Description of Artificial Sequence: Synthetic oligonucleotide
cgacucgcucagacgcguu

SEQ ID NO: 637586 - RNA, 19 nt, Artificial Sequence
  Description of Artificial Sequence: Synthetic oligonucleotide
aaauauugcaaccaaguac

SEQ ID NO: 637587 - RNA, 19 nt, Artificial Sequence
  Description of Artificial Sequence: Synthetic oligonucleotide
aggauuaauauuuuaaagc

SEQ ID NO: 637588 - RNA, 19 nt, Artificial Sequence
  Description of Artificial Sequence: Synthetic oligonucleotide
agauagaggacucagaccg

SEQ ID NO: 637589 - RNA, 19 nt, Artificial Sequence
  Description of Artificial Sequence: Synthetic oligonucleotide
aaggauuaauauuuuaaag

SEQ ID NO: 637590 - RNA, 19 nt, Artificial Sequence
  Description of Artificial Sequence: Synthetic oligonucleotide
uuauagaagaccuugugug

SEQ ID NO: 637591 - RNA, 19 nt, Artificial Sequence
  Description of Artificial Sequence: Synthetic oligonucleotide
aauauugcaaccaaguacu

SEQ ID NO: 637592 - RNA, 19 nt, Artificial Sequence
  Description of Artificial Sequence: Synthetic oligonucleotide
aaacaagauggaaacaugc

SEQ ID NO: 637593 - RNA, 19 nt, Artificial Sequence
  Description of Artificial Sequence: Synthetic oligonucleotide
aaagacaauccucugaagu

SEQ ID NO: 637594 - RNA, 19 nt, Artificial Sequence
  Description of Artificial Sequence: Synthetic oligonucleotide
uaauguaacagaaggagga

SEQ ID NO: 637595 - RNA, 19 nt, Artificial Sequence
  Description of Artificial Sequence: Synthetic oligonucleotide
aauggguugguauuguuug

SEQ ID NO: 637596 - RNA, 19 nt, Artificial Sequence
  Description of Artificial Sequence: Synthetic oligonucleotide
gaagccgcaacccugaggg

SEQ ID NO: 637597 - RNA, 19 nt, Artificial Sequence
  Description of Artificial Sequence: Synthetic oligonucleotide
aagaucauccgcugaagac

SEQ ID NO: 637598 - RNA, 19 nt, Artificial Sequence
  Description of Artificial Sequence: Synthetic oligonucleotide
ugaacuauacaagaugagg

SEQ ID NO: 637599 - RNA, 19 nt, Artificial Sequence
  Description of Artificial Sequence: Synthetic oligonucleotide
uauacuacuuuccauuagc

SEQ ID NO: 637600 - RNA, 19 nt, Artificial Sequence
  Description of Artificial Sequence: Synthetic oligonucleotide
aaaggauuaauauuuuaaa

SEQ ID NO: 637601 - RNA, 19 nt, Artificial Sequence
  Description of Artificial Sequence: Synthetic oligonucleotide
aacacuuuggcauuaaaua

SEQ ID NO: 637602 - RNA, 19 nt, Artificial Sequence
  Description of Artificial Sequence: Synthetic oligonucleotide
uuuaugaggggaaggagag

SEQ ID NO: 637603 - RNA, 19 nt, Artificial Sequence
  Description of Artificial Sequence: Synthetic oligonucleotide
auggaagugccacacaggc

SEQ ID NO: 637604 - RNA, 19 nt, Artificial Sequence
  Description of Artificial Sequence: Synthetic oligonucleotide
uuuauagaagaccuugugu

SEQ ID NO: 637605 - RNA, 19 nt, Artificial Sequence
  Description of Artificial Sequence: Synthetic oligonucleotide
caugaguuaauuacaaaag

SEQ ID NO: 637606 - RNA, 19 nt, Artificial Sequence
  Description of Artificial Sequence: Synthetic oligonucleotide
aaacaugcagcccugucag

SEQ ID NO: 637607 - RNA, 19 nt, Artificial Sequence
  Description of Artificial Sequence: Synthetic oligonucleotide
uauagaagaccuugugugg

SEQ ID NO: 637608 - RNA, 19 nt, Artificial Sequence
  Description of Artificial Sequence: Synthetic oligonucleotide
ugcccaagaaaacacacag

SEQ ID NO: 637609 - RNA, 19 nt, Artificial Sequence
  Description of Artificial Sequence: Synthetic oligonucleotide
auuagcaagacccauguaa

SEQ ID NO: 637610 - RNA, 19 nt, Artificial Sequence
  Description of Artificial Sequence: Synthetic oligonucleotide
uacaagaugaggcuguaca

SEQ ID NO: 637611 - RNA, 19 nt, Artificial Sequence
  Description of Artificial Sequence: Synthetic oligonucleotide
uguaucaaggcccaaaguu

SEQ ID NO: 637612 - RNA, 19 nt, Artificial Sequence
  Description of Artificial Sequence: Synthetic oligonucleotide
auugcaaccaaguacucug

SEQ ID NO: 637613 - RNA, 19 nt, Artificial Sequence
  Description of Artificial Sequence: Synthetic oligonucleotide
uggaccaagagauacaggu

SEQ ID NO: 637614 - RNA, 19 nt, Artificial Sequence
  Description of Artificial Sequence: Synthetic oligonucleotide
ucggauuuauagaagaccu

SEQ ID NO: 637615 - RNA, 19 nt, Artificial Sequence
  Description of Artificial Sequence: Synthetic oligonucleotide
aucaccaaaauacaccgag

SEQ ID NO: 637616 - RNA, 19 nt, Artificial Sequence
  Description of Artificial Sequence: Synthetic oligonucleotide
aacuacuuagguaugucac

SEQ ID NO: 637617 - RNA, 19 nt, Artificial Sequence
  Description of Artificial Sequence: Synthetic oligonucleotide
uguagugcaaauauugcaa

SEQ ID NO: 637618 - RNA, 19 nt, Artificial Sequence
  Description of Artificial Sequence: Synthetic oligonucleotide
aaauacucgcauuuuggca

SEQ ID NO: 637619 - RNA, 19 nt, Artificial Sequence
  Description of Artificial Sequence: Synthetic oligonucleotide
uuucguuacaaacacccca

SEQ ID NO: 637620 - RNA, 19 nt, Artificial Sequence
  Description of Artificial Sequence: Synthetic oligonucleotide
caucaaguaacugaagugg

SEQ ID NO: 637621 - RNA, 19 nt, Artificial Sequence
  Description of Artificial Sequence: Synthetic oligonucleotide
auugguaugcaggacaaac

SEQ ID NO: 637622 - RNA, 19 nt, Artificial Sequence
  Description of Artificial Sequence: Synthetic oligonucleotide
acugaaguggauguagugc

SEQ ID NO: 637623 - RNA, 19 nt, Artificial Sequence
  Description of Artificial Sequence: Synthetic oligonucleotide
aaagcacauauauacuacu

SEQ ID NO: 637624 - RNA, 19 nt, Artificial Sequence
  Description of Artificial Sequence: Synthetic oligonucleotide
agaucauccgcugaagacc

SEQ ID NO: 637625 - RNA, 19 nt, Artificial Sequence
  Description of Artificial Sequence: Synthetic oligonucleotide
uucguuacaaacaccccag

SEQ ID NO: 637626 - RNA, 19 nt, Artificial Sequence
  Description of Artificial Sequence: Synthetic oligonucleotide
aaguaacugaaguggaugu

SEQ ID NO: 637627 - RNA, 19 nt, Artificial Sequence
  Description of Artificial Sequence: Synthetic oligonucleotide
uucguuuuacaguugcucc

SEQ ID NO: 637628 - RNA, 19 nt, Artificial Sequence
  Description of Artificial Sequence: Synthetic oligonucleotide
auauauacuacuuuccauu

SEQ ID NO: 637629 - RNA, 19 nt, Artificial Sequence
  Description of Artificial Sequence: Synthetic oligonucleotide
auaucuggguucucugucc

SEQ ID NO: 637630 - RNA, 19 nt, Artificial Sequence
  Description of Artificial Sequence: Synthetic oligonucleotide
auuuauagaagaccuugug

SEQ ID NO: 637631 - RNA, 19 nt, Artificial Sequence
  Description of Artificial Sequence: Synthetic oligonucleotide
caccuuaagggccacaugg

SEQ ID NO: 637632 - RNA, 19 nt, Artificial Sequence
  Description of Artificial Sequence: Synthetic oligonucleotide
uaagaaacgcagcagccca

SEQ ID NO: 637633 - RNA, 19 nt, Artificial Sequence
  Description of Artificial Sequence: Synthetic oligonucleotide
agccccuaggccuuaaacc

SEQ ID NO: 637634 - RNA, 19 nt, Artificial Sequence
  Description of Artificial Sequence: Synthetic oligonucleotide
accaaaauacaccgagcgc

SEQ ID NO: 637635 - RNA, 19 nt, Artificial Sequence
  Description of Artificial Sequence: Synthetic oligonucleotide
uuagguaugucaccugggc

SEQ ID NO: 637636 - RNA, 19 nt, Artificial Sequence
  Description of Artificial Sequence: Synthetic oligonucleotide
gaagacaccugucaaucag

SEQ ID NO: 637637 - RNA, 19 nt, Artificial Sequence
  Description of Artificial Sequence: Synthetic oligonucleotide
agacccauguaagaaacgc

SEQ ID NO: 637638 - RNA, 19 nt, Artificial Sequence
  Description of Artificial Sequence: Synthetic oligonucleotide
agcauauacauuccccagg

SEQ ID NO: 637639 - RNA, 19 nt, Artificial Sequence
  Description of Artificial Sequence: Synthetic oligonucleotide
ugaccuugaaggcugauuc

SEQ ID NO: 637640 - RNA, 19 nt, Artificial Sequence
  Description of Artificial Sequence: Synthetic oligonucleotide
aguaagcgaagccgcaacc

SEQ ID NO: 637641 - RNA, 19 nt, Artificial Sequence
  Description of Artificial Sequence: Synthetic oligonucleotide
aaacgcagcagcccaaucu

SEQ ID NO: 637642 - RNA, 19 nt, Artificial Sequence
  Description of Artificial Sequence: Synthetic oligonucleotide
gauauccacuccaagagug

SEQ ID NO: 637643 - RNA, 19 nt, Artificial Sequence
  Description of Artificial Sequence: Synthetic oligonucleotide
caaauacucgcauuuuggc

SEQ ID NO: 637644 - RNA, 19 nt, Artificial Sequence
  Description of Artificial Sequence: Synthetic oligonucleotide
aguacucuggacaugcuac

SEQ ID NO: 637645 - RNA, 19 nt, Artificial Sequence
  Description of Artificial Sequence: Synthetic oligonucleotide
gaauguggagccaaauggg

SEQ ID NO: 637646 - RNA, 19 nt, Artificial Sequence
  Description of Artificial Sequence: Synthetic oligonucleotide
aagacaauccucugaaguu

SEQ ID NO: 637647 - RNA, 19 nt, Artificial Sequence
  Description of Artificial Sequence: Synthetic oligonucleotide
guaauguaacagaaggagg

SEQ ID NO: 637648 - RNA, 19 nt, Artificial Sequence
  Description of Artificial Sequence: Synthetic oligonucleotide
uucggauuuauagaagacc

SEQ ID NO: 637649 - RNA, 19 nt, Artificial Sequence
  Description of Artificial Sequence: Synthetic oligonucleotide
cacuccaagagugaaauag

SEQ ID NO: 637650 - RNA, 19 nt, Artificial Sequence
  Description of Artificial Sequence: Synthetic oligonucleotide
ugucuucggauuuauagaa

SEQ ID NO: 637651 - RNA, 19 nt, Artificial Sequence
  Description of Artificial Sequence: Synthetic oligonucleotide
aggccuuaaaccauguggc

SEQ ID NO: 637652 - RNA, 19 nt, Artificial Sequence
  Description of Artificial Sequence: Synthetic oligonucleotide
uaacacuuuggcauuaaau

SEQ ID NO: 637653 - RNA, 19 nt, Artificial Sequence
  Description of Artificial Sequence: Synthetic oligonucleotide
ugaggguccaguuccaucu

SEQ ID NO: 637654 - RNA, 19 nt, Artificial Sequence
  Description of Artificial Sequence: Synthetic oligonucleotide
uugucuucggauuuauaga

SEQ ID NO: 637655 - RNA, 19 nt, Artificial Sequence
  Description of Artificial Sequence: Synthetic oligonucleotide
uugucaucuauguaucaca

SEQ ID NO: 637656 - RNA, 19 nt, Artificial Sequence
  Description of Artificial Sequence: Synthetic oligonucleotide
gaggauauccacuccaaga

SEQ ID NO: 637657 - RNA, 19 nt, Artificial Sequence
  Description of Artificial Sequence: Synthetic oligonucleotide
uuuucguuacaaacacccc

SEQ ID NO: 637658 - RNA, 19 nt, Artificial Sequence
  Description of Artificial Sequence: Synthetic oligonucleotide
aguuugaccaccugcauuu

SEQ ID NO: 637659 - RNA, 19 nt, Artificial Sequence
  Description of Artificial Sequence: Synthetic oligonucleotide
ugucccaagauagaggacu

SEQ ID NO: 637660 - RNA, 19 nt, Artificial Sequence
  Description of Artificial Sequence: Synthetic oligonucleotide
agauaccugguacaaaccu

SEQ ID NO: 637661 - RNA, 19 nt, Artificial Sequence
  Description of Artificial Sequence: Synthetic oligonucleotide
uauauacuacuuuccauua

SEQ ID NO: 637662 - RNA, 19 nt, Artificial Sequence
  Description of Artificial Sequence: Synthetic oligonucleotide
aguugcuagaccaaaauau

SEQ ID NO: 637663 - RNA, 19 nt, Artificial Sequence
  Description of Artificial Sequence: Synthetic oligonucleotide
auauacuacuuuccauuag

SEQ ID NO: 637664 - RNA, 19 nt, Artificial Sequence
  Description of Artificial Sequence: Synthetic oligonucleotide
accuugaaggcugauuccc

SEQ ID NO: 637665 - RNA, 19 nt, Artificial Sequence
  Description of Artificial Sequence: Synthetic oligonucleotide
ucacuuuguguguauuugc

SEQ ID NO: 637666 - RNA, 19 nt, Artificial Sequence
  Description of Artificial Sequence: Synthetic oligonucleotide
cuagaccauggcaaaauug

SEQ ID NO: 637667 - RNA, 19 nt, Artificial Sequence
  Description of Artificial Sequence: Synthetic oligonucleotide
ugucaucuauguaucacaa

SEQ ID NO: 637668 - RNA, 19 nt, Artificial Sequence
  Description of Artificial Sequence: Synthetic oligonucleotide
uguaggucgugcauguuuc

SEQ ID NO: 637669 - RNA, 19 nt, Artificial Sequence
  Description of Artificial Sequence: Synthetic oligonucleotide
ugagucuaacuggaaagag

SEQ ID NO: 637670 - RNA, 19 nt, Artificial Sequence
  Description of Artificial Sequence: Synthetic oligonucleotide
ugucaccugggcauggcag

SEQ ID NO: 637671 - RNA, 19 nt, Artificial Sequence
  Description of Artificial Sequence: Synthetic oligonucleotide
uguuuggggaugaggaccu

SEQ ID NO: 637672 - RNA, 19 nt, Artificial Sequence
  Description of Artificial Sequence: Synthetic oligonucleotide
cuuguuuaugaggggaagg

SEQ ID NO: 637673 - RNA, 19 nt, Artificial Sequence
  Description of Artificial Sequence: Synthetic oligonucleotide
agaggaugggaacaguccu

SEQ ID NO: 637674 - RNA, 19 nt, Artificial Sequence
  Description of Artificial Sequence: Synthetic oligonucleotide
gaggacucagaccgaaucc

SEQ ID NO: 637675 - RNA, 19 nt, Artificial Sequence
  Description of Artificial Sequence: Synthetic oligonucleotide
uagauaccugguacaaacc

SEQ ID NO: 637676 - RNA, 19 nt, Artificial Sequence
  Description of Artificial Sequence: Synthetic oligonucleotide
uugcuagaccaaaauauua

SEQ ID NO: 637677 - RNA, 19 nt, Artificial Sequence
  Description of Artificial Sequence: Synthetic oligonucleotide
ggauguagugcaaauauug

SEQ ID NO: 637678 - RNA, 19 nt, Artificial Sequence
  Description of Artificial Sequence: Synthetic oligonucleotide
ugaccucaaagaucauccg

SEQ ID NO: 637679 - RNA, 19 nt, Artificial Sequence
  Description of Artificial Sequence: Synthetic oligonucleotide
aguuaauuacaaaagucau

SEQ ID NO: 637680 - RNA, 19 nt, Artificial Sequence
  Description of Artificial Sequence: Synthetic oligonucleotide
auugcacuuggauggaacu

SEQ ID NO: 637681 - RNA, 19 nt, Artificial Sequence
  Description of Artificial Sequence: Synthetic oligonucleotide
uccaagagugaaauaguua

SEQ ID NO: 637682 - RNA, 19 nt, Artificial Sequence
  Description of Artificial Sequence: Synthetic oligonucleotide
agucuaacuggaaagagaa

SEQ ID NO: 637683 - RNA, 19 nt, Artificial Sequence
  Description of Artificial Sequence: Synthetic oligonucleotide
aauguggagccaaaugggu

SEQ ID NO: 637684 - RNA, 19 nt, Artificial Sequence
  Description of Artificial Sequence: Synthetic oligonucleotide
agaccaaagcagaaugugg

SEQ ID NO: 637685 - RNA, 19 nt, Artificial Sequence
  Description of Artificial Sequence: Synthetic oligonucleotide
guuggaccaagagauacag

SEQ ID NO: 637686 - RNA, 19 nt, Artificial Sequence
  Description of Artificial Sequence: Synthetic oligonucleotide
cuugguauccuggaggcug

SEQ ID NO: 637687 - RNA, 19 nt, Artificial Sequence
  Description of Artificial Sequence: Synthetic oligonucleotide
cucugcucaccuuaagggc

SEQ ID NO: 637688 - RNA, 19 nt, Artificial Sequence
  Description of Artificial Sequence: Synthetic oligonucleotide
uaagcgaagccgcaacccu

SEQ ID NO: 637689 - RNA, 19 nt, Artificial Sequence
  Description of Artificial Sequence: Synthetic oligonucleotide
uuaagggccacauggcaau

SEQ ID NO: 637690 - RNA, 19 nt, Artificial Sequence
  Description of Artificial Sequence: Synthetic oligonucleotide
gaccauggcaaaauugggc

SEQ ID NO: 637691 - RNA, 19 nt, Artificial Sequence
  Description of Artificial Sequence: Synthetic oligonucleotide
gcucugcucaccuuaaggg

SEQ ID NO: 637692 - RNA, 19 nt, Artificial Sequence
  Description of Artificial Sequence: Synthetic oligonucleotide
caagaaucaccaaaauaca

SEQ ID NO: 637693 - RNA, 19 nt, Artificial Sequence
  Description of Artificial Sequence: Synthetic oligonucleotide
cuucggauuuauagaagac

SEQ ID NO: 637694 - RNA, 19 nt, Artificial Sequence
  Description of Artificial Sequence: Synthetic oligonucleotide
ucgcauuuuggcaucugcu

SEQ ID NO: 637695 - RNA, 19 nt, Artificial Sequence
  Description of Artificial Sequence: Synthetic oligonucleotide
agaagcuagaccauggcaa

SEQ ID NO: 637696 - RNA, 19 nt, Artificial Sequence
  Description of Artificial Sequence: Synthetic oligonucleotide
uacuacuuuccauuagcaa

SEQ ID NO: 637697 - RNA, 19 nt, Artificial Sequence
  Description of Artificial Sequence: Synthetic oligonucleotide
uggguagauaccugguaca

SEQ ID NO: 637698 - RNA, 19 nt, Artificial Sequence
  Description of Artificial Sequence: Synthetic oligonucleotide
uucuucccgggguaauugg

SEQ ID NO: 637699 - RNA, 19 nt, Artificial Sequence
  Description of Artificial Sequence: Synthetic oligonucleotide
gagaagcuagaccauggca

SEQ ID NO: 637700 - RNA, 19 nt, Artificial Sequence
  Description of Artificial Sequence: Synthetic oligonucleotide
aaguacucuggacaugcua

SEQ ID NO: 637701 - RNA, 19 nt, Artificial Sequence
  Description of Artificial Sequence: Synthetic oligonucleotide
guaagaaacgcagcagccc

SEQ ID NO: 637702 - RNA, 19 nt, Artificial Sequence
  Description of Artificial Sequence: Synthetic oligonucleotide
cuggauauugucccacuug

SEQ ID NO: 637703 - RNA, 19 nt, Artificial Sequence
  Description of Artificial Sequence: Synthetic oligonucleotide
uauugcaaccaaguacucu

SEQ ID NO: 637704 - RNA, 19 nt, Artificial Sequence
  Description of Artificial Sequence: Synthetic oligonucleotide
gaccaaagcagaaugugga

SEQ ID NO: 637705 - RNA, 19 nt, Artificial Sequence
  Description of Artificial Sequence: Synthetic oligonucleotide
ugacaagaaucaccaaaau

SEQ ID NO: 637706 - RNA, 19 nt, Artificial Sequence
  Description of Artificial Sequence: Synthetic oligonucleotide
aggugcuuuauuggaaagg

SEQ ID NO: 637707 - RNA, 19 nt, Artificial Sequence
  Description of Artificial Sequence: Synthetic oligonucleotide
ccucuguucaagaggaugg

SEQ ID NO: 637708 - RNA, 19 nt, Artificial Sequence
  Description of Artificial Sequence: Synthetic oligonucleotide
aaauacaccgagcgcucaa

SEQ ID NO: 637709 - RNA, 19 nt, Artificial Sequence
  Description of Artificial Sequence: Synthetic oligonucleotide
uguccuuaggguagcucug

SEQ ID NO: 637710 - RNA, 19 nt, Artificial Sequence
  Description of Artificial Sequence: Synthetic oligonucleotide
uacaugaguuaauuacaaa

SEQ ID NO: 637711 - RNA, 19 nt, Artificial Sequence
  Description of Artificial Sequence: Synthetic oligonucleotide
agcacuugcacaaaagaaa

SEQ ID NO: 637712 - RNA, 19 nt, Artificial Sequence
  Description of Artificial Sequence: Synthetic oligonucleotide
uuugcagacuguguucucu

SEQ ID NO: 637713 - RNA, 19 nt, Artificial Sequence
  Description of Artificial Sequence: Synthetic oligonucleotide
gggguaauugguaugcagg

SEQ ID NO: 637714 - RNA, 19 nt, Artificial Sequence
  Description of Artificial Sequence: Synthetic oligonucleotide
aagacccauguaagaaacg

SEQ ID NO: 637715 - RNA, 19 nt, Artificial Sequence
  Description of Artificial Sequence: Synthetic oligonucleotide
caaaauacaccgagcgcuc

SEQ ID NO: 637716 - RNA, 19 nt, Artificial Sequence
  Description of Artificial Sequence: Synthetic oligonucleotide
auacucgcauuuuggcauc

SEQ ID NO: 637717 - RNA, 19 nt, Artificial Sequence
  Description of Artificial Sequence: Synthetic oligonucleotide
auagaagaccuugugugga

SEQ ID NO: 637718 - RNA, 19 nt, Artificial Sequence
  Description of Artificial Sequence: Synthetic oligonucleotide
caaagaggauauccacucc

SEQ ID NO: 637719 - RNA, 19 nt, Artificial Sequence
  Description of Artificial Sequence: Synthetic oligonucleotide
cuggcuacccugacagugg

SEQ ID NO: 637720 - RNA, 19 nt, Artificial Sequence
  Description of Artificial Sequence: Synthetic oligonucleotide
gucaucuauguaucacaag

SEQ ID NO: 637721 - RNA, 19 nt, Artificial Sequence
  Description of Artificial Sequence: Synthetic oligonucleotide
cucgcauuuuggcaucugc

SEQ ID NO: 637722 - RNA, 19 nt, Artificial Sequence
  Description of Artificial Sequence: Synthetic oligonucleotide
uacccugacagugggaugu

SEQ ID NO: 637723 - RNA, 19 nt, Artificial Sequence
  Description of Artificial Sequence: Synthetic oligonucleotide
uacauucguuuuacaguug

SEQ ID NO: 637724 - RNA, 19 nt, Artificial Sequence
  Description of Artificial Sequence: Synthetic oligonucleotide
accucaaagaucauccgcu

SEQ ID NO: 637725 - RNA, 19 nt, Artificial Sequence
  Description of Artificial Sequence: Synthetic oligonucleotide
gaccuugaaggcugauucc

SEQ ID NO: 637726 - RNA, 19 nt, Artificial Sequence
  Description of Artificial Sequence: Synthetic oligonucleotide
uuucuucccgggguaauug

SEQ ID NO: 637727 - RNA, 19 nt, Artificial Sequence
  Description of Artificial Sequence: Synthetic oligonucleotide
aaccuauauuucaacuacu

SEQ ID NO: 637728 - RNA, 19 nt, Artificial Sequence
  Description of Artificial Sequence: Synthetic oligonucleotide
accuuaagggccacauggc

SEQ ID NO: 637729 - RNA, 19 nt, Artificial Sequence
  Description of Artificial Sequence: Synthetic oligonucleotide
caugcuaccugcucugcuc

SEQ ID NO: 637730 - RNA, 19 nt, Artificial Sequence
  Description of Artificial Sequence: Synthetic oligonucleotide
ugcaaccaaguacucugga

SEQ ID NO: 637731 - RNA, 19 nt, Artificial Sequence
  Description of Artificial Sequence: Synthetic oligonucleotide
gaguaagcgaagccgcaac

SEQ ID NO: 637732 - RNA, 19 nt, Artificial Sequence
  Description of Artificial Sequence: Synthetic oligonucleotide
ugaacccuucugaauccca

SEQ ID NO: 637733 - RNA, 19 nt, Artificial Sequence
  Description of Artificial Sequence: Synthetic oligonucleotide
ucguuacaaacaccccagc

SEQ ID NO: 637734 - RNA, 19 nt, Artificial Sequence
  Description of Artificial Sequence: Synthetic oligonucleotide
gaagcuagaccauggcaaa

SEQ ID NO: 637735 - RNA, 19 nt, Artificial Sequence
  Description of Artificial Sequence: Synthetic oligonucleotide
auguaucaaggcccaaagu

SEQ ID NO: 637736 - RNA, 19 nt, Artificial Sequence
  Description of Artificial Sequence: Synthetic oligonucleotide
uggauguagugcaaauauu

SEQ ID NO: 637737 - RNA, 19 nt, Artificial Sequence
  Description of Artificial Sequence: Synthetic oligonucleotide
ggauggaacuuguuuauga

SEQ ID NO: 637738 - RNA, 19 nt, Artificial Sequence
  Description of Artificial Sequence: Synthetic oligonucleotide
agcaagacccauguaagaa

SEQ ID NO: 637739 - RNA, 19 nt, Artificial Sequence
  Description of Artificial Sequence: Synthetic oligonucleotide
guaagcgaagccgcaaccc

SEQ ID NO: 637740 - RNA, 19 nt, Artificial Sequence
  Description of Artificial Sequence: Synthetic oligonucleotide
cuguucaagaggaugggaa

SEQ ID NO: 637741 - RNA, 19 nt, Artificial Sequence
  Description of Artificial Sequence: Synthetic oligonucleotide
cauccgcugaagaccaaag

SEQ ID NO: 637742 - RNA, 19 nt, Artificial Sequence
  Description of Artificial Sequence: Synthetic oligonucleotide
ccuuaaaccauguggccag

SEQ ID NO: 637743 - RNA, 19 nt, Artificial Sequence
  Description of Artificial Sequence: Synthetic oligonucleotide
acauggcaauguaucaagg

SEQ ID NO: 637744 - RNA, 19 nt, Artificial Sequence
  Description of Artificial Sequence: Synthetic oligonucleotide
ucuucccgggguaauuggu

SEQ ID NO: 637745 - RNA, 19 nt, Artificial Sequence
  Description of Artificial Sequence: Synthetic oligonucleotide
uauguaucacaaguugcua

SEQ ID NO: 637746 - RNA, 19 nt, Artificial Sequence
  Description of Artificial Sequence: Synthetic oligonucleotide
guacucuggacaugcuacc

SEQ ID NO: 637747 - RNA, 19 nt, Artificial Sequence
  Description of Artificial Sequence: Synthetic oligonucleotide
cagaaguggggcagggagc

SEQ ID NO: 637748 - RNA, 19 nt, Artificial Sequence
  Description of Artificial Sequence: Synthetic oligonucleotide
uacuuagguaugucaccug

SEQ ID NO: 637749 - RNA, 19 nt, Artificial Sequence
  Description of Artificial Sequence: Synthetic oligonucleotide
guacauucguuuuacaguu

SEQ ID NO: 637750 - RNA, 19 nt, Artificial Sequence
  Description of Artificial Sequence: Synthetic oligonucleotide
cuuaagggccacauggcaa

SEQ ID NO: 637751 - RNA, 19 nt, Artificial Sequence
  Description of Artificial Sequence: Synthetic oligonucleotide
ucagaccgaaucccuucug

SEQ ID NO: 637752 - RNA, 19 nt, Artificial Sequence
  Description of Artificial Sequence: Synthetic oligonucleotide
ggcaaugugguuguucugc

SEQ ID NO: 637753 - RNA, 19 nt, Artificial Sequence
  Description of Artificial Sequence: Synthetic oligonucleotide
ccacuguagauguacauuc

SEQ ID NO: 637754 - RNA, 19 nt, Artificial Sequence
  Description of Artificial Sequence: Synthetic oligonucleotide
uuaaaccauguggccaggc

SEQ ID NO: 637755 - RNA, 19 nt, Artificial Sequence
  Description of Artificial Sequence: Synthetic oligonucleotide
ugcagacuguguucucugc

SEQ ID NO: 637756 - RNA, 19 nt, Artificial Sequence
  Description of Artificial Sequence: Synthetic oligonucleotide
caaagaucauccgcugaag

SEQ ID NO: 637757 - RNA, 19 nt, Artificial Sequence
  Description of Artificial Sequence: Synthetic oligonucleotide
augggaagacaccugucaa

SEQ ID NO: 637758 - RNA, 19 nt, Artificial Sequence
  Description of Artificial Sequence: Synthetic oligonucleotide
aggucgugcauguuucagu

SEQ ID NO: 637759 - RNA, 19 nt, Artificial Sequence
  Description of Artificial Sequence: Synthetic oligonucleotide
gcaugcuaagaacaucuug

SEQ ID NO: 637760 - RNA, 19 nt, Artificial Sequence
  Description of Artificial Sequence: Synthetic oligonucleotide
uaggucgugcauguuucag

SEQ ID NO: 637761 - RNA, 19 nt, Artificial Sequence
  Description of Artificial Sequence: Synthetic oligonucleotide
guacuugggagccucuguc

SEQ ID NO: 637762 - RNA, 19 nt, Artificial Sequence
  Description of Artificial Sequence: Synthetic oligonucleotide
accauacagacagcugggg

SEQ ID NO: 637763 - RNA, 19 nt, Artificial Sequence
  Description of Artificial Sequence: Synthetic oligonucleotide
acaggugaccuugaaggcu

SEQ ID NO: 637764 - RNA, 19 nt, Artificial Sequence
  Description of Artificial Sequence: Synthetic oligonucleotide
agccgcaacccugaggguc

SEQ ID NO: 637765 - RNA, 19 nt, Artificial Sequence
  Description of Artificial Sequence: Synthetic oligonucleotide
cucuguucaagaggauggg

SEQ ID NO: 637766 - RNA, 19 nt, Artificial Sequence
  Description of Artificial Sequence: Synthetic oligonucleotide
aauacaccgagcgcucaaa

SEQ ID NO: 637767 - RNA, 19 nt, Artificial Sequence
  Description of Artificial Sequence: Synthetic oligonucleotide
gcauauacauuccccagga

SEQ ID NO: 637768 - RNA, 19 nt, Artificial Sequence
  Description of Artificial Sequence: Synthetic oligonucleotide
agcgcucaaauacucgcau

SEQ ID NO: 637769 - RNA, 19 nt, Artificial Sequence
  Description of Artificial Sequence: Synthetic oligonucleotide
uggauggaacuuguuuaug

SEQ ID NO: 637770 - RNA, 19 nt, Artificial Sequence
  Description of Artificial Sequence: Synthetic oligonucleotide
aagaggauauccacuccaa

SEQ ID NO: 637771 - RNA, 19 nt, Artificial Sequence
  Description of Artificial Sequence: Synthetic oligonucleotide
gagccccuaggccuuaaac

SEQ ID NO: 637772 - RNA, 19 nt, Artificial Sequence
  Description of Artificial Sequence: Synthetic oligonucleotide
agaccgaaucccuucugaa

SEQ ID NO: 637773 - RNA, 19 nt, Artificial Sequence
  Description of Artificial Sequence: Synthetic oligonucleotide
gcacuugcacaaaagaaac

SEQ ID NO: 637774 - RNA, 19 nt, Artificial Sequence
  Description of Artificial Sequence: Synthetic oligonucleotide
auauugcaaccaaguacuc

SEQ ID NO: 637775 - RNA, 19 nt, Artificial Sequence
  Description of Artificial Sequence: Synthetic oligonucleotide
aagcgaagccgcaacccug

SEQ ID NO: 637776 - RNA, 19 nt, Artificial Sequence
  Description of Artificial Sequence: Synthetic oligonucleotide
acuccaagagugaaauagu

SEQ ID NO: 637777 - RNA, 19 nt, Artificial Sequence
  Description of Artificial Sequence: Synthetic oligonucleotide
ccgcugaagaccaaagcag

SEQ ID NO: 637778 - RNA, 19 nt, Artificial Sequence
  Description of Artificial Sequence: Synthetic oligonucleotide
agaaggaggaaggugucuu

SEQ ID NO: 637779 - RNA, 19 nt, Artificial Sequence
  Description of Artificial Sequence: Synthetic oligonucleotide
uucccgggguaauugguau

SEQ ID NO: 637780 - RNA, 19 nt, Artificial Sequence
  Description of Artificial Sequence: Synthetic oligonucleotide
caagagugaaauaguuaaa

SEQ ID NO: 637781 - RNA, 19 nt, Artificial Sequence
  Description of Artificial Sequence: Synthetic oligonucleotide
guagauguacauucguuuu

SEQ ID NO: 637782 - RNA, 19 nt, Artificial Sequence
  Description of Artificial Sequence: Synthetic oligonucleotide
caggauccccugcacauuc

SEQ ID NO: 637783 - RNA, 19 nt, Artificial Sequence
  Description of Artificial Sequence: Synthetic oligonucleotide
gcauaggugcuuuauugga

SEQ ID NO: 637784 - RNA, 19 nt, Artificial Sequence
  Description of Artificial Sequence: Synthetic oligonucleotide
cuuaaaccauguggccagg

SEQ ID NO: 637785 - RNA, 19 nt, Artificial Sequence
  Description of Artificial Sequence: Synthetic oligonucleotide
gacccauguaagaaacgca

SEQ ID NO: 637786 - RNA, 19 nt, Artificial Sequence
  Description of Artificial Sequence: Synthetic oligonucleotide
gugcaaauauugcaaccaa

SEQ ID NO: 637787 - RNA, 19 nt, Artificial Sequence
  Description of Artificial Sequence: Synthetic oligonucleotide
caaaauugggcucgguacu

SEQ ID NO: 637788 - RNA, 19 nt, Artificial Sequence
  Description of Artificial Sequence: Synthetic oligonucleotide
cuaggccuuaaaccaugug

SEQ ID NO: 637789 - RNA, 19 nt, Artificial Sequence
  Description of Artificial Sequence: Synthetic oligonucleotide
accgagcgcucaaauacuc

SEQ ID NO: 637790 - RNA, 19 nt, Artificial Sequence
  Description of Artificial Sequence: Synthetic oligonucleotide
gggccauacagggucaccg

SEQ ID NO: 637791 - RNA, 19 nt, Artificial Sequence
  Description of Artificial Sequence: Synthetic oligonucleotide
auagaggacucagaccgaa

SEQ ID NO: 637792 - RNA, 19 nt, Artificial Sequence
  Description of Artificial Sequence: Synthetic oligonucleotide
ucauccgcugaagaccaaa

SEQ ID NO: 637793 - RNA, 19 nt, Artificial Sequence
  Description of Artificial Sequence: Synthetic oligonucleotide
auacaccgagcgcucaaau

SEQ ID NO: 637794 - RNA, 19 nt, Artificial Sequence
  Description of Artificial Sequence: Synthetic oligonucleotide
cacuugcacaaaagaaaca

SEQ ID NO: 637795 - RNA, 19 nt, Artificial Sequence
  Description of Artificial Sequence: Synthetic oligonucleotide
gaauggguagugauguccu

SEQ ID NO: 637796 - RNA, 19 nt, Artificial Sequence
  Description of Artificial Sequence: Synthetic oligonucleotide
gaagaccaaagcagaaugu

SEQ ID NO: 637797 - RNA, 19 nt, Artificial Sequence
  Description of Artificial Sequence: Synthetic oligonucleotide
ucccgggguaauugguaug

SEQ ID NO: 637798 - RNA, 19 nt, Artificial Sequence
  Description of Artificial Sequence: Synthetic oligonucleotide
guaugucaccugggcaugg

SEQ ID NO: 637799 - RNA, 19 nt, Artificial Sequence
  Description of Artificial Sequence: Synthetic oligonucleotide
gggauaucuggguucucug

SEQ ID NO: 637800 - RNA, 19 nt, Artificial Sequence
  Description of Artificial Sequence: Synthetic oligonucleotide
gccccuaggccuuaaacca

SEQ ID NO: 637801 - RNA, 19 nt, Artificial Sequence
  Description of Artificial Sequence: Synthetic oligonucleotide
caugggguauuugaagaga

SEQ ID NO: 637802 - RNA, 19 nt, Artificial Sequence
  Description of Artificial Sequence: Synthetic oligonucleotide
agugcacaacagaaugcug

SEQ ID NO: 637803 - RNA, 19 nt, Artificial Sequence
  Description of Artificial Sequence: Synthetic oligonucleotide
ggccuuaaaccauguggcc

SEQ ID NO: 637804 - RNA, 19 nt, Artificial Sequence
  Description of Artificial Sequence: Synthetic oligonucleotide
uccuggaggcuguuuccac

SEQ ID NO: 637805 - RNA, 19 nt, Artificial Sequence
  Description of Artificial Sequence: Synthetic oligonucleotide
aguaacugaaguggaugua

SEQ ID NO: 637806 - RNA, 19 nt, Artificial Sequence
  Description of Artificial Sequence: Synthetic oligonucleotide
guccaugagucuaacugga

SEQ ID NO: 637807 - RNA, 19 nt, Artificial Sequence
  Description of Artificial Sequence: Synthetic oligonucleotide
cugaacccuucugaauccc

SEQ ID NO: 637808 - RNA, 19 nt, Artificial Sequence
  Description of Artificial Sequence: Synthetic oligonucleotide
acaaguugcuagaccaaaa

SEQ ID NO: 637809 - RNA, 19 nt, Artificial Sequence
  Description of Artificial Sequence: Synthetic oligonucleotide
aagcuagaccauggcaaaa

SEQ ID NO: 637810 - RNA, 19 nt, Artificial Sequence
  Description of Artificial Sequence: Synthetic oligonucleotide
gugcaagacaacaggcuuc

SEQ ID NO: 637811 - RNA, 19 nt, Artificial Sequence
  Description of Artificial Sequence: Synthetic oligonucleotide
gacaugcuaccugcucugc

SEQ ID NO: 637812 - RNA, 19 nt, Artificial Sequence
  Description of Artificial Sequence: Synthetic oligonucleotide
caggcuuaggacagaggga

SEQ ID NO: 637813 - RNA, 19 nt, Artificial Sequence
  Description of Artificial Sequence: Synthetic oligonucleotide
cagaccgaaucccuucuga

SEQ ID NO: 637814 - RNA, 19 nt, Artificial Sequence
  Description of Artificial Sequence: Synthetic oligonucleotide
agggucaccgaggcaaugu

SEQ ID NO: 637815 - RNA, 19 nt, Artificial Sequence
  Description of Artificial Sequence: Synthetic oligonucleotide
gauagaggacucagaccga

SEQ ID NO: 637816 - RNA, 19 nt, Artificial Sequence
  Description of Artificial Sequence: Synthetic oligonucleotide
cgagcgcucaaauacucgc

SEQ ID NO: 637817 - RNA, 19 nt, Artificial Sequence
  Description of Artificial Sequence: Synthetic oligonucleotide
ggcaaaauugggcucggua

SEQ ID NO: 637818 - RNA, 19 nt, Artificial Sequence
  Description of Artificial Sequence: Synthetic oligonucleotide
ggaaacaugcagcccuguc

SEQ ID NO: 637819 - RNA, 19 nt, Artificial Sequence
  Description of Artificial Sequence: Synthetic oligonucleotide
gcagggagcacuugcacaa

SEQ ID NO: 637820 - RNA, 19 nt, Artificial Sequence
  Description of Artificial Sequence: Synthetic oligonucleotide
ccaaaauacaccgagcgcu

SEQ ID NO: 637821 - RNA, 19 nt, Artificial Sequence
  Description of Artificial Sequence: Synthetic oligonucleotide
ucauugcacuuggauggaa

SEQ ID NO: 637822 - RNA, 19 nt, Artificial Sequence
  Description of Artificial Sequence: Synthetic oligonucleotide
cucgguacuugggagccuc

SEQ ID NO: 637823 - RNA, 19 nt, Artificial Sequence
  Description of Artificial Sequence: Synthetic oligonucleotide
gagcgcucaaauacucgca

SEQ ID NO: 637824 - RNA, 19 nt, Artificial Sequence
  Description of Artificial Sequence: Synthetic oligonucleotide
caucuauguaucacaaguu

SEQ ID NO: 637825 - RNA, 19 nt, Artificial Sequence
  Description of Artificial Sequence: Synthetic oligonucleotide
uaccugguacaaaccuaua

SEQ ID NO: 637826 - RNA, 19 nt, Artificial Sequence
  Description of Artificial Sequence: Synthetic oligonucleotide
guugcuagaccaaaauauu

SEQ ID NO: 637827 - RNA, 19 nt, Artificial Sequence
  Description of Artificial Sequence: Synthetic oligonucleotide
ccgaaucccuucugaaccc

SEQ ID NO: 637828 - RNA, 19 nt, Artificial Sequence
  Description of Artificial Sequence: Synthetic oligonucleotide
guaggucgugcauguuuca

SEQ ID NO: 637829 - RNA, 19 nt, Artificial Sequence
  Description of Artificial Sequence: Synthetic oligonucleotide
ccaggcuuggguagauacc

SEQ ID NO: 637830 - RNA, 19 nt, Artificial Sequence
  Description of Artificial Sequence: Synthetic oligonucleotide
ccucaaagaucauccgcug

SEQ ID NO: 637831 - RNA, 19 nt, Artificial Sequence
  Description of Artificial Sequence: Synthetic oligonucleotide
aagccgcaacccugagggu

SEQ ID NO: 637832 - RNA, 19 nt, Artificial Sequence
  Description of Artificial Sequence: Synthetic oligonucleotide
cacaaguugcuagaccaaa

SEQ ID NO: 637833 - RNA, 19 nt, Artificial Sequence
  Description of Artificial Sequence: Synthetic oligonucleotide
gguaugucaccugggcaug

SEQ ID NO: 637834 - RNA, 19 nt, Artificial Sequence
  Description of Artificial Sequence: Synthetic oligonucleotide
gccuuaaaccauguggcca

SEQ ID NO: 637835 - RNA, 19 nt, Artificial Sequence
  Description of Artificial Sequence: Synthetic oligonucleotide
ggcaauguaucaaggccca

SEQ ID NO: 637836 - RNA, 19 nt, Artificial Sequence
  Description of Artificial Sequence: Synthetic oligonucleotide
agcgaagccgcaacccuga

SEQ ID NO: 637837 - RNA, 19 nt, Artificial Sequence
  Description of Artificial Sequence: Synthetic oligonucleotide
uuccucuguucaagaggau

SEQ ID NO: 637838 - RNA, 19 nt, Artificial Sequence
  Description of Artificial Sequence: Synthetic oligonucleotide
ugagccccuaggccuuaaa

SEQ ID NO: 637839 - RNA, 19 nt, Artificial Sequence
  Description of Artificial Sequence: Synthetic oligonucleotide
cucgaagaacaucuacacu

SEQ ID NO: 637840 - RNA, 19 nt, Artificial Sequence
  Description of Artificial Sequence: Synthetic oligonucleotide
gguauuguuuggggaugag

SEQ ID NO: 637841 - RNA, 19 nt, Artificial Sequence
  Description of Artificial Sequence: Synthetic oligonucleotide
ccgagcgcucaaauacucg

SEQ ID NO: 637842 - RNA, 19 nt, Artificial Sequence
  Description of Artificial Sequence: Synthetic oligonucleotide
gagagugaauuuucaucuu

SEQ ID NO: 637843 - RNA, 19 nt, Artificial Sequence
  Description of Artificial Sequence: Synthetic oligonucleotide
cuccaagagugaaauaguu

SEQ ID NO: 637844 - RNA, 19 nt, Artificial Sequence
  Description of Artificial Sequence: Synthetic oligonucleotide
ccuuguguggagagccaag

SEQ ID NO: 637845 - RNA, 19 nt, Artificial Sequence
  Description of Artificial Sequence: Synthetic oligonucleotide
agccucuguccaugagucu

SEQ ID NO: 637846 - RNA, 19 nt, Artificial Sequence
  Description of Artificial Sequence: Synthetic oligonucleotide
cuucccgggguaauuggua

SEQ ID NO: 637847 - RNA, 19 nt, Artificial Sequence
  Description of Artificial Sequence: Synthetic oligonucleotide
gggucaccgaggcaaugug

SEQ ID NO: 637848 - RNA, 19 nt, Artificial Sequence
  Description of Artificial Sequence: Synthetic oligonucleotide
cccgggguaauugguaugc

SEQ ID NO: 637849 - RNA, 19 nt, Artificial Sequence
  Description of Artificial Sequence: Synthetic oligonucleotide
aguugcuccaugggguauu

SEQ ID NO: 637850 - RNA, 19 nt, Artificial Sequence
  Description of Artificial Sequence: Synthetic oligonucleotide
ccuuaagggccacauggca

SEQ ID NO: 637851 - RNA, 19 nt, Artificial Sequence
  Description of Artificial Sequence: Synthetic oligonucleotide
gcuaauacuccagguccac

SEQ ID NO: 637852 - RNA, 19 nt, Artificial Sequence
  Description of Artificial Sequence: Synthetic oligonucleotide
ggauauccacuccaagagu

SEQ ID NO: 637853 - RNA, 19 nt, Artificial Sequence
  Description of Artificial Sequence: Synthetic oligonucleotide
ccaagauagaggacucaga

SEQ ID NO: 637854 - RNA, 19 nt, Artificial Sequence
  Description of Artificial Sequence: Synthetic oligonucleotide
cccuaggccuuaaaccaug

SEQ ID NO: 637855 - RNA, 19 nt, Artificial Sequence
  Description of Artificial Sequence: Synthetic oligonucleotide
cgggguaauugguaugcag

SEQ ID NO: 637856 - RNA, 19 nt, Artificial Sequence
  Description of Artificial Sequence: Synthetic oligonucleotide
ccagaccaagguccaaaug

SEQ ID NO: 637857 - RNA, 19 nt, Artificial Sequence
  Description of Artificial Sequence: Synthetic oligonucleotide
acucgcauuuuggcaucug

SEQ ID NO: 637858 - RNA, 19 nt, Artificial Sequence
  Description of Artificial Sequence: Synthetic oligonucleotide
cuaccugcucugcucaccu

SEQ ID NO: 637859 - RNA, 19 nt, Artificial Sequence
  Description of Artificial Sequence: Synthetic oligonucleotide
cugaagaccaaagcagaau

SEQ ID NO: 637860 - RNA, 19 nt, Artificial Sequence
  Description of Artificial Sequence: Synthetic oligonucleotide
agcaugcuaagaacaucuu

SEQ ID NO: 637861 - RNA, 19 nt, Artificial Sequence
  Description of Artificial Sequence: Synthetic oligonucleotide
cucagaccgaaucccuucu

SEQ ID NO: 637862 - RNA, 19 nt, Artificial Sequence
  Description of Artificial Sequence: Synthetic oligonucleotide
ggucgugcauguuucaguu

SEQ ID NO: 637863 - RNA, 19 nt, Artificial Sequence
  Description of Artificial Sequence: Synthetic oligonucleotide
uggcaaaauugggcucggu

SEQ ID NO: 637864 - RNA, 19 nt, Artificial Sequence
  Description of Artificial Sequence: Synthetic oligonucleotide
gguagauaccugguacaaa

SEQ ID NO: 637865 - RNA, 19 nt, Artificial Sequence
  Description of Artificial Sequence: Synthetic oligonucleotide
gcugaagaccaaagcagaa

SEQ ID NO: 637866 - RNA, 19 nt, Artificial Sequence
  Description of Artificial Sequence: Synthetic oligonucleotide
uggagccaaauggguuggu

SEQ ID NO: 637867 - RNA, 19 nt, Artificial Sequence
  Description of Artificial Sequence: Synthetic oligonucleotide
gccgcaacccugagggucc

SEQ ID NO: 637868 - RNA, 19 nt, Artificial Sequence
  Description of Artificial Sequence: Synthetic oligonucleotide
caccgagcgcucaaauacu

SEQ ID NO: 637869 - RNA, 19 nt, Artificial Sequence
  Description of Artificial Sequence: Synthetic oligonucleotide
gggaacaguccuggcuacc

SEQ ID NO: 637870 - RNA, 19 nt, Artificial Sequence
  Description of Artificial Sequence: Synthetic oligonucleotide
cuuugagccccuaggccuu

SEQ ID NO: 637871 - RNA, 19 nt, Artificial Sequence
  Description of Artificial Sequence: Synthetic oligonucleotide
gcuacccugacagugggau

SEQ ID NO: 637872 - RNA, 19 nt, Artificial Sequence
  Description of Artificial Sequence: Synthetic oligonucleotide
uaccugcucugcucaccuu

SEQ ID NO: 637873 - RNA, 19 nt, Artificial Sequence
  Description of Artificial Sequence: Synthetic oligonucleotide
ggcuguacaugaguuaauu

SEQ ID NO: 637874 - RNA, 19 nt, Artificial Sequence
  Description of Artificial Sequence: Synthetic oligonucleotide
gugaccuugaaggcugauu

SEQ ID NO: 637875 - RNA, 19 nt, Artificial Sequence
  Description of Artificial Sequence: Synthetic oligonucleotide
ggagccaaauggguuggua

SEQ ID NO: 637876 - RNA, 19 nt, Artificial Sequence
  Description of Artificial Sequence: Synthetic oligonucleotide
ggggccauacagggucacc

SEQ ID NO: 637877 - RNA, 19 nt, Artificial Sequence
  Description of Artificial Sequence: Synthetic oligonucleotide
caacccugaggguccaguu

SEQ ID NO: 637878 - RNA, 19 nt, Artificial Sequence
  Description of Artificial Sequence: Synthetic oligonucleotide
gucgugcauguuucaguuu

SEQ ID NO: 637879 - RNA, 19 nt, Artificial Sequence
  Description of Artificial Sequence: Synthetic oligonucleotide
aucauccgcugaagaccaa

SEQ ID NO: 637880 - RNA, 19 nt, Artificial Sequence
  Description of Artificial Sequence: Synthetic oligonucleotide
cgcucaaauacucgcauuu

SEQ ID NO: 637881 - RNA, 19 nt, Artificial Sequence
  Description of Artificial Sequence: Synthetic oligonucleotide
cagggagcacuugcacaaa

SEQ ID NO: 637882 - RNA, 19 nt, Artificial Sequence
  Description of Artificial Sequence: Synthetic oligonucleotide
ccuaggccuuaaaccaugu

SEQ ID NO: 637883 - RNA, 19 nt, Artificial Sequence
  Description of Artificial Sequence: Synthetic oligonucleotide
ggcuacccugacaguggga

SEQ ID NO: 637884 - RNA, 19 nt, Artificial Sequence
  Description of Artificial Sequence: Synthetic oligonucleotide
gcgcucaaauacucgcauu

SEQ ID NO: 637885 - RNA, 19 nt, Artificial Sequence
  Description of Artificial Sequence: Synthetic oligonucleotide
cuguaggcccaggaaccau

SEQ ID NO: 637886 - RNA, 19 nt, Artificial Sequence
  Description of Artificial Sequence: Synthetic oligonucleotide
ccacuccaagagugaaaua

SEQ ID NO: 637887 - RNA, 19 nt, Artificial Sequence
  Description of Artificial Sequence: Synthetic oligonucleotide
ccgggguaauugguaugca

SEQ ID NO: 637888 - RNA, 19 nt, Artificial Sequence
  Description of Artificial Sequence: Synthetic oligonucleotide
ccccuaggccuuaaaccau

SEQ ID NO: 637889 - RNA, 19 nt, Artificial Sequence
  Description of Artificial Sequence: Synthetic oligonucleotide
ccuugguauccuggaggcu

SEQ ID NO: 637890 - RNA, 19 nt, Artificial Sequence
  Description of Artificial Sequence: Synthetic oligonucleotide
ccgcaacccugagggucca

SEQ ID NO: 637891 - RNA, 19 nt, Artificial Sequence
  Description of Artificial Sequence: Synthetic oligonucleotide
ccgaggcaaugugguuguu

SEQ ID NO: 637892 - RNA, 19 nt, Artificial Sequence
  Description of Artificial Sequence: Synthetic oligonucleotide
aauugcuuagaacuaggcc

SEQ ID NO: 637893 - RNA, 19 nt, Artificial Sequence
  Description of Artificial Sequence: Synthetic oligonucleotide
agaugcaggaccuagaaac

SEQ ID NO: 637894 - RNA, 19 nt, Artificial Sequence
  Description of Artificial Sequence: Synthetic oligonucleotide
uuuuacucaagaucgagcg

SEQ ID NO: 637895 - RNA, 19 nt, Artificial Sequence
  Description of Artificial Sequence: Synthetic oligonucleotide
uuuuagguaaucuugcugc

SEQ ID NO: 637896 - RNA, 19 nt, Artificial Sequence
  Description of Artificial Sequence: Synthetic oligonucleotide
aauacuaacugagugaugu

SEQ ID NO: 637897 - RNA, 19 nt, Artificial Sequence
  Description of Artificial Sequence: Synthetic oligonucleotide
auugcuuagaacuaggccu

SEQ ID NO: 637898 - RNA, 19 nt, Artificial Sequence
  Description of Artificial Sequence: Synthetic oligonucleotide
gauuagagaauacuaacug

SEQ ID NO: 637899 - RNA, 19 nt, Artificial Sequence
  Description of Artificial Sequence: Synthetic oligonucleotide
augauuagagaauacuaac

SEQ ID NO: 637900 - RNA, 19 nt, Artificial Sequence
  Description of Artificial Sequence: Synthetic oligonucleotide
ucaagagacgacuugaaga

SEQ ID NO: 637901 - RNA, 19 nt, Artificial Sequence
  Description of Artificial Sequence: Synthetic oligonucleotide
aaguauacuucucagugcu

SEQ ID NO: 637902 - RNA, 19 nt, Artificial Sequence
  Description of Artificial Sequence: Synthetic oligonucleotide
agcaauuaugauuagagaa

SEQ ID NO: 637903 - RNA, 19 nt, Artificial Sequence
  Description of Artificial Sequence: Synthetic oligonucleotide
uaugauuagagaauacuaa

SEQ ID NO: 637904 - RNA, 19 nt, Artificial Sequence
  Description of Artificial Sequence: Synthetic oligonucleotide
auaaaggguauguugaaug

SEQ ID NO: 637905 - RNA, 19 nt, Artificial Sequence
  Description of Artificial Sequence: Synthetic oligonucleotide
aauagaguagagccagcgg

SEQ ID NO: 637906 - RNA, 19 nt, Artificial Sequence
  Description of Artificial Sequence: Synthetic oligonucleotide
ucauuugagucgcugaaag

SEQ ID NO: 637907 - RNA, 19 nt, Artificial Sequence
  Description of Artificial Sequence: Synthetic oligonucleotide
agagaauacuaacugagug

SEQ ID NO: 637908 - RNA, 19 nt, Artificial Sequence
  Description of Artificial Sequence: Synthetic oligonucleotide
ugauuagagaauacuaacu

SEQ ID NO: 637909 - RNA, 19 nt, Artificial Sequence
  Description of Artificial Sequence: Synthetic oligonucleotide
ucuauagcagcucaucuac

SEQ ID NO: 637910 - RNA, 19 nt, Artificial Sequence
  Description of Artificial Sequence: Synthetic oligonucleotide
aaauagaguagagccagcg

SEQ ID NO: 637911 - RNA, 19 nt, Artificial Sequence
  Description of Artificial Sequence: Synthetic oligonucleotide
acaggaugagaccacauuc

SEQ ID NO: 637912 - RNA, 19 nt, Artificial Sequence
  Description of Artificial Sequence: Synthetic oligonucleotide
agauucagcacuuugggga

SEQ ID NO: 637913 - RNA, 19 nt, Artificial Sequence
  Description of Artificial Sequence: Synthetic oligonucleotide
aagauucagcacuuugggg

SEQ ID NO: 637914 - RNA, 19 nt, Artificial Sequence
  Description of Artificial Sequence: Synthetic oligonucleotide
auaguuuaucacuuaccac

SEQ ID NO: 637915 - RNA, 19 nt, Artificial Sequence
  Description of Artificial Sequence: Synthetic oligonucleotide
gacaguagaacacaccaug

SEQ ID NO: 637916 - RNA, 19 nt, Artificial Sequence
  Description of Artificial Sequence: Synthetic oligonucleotide
gaugagaccacauucaugu

SEQ ID NO: 637917 - RNA, 19 nt, Artificial Sequence
  Description of Artificial Sequence: Synthetic oligonucleotide
caugacgggauguaaaacc

SEQ ID NO: 637918 - RNA, 19 nt, Artificial Sequence
  Description of Artificial Sequence: Synthetic oligonucleotide
agaaauagaguagagccag

SEQ ID NO: 637919 - RNA, 19 nt, Artificial Sequence
  Description of Artificial Sequence: Synthetic oligonucleotide
uaucacuuaccacuggagc

SEQ ID NO: 637920 - RNA, 19 nt, Artificial Sequence
  Description of Artificial Sequence: Synthetic oligonucleotide
uuacucaagaucgagcgag

SEQ ID NO: 637921 - RNA, 19 nt, Artificial Sequence
  Description of Artificial Sequence: Synthetic oligonucleotide
gaagaccauauguaaaggc

SEQ ID NO: 637922 - RNA, 19 nt, Artificial Sequence
  Description of Artificial Sequence: Synthetic oligonucleotide
aauuaugauuagagaauac

SEQ ID NO: 637923 - RNA, 19 nt, Artificial Sequence
  Description of Artificial Sequence: Synthetic oligonucleotide
ucaagaucgagcgagcgag

SEQ ID NO: 637924 - RNA, 19 nt, Artificial Sequence
  Description of Artificial Sequence: Synthetic oligonucleotide
caaucuacuggcucuauag

SEQ ID NO: 637925 - RNA, 19 nt, Artificial Sequence
  Description of Artificial Sequence: Synthetic oligonucleotide
aguagaacacaccaugugu

SEQ ID NO: 637926 - RNA, 19 nt, Artificial Sequence
  Description of Artificial Sequence: Synthetic oligonucleotide
auuagagaauacuaacuga

SEQ ID NO: 637927 - RNA, 19 nt, Artificial Sequence
  Description of Artificial Sequence: Synthetic oligonucleotide
uuuaggggcuugaaaaggc

SEQ ID NO: 637928 - RNA, 19 nt, Artificial Sequence
  Description of Artificial Sequence: Synthetic oligonucleotide
auagaguagagccagcgga

SEQ ID NO: 637929 - RNA, 19 nt, Artificial Sequence
  Description of Artificial Sequence: Synthetic oligonucleotide
acgacuugaagauucagca

SEQ ID NO: 637930 - RNA, 19 nt, Artificial Sequence
  Description of Artificial Sequence: Synthetic oligonucleotide
cauauguaaaggcugcacc

SEQ ID NO: 637931 - RNA, 19 nt, Artificial Sequence
  Description of Artificial Sequence: Synthetic oligonucleotide
auuuuacucaagaucgagc

SEQ ID NO: 637932 - RNA, 19 nt, Artificial Sequence
  Description of Artificial Sequence: Synthetic oligonucleotide
aaaguagucaggauccgag

SEQ ID NO: 637933 - RNA, 19 nt, Artificial Sequence
  Description of Artificial Sequence: Synthetic oligonucleotide
aucaccucacgccaguuac

SEQ ID NO: 637934 - RNA, 19 nt, Artificial Sequence
  Description of Artificial Sequence: Synthetic oligonucleotide
aagacggucacauguaaaa

SEQ ID NO: 637935 - RNA, 19 nt, Artificial Sequence
  Description of Artificial Sequence: Synthetic oligonucleotide
auuaugauuagagaauacu

SEQ ID NO: 637936 - RNA, 19 nt, Artificial Sequence
  Description of Artificial Sequence: Synthetic oligonucleotide
agaaccuaaagccuagacu

SEQ ID NO: 637937 - RNA, 19 nt, Artificial Sequence
  Description of Artificial Sequence: Synthetic oligonucleotide
cauauaguuuaucacuuac

SEQ ID NO: 637938 - RNA, 19 nt, Artificial Sequence
  Description of Artificial Sequence: Synthetic oligonucleotide
aagcaauuaugauuagaga

SEQ ID NO: 637939 - RNA, 19 nt, Artificial Sequence
  Description of Artificial Sequence: Synthetic oligonucleotide
uucauauaguuuaucacuu

SEQ ID NO: 637940 - RNA, 19 nt, Artificial Sequence
  Description of Artificial Sequence: Synthetic oligonucleotide
aagaccauauguaaaggcu

SEQ ID NO: 637941 - RNA, 19 nt, Artificial Sequence
  Description of Artificial Sequence: Synthetic oligonucleotide
ucuacgcucagagaacacg

SEQ ID NO: 637942 - RNA, 19 nt, Artificial Sequence
  Description of Artificial Sequence: Synthetic oligonucleotide
gaaaaucccuguuccgggg

SEQ ID NO: 637943 - RNA, 19 nt, Artificial Sequence
  Description of Artificial Sequence: Synthetic oligonucleotide
uacuaacugagugaugucc

SEQ ID NO: 637944 - RNA, 19 nt, Artificial Sequence
  Description of Artificial Sequence: Synthetic oligonucleotide
cucuagucaguguucaacc

SEQ ID NO: 637945 - RNA, 19 nt, Artificial Sequence
  Description of Artificial Sequence: Synthetic oligonucleotide
aagaucgagcgagcgaggc

SEQ ID NO: 637946 - RNA, 19 nt, Artificial Sequence
  Description of Artificial Sequence: Synthetic oligonucleotide
uguugaaugggcgaacaug

SEQ ID NO: 637947 - RNA, 19 nt, Artificial Sequence
  Description of Artificial Sequence: Synthetic oligonucleotide
agagacgacuugaagauuc

SEQ ID NO: 637948 - RNA, 19 nt, Artificial Sequence
  Description of Artificial Sequence: Synthetic oligonucleotide
cagcgauaagggaagaggg

SEQ ID NO: 637949 - RNA, 19 nt, Artificial Sequence
  Description of Artificial Sequence: Synthetic oligonucleotide
agcgcuucuggcuaggcag

SEQ ID NO: 637950 - RNA, 19 nt, Artificial Sequence
  Description of Artificial Sequence: Synthetic oligonucleotide
cuugguacgaagacacgcc

SEQ ID NO: 637951 - RNA, 19 nt, Artificial Sequence
  Description of Artificial Sequence: Synthetic oligonucleotide
uagaguagagccagcggag

SEQ ID NO: 637952 - RNA, 19 nt, Artificial Sequence
  Description of Artificial Sequence: Synthetic oligonucleotide
aacacaccaugugugacag

SEQ ID NO: 637953 - RNA, 19 nt, Artificial Sequence
  Description of Artificial Sequence: Synthetic oligonucleotide
aaugggcgaacaugauccg

SEQ ID NO: 637954 - RNA, 19 nt, Artificial Sequence
  Description of Artificial Sequence: Synthetic oligonucleotide
auaagucaguggcucaguc

SEQ ID NO: 637955 - RNA, 19 nt, Artificial Sequence
  Description of Artificial Sequence: Synthetic oligonucleotide
aucuacuggcucuauagca

SEQ ID NO: 637956 - RNA, 19 nt, Artificial Sequence
  Description of Artificial Sequence: Synthetic oligonucleotide
uuuuaugacucuagucagu

SEQ ID NO: 637957 - RNA, 19 nt, Artificial Sequence
  Description of Artificial Sequence: Synthetic oligonucleotide
ucuagucaguguucaaccc

SEQ ID NO: 637958 - RNA, 19 nt, Artificial Sequence
  Description of Artificial Sequence: Synthetic oligonucleotide
aacacgaucacagguuaug

SEQ ID NO: 637959 - RNA, 19 nt, Artificial Sequence
  Description of Artificial Sequence: Synthetic oligonucleotide
cuugacaguagaacacacc

SEQ ID NO: 637960 - RNA, 19 nt, Artificial Sequence
  Description of Artificial Sequence: Synthetic oligonucleotide
aggaccuagaaacuguggu

SEQ ID NO: 637961 - RNA, 19 nt, Artificial Sequence
  Description of Artificial Sequence: Synthetic oligonucleotide
uacugguuugggaucgggg

SEQ ID NO: 637962 - RNA, 19 nt, Artificial Sequence
  Description of Artificial Sequence: Synthetic oligonucleotide
uuagaacuaggccucuuuc

SEQ ID NO: 637963 - RNA, 19 nt, Artificial Sequence
  Description of Artificial Sequence: Synthetic oligonucleotide
caugucucagucuagcuca

SEQ ID NO: 637964 - RNA, 19 nt, Artificial Sequence
  Description of Artificial Sequence: Synthetic oligonucleotide
uugcuugacaguagaacac

SEQ ID NO: 637965 - RNA, 19 nt, Artificial Sequence
  Description of Artificial Sequence: Synthetic oligonucleotide
agaauacuaacugagugau

SEQ ID NO: 637966 - RNA, 19 nt, Artificial Sequence
  Description of Artificial Sequence: Synthetic oligonucleotide
gucuuuaggggcuugaaaa

SEQ ID NO: 637967 - RNA, 19 nt, Artificial Sequence
  Description of Artificial Sequence: Synthetic oligonucleotide
uuuacucaagaucgagcga

SEQ ID NO: 637968 - RNA, 19 nt, Artificial Sequence
  Description of Artificial Sequence: Synthetic oligonucleotide
uguuugucauacugguuug

SEQ ID NO: 637969 - RNA, 19 nt, Artificial Sequence
  Description of Artificial Sequence: Synthetic oligonucleotide
gacuugaagauucagcacu

SEQ ID NO: 637970 - RNA, 19 nt, Artificial Sequence
  Description of Artificial Sequence: Synthetic oligonucleotide
uagaacuaggccucuuuca

SEQ ID NO: 637971 - RNA, 19 nt, Artificial Sequence
  Description of Artificial Sequence: Synthetic oligonucleotide
aauaaaggguauguugaau

SEQ ID NO: 637972 - RNA, 19 nt, Artificial Sequence
  Description of Artificial Sequence: Synthetic oligonucleotide
gggaagaccauauguaaag

SEQ ID NO: 637973 - RNA, 19 nt, Artificial Sequence
  Description of Artificial Sequence: Synthetic oligonucleotide
gagaggucagguuccuugg

SEQ ID NO: 637974 - RNA, 19 nt, Artificial Sequence
  Description of Artificial Sequence: Synthetic oligonucleotide
cucaucuacgcucagagaa

SEQ ID NO: 637975 - RNA, 19 nt, Artificial Sequence
  Description of Artificial Sequence: Synthetic oligonucleotide
gaucgagcgagcgaggcag

SEQ ID NO: 637976 - RNA, 19 nt, Artificial Sequence
  Description of Artificial Sequence: Synthetic oligonucleotide
ugaagaguccaugucucag

SEQ ID NO: 637977 - RNA, 19 nt, Artificial Sequence
  Description of Artificial Sequence: Synthetic oligonucleotide
accacauucauguggccug

SEQ ID NO: 637978 - RNA, 19 nt, Artificial Sequence
  Description of Artificial Sequence: Synthetic oligonucleotide
uuuauccggaggcugugac

SEQ ID NO: 637979 - RNA, 19 nt, Artificial Sequence
  Description of Artificial Sequence: Synthetic oligonucleotide
guagaacacaccaugugug

SEQ ID NO: 637980 - RNA, 19 nt, Artificial Sequence
  Description of Artificial Sequence: Synthetic oligonucleotide
ugagcgaacuccagcaggu

SEQ ID NO: 637981 - RNA, 19 nt, Artificial Sequence
  Description of Artificial Sequence: Synthetic oligonucleotide
acguagccaguguaguccc

SEQ ID NO: 637982 - RNA, 19 nt, Artificial Sequence
  Description of Artificial Sequence: Synthetic oligonucleotide
gguacgaagacacgccugg

SEQ ID NO: 637983 - RNA, 19 nt, Artificial Sequence
  Description of Artificial Sequence: Synthetic oligonucleotide
uuacugugaagcaggcucu

SEQ ID NO: 637984 - RNA, 19 nt, Artificial Sequence
  Description of Artificial Sequence: Synthetic oligonucleotide
gacgacuugaagauucagc

SEQ ID NO: 637985 - RNA, 19 nt, Artificial Sequence
  Description of Artificial Sequence: Synthetic oligonucleotide
ucucagucuagcucaggcc

SEQ ID NO: 637986 - RNA, 19 nt, Artificial Sequence
  Description of Artificial Sequence: Synthetic oligonucleotide
agaccucuaaagcaaauuu

SEQ ID NO: 637987 - RNA, 19 nt, Artificial Sequence
  Description of Artificial Sequence: Synthetic oligonucleotide
agaacuaggccucuuucaa

SEQ ID NO: 637988 - RNA, 19 nt, Artificial Sequence
  Description of Artificial Sequence: Synthetic oligonucleotide
uugcuuagaacuaggccuc

SEQ ID NO: 637989 - RNA, 19 nt, Artificial Sequence
  Description of Artificial Sequence: Synthetic oligonucleotide
ucaucuacgcucagagaac

SEQ ID NO: 637990 - RNA, 19 nt, Artificial Sequence
  Description of Artificial Sequence: Synthetic oligonucleotide
auguaaaggcugcacccuc

SEQ ID NO: 637991 - RNA, 19 nt, Artificial Sequence
  Description of Artificial Sequence: Synthetic oligonucleotide
ggauguaaaaccuuugcaa

SEQ ID NO: 637992 - RNA, 19 nt, Artificial Sequence
  Description of Artificial Sequence: Synthetic oligonucleotide
cuaugagggugcuuacagg

SEQ ID NO: 637993 - RNA, 19 nt, Artificial Sequence
  Description of Artificial Sequence: Synthetic oligonucleotide
uacgaagacacgccuggca

SEQ ID NO: 637994 - RNA, 19 nt, Artificial Sequence
  Description of Artificial Sequence: Synthetic oligonucleotide
aggagucuggaacaagucu

SEQ ID NO: 637995 - RNA, 19 nt, Artificial Sequence
  Description of Artificial Sequence: Synthetic oligonucleotide
accucuaaagcaaauuucu

SEQ ID NO: 637996 - RNA, 19 nt, Artificial Sequence
  Description of Artificial Sequence: Synthetic oligonucleotide
agaacacaccaugugugac

SEQ ID NO: 637997 - RNA, 19 nt, Artificial Sequence
  Description of Artificial Sequence: Synthetic oligonucleotide
acaacuugcucagcuugcc

SEQ ID NO: 637998 - RNA, 19 nt, Artificial Sequence
  Description of Artificial Sequence: Synthetic oligonucleotide
ugcaggaccuagaaacugu

SEQ ID NO: 637999 - RNA, 19 nt, Artificial Sequence
  Description of Artificial Sequence: Synthetic oligonucleotide
uggggaagaccauauguaa

SEQ ID NO: 638000 - RNA, 19 nt, Artificial Sequence
  Description of Artificial Sequence: Synthetic oligonucleotide
gagaaccuaaagccuagac

SEQ ID NO: 638001 - RNA, 19 nt, Artificial Sequence
  Description of Artificial Sequence: Synthetic oligonucleotide
ucagucauuacagcgcuuc

SEQ ID NO: 638002 - RNA, 19 nt, Artificial Sequence
  Description of Artificial Sequence: Synthetic oligonucleotide
gagucagaaauagaguaga

SEQ ID NO: 638003 - RNA, 19 nt, Artificial Sequence
  Description of Artificial Sequence: Synthetic oligonucleotide
gucucagucuagcucaggc

SEQ ID NO: 638004 - RNA, 19 nt, Artificial Sequence
  Description of Artificial Sequence: Synthetic oligonucleotide
gaccauauguaaaggcugc

SEQ ID NO: 638005 - RNA, 19 nt, Artificial Sequence
  Description of Artificial Sequence: Synthetic oligonucleotide
ugaauguguagaccucuaa

SEQ ID NO: 638006 - RNA, 19 nt, Artificial Sequence
  Description of Artificial Sequence: Synthetic oligonucleotide
uauguaaaggcugcacccu

SEQ ID NO: 638007 - RNA, 19 nt, Artificial Sequence
  Description of Artificial Sequence: Synthetic oligonucleotide
uguagaccucuaaagcaaa

SEQ ID NO: 638008 - RNA, 19 nt, Artificial Sequence
  Description of Artificial Sequence: Synthetic oligonucleotide
uugagucgcugaaagccug

SEQ ID NO: 638009 - RNA, 19 nt, Artificial Sequence
  Description of Artificial Sequence: Synthetic oligonucleotide
uugguacgaagacacgccu

SEQ ID NO: 638010 - RNA, 19 nt, Artificial Sequence
  Description of Artificial Sequence: Synthetic oligonucleotide
acggucacauguaaaauug

SEQ ID NO: 638011 - RNA, 19 nt, Artificial Sequence
  Description of Artificial Sequence: Synthetic oligonucleotide
guguuuaaaguagucagga

SEQ ID NO: 638012 - RNA, 19 nt, Artificial Sequence
  Description of Artificial Sequence: Synthetic oligonucleotide
agaccauauguaaaggcug

SEQ ID NO: 638013 - RNA, 19 nt, Artificial Sequence
  Description of Artificial Sequence: Synthetic oligonucleotide
cuacuggcucuauagcagc

SEQ ID NO: 638014 - RNA, 19 nt, Artificial Sequence
  Description of Artificial Sequence: Synthetic oligonucleotide
uccucauuugagucgcuga

SEQ ID NO: 638015 - RNA, 19 nt, Artificial Sequence
  Description of Artificial Sequence: Synthetic oligonucleotide
agauaagucaguggcucag

SEQ ID NO: 638016 - RNA, 19 nt, Artificial Sequence
  Description of Artificial Sequence: Synthetic oligonucleotide
gcuccuaguauucaaacuc

SEQ ID NO: 638017 - RNA, 19 nt, Artificial Sequence
  Description of Artificial Sequence: Synthetic oligonucleotide
cacguagccaguguagucc

SEQ ID NO: 638018 - RNA, 19 nt, Artificial Sequence
  Description of Artificial Sequence: Synthetic oligonucleotide
aguuuaucacuuaccacug

SEQ ID NO: 638019 - RNA, 19 nt, Artificial Sequence
  Description of Artificial Sequence: Synthetic oligonucleotide
accuagaaacugugguggg

SEQ ID NO: 638020 - RNA, 19 nt, Artificial Sequence
  Description of Artificial Sequence: Synthetic oligonucleotide
cacgaucacagguuauggc

SEQ ID NO: 638021 - RNA, 19 nt, Artificial Sequence
  Description of Artificial Sequence: Synthetic oligonucleotide
acaggggcaaguucaucag

SEQ ID NO: 638022 - RNA, 19 nt, Artificial Sequence
  Description of Artificial Sequence: Synthetic oligonucleotide
uauccggaggcugugacuc

SEQ ID NO: 638023 - RNA, 19 nt, Artificial Sequence
  Description of Artificial Sequence: Synthetic oligonucleotide
acacgaucacagguuaugg

SEQ ID NO: 638024 - RNA, 19 nt, Artificial Sequence
  Description of Artificial Sequence: Synthetic oligonucleotide
uggcuaggcagacucugcc

SEQ ID NO: 638025 - RNA, 19 nt, Artificial Sequence
  Description of Artificial Sequence: Synthetic oligonucleotide
uauggcuccuaguauucaa

SEQ ID NO: 638026 - RNA, 19 nt, Artificial Sequence
  Description of Artificial Sequence: Synthetic oligonucleotide
cugugaagcaggcucuccc

SEQ ID NO: 638027 - RNA, 19 nt, Artificial Sequence
  Description of Artificial Sequence: Synthetic oligonucleotide
ugguacgaagacacgccug

SEQ ID NO: 638028 - RNA, 19 nt, Artificial Sequence
  Description of Artificial Sequence: Synthetic oligonucleotide
ugcuugacaguagaacaca

SEQ ID NO: 638029 - RNA, 19 nt, Artificial Sequence
  Description of Artificial Sequence: Synthetic oligonucleotide
auagcagcucaucuacgcu

SEQ ID NO: 638030 - RNA, 19 nt, Artificial Sequence
  Description of Artificial Sequence: Synthetic oligonucleotide
cagaaauagaguagagcca

SEQ ID NO: 638031 - RNA, 19 nt, Artificial Sequence
  Description of Artificial Sequence: Synthetic oligonucleotide
agugaauguguagaccucu

SEQ ID NO: 638032 - RNA, 19 nt, Artificial Sequence
  Description of Artificial Sequence: Synthetic oligonucleotide
agaacacgaucacagguua

SEQ ID NO: 638033 - RNA, 19 nt, Artificial Sequence
  Description of Artificial Sequence: Synthetic oligonucleotide
gaccucuaaagcaaauuuc

SEQ ID NO: 638034 - RNA, 19 nt, Artificial Sequence
  Description of Artificial Sequence: Synthetic oligonucleotide
ucgcugaaagccuggacaa

SEQ ID NO: 638035 - RNA, 19 nt, Artificial Sequence
  Description of Artificial Sequence: Synthetic oligonucleotide
uugugguuuggcccuaaaa

SEQ ID NO: 638036 - RNA, 19 nt, Artificial Sequence
  Description of Artificial Sequence: Synthetic oligonucleotide
ugacaguagaacacaccau

SEQ ID NO: 638037 - RNA, 19 nt, Artificial Sequence
  Description of Artificial Sequence: Synthetic oligonucleotide
caauugucagagaggucag

SEQ ID NO: 638038 - RNA, 19 nt, Artificial Sequence
  Description of Artificial Sequence: Synthetic oligonucleotide
ucuggcuaggcagacucug

SEQ ID NO: 638039 - RNA, 19 nt, Artificial Sequence
  Description of Artificial Sequence: Synthetic oligonucleotide
uacucaagaucgagcgagc

SEQ ID NO: 638040 - RNA, 19 nt, Artificial Sequence
  Description of Artificial Sequence: Synthetic oligonucleotide
acucaagaucgagcgagcg

SEQ ID NO: 638041 - RNA, 19 nt, Artificial Sequence
  Description of Artificial Sequence: Synthetic oligonucleotide
acuaacugagugauguccu

SEQ ID NO: 638042 - RNA, 19 nt, Artificial Sequence
  Description of Artificial Sequence: Synthetic oligonucleotide
aggguauguugaaugggcg

SEQ ID NO: 638043 - RNA, 19 nt, Artificial Sequence
  Description of Artificial Sequence: Synthetic oligonucleotide
caggaccuagaaacugugg

SEQ ID NO: 638044 - RNA, 19 nt, Artificial Sequence
  Description of Artificial Sequence: Synthetic oligonucleotide
uugguggggaagaccauau

SEQ ID NO: 638045 - RNA, 19 nt, Artificial Sequence
  Description of Artificial Sequence: Synthetic oligonucleotide
ggagucagaaauagaguag

SEQ ID NO: 638046 - RNA, 19 nt, Artificial Sequence
  Description of Artificial Sequence: Synthetic oligonucleotide
agaagacggucacauguaa

SEQ ID NO: 638047 - RNA, 19 nt, Artificial Sequence
  Description of Artificial Sequence: Synthetic oligonucleotide
augacucuagucaguguuc

SEQ ID NO: 638048 - RNA, 19 nt, Artificial Sequence
  Description of Artificial Sequence: Synthetic oligonucleotide
gagauaagucaguggcuca

SEQ ID NO: 638049 - RNA, 19 nt, Artificial Sequence
  Description of Artificial Sequence: Synthetic oligonucleotide
uagaaacuguggugggcug

SEQ ID NO: 638050 - RNA, 19 nt, Artificial Sequence
  Description of Artificial Sequence: Synthetic oligonucleotide
uuauccggaggcugugacu

SEQ ID NO: 638051 - RNA, 19 nt, Artificial Sequence
  Description of Artificial Sequence: Synthetic oligonucleotide
agucagaaauagaguagag

SEQ ID NO: 638052 - RNA, 19 nt, Artificial Sequence
  Description of Artificial Sequence: Synthetic oligonucleotide
augacgggauguaaaaccu

SEQ ID NO: 638053 - RNA, 19 nt, Artificial Sequence
  Description of Artificial Sequence: Synthetic oligonucleotide
gucauacugguuugggauc

SEQ ID NO: 638054 - RNA, 19 nt, Artificial Sequence
  Description of Artificial Sequence: Synthetic oligonucleotide
cacagguuauggcuccuag

SEQ ID NO: 638055 - RNA, 19 nt, Artificial Sequence
  Description of Artificial Sequence: Synthetic oligonucleotide
caauuaugauuagagaaua

SEQ ID NO: 638056 - RNA, 19 nt, Artificial Sequence
  Description of Artificial Sequence: Synthetic oligonucleotide
agaguaugaagagggcuga

SEQ ID NO: 638057 - RNA, 19 nt, Artificial Sequence
  Description of Artificial Sequence: Synthetic oligonucleotide
agggcuuuuaugacucuag

SEQ ID NO: 638058 - RNA, 19 nt, Artificial Sequence
  Description of Artificial Sequence: Synthetic oligonucleotide
gggauguaaaaccuuugca

SEQ ID NO: 638059 - RNA, 19 nt, Artificial Sequence
  Description of Artificial Sequence: Synthetic oligonucleotide
acaguagaacacaccaugu

SEQ ID NO: 638060 - RNA, 19 nt, Artificial Sequence
  Description of Artificial Sequence: Synthetic oligonucleotide
aaccuaaagccuagacucu

SEQ ID NO: 638061 - RNA, 19 nt, Artificial Sequence
  Description of Artificial Sequence: Synthetic oligonucleotide
ucccagaagacggucacau

SEQ ID NO: 638062 - RNA, 19 nt, Artificial Sequence
  Description of Artificial Sequence: Synthetic oligonucleotide
cagguuauggcuccuagua

SEQ ID NO: 638063 - RNA, 19 nt, Artificial Sequence
  Description of Artificial Sequence: Synthetic oligonucleotide
ugcuuacaggagugcagug

SEQ ID NO: 638064 - RNA, 19 nt, Artificial Sequence
  Description of Artificial Sequence: Synthetic oligonucleotide
gaauacuaacugagugaug

SEQ ID NO: 638065 - RNA, 19 nt, Artificial Sequence
  Description of Artificial Sequence: Synthetic oligonucleotide
ucuuuauccggaggcugug

SEQ ID NO: 638066 - RNA, 19 nt, Artificial Sequence
  Description of Artificial Sequence: Synthetic oligonucleotide
caagaucgagcgagcgagg

SEQ ID NO: 638067 - RNA, 19 nt, Artificial Sequence
  Description of Artificial Sequence: Synthetic oligonucleotide
augugugacaguuguccaa

SEQ ID NO: 638068 - RNA, 19 nt, Artificial Sequence
  Description of Artificial Sequence: Synthetic oligonucleotide
agguuauggcuccuaguau

SEQ ID NO: 638069 - RNA, 19 nt, Artificial Sequence
  Description of Artificial Sequence: Synthetic oligonucleotide
ggagauaagucaguggcuc

SEQ ID NO: 638070 - RNA, 19 nt, Artificial Sequence
  Description of Artificial Sequence: Synthetic oligonucleotide
ggaaaggccggauccuucc

SEQ ID NO: 638071 - RNA, 19 nt, Artificial Sequence
  Description of Artificial Sequence: Synthetic oligonucleotide
caacuugcucagcuugccc

SEQ ID NO: 638072 - RNA, 19 nt, Artificial Sequence
  Description of Artificial Sequence: Synthetic oligonucleotide
ggcuuuuaugacucuaguc

SEQ ID NO: 638073 - RNA, 19 nt, Artificial Sequence
  Description of Artificial Sequence: Synthetic oligonucleotide
ucagucuagcucaggccau

SEQ ID NO: 638074 - RNA, 19 nt, Artificial Sequence
  Description of Artificial Sequence: Synthetic oligonucleotide
guuauggcuccuaguauuc

SEQ ID NO: 638075 - RNA, 19 nt, Artificial Sequence
  Description of Artificial Sequence: Synthetic oligonucleotide
ugaguucaguaaccuccac

SEQ ID NO: 638076 - RNA, 19 nt, Artificial Sequence
  Description of Artificial Sequence: Synthetic oligonucleotide
caaagcaauuaugauuaga

SEQ ID NO: 638077 - RNA, 19 nt, Artificial Sequence
  Description of Artificial Sequence: Synthetic oligonucleotide
uagaccucuaaagcaaauu

SEQ ID NO: 638078 - RNA, 19 nt, Artificial Sequence
  Description of Artificial Sequence: Synthetic oligonucleotide
caaagaugcaggaccuaga

SEQ ID NO: 638079 - RNA, 19 nt, Artificial Sequence
  Description of Artificial Sequence: Synthetic oligonucleotide
auacugguuugggaucggg

SEQ ID NO: 638080 - RNA, 19 nt, Artificial Sequence
  Description of Artificial Sequence: Synthetic oligonucleotide
ccucggaggacaaggaaag

SEQ ID NO: 638081 - RNA, 19 nt, Artificial Sequence
  Description of Artificial Sequence: Synthetic oligonucleotide
augcaggaccuagaaacug

SEQ ID NO: 638082 - RNA, 19 nt, Artificial Sequence
  Description of Artificial Sequence: Synthetic oligonucleotide
guaaccuccacaaagccuu

SEQ ID NO: 638083 - RNA, 19 nt, Artificial Sequence
  Description of Artificial Sequence: Synthetic oligonucleotide
gacggucacauguaaaauu

SEQ ID NO: 638084 - RNA, 19 nt, Artificial Sequence
  Description of Artificial Sequence: Synthetic oligonucleotide
gcugguguaugucacaucu

SEQ ID NO: 638085 - RNA, 19 nt, Artificial Sequence
  Description of Artificial Sequence: Synthetic oligonucleotide
agaucgagcgagcgaggca

SEQ ID NO: 638086 - RNA, 19 nt, Artificial Sequence
  Description of Artificial Sequence: Synthetic oligonucleotide
acacgccuggcauuuuacu

SEQ ID NO: 638087 - RNA, 19 nt, Artificial Sequence
  Description of Artificial Sequence: Synthetic oligonucleotide
cucguccacugucuuuagg

SEQ ID NO: 638088 - RNA, 19 nt, Artificial Sequence
  Description of Artificial Sequence: Synthetic oligonucleotide
guguagaccucuaaagcaa

SEQ ID NO: 638089 - RNA, 19 nt, Artificial Sequence
  Description of Artificial Sequence: Synthetic oligonucleotide
ucaccucacgccaguuacu

SEQ ID NO: 638090 - RNA, 19 nt, Artificial Sequence
  Description of Artificial Sequence: Synthetic oligonucleotide
ugacgggauguaaaaccuu

SEQ ID NO: 638091 - RNA, 19 nt, Artificial Sequence
  Description of Artificial Sequence: Synthetic oligonucleotide
ccuugguacgaagacacgc

SEQ ID NO: 638092 - RNA, 19 nt, Artificial Sequence
  Description of Artificial Sequence: Synthetic oligonucleotide
cagugaauguguagaccuc

SEQ ID NO: 638093 - RNA, 19 nt, Artificial Sequence
  Description of Artificial Sequence: Synthetic oligonucleotide
agacgacuugaagauucag

SEQ ID NO: 638094 - RNA, 19 nt, Artificial Sequence
  Description of Artificial Sequence: Synthetic oligonucleotide
cauuacagcgcuucuggcu

SEQ ID NO: 638095 - RNA, 19 nt, Artificial Sequence
  Description of Artificial Sequence: Synthetic oligonucleotide
guagccaguguagucccgc

SEQ ID NO: 638096 - RNA, 19 nt, Artificial Sequence
  Description of Artificial Sequence: Synthetic oligonucleotide
uuugggaucggggccgcgu

SEQ ID NO: 638097 - RNA, 19 nt, Artificial Sequence
  Description of Artificial Sequence: Synthetic oligonucleotide
auguugaaugggcgaacau

SEQ ID NO: 638098 - RNA, 19 nt, Artificial Sequence
  Description of Artificial Sequence: Synthetic oligonucleotide
ccucacgccaguuacugug

SEQ ID NO: 638099 - RNA, 19 nt, Artificial Sequence
  Description of Artificial Sequence: Synthetic oligonucleotide
agcgauaagggaagaggga

SEQ ID NO: 638100 - RNA, 19 nt, Artificial Sequence
  Description of Artificial Sequence: Synthetic oligonucleotide
agguaaucuugcugcugcu

SEQ ID NO: 638101 - RNA, 19 nt, Artificial Sequence
  Description of Artificial Sequence: Synthetic oligonucleotide
uguuccggggcacguuaaa

SEQ ID NO: 638102 - RNA, 19 nt, Artificial Sequence
  Description of Artificial Sequence: Synthetic oligonucleotide
ccuaaagccuagacucucc

SEQ ID NO: 638103 - RNA, 19 nt, Artificial Sequence
  Description of Artificial Sequence: Synthetic oligonucleotide
cuggcuaugagggugcuua

SEQ ID NO: 638104 - RNA, 19 nt, Artificial Sequence
  Description of Artificial Sequence: Synthetic oligonucleotide
gaagacggucacauguaaa

SEQ ID NO: 638105 - RNA, 19 nt, Artificial Sequence
  Description of Artificial Sequence: Synthetic oligonucleotide
gaacaagucucagcucaca

SEQ ID NO: 638106 - RNA, 19 nt, Artificial Sequence
  Description of Artificial Sequence: Synthetic oligonucleotide
aucuacgcucagagaacac

SEQ ID NO: 638107 - RNA, 19 nt, Artificial Sequence
  Description of Artificial Sequence: Synthetic oligonucleotide
cuagucaguguucaacccu

SEQ ID NO: 638108 - RNA, 19 nt, Artificial Sequence
  Description of Artificial Sequence: Synthetic oligonucleotide
aacugccgucaucugcaau

SEQ ID NO: 638109 - RNA, 19 nt, Artificial Sequence
  Description of Artificial Sequence: Synthetic oligonucleotide
cugugacucuccuuccuca

SEQ ID NO: 638110 - RNA, 19 nt, Artificial Sequence
  Description of Artificial Sequence: Synthetic oligonucleotide
ugggaucggggccgcgucc

SEQ ID NO: 638111 - RNA, 19 nt, Artificial Sequence
  Description of Artificial Sequence: Synthetic oligonucleotide
caccucacgccaguuacug

SEQ ID NO: 638112 - RNA, 19 nt, Artificial Sequence
  Description of Artificial Sequence: Synthetic oligonucleotide
caucuacgcucagagaaca

SEQ ID NO: 638113 - RNA, 19 nt, Artificial Sequence
  Description of Artificial Sequence: Synthetic oligonucleotide
uugggcccgaggccacagg

SEQ ID NO: 638114 - RNA, 19 nt, Artificial Sequence
  Description of Artificial Sequence: Synthetic oligonucleotide
agacggucacauguaaaau

SEQ ID NO: 638115 - RNA, 19 nt, Artificial Sequence
  Description of Artificial Sequence: Synthetic oligonucleotide
uacagcgcuucuggcuagg

SEQ ID NO: 638116 - RNA, 19 nt, Artificial Sequence
  Description of Artificial Sequence: Synthetic oligonucleotide
uugggaucggggccgcguc

SEQ ID NO: 638117 - RNA, 19 nt, Artificial Sequence
  Description of Artificial Sequence: Synthetic oligonucleotide
accauauguaaaggcugca

SEQ ID NO: 638118 - RNA, 19 nt, Artificial Sequence
  Description of Artificial Sequence: Synthetic oligonucleotide
ggguauguugaaugggcga

SEQ ID NO: 638119 - RNA, 19 nt, Artificial Sequence
  Description of Artificial Sequence: Synthetic oligonucleotide
gguauguugaaugggcgaa

SEQ ID NO: 638120 - RNA, 19 nt, Artificial Sequence
  Description of Artificial Sequence: Synthetic oligonucleotide
cuagaaacuguggugggcu

SEQ ID NO: 638121 - RNA, 19 nt, Artificial Sequence
  Description of Artificial Sequence: Synthetic oligonucleotide
gaugcaggaccuagaaacu

SEQ ID NO: 638122 - RNA, 19 nt, Artificial Sequence
  Description of Artificial Sequence: Synthetic oligonucleotide
ugggucugaucuggcagca

SEQ ID NO: 638123 - RNA, 19 nt, Artificial Sequence
  Description of Artificial Sequence: Synthetic oligonucleotide
cauguggccuggccucagg

SEQ ID NO: 638124 - RNA, 19 nt, Artificial Sequence
  Description of Artificial Sequence: Synthetic oligonucleotide
uucauguggccuggccuca

SEQ ID NO: 638125 - RNA, 19 nt, Artificial Sequence
  Description of Artificial Sequence: Synthetic oligonucleotide
ggaugagaccacauucaug

SEQ ID NO: 638126 - RNA, 19 nt, Artificial Sequence
  Description of Artificial Sequence: Synthetic oligonucleotide
cauacugguuugggaucgg

SEQ ID NO: 638127 - RNA, 19 nt, Artificial Sequence
  Description of Artificial Sequence: Synthetic oligonucleotide
gacaggaugagaccacauu

SEQ ID NO: 638128 - RNA, 19 nt, Artificial Sequence
  Description of Artificial Sequence: Synthetic oligonucleotide
ggcuaggcagacucugccc

SEQ ID NO: 638129 - RNA, 19 nt, Artificial Sequence
  Description of Artificial Sequence: Synthetic oligonucleotide
gagaacacgaucacagguu

SEQ ID NO: 638130 - RNA, 19 nt, Artificial Sequence
  Description of Artificial Sequence: Synthetic oligonucleotide
agucaagagacgacuugaa

SEQ ID NO: 638131 - RNA, 19 nt, Artificial Sequence
  Description of Artificial Sequence: Synthetic oligonucleotide
agagaaccuaaagccuaga

SEQ ID NO: 638132 - RNA, 19 nt, Artificial Sequence
  Description of Artificial Sequence: Synthetic oligonucleotide
uggcucuauagcagcucau

SEQ ID NO: 638133 - RNA, 19 nt, Artificial Sequence
  Description of Artificial Sequence: Synthetic oligonucleotide
caaguucaucagucagguc

SEQ ID NO: 638134 - RNA, 19 nt, Artificial Sequence
  Description of Artificial Sequence: Synthetic oligonucleotide
aggaaccuuccagcaggcg

SEQ ID NO: 638135 - RNA, 19 nt, Artificial Sequence
  Description of Artificial Sequence: Synthetic oligonucleotide
uggcuaugagggugcuuac

SEQ ID NO: 638136 - RNA, 19 nt, Artificial Sequence
  Description of Artificial Sequence: Synthetic oligonucleotide
cagaagacggucacaugua

SEQ ID NO: 638137 - RNA, 19 nt, Artificial Sequence
  Description of Artificial Sequence: Synthetic oligonucleotide
gguuauggcuccuaguauu

SEQ ID NO: 638138 - RNA, 19 nt, Artificial Sequence
  Description of Artificial Sequence: Synthetic oligonucleotide
ggagcucaguguuuaaagu

SEQ ID NO: 638139 - RNA, 19 nt, Artificial Sequence
  Description of Artificial Sequence: Synthetic oligonucleotide
ccagaagacggucacaugu

SEQ ID NO: 638140 - RNA, 19 nt, Artificial Sequence
  Description of Artificial Sequence: Synthetic oligonucleotide
gcucagagaacacgaucac

SEQ ID NO: 638141 - RNA, 19 nt, Artificial Sequence
  Description of Artificial Sequence: Synthetic oligonucleotide
gcgauaagggaagagggaa

SEQ ID NO: 638142 - RNA, 19 nt, Artificial Sequence
  Description of Artificial Sequence: Synthetic oligonucleotide
auggcuccuaguauucaaa

SEQ ID NO: 638143 - RNA, 19 nt, Artificial Sequence
  Description of Artificial Sequence: Synthetic oligonucleotide
guacgaagacacgccuggc

SEQ ID NO: 638144 - RNA, 19 nt, Artificial Sequence
  Description of Artificial Sequence: Synthetic oligonucleotide
uccggcccugagccugagg

SEQ ID NO: 638145 - RNA, 19 nt, Artificial Sequence
  Description of Artificial Sequence: Synthetic oligonucleotide
gauaagucaguggcucagu

SEQ ID NO: 638146 - RNA, 19 nt, Artificial Sequence
  Description of Artificial Sequence: Synthetic oligonucleotide
ccuaguauucaaacucuaa

SEQ ID NO: 638147 - RNA, 19 nt, Artificial Sequence
  Description of Artificial Sequence: Synthetic oligonucleotide
ggggacaacaauguucaaa

SEQ ID NO: 638148 - RNA, 19 nt, Artificial Sequence
  Description of Artificial Sequence: Synthetic oligonucleotide
gacgggauguaaaaccuuu

SEQ ID NO: 638149 - RNA, 19 nt, Artificial Sequence
  Description of Artificial Sequence: Synthetic oligonucleotide
ccucaggcguaccaaguug

SEQ ID NO: 638150 - RNA, 19 nt, Artificial Sequence
  Description of Artificial Sequence: Synthetic oligonucleotide
gccaugacgggauguaaaa

SEQ ID NO: 638151 - RNA, 19 nt, Artificial Sequence
  Description of Artificial Sequence: Synthetic oligonucleotide
ccggugcuuguccagacug

SEQ ID NO: 638152 - RNA, 19 nt, Artificial Sequence
  Description of Artificial Sequence: Synthetic oligonucleotide
guucaacccucccuucucu

SEQ ID NO: 638153 - RNA, 19 nt, Artificial Sequence
  Description of Artificial Sequence: Synthetic oligonucleotide
cuuagaacuaggccucuuu

SEQ ID NO: 638154 - RNA, 19 nt, Artificial Sequence
  Description of Artificial Sequence: Synthetic oligonucleotide
guaccaaguugcuggugua

SEQ ID NO: 638155 - RNA, 19 nt, Artificial Sequence
  Description of Artificial Sequence: Synthetic oligonucleotide
augauccggcccugagccu

SEQ ID NO: 638156 - RNA, 19 nt, Artificial Sequence
  Description of Artificial Sequence: Synthetic oligonucleotide
gcaggaccuagaaacugug

SEQ ID NO: 638157 - RNA, 19 nt, Artificial Sequence
  Description of Artificial Sequence: Synthetic oligonucleotide
agggucgcaggagcccacg

SEQ ID NO: 638158 - RNA, 19 nt, Artificial Sequence
  Description of Artificial Sequence: Synthetic oligonucleotide
agcgaggcagggagggcuc

SEQ ID NO: 638159 - RNA, 19 nt, Artificial Sequence
  Description of Artificial Sequence: Synthetic oligonucleotide
gcgaacaugauccggcccu

SEQ ID NO: 638160 - RNA, 19 nt, Artificial Sequence
  Description of Artificial Sequence: Synthetic oligonucleotide
cgacuugaagauucagcac

SEQ ID NO: 638161 - RNA, 19 nt, Artificial Sequence
  Description of Artificial Sequence: Synthetic oligonucleotide
cagucuagcucaggccaug

SEQ ID NO: 638162 - RNA, 19 nt, Artificial Sequence
  Description of Artificial Sequence: Synthetic oligonucleotide
cuuuauccggaggcuguga

SEQ ID NO: 638163 - RNA, 19 nt, Artificial Sequence
  Description of Artificial Sequence: Synthetic oligonucleotide
gcuaggcagacucugcccu

SEQ ID NO: 638164 - RNA, 19 nt, Artificial Sequence
  Description of Artificial Sequence: Synthetic oligonucleotide
ggcuccuaguauucaaacu

SEQ ID NO: 638165 - RNA, 19 nt, Artificial Sequence
  Description of Artificial Sequence: Synthetic oligonucleotide
ucuugugguuuggcccuaa

SEQ ID NO: 638166 - RNA, 19 nt, Artificial Sequence
  Description of Artificial Sequence: Synthetic oligonucleotide
ccaaaguauacuucucagu

SEQ ID NO: 638167 - RNA, 19 nt, Artificial Sequence
  Description of Artificial Sequence: Synthetic oligonucleotide
ccaugacgggauguaaaac

SEQ ID NO: 638168 - RNA, 19 nt, Artificial Sequence
  Description of Artificial Sequence: Synthetic oligonucleotide
uguggccguucagggccag

SEQ ID NO: 638169 - RNA, 19 nt, Artificial Sequence
  Description of Artificial Sequence: Synthetic oligonucleotide
guuugggaucggggccgcg

SEQ ID NO: 638170 - RNA, 19 nt, Artificial Sequence
  Description of Artificial Sequence: Synthetic oligonucleotide
gcucaucuacgcucagaga

SEQ ID NO: 638171 - RNA, 19 nt, Artificial Sequence
  Description of Artificial Sequence: Synthetic oligonucleotide
cagcgcuucuggcuaggca

SEQ ID NO: 638172 - RNA, 19 nt, Artificial Sequence
  Description of Artificial Sequence: Synthetic oligonucleotide
aggccaugacgggauguaa

SEQ ID NO: 638173 - RNA, 19 nt, Artificial Sequence
  Description of Artificial Sequence: Synthetic oligonucleotide
cuugugguuuggcccuaaa

SEQ ID NO: 638174 - RNA, 19 nt, Artificial Sequence
  Description of Artificial Sequence: Synthetic oligonucleotide
cagggucgcaggagcccac

SEQ ID NO: 638175 - RNA, 19 nt, Artificial Sequence
  Description of Artificial Sequence: Synthetic oligonucleotide
gggcuuuuaugacucuagu

SEQ ID NO: 638176 - RNA, 19 nt, Artificial Sequence
  Description of Artificial Sequence: Synthetic oligonucleotide
ggcuaugagggugcuuaca

SEQ ID NO: 638177 - RNA, 19 nt, Artificial Sequence
  Description of Artificial Sequence: Synthetic oligonucleotide
guagaccucuaaagcaaau

SEQ ID NO: 638178 - RNA, 19 nt, Artificial Sequence
  Description of Artificial Sequence: Synthetic oligonucleotide
gaacacgaucacagguuau

SEQ ID NO: 638179 - RNA, 19 nt, Artificial Sequence
  Description of Artificial Sequence: Synthetic oligonucleotide
gcaugugccuuggcagaag

SEQ ID NO: 638180 - RNA, 19 nt, Artificial Sequence
  Description of Artificial Sequence: Synthetic oligonucleotide
cccagaagacggucacaug

SEQ ID NO: 638181 - RNA, 19 nt, Artificial Sequence
  Description of Artificial Sequence: Synthetic oligonucleotide
ggccaugacgggauguaaa

SEQ ID NO: 638182 - RNA, 19 nt, Artificial Sequence
  Description of Artificial Sequence: Synthetic oligonucleotide
cagggcuuuuaugacucua

SEQ ID NO: 638183 - RNA, 19 nt, Artificial Sequence
  Description of Artificial Sequence: Synthetic oligonucleotide
aggauccgaggugcuuggu

SEQ ID NO: 638184 - RNA, 19 nt, Artificial Sequence
  Description of Artificial Sequence: Synthetic oligonucleotide
gggaaacaacugagcugag

SEQ ID NO: 638185 - RNA, 19 nt, Artificial Sequence
  Description of Artificial Sequence: Synthetic oligonucleotide
cgcguccugagcgaacucc

SEQ ID NO: 638186 - RNA, 19 nt, Artificial Sequence
  Description of Artificial Sequence: Synthetic oligonucleotide
cucucccaccagucugaga

SEQ ID NO: 638187 - RNA, 19 nt, Artificial Sequence
  Description of Artificial Sequence: Synthetic oligonucleotide
gguuugggaucggggccgc

SEQ ID NO: 638188 - RNA, 19 nt, Artificial Sequence
  Description of Artificial Sequence: Synthetic oligonucleotide
ccucguccacugucuuuag

SEQ ID NO: 638189 - RNA, 19 nt, Artificial Sequence
  Description of Artificial Sequence: Synthetic oligonucleotide
cuguggugggcuguccucu

SEQ ID NO: 638190 - RNA, 19 nt, Artificial Sequence
  Description of Artificial Sequence: Synthetic oligonucleotide
ccaugaaguguuugucaua

SEQ ID NO: 638191 - RNA, 19 nt, Artificial Sequence
  Description of Artificial Sequence: Synthetic oligonucleotide
cugccgucaucugcaaucu

SEQ ID NO: 638192 - RNA, 19 nt, Artificial Sequence
  Description of Artificial Sequence: Synthetic oligonucleotide
guggccguucagggccagc

SEQ ID NO: 638193 - RNA, 19 nt, Artificial Sequence
  Description of Artificial Sequence: Synthetic oligonucleotide
ggaucggggccgcguccug

SEQ ID NO: 638194 - RNA, 19 nt, Artificial Sequence
  Description of Artificial Sequence: Synthetic oligonucleotide
gcguaccaaguugcuggug

SEQ ID NO: 638195 - RNA, 19 nt, Artificial Sequence
  Description of Artificial Sequence: Synthetic oligonucleotide
gccggauccuuccgcagcu

SEQ ID NO: 638196 - RNA, 19 nt, Artificial Sequence
  Description of Artificial Sequence: Synthetic oligonucleotide
ccggcccugagccugaggu

SEQ ID NO: 638197 - RNA, 19 nt, Artificial Sequence
  Description of Artificial Sequence: Synthetic oligonucleotide
gccagcacguagccagugu

SEQ ID NO: 638198 - RNA, 19 nt, Artificial Sequence
  Description of Artificial Sequence: Synthetic oligonucleotide
gucaggauccgaggugcuu

SEQ ID NO: 638199 - RNA, 19 nt, Artificial Sequence
  Description of Artificial Sequence: Synthetic oligonucleotide
ccguucagggccagcacgu

SEQ ID NO: 638200 - RNA, 19 nt, Artificial Sequence
  Description of Artificial Sequence: Synthetic oligonucleotide
ccgcuccaugaaguguuug

SEQ ID NO: 638201 - RNA, 19 nt, Artificial Sequence
  Description of Artificial Sequence: Synthetic oligonucleotide
gccgcguccugagcgaacu

SEQ ID NO: 638202 - RNA, 19 nt, Artificial Sequence
  Description of Artificial Sequence: Synthetic oligonucleotide
cacccacugcucagccccu

SEQ ID NO: 638203 - RNA, 19 nt, Artificial Sequence
  Description of Artificial Sequence: Synthetic oligonucleotide
gggaucggggccgcguccu

SEQ ID NO: 638204 - RNA, 19 nt, Artificial Sequence
  Description of Artificial Sequence: Synthetic oligonucleotide
ggccgcguccugagcgaac

SEQ ID NO: 638205 - RNA, 19 nt, Artificial Sequence
  Description of Artificial Sequence: Synthetic oligonucleotide
ccggauccuuccgcagcug

SEQ ID NO: 638206 - RNA, 19 nt, Artificial Sequence
  Description of Artificial Sequence: Synthetic oligonucleotide
gcuuagaacuaggccucuu

SEQ ID NO: 638207 - RNA, 19 nt, Artificial Sequence
  Description of Artificial Sequence: Synthetic oligonucleotide
ccgcguccugagcgaacuc

SEQ ID NO: 638208 - RNA, 19 nt, Artificial Sequence
  Description of Artificial Sequence: Synthetic oligonucleotide
gggccgcguccugagcgaa

SEQ ID NO: 638209 - RNA, 19 nt, Artificial Sequence
  Description of Artificial Sequence: Synthetic oligonucleotide
cccuggcuaugagggugcu

SEQ ID NO: 638210 - RNA, 19 nt, Artificial Sequence
  Description of Artificial Sequence: Synthetic oligonucleotide
aacuuuauguuccauacgg

SEQ ID NO: 638211 - RNA, 19 nt, Artificial Sequence
  Description of Artificial Sequence: Synthetic oligonucleotide
uaaagauuaagcaaaaguc

SEQ ID NO: 638212 - RNA, 19 nt, Artificial Sequence
  Description of Artificial Sequence: Synthetic oligonucleotide
gaauauauugguaucaagg

SEQ ID NO: 638213 - RNA, 19 nt, Artificial Sequence
  Description of Artificial Sequence: Synthetic oligonucleotide
uuuacuuaauugcugauca

SEQ ID NO: 638214 - RNA, 19 nt, Artificial Sequence
  Description of Artificial Sequence: Synthetic oligonucleotide
uauaguuugaccuuguuuc

SEQ ID NO: 638215 - RNA, 19 nt, Artificial Sequence
  Description of Artificial Sequence: Synthetic oligonucleotide
aaaccuuauggucauguac

SEQ ID NO: 638216 - RNA, 19 nt, Artificial Sequence
  Description of Artificial Sequence: Synthetic oligonucleotide
aaaauuuacguaguucuac

SEQ ID NO: 638217 - RNA, 19 nt, Artificial Sequence
  Description of Artificial Sequence: Synthetic oligonucleotide
aaauacuuuauccagguuu

SEQ ID NO: 638218 - RNA, 19 nt, Artificial Sequence
  Description of Artificial Sequence: Synthetic oligonucleotide
aguaagaguguguauuugc

SEQ ID NO: 638219 - RNA, 19 nt, Artificial Sequence
  Description of Artificial Sequence: Synthetic oligonucleotide
aaccuuauggucauguacc

SEQ ID NO: 638220 - RNA, 19 nt, Artificial Sequence
  Description of Artificial Sequence: Synthetic oligonucleotide
uauugauaaaaguuguuug

SEQ ID NO: 638221 - RNA, 19 nt, Artificial Sequence
  Description of Artificial Sequence: Synthetic oligonucleotide
uuucugaucagaaaccuug

SEQ ID NO: 638222 - RNA, 19 nt, Artificial Sequence
  Description of Artificial Sequence: Synthetic oligonucleotide
auauacacccaucagagcu

SEQ ID NO: 638223 - RNA, 19 nt, Artificial Sequence
  Description of Artificial Sequence: Synthetic oligonucleotide
aagagcgccugccagagac

SEQ ID NO: 638224 - RNA, 19 nt, Artificial Sequence
  Description of Artificial Sequence: Synthetic oligonucleotide
acuuacuucaaucuuguug

SEQ ID NO: 638225 - RNA, 19 nt, Artificial Sequence
  Description of Artificial Sequence: Synthetic oligonucleotide
acagguuauaguuugaccu

SEQ ID NO: 638226 - RNA, 19 nt, Artificial Sequence
  Description of Artificial Sequence: Synthetic oligonucleotide
uaagacgacaguaaaauua

SEQ ID NO: 638227 - RNA, 19 nt, Artificial Sequence
  Description of Artificial Sequence: Synthetic oligonucleotide
uucauauauacacccauca

SEQ ID NO: 638228 - RNA, 19 nt, Artificial Sequence
  Description of Artificial Sequence: Synthetic oligonucleotide
uuuuguacugaguggaucc

SEQ ID NO: 638229 - RNA, 19 nt, Artificial Sequence
  Description of Artificial Sequence: Synthetic oligonucleotide
aauaauauuucuccaugau

SEQ ID NO: 638230 - RNA, 19 nt, Artificial Sequence
  Description of Artificial Sequence: Synthetic oligonucleotide
auuuacguaguucuacuuc

SEQ ID NO: 638231 - RNA, 19 nt, Artificial Sequence
  Description of Artificial Sequence: Synthetic oligonucleotide
uccgaggauaaaacgaugg

SEQ ID NO: 638232 - RNA, 19 nt, Artificial Sequence
  Description of Artificial Sequence: Synthetic oligonucleotide
ugacucuugaguaugcuug

SEQ ID NO: 638233 - RNA, 19 nt, Artificial Sequence
  Description of Artificial Sequence: Synthetic oligonucleotide
aaauuuacguaguucuacu

SEQ ID NO: 638234 - RNA, 19 nt, Artificial Sequence
  Description of Artificial Sequence: Synthetic oligonucleotide
agaugaauuuuccauccac

SEQ ID NO: 638235 - RNA, 19 nt, Artificial Sequence
  Description of Artificial Sequence: Synthetic oligonucleotide
uuugaacaauuucaguuug

SEQ ID NO: 638236 - RNA, 19 nt, Artificial Sequence
  Description of Artificial Sequence: Synthetic oligonucleotide
ucuccaucaagccagggca

SEQ ID NO: 638237 - RNA, 19 nt, Artificial Sequence
  Description of Artificial Sequence: Synthetic oligonucleotide
uaugggaucacaguuagac

SEQ ID NO: 638238 - RNA, 19 nt, Artificial Sequence
  Description of Artificial Sequence: Synthetic oligonucleotide
cuuuauguuccauacggag

SEQ ID NO: 638239 - RNA, 19 nt, Artificial Sequence
  Description of Artificial Sequence: Synthetic oligonucleotide
aagcacauguguuuggaug

SEQ ID NO: 638240 - RNA, 19 nt, Artificial Sequence
  Description of Artificial Sequence: Synthetic oligonucleotide
ugcacuguaggacccaagg

SEQ ID NO: 638241 - RNA, 19 nt, Artificial Sequence
  Description of Artificial Sequence: Synthetic oligonucleotide
uuuacaccuucccagaagu

SEQ ID NO: 638242 - RNA, 19 nt, Artificial Sequence
  Description of Artificial Sequence: Synthetic oligonucleotide
uuuacguaguucuacuucu

SEQ ID NO: 638243 - RNA, 19 nt, Artificial Sequence
  Description of Artificial Sequence: Synthetic oligonucleotide
auauccugaacacguuucc

SEQ ID NO: 638244 - RNA, 19 nt, Artificial Sequence
  Description of Artificial Sequence: Synthetic oligonucleotide
aaaacagguugcuugaaua

SEQ ID NO: 638245 - RNA, 19 nt, Artificial Sequence
  Description of Artificial Sequence: Synthetic oligonucleotide
aagacgacaguaaaauuag

SEQ ID NO: 638246 - RNA, 19 nt, Artificial Sequence
  Description of Artificial Sequence: Synthetic oligonucleotide
caagcaaggccucuaaucc

SEQ ID NO: 638247 - RNA, 19 nt, Artificial Sequence
  Description of Artificial Sequence: Synthetic oligonucleotide
auucucaaaaccuuauggu

SEQ ID NO: 638248 - RNA, 19 nt, Artificial Sequence
  Description of Artificial Sequence: Synthetic oligonucleotide
ucggaauagacagaaaucu

SEQ ID NO: 638249 - RNA, 19 nt, Artificial Sequence
  Description of Artificial Sequence: Synthetic oligonucleotide
gaucagaaaccuuguagag

SEQ ID NO: 638250 - RNA, 19 nt, Artificial Sequence
  Description of Artificial Sequence: Synthetic oligonucleotide
aaugcuuaagaaaaguuuu

SEQ ID NO: 638251 - RNA, 19 nt, Artificial Sequence
  Description of Artificial Sequence: Synthetic oligonucleotide
agagcuuaaugacaccagg

SEQ ID NO: 638252 - RNA, 19 nt, Artificial Sequence
  Description of Artificial Sequence: Synthetic oligonucleotide
agaguugcccacugguucc

SEQ ID NO: 638253 - RNA, 19 nt, Artificial Sequence
  Description of Artificial Sequence: Synthetic oligonucleotide
cugucuuuuguacugagug

SEQ ID NO: 638254 - RNA, 19 nt, Artificial Sequence
  Description of Artificial Sequence: Synthetic oligonucleotide
uguguuuggaugagcugcg

SEQ ID NO: 638255 - RNA, 19 nt, Artificial Sequence
  Description of Artificial Sequence: Synthetic oligonucleotide
uucagguaaaggaaauaca

SEQ ID NO: 638256 - RNA, 19 nt, Artificial Sequence
  Description of Artificial Sequence: Synthetic oligonucleotide
uucucaaaaccuuaugguc

SEQ ID NO: 638257 - RNA, 19 nt, Artificial Sequence
  Description of Artificial Sequence: Synthetic oligonucleotide
uccaugauaccagaguugc

SEQ ID NO: 638258 - RNA, 19 nt, Artificial Sequence
  Description of Artificial Sequence: Synthetic oligonucleotide
aaguuuuaagcaagcacag

SEQ ID NO: 638259 - RNA, 19 nt, Artificial Sequence
  Description of Artificial Sequence: Synthetic oligonucleotide
uacugaguggauccuauga

SEQ ID NO: 638260 - RNA, 19 nt, Artificial Sequence
  Description of Artificial Sequence: Synthetic oligonucleotide
acauuuuccauguagcaua

SEQ ID NO: 638261 - RNA, 19 nt, Artificial Sequence
  Description of Artificial Sequence: Synthetic oligonucleotide
gagggcuuauuccaggaag

SEQ ID NO: 638262 - RNA, 19 nt, Artificial Sequence
  Description of Artificial Sequence: Synthetic oligonucleotide
acgaacagcaccucuucgg

SEQ ID NO: 638263 - RNA, 19 nt, Artificial Sequence
  Description of Artificial Sequence: Synthetic oligonucleotide
gaggauaaaacgauggcuc

SEQ ID NO: 638264 - RNA, 19 nt, Artificial Sequence
  Description of Artificial Sequence: Synthetic oligonucleotide
cuacacuucagguaaagga

SEQ ID NO: 638265 - RNA, 19 nt, Artificial Sequence
  Description of Artificial Sequence: Synthetic oligonucleotide
uugaccuuguuucacugac

SEQ ID NO: 638266 - RNA, 19 nt, Artificial Sequence
  Description of Artificial Sequence: Synthetic oligonucleotide
ugcucuaauuaaccuauga

SEQ ID NO: 638267 - RNA, 19 nt, Artificial Sequence
  Description of Artificial Sequence: Synthetic oligonucleotide
uaucauuaagacgacagua

SEQ ID NO: 638268 - RNA, 19 nt, Artificial Sequence
  Description of Artificial Sequence: Synthetic oligonucleotide
accacaauauauucuccag

SEQ ID NO: 638269 - RNA, 19 nt, Artificial Sequence
  Description of Artificial Sequence: Synthetic oligonucleotide
uguaaauuuguuucacuuu

SEQ ID NO: 638270 - RNA, 19 nt, Artificial Sequence
  Description of Artificial Sequence: Synthetic oligonucleotide
cuggcucaaaguuggaggg

SEQ ID NO: 638271 - RNA, 19 nt, Artificial Sequence
  Description of Artificial Sequence: Synthetic oligonucleotide
uaugaaccucggcugacag

SEQ ID NO: 638272 - RNA, 19 nt, Artificial Sequence
  Description of Artificial Sequence: Synthetic oligonucleotide
gacagguuauaguuugacc

SEQ ID NO: 638273 - RNA, 19 nt, Artificial Sequence
  Description of Artificial Sequence: Synthetic oligonucleotide
gauccuaugaaccucggcu

SEQ ID NO: 638274 - RNA, 19 nt, Artificial Sequence
  Description of Artificial Sequence: Synthetic oligonucleotide
uugauauuaaugucuugaa

SEQ ID NO: 638275 - RNA, 19 nt, Artificial Sequence
  Description of Artificial Sequence: Synthetic oligonucleotide
cuaauccacgaacagcacc

SEQ ID NO: 638276 - RNA, 19 nt, Artificial Sequence
  Description of Artificial Sequence: Synthetic oligonucleotide
acgacaguaaaauuagcau

SEQ ID NO: 638277 - RNA, 19 nt, Artificial Sequence
  Description of Artificial Sequence: Synthetic oligonucleotide
aagauuaagcaaaagucuu

SEQ ID NO: 638278 - RNA, 19 nt, Artificial Sequence
  Description of Artificial Sequence: Synthetic oligonucleotide
uccgaaucauucuuuauua

SEQ ID NO: 638279 - RNA, 19 nt, Artificial Sequence
  Description of Artificial Sequence: Synthetic oligonucleotide
aagucagguguugacuugg

SEQ ID NO: 638280 - RNA, 19 nt, Artificial Sequence
  Description of Artificial Sequence: Synthetic oligonucleotide
ugcugaucaucuuuacugc

SEQ ID NO: 638281 - RNA, 19 nt, Artificial Sequence
  Description of Artificial Sequence: Synthetic oligonucleotide
uccaguuugaaaguugcac

SEQ ID NO: 638282 - RNA, 19 nt, Artificial Sequence
  Description of Artificial Sequence: Synthetic oligonucleotide
guuuuaagcaagcacaggu

SEQ ID NO: 638283 - RNA, 19 nt, Artificial Sequence
  Description of Artificial Sequence: Synthetic oligonucleotide
uuacaguaugaaagucagg

SEQ ID NO: 638284 - RNA, 19 nt, Artificial Sequence
  Description of Artificial Sequence: Synthetic oligonucleotide
uccugauucaauuucugua

SEQ ID NO: 638285 - RNA, 19 nt, Artificial Sequence
  Description of Artificial Sequence: Synthetic oligonucleotide
uuuuacuuaauugcugauc

SEQ ID NO: 638286 - RNA, 19 nt, Artificial Sequence
  Description of Artificial Sequence: Synthetic oligonucleotide
uagugugaugugcuuugcg

SEQ ID NO: 638287 - RNA, 19 nt, Artificial Sequence
  Description of Artificial Sequence: Synthetic oligonucleotide
aauuuacguaguucuacuu

SEQ ID NO: 638288 - RNA, 19 nt, Artificial Sequence
  Description of Artificial Sequence: Synthetic oligonucleotide
caguuagacauuuuccaug

SEQ ID NO: 638289 - RNA, 19 nt, Artificial Sequence
  Description of Artificial Sequence: Synthetic oligonucleotide
auauauugguaucaagguu

SEQ ID NO: 638290 - RNA, 19 nt, Artificial Sequence
  Description of Artificial Sequence: Synthetic oligonucleotide
uuaagcaagcacagguggu

SEQ ID NO: 638291 - RNA, 19 nt, Artificial Sequence
  Description of Artificial Sequence: Synthetic oligonucleotide
uuagaagcuggaagcggag

SEQ ID NO: 638292 - RNA, 19 nt, Artificial Sequence
  Description of Artificial Sequence: Synthetic oligonucleotide
gacgacaguaaaauuagca

SEQ ID NO: 638293 - RNA, 19 nt, Artificial Sequence
  Description of Artificial Sequence: Synthetic oligonucleotide
ugacaguguagcuuuaaau

SEQ ID NO: 638294 - RNA, 19 nt, Artificial Sequence
  Description of Artificial Sequence: Synthetic oligonucleotide
uguugagcucggaauagac

SEQ ID NO: 638295 - RNA, 19 nt, Artificial Sequence
  Description of Artificial Sequence: Synthetic oligonucleotide
uauauacacccaucagagc

SEQ ID NO: 638296 - RNA, 19 nt, Artificial Sequence
  Description of Artificial Sequence: Synthetic oligonucleotide
agcgcaguaccauuucuag

SEQ ID NO: 638297 - RNA, 19 nt, Artificial Sequence
  Description of Artificial Sequence: Synthetic oligonucleotide
auuuagcagagccgcucgc

SEQ ID NO: 638298 - RNA, 19 nt, Artificial Sequence
  Description of Artificial Sequence: Synthetic oligonucleotide
acuuguaugggaucacagu

SEQ ID NO: 638299 - RNA, 19 nt, Artificial Sequence
  Description of Artificial Sequence: Synthetic oligonucleotide
ugagcaucaaugcucuaau

SEQ ID NO: 638300 - RNA, 19 nt, Artificial Sequence
  Description of Artificial Sequence: Synthetic oligonucleotide
aguggagaacugcauuuag

SEQ ID NO: 638301 - RNA, 19 nt, Artificial Sequence
  Description of Artificial Sequence: Synthetic oligonucleotide
cauauccugaacacguuuc

SEQ ID NO: 638302 - RNA, 19 nt, Artificial Sequence
  Description of Artificial Sequence: Synthetic oligonucleotide
acaguuccgaggauaaaac

SEQ ID NO: 638303 - RNA, 19 nt, Artificial Sequence
  Description of Artificial Sequence: Synthetic oligonucleotide
cucggaauagacagaaauc

SEQ ID NO: 638304 - RNA, 19 nt, Artificial Sequence
  Description of Artificial Sequence: Synthetic oligonucleotide
cauuuagcagagccgcucg

SEQ ID NO: 638305 - RNA, 19 nt, Artificial Sequence
  Description of Artificial Sequence: Synthetic oligonucleotide
agaaauagugugaugugcu

SEQ ID NO: 638306 - RNA, 19 nt, Artificial Sequence
  Description of Artificial Sequence: Synthetic oligonucleotide
uggucauguaccacaauau

SEQ ID NO: 638307 - RNA, 19 nt, Artificial Sequence
  Description of Artificial Sequence: Synthetic oligonucleotide
guugacucaggaaugucag

SEQ ID NO: 638308 - RNA, 19 nt, Artificial Sequence
  Description of Artificial Sequence: Synthetic oligonucleotide
cacuguaggacccaagguc

SEQ ID NO: 638309 - RNA, 19 nt, Artificial Sequence
  Description of Artificial Sequence: Synthetic oligonucleotide
auggucauguaccacaaua

SEQ ID NO: 638310 - RNA, 19 nt, Artificial Sequence
  Description of Artificial Sequence: Synthetic oligonucleotide
gcuuaagaaaaguuuuaag

SEQ ID NO: 638311 - RNA, 19 nt, Artificial Sequence
  Description of Artificial Sequence: Synthetic oligonucleotide
accacuugaucacuuccuc

SEQ ID NO: 638312 - RNA, 19 nt, Artificial Sequence
  Description of Artificial Sequence: Synthetic oligonucleotide
uuguccugauucaauuucu

SEQ ID NO: 638313 - RNA, 19 nt, Artificial Sequence
  Description of Artificial Sequence: Synthetic oligonucleotide
uguccugauucaauuucug

SEQ ID NO: 638314 - RNA, 19 nt, Artificial Sequence
  Description of Artificial Sequence: Synthetic oligonucleotide
caguuccgaggauaaaacg

SEQ ID NO: 638315 - RNA, 19 nt, Artificial Sequence
  Description of Artificial Sequence: Synthetic oligonucleotide
cugccuugagcaucaaugc

SEQ ID NO: 638316 - RNA, 19 nt, Artificial Sequence
  Description of Artificial Sequence: Synthetic oligonucleotide
auaguuugaccuuguuuca

SEQ ID NO: 638317 - RNA, 19 nt, Artificial Sequence
  Description of Artificial Sequence: Synthetic oligonucleotide
ccagucuacaaaauggggc

SEQ ID NO: 638318 - RNA, 19 nt, Artificial Sequence
  Description of Artificial Sequence: Synthetic oligonucleotide
cugcauuuagcagagccgc

SEQ ID NO: 638319 - RNA, 19 nt, Artificial Sequence
  Description of Artificial Sequence: Synthetic oligonucleotide
acaguuagacauuuuccau

SEQ ID NO: 638320 - RNA, 19 nt, Artificial Sequence
  Description of Artificial Sequence: Synthetic oligonucleotide
acuacgucuccaauuacag

SEQ ID NO: 638321 - RNA, 19 nt, Artificial Sequence
  Description of Artificial Sequence: Synthetic oligonucleotide
aguuccgaggauaaaacga

SEQ ID NO: 638322 - RNA, 19 nt, Artificial Sequence
  Description of Artificial Sequence: Synthetic oligonucleotide
aggauaaaacgauggcucu

SEQ ID NO: 638323 - RNA, 19 nt, Artificial Sequence
  Description of Artificial Sequence: Synthetic oligonucleotide
uuauggucauguaccacaa

SEQ ID NO: 638324 - RNA, 19 nt, Artificial Sequence
  Description of Artificial Sequence: Synthetic oligonucleotide
aguuugaccuuguuucacu

SEQ ID NO: 638325 - RNA, 19 nt, Artificial Sequence
  Description of Artificial Sequence: Synthetic oligonucleotide
uguagcucccgaaaacuua

SEQ ID NO: 638326 - RNA, 19 nt, Artificial Sequence
  Description of Artificial Sequence: Synthetic oligonucleotide
aguuuuaagcaagcacagg

SEQ ID NO: 638327 - RNA, 19 nt, Artificial Sequence
  Description of Artificial Sequence: Synthetic oligonucleotide
uuguaugggaucacaguua

SEQ ID NO: 638328 - RNA, 19 nt, Artificial Sequence
  Description of Artificial Sequence: Synthetic oligonucleotide
caaggucauauccugaaca

SEQ ID NO: 638329 - RNA, 19 nt, Artificial Sequence
  Description of Artificial Sequence: Synthetic oligonucleotide
agagacgauacuucacacu

SEQ ID NO: 638330 - RNA, 19 nt, Artificial Sequence
  Description of Artificial Sequence: Synthetic oligonucleotide
cuuagaagcuggaagcgga

SEQ ID NO: 638331 - RNA, 19 nt, Artificial Sequence
  Description of Artificial Sequence: Synthetic oligonucleotide
uccgucacuaggaacuggu

SEQ ID NO: 638332 - RNA, 19 nt, Artificial Sequence
  Description of Artificial Sequence: Synthetic oligonucleotide
cagucuacaaaauggggca

SEQ ID NO: 638333 - RNA, 19 nt, Artificial Sequence
  Description of Artificial Sequence: Synthetic oligonucleotide
aguggauccuaugaaccuc

SEQ ID NO: 638334 - RNA, 19 nt, Artificial Sequence
  Description of Artificial Sequence: Synthetic oligonucleotide
uuugaccuuguuucacuga

SEQ ID NO: 638335 - RNA, 19 nt, Artificial Sequence
  Description of Artificial Sequence: Synthetic oligonucleotide
ucacuguacgcugagugga

SEQ ID NO: 638336 - RNA, 19 nt, Artificial Sequence
  Description of Artificial Sequence: Synthetic oligonucleotide
ucauauccugaacacguuu

SEQ ID NO: 638337 - RNA, 19 nt, Artificial Sequence
  Description of Artificial Sequence: Synthetic oligonucleotide
agacacagcuguaacaucu

SEQ ID NO: 638338 - RNA, 19 nt, Artificial Sequence
  Description of Artificial Sequence: Synthetic oligonucleotide
guaguucuacuucuaugug

SEQ ID NO: 638339 - RNA, 19 nt, Artificial Sequence
  Description of Artificial Sequence: Synthetic oligonucleotide
uugagcaucaaugcucuaa

SEQ ID NO: 638340 - RNA, 19 nt, Artificial Sequence
  Description of Artificial Sequence: Synthetic oligonucleotide
uguuccauacggagaggca

SEQ ID NO: 638341 - RNA, 19 nt, Artificial Sequence
  Description of Artificial Sequence: Synthetic oligonucleotide
gcuauugucuuccggacug

SEQ ID NO: 638342 - RNA, 19 nt, Artificial Sequence
  Description of Artificial Sequence: Synthetic oligonucleotide
uuaagacgacaguaaaauu

SEQ ID NO: 638343 - RNA, 19 nt, Artificial Sequence
  Description of Artificial Sequence: Synthetic oligonucleotide
uagcauugccacuacacuu

SEQ ID NO: 638344 - RNA, 19 nt, Artificial Sequence
  Description of Artificial Sequence: Synthetic oligonucleotide
uuacuucaaucuuguugag

SEQ ID NO: 638345 - RNA, 19 nt, Artificial Sequence
  Description of Artificial Sequence: Synthetic oligonucleotide
uguuuggaugagcugcguc

SEQ ID NO: 638346 - RNA, 19 nt, Artificial Sequence
  Description of Artificial Sequence: Synthetic oligonucleotide
ugcggggauguccuucagg

SEQ ID NO: 638347 - RNA, 19 nt, Artificial Sequence
  Description of Artificial Sequence: Synthetic oligonucleotide
uacuucaaucuuguugagc

SEQ ID NO: 638348 - RNA, 19 nt, Artificial Sequence
  Description of Artificial Sequence: Synthetic oligonucleotide
uuugcggggauguccuuca

SEQ ID NO: 638349 - RNA, 19 nt, Artificial Sequence
  Description of Artificial Sequence: Synthetic oligonucleotide
acuguaggacccaagguca

SEQ ID NO: 638350 - RNA, 19 nt, Artificial Sequence
  Description of Artificial Sequence: Synthetic oligonucleotide
ugaccuuguuucacugacc

SEQ ID NO: 638351 - RNA, 19 nt, Artificial Sequence
  Description of Artificial Sequence: Synthetic oligonucleotide
gaguacaguccucuaccgc

SEQ ID NO: 638352 - RNA, 19 nt, Artificial Sequence
  Description of Artificial Sequence: Synthetic oligonucleotide
ucuaauccacgaacagcac

SEQ ID NO: 638353 - RNA, 19 nt, Artificial Sequence
  Description of Artificial Sequence: Synthetic oligonucleotide
uauacacccaucagagcuu

SEQ ID NO: 638354 - RNA, 19 nt, Artificial Sequence
  Description of Artificial Sequence: Synthetic oligonucleotide
cugaacacguuucccaguc

SEQ ID NO: 638355 - RNA, 19 nt, Artificial Sequence
  Description of Artificial Sequence: Synthetic oligonucleotide
uacguaguucuacuucuau

SEQ ID NO: 638356 - RNA, 19 nt, Artificial Sequence
  Description of Artificial Sequence: Synthetic oligonucleotide
aguucuugacugcucugca

SEQ ID NO: 638357 - RNA, 19 nt, Artificial Sequence
  Description of Artificial Sequence: Synthetic oligonucleotide
gacgauacuucacacuugu

SEQ ID NO: 638358 - RNA, 19 nt, Artificial Sequence
  Description of Artificial Sequence: Synthetic oligonucleotide
ucuucggaacagcaccagu

SEQ ID NO: 638359 - RNA, 19 nt, Artificial Sequence
  Description of Artificial Sequence: Synthetic oligonucleotide
ugcgucagacaguuccgag

SEQ ID NO: 638360 - RNA, 19 nt, Artificial Sequence
  Description of Artificial Sequence: Synthetic oligonucleotide
ugcuacuacgucuccaauu

SEQ ID NO: 638361 - RNA, 19 nt, Artificial Sequence
  Description of Artificial Sequence: Synthetic oligonucleotide
caucugcacaucugugugc

SEQ ID NO: 638362 - RNA, 19 nt, Artificial Sequence
  Description of Artificial Sequence: Synthetic oligonucleotide
ggaguacaguccucuaccg

SEQ ID NO: 638363 - RNA, 19 nt, Artificial Sequence
  Description of Artificial Sequence: Synthetic oligonucleotide
aauggaguacaguccucua

SEQ ID NO: 638364 - RNA, 19 nt, Artificial Sequence
  Description of Artificial Sequence: Synthetic oligonucleotide
ucggaacagcaccaguggu

SEQ ID NO: 638365 - RNA, 19 nt, Artificial Sequence
  Description of Artificial Sequence: Synthetic oligonucleotide
uggauccuaugaaccucgg

SEQ ID NO: 638366 - RNA, 19 nt, Artificial Sequence
  Description of Artificial Sequence: Synthetic oligonucleotide
uaucaagguuucauauaua

SEQ ID NO: 638367 - RNA, 19 nt, Artificial Sequence
  Description of Artificial Sequence: Synthetic oligonucleotide
agacgacaguaaaauuagc

SEQ ID NO: 638368 - RNA, 19 nt, Artificial Sequence
  Description of Artificial Sequence: Synthetic oligonucleotide
cagagacgauacuucacac

SEQ ID NO: 638369 - RNA, 19 nt, Artificial Sequence
  Description of Artificial Sequence: Synthetic oligonucleotide
ugagcugcgucagacaguu

SEQ ID NO: 638370 - RNA, 19 nt, Artificial Sequence
  Description of Artificial Sequence: Synthetic oligonucleotide
uuuccgaaucauucuuuau

SEQ ID NO: 638371 - RNA, 19 nt, Artificial Sequence
  Description of Artificial Sequence: Synthetic oligonucleotide
uuacuuaauugcugaucau

SEQ ID NO: 638372 - RNA, 19 nt, Artificial Sequence
  Description of Artificial Sequence: Synthetic oligonucleotide
agcuauugucuuccggacu

SEQ ID NO: 638373 - RNA, 19 nt, Artificial Sequence
  Description of Artificial Sequence: Synthetic oligonucleotide
gcaucaaugcucuaauuaa

SEQ ID NO: 638374 - RNA, 19 nt, Artificial Sequence
  Description of Artificial Sequence: Synthetic oligonucleotide
agaguucuugacugcucug

SEQ ID NO: 638375 - RNA, 19 nt, Artificial Sequence
  Description of Artificial Sequence: Synthetic oligonucleotide
cacgaacagcaccucuucg

SEQ ID NO: 638376 - RNA, 19 nt, Artificial Sequence
  Description of Artificial Sequence: Synthetic oligonucleotide
guugcuugaauaccaugaa

SEQ ID NO: 638377 - RNA, 19 nt, Artificial Sequence
  Description of Artificial Sequence: Synthetic oligonucleotide
agucaugguagcauugcca

SEQ ID NO: 638378 - RNA, 19 nt, Artificial Sequence
  Description of Artificial Sequence: Synthetic oligonucleotide
auaccagaguugcccacug

SEQ ID NO: 638379 - RNA, 19 nt, Artificial Sequence
  Description of Artificial Sequence: Synthetic oligonucleotide
ccauauugauauuaauguc

SEQ ID NO: 638380 - RNA, 19 nt, Artificial Sequence
  Description of Artificial Sequence: Synthetic oligonucleotide
aguuugaaaguugcacacu

SEQ ID NO: 638381 - RNA, 19 nt, Artificial Sequence
  Description of Artificial Sequence: Synthetic oligonucleotide
agccgcucgcuuuggugcc

SEQ ID NO: 638382 - RNA, 19 nt, Artificial Sequence
  Description of Artificial Sequence: Synthetic oligonucleotide
ugccacuacacuucaggua

SEQ ID NO: 638383 - RNA, 19 nt, Artificial Sequence
  Description of Artificial Sequence: Synthetic oligonucleotide
cucuagggcaaucuccauc

SEQ ID NO: 638384 - RNA, 19 nt, Artificial Sequence
  Description of Artificial Sequence: Synthetic oligonucleotide
ucacuaggaacuggucugc

SEQ ID NO: 638385 - RNA, 19 nt, Artificial Sequence
  Description of Artificial Sequence: Synthetic oligonucleotide
guagcucccgaaaacuuac

SEQ ID NO: 638386 - RNA, 19 nt, Artificial Sequence
  Description of Artificial Sequence: Synthetic oligonucleotide
ugcauuuagcagagccgcu

SEQ ID NO: 638387 - RNA, 19 nt, Artificial Sequence
  Description of Artificial Sequence: Synthetic oligonucleotide
gaacacguuucccagucua

SEQ ID NO: 638388 - RNA, 19 nt, Artificial Sequence
  Description of Artificial Sequence: Synthetic oligonucleotide
ugauaccagaguugcccac

SEQ ID NO: 638389 - RNA, 19 nt, Artificial Sequence
  Description of Artificial Sequence: Synthetic oligonucleotide
gggagaugaauuuuccauc

SEQ ID NO: 638390 - RNA, 19 nt, Artificial Sequence
  Description of Artificial Sequence: Synthetic oligonucleotide
cauguagcauaaauaauau

SEQ ID NO: 638391 - RNA, 19 nt, Artificial Sequence
  Description of Artificial Sequence: Synthetic oligonucleotide
uggacagguuauaguuuga

SEQ ID NO: 638392 - RNA, 19 nt, Artificial Sequence
  Description of Artificial Sequence: Synthetic oligonucleotide
cagcuauugucuuccggac

SEQ ID NO: 638393 - RNA, 19 nt, Artificial Sequence
  Description of Artificial Sequence: Synthetic oligonucleotide
uuaaaacagguugcuugaa

SEQ ID NO: 638394 - RNA, 19 nt, Artificial Sequence
  Description of Artificial Sequence: Synthetic oligonucleotide
acgcugaguggagaacugc

SEQ ID NO: 638395 - RNA, 19 nt, Artificial Sequence
  Description of Artificial Sequence: Synthetic oligonucleotide
gaguguguauuugcuuaag

SEQ ID NO: 638396 - RNA, 19 nt, Artificial Sequence
  Description of Artificial Sequence: Synthetic oligonucleotide
uuagcagagccgcucgcuu

SEQ ID NO: 638397 - RNA, 19 nt, Artificial Sequence
  Description of Artificial Sequence: Synthetic oligonucleotide
ucuaccgcucuuguccuga

SEQ ID NO: 638398 - RNA, 19 nt, Artificial Sequence
  Description of Artificial Sequence: Synthetic oligonucleotide
aggacugcuacauggucuu

SEQ ID NO: 638399 - RNA, 19 nt, Artificial Sequence
  Description of Artificial Sequence: Synthetic oligonucleotide
cacacgugcaguaaaauuu

SEQ ID NO: 638400 - RNA, 19 nt, Artificial Sequence
  Description of Artificial Sequence: Synthetic oligonucleotide
cuguccgucacuaggaacu

SEQ ID NO: 638401 - RNA, 19 nt, Artificial Sequence
  Description of Artificial Sequence: Synthetic oligonucleotide
cuuguaugggaucacaguu

SEQ ID NO: 638402 - RNA, 19 nt, Artificial Sequence
  Description of Artificial Sequence: Synthetic oligonucleotide
gcgucagacaguuccgagg

SEQ ID NO: 638403 - RNA, 19 nt, Artificial Sequence
  Description of Artificial Sequence: Synthetic oligonucleotide
uguacgcugaguggagaac

SEQ ID NO: 638404 - RNA, 19 nt, Artificial Sequence
  Description of Artificial Sequence: Synthetic oligonucleotide
gucagguguugacuuggcc

SEQ ID NO: 638405 - RNA, 19 nt, Artificial Sequence
  Description of Artificial Sequence: Synthetic oligonucleotide
uuccauacggagaggcauu

SEQ ID NO: 638406 - RNA, 19 nt, Artificial Sequence
  Description of Artificial Sequence: Synthetic oligonucleotide
gauggucuccuuugcugca

SEQ ID NO: 638407 - RNA, 19 nt, Artificial Sequence
  Description of Artificial Sequence: Synthetic oligonucleotide
acaacugccuugagcauca

SEQ ID NO: 638408 - RNA, 19 nt, Artificial Sequence
  Description of Artificial Sequence: Synthetic oligonucleotide
ugcccaaggguuucugauc

SEQ ID NO: 638409 - RNA, 19 nt, Artificial Sequence
  Description of Artificial Sequence: Synthetic oligonucleotide
gcuacuacgucuccaauua

SEQ ID NO: 638410 - RNA, 19 nt, Artificial Sequence
  Description of Artificial Sequence: Synthetic oligonucleotide
agucagguguugacuuggc

SEQ ID NO: 638411 - RNA, 19 nt, Artificial Sequence
  Description of Artificial Sequence: Synthetic oligonucleotide
gucuacaaaauggggcaug

SEQ ID NO: 638412 - RNA, 19 nt, Artificial Sequence
  Description of Artificial Sequence: Synthetic oligonucleotide
aaccucggcugacagugua

SEQ ID NO: 638413 - RNA, 19 nt, Artificial Sequence
  Description of Artificial Sequence: Synthetic oligonucleotide
gccgcuguccgucacuagg

SEQ ID NO: 638414 - RNA, 19 nt, Artificial Sequence
  Description of Artificial Sequence: Synthetic oligonucleotide
gcuugagcuuuccaagagc

SEQ ID NO: 638415 - RNA, 19 nt, Artificial Sequence
  Description of Artificial Sequence: Synthetic oligonucleotide
cacaacugccuugagcauc

SEQ ID NO: 638416 - RNA, 19 nt, Artificial Sequence
  Description of Artificial Sequence: Synthetic oligonucleotide
cugaccacuugaucacuuc

SEQ ID NO: 638417 - RNA, 19 nt, Artificial Sequence
  Description of Artificial Sequence: Synthetic oligonucleotide
uauggucauguaccacaau

SEQ ID NO: 638418 - RNA, 19 nt, Artificial Sequence
  Description of Artificial Sequence: Synthetic oligonucleotide
gaaagagauggucuccuuu

SEQ ID NO: 638419 - RNA, 19 nt, Artificial Sequence
  Description of Artificial Sequence: Synthetic oligonucleotide
guugagcucggaauagaca

SEQ ID NO: 638420 - RNA, 19 nt, Artificial Sequence
  Description of Artificial Sequence: Synthetic oligonucleotide
agggcuuauuccaggaaga

SEQ ID NO: 638421 - RNA, 19 nt, Artificial Sequence
  Description of Artificial Sequence: Synthetic oligonucleotide
gucauguaccacaauauau

SEQ ID NO: 638422 - RNA, 19 nt, Artificial Sequence
  Description of Artificial Sequence: Synthetic oligonucleotide
acacguuucccagucuaca

SEQ ID NO: 638423 - RNA, 19 nt, Artificial Sequence
  Description of Artificial Sequence: Synthetic oligonucleotide
agcucccgaaaacuuacuu

SEQ ID NO: 638424 - RNA, 19 nt, Artificial Sequence
  Description of Artificial Sequence: Synthetic oligonucleotide
cagguguugacuuggccaa

SEQ ID NO: 638425 - RNA, 19 nt, Artificial Sequence
  Description of Artificial Sequence: Synthetic oligonucleotide
ucggcugacaguguagcuu

SEQ ID NO: 638426 - RNA, 19 nt, Artificial Sequence
  Description of Artificial Sequence: Synthetic oligonucleotide
uauugguaucaagguuuca

SEQ ID NO: 638427 - RNA, 19 nt, Artificial Sequence
  Description of Artificial Sequence: Synthetic oligonucleotide
cuccaucaagccagggcac

SEQ ID NO: 638428 - RNA, 19 nt, Artificial Sequence
  Description of Artificial Sequence: Synthetic oligonucleotide
guaagaguguguauuugcu

SEQ ID NO: 638429 - RNA, 19 nt, Artificial Sequence
  Description of Artificial Sequence: Synthetic oligonucleotide
cuacuacgucuccaauuac

SEQ ID NO: 638430 - RNA, 19 nt, Artificial Sequence
  Description of Artificial Sequence: Synthetic oligonucleotide
cacauguguuuggaugagc

SEQ ID NO: 638431 - RNA, 19 nt, Artificial Sequence
  Description of Artificial Sequence: Synthetic oligonucleotide
gguugacucaggaauguca

SEQ ID NO: 638432 - RNA, 19 nt, Artificial Sequence
  Description of Artificial Sequence: Synthetic oligonucleotide
uguccgucacuaggaacug

SEQ ID NO: 638433 - RNA, 19 nt, Artificial Sequence
  Description of Artificial Sequence: Synthetic oligonucleotide
ucugcaagcaaggccucua

SEQ ID NO: 638434 - RNA, 19 nt, Artificial Sequence
  Description of Artificial Sequence: Synthetic oligonucleotide
ccucuaauccacgaacagc

SEQ ID NO: 638435 - RNA, 19 nt, Artificial Sequence
  Description of Artificial Sequence: Synthetic oligonucleotide
uccauacggagaggcauuc

SEQ ID NO: 638436 - RNA, 19 nt, Artificial Sequence
  Description of Artificial Sequence: Synthetic oligonucleotide
cauacggagaggcauuccu

SEQ ID NO: 638437 - RNA, 19 nt, Artificial Sequence
  Description of Artificial Sequence: Synthetic oligonucleotide
uccacacgugcaguaaaau

SEQ ID NO: 638438 - RNA, 19 nt, Artificial Sequence
  Description of Artificial Sequence: Synthetic oligonucleotide
ggucauauccugaacacgu

SEQ ID NO: 638439 - RNA, 19 nt, Artificial Sequence
  Description of Artificial Sequence: Synthetic oligonucleotide
uagcucccgaaaacuuacu

SEQ ID NO: 638440 - RNA, 19 nt, Artificial Sequence
  Description of Artificial Sequence: Synthetic oligonucleotide
ccgaggauaaaacgauggc

SEQ ID NO: 638441 - RNA, 19 nt, Artificial Sequence
  Description of Artificial Sequence: Synthetic oligonucleotide
cuuugcggggauguccuuc

SEQ ID NO: 638442 - RNA, 19 nt, Artificial Sequence
  Description of Artificial Sequence: Synthetic oligonucleotide
ggauccuaugaaccucggc

SEQ ID NO: 638443 - RNA, 19 nt, Artificial Sequence
  Description of Artificial Sequence: Synthetic oligonucleotide
ggggcauggaaugaguguc

SEQ ID NO: 638444 - RNA, 19 nt, Artificial Sequence
  Description of Artificial Sequence: Synthetic oligonucleotide
gauaccagaguugcccacu

SEQ ID NO: 638445 - RNA, 19 nt, Artificial Sequence
  Description of Artificial Sequence: Synthetic oligonucleotide
acacccaucagagcuuaau

SEQ ID NO: 638446 - RNA, 19 nt, Artificial Sequence
  Description of Artificial Sequence: Synthetic oligonucleotide
cuuagaguucuugacugcu

SEQ ID NO: 638447 - RNA, 19 nt, Artificial Sequence
  Description of Artificial Sequence: Synthetic oligonucleotide
ccggacugaagccauuuug

SEQ ID NO: 638448 - RNA, 19 nt, Artificial Sequence
  Description of Artificial Sequence: Synthetic oligonucleotide
ggacagguuauaguuugac

SEQ ID NO: 638449 - RNA, 19 nt, Artificial Sequence
  Description of Artificial Sequence: Synthetic oligonucleotide
gcucuaauuaaccuaugau

SEQ ID NO: 638450 - RNA, 19 nt, Artificial Sequence
  Description of Artificial Sequence: Synthetic oligonucleotide
guccugauucaauuucugu

SEQ ID NO: 638451 - RNA, 19 nt, Artificial Sequence
  Description of Artificial Sequence: Synthetic oligonucleotide
ucggugucacuugaauaua

SEQ ID NO: 638452 - RNA, 19 nt, Artificial Sequence
  Description of Artificial Sequence: Synthetic oligonucleotide
gugagcgcaguaccauuuc

SEQ ID NO: 638453 - RNA, 19 nt, Artificial Sequence
  Description of Artificial Sequence: Synthetic oligonucleotide
uugcggggauguccuucag

SEQ ID NO: 638454 - RNA, 19 nt, Artificial Sequence
  Description of Artificial Sequence: Synthetic oligonucleotide
uggugagcgcaguaccauu

SEQ ID NO: 638455 - RNA, 19 nt, Artificial Sequence
  Description of Artificial Sequence: Synthetic oligonucleotide
guuccgaggauaaaacgau

SEQ ID NO: 638456 - RNA, 19 nt, Artificial Sequence
  Description of Artificial Sequence: Synthetic oligonucleotide
gggcuuauuccaggaagag

SEQ ID NO: 638457 - RNA, 19 nt, Artificial Sequence
  Description of Artificial Sequence: Synthetic oligonucleotide
cggaauagacagaaaucug

SEQ ID NO: 638458 - RNA, 19 nt, Artificial Sequence
  Description of Artificial Sequence: Synthetic oligonucleotide
cuguacgcugaguggagaa

SEQ ID NO: 638459 - RNA, 19 nt, Artificial Sequence
  Description of Artificial Sequence: Synthetic oligonucleotide
gcuacauggucuugaucca

SEQ ID NO: 638460 - RNA, 19 nt, Artificial Sequence
  Description of Artificial Sequence: Synthetic oligonucleotide
gaguggagaacugcauuua

SEQ ID NO: 638461 - RNA, 19 nt, Artificial Sequence
  Description of Artificial Sequence: Synthetic oligonucleotide
cugcuacauggucuugauc

SEQ ID NO: 638462 - RNA, 19 nt, Artificial Sequence
  Description of Artificial Sequence: Synthetic oligonucleotide
gcugcgucagacaguuccg

SEQ ID NO: 638463 - RNA, 19 nt, Artificial Sequence
  Description of Artificial Sequence: Synthetic oligonucleotide
gcgcaguaccauuucuagc

SEQ ID NO: 638464 - RNA, 19 nt, Artificial Sequence
  Description of Artificial Sequence: Synthetic oligonucleotide
guccgucacuaggaacugg

SEQ ID NO: 638465 - RNA, 19 nt, Artificial Sequence
  Description of Artificial Sequence: Synthetic oligonucleotide
cauccacacgugcaguaaa

SEQ ID NO: 638466 - RNA, 19 nt, Artificial Sequence
  Description of Artificial Sequence: Synthetic oligonucleotide
uuccggacugaagccauuu

SEQ ID NO: 638467 - RNA, 19 nt, Artificial Sequence
  Description of Artificial Sequence: Synthetic oligonucleotide
guacgcugaguggagaacu

SEQ ID NO: 638468 - RNA, 19 nt, Artificial Sequence
  Description of Artificial Sequence: Synthetic oligonucleotide
cuaugaaccucggcugaca

SEQ ID NO: 638469 - RNA, 19 nt, Artificial Sequence
  Description of Artificial Sequence: Synthetic oligonucleotide
auacacccaucagagcuua

SEQ ID NO: 638470 - RNA, 19 nt, Artificial Sequence
  Description of Artificial Sequence: Synthetic oligonucleotide
uaaugacaccagggagaug

SEQ ID NO: 638471 - RNA, 19 nt, Artificial Sequence
  Description of Artificial Sequence: Synthetic oligonucleotide
caauggaguacaguccucu

SEQ ID NO: 638472 - RNA, 19 nt, Artificial Sequence
  Description of Artificial Sequence: Synthetic oligonucleotide
gcuguccgucacuaggaac

SEQ ID NO: 638473 - RNA, 19 nt, Artificial Sequence
  Description of Artificial Sequence: Synthetic oligonucleotide
gcauuuagcagagccgcuc

SEQ ID NO: 638474 - RNA, 19 nt, Artificial Sequence
  Description of Artificial Sequence: Synthetic oligonucleotide
gagcgcaguaccauuucua

SEQ ID NO: 638475 - RNA, 19 nt, Artificial Sequence
  Description of Artificial Sequence: Synthetic oligonucleotide
ugugugcucuagggcaauc

SEQ ID NO: 638476 - RNA, 19 nt, Artificial Sequence
  Description of Artificial Sequence: Synthetic oligonucleotide
accucggcugacaguguag

SEQ ID NO: 638477 - RNA, 19 nt, Artificial Sequence
  Description of Artificial Sequence: Synthetic oligonucleotide
auccacacgugcaguaaaa

SEQ ID NO: 638478 - RNA, 19 nt, Artificial Sequence
  Description of Artificial Sequence: Synthetic oligonucleotide
auacggagaggcauuccuu

SEQ ID NO: 638479 - RNA, 19 nt, Artificial Sequence
  Description of Artificial Sequence: Synthetic oligonucleotide
ccaugauaccagaguugcc

SEQ ID NO: 638480 - RNA, 19 nt, Artificial Sequence
  Description of Artificial Sequence: Synthetic oligonucleotide
gucccaggacugcuacaug

SEQ ID NO: 638481 - RNA, 19 nt, Artificial Sequence
  Description of Artificial Sequence: Synthetic oligonucleotide
agcggaggucccaggacug

SEQ ID NO: 638482 - RNA, 19 nt, Artificial Sequence
  Description of Artificial Sequence: Synthetic oligonucleotide
cagguuauaguuugaccuu

SEQ ID NO: 638483 - RNA, 19 nt, Artificial Sequence
  Description of Artificial Sequence: Synthetic oligonucleotide
guuagacauuuuccaugua

SEQ ID NO: 638484 - RNA, 19 nt, Artificial Sequence
  Description of Artificial Sequence: Synthetic oligonucleotide
gaacugcauuuagcagagc

SEQ ID NO: 638485 - RNA, 19 nt, Artificial Sequence
  Description of Artificial Sequence: Synthetic oligonucleotide
guagaggaccacgguccug

SEQ ID NO: 638486 - RNA, 19 nt, Artificial Sequence
  Description of Artificial Sequence: Synthetic oligonucleotide
uacacccaucagagcuuaa

SEQ ID NO: 638487 - RNA, 19 nt, Artificial Sequence
  Description of Artificial Sequence: Synthetic oligonucleotide
cucuaccgcucuuguccug

SEQ ID NO: 638488 - RNA, 19 nt, Artificial Sequence
  Description of Artificial Sequence: Synthetic oligonucleotide
accagugguucugucuuuu

SEQ ID NO: 638489 - RNA, 19 nt, Artificial Sequence
  Description of Artificial Sequence: Synthetic oligonucleotide
gcucgcuuuggugccacag

SEQ ID NO: 638490 - RNA, 19 nt, Artificial Sequence
  Description of Artificial Sequence: Synthetic oligonucleotide
cugcacaucugugugcucu

SEQ ID NO: 638491 - RNA, 19 nt, Artificial Sequence
  Description of Artificial Sequence: Synthetic oligonucleotide
gcacauguguuuggaugag

SEQ ID NO: 638492 - RNA, 19 nt, Artificial Sequence
  Description of Artificial Sequence: Synthetic oligonucleotide
cgucagacaguuccgagga

SEQ ID NO: 638493 - RNA, 19 nt, Artificial Sequence
  Description of Artificial Sequence: Synthetic oligonucleotide
cacgguccugccgcugucc

SEQ ID NO: 638494 - RNA, 19 nt, Artificial Sequence
  Description of Artificial Sequence: Synthetic oligonucleotide
guccugcuacuacgucucc

SEQ ID NO: 638495 - RNA, 19 nt, Artificial Sequence
  Description of Artificial Sequence: Synthetic oligonucleotide
cugaguggagaacugcauu

SEQ ID NO: 638496 - RNA, 19 nt, Artificial Sequence
  Description of Artificial Sequence: Synthetic oligonucleotide
cuauugucuuccggacuga

SEQ ID NO: 638497 - RNA, 19 nt, Artificial Sequence
  Description of Artificial Sequence: Synthetic oligonucleotide
ccucggcugacaguguagc

SEQ ID NO: 638498 - RNA, 19 nt, Artificial Sequence
  Description of Artificial Sequence: Synthetic oligonucleotide
cccaaggucauauccugaa

SEQ ID NO: 638499 - RNA, 19 nt, Artificial Sequence
  Description of Artificial Sequence: Synthetic oligonucleotide
gagcaucaaugcucuaauu

SEQ ID NO: 638500 - RNA, 19 nt, Artificial Sequence
  Description of Artificial Sequence: Synthetic oligonucleotide
ccuuauggucauguaccac

SEQ ID NO: 638501 - RNA, 19 nt, Artificial Sequence
  Description of Artificial Sequence: Synthetic oligonucleotide
gcaagcacaggugguugac

SEQ ID NO: 638502 - RNA, 19 nt, Artificial Sequence
  Description of Artificial Sequence: Synthetic oligonucleotide
ggcucaaaguuggagggcu

SEQ ID NO: 638503 - RNA, 19 nt, Artificial Sequence
  Description of Artificial Sequence: Synthetic oligonucleotide
ccaaguaagaguguguauu

SEQ ID NO: 638504 - RNA, 19 nt, Artificial Sequence
  Description of Artificial Sequence: Synthetic oligonucleotide
ccuguaaauuuguuucacu

SEQ ID NO: 638505 - RNA, 19 nt, Artificial Sequence
  Description of Artificial Sequence: Synthetic oligonucleotide
ccuaugaaccucggcugac

SEQ ID NO: 638506 - RNA, 19 nt, Artificial Sequence
  Description of Artificial Sequence: Synthetic oligonucleotide
cugcgucagacaguuccga

SEQ ID NO: 638507 - RNA, 19 nt, Artificial Sequence
  Description of Artificial Sequence: Synthetic oligonucleotide
cauggucuugauccaggau

SEQ ID NO: 638508 - RNA, 19 nt, Artificial Sequence
  Description of Artificial Sequence: Synthetic oligonucleotide
ggcuuauuccaggaagagu

SEQ ID NO: 638509 - RNA, 19 nt, Artificial Sequence
  Description of Artificial Sequence: Synthetic oligonucleotide
cagguugcuugaauaccau

SEQ ID NO: 638510 - RNA, 19 nt, Artificial Sequence
  Description of Artificial Sequence: Synthetic oligonucleotide
cuagggcaaucuccaucaa

SEQ ID NO: 638511 - RNA, 19 nt, Artificial Sequence
  Description of Artificial Sequence: Synthetic oligonucleotide
acgauacuucacacuugua

SEQ ID NO: 638512 - RNA, 19 nt, Artificial Sequence
  Description of Artificial Sequence: Synthetic oligonucleotide
cucugcacuguaggaccca

SEQ ID NO: 638513 - RNA, 19 nt, Artificial Sequence
  Description of Artificial Sequence: Synthetic oligonucleotide
cgaggauaaaacgauggcu

SEQ ID NO: 638514 - RNA, 19 nt, Artificial Sequence
  Description of Artificial Sequence: Synthetic oligonucleotide
ccgucacuaggaacugguc

SEQ ID NO: 638515 - RNA, 19 nt, Artificial Sequence
  Description of Artificial Sequence: Synthetic oligonucleotide
gucauauccugaacacguu

SEQ ID NO: 638516 - RNA, 19 nt, Artificial Sequence
  Description of Artificial Sequence: Synthetic oligonucleotide
ccgcuguccgucacuagga

SEQ ID NO: 638517 - RNA, 19 nt, Artificial Sequence
  Description of Artificial Sequence: Synthetic oligonucleotide
gcauuccuuagaagcugga

SEQ ID NO: 638518 - RNA, 19 nt, Artificial Sequence
  Description of Artificial Sequence: Synthetic oligonucleotide
caagagcgccugccagaga

SEQ ID NO: 638519 - RNA, 19 nt, Artificial Sequence
  Description of Artificial Sequence: Synthetic oligonucleotide
ggugagcgcaguaccauuu

SEQ ID NO: 638520 - RNA, 19 nt, Artificial Sequence
  Description of Artificial Sequence: Synthetic oligonucleotide
ccacacgugcaguaaaauu

SEQ ID NO: 638521 - RNA, 19 nt, Artificial Sequence
  Description of Artificial Sequence: Synthetic oligonucleotide
guguuuggaugagcugcgu

SEQ ID NO: 638522 - RNA, 19 nt, Artificial Sequence
  Description of Artificial Sequence: Synthetic oligonucleotide
cccgaaaacuuacuucaau

SEQ ID NO: 638523 - RNA, 19 nt, Artificial Sequence
  Description of Artificial Sequence: Synthetic oligonucleotide
gaaccucggcugacagugu

SEQ ID NO: 638524 - RNA, 19 nt, Artificial Sequence
  Description of Artificial Sequence: Synthetic oligonucleotide
gcggaggucccaggacugc

SEQ ID NO: 638525 - RNA, 19 nt, Artificial Sequence
  Description of Artificial Sequence: Synthetic oligonucleotide
cacugcuggacagguuaua

SEQ ID NO: 638526 - RNA, 19 nt, Artificial Sequence
  Description of Artificial Sequence: Synthetic oligonucleotide
cugcuacuacgucuccaau

SEQ ID NO: 638527 - RNA, 19 nt, Artificial Sequence
  Description of Artificial Sequence: Synthetic oligonucleotide
cgccugccagagacgauac

SEQ ID NO: 638528 - RNA, 19 nt, Artificial Sequence
  Description of Artificial Sequence: Synthetic oligonucleotide
cugccgcuguccgucacua

SEQ ID NO: 638529 - RNA, 19 nt, Artificial Sequence
  Description of Artificial Sequence: Synthetic oligonucleotide
ccauccacacgugcaguaa

SEQ ID NO: 638530 - RNA, 19 nt, Artificial Sequence
  Description of Artificial Sequence: Synthetic oligonucleotide
agcgccugccagagacgau

SEQ ID NO: 638531 - RNA, 19 nt, Artificial Sequence
  Description of Artificial Sequence: Synthetic oligonucleotide
cuuccggacugaagccauu

SEQ ID NO: 638532 - RNA, 19 nt, Artificial Sequence
  Description of Artificial Sequence: Synthetic oligonucleotide
cggugucacuugaauauau

SEQ ID NO: 638533 - RNA, 19 nt, Artificial Sequence
  Description of Artificial Sequence: Synthetic oligonucleotide
ccgcucgcuuuggugccac

SEQ ID NO: 638534 - RNA, 19 nt, Artificial Sequence
  Description of Artificial Sequence: Synthetic oligonucleotide
cgcuguccgucacuaggaa

SEQ ID NO: 638535 - RNA, 19 nt, Artificial Sequence
  Description of Artificial Sequence: Synthetic oligonucleotide
gccgcucgcuuuggugcca

SEQ ID NO: 638536 - RNA, 19 nt, Artificial Sequence
  Description of Artificial Sequence: Synthetic oligonucleotide
gcuuugcggggauguccuu

SEQ ID NO: 638537 - RNA, 19 nt, Artificial Sequence
  Description of Artificial Sequence: Synthetic oligonucleotide
uucaccaucaagcagaacc

SEQ ID NO: 638538 - RNA, 19 nt, Artificial Sequence
  Description of Artificial Sequence: Synthetic oligonucleotide
aacgcaucucucuaaaggc

SEQ ID NO: 638539 - RNA, 19 nt, Artificial Sequence
  Description of Artificial Sequence: Synthetic oligonucleotide
uuuuguuaguuauugauga

SEQ ID NO: 638540 - RNA, 19 nt, Artificial Sequence
  Description of Artificial Sequence: Synthetic oligonucleotide
gaaaagaaggguuaggcuc

SEQ ID NO: 638541 - RNA, 19 nt, Artificial Sequence
  Description of Artificial Sequence: Synthetic oligonucleotide
aucagagaccuucauaugg

SEQ ID NO: 638542 - RNA, 19 nt, Artificial Sequence
  Description of Artificial Sequence: Synthetic oligonucleotide
uccgcaaucuuucuagugg

SEQ ID NO: 638543 - RNA, 19 nt, Artificial Sequence
  Description of Artificial Sequence: Synthetic oligonucleotide
aguguucacgauuggaggc

SEQ ID NO: 638544 - RNA, 19 nt, Artificial Sequence
  Description of Artificial Sequence: Synthetic oligonucleotide
gaucuaaagagagaagagg

SEQ ID NO: 638545 - RNA, 19 nt, Artificial Sequence
  Description of Artificial Sequence: Synthetic oligonucleotide
uguuaguuauugaugaagu

SEQ ID NO: 638546 - RNA, 19 nt, Artificial Sequence
  Description of Artificial Sequence: Synthetic oligonucleotide
uggauauggccuuaaagag

SEQ ID NO: 638547 - RNA, 19 nt, Artificial Sequence
  Description of Artificial Sequence: Synthetic oligonucleotide
aggggauacacucagagga

SEQ ID NO: 638548 - RNA, 19 nt, Artificial Sequence
  Description of Artificial Sequence: Synthetic oligonucleotide
ucaccaucaagcagaaccg

SEQ ID NO: 638549 - RNA, 19 nt, Artificial Sequence
  Description of Artificial Sequence: Synthetic oligonucleotide
uucgaggccaccuggaagg

SEQ ID NO: 638550 - RNA, 19 nt, Artificial Sequence
  Description of Artificial Sequence: Synthetic oligonucleotide
uggccuagaacccaggacc

SEQ ID NO: 638551 - RNA, 19 nt, Artificial Sequence
  Description of Artificial Sequence: Synthetic oligonucleotide
uugguuagaaagaaauaga

SEQ ID NO: 638552 - RNA, 19 nt, Artificial Sequence
  Description of Artificial Sequence: Synthetic oligonucleotide
uucucauguacaaagcacu

SEQ ID NO: 638553 - RNA, 19 nt, Artificial Sequence
  Description of Artificial Sequence: Synthetic oligonucleotide
ugguuagaaagaaauagau

SEQ ID NO: 638554 - RNA, 19 nt, Artificial Sequence
  Description of Artificial Sequence: Synthetic oligonucleotide
guggauauggccuuaaaga

SEQ ID NO: 638555 - RNA, 19 nt, Artificial Sequence
  Description of Artificial Sequence: Synthetic oligonucleotide
aaggcgugcauccaguugu

SEQ ID NO: 638556 - RNA, 19 nt, Artificial Sequence
  Description of Artificial Sequence: Synthetic oligonucleotide
uuguuaguuauugaugaag

SEQ ID NO: 638557 - RNA, 19 nt, Artificial Sequence
  Description of Artificial Sequence: Synthetic oligonucleotide
cacagaacgaaacagaaga

SEQ ID NO: 638558 - RNA, 19 nt, Artificial Sequence
  Description of Artificial Sequence: Synthetic oligonucleotide
ucuaaagagagaagaggcu

SEQ ID NO: 638559 - RNA, 19 nt, Artificial Sequence
  Description of Artificial Sequence: Synthetic oligonucleotide
uuucuaguggucuuccagc

SEQ ID NO: 638560 - RNA, 19 nt, Artificial Sequence
  Description of Artificial Sequence: Synthetic oligonucleotide
cuacagaugagaaagcuga

SEQ ID NO: 638561 - RNA, 19 nt, Artificial Sequence
  Description of Artificial Sequence: Synthetic oligonucleotide
ugagcuacccagcugucag

SEQ ID NO: 638562 - RNA, 19 nt, Artificial Sequence
  Description of Artificial Sequence: Synthetic oligonucleotide
gacguugaucuaaagagag

SEQ ID NO: 638563 - RNA, 19 nt, Artificial Sequence
  Description of Artificial Sequence: Synthetic oligonucleotide
ucuaaaggcaacucagagu

SEQ ID NO: 638564 - RNA, 19 nt, Artificial Sequence
  Description of Artificial Sequence: Synthetic oligonucleotide
cuaaaggcaacucagagua

SEQ ID NO: 638565 - RNA, 19 nt, Artificial Sequence
  Description of Artificial Sequence: Synthetic oligonucleotide
gagaagaacucuuuguaga

SEQ ID NO: 638566 - RNA, 19 nt, Artificial Sequence
  Description of Artificial Sequence: Synthetic oligonucleotide
gaacuugugggacacuuug

SEQ ID NO: 638567 - RNA, 19 nt, Artificial Sequence
  Description of Artificial Sequence: Synthetic oligonucleotide
agaggcugccuaaugaucc

SEQ ID NO: 638568 - RNA, 19 nt, Artificial Sequence
  Description of Artificial Sequence: Synthetic oligonucleotide
guacaaagcacucagccca

SEQ ID NO: 638569 - RNA, 19 nt, Artificial Sequence
  Description of Artificial Sequence: Synthetic oligonucleotide
gaucacucagccucaaggc

SEQ ID NO: 638570 - RNA, 19 nt, Artificial Sequence
  Description of Artificial Sequence: Synthetic oligonucleotide
guuguuugugccucugugg

SEQ ID NO: 638571 - RNA, 19 nt, Artificial Sequence
  Description of Artificial Sequence: Synthetic oligonucleotide
caggaaaugaacaaggcaa

SEQ ID NO: 638572 - RNA, 19 nt, Artificial Sequence
  Description of Artificial Sequence: Synthetic oligonucleotide
aaggauagcaugugugggu

SEQ ID NO: 638573 - RNA, 19 nt, Artificial Sequence
  Description of Artificial Sequence: Synthetic oligonucleotide
agucaauuuuguuaguuau

SEQ ID NO: 638574 - RNA, 19 nt, Artificial Sequence
  Description of Artificial Sequence: Synthetic oligonucleotide
aauccagcgaauuguuacu

SEQ ID NO: 638575 - RNA, 19 nt, Artificial Sequence
  Description of Artificial Sequence: Synthetic oligonucleotide
uccaggucgugacacaugc

SEQ ID NO: 638576 - RNA, 19 nt, Artificial Sequence
  Description of Artificial Sequence: Synthetic oligonucleotide
gaggggaucacucagccuc

SEQ ID NO: 638577 - RNA, 19 nt, Artificial Sequence
  Description of Artificial Sequence: Synthetic oligonucleotide
acaagggacauccuggccu

SEQ ID NO: 638578 - RNA, 19 nt, Artificial Sequence
  Description of Artificial Sequence: Synthetic oligonucleotide
aaaagaaggguuaggcucu

SEQ ID NO: 638579 - RNA, 19 nt, Artificial Sequence
  Description of Artificial Sequence: Synthetic oligonucleotide
uccuaccagaagcacagag

SEQ ID NO: 638580 - RNA, 19 nt, Artificial Sequence
  Description of Artificial Sequence: Synthetic oligonucleotide
uuguuugugccucuguggu

SEQ ID NO: 638581 - RNA, 19 nt, Artificial Sequence
  Description of Artificial Sequence: Synthetic oligonucleotide
gaaggauagcauguguggg

SEQ ID NO: 638582 - RNA, 19 nt, Artificial Sequence
  Description of Artificial Sequence: Synthetic oligonucleotide
cuugguguacucaucauca

SEQ ID NO: 638583 - RNA, 19 nt, Artificial Sequence
  Description of Artificial Sequence: Synthetic oligonucleotide
acugguagagaacuguaga

SEQ ID NO: 638584 - RNA, 19 nt, Artificial Sequence
  Description of Artificial Sequence: Synthetic oligonucleotide
cucuaaaggcaacucagag

SEQ ID NO: 638585 - RNA, 19 nt, Artificial Sequence
  Description of Artificial Sequence: Synthetic oligonucleotide
gucacaggaggucaugagg

SEQ ID NO: 638586 - RNA, 19 nt, Artificial Sequence
  Description of Artificial Sequence: Synthetic oligonucleotide
caaggggauacacucagag

SEQ ID NO: 638587 - RNA, 19 nt, Artificial Sequence
  Description of Artificial Sequence: Synthetic oligonucleotide
ugggcagucaauuuuguua

SEQ ID NO: 638588 - RNA, 19 nt, Artificial Sequence
  Description of Artificial Sequence: Synthetic oligonucleotide
agugaugccucuccaugac

SEQ ID NO: 638589 - RNA, 19 nt, Artificial Sequence
  Description of Artificial Sequence: Synthetic oligonucleotide
ugguagagaacuguagaag

SEQ ID NO: 638590 - RNA, 19 nt, Artificial Sequence
  Description of Artificial Sequence: Synthetic oligonucleotide
ucagagaccuucauauggu

SEQ ID NO: 638591 - RNA, 19 nt, Artificial Sequence
  Description of Artificial Sequence: Synthetic oligonucleotide
gauguugcagccgugggug

SEQ ID NO: 638592 - RNA, 19 nt, Artificial Sequence
  Description of Artificial Sequence: Synthetic oligonucleotide
ggaaggauagcaugugugg

SEQ ID NO: 638593 - RNA, 19 nt, Artificial Sequence
  Description of Artificial Sequence: Synthetic oligonucleotide
cuuucuaguggucuuccag

SEQ ID NO: 638594 - RNA, 19 nt, Artificial Sequence
  Description of Artificial Sequence: Synthetic oligonucleotide
uccucaggacacuucaaag

SEQ ID NO: 638595 - RNA, 19 nt, Artificial Sequence
  Description of Artificial Sequence: Synthetic oligonucleotide
agauuucgaggccaccugg

SEQ ID NO: 638596 - RNA, 19 nt, Artificial Sequence
  Description of Artificial Sequence: Synthetic oligonucleotide
uccaauccuaccagaagca

SEQ ID NO: 638597 - RNA, 19 nt, Artificial Sequence
  Description of Artificial Sequence: Synthetic oligonucleotide
uuucgaggccaccuggaag

SEQ ID NO: 638598 - RNA, 19 nt, Artificial Sequence
  Description of Artificial Sequence: Synthetic oligonucleotide
gaauuguuacuugggaggc

SEQ ID NO: 638599 - RNA, 19 nt, Artificial Sequence
  Description of Artificial Sequence: Synthetic oligonucleotide
aguuguuugugccucugug

SEQ ID NO: 638600 - RNA, 19 nt, Artificial Sequence
  Description of Artificial Sequence: Synthetic oligonucleotide
gaucucgauguccucgagg

SEQ ID NO: 638601 - RNA, 19 nt, Artificial Sequence
  Description of Artificial Sequence: Synthetic oligonucleotide
uagcagaagugagagacag

SEQ ID NO: 638602 - RNA, 19 nt, Artificial Sequence
  Description of Artificial Sequence: Synthetic oligonucleotide
aaaggcgugcauccaguug

SEQ ID NO: 638603 - RNA, 19 nt, Artificial Sequence
  Description of Artificial Sequence: Synthetic oligonucleotide
ugauaggagagagugggca

SEQ ID NO: 638604 - RNA, 19 nt, Artificial Sequence
  Description of Artificial Sequence: Synthetic oligonucleotide
ccuaguuagggaaaggagc

SEQ ID NO: 638605 - RNA, 19 nt, Artificial Sequence
  Description of Artificial Sequence: Synthetic oligonucleotide
uucuaguggucuuccagcc

SEQ ID NO: 638606 - RNA, 19 nt, Artificial Sequence
  Description of Artificial Sequence: Synthetic oligonucleotide
gguagcagaagugagagac

SEQ ID NO: 638607 - RNA, 19 nt, Artificial Sequence
  Description of Artificial Sequence: Synthetic oligonucleotide
auuggucuguugcccaugg

SEQ ID NO: 638608 - RNA, 19 nt, Artificial Sequence
  Description of Artificial Sequence: Synthetic oligonucleotide
aagcacucagcccacggga

SEQ ID NO: 638609 - RNA, 19 nt, Artificial Sequence
  Description of Artificial Sequence: Synthetic oligonucleotide
ugaggccugggaaggauag

SEQ ID NO: 638610 - RNA, 19 nt, Artificial Sequence
  Description of Artificial Sequence: Synthetic oligonucleotide
guccuugaagauucggagg

SEQ ID NO: 638611 - RNA, 19 nt, Artificial Sequence
  Description of Artificial Sequence: Synthetic oligonucleotide
aucucauuggccagguggc

SEQ ID NO: 638612 - RNA, 19 nt, Artificial Sequence
  Description of Artificial Sequence: Synthetic oligonucleotide
auagaaguaucguccucag

SEQ ID NO: 638613 - RNA, 19 nt, Artificial Sequence
  Description of Artificial Sequence: Synthetic oligonucleotide
aagaucucgauguccucga

SEQ ID NO: 638614 - RNA, 19 nt, Artificial Sequence
  Description of Artificial Sequence: Synthetic oligonucleotide
acgauuggaggccacacgu

SEQ ID NO: 638615 - RNA, 19 nt, Artificial Sequence
  Description of Artificial Sequence: Synthetic oligonucleotide
ugggagaagaacucuuugu

SEQ ID NO: 638616 - RNA, 19 nt, Artificial Sequence
  Description of Artificial Sequence: Synthetic oligonucleotide
cuuugguccaguguucacg

SEQ ID NO: 638617 - RNA, 19 nt, Artificial Sequence
  Description of Artificial Sequence: Synthetic oligonucleotide
cauaugguacaucaucauc

SEQ ID NO: 638618 - RNA, 19 nt, Artificial Sequence
  Description of Artificial Sequence: Synthetic oligonucleotide
caggucgugacacaugcag

SEQ ID NO: 638619 - RNA, 19 nt, Artificial Sequence
  Description of Artificial Sequence: Synthetic oligonucleotide
ugguguacucaucaucaga

SEQ ID NO: 638620 - RNA, 19 nt, Artificial Sequence
  Description of Artificial Sequence: Synthetic oligonucleotide
ggaguguagguaaaguugg

SEQ ID NO: 638621 - RNA, 19 nt, Artificial Sequence
  Description of Artificial Sequence: Synthetic oligonucleotide
agaacgaaacagaagagaa

SEQ ID NO: 638622 - RNA, 19 nt, Artificial Sequence
  Description of Artificial Sequence: Synthetic oligonucleotide
acuugugggacacuuuggu

SEQ ID NO: 638623 - RNA, 19 nt, Artificial Sequence
  Description of Artificial Sequence: Synthetic oligonucleotide
agcccugcgggguaaggcc

SEQ ID NO: 638624 - RNA, 19 nt, Artificial Sequence
  Description of Artificial Sequence: Synthetic oligonucleotide
agagguguccucaggacac

SEQ ID NO: 638625 - RNA, 19 nt, Artificial Sequence
  Description of Artificial Sequence: Synthetic oligonucleotide
auauuccucguccaggaaa

SEQ ID NO: 638626 - RNA, 19 nt, Artificial Sequence
  Description of Artificial Sequence: Synthetic oligonucleotide
aacaugcgcugauaguccu

SEQ ID NO: 638627 - RNA, 19 nt, Artificial Sequence
  Description of Artificial Sequence: Synthetic oligonucleotide
ucucauguacaaagcacuc

SEQ ID NO: 638628 - RNA, 19 nt, Artificial Sequence
  Description of Artificial Sequence: Synthetic oligonucleotide
agcgaauuguuacuuggga

SEQ ID NO: 638629 - RNA, 19 nt, Artificial Sequence
  Description of Artificial Sequence: Synthetic oligonucleotide
gauuggaggccacacguuc

SEQ ID NO: 638630 - RNA, 19 nt, Artificial Sequence
  Description of Artificial Sequence: Synthetic oligonucleotide
augguuccaauccuaccag

SEQ ID NO: 638631 - RNA, 19 nt, Artificial Sequence
  Description of Artificial Sequence: Synthetic oligonucleotide
aagauucggagguggugug

SEQ ID NO: 638632 - RNA, 19 nt, Artificial Sequence
  Description of Artificial Sequence: Synthetic oligonucleotide
gaugccgcaguagauggag

SEQ ID NO: 638633 - RNA, 19 nt, Artificial Sequence
  Description of Artificial Sequence: Synthetic oligonucleotide
agaagcuugguguacucau

SEQ ID NO: 638634 - RNA, 19 nt, Artificial Sequence
  Description of Artificial Sequence: Synthetic oligonucleotide
agagaccuucauaugguac

SEQ ID NO: 638635 - RNA, 19 nt, Artificial Sequence
  Description of Artificial Sequence: Synthetic oligonucleotide
aguuagggaaaggagcuug

SEQ ID NO: 638636 - RNA, 19 nt, Artificial Sequence
  Description of Artificial Sequence: Synthetic oligonucleotide
gguccuugaagauucggag

SEQ ID NO: 638637 - RNA, 19 nt, Artificial Sequence
  Description of Artificial Sequence: Synthetic oligonucleotide
caacaugcgcugauagucc

SEQ ID NO: 638638 - RNA, 19 nt, Artificial Sequence
  Description of Artificial Sequence: Synthetic oligonucleotide
cuuaggguggcagagcaug

SEQ ID NO: 638639 - RNA, 19 nt, Artificial Sequence
  Description of Artificial Sequence: Synthetic oligonucleotide
acgaaacagaagagaagcc

SEQ ID NO: 638640 - RNA, 19 nt, Artificial Sequence
  Description of Artificial Sequence: Synthetic oligonucleotide
caucagguccaacaugcgc

SEQ ID NO: 638641 - RNA, 19 nt, Artificial Sequence
  Description of Artificial Sequence: Synthetic oligonucleotide
ucuaguggucuuccagccc

SEQ ID NO: 638642 - RNA, 19 nt, Artificial Sequence
  Description of Artificial Sequence: Synthetic oligonucleotide
aaaucgggcaccucauauu

SEQ ID NO: 638643 - RNA, 19 nt, Artificial Sequence
  Description of Artificial Sequence: Synthetic oligonucleotide
aagcccugcgggguaaggc

SEQ ID NO: 638644 - RNA, 19 nt, Artificial Sequence
  Description of Artificial Sequence: Synthetic oligonucleotide
caucaagcagaaccgggcc

SEQ ID NO: 638645 - RNA, 19 nt, Artificial Sequence
  Description of Artificial Sequence: Synthetic oligonucleotide
cagguagcagaagugagag

SEQ ID NO: 638646 - RNA, 19 nt, Artificial Sequence
  Description of Artificial Sequence: Synthetic oligonucleotide
cacgggaccacacacaaca

SEQ ID NO: 638647 - RNA, 19 nt, Artificial Sequence
  Description of Artificial Sequence: Synthetic oligonucleotide
gaacucuuuguagaucagc

SEQ ID NO: 638648 - RNA, 19 nt, Artificial Sequence
  Description of Artificial Sequence: Synthetic oligonucleotide
ugugggacacuuuggucca

SEQ ID NO: 638649 - RNA, 19 nt, Artificial Sequence
  Description of Artificial Sequence: Synthetic oligonucleotide
gacagaaaaggcgugcauc

SEQ ID NO: 638650 - RNA, 19 nt, Artificial Sequence
  Description of Artificial Sequence: Synthetic oligonucleotide
ggauauggccuuaaagagg

SEQ ID NO: 638651 - RNA, 19 nt, Artificial Sequence
  Description of Artificial Sequence: Synthetic oligonucleotide
ugaagauucggagguggug

SEQ ID NO: 638652 - RNA, 19 nt, Artificial Sequence
  Description of Artificial Sequence: Synthetic oligonucleotide
cagcgaauuguuacuuggg

SEQ ID NO: 638653 - RNA, 19 nt, Artificial Sequence
  Description of Artificial Sequence: Synthetic oligonucleotide
aucagguccaacaugcgcu

SEQ ID NO: 638654 - RNA, 19 nt, Artificial Sequence
  Description of Artificial Sequence: Synthetic oligonucleotide
ugccuaguuagggaaagga

SEQ ID NO: 638655 - RNA, 19 nt, Artificial Sequence
  Description of Artificial Sequence: Synthetic oligonucleotide
gacugguagagaacuguag

SEQ ID NO: 638656 - RNA, 19 nt, Artificial Sequence
  Description of Artificial Sequence: Synthetic oligonucleotide
caaagcacucagcccacgg

SEQ ID NO: 638657 - RNA, 19 nt, Artificial Sequence
  Description of Artificial Sequence: Synthetic oligonucleotide
gagaagaggcugccuaaug

SEQ ID NO: 638658 - RNA, 19 nt, Artificial Sequence
  Description of Artificial Sequence: Synthetic oligonucleotide
guccaacaugcgcugauag

SEQ ID NO: 638659 - RNA, 19 nt, Artificial Sequence
  Description of Artificial Sequence: Synthetic oligonucleotide
ucgugacacaugcaggaaa

SEQ ID NO: 638660 - RNA, 19 nt, Artificial Sequence
  Description of Artificial Sequence: Synthetic oligonucleotide
uugaagauucggagguggu

SEQ ID NO: 638661 - RNA, 19 nt, Artificial Sequence
  Description of Artificial Sequence: Synthetic oligonucleotide
ugggaaggauagcaugugu

SEQ ID NO: 638662 - RNA, 19 nt, Artificial Sequence
  Description of Artificial Sequence: Synthetic oligonucleotide
gcgaauuguuacuugggag

SEQ ID NO: 638663 - RNA, 19 nt, Artificial Sequence
  Description of Artificial Sequence: Synthetic oligonucleotide
uccaaugguuccaauccua

SEQ ID NO: 638664 - RNA, 19 nt, Artificial Sequence
  Description of Artificial Sequence: Synthetic oligonucleotide
ggucauaacccacuucagc

SEQ ID NO: 638665 - RNA, 19 nt, Artificial Sequence
  Description of Artificial Sequence: Synthetic oligonucleotide
gauucggagguggugugcc

SEQ ID NO: 638666 - RNA, 19 nt, Artificial Sequence
  Description of Artificial Sequence: Synthetic oligonucleotide
cuaguuagggaaaggagcu

SEQ ID NO: 638667 - RNA, 19 nt, Artificial Sequence
  Description of Artificial Sequence: Synthetic oligonucleotide
cacacguucauacagcucu

SEQ ID NO: 638668 - RNA, 19 nt, Artificial Sequence
  Description of Artificial Sequence: Synthetic oligonucleotide
uagaucagcuccgcaaucu

SEQ ID NO: 638669 - RNA, 19 nt, Artificial Sequence
  Description of Artificial Sequence: Synthetic oligonucleotide
ugccuaaugauccggucuu

SEQ ID NO: 638670 - RNA, 19 nt, Artificial Sequence
  Description of Artificial Sequence: Synthetic oligonucleotide
cuguuuguugguucgguca

SEQ ID NO: 638671 - RNA, 19 nt, Artificial Sequence
  Description of Artificial Sequence: Synthetic oligonucleotide
acagauuucgaggccaccu

SEQ ID NO: 638672 - RNA, 19 nt, Artificial Sequence
  Description of Artificial Sequence: Synthetic oligonucleotide
gauagcaugugugggucac

SEQ ID NO: 638673 - RNA, 19 nt, Artificial Sequence
  Description of Artificial Sequence: Synthetic oligonucleotide
uccagcgaauuguuacuug

SEQ ID NO: 638674 - RNA, 19 nt, Artificial Sequence
  Description of Artificial Sequence: Synthetic oligonucleotide
ggcacauguggauauggcc

SEQ ID NO: 638675 - RNA, 19 nt, Artificial Sequence
  Description of Artificial Sequence: Synthetic oligonucleotide
acagaacgaaacagaagag

SEQ ID NO: 638676 - RNA, 19 nt, Artificial Sequence
  Description of Artificial Sequence: Synthetic oligonucleotide
uccaacaugcgcugauagu

SEQ ID NO: 638677 - RNA, 19 nt, Artificial Sequence
  Description of Artificial Sequence: Synthetic oligonucleotide
ggcgaugugcuccaugaag

SEQ ID NO: 638678 - RNA, 19 nt, Artificial Sequence
  Description of Artificial Sequence: Synthetic oligonucleotide
augcugaugccgcaguaga

SEQ ID NO: 638679 - RNA, 19 nt, Artificial Sequence
  Description of Artificial Sequence: Synthetic oligonucleotide
gauaggagagagugggcaa

SEQ ID NO: 638680 - RNA, 19 nt, Artificial Sequence
  Description of Artificial Sequence: Synthetic oligonucleotide
ccagcgaauuguuacuugg

SEQ ID NO: 638681 - RNA, 19 nt, Artificial Sequence
  Description of Artificial Sequence: Synthetic oligonucleotide
accaucaagcagaaccggg

SEQ ID NO: 638682 - RNA, 19 nt, Artificial Sequence
  Description of Artificial Sequence: Synthetic oligonucleotide
agcuugaggguccuuccug

SEQ ID NO: 638683 - RNA, 19 nt, Artificial Sequence
  Description of Artificial Sequence: Synthetic oligonucleotide
aaaaggcgugcauccaguu

SEQ ID NO: 638684 - RNA, 19 nt, Artificial Sequence
  Description of Artificial Sequence: Synthetic oligonucleotide
cuugugggacacuuugguc

SEQ ID NO: 638685 - RNA, 19 nt, Artificial Sequence
  Description of Artificial Sequence: Synthetic oligonucleotide
ucuugccuaguuagggaaa

SEQ ID NO: 638686 - RNA, 19 nt, Artificial Sequence
  Description of Artificial Sequence: Synthetic oligonucleotide
ggacccauggcucugguuc

SEQ ID NO: 638687 - RNA, 19 nt, Artificial Sequence
  Description of Artificial Sequence: Synthetic oligonucleotide
uuacuugggaggccucgga

SEQ ID NO: 638688 - RNA, 19 nt, Artificial Sequence
  Description of Artificial Sequence: Synthetic oligonucleotide
ucuucaccaucaagcagaa

SEQ ID NO: 638689 - RNA, 19 nt, Artificial Sequence
  Description of Artificial Sequence: Synthetic oligonucleotide
uacaaagcacucagcccac

SEQ ID NO: 638690 - RNA, 19 nt, Artificial Sequence
  Description of Artificial Sequence: Synthetic oligonucleotide
cacgauuggaggccacacg

SEQ ID NO: 638691 - RNA, 19 nt, Artificial Sequence
  Description of Artificial Sequence: Synthetic oligonucleotide
gcugaucugcagcucaggg

SEQ ID NO: 638692 - RNA, 19 nt, Artificial Sequence
  Description of Artificial Sequence: Synthetic oligonucleotide
gaagauucggagguggugu

SEQ ID NO: 638693 - RNA, 19 nt, Artificial Sequence
  Description of Artificial Sequence: Synthetic oligonucleotide
cucgagguagcuggaaagc

SEQ ID NO: 638694 - RNA, 19 nt, Artificial Sequence
  Description of Artificial Sequence: Synthetic oligonucleotide
ucuuucuaguggucuucca

SEQ ID NO: 638695 - RNA, 19 nt, Artificial Sequence
  Description of Artificial Sequence: Synthetic oligonucleotide
ugguccaguguucacgauu

SEQ ID NO: 638696 - RNA, 19 nt, Artificial Sequence
  Description of Artificial Sequence: Synthetic oligonucleotide
ggagagaagcccugcgggg

SEQ ID NO: 638697 - RNA, 19 nt, Artificial Sequence
  Description of Artificial Sequence: Synthetic oligonucleotide
agcagccauugaugggagc

SEQ ID NO: 638698 - RNA, 19 nt, Artificial Sequence
  Description of Artificial Sequence: Synthetic oligonucleotide
guuacuugggaggccucgg

SEQ ID NO: 638699 - RNA, 19 nt, Artificial Sequence
  Description of Artificial Sequence: Synthetic oligonucleotide
ugcgggguaaggccaggcc

SEQ ID NO: 638700 - RNA, 19 nt, Artificial Sequence
  Description of Artificial Sequence: Synthetic oligonucleotide
agcccuccgagcuguagag

SEQ ID NO: 638701 - RNA, 19 nt, Artificial Sequence
  Description of Artificial Sequence: Synthetic oligonucleotide
uccucgagguagcuggaaa

SEQ ID NO: 638702 - RNA, 19 nt, Artificial Sequence
  Description of Artificial Sequence: Synthetic oligonucleotide
agacagacugguagagaac

SEQ ID NO: 638703 - RNA, 19 nt, Artificial Sequence
  Description of Artificial Sequence: Synthetic oligonucleotide
cagaacgaaacagaagaga

SEQ ID NO: 638704 - RNA, 19 nt, Artificial Sequence
  Description of Artificial Sequence: Synthetic oligonucleotide
agacguugaucuaaagaga

SEQ ID NO: 638705 - RNA, 19 nt, Artificial Sequence
  Description of Artificial Sequence: Synthetic oligonucleotide
gggcaccucauauuccucg

SEQ ID NO: 638706 - RNA, 19 nt, Artificial Sequence
  Description of Artificial Sequence: Synthetic oligonucleotide
ucgagguagcuggaaagcu

SEQ ID NO: 638707 - RNA, 19 nt, Artificial Sequence
  Description of Artificial Sequence: Synthetic oligonucleotide
uggagacguugaucuaaag

SEQ ID NO: 638708 - RNA, 19 nt, Artificial Sequence
  Description of Artificial Sequence: Synthetic oligonucleotide
uuagggaaaggagcuugcu

SEQ ID NO: 638709 - RNA, 19 nt, Artificial Sequence
  Description of Artificial Sequence: Synthetic oligonucleotide
ugaacuugugggacacuuu

SEQ ID NO: 638710 - RNA, 19 nt, Artificial Sequence
  Description of Artificial Sequence: Synthetic oligonucleotide
guugugguaggguggaucu

SEQ ID NO: 638711 - RNA, 19 nt, Artificial Sequence
  Description of Artificial Sequence: Synthetic oligonucleotide
cagauuucgaggccaccug

SEQ ID NO: 638712 - RNA, 19 nt, Artificial Sequence
  Description of Artificial Sequence: Synthetic oligonucleotide
uucggagguggugugccag

SEQ ID NO: 638713 - RNA, 19 nt, Artificial Sequence
  Description of Artificial Sequence: Synthetic oligonucleotide
cuggugccguccaaaucgg

SEQ ID NO: 638714 - RNA, 19 nt, Artificial Sequence
  Description of Artificial Sequence: Synthetic oligonucleotide
gaugggcauggcgaugugc

SEQ ID NO: 638715 - RNA, 19 nt, Artificial Sequence
  Description of Artificial Sequence: Synthetic oligonucleotide
guguucacgauuggaggcc

SEQ ID NO: 638716 - RNA, 19 nt, Artificial Sequence
  Description of Artificial Sequence: Synthetic oligonucleotide
cacuucaaagucuguguga

SEQ ID NO: 638717 - RNA, 19 nt, Artificial Sequence
  Description of Artificial Sequence: Synthetic oligonucleotide
gagacagaaaaggcgugca

SEQ ID NO: 638718 - RNA, 19 nt, Artificial Sequence
  Description of Artificial Sequence: Synthetic oligonucleotide
gaagaggcugccuaaugau

SEQ ID NO: 638719 - RNA, 19 nt, Artificial Sequence
  Description of Artificial Sequence: Synthetic oligonucleotide
aguggccacucgcccaagg

SEQ ID NO: 638720 - RNA, 19 nt, Artificial Sequence
  Description of Artificial Sequence: Synthetic oligonucleotide
gucuugccuaguuagggaa

SEQ ID NO: 638721 - RNA, 19 nt, Artificial Sequence
  Description of Artificial Sequence: Synthetic oligonucleotide
gguccaguguucacgauug

SEQ ID NO: 638722 - RNA, 19 nt, Artificial Sequence
  Description of Artificial Sequence: Synthetic oligonucleotide
uguucacgauuggaggcca

SEQ ID NO: 638723 - RNA, 19 nt, Artificial Sequence
  Description of Artificial Sequence: Synthetic oligonucleotide
aggucgugacacaugcagg

SEQ ID NO: 638724 - RNA, 19 nt, Artificial Sequence
  Description of Artificial Sequence: Synthetic oligonucleotide
guaucguccucaggcagag

SEQ ID NO: 638725 - RNA, 19 nt, Artificial Sequence
  Description of Artificial Sequence: Synthetic oligonucleotide
ggucgugacacaugcagga

SEQ ID NO: 638726 - RNA, 19 nt, Artificial Sequence
  Description of Artificial Sequence: Synthetic oligonucleotide
ccaacaugcgcugauaguc

SEQ ID NO: 638727 - RNA, 19 nt, Artificial Sequence
  Description of Artificial Sequence: Synthetic oligonucleotide
ucacgauuggaggccacac

SEQ ID NO: 638728 - RNA, 19 nt, Artificial Sequence
  Description of Artificial Sequence: Synthetic oligonucleotide
aagcugaucugcagcucag

SEQ ID NO: 638729 - RNA, 19 nt, Artificial Sequence
  Description of Artificial Sequence: Synthetic oligonucleotide
uucacgauuggaggccaca

SEQ ID NO: 638730 - RNA, 19 nt, Artificial Sequence
  Description of Artificial Sequence: Synthetic oligonucleotide
uggugccguccaaaucggg

SEQ ID NO: 638731 - RNA, 19 nt, Artificial Sequence
  Description of Artificial Sequence: Synthetic oligonucleotide
cacaagggacauccuggcc

SEQ ID NO: 638732 - RNA, 19 nt, Artificial Sequence
  Description of Artificial Sequence: Synthetic oligonucleotide
cuuccgggagaagugauca

SEQ ID NO: 638733 - RNA, 19 nt, Artificial Sequence
  Description of Artificial Sequence: Synthetic oligonucleotide
ggcaaagaucucgaugucc

SEQ ID NO: 638734 - RNA, 19 nt, Artificial Sequence
  Description of Artificial Sequence: Synthetic oligonucleotide
caaagauguugcagccgug

SEQ ID NO: 638735 - RNA, 19 nt, Artificial Sequence
  Description of Artificial Sequence: Synthetic oligonucleotide
ugaugccgcaguagaugga

SEQ ID NO: 638736 - RNA, 19 nt, Artificial Sequence
  Description of Artificial Sequence: Synthetic oligonucleotide
agaucucgauguccucgag

SEQ ID NO: 638737 - RNA, 19 nt, Artificial Sequence
  Description of Artificial Sequence: Synthetic oligonucleotide
ucguccucaggcagagaac

SEQ ID NO: 638738 - RNA, 19 nt, Artificial Sequence
  Description of Artificial Sequence: Synthetic oligonucleotide
ggguuaggcucucugugcc

SEQ ID NO: 638739 - RNA, 19 nt, Artificial Sequence
  Description of Artificial Sequence: Synthetic oligonucleotide
gcgaugugcuccaugaagc

SEQ ID NO: 638740 - RNA, 19 nt, Artificial Sequence
  Description of Artificial Sequence: Synthetic oligonucleotide
gugccguccaaaucgggca

SEQ ID NO: 638741 - RNA, 19 nt, Artificial Sequence
  Description of Artificial Sequence: Synthetic oligonucleotide
gcgcugauaguccuuccgg

SEQ ID NO: 638742 - RNA, 19 nt, Artificial Sequence
  Description of Artificial Sequence: Synthetic oligonucleotide
cagucaauuuuguuaguua

SEQ ID NO: 638743 - RNA, 19 nt, Artificial Sequence
  Description of Artificial Sequence: Synthetic oligonucleotide
gauuucgaggccaccugga

SEQ ID NO: 638744 - RNA, 19 nt, Artificial Sequence
  Description of Artificial Sequence: Synthetic oligonucleotide
aguaucguccucaggcaga

SEQ ID NO: 638745 - RNA, 19 nt, Artificial Sequence
  Description of Artificial Sequence: Synthetic oligonucleotide
guagaucagcuccgcaauc

SEQ ID NO: 638746 - RNA, 19 nt, Artificial Sequence
  Description of Artificial Sequence: Synthetic oligonucleotide
cagcccuuugucuggucag

SEQ ID NO: 638747 - RNA, 19 nt, Artificial Sequence
  Description of Artificial Sequence: Synthetic oligonucleotide
ugcuguuuguugguucggu

SEQ ID NO: 638748 - RNA, 19 nt, Artificial Sequence
  Description of Artificial Sequence: Synthetic oligonucleotide
acgaggaguguagguaaag

SEQ ID NO: 638749 - RNA, 19 nt, Artificial Sequence
  Description of Artificial Sequence: Synthetic oligonucleotide
gggagaagaacucuuugua

SEQ ID NO: 638750 - RNA, 19 nt, Artificial Sequence
  Description of Artificial Sequence: Synthetic oligonucleotide
auaggagagagugggcaau

SEQ ID NO: 638751 - RNA, 19 nt, Artificial Sequence
  Description of Artificial Sequence: Synthetic oligonucleotide
ugcaucagacagacuggua

SEQ ID NO: 638752 - RNA, 19 nt, Artificial Sequence
  Description of Artificial Sequence: Synthetic oligonucleotide
gagcuacccagcugucagc

SEQ ID NO: 638753 - RNA, 19 nt, Artificial Sequence
  Description of Artificial Sequence: Synthetic oligonucleotide
uggccuuaaagaggagaga

SEQ ID NO: 638754 - RNA, 19 nt, Artificial Sequence
  Description of Artificial Sequence: Synthetic oligonucleotide
gcuugaggguccuuccugc

SEQ ID NO: 638755 - RNA, 19 nt, Artificial Sequence
  Description of Artificial Sequence: Synthetic oligonucleotide
augauccggucuugccuag

SEQ ID NO: 638756 - RNA, 19 nt, Artificial Sequence
  Description of Artificial Sequence: Synthetic oligonucleotide
cauggagacguugaucuaa

SEQ ID NO: 638757 - RNA, 19 nt, Artificial Sequence
  Description of Artificial Sequence: Synthetic oligonucleotide
guuaguuauugaugaaguu

SEQ ID NO: 638758 - RNA, 19 nt, Artificial Sequence
  Description of Artificial Sequence: Synthetic oligonucleotide
gagaagcuugguguacuca

SEQ ID NO: 638759 - RNA, 19 nt, Artificial Sequence
  Description of Artificial Sequence: Synthetic oligonucleotide
agaguagguaaggcaggug

SEQ ID NO: 638760 - RNA, 19 nt, Artificial Sequence
  Description of Artificial Sequence: Synthetic oligonucleotide
gugccuuaggguggcagag

SEQ ID NO: 638761 - RNA, 19 nt, Artificial Sequence
  Description of Artificial Sequence: Synthetic oligonucleotide
gccuaguuagggaaaggag

SEQ ID NO: 638762 - RNA, 19 nt, Artificial Sequence
  Description of Artificial Sequence: Synthetic oligonucleotide
ggccgcgccaccugaaggg

SEQ ID NO: 638763 - RNA, 19 nt, Artificial Sequence
  Description of Artificial Sequence: Synthetic oligonucleotide
acgcaucucucuaaaggca

SEQ ID NO: 638764 - RNA, 19 nt, Artificial Sequence
  Description of Artificial Sequence: Synthetic oligonucleotide
gcgcauaaggggcuguccc

SEQ ID NO: 638765 - RNA, 19 nt, Artificial Sequence
  Description of Artificial Sequence: Synthetic oligonucleotide
cacguucauacagcucugc

SEQ ID NO: 638766 - RNA, 19 nt, Artificial Sequence
  Description of Artificial Sequence: Synthetic oligonucleotide
gccugggaaggauagcaug

SEQ ID NO: 638767 - RNA, 19 nt, Artificial Sequence
  Description of Artificial Sequence: Synthetic oligonucleotide
gaagcccugcgggguaagg

SEQ ID NO: 638768 - RNA, 19 nt, Artificial Sequence
  Description of Artificial Sequence: Synthetic oligonucleotide
ccugauggcaggaauggga

SEQ ID NO: 638769 - RNA, 19 nt, Artificial Sequence
  Description of Artificial Sequence: Synthetic oligonucleotide
uuguuacuugggaggccuc

SEQ ID NO: 638770 - RNA, 19 nt, Artificial Sequence
  Description of Artificial Sequence: Synthetic oligonucleotide
gcgggguaaggccaggccc

SEQ ID NO: 638771 - RNA, 19 nt, Artificial Sequence
  Description of Artificial Sequence: Synthetic oligonucleotide
agcuugguguacucaucau

SEQ ID NO: 638772 - RNA, 19 nt, Artificial Sequence
  Description of Artificial Sequence: Synthetic oligonucleotide
auaacccacuucagccauc

SEQ ID NO: 638773 - RNA, 19 nt, Artificial Sequence
  Description of Artificial Sequence: Synthetic oligonucleotide
aacgaggaguguagguaaa

SEQ ID NO: 638774 - RNA, 19 nt, Artificial Sequence
  Description of Artificial Sequence: Synthetic oligonucleotide
aagggcgcauaaggggcug

SEQ ID NO: 638775 - RNA, 19 nt, Artificial Sequence
  Description of Artificial Sequence: Synthetic oligonucleotide
acagacugguagagaacug

SEQ ID NO: 638776 - RNA, 19 nt, Artificial Sequence
  Description of Artificial Sequence: Synthetic oligonucleotide
ugccuuaggguggcagagc

SEQ ID NO: 638777 - RNA, 19 nt, Artificial Sequence
  Description of Artificial Sequence: Synthetic oligonucleotide
guaaggccaggccccuccc

SEQ ID NO: 638778 - RNA, 19 nt, Artificial Sequence
  Description of Artificial Sequence: Synthetic oligonucleotide
aguucauaucuugcagcau

SEQ ID NO: 638779 - RNA, 19 nt, Artificial Sequence
  Description of Artificial Sequence: Synthetic oligonucleotide
acguugaucuaaagagaga

SEQ ID NO: 638780 - RNA, 19 nt, Artificial Sequence
  Description of Artificial Sequence: Synthetic oligonucleotide
uggaucucgguagccuuuc

SEQ ID NO: 638781 - RNA, 19 nt, Artificial Sequence
  Description of Artificial Sequence: Synthetic oligonucleotide
ggucuugccuaguuaggga

SEQ ID NO: 638782 - RNA, 19 nt, Artificial Sequence
  Description of Artificial Sequence: Synthetic oligonucleotide
gugguaggguggaucucgg

SEQ ID NO: 638783 - RNA, 19 nt, Artificial Sequence
  Description of Artificial Sequence: Synthetic oligonucleotide
cccuccgagcuguagagug

SEQ ID NO: 638784 - RNA, 19 nt, Artificial Sequence
  Description of Artificial Sequence: Synthetic oligonucleotide
cugccuuggggaacagguc

SEQ ID NO: 638785 - RNA, 19 nt, Artificial Sequence
  Description of Artificial Sequence: Synthetic oligonucleotide
caaaucgggcaccucauau

SEQ ID NO: 638786 - RNA, 19 nt, Artificial Sequence
  Description of Artificial Sequence: Synthetic oligonucleotide
ugcucaggauggccauaga

SEQ ID NO: 638787 - RNA, 19 nt, Artificial Sequence
  Description of Artificial Sequence: Synthetic oligonucleotide
agccauugaugggagcccu

SEQ ID NO: 638788 - RNA, 19 nt, Artificial Sequence
  Description of Artificial Sequence: Synthetic oligonucleotide
uggcgaugugcuccaugaa

SEQ ID NO: 638789 - RNA, 19 nt, Artificial Sequence
  Description of Artificial Sequence: Synthetic oligonucleotide
cugccuaaugauccggucu

SEQ ID NO: 638790 - RNA, 19 nt, Artificial Sequence
  Description of Artificial Sequence: Synthetic oligonucleotide
gggcauggcgaugugcucc

SEQ ID NO: 638791 - RNA, 19 nt, Artificial Sequence
  Description of Artificial Sequence: Synthetic oligonucleotide
cauuggucuguugcccaug

SEQ ID NO: 638792 - RNA, 19 nt, Artificial Sequence
  Description of Artificial Sequence: Synthetic oligonucleotide
ggcaaugcugaugccgcag

SEQ ID NO: 638793 - RNA, 19 nt, Artificial Sequence
  Description of Artificial Sequence: Synthetic oligonucleotide
agacugguagagaacugua

SEQ ID NO: 638794 - RNA, 19 nt, Artificial Sequence
  Description of Artificial Sequence: Synthetic oligonucleotide
uaguuagggaaaggagcuu

SEQ ID NO: 638795 - RNA, 19 nt, Artificial Sequence
  Description of Artificial Sequence: Synthetic oligonucleotide
ggaaaggagcuugcuucag

SEQ ID NO: 638796 - RNA, 19 nt, Artificial Sequence
  Description of Artificial Sequence: Synthetic oligonucleotide
auggagacguugaucuaaa

SEQ ID NO: 638797 - RNA, 19 nt, Artificial Sequence
  Description of Artificial Sequence: Synthetic oligonucleotide
auccagcgaauuguuacuu

SEQ ID NO: 638798 - RNA, 19 nt, Artificial Sequence
  Description of Artificial Sequence: Synthetic oligonucleotide
acacguucauacagcucug

SEQ ID NO: 638799 - RNA, 19 nt, Artificial Sequence
  Description of Artificial Sequence: Synthetic oligonucleotide
gguuccaauccuaccagaa

SEQ ID NO: 638800 - RNA, 19 nt, Artificial Sequence
  Description of Artificial Sequence: Synthetic oligonucleotide
caagggacauccuggccua

SEQ ID NO: 638801 - RNA, 19 nt, Artificial Sequence
  Description of Artificial Sequence: Synthetic oligonucleotide
auccuggccuagaacccag

SEQ ID NO: 638802 - RNA, 19 nt, Artificial Sequence
  Description of Artificial Sequence: Synthetic oligonucleotide
ggccuagaacccaggaccc

SEQ ID NO: 638803 - RNA, 19 nt, Artificial Sequence
  Description of Artificial Sequence: Synthetic oligonucleotide
gaguuguuugugccucugu

SEQ ID NO: 638804 - RNA, 19 nt, Artificial Sequence
  Description of Artificial Sequence: Synthetic oligonucleotide
auccggucuugccuaguua

SEQ ID NO: 638805 - RNA, 19 nt, Artificial Sequence
  Description of Artificial Sequence: Synthetic oligonucleotide
gagagaagcccugcggggu

SEQ ID NO: 638806 - RNA, 19 nt, Artificial Sequence
  Description of Artificial Sequence: Synthetic oligonucleotide
cauaacccacuucagccau

SEQ ID NO: 638807 - RNA, 19 nt, Artificial Sequence
  Description of Artificial Sequence: Synthetic oligonucleotide
ucaggccgcgccaccugaa

SEQ ID NO: 638808 - RNA, 19 nt, Artificial Sequence
  Description of Artificial Sequence: Synthetic oligonucleotide
caggccgcgccaccugaag

SEQ ID NO: 638809 - RNA, 19 nt, Artificial Sequence
  Description of Artificial Sequence: Synthetic oligonucleotide
agcagaagugagagacaga

SEQ ID NO: 638810 - RNA, 19 nt, Artificial Sequence
  Description of Artificial Sequence: Synthetic oligonucleotide
gcacucagcccacgggacc

SEQ ID NO: 638811 - RNA, 19 nt, Artificial Sequence
  Description of Artificial Sequence: Synthetic oligonucleotide
cuccgagcuguagagugca

SEQ ID NO: 638812 - RNA, 19 nt, Artificial Sequence
  Description of Artificial Sequence: Synthetic oligonucleotide
ggaguuguuugugccucug

SEQ ID NO: 638813 - RNA, 19 nt, Artificial Sequence
  Description of Artificial Sequence: Synthetic oligonucleotide
ggauacacucagaggaaaa

SEQ ID NO: 638814 - RNA, 19 nt, Artificial Sequence
  Description of Artificial Sequence: Synthetic oligonucleotide
ggauagcauguguggguca

SEQ ID NO: 638815 - RNA, 19 nt, Artificial Sequence
  Description of Artificial Sequence: Synthetic oligonucleotide
ucgaggccaccuggaagga

SEQ ID NO: 638816 - RNA, 19 nt, Artificial Sequence
  Description of Artificial Sequence: Synthetic oligonucleotide
gcugccuaaugauccgguc

SEQ ID NO: 638817 - RNA, 19 nt, Artificial Sequence
  Description of Artificial Sequence: Synthetic oligonucleotide
agccacagguuggauccca

SEQ ID NO: 638818 - RNA, 19 nt, Artificial Sequence
  Description of Artificial Sequence: Synthetic oligonucleotide
ucaucuccauuggucuguu

SEQ ID NO: 638819 - RNA, 19 nt, Artificial Sequence
  Description of Artificial Sequence: Synthetic oligonucleotide
ugauccggucuugccuagu

SEQ ID NO: 638820 - RNA, 19 nt, Artificial Sequence
  Description of Artificial Sequence: Synthetic oligonucleotide
cggucuugccuaguuaggg

SEQ ID NO: 638821 - RNA, 19 nt, Artificial Sequence
  Description of Artificial Sequence: Synthetic oligonucleotide
agggacauccuggccuaga

SEQ ID NO: 638822 - RNA, 19 nt, Artificial Sequence
  Description of Artificial Sequence: Synthetic oligonucleotide
cacucagcccacgggacca

SEQ ID NO: 638823 - RNA, 19 nt, Artificial Sequence
  Description of Artificial Sequence: Synthetic oligonucleotide
gcugccuuggggaacaggu

SEQ ID NO: 638824 - RNA, 19 nt, Artificial Sequence
  Description of Artificial Sequence: Synthetic oligonucleotide
gauccggucuugccuaguu

SEQ ID NO: 638825 - RNA, 19 nt, Artificial Sequence
  Description of Artificial Sequence: Synthetic oligonucleotide
cugagcuacccagcuguca

SEQ ID NO: 638826 - RNA, 19 nt, Artificial Sequence
  Description of Artificial Sequence: Synthetic oligonucleotide
gaagggcgcauaaggggcu

SEQ ID NO: 638827 - RNA, 19 nt, Artificial Sequence
  Description of Artificial Sequence: Synthetic oligonucleotide
ggcgcauaaggggcugucc

SEQ ID NO: 638828 - RNA, 19 nt, Artificial Sequence
  Description of Artificial Sequence: Synthetic oligonucleotide
ggucuguugcccauggccu

SEQ ID NO: 638829 - RNA, 19 nt, Artificial Sequence
  Description of Artificial Sequence: Synthetic oligonucleotide
gccguggguguugaggaug

SEQ ID NO: 638830 - RNA, 19 nt, Artificial Sequence
  Description of Artificial Sequence: Synthetic oligonucleotide
gguacaucaucaucucauu

SEQ ID NO: 638831 - RNA, 19 nt, Artificial Sequence
  Description of Artificial Sequence: Synthetic oligonucleotide
ccuuccgggagaagugauc

SEQ ID NO: 638832 - RNA, 19 nt, Artificial Sequence
  Description of Artificial Sequence: Synthetic oligonucleotide
gugcaucagacagacuggu

SEQ ID NO: 638833 - RNA, 19 nt, Artificial Sequence
  Description of Artificial Sequence: Synthetic oligonucleotide
cauguggauauggccuuaa

SEQ ID NO: 638834 - RNA, 19 nt, Artificial Sequence
  Description of Artificial Sequence: Synthetic oligonucleotide
ccugggaaggauagcaugu

SEQ ID NO: 638835 - RNA, 19 nt, Artificial Sequence
  Description of Artificial Sequence: Synthetic oligonucleotide
gucgugacacaugcaggaa

SEQ ID NO: 638836 - RNA, 19 nt, Artificial Sequence
  Description of Artificial Sequence: Synthetic oligonucleotide
cagaguugggcagucaauu

SEQ ID NO: 638837 - RNA, 19 nt, Artificial Sequence
  Description of Artificial Sequence: Synthetic oligonucleotide
acauguggauauggccuua

SEQ ID NO: 638838 - RNA, 19 nt, Artificial Sequence
  Description of Artificial Sequence: Synthetic oligonucleotide
guucacgauuggaggccac

SEQ ID NO: 638839 - RNA, 19 nt, Artificial Sequence
  Description of Artificial Sequence: Synthetic oligonucleotide
cuucaccaucaagcagaac

SEQ ID NO: 638840 - RNA, 19 nt, Artificial Sequence
  Description of Artificial Sequence: Synthetic oligonucleotide
gcccuuugucuggucagag

SEQ ID NO: 638841 - RNA, 19 nt, Artificial Sequence
  Description of Artificial Sequence: Synthetic oligonucleotide
aggcgugcauccaguugug

SEQ ID NO: 638842 - RNA, 19 nt, Artificial Sequence
  Description of Artificial Sequence: Synthetic oligonucleotide
ucugugccuuaggguggca

SEQ ID NO: 638843 - RNA, 19 nt, Artificial Sequence
  Description of Artificial Sequence: Synthetic oligonucleotide
cggucauaacccacuucag

SEQ ID NO: 638844 - RNA, 19 nt, Artificial Sequence
  Description of Artificial Sequence: Synthetic oligonucleotide
augccgcaguagauggaga

SEQ ID NO: 638845 - RNA, 19 nt, Artificial Sequence
  Description of Artificial Sequence: Synthetic oligonucleotide
guuaggcucucugugccuu

SEQ ID NO: 638846 - RNA, 19 nt, Artificial Sequence
  Description of Artificial Sequence: Synthetic oligonucleotide
ccagcccuuugucugguca

SEQ ID NO: 638847 - RNA, 19 nt, Artificial Sequence
  Description of Artificial Sequence: Synthetic oligonucleotide
gaagucuguggugcuguuu

SEQ ID NO: 638848 - RNA, 19 nt, Artificial Sequence
  Description of Artificial Sequence: Synthetic oligonucleotide
uggaggccacacguucaua

SEQ ID NO: 638849 - RNA, 19 nt, Artificial Sequence
  Description of Artificial Sequence: Synthetic oligonucleotide
gccuaaugauccggucuug

SEQ ID NO: 638850 - RNA, 19 nt, Artificial Sequence
  Description of Artificial Sequence: Synthetic oligonucleotide
ggaaauccagcgaauuguu

SEQ ID NO: 638851 - RNA, 19 nt, Artificial Sequence
  Description of Artificial Sequence: Synthetic oligonucleotide
gcagucaauuuuguuaguu

SEQ ID NO: 638852 - RNA, 19 nt, Artificial Sequence
  Description of Artificial Sequence: Synthetic oligonucleotide
cagggcagggagggucccc

SEQ ID NO: 638853 - RNA, 19 nt, Artificial Sequence
  Description of Artificial Sequence: Synthetic oligonucleotide
ggagcccuggugccgucca

SEQ ID NO: 638854 - RNA, 19 nt, Artificial Sequence
  Description of Artificial Sequence: Synthetic oligonucleotide
cgcaaucuuucuagugguc

SEQ ID NO: 638855 - RNA, 19 nt, Artificial Sequence
  Description of Artificial Sequence: Synthetic oligonucleotide
agggcgcauaaggggcugu

SEQ ID NO: 638856 - RNA, 19 nt, Artificial Sequence
  Description of Artificial Sequence: Synthetic oligonucleotide
gguuaggcucucugugccu

SEQ ID NO: 638857 - RNA, 19 nt, Artificial Sequence
  Description of Artificial Sequence: Synthetic oligonucleotide
ccgcgccaccugaagggcg

SEQ ID NO: 638858 - RNA, 19 nt, Artificial Sequence
  Description of Artificial Sequence: Synthetic oligonucleotide
cgcgccaccugaagggcgc

SEQ ID NO: 638859 - RNA, 19 nt, Artificial Sequence
  Description of Artificial Sequence: Synthetic oligonucleotide
ggccaaggggauacacuca

SEQ ID NO: 638860 - RNA, 19 nt, Artificial Sequence
  Description of Artificial Sequence: Synthetic oligonucleotide
cccuuugucuggucagaga

SEQ ID NO: 638861 - RNA, 19 nt, Artificial Sequence
  Description of Artificial Sequence: Synthetic oligonucleotide
ggaucccaucauggagaag

SEQ ID NO: 638862 - RNA, 19 nt, Artificial Sequence
  Description of Artificial Sequence: Synthetic oligonucleotide
gccguccaaaucgggcacc

SEQ ID NO: 638863 - RNA, 19 nt, Artificial Sequence
  Description of Artificial Sequence: Synthetic oligonucleotide
gccauugaugggagcccug

SEQ ID NO: 638864 - RNA, 19 nt, Artificial Sequence
  Description of Artificial Sequence: Synthetic oligonucleotide
ccgcaaucuuucuaguggu

SEQ ID NO: 638865 - RNA, 19 nt, Artificial Sequence
  Description of Artificial Sequence: Synthetic oligonucleotide
cccugcgggguaaggccag

SEQ ID NO: 638866 - RNA, 19 nt, Artificial Sequence
  Description of Artificial Sequence: Synthetic oligonucleotide
ugggagcccuggugccguc

SEQ ID NO: 638867 - RNA, 19 nt, Artificial Sequence
  Description of Artificial Sequence: Synthetic oligonucleotide
ccacgggaccacacacaac

SEQ ID NO: 638868 - RNA, 19 nt, Artificial Sequence
  Description of Artificial Sequence: Synthetic oligonucleotide
gguccaacaugcgcugaua

SEQ ID NO: 638869 - RNA, 19 nt, Artificial Sequence
  Description of Artificial Sequence: Synthetic oligonucleotide
cgugacacaugcaggaaau

SEQ ID NO: 638870 - RNA, 19 nt, Artificial Sequence
  Description of Artificial Sequence: Synthetic oligonucleotide
ggguguugaggauggcaau

SEQ ID NO: 638871 - RNA, 19 nt, Artificial Sequence
  Description of Artificial Sequence: Synthetic oligonucleotide
guccucgagguagcuggaa

SEQ ID NO: 638872 - RNA, 19 nt, Artificial Sequence
  Description of Artificial Sequence: Synthetic oligonucleotide
gguagccuuucuucaccau

SEQ ID NO: 638873 - RNA, 19 nt, Artificial Sequence
  Description of Artificial Sequence: Synthetic oligonucleotide
cucaggccaaggggauaca

SEQ ID NO: 638874 - RNA, 19 nt, Artificial Sequence
  Description of Artificial Sequence: Synthetic oligonucleotide
guggaucucgguagccuuu

SEQ ID NO: 638875 - RNA, 19 nt, Artificial Sequence
  Description of Artificial Sequence: Synthetic oligonucleotide
gggcgcauaaggggcuguc

SEQ ID NO: 638876 - RNA, 19 nt, Artificial Sequence
  Description of Artificial Sequence: Synthetic oligonucleotide
ggaucucgguagccuuucu

SEQ ID NO: 638877 - RNA, 19 nt, Artificial Sequence
  Description of Artificial Sequence: Synthetic oligonucleotide
ggcugccuaaugauccggu

SEQ ID NO: 638878 - RNA, 19 nt, Artificial Sequence
  Description of Artificial Sequence: Synthetic oligonucleotide
gcccugcgggguaaggcca

SEQ ID NO: 638879 - RNA, 19 nt, Artificial Sequence
  Description of Artificial Sequence: Synthetic oligonucleotide
ccauggagacguugaucua

SEQ ID NO: 638880 - RNA, 19 nt, Artificial Sequence
  Description of Artificial Sequence: Synthetic oligonucleotide
ccuagaacccaggacccau

SEQ ID NO: 638881 - RNA, 19 nt, Artificial Sequence
  Description of Artificial Sequence: Synthetic oligonucleotide
gccaccugaagggcgcaua

SEQ ID NO: 638882 - RNA, 19 nt, Artificial Sequence
  Description of Artificial Sequence: Synthetic oligonucleotide
cgaggaguguagguaaagu

SEQ ID NO: 638883 - RNA, 19 nt, Artificial Sequence
  Description of Artificial Sequence: Synthetic oligonucleotide
ccuuaggguggcagagcau

SEQ ID NO: 638884 - RNA, 19 nt, Artificial Sequence
  Description of Artificial Sequence: Synthetic oligonucleotide
cguccaaaucgggcaccuc

SEQ ID NO: 638885 - RNA, 19 nt, Artificial Sequence
  Description of Artificial Sequence: Synthetic oligonucleotide
cgauuggaggccacacguu

SEQ ID NO: 638886 - RNA, 19 nt, Artificial Sequence
  Description of Artificial Sequence: Synthetic oligonucleotide
ccguccaaaucgggcaccu

SEQ ID NO: 638887 - RNA, 19 nt, Artificial Sequence
  Description of Artificial Sequence: Synthetic oligonucleotide
gcgccaccugaagggcgca

SEQ ID NO: 638888 - RNA, 19 nt, Artificial Sequence
  Description of Artificial Sequence: Synthetic oligonucleotide
gcccuccgagcuguagagu

SEQ ID NO: 638889 - RNA, 19 nt, Artificial Sequence
  Description of Artificial Sequence: Synthetic oligonucleotide
cugcgguacugggccucau

SEQ ID NO: 638890 - RNA, 19 nt, Artificial Sequence
  Description of Artificial Sequence: Synthetic oligonucleotide
agaacuaaccaauaggucc

SEQ ID NO: 638891 - RNA, 19 nt, Artificial Sequence
  Description of Artificial Sequence: Synthetic oligonucleotide
aacuccuaacuucauaucc

SEQ ID NO: 638892 - RNA, 19 nt, Artificial Sequence
  Description of Artificial Sequence: Synthetic oligonucleotide
auacauaucagcuuugcag

SEQ ID NO: 638893 - RNA, 19 nt, Artificial Sequence
  Description of Artificial Sequence: Synthetic oligonucleotide
aguaguuuaacuccuaacu

SEQ ID NO: 638894 - RNA, 19 nt, Artificial Sequence
  Description of Artificial Sequence: Synthetic oligonucleotide
uaauuaauccccuaaucug

SEQ ID NO: 638895 - RNA, 19 nt, Artificial Sequence
  Description of Artificial Sequence: Synthetic oligonucleotide
aguaauuaauccccuaauc

SEQ ID NO: 638896 - RNA, 19 nt, Artificial Sequence
  Description of Artificial Sequence: Synthetic oligonucleotide
aaaguaauuaauccccuaa

SEQ ID NO: 638897 - RNA, 19 nt, Artificial Sequence
  Description of Artificial Sequence: Synthetic oligonucleotide
cuaacuucauauccaaugg

SEQ ID NO: 638898 - RNA, 19 nt, Artificial Sequence
  Description of Artificial Sequence: Synthetic oligonucleotide
auuuacagggugcugcccc

SEQ ID NO: 638899 - RNA, 19 nt, Artificial Sequence
  Description of Artificial Sequence: Synthetic oligonucleotide
uuaacuccuaacuucauau

SEQ ID NO: 638900 - RNA, 19 nt, Artificial Sequence
  Description of Artificial Sequence: Synthetic oligonucleotide
cuuccaguaguuuaacucc

SEQ ID NO: 638901 - RNA, 19 nt, Artificial Sequence
  Description of Artificial Sequence: Synthetic oligonucleotide
uucacacacacacacacac

SEQ ID NO: 638902 - RNA, 19 nt, Artificial Sequence
  Description of Artificial Sequence: Synthetic oligonucleotide
ucuacagucccugagauuc

SEQ ID NO: 638903 - RNA, 19 nt, Artificial Sequence
  Description of Artificial Sequence: Synthetic oligonucleotide
gagacaugcacucaggauc

SEQ ID NO: 638904 - RNA, 19 nt, Artificial Sequence
  Description of Artificial Sequence: Synthetic oligonucleotide
aauggaaucugugaacaug

SEQ ID NO: 638905 - RNA, 19 nt, Artificial Sequence
  Description of Artificial Sequence: Synthetic oligonucleotide
guaccaagcaguuggagag

SEQ ID NO: 638906 - RNA, 19 nt, Artificial Sequence
  Description of Artificial Sequence: Synthetic oligonucleotide
aaccauuauaagcaggaau

SEQ ID NO: 638907 - RNA, 19 nt, Artificial Sequence
  Description of Artificial Sequence: Synthetic oligonucleotide
agaccuaucaccagcagac

SEQ ID NO: 638908 - RNA, 19 nt, Artificial Sequence
  Description of Artificial Sequence: Synthetic oligonucleotide
gaaucugaacuccuggagc

SEQ ID NO: 638909 - RNA, 19 nt, Artificial Sequence
  Description of Artificial Sequence: Synthetic oligonucleotide
gaugcuacauaugcggugg

SEQ ID NO: 638910 - RNA, 19 nt, Artificial Sequence
  Description of Artificial Sequence: Synthetic oligonucleotide
aggcgcaauacauaucagc

SEQ ID NO: 638911 - RNA, 19 nt, Artificial Sequence
  Description of Artificial Sequence: Synthetic oligonucleotide
ucaguauucguuggcaagg

SEQ ID NO: 638912 - RNA, 19 nt, Artificial Sequence
  Description of Artificial Sequence: Synthetic oligonucleotide
agaguugucaccccaacga

SEQ ID NO: 638913 - RNA, 19 nt, Artificial Sequence
  Description of Artificial Sequence: Synthetic oligonucleotide
ucacuugaccugcaagucg

SEQ ID NO: 638914 - RNA, 19 nt, Artificial Sequence
  Description of Artificial Sequence: Synthetic oligonucleotide
uauccaauggaaucuguga

SEQ ID NO: 638915 - RNA, 19 nt, Artificial Sequence
  Description of Artificial Sequence: Synthetic oligonucleotide
acaacgguugccucagccc

SEQ ID NO: 638916 - RNA, 19 nt, Artificial Sequence
  Description of Artificial Sequence: Synthetic oligonucleotide
gguugauucggcuucaugc

SEQ ID NO: 638917 - RNA, 19 nt, Artificial Sequence
  Description of Artificial Sequence: Synthetic oligonucleotide
aaguaauuaauccccuaau

SEQ ID NO: 638918 - RNA, 19 nt, Artificial Sequence
  Description of Artificial Sequence: Synthetic oligonucleotide
agaaguuucccaccacaac

SEQ ID NO: 638919 - RNA, 19 nt, Artificial Sequence
  Description of Artificial Sequence: Synthetic oligonucleotide
cuuaaaaggucagaaggag

SEQ ID NO: 638920 - RNA, 19 nt, Artificial Sequence
  Description of Artificial Sequence: Synthetic oligonucleotide
ucuugugggucuuuggaug

SEQ ID NO: 638921 - RNA, 19 nt, Artificial Sequence
  Description of Artificial Sequence: Synthetic oligonucleotide
uuggaugagauacguagac

SEQ ID NO: 638922 - RNA, 19 nt, Artificial Sequence
  Description of Artificial Sequence: Synthetic oligonucleotide
agacucagaguugucaccc

SEQ ID NO: 638923 - RNA, 19 nt, Artificial Sequence
  Description of Artificial Sequence: Synthetic oligonucleotide
uucauauccaauggaaucu

SEQ ID NO: 638924 - RNA, 19 nt, Artificial Sequence
  Description of Artificial Sequence: Synthetic oligonucleotide
gagucguuaaguccugggg

SEQ ID NO: 638925 - RNA, 19 nt, Artificial Sequence
  Description of Artificial Sequence: Synthetic oligonucleotide
uagacuguuccugggaugg

SEQ ID NO: 638926 - RNA, 19 nt, Artificial Sequence
  Description of Artificial Sequence: Synthetic oligonucleotide
gauacguagacuguuccug

SEQ ID NO: 638927 - RNA, 19 nt, Artificial Sequence
  Description of Artificial Sequence: Synthetic oligonucleotide
ugagacugagacaugcacu

SEQ ID NO: 638928 - RNA, 19 nt, Artificial Sequence
  Description of Artificial Sequence: Synthetic oligonucleotide
ggaugagauacguagacug

SEQ ID NO: 638929 - RNA, 19 nt, Artificial Sequence
  Description of Artificial Sequence: Synthetic oligonucleotide
ucgaugguaacagacuucc

SEQ ID NO: 638930 - RNA, 19 nt, Artificial Sequence
  Description of Artificial Sequence: Synthetic oligonucleotide
guugauucggcuucaugcc

SEQ ID NO: 638931 - RNA, 19 nt, Artificial Sequence
  Description of Artificial Sequence: Synthetic oligonucleotide
aguaccaagcaguuggaga

SEQ ID NO: 638932 - RNA, 19 nt, Artificial Sequence
  Description of Artificial Sequence: Synthetic oligonucleotide
ugagucucgaugguaacag

SEQ ID NO: 638933 - RNA, 19 nt, Artificial Sequence
  Description of Artificial Sequence: Synthetic oligonucleotide
caacgaucagaccaauugg

SEQ ID NO: 638934 - RNA, 19 nt, Artificial Sequence
  Description of Artificial Sequence: Synthetic oligonucleotide
cacgauacaggugacauug

SEQ ID NO: 638935 - RNA, 19 nt, Artificial Sequence
  Description of Artificial Sequence: Synthetic oligonucleotide
auacguagacuguuccugg

SEQ ID NO: 638936 - RNA, 19 nt, Artificial Sequence
  Description of Artificial Sequence: Synthetic oligonucleotide
cacuugaccugcaagucgg

SEQ ID NO: 638937 - RNA, 19 nt, Artificial Sequence
  Description of Artificial Sequence: Synthetic oligonucleotide
agacccucggaccuccucc

SEQ ID NO: 638938 - RNA, 19 nt, Artificial Sequence
  Description of Artificial Sequence: Synthetic oligonucleotide
gagacugagacaugcacuc

SEQ ID NO: 638939 - RNA, 19 nt, Artificial Sequence
  Description of Artificial Sequence: Synthetic oligonucleotide
aaaaguaauuaauccccua

SEQ ID NO: 638940 - RNA, 19 nt, Artificial Sequence
  Description of Artificial Sequence: Synthetic oligonucleotide
auaacaccauggcagaagu

SEQ ID NO: 638941 - RNA, 19 nt, Artificial Sequence
  Description of Artificial Sequence: Synthetic oligonucleotide
caaggaugcuacauaugcg

SEQ ID NO: 638942 - RNA, 19 nt, Artificial Sequence
  Description of Artificial Sequence: Synthetic oligonucleotide
aggauguuagcuccuuggg

SEQ ID NO: 638943 - RNA, 19 nt, Artificial Sequence
  Description of Artificial Sequence: Synthetic oligonucleotide
cacacacacacacacacac

SEQ ID NO: 638944 - RNA, 19 nt, Artificial Sequence
  Description of Artificial Sequence: Synthetic oligonucleotide
auuggcagaucuugugccg

SEQ ID NO: 638945 - RNA, 19 nt, Artificial Sequence
  Description of Artificial Sequence: Synthetic oligonucleotide
gagauacguagacuguucc

SEQ ID NO: 638946 - RNA, 19 nt, Artificial Sequence
  Description of Artificial Sequence: Synthetic oligonucleotide
uuguugccgaggaagcccg

SEQ ID NO: 638947 - RNA, 19 nt, Artificial Sequence
  Description of Artificial Sequence: Synthetic oligonucleotide
agucguuaaguccugggga

SEQ ID NO: 638948 - RNA, 19 nt, Artificial Sequence
  Description of Artificial Sequence: Synthetic oligonucleotide
aacuucauauccaauggaa

SEQ ID NO: 638949 - RNA, 19 nt, Artificial Sequence
  Description of Artificial Sequence: Synthetic oligonucleotide
uuuguugccgaggaagccc

SEQ ID NO: 638950 - RNA, 19 nt, Artificial Sequence
  Description of Artificial Sequence: Synthetic oligonucleotide
agcaggaauuaauucuguc

SEQ ID NO: 638951 - RNA, 19 nt, Artificial Sequence
  Description of Artificial Sequence: Synthetic oligonucleotide
ugugugcccacauggaaga

SEQ ID NO: 638952 - RNA, 19 nt, Artificial Sequence
  Description of Artificial Sequence: Synthetic oligonucleotide
agagucguuaaguccuggg

SEQ ID NO: 638953 - RNA, 19 nt, Artificial Sequence
  Description of Artificial Sequence: Synthetic oligonucleotide
uuggcaaggcgcaauacau

SEQ ID NO: 638954 - RNA, 19 nt, Artificial Sequence
  Description of Artificial Sequence: Synthetic oligonucleotide
cuuagcacacccuguuggg

SEQ ID NO: 638955 - RNA, 19 nt, Artificial Sequence
  Description of Artificial Sequence: Synthetic oligonucleotide
caaggcgcaauacauauca

SEQ ID NO: 638956 - RNA, 19 nt, Artificial Sequence
  Description of Artificial Sequence: Synthetic oligonucleotide
aacgaucagaccaauugga

SEQ ID NO: 638957 - RNA, 19 nt, Artificial Sequence
  Description of Artificial Sequence: Synthetic oligonucleotide
uccaauggaaucugugaac

SEQ ID NO: 638958 - RNA, 19 nt, Artificial Sequence
  Description of Artificial Sequence: Synthetic oligonucleotide
uugauucggcuucaugccc

SEQ ID NO: 638959 - RNA, 19 nt, Artificial Sequence
  Description of Artificial Sequence: Synthetic oligonucleotide
aguauucguuggcaaggcg

SEQ ID NO: 638960 - RNA, 19 nt, Artificial Sequence
  Description of Artificial Sequence: Synthetic oligonucleotide
gucaguauucguuggcaag

SEQ ID NO: 638961 - RNA, 19 nt, Artificial Sequence
  Description of Artificial Sequence: Synthetic oligonucleotide
ugagauacguagacuguuc

SEQ ID NO: 638962 - RNA, 19 nt, Artificial Sequence
  Description of Artificial Sequence: Synthetic oligonucleotide
ugcacauaucuguggauga

SEQ ID NO: 638963 - RNA, 19 nt, Artificial Sequence
  Description of Artificial Sequence: Synthetic oligonucleotide
cuugcauuuccaggaaugg

SEQ ID NO: 638964 - RNA, 19 nt, Artificial Sequence
  Description of Artificial Sequence: Synthetic oligonucleotide
uuuguaagcaggagggcuu

SEQ ID NO: 638965 - RNA, 19 nt, Artificial Sequence
  Description of Artificial Sequence: Synthetic oligonucleotide
guauucguuggcaaggcgc

SEQ ID NO: 638966 - RNA, 19 nt, Artificial Sequence
  Description of Artificial Sequence: Synthetic oligonucleotide
accauuauaagcaggaauu

SEQ ID NO: 638967 - RNA, 19 nt, Artificial Sequence
  Description of Artificial Sequence: Synthetic oligonucleotide
uuggaaggguuccuuaaaa

SEQ ID NO: 638968 - RNA, 19 nt, Artificial Sequence
  Description of Artificial Sequence: Synthetic oligonucleotide
ugauucggcuucaugccca

SEQ ID NO: 638969 - RNA, 19 nt, Artificial Sequence
  Description of Artificial Sequence: Synthetic oligonucleotide
aauggcaaggaugcuacau

SEQ ID NO: 638970 - RNA, 19 nt, Artificial Sequence
  Description of Artificial Sequence: Synthetic oligonucleotide
caccauuggugcuaugugc

SEQ ID NO: 638971 - RNA, 19 nt, Artificial Sequence
  Description of Artificial Sequence: Synthetic oligonucleotide
uacguagacuguuccuggg

SEQ ID NO: 638972 - RNA, 19 nt, Artificial Sequence
  Description of Artificial Sequence: Synthetic oligonucleotide
uguuagcuccuugggaggg

SEQ ID NO: 638973 - RNA, 19 nt, Artificial Sequence
  Description of Artificial Sequence: Synthetic oligonucleotide
agccuuaugcacugucgac

SEQ ID NO: 638974 - RNA, 19 nt, Artificial Sequence
  Description of Artificial Sequence: Synthetic oligonucleotide
uucacgauacaggugacau

SEQ ID NO: 638975 - RNA, 19 nt, Artificial Sequence
  Description of Artificial Sequence: Synthetic oligonucleotide
gacugccccauauaacacc

SEQ ID NO: 638976 - RNA, 19 nt, Artificial Sequence
  Description of Artificial Sequence: Synthetic oligonucleotide
uuccaguaguuuaacuccu

SEQ ID NO: 638977 - RNA, 19 nt, Artificial Sequence
  Description of Artificial Sequence: Synthetic oligonucleotide
aaucaggcaagagcccggg

SEQ ID NO: 638978 - RNA, 19 nt, Artificial Sequence
  Description of Artificial Sequence: Synthetic oligonucleotide
cugugugcccacauggaag

SEQ ID NO: 638979 - RNA, 19 nt, Artificial Sequence
  Description of Artificial Sequence: Synthetic oligonucleotide
ugggaagaaucugaacucc

SEQ ID NO: 638980 - RNA, 19 nt, Artificial Sequence
  Description of Artificial Sequence: Synthetic oligonucleotide
aggacacuccuccugggag

SEQ ID NO: 638981 - RNA, 19 nt, Artificial Sequence
  Description of Artificial Sequence: Synthetic oligonucleotide
cuuugcaggugcacacucg

SEQ ID NO: 638982 - RNA, 19 nt, Artificial Sequence
  Description of Artificial Sequence: Synthetic oligonucleotide
caccuucacacacacacac

SEQ ID NO: 638983 - RNA, 19 nt, Artificial Sequence
  Description of Artificial Sequence: Synthetic oligonucleotide
cauauaacaccauggcaga

SEQ ID NO: 638984 - RNA, 19 nt, Artificial Sequence
  Description of Artificial Sequence: Synthetic oligonucleotide
uaugcgguggggcuugcac

SEQ ID NO: 638985 - RNA, 19 nt, Artificial Sequence
  Description of Artificial Sequence: Synthetic oligonucleotide
ccaacgaucagaccaauug

SEQ ID NO: 638986 - RNA, 19 nt, Artificial Sequence
  Description of Artificial Sequence: Synthetic oligonucleotide
cacacaagcacgggaacgg

SEQ ID NO: 638987 - RNA, 19 nt, Artificial Sequence
  Description of Artificial Sequence: Synthetic oligonucleotide
agauacguagacuguuccu

SEQ ID NO: 638988 - RNA, 19 nt, Artificial Sequence
  Description of Artificial Sequence: Synthetic oligonucleotide
cuaaucuggucuaagccaa

SEQ ID NO: 638989 - RNA, 19 nt, Artificial Sequence
  Description of Artificial Sequence: Synthetic oligonucleotide
caccccaacgaucagacca

SEQ ID NO: 638990 - RNA, 19 nt, Artificial Sequence
  Description of Artificial Sequence: Synthetic oligonucleotide
ccuucggggauccugaggg

SEQ ID NO: 638991 - RNA, 19 nt, Artificial Sequence
  Description of Artificial Sequence: Synthetic oligonucleotide
gguaacagacuuccaguag

SEQ ID NO: 638992 - RNA, 19 nt, Artificial Sequence
  Description of Artificial Sequence: Synthetic oligonucleotide
gaacggaggcaacacccag

SEQ ID NO: 638993 - RNA, 19 nt, Artificial Sequence
  Description of Artificial Sequence: Synthetic oligonucleotide
uggcaaggaugcuacauau

SEQ ID NO: 638994 - RNA, 19 nt, Artificial Sequence
  Description of Artificial Sequence: Synthetic oligonucleotide
uugccgaggaagcccgagg

SEQ ID NO: 638995 - RNA, 19 nt, Artificial Sequence
  Description of Artificial Sequence: Synthetic oligonucleotide
uggugucagagaacguccc

SEQ ID NO: 638996 - RNA, 19 nt, Artificial Sequence
  Description of Artificial Sequence: Synthetic oligonucleotide
ggauugagggucuagaacu

SEQ ID NO: 638997 - RNA, 19 nt, Artificial Sequence
  Description of Artificial Sequence: Synthetic oligonucleotide
ugucaguauucguuggcaa

SEQ ID NO: 638998 - RNA, 19 nt, Artificial Sequence
  Description of Artificial Sequence: Synthetic oligonucleotide
gugucagagaacguccccg

SEQ ID NO: 638999 - RNA, 19 nt, Artificial Sequence
  Description of Artificial Sequence: Synthetic oligonucleotide
agccaagacaacaacaaaa

SEQ ID NO: 639000 - RNA, 19 nt, Artificial Sequence
  Description of Artificial Sequence: Synthetic oligonucleotide
uccuucggggauccugagg

SEQ ID NO: 639001 - RNA, 19 nt, Artificial Sequence
  Description of Artificial Sequence: Synthetic oligonucleotide
aauccccuaaucuggucua

SEQ ID NO: 639002 - RNA, 19 nt, Artificial Sequence
  Description of Artificial Sequence: Synthetic oligonucleotide
cacaacgguugccucagcc

SEQ ID NO: 639003 - RNA, 19 nt, Artificial Sequence
  Description of Artificial Sequence: Synthetic oligonucleotide
ucacacacacacacacaca

SEQ ID NO: 639004 - RNA, 19 nt, Artificial Sequence
  Description of Artificial Sequence: Synthetic oligonucleotide
uugcauuuccaggaauggc

SEQ ID NO: 639005 - RNA, 19 nt, Artificial Sequence
  Description of Artificial Sequence: Synthetic oligonucleotide
ggaauuaauucuguccagc

SEQ ID NO: 639006 - RNA, 19 nt, Artificial Sequence
  Description of Artificial Sequence: Synthetic oligonucleotide
gaaucaggcaagagcccgg

SEQ ID NO: 639007 - RNA, 19 nt, Artificial Sequence
  Description of Artificial Sequence: Synthetic oligonucleotide
ugcuacauaugcggugggg

SEQ ID NO: 639008 - RNA, 19 nt, Artificial Sequence
  Description of Artificial Sequence: Synthetic oligonucleotide
guaacagacuuccaguagu

SEQ ID NO: 639009 - RNA, 19 nt, Artificial Sequence
  Description of Artificial Sequence: Synthetic oligonucleotide
uucuucguccccacgcgcu

SEQ ID NO: 639010 - RNA, 19 nt, Artificial Sequence
  Description of Artificial Sequence: Synthetic oligonucleotide
aggccgcuaagggagaugg

SEQ ID NO: 639011 - RNA, 19 nt, Artificial Sequence
  Description of Artificial Sequence: Synthetic oligonucleotide
aagagucguuaaguccugg

SEQ ID NO: 639012 - RNA, 19 nt, Artificial Sequence
  Description of Artificial Sequence: Synthetic oligonucleotide
cacacacacacacacaaaa

SEQ ID NO: 639013 - RNA, 19 nt, Artificial Sequence
  Description of Artificial Sequence: Synthetic oligonucleotide
uaacagacuuccaguaguu

SEQ ID NO: 639014 - RNA, 19 nt, Artificial Sequence
  Description of Artificial Sequence: Synthetic oligonucleotide
uugagucucgaugguaaca

SEQ ID NO: 639015 - RNA, 19 nt, Artificial Sequence
  Description of Artificial Sequence: Synthetic oligonucleotide
ugguugauucggcuucaug

SEQ ID NO: 639016 - RNA, 19 nt, Artificial Sequence
  Description of Artificial Sequence: Synthetic oligonucleotide
ucuuuguaagcaggagggc

SEQ ID NO: 639017 - RNA, 19 nt, Artificial Sequence
  Description of Artificial Sequence: Synthetic oligonucleotide
ugccgaggaagcccgaggu

SEQ ID NO: 639018 - RNA, 19 nt, Artificial Sequence
  Description of Artificial Sequence: Synthetic oligonucleotide
ugcagagaacuaaccaaua

SEQ ID NO: 639019 - RNA, 19 nt, Artificial Sequence
  Description of Artificial Sequence: Synthetic oligonucleotide
cacacacacacacacacaa

SEQ ID NO: 639020 - RNA, 19 nt, Artificial Sequence
  Description of Artificial Sequence: Synthetic oligonucleotide
gguccuaagucuugauucc

SEQ ID NO: 639021 - RNA, 19 nt, Artificial Sequence
  Description of Artificial Sequence: Synthetic oligonucleotide
cagcugucaguauucguug

SEQ ID NO: 639022 - RNA, 19 nt, Artificial Sequence
  Description of Artificial Sequence: Synthetic oligonucleotide
guagacuguuccugggaug

SEQ ID NO: 639023 - RNA, 19 nt, Artificial Sequence
  Description of Artificial Sequence: Synthetic oligonucleotide
uuuacagggugcugccccu

SEQ ID NO: 639024 - RNA, 19 nt, Artificial Sequence
  Description of Artificial Sequence: Synthetic oligonucleotide
agcuacuggggccucucag

SEQ ID NO: 639025 - RNA, 19 nt, Artificial Sequence
  Description of Artificial Sequence: Synthetic oligonucleotide
ccuucacacacacacacac

SEQ ID NO: 639026 - RNA, 19 nt, Artificial Sequence
  Description of Artificial Sequence: Synthetic oligonucleotide
gaccaauuggaagagagau

SEQ ID NO: 639027 - RNA, 19 nt, Artificial Sequence
  Description of Artificial Sequence: Synthetic oligonucleotide
uggaugagauacguagacu

SEQ ID NO: 639028 - RNA, 19 nt, Artificial Sequence
  Description of Artificial Sequence: Synthetic oligonucleotide
acuccuaacuucauaucca

SEQ ID NO: 639029 - RNA, 19 nt, Artificial Sequence
  Description of Artificial Sequence: Synthetic oligonucleotide
cagggugcagacguguucc

SEQ ID NO: 639030 - RNA, 19 nt, Artificial Sequence
  Description of Artificial Sequence: Synthetic oligonucleotide
gaacuaaccaauagguccu

SEQ ID NO: 639031 - RNA, 19 nt, Artificial Sequence
  Description of Artificial Sequence: Synthetic oligonucleotide
guggugucagagaacgucc

SEQ ID NO: 639032 - RNA, 19 nt, Artificial Sequence
  Description of Artificial Sequence: Synthetic oligonucleotide
cacaagcacgggaacggag

SEQ ID NO: 639033 - RNA, 19 nt, Artificial Sequence
  Description of Artificial Sequence: Synthetic oligonucleotide
caagcacgggaacggaggc

SEQ ID NO: 639034 - RNA, 19 nt, Artificial Sequence
  Description of Artificial Sequence: Synthetic oligonucleotide
acccuguuggggcccacac

SEQ ID NO: 639035 - RNA, 19 nt, Artificial Sequence
  Description of Artificial Sequence: Synthetic oligonucleotide
aucagcuuugcaggugcac

SEQ ID NO: 639036 - RNA, 19 nt, Artificial Sequence
  Description of Artificial Sequence: Synthetic oligonucleotide
agcuccuugggagggaaag

SEQ ID NO: 639037 - RNA, 19 nt, Artificial Sequence
  Description of Artificial Sequence: Synthetic oligonucleotide
uuaauccccuaaucugguc

SEQ ID NO: 639038 - RNA, 19 nt, Artificial Sequence
  Description of Artificial Sequence: Synthetic oligonucleotide
aggcgcuguugcucuaggc

SEQ ID NO: 639039 - RNA, 19 nt, Artificial Sequence
  Description of Artificial Sequence: Synthetic oligonucleotide
cccuaaucuggucuaagcc

SEQ ID NO: 639040 - RNA, 19 nt, Artificial Sequence
  Description of Artificial Sequence: Synthetic oligonucleotide
ucuucguccccacgcgcug

SEQ ID NO: 639041 - RNA, 19 nt, Artificial Sequence
  Description of Artificial Sequence: Synthetic oligonucleotide
gacccucggaccuccuccg

SEQ ID NO: 639042 - RNA, 19 nt, Artificial Sequence
  Description of Artificial Sequence: Synthetic oligonucleotide
aacgaagguguggccuugg

SEQ ID NO: 639043 - RNA, 19 nt, Artificial Sequence
  Description of Artificial Sequence: Synthetic oligonucleotide
ugugccggccacuccgaag

SEQ ID NO: 639044 - RNA, 19 nt, Artificial Sequence
  Description of Artificial Sequence: Synthetic oligonucleotide
cacauaucuguggaugaug

SEQ ID NO: 639045 - RNA, 19 nt, Artificial Sequence
  Description of Artificial Sequence: Synthetic oligonucleotide
ccuugcauaccacauuccc

SEQ ID NO: 639046 - RNA, 19 nt, Artificial Sequence
  Description of Artificial Sequence: Synthetic oligonucleotide
ggcgcuguugcucuaggcc

SEQ ID NO: 639047 - RNA, 19 nt, Artificial Sequence
  Description of Artificial Sequence: Synthetic oligonucleotide
agauuccccugaacgaagg

SEQ ID NO: 639048 - RNA, 19 nt, Artificial Sequence
  Description of Artificial Sequence: Synthetic oligonucleotide
ucuaggccucaccuuggcu

SEQ ID NO: 639049 - RNA, 19 nt, Artificial Sequence
  Description of Artificial Sequence: Synthetic oligonucleotide
cuugugggucuuuggauga

SEQ ID NO: 639050 - RNA, 19 nt, Artificial Sequence
  Description of Artificial Sequence: Synthetic oligonucleotide
uggggauugagggucuaga

SEQ ID NO: 639051 - RNA, 19 nt, Artificial Sequence
  Description of Artificial Sequence: Synthetic oligonucleotide
gaagcccgaggucaucuca

SEQ ID NO: 639052 - RNA, 19 nt, Artificial Sequence
  Description of Artificial Sequence: Synthetic oligonucleotide
uccguuccauucauguuuu

SEQ ID NO: 639053 - RNA, 19 nt, Artificial Sequence
  Description of Artificial Sequence: Synthetic oligonucleotide
guaguuuaacuccuaacuu

SEQ ID NO: 639054 - RNA, 19 nt, Artificial Sequence
  Description of Artificial Sequence: Synthetic oligonucleotide
uccuaacuucauauccaau

SEQ ID NO: 639055 - RNA, 19 nt, Artificial Sequence
  Description of Artificial Sequence: Synthetic oligonucleotide
uagaacuggggcugugguc

SEQ ID NO: 639056 - RNA, 19 nt, Artificial Sequence
  Description of Artificial Sequence: Synthetic oligonucleotide
ccuaaucuggucuaagcca

SEQ ID NO: 639057 - RNA, 19 nt, Artificial Sequence
  Description of Artificial Sequence: Synthetic oligonucleotide
augcuacauaugcgguggg

SEQ ID NO: 639058 - RNA, 19 nt, Artificial Sequence
  Description of Artificial Sequence: Synthetic oligonucleotide
aggaucaccguggguacag

SEQ ID NO: 639059 - RNA, 19 nt, Artificial Sequence
  Description of Artificial Sequence: Synthetic oligonucleotide
ccuuaaaaggucagaagga

SEQ ID NO: 639060 - RNA, 19 nt, Artificial Sequence
  Description of Artificial Sequence: Synthetic oligonucleotide
cuucuucguccccacgcgc

SEQ ID NO: 639061 - RNA, 19 nt, Artificial Sequence
  Description of Artificial Sequence: Synthetic oligonucleotide
aaggcgcaauacauaucag

SEQ ID NO: 639062 - RNA, 19 nt, Artificial Sequence
  Description of Artificial Sequence: Synthetic oligonucleotide
caguauucguuggcaaggc

SEQ ID NO: 639063 - RNA, 19 nt, Artificial Sequence
  Description of Artificial Sequence: Synthetic oligonucleotide
gcuacauaugcgguggggc

SEQ ID NO: 639064 - RNA, 19 nt, Artificial Sequence
  Description of Artificial Sequence: Synthetic oligonucleotide
augagauacguagacuguu

SEQ ID NO: 639065 - RNA, 19 nt, Artificial Sequence
  Description of Artificial Sequence: Synthetic oligonucleotide
uccaguaguuuaacuccua

SEQ ID NO: 639066 - RNA, 19 nt, Artificial Sequence
  Description of Artificial Sequence: Synthetic oligonucleotide
gcaacacccagauacuguc

SEQ ID NO: 639067 - RNA, 19 nt, Artificial Sequence
  Description of Artificial Sequence: Synthetic oligonucleotide
agggacaccaagggguaag

SEQ ID NO: 639068 - RNA, 19 nt, Artificial Sequence
  Description of Artificial Sequence: Synthetic oligonucleotide
agcccgaggucaucucagg

SEQ ID NO: 639069 - RNA, 19 nt, Artificial Sequence
  Description of Artificial Sequence: Synthetic oligonucleotide
uucggggauccugaggggu

SEQ ID NO: 639070 - RNA, 19 nt, Artificial Sequence
  Description of Artificial Sequence: Synthetic oligonucleotide
ugcgguggggcuugcacau

SEQ ID NO: 639071 - RNA, 19 nt, Artificial Sequence
  Description of Artificial Sequence: Synthetic oligonucleotide
ggucgagaggcgcuguugc

SEQ ID NO: 639072 - RNA, 19 nt, Artificial Sequence
  Description of Artificial Sequence: Synthetic oligonucleotide
gauucggcuucaugcccac

SEQ ID NO: 639073 - RNA, 19 nt, Artificial Sequence
  Description of Artificial Sequence: Synthetic oligonucleotide
cagaccuaucaccagcaga

SEQ ID NO: 639074 - RNA, 19 nt, Artificial Sequence
  Description of Artificial Sequence: Synthetic oligonucleotide
cugagggguuggcaucugg

SEQ ID NO: 639075 - RNA, 19 nt, Artificial Sequence
  Description of Artificial Sequence: Synthetic oligonucleotide
acauaugcgguggggcuug

SEQ ID NO: 639076 - RNA, 19 nt, Artificial Sequence
  Description of Artificial Sequence: Synthetic oligonucleotide
cuucacacacacacacaca

SEQ ID NO: 639077 - RNA, 19 nt, Artificial Sequence
  Description of Artificial Sequence: Synthetic oligonucleotide
cagaucuugugccggccac

SEQ ID NO: 639078 - RNA, 19 nt, Artificial Sequence
  Description of Artificial Sequence: Synthetic oligonucleotide
aggguuccuuaaaagguca

SEQ ID NO: 639079 - RNA, 19 nt, Artificial Sequence
  Description of Artificial Sequence: Synthetic oligonucleotide
cauuuacagggugcugccc

SEQ ID NO: 639080 - RNA, 19 nt, Artificial Sequence
  Description of Artificial Sequence: Synthetic oligonucleotide
uccccuaaucuggucuaag

SEQ ID NO: 639081 - RNA, 19 nt, Artificial Sequence
  Description of Artificial Sequence: Synthetic oligonucleotide
gaagccggggccacacuug

SEQ ID NO: 639082 - RNA, 19 nt, Artificial Sequence
  Description of Artificial Sequence: Synthetic oligonucleotide
gaugagauacguagacugu

SEQ ID NO: 639083 - RNA, 19 nt, Artificial Sequence
  Description of Artificial Sequence: Synthetic oligonucleotide
ucguuggcaaggcgcaaua

SEQ ID NO: 639084 - RNA, 19 nt, Artificial Sequence
  Description of Artificial Sequence: Synthetic oligonucleotide
ucgagaggcgcuguugcuc

SEQ ID NO: 639085 - RNA, 19 nt, Artificial Sequence
  Description of Artificial Sequence: Synthetic oligonucleotide
gaucuugugccggccacuc

SEQ ID NO: 639086 - RNA, 19 nt, Artificial Sequence
  Description of Artificial Sequence: Synthetic oligonucleotide
acauggaauccaagcaccu

SEQ ID NO: 639087 - RNA, 19 nt, Artificial Sequence
  Description of Artificial Sequence: Synthetic oligonucleotide
ucacgauacaggugacauu

SEQ ID NO: 639088 - RNA, 19 nt, Artificial Sequence
  Description of Artificial Sequence: Synthetic oligonucleotide
gagaacguccccggggcac

SEQ ID NO: 639089 - RNA, 19 nt, Artificial Sequence
  Description of Artificial Sequence: Synthetic oligonucleotide
ggugucagagaacgucccc

SEQ ID NO: 639090 - RNA, 19 nt, Artificial Sequence
  Description of Artificial Sequence: Synthetic oligonucleotide
ggauggugcucggagcugg

SEQ ID NO: 639091 - RNA, 19 nt, Artificial Sequence
  Description of Artificial Sequence: Synthetic oligonucleotide
uugugggucuuuggaugag

SEQ ID NO: 639092 - RNA, 19 nt, Artificial Sequence
  Description of Artificial Sequence: Synthetic oligonucleotide
cccagaaagagucguuaag

SEQ ID NO: 639093 - RNA, 19 nt, Artificial Sequence
  Description of Artificial Sequence: Synthetic oligonucleotide
guccguuccauucauguuu

SEQ ID NO: 639094 - RNA, 19 nt, Artificial Sequence
  Description of Artificial Sequence: Synthetic oligonucleotide
cugggacugccccauauaa

SEQ ID NO: 639095 - RNA, 19 nt, Artificial Sequence
  Description of Artificial Sequence: Synthetic oligonucleotide
uggucgagaggcgcuguug

SEQ ID NO: 639096 - RNA, 19 nt, Artificial Sequence
  Description of Artificial Sequence: Synthetic oligonucleotide
ggggcuugcacauaucugu

SEQ ID NO: 639097 - RNA, 19 nt, Artificial Sequence
  Description of Artificial Sequence: Synthetic oligonucleotide
uacauaugcgguggggcuu

SEQ ID NO: 639098 - RNA, 19 nt, Artificial Sequence
  Description of Artificial Sequence: Synthetic oligonucleotide
aggaugcuacauaugcggu

SEQ ID NO: 639099 - RNA, 19 nt, Artificial Sequence
  Description of Artificial Sequence: Synthetic oligonucleotide
uucguccccacgcgcuggc

SEQ ID NO: 639100 - RNA, 19 nt, Artificial Sequence
  Description of Artificial Sequence: Synthetic oligonucleotide
gaucaccguggguacagua

SEQ ID NO: 639101 - RNA, 19 nt, Artificial Sequence
  Description of Artificial Sequence: Synthetic oligonucleotide
uugauuccagagggcugag

SEQ ID NO: 639102 - RNA, 19 nt, Artificial Sequence
  Description of Artificial Sequence: Synthetic oligonucleotide
caguaccaagcaguuggag

SEQ ID NO: 639103 - RNA, 19 nt, Artificial Sequence
  Description of Artificial Sequence: Synthetic oligonucleotide
cuaagggagaugggcccag

SEQ ID NO: 639104 - RNA, 19 nt, Artificial Sequence
  Description of Artificial Sequence: Synthetic oligonucleotide
gagucucgaugguaacaga

SEQ ID NO: 639105 - RNA, 19 nt, Artificial Sequence
  Description of Artificial Sequence: Synthetic oligonucleotide
gccgcuaagggagaugggc

SEQ ID NO: 639106 - RNA, 19 nt, Artificial Sequence
  Description of Artificial Sequence: Synthetic oligonucleotide
acacccagauacuguccgu

SEQ ID NO: 639107 - RNA, 19 nt, Artificial Sequence
  Description of Artificial Sequence: Synthetic oligonucleotide
aagcacgggaacggaggca

SEQ ID NO: 639108 - RNA, 19 nt, Artificial Sequence
  Description of Artificial Sequence: Synthetic oligonucleotide
cugucaguauucguuggca

SEQ ID NO: 639109 - RNA, 19 nt, Artificial Sequence
  Description of Artificial Sequence: Synthetic oligonucleotide
ggcgcaauacauaucagcu

SEQ ID NO: 639110 - RNA, 19 nt, Artificial Sequence
  Description of Artificial Sequence: Synthetic oligonucleotide
gaacgaagguguggccuug

SEQ ID NO: 639111 - RNA, 19 nt, Artificial Sequence
  Description of Artificial Sequence: Synthetic oligonucleotide
cugcaaccuggucacacca

SEQ ID NO: 639112 - RNA, 19 nt, Artificial Sequence
  Description of Artificial Sequence: Synthetic oligonucleotide
ccccuaaucuggucuaagc

SEQ ID NO: 639113 - RNA, 19 nt, Artificial Sequence
  Description of Artificial Sequence: Synthetic oligonucleotide
gucguuaaguccuggggau

SEQ ID NO: 639114 - RNA, 19 nt, Artificial Sequence
  Description of Artificial Sequence: Synthetic oligonucleotide
agagaacguccccggggca

SEQ ID NO: 639115 - RNA, 19 nt, Artificial Sequence
  Description of Artificial Sequence: Synthetic oligonucleotide
ccgcuaagggagaugggcc

SEQ ID NO: 639116 - RNA, 19 nt, Artificial Sequence
  Description of Artificial Sequence: Synthetic oligonucleotide
ccaauggaaucugugaaca

SEQ ID NO: 639117 - RNA, 19 nt, Artificial Sequence
  Description of Artificial Sequence: Synthetic oligonucleotide
guugccgaggaagcccgag

SEQ ID NO: 639118 - RNA, 19 nt, Artificial Sequence
  Description of Artificial Sequence: Synthetic oligonucleotide
gcugcaaccuggucacacc

SEQ ID NO: 639119 - RNA, 19 nt, Artificial Sequence
  Description of Artificial Sequence: Synthetic oligonucleotide
caccacaacgguugccuca

SEQ ID NO: 639120 - RNA, 19 nt, Artificial Sequence
  Description of Artificial Sequence: Synthetic oligonucleotide
aggggucaggccacuuugg

SEQ ID NO: 639121 - RNA, 19 nt, Artificial Sequence
  Description of Artificial Sequence: Synthetic oligonucleotide
ucggggauccugagggguu

SEQ ID NO: 639122 - RNA, 19 nt, Artificial Sequence
  Description of Artificial Sequence: Synthetic oligonucleotide
cccgaggucaucucaggac

SEQ ID NO: 639123 - RNA, 19 nt, Artificial Sequence
  Description of Artificial Sequence: Synthetic oligonucleotide
cacugucgacagcugucag

SEQ ID NO: 639124 - RNA, 19 nt, Artificial Sequence
  Description of Artificial Sequence: Synthetic oligonucleotide
cccugaacgaagguguggc

SEQ ID NO: 639125 - RNA, 19 nt, Artificial Sequence
  Description of Artificial Sequence: Synthetic oligonucleotide
cccauauaacaccauggca

SEQ ID NO: 639126 - RNA, 19 nt, Artificial Sequence
  Description of Artificial Sequence: Synthetic oligonucleotide
acgaagguguggccuugga

SEQ ID NO: 639127 - RNA, 19 nt, Artificial Sequence
  Description of Artificial Sequence: Synthetic oligonucleotide
ggucaucucaggacuggcc

SEQ ID NO: 639128 - RNA, 19 nt, Artificial Sequence
  Description of Artificial Sequence: Synthetic oligonucleotide
cgugggaagaaucugaacu

SEQ ID NO: 639129 - RNA, 19 nt, Artificial Sequence
  Description of Artificial Sequence: Synthetic oligonucleotide
ggcaaggcgcaauacauau

SEQ ID NO: 639130 - RNA, 19 nt, Artificial Sequence
  Description of Artificial Sequence: Synthetic oligonucleotide
acacacacacacacacaca

SEQ ID NO: 639131 - RNA, 19 nt, Artificial Sequence
  Description of Artificial Sequence: Synthetic oligonucleotide
cuucguccccacgcgcugg

SEQ ID NO: 639132 - RNA, 19 nt, Artificial Sequence
  Description of Artificial Sequence: Synthetic oligonucleotide
cuccagucugaugcacugc

SEQ ID NO: 639133 - RNA, 19 nt, Artificial Sequence
  Description of Artificial Sequence: Synthetic oligonucleotide
uguugccgaggaagcccga

SEQ ID NO: 639134 - RNA, 19 nt, Artificial Sequence
  Description of Artificial Sequence: Synthetic oligonucleotide
acaccuucacacacacaca

SEQ ID NO: 639135 - RNA, 19 nt, Artificial Sequence
  Description of Artificial Sequence: Synthetic oligonucleotide
gcuuugcaggugcacacuc

SEQ ID NO: 639136 - RNA, 19 nt, Artificial Sequence
  Description of Artificial Sequence: Synthetic oligonucleotide
caacgguugccucagcccu

SEQ ID NO: 639137 - RNA, 19 nt, Artificial Sequence
  Description of Artificial Sequence: Synthetic oligonucleotide
cauauccaauggaaucugu

SEQ ID NO: 639138 - RNA, 19 nt, Artificial Sequence
  Description of Artificial Sequence: Synthetic oligonucleotide
uguggucgagaggcgcugu

SEQ ID NO: 639139 - RNA, 19 nt, Artificial Sequence
  Description of Artificial Sequence: Synthetic oligonucleotide
aucaggcaagagcccggga

SEQ ID NO: 639140 - RNA, 19 nt, Artificial Sequence
  Description of Artificial Sequence: Synthetic oligonucleotide
gucgacagcugucaguauu

SEQ ID NO: 639141 - RNA, 19 nt, Artificial Sequence
  Description of Artificial Sequence: Synthetic oligonucleotide
ggguacaguaccaagcagu

SEQ ID NO: 639142 - RNA, 19 nt, Artificial Sequence
  Description of Artificial Sequence: Synthetic oligonucleotide
accuucacacacacacaca

SEQ ID NO: 639143 - RNA, 19 nt, Artificial Sequence
  Description of Artificial Sequence: Synthetic oligonucleotide
cuggggauugagggucuag

SEQ ID NO: 639144 - RNA, 19 nt, Artificial Sequence
  Description of Artificial Sequence: Synthetic oligonucleotide
cucggagcuggggacucag

SEQ ID NO: 639145 - RNA, 19 nt, Artificial Sequence
  Description of Artificial Sequence: Synthetic oligonucleotide
gggagaagggaaccugcuc

SEQ ID NO: 639146 - RNA, 19 nt, Artificial Sequence
  Description of Artificial Sequence: Synthetic oligonucleotide
cucggaccuccuccguggc

SEQ ID NO: 639147 - RNA, 19 nt, Artificial Sequence
  Description of Artificial Sequence: Synthetic oligonucleotide
ucguuaaguccuggggauu

SEQ ID NO: 639148 - RNA, 19 nt, Artificial Sequence
  Description of Artificial Sequence: Synthetic oligonucleotide
agaacguccccggggcaca

SEQ ID NO: 639149 - RNA, 19 nt, Artificial Sequence
  Description of Artificial Sequence: Synthetic oligonucleotide
ccugaacgaagguguggcc

SEQ ID NO: 639150 - RNA, 19 nt, Artificial Sequence
  Description of Artificial Sequence: Synthetic oligonucleotide
ggcaaggaugcuacauaug

SEQ ID NO: 639151 - RNA, 19 nt, Artificial Sequence
  Description of Artificial Sequence: Synthetic oligonucleotide
ugucgacagcugucaguau

SEQ ID NO: 639152 - RNA, 19 nt, Artificial Sequence
  Description of Artificial Sequence: Synthetic oligonucleotide
gucucgaugguaacagacu

SEQ ID NO: 639153 - RNA, 19 nt, Artificial Sequence
  Description of Artificial Sequence: Synthetic oligonucleotide
ucccaccacaacgguugcc

SEQ ID NO: 639154 - RNA, 19 nt, Artificial Sequence
  Description of Artificial Sequence: Synthetic oligonucleotide
gaugcacugcagagaacua

SEQ ID NO: 639155 - RNA, 19 nt, Artificial Sequence
  Description of Artificial Sequence: Synthetic oligonucleotide
acuguccguuccauucaug

SEQ ID NO: 639156 - RNA, 19 nt, Artificial Sequence
  Description of Artificial Sequence: Synthetic oligonucleotide
gaggccgcuaagggagaug

SEQ ID NO: 639157 - RNA, 19 nt, Artificial Sequence
  Description of Artificial Sequence: Synthetic oligonucleotide
ggguuccuuaaaaggucag

SEQ ID NO: 639158 - RNA, 19 nt, Artificial Sequence
  Description of Artificial Sequence: Synthetic oligonucleotide
cuugugccggccacuccga

SEQ ID NO: 639159 - RNA, 19 nt, Artificial Sequence
  Description of Artificial Sequence: Synthetic oligonucleotide
acacacacacacacacaaa

SEQ ID NO: 639160 - RNA, 19 nt, Artificial Sequence
  Description of Artificial Sequence: Synthetic oligonucleotide
ggggcgcccuucuucgucc

SEQ ID NO: 639161 - RNA, 19 nt, Artificial Sequence
  Description of Artificial Sequence: Synthetic oligonucleotide
cuguggucgagaggcgcug

SEQ ID NO: 639162 - RNA, 19 nt, Artificial Sequence
  Description of Artificial Sequence: Synthetic oligonucleotide
guccccacgcgcuggcuga

SEQ ID NO: 639163 - RNA, 19 nt, Artificial Sequence
  Description of Artificial Sequence: Synthetic oligonucleotide
ccucacuugaccugcaagu

SEQ ID NO: 639164 - RNA, 19 nt, Artificial Sequence
  Description of Artificial Sequence: Synthetic oligonucleotide
ggacugccccauauaacac

SEQ ID NO: 639165 - RNA, 19 nt, Artificial Sequence
  Description of Artificial Sequence: Synthetic oligonucleotide
cacgggaacggaggcaaca

SEQ ID NO: 639166 - RNA, 19 nt, Artificial Sequence
  Description of Artificial Sequence: Synthetic oligonucleotide
ccguggguacaguaccaag

SEQ ID NO: 639167 - RNA, 19 nt, Artificial Sequence
  Description of Artificial Sequence: Synthetic oligonucleotide
gaacguccccggggcacag

SEQ ID NO: 639168 - RNA, 19 nt, Artificial Sequence
  Description of Artificial Sequence: Synthetic oligonucleotide
ggaacggaggcaacaccca

SEQ ID NO: 639169 - RNA, 19 nt, Artificial Sequence
  Description of Artificial Sequence: Synthetic oligonucleotide
cagcagacucagaguuguc

SEQ ID NO: 639170 - RNA, 19 nt, Artificial Sequence
  Description of Artificial Sequence: Synthetic oligonucleotide
guccccggggcacaggccu

SEQ ID NO: 639171 - RNA, 19 nt, Artificial Sequence
  Description of Artificial Sequence: Synthetic oligonucleotide
gcuccuugggagggaaagc

SEQ ID NO: 639172 - RNA, 19 nt, Artificial Sequence
  Description of Artificial Sequence: Synthetic oligonucleotide
ccaguaguuuaacuccuaa

SEQ ID NO: 639173 - RNA, 19 nt, Artificial Sequence
  Description of Artificial Sequence: Synthetic oligonucleotide
cuccuccguggcuguugcc

SEQ ID NO: 639174 - RNA, 19 nt, Artificial Sequence
  Description of Artificial Sequence: Synthetic oligonucleotide
gaggaagcccgaggucauc

SEQ ID NO: 639175 - RNA, 19 nt, Artificial Sequence
  Description of Artificial Sequence: Synthetic oligonucleotide
ccgaggaagcccgagguca

SEQ ID NO: 639176 - RNA, 19 nt, Artificial Sequence
  Description of Artificial Sequence: Synthetic oligonucleotide
gcgcuguugcucuaggccu

SEQ ID NO: 639177 - RNA, 19 nt, Artificial Sequence
  Description of Artificial Sequence: Synthetic oligonucleotide
gguacaguaccaagcaguu

SEQ ID NO: 639178 - RNA, 19 nt, Artificial Sequence
  Description of Artificial Sequence: Synthetic oligonucleotide
augcuccuuagcacacccu

SEQ ID NO: 639179 - RNA, 19 nt, Artificial Sequence
  Description of Artificial Sequence: Synthetic oligonucleotide
cauaugcgguggggcuugc

SEQ ID NO: 639180 - RNA, 19 nt, Artificial Sequence
  Description of Artificial Sequence: Synthetic oligonucleotide
gcuaagggagaugggccca

SEQ ID NO: 639181 - RNA, 19 nt, Artificial Sequence
  Description of Artificial Sequence: Synthetic oligonucleotide
auccccuaaucuggucuaa

SEQ ID NO: 639182 - RNA, 19 nt, Artificial Sequence
  Description of Artificial Sequence: Synthetic oligonucleotide
auaugcgguggggcuugca

SEQ ID NO: 639183 - RNA, 19 nt, Artificial Sequence
  Description of Artificial Sequence: Synthetic oligonucleotide
cacauucccauuggcagau

SEQ ID NO: 639184 - RNA, 19 nt, Artificial Sequence
  Description of Artificial Sequence: Synthetic oligonucleotide
caggugcacacucgguucu

SEQ ID NO: 639185 - RNA, 19 nt, Artificial Sequence
  Description of Artificial Sequence: Synthetic oligonucleotide
acccucggaccuccuccgu

SEQ ID NO: 639186 - RNA, 19 nt, Artificial Sequence
  Description of Artificial Sequence: Synthetic oligonucleotide
ccccugaacgaaggugugg

SEQ ID NO: 639187 - RNA, 19 nt, Artificial Sequence
  Description of Artificial Sequence: Synthetic oligonucleotide
uccccacgcgcuggcugag

SEQ ID NO: 639188 - RNA, 19 nt, Artificial Sequence
  Description of Artificial Sequence: Synthetic oligonucleotide
ggcaacacccagauacugu

SEQ ID NO: 639189 - RNA, 19 nt, Artificial Sequence
  Description of Artificial Sequence: Synthetic oligonucleotide
ggaccucuacagucccuga

SEQ ID NO: 639190 - RNA, 19 nt, Artificial Sequence
  Description of Artificial Sequence: Synthetic oligonucleotide
gcugccgugggaagaaucu

SEQ ID NO: 639191 - RNA, 19 nt, Artificial Sequence
  Description of Artificial Sequence: Synthetic oligonucleotide
gcccgaggucaucucagga

SEQ ID NO: 639192 - RNA, 19 nt, Artificial Sequence
  Description of Artificial Sequence: Synthetic oligonucleotide
gcaaggcgcaauacauauc

SEQ ID NO: 639193 - RNA, 19 nt, Artificial Sequence
  Description of Artificial Sequence: Synthetic oligonucleotide
gcugggacugccccauaua

SEQ ID NO: 639194 - RNA, 19 nt, Artificial Sequence
  Description of Artificial Sequence: Synthetic oligonucleotide
ggggacucagaugcacaga

SEQ ID NO: 639195 - RNA, 19 nt, Artificial Sequence
  Description of Artificial Sequence: Synthetic oligonucleotide
cguccuucggggauccuga

SEQ ID NO: 639196 - RNA, 19 nt, Artificial Sequence
  Description of Artificial Sequence: Synthetic oligonucleotide
guccccgacuguggugcug

SEQ ID NO: 639197 - RNA, 19 nt, Artificial Sequence
  Description of Artificial Sequence: Synthetic oligonucleotide
gcgcaauacauaucagcuu

SEQ ID NO: 639198 - RNA, 19 nt, Artificial Sequence
  Description of Artificial Sequence: Synthetic oligonucleotide
ugcaggggucaggccacuu

SEQ ID NO: 639199 - RNA, 19 nt, Artificial Sequence
  Description of Artificial Sequence: Synthetic oligonucleotide
aggccucaccuuggcuucu

SEQ ID NO: 639200 - RNA, 19 nt, Artificial Sequence
  Description of Artificial Sequence: Synthetic oligonucleotide
ucguccccacgcgcuggcu

SEQ ID NO: 639201 - RNA, 19 nt, Artificial Sequence
  Description of Artificial Sequence: Synthetic oligonucleotide
ggcgcccuucuucgucccc

SEQ ID NO: 639202 - RNA, 19 nt, Artificial Sequence
  Description of Artificial Sequence: Synthetic oligonucleotide
ggggcgucccacugggacu

SEQ ID NO: 639203 - RNA, 19 nt, Artificial Sequence
  Description of Artificial Sequence: Synthetic oligonucleotide
caccaagggguaagggcuu

SEQ ID NO: 639204 - RNA, 19 nt, Artificial Sequence
  Description of Artificial Sequence: Synthetic oligonucleotide
gguggggcuugcacauauc

SEQ ID NO: 639205 - RNA, 19 nt, Artificial Sequence
  Description of Artificial Sequence: Synthetic oligonucleotide
cacccagauacuguccguu

SEQ ID NO: 639206 - RNA, 19 nt, Artificial Sequence
  Description of Artificial Sequence: Synthetic oligonucleotide
ccugagacccucggaccuc

SEQ ID NO: 639207 - RNA, 19 nt, Artificial Sequence
  Description of Artificial Sequence: Synthetic oligonucleotide
ggacucagaugcacagacu

SEQ ID NO: 639208 - RNA, 19 nt, Artificial Sequence
  Description of Artificial Sequence: Synthetic oligonucleotide
gcuguggucgagaggcgcu

SEQ ID NO: 639209 - RNA, 19 nt, Artificial Sequence
  Description of Artificial Sequence: Synthetic oligonucleotide
cguccccacgcgcuggcug

SEQ ID NO: 639210 - RNA, 19 nt, Artificial Sequence
  Description of Artificial Sequence: Synthetic oligonucleotide
cagggacaccaagggguaa

SEQ ID NO: 639211 - RNA, 19 nt, Artificial Sequence
  Description of Artificial Sequence: Synthetic oligonucleotide
acgcgcuggcugagcucuc

SEQ ID NO: 639212 - RNA, 19 nt, Artificial Sequence
  Description of Artificial Sequence: Synthetic oligonucleotide
gcgcccuucuucgucccca

SEQ ID NO: 639213 - RNA, 19 nt, Artificial Sequence
  Description of Artificial Sequence: Synthetic oligonucleotide
guggucgagaggcgcuguu

SEQ ID NO: 639214 - RNA, 19 nt, Artificial Sequence
  Description of Artificial Sequence: Synthetic oligonucleotide
cccuguuggggcccacaca

SEQ ID NO: 639215 - RNA, 19 nt, Artificial Sequence
  Description of Artificial Sequence: Synthetic oligonucleotide
gcgucccacugggacugag

SEQ ID NO: 639216 - RNA, 19 nt, Artificial Sequence
  Description of Artificial Sequence: Synthetic oligonucleotide
ccaagcaguuggagaguua

SEQ ID NO: 639217 - RNA, 19 nt, Artificial Sequence
  Description of Artificial Sequence: Synthetic oligonucleotide
gcaggggucaggccacuuu

SEQ ID NO: 639218 - RNA, 19 nt, Artificial Sequence
  Description of Artificial Sequence: Synthetic oligonucleotide
cugccccauauaacaccau

SEQ ID NO: 639219 - RNA, 19 nt, Artificial Sequence
  Description of Artificial Sequence: Synthetic oligonucleotide
cggggauccugagggguug

SEQ ID NO: 639220 - RNA, 19 nt, Artificial Sequence
  Description of Artificial Sequence: Synthetic oligonucleotide
gcacgggaacggaggcaac

SEQ ID NO: 639221 - RNA, 19 nt, Artificial Sequence
  Description of Artificial Sequence: Synthetic oligonucleotide
ggaucaccguggguacagu

SEQ ID NO: 639222 - RNA, 19 nt, Artificial Sequence
  Description of Artificial Sequence: Synthetic oligonucleotide
gcucggagcuggggacuca

SEQ ID NO: 639223 - RNA, 19 nt, Artificial Sequence
  Description of Artificial Sequence: Synthetic oligonucleotide
cccaacgaucagaccaauu

SEQ ID NO: 639224 - RNA, 19 nt, Artificial Sequence
  Description of Artificial Sequence: Synthetic oligonucleotide
gguccccgacuguggugcu

SEQ ID NO: 639225 - RNA, 19 nt, Artificial Sequence
  Description of Artificial Sequence: Synthetic oligonucleotide
ggaggccgcuaagggagau

SEQ ID NO: 639226 - RNA, 19 nt, Artificial Sequence
  Description of Artificial Sequence: Synthetic oligonucleotide
ggcgucccacugggacuga

SEQ ID NO: 639227 - RNA, 19 nt, Artificial Sequence
  Description of Artificial Sequence: Synthetic oligonucleotide
gcgguggggcuugcacaua

SEQ ID NO: 639228 - RNA, 19 nt, Artificial Sequence
  Description of Artificial Sequence: Synthetic oligonucleotide
ccccaacgaucagaccaau

SEQ ID NO: 639229 - RNA, 19 nt, Artificial Sequence
  Description of Artificial Sequence: Synthetic oligonucleotide
aaugucacgacuuuauuug

SEQ ID NO: 639230 - RNA, 19 nt, Artificial Sequence
  Description of Artificial Sequence: Synthetic oligonucleotide
aauagaagacaacccuccc

SEQ ID NO: 639231 - RNA, 19 nt, Artificial Sequence
  Description of Artificial Sequence: Synthetic oligonucleotide
auaaauacggugcgggagc

SEQ ID NO: 639232 - RNA, 19 nt, Artificial Sequence
  Description of Artificial Sequence: Synthetic oligonucleotide
uguauaaauacggugcggg

SEQ ID NO: 639233 - RNA, 19 nt, Artificial Sequence
  Description of Artificial Sequence: Synthetic oligonucleotide
uuuucuaggagggaggagg

SEQ ID NO: 639234 - RNA, 19 nt, Artificial Sequence
  Description of Artificial Sequence: Synthetic oligonucleotide
uuccuuuugguuccgaagg

SEQ ID NO: 639235 - RNA, 19 nt, Artificial Sequence
  Description of Artificial Sequence: Synthetic oligonucleotide
aaaauagaagacaacccuc

SEQ ID NO: 639236 - RNA, 19 nt, Artificial Sequence
  Description of Artificial Sequence: Synthetic oligonucleotide
acaggcaucugguaggacc

SEQ ID NO: 639237 - RNA, 19 nt, Artificial Sequence
  Description of Artificial Sequence: Synthetic oligonucleotide
aaugacgcggaucagugcu

SEQ ID NO: 639238 - RNA, 19 nt, Artificial Sequence
  Description of Artificial Sequence: Synthetic oligonucleotide
gagacuggcgcauaaggcg

SEQ ID NO: 639239 - RNA, 19 nt, Artificial Sequence
  Description of Artificial Sequence: Synthetic oligonucleotide
ucaaacgacacacggagcu

SEQ ID NO: 639240 - RNA, 19 nt, Artificial Sequence
  Description of Artificial Sequence: Synthetic oligonucleotide
aagacaacccucccuauug

SEQ ID NO: 639241 - RNA, 19 nt, Artificial Sequence
  Description of Artificial Sequence: Synthetic oligonucleotide
aaagcguuccugccgcugc

SEQ ID NO: 639242 - RNA, 19 nt, Artificial Sequence
  Description of Artificial Sequence: Synthetic oligonucleotide
acgacuuuauuuguggugc

SEQ ID NO: 639243 - RNA, 19 nt, Artificial Sequence
  Description of Artificial Sequence: Synthetic oligonucleotide
uugcuaaugacgcggauca

SEQ ID NO: 639244 - RNA, 19 nt, Artificial Sequence
  Description of Artificial Sequence: Synthetic oligonucleotide
aucggguucuuccuguucc

SEQ ID NO: 639245 - RNA, 19 nt, Artificial Sequence
  Description of Artificial Sequence: Synthetic oligonucleotide
aauacggugcgggagcccc

SEQ ID NO: 639246 - RNA, 19 nt, Artificial Sequence
  Description of Artificial Sequence: Synthetic oligonucleotide
acggacccuauauacaggc

SEQ ID NO: 639247 - RNA, 19 nt, Artificial Sequence
  Description of Artificial Sequence: Synthetic oligonucleotide
auguacagcuuccggaagc

SEQ ID NO: 639248 - RNA, 19 nt, Artificial Sequence
  Description of Artificial Sequence: Synthetic oligonucleotide
ugggucagcgaauccaucg

SEQ ID NO: 639249 - RNA, 19 nt, Artificial Sequence
  Description of Artificial Sequence: Synthetic oligonucleotide
agggauacuggguagcauc

SEQ ID NO: 639250 - RNA, 19 nt, Artificial Sequence
  Description of Artificial Sequence: Synthetic oligonucleotide
cuuggauucuggauugagg

SEQ ID NO: 639251 - RNA, 19 nt, Artificial Sequence
  Description of Artificial Sequence: Synthetic oligonucleotide
gucacgacuuuauuugugg

SEQ ID NO: 639252 - RNA, 19 nt, Artificial Sequence
  Description of Artificial Sequence: Synthetic oligonucleotide
aggcauggcagccucacac

SEQ ID NO: 639253 - RNA, 19 nt, Artificial Sequence
  Description of Artificial Sequence: Synthetic oligonucleotide
acacggacccuauauacag

SEQ ID NO: 639254 - RNA, 19 nt, Artificial Sequence
  Description of Artificial Sequence: Synthetic oligonucleotide
aagagaggggcccgcggcc

SEQ ID NO: 639255 - RNA, 19 nt, Artificial Sequence
  Description of Artificial Sequence: Synthetic oligonucleotide
agugauccgaagaaggagg

SEQ ID NO: 639256 - RNA, 19 nt, Artificial Sequence
  Description of Artificial Sequence: Synthetic oligonucleotide
cucuugguugcacaggagg

SEQ ID NO: 639257 - RNA, 19 nt, Artificial Sequence
  Description of Artificial Sequence: Synthetic oligonucleotide
agcagcuguauaaauacgg

SEQ ID NO: 639258 - RNA, 19 nt, Artificial Sequence
  Description of Artificial Sequence: Synthetic oligonucleotide
gagagcuugcuaaugacgc

SEQ ID NO: 639259 - RNA, 19 nt, Artificial Sequence
  Description of Artificial Sequence: Synthetic oligonucleotide
cuaaugacgcggaucagug

SEQ ID NO: 639260 - RNA, 19 nt, Artificial Sequence
  Description of Artificial Sequence: Synthetic oligonucleotide
uccauguacagcuuccgga

SEQ ID NO: 639261 - RNA, 19 nt, Artificial Sequence
  Description of Artificial Sequence: Synthetic oligonucleotide
agcaucacacgugaggugg

SEQ ID NO: 639262 - RNA, 19 nt, Artificial Sequence
  Description of Artificial Sequence: Synthetic oligonucleotide
aacauuucccuaccuggcu

SEQ ID NO: 639263 - RNA, 19 nt, Artificial Sequence
  Description of Artificial Sequence: Synthetic oligonucleotide
gagguuauggcuucucaac

SEQ ID NO: 639264 - RNA, 19 nt, Artificial Sequence
  Description of Artificial Sequence: Synthetic oligonucleotide
guugucagcgcggaggucg

SEQ ID NO: 639265 - RNA, 19 nt, Artificial Sequence
  Description of Artificial Sequence: Synthetic oligonucleotide
acccuguccacccugguuc

SEQ ID NO: 639266 - RNA, 19 nt, Artificial Sequence
  Description of Artificial Sequence: Synthetic oligonucleotide
uuauucuggcaagacgggg

SEQ ID NO: 639267 - RNA, 19 nt, Artificial Sequence
  Description of Artificial Sequence: Synthetic oligonucleotide
ucggacagggccuucagcu

SEQ ID NO: 639268 - RNA, 19 nt, Artificial Sequence
  Description of Artificial Sequence: Synthetic oligonucleotide
gucaaaagcagcuguauaa

SEQ ID NO: 639269 - RNA, 19 nt, Artificial Sequence
  Description of Artificial Sequence: Synthetic oligonucleotide
aaggaggcauggcagccuc

SEQ ID NO: 639270 - RNA, 19 nt, Artificial Sequence
  Description of Artificial Sequence: Synthetic oligonucleotide
agacaacccucccuauugc

SEQ ID NO: 639271 - RNA, 19 nt, Artificial Sequence
  Description of Artificial Sequence: Synthetic oligonucleotide
acauuucccuaccuggcuc

SEQ ID NO: 639272 - RNA, 19 nt, Artificial Sequence
  Description of Artificial Sequence: Synthetic oligonucleotide
gcucaaacgacacacggag

SEQ ID NO: 639273 - RNA, 19 nt, Artificial Sequence
  Description of Artificial Sequence: Synthetic oligonucleotide
ugugcuuuccuccggguuc

SEQ ID NO: 639274 - RNA, 19 nt, Artificial Sequence
  Description of Artificial Sequence: Synthetic oligonucleotide
ucuucuggagaccgccgcg

SEQ ID NO: 639275 - RNA, 19 nt, Artificial Sequence
  Description of Artificial Sequence: Synthetic oligonucleotide
cuuccuuuugguuccgaag

SEQ ID NO: 639276 - RNA, 19 nt, Artificial Sequence
  Description of Artificial Sequence: Synthetic oligonucleotide
cauugagggcucuugguug

SEQ ID NO: 639277 - RNA, 19 nt, Artificial Sequence
  Description of Artificial Sequence: Synthetic oligonucleotide
cugcucaaacgacacacgg

SEQ ID NO: 639278 - RNA, 19 nt, Artificial Sequence
  Description of Artificial Sequence: Synthetic oligonucleotide
ucacacgugagguggcccg

SEQ ID NO: 639279 - RNA, 19 nt, Artificial Sequence
  Description of Artificial Sequence: Synthetic oligonucleotide
ucucacggcugcucaaacg

SEQ ID NO: 639280 - RNA, 19 nt, Artificial Sequence
  Description of Artificial Sequence: Synthetic oligonucleotide
agagcuugcuaaugacgcg

SEQ ID NO: 639281 - RNA, 19 nt, Artificial Sequence
  Description of Artificial Sequence: Synthetic oligonucleotide
auacuggguagcaucacac

SEQ ID NO: 639282 - RNA, 19 nt, Artificial Sequence
  Description of Artificial Sequence: Synthetic oligonucleotide
agggguagggguuauucug

SEQ ID NO: 639283 - RNA, 19 nt, Artificial Sequence
  Description of Artificial Sequence: Synthetic oligonucleotide
uuucuaggagggaggagga

SEQ ID NO: 639284 - RNA, 19 nt, Artificial Sequence
  Description of Artificial Sequence: Synthetic oligonucleotide
cucccuauugcacacggac

SEQ ID NO: 639285 - RNA, 19 nt, Artificial Sequence
  Description of Artificial Sequence: Synthetic oligonucleotide
ugaggucucucugcaaacg

SEQ ID NO: 639286 - RNA, 19 nt, Artificial Sequence
  Description of Artificial Sequence: Synthetic oligonucleotide
accccagucgggcugcugc

SEQ ID NO: 639287 - RNA, 19 nt, Artificial Sequence
  Description of Artificial Sequence: Synthetic oligonucleotide
ugcucaaacgacacacgga

SEQ ID NO: 639288 - RNA, 19 nt, Artificial Sequence
  Description of Artificial Sequence: Synthetic oligonucleotide
ugcaaacgcugucuacggg

SEQ ID NO: 639289 - RNA, 19 nt, Artificial Sequence
  Description of Artificial Sequence: Synthetic oligonucleotide
ucccuauugcacacggacc

SEQ ID NO: 639290 - RNA, 19 nt, Artificial Sequence
  Description of Artificial Sequence: Synthetic oligonucleotide
ugucagggccucacgaagc

SEQ ID NO: 639291 - RNA, 19 nt, Artificial Sequence
  Description of Artificial Sequence: Synthetic oligonucleotide
gauacuggguagcaucaca

SEQ ID NO: 639292 - RNA, 19 nt, Artificial Sequence
  Description of Artificial Sequence: Synthetic oligonucleotide
uuuugguuccgaagguccu

SEQ ID NO: 639293 - RNA, 19 nt, Artificial Sequence
  Description of Artificial Sequence: Synthetic oligonucleotide
ucagcgaauccaucgcccc

SEQ ID NO: 639294 - RNA, 19 nt, Artificial Sequence
  Description of Artificial Sequence: Synthetic oligonucleotide
ugcgugugucaaaagcagc

SEQ ID NO: 639295 - RNA, 19 nt, Artificial Sequence
  Description of Artificial Sequence: Synthetic oligonucleotide
guuauggcuucucaacaac

SEQ ID NO: 639296 - RNA, 19 nt, Artificial Sequence
  Description of Artificial Sequence: Synthetic oligonucleotide
cauaaggcgggagcgagcc

SEQ ID NO: 639297 - RNA, 19 nt, Artificial Sequence
  Description of Artificial Sequence: Synthetic oligonucleotide
cucggcaacauuucccuac

SEQ ID NO: 639298 - RNA, 19 nt, Artificial Sequence
  Description of Artificial Sequence: Synthetic oligonucleotide
cuguguagaccuccgagac

SEQ ID NO: 639299 - RNA, 19 nt, Artificial Sequence
  Description of Artificial Sequence: Synthetic oligonucleotide
ggacccuauauacaggccc

SEQ ID NO: 639300 - RNA, 19 nt, Artificial Sequence
  Description of Artificial Sequence: Synthetic oligonucleotide
agacucggacucuucauca

SEQ ID NO: 639301 - RNA, 19 nt, Artificial Sequence
  Description of Artificial Sequence: Synthetic oligonucleotide
ucacacaggguagagggcu

SEQ ID NO: 639302 - RNA, 19 nt, Artificial Sequence
  Description of Artificial Sequence: Synthetic oligonucleotide
aaauacggugcgggagccc

SEQ ID NO: 639303 - RNA, 19 nt, Artificial Sequence
  Description of Artificial Sequence: Synthetic oligonucleotide
cugcaaacgcugucuacgg

SEQ ID NO: 639304 - RNA, 19 nt, Artificial Sequence
  Description of Artificial Sequence: Synthetic oligonucleotide
ucuacgggcaguggagccg

SEQ ID NO: 639305 - RNA, 19 nt, Artificial Sequence
  Description of Artificial Sequence: Synthetic oligonucleotide
acgcacaggcaucugguag

SEQ ID NO: 639306 - RNA, 19 nt, Artificial Sequence
  Description of Artificial Sequence: Synthetic oligonucleotide
gaccuuucgaugcucccug

SEQ ID NO: 639307 - RNA, 19 nt, Artificial Sequence
  Description of Artificial Sequence: Synthetic oligonucleotide
uugcacacggacccuauau

SEQ ID NO: 639308 - RNA, 19 nt, Artificial Sequence
  Description of Artificial Sequence: Synthetic oligonucleotide
uccgaagcuccauguacag

SEQ ID NO: 639309 - RNA, 19 nt, Artificial Sequence
  Description of Artificial Sequence: Synthetic oligonucleotide
guagggguuauucuggcaa

SEQ ID NO: 639310 - RNA, 19 nt, Artificial Sequence
  Description of Artificial Sequence: Synthetic oligonucleotide
ugagaggcuuccuuuuggu

SEQ ID NO: 639311 - RNA, 19 nt, Artificial Sequence
  Description of Artificial Sequence: Synthetic oligonucleotide
ggguuauucuggcaagacg

SEQ ID NO: 639312 - RNA, 19 nt, Artificial Sequence
  Description of Artificial Sequence: Synthetic oligonucleotide
guggccgaccuuucgaugc

SEQ ID NO: 639313 - RNA, 19 nt, Artificial Sequence
  Description of Artificial Sequence: Synthetic oligonucleotide
cugucuacgggcaguggag

SEQ ID NO: 639314 - RNA, 19 nt, Artificial Sequence
  Description of Artificial Sequence: Synthetic oligonucleotide
gauacugauccuggcuucc

SEQ ID NO: 639315 - RNA, 19 nt, Artificial Sequence
  Description of Artificial Sequence: Synthetic oligonucleotide
aagcguuccugccgcugcg

SEQ ID NO: 639316 - RNA, 19 nt, Artificial Sequence
  Description of Artificial Sequence: Synthetic oligonucleotide
uguguagaccuccgagacu

SEQ ID NO: 639317 - RNA, 19 nt, Artificial Sequence
  Description of Artificial Sequence: Synthetic oligonucleotide
uaaugacgcggaucagugc

SEQ ID NO: 639318 - RNA, 19 nt, Artificial Sequence
  Description of Artificial Sequence: Synthetic oligonucleotide
agacuggcgcauaaggcgg

SEQ ID NO: 639319 - RNA, 19 nt, Artificial Sequence
  Description of Artificial Sequence: Synthetic oligonucleotide
aggagggugaucagcugcc

SEQ ID NO: 639320 - RNA, 19 nt, Artificial Sequence
  Description of Artificial Sequence: Synthetic oligonucleotide
cacucauguucacucgggg

SEQ ID NO: 639321 - RNA, 19 nt, Artificial Sequence
  Description of Artificial Sequence: Synthetic oligonucleotide
uaaauacggugcgggagcc

SEQ ID NO: 639322 - RNA, 19 nt, Artificial Sequence
  Description of Artificial Sequence: Synthetic oligonucleotide
cuggauugaggucucucug

SEQ ID NO: 639323 - RNA, 19 nt, Artificial Sequence
  Description of Artificial Sequence: Synthetic oligonucleotide
gcaaacgcugucuacgggc

SEQ ID NO: 639324 - RNA, 19 nt, Artificial Sequence
  Description of Artificial Sequence: Synthetic oligonucleotide
guauaaauacggugcggga

SEQ ID NO: 639325 - RNA, 19 nt, Artificial Sequence
  Description of Artificial Sequence: Synthetic oligonucleotide
gauggggcggagugauccg

SEQ ID NO: 639326 - RNA, 19 nt, Artificial Sequence
  Description of Artificial Sequence: Synthetic oligonucleotide
ucgggcgccucucucuggg

SEQ ID NO: 639327 - RNA, 19 nt, Artificial Sequence
  Description of Artificial Sequence: Synthetic oligonucleotide
ucacgaagccgcucguucu

SEQ ID NO: 639328 - RNA, 19 nt, Artificial Sequence
  Description of Artificial Sequence: Synthetic oligonucleotide
uccccagacaauggguggg

SEQ ID NO: 639329 - RNA, 19 nt, Artificial Sequence
  Description of Artificial Sequence: Synthetic oligonucleotide
uguacagcuuccggaagcu

SEQ ID NO: 639330 - RNA, 19 nt, Artificial Sequence
  Description of Artificial Sequence: Synthetic oligonucleotide
cucaaacgacacacggagc

SEQ ID NO: 639331 - RNA, 19 nt, Artificial Sequence
  Description of Artificial Sequence: Synthetic oligonucleotide
aucacacgugagguggccc

SEQ ID NO: 639332 - RNA, 19 nt, Artificial Sequence
  Description of Artificial Sequence: Synthetic oligonucleotide
cucacggcugcucaaacga

SEQ ID NO: 639333 - RNA, 19 nt, Artificial Sequence
  Description of Artificial Sequence: Synthetic oligonucleotide
ggcugagcgcugcagaccg

SEQ ID NO: 639334 - RNA, 19 nt, Artificial Sequence
  Description of Artificial Sequence: Synthetic oligonucleotide
uggauucuggauugagguc

SEQ ID NO: 639335 - RNA, 19 nt, Artificial Sequence
  Description of Artificial Sequence: Synthetic oligonucleotide
cuccccagacaaugggugg

SEQ ID NO: 639336 - RNA, 19 nt, Artificial Sequence
  Description of Artificial Sequence: Synthetic oligonucleotide
acgugagguggcccggggc

SEQ ID NO: 639337 - RNA, 19 nt, Artificial Sequence
  Description of Artificial Sequence: Synthetic oligonucleotide
uuccaucggguucuuccug

SEQ ID NO: 639338 - RNA, 19 nt, Artificial Sequence
  Description of Artificial Sequence: Synthetic oligonucleotide
ugcgagggcauuuggcuuc

SEQ ID NO: 639339 - RNA, 19 nt, Artificial Sequence
  Description of Artificial Sequence: Synthetic oligonucleotide
uugucagcgcggaggucgg

SEQ ID NO: 639340 - RNA, 19 nt, Artificial Sequence
  Description of Artificial Sequence: Synthetic oligonucleotide
aggagggcgggccucucgg

SEQ ID NO: 639341 - RNA, 19 nt, Artificial Sequence
  Description of Artificial Sequence: Synthetic oligonucleotide
cacggugcugcacuccagg

SEQ ID NO: 639342 - RNA, 19 nt, Artificial Sequence
  Description of Artificial Sequence: Synthetic oligonucleotide
cucucucugggcagggccc

SEQ ID NO: 639343 - RNA, 19 nt, Artificial Sequence
  Description of Artificial Sequence: Synthetic oligonucleotide
ugcacacggacccuauaua

SEQ ID NO: 639344 - RNA, 19 nt, Artificial Sequence
  Description of Artificial Sequence: Synthetic oligonucleotide
uccaggcuccguucugccg

SEQ ID NO: 639345 - RNA, 19 nt, Artificial Sequence
  Description of Artificial Sequence: Synthetic oligonucleotide
agccgcucguucucccucc

SEQ ID NO: 639346 - RNA, 19 nt, Artificial Sequence
  Description of Artificial Sequence: Synthetic oligonucleotide
cuuccgcugagacucggac

SEQ ID NO: 639347 - RNA, 19 nt, Artificial Sequence
  Description of Artificial Sequence: Synthetic oligonucleotide
cacggacccuauauacagg

SEQ ID NO: 639348 - RNA, 19 nt, Artificial Sequence
  Description of Artificial Sequence: Synthetic oligonucleotide
uccugcuuggauucuggau

SEQ ID NO: 639349 - RNA, 19 nt, Artificial Sequence
  Description of Artificial Sequence: Synthetic oligonucleotide
gugcgugugucaaaagcag

SEQ ID NO: 639350 - RNA, 19 nt, Artificial Sequence
  Description of Artificial Sequence: Synthetic oligonucleotide
cucacgaagccgcucguuc

SEQ ID NO: 639351 - RNA, 19 nt, Artificial Sequence
  Description of Artificial Sequence: Synthetic oligonucleotide
uagcaucacacgugaggug

SEQ ID NO: 639352 - RNA, 19 nt, Artificial Sequence
  Description of Artificial Sequence: Synthetic oligonucleotide
gggugcgugugucaaaagc

SEQ ID NO: 639353 - RNA, 19 nt, Artificial Sequence
  Description of Artificial Sequence: Synthetic oligonucleotide
ugucuacgggcaguggagc

SEQ ID NO: 639354 - RNA, 19 nt, Artificial Sequence
  Description of Artificial Sequence: Synthetic oligonucleotide
uucucacggcugcucaaac

SEQ ID NO: 639355 - RNA, 19 nt, Artificial Sequence
  Description of Artificial Sequence: Synthetic oligonucleotide
cuuggagagcuugcuaaug

SEQ ID NO: 639356 - RNA, 19 nt, Artificial Sequence
  Description of Artificial Sequence: Synthetic oligonucleotide
cacucucggcaacauuucc

SEQ ID NO: 639357 - RNA, 19 nt, Artificial Sequence
  Description of Artificial Sequence: Synthetic oligonucleotide
ugcaccccuccucucugag

SEQ ID NO: 639358 - RNA, 19 nt, Artificial Sequence
  Description of Artificial Sequence: Synthetic oligonucleotide
gcaggcguccuccacaccc

SEQ ID NO: 639359 - RNA, 19 nt, Artificial Sequence
  Description of Artificial Sequence: Synthetic oligonucleotide
uuccgcugagacucggacu

SEQ ID NO: 639360 - RNA, 19 nt, Artificial Sequence
  Description of Artificial Sequence: Synthetic oligonucleotide
gugauccgaagaaggaggc

SEQ ID NO: 639361 - RNA, 19 nt, Artificial Sequence
  Description of Artificial Sequence: Synthetic oligonucleotide
gucagcgaauccaucgccc

SEQ ID NO: 639362 - RNA, 19 nt, Artificial Sequence
  Description of Artificial Sequence: Synthetic oligonucleotide
gcacacggacccuauauac

SEQ ID NO: 639363 - RNA, 19 nt, Artificial Sequence
  Description of Artificial Sequence: Synthetic oligonucleotide
caagacgggguucccuggc

SEQ ID NO: 639364 - RNA, 19 nt, Artificial Sequence
  Description of Artificial Sequence: Synthetic oligonucleotide
guaggaccuccgccgaucc

SEQ ID NO: 639365 - RNA, 19 nt, Artificial Sequence
  Description of Artificial Sequence: Synthetic oligonucleotide
gagaccgccgcgccuggag

SEQ ID NO: 639366 - RNA, 19 nt, Artificial Sequence
  Description of Artificial Sequence: Synthetic oligonucleotide
aggcugagcgcugcagacc

SEQ ID NO: 639367 - RNA, 19 nt, Artificial Sequence
  Description of Artificial Sequence: Synthetic oligonucleotide
gucuacgggcaguggagcc

SEQ ID NO: 639368 - RNA, 19 nt, Artificial Sequence
  Description of Artificial Sequence: Synthetic oligonucleotide
guagcaucacacgugaggu

SEQ ID NO: 639369 - RNA, 19 nt, Artificial Sequence
  Description of Artificial Sequence: Synthetic oligonucleotide
gacccuauauacaggccca

SEQ ID NO: 639370 - RNA, 19 nt, Artificial Sequence
  Description of Artificial Sequence: Synthetic oligonucleotide
caaacgcugucuacgggca

SEQ ID NO: 639371 - RNA, 19 nt, Artificial Sequence
  Description of Artificial Sequence: Synthetic oligonucleotide
accuuucgaugcucccugg

SEQ ID NO: 639372 - RNA, 19 nt, Artificial Sequence
  Description of Artificial Sequence: Synthetic oligonucleotide
caucugguaggaccuccgc

SEQ ID NO: 639373 - RNA, 19 nt, Artificial Sequence
  Description of Artificial Sequence: Synthetic oligonucleotide
gaagggauacuggguagca

SEQ ID NO: 639374 - RNA, 19 nt, Artificial Sequence
  Description of Artificial Sequence: Synthetic oligonucleotide
ggauggggcggagugaucc

SEQ ID NO: 639375 - RNA, 19 nt, Artificial Sequence
  Description of Artificial Sequence: Synthetic oligonucleotide
cauuucccuaccuggcuca

SEQ ID NO: 639376 - RNA, 19 nt, Artificial Sequence
  Description of Artificial Sequence: Synthetic oligonucleotide
cacacggacccuauauaca

SEQ ID NO: 639377 - RNA, 19 nt, Artificial Sequence
  Description of Artificial Sequence: Synthetic oligonucleotide
ggcgcauaaggcgggagcg

SEQ ID NO: 639378 - RNA, 19 nt, Artificial Sequence
  Description of Artificial Sequence: Synthetic oligonucleotide
uucuaggagggaggaggag

SEQ ID NO: 639379 - RNA, 19 nt, Artificial Sequence
  Description of Artificial Sequence: Synthetic oligonucleotide
gauccgaagaaggaggcau

SEQ ID NO: 639380 - RNA, 19 nt, Artificial Sequence
  Description of Artificial Sequence: Synthetic oligonucleotide
cuuuucuaggagggaggag

SEQ ID NO: 639381 - RNA, 19 nt, Artificial Sequence
  Description of Artificial Sequence: Synthetic oligonucleotide
ggugcgugugucaaaagca

SEQ ID NO: 639382 - RNA, 19 nt, Artificial Sequence
  Description of Artificial Sequence: Synthetic oligonucleotide
uaaggcgggagcgagccuu

SEQ ID NO: 639383 - RNA, 19 nt, Artificial Sequence
  Description of Artificial Sequence: Synthetic oligonucleotide
ugacgcggaucagugcugc

SEQ ID NO: 639384 - RNA, 19 nt, Artificial Sequence
  Description of Artificial Sequence: Synthetic oligonucleotide
cuucuggagaccgccgcgc

SEQ ID NO: 639385 - RNA, 19 nt, Artificial Sequence
  Description of Artificial Sequence: Synthetic oligonucleotide
guggagccgccauccacgg

SEQ ID NO: 639386 - RNA, 19 nt, Artificial Sequence
  Description of Artificial Sequence: Synthetic oligonucleotide
ccgagacuggcgcauaagg

SEQ ID NO: 639387 - RNA, 19 nt, Artificial Sequence
  Description of Artificial Sequence: Synthetic oligonucleotide
acccuauauacaggcccac

SEQ ID NO: 639388 - RNA, 19 nt, Artificial Sequence
  Description of Artificial Sequence: Synthetic oligonucleotide
gguuauggcuucucaacaa

SEQ ID NO: 639389 - RNA, 19 nt, Artificial Sequence
  Description of Artificial Sequence: Synthetic oligonucleotide
acacacggagcuccuucug

SEQ ID NO: 639390 - RNA, 19 nt, Artificial Sequence
  Description of Artificial Sequence: Synthetic oligonucleotide
uccgagacuggcgcauaag

SEQ ID NO: 639391 - RNA, 19 nt, Artificial Sequence
  Description of Artificial Sequence: Synthetic oligonucleotide
gacuggcgcauaaggcggg

SEQ ID NO: 639392 - RNA, 19 nt, Artificial Sequence
  Description of Artificial Sequence: Synthetic oligonucleotide
caaugucacgacuuuauuu

SEQ ID NO: 639393 - RNA, 19 nt, Artificial Sequence
  Description of Artificial Sequence: Synthetic oligonucleotide
ggauucuggauugaggucu

SEQ ID NO: 639394 - RNA, 19 nt, Artificial Sequence
  Description of Artificial Sequence: Synthetic oligonucleotide
cugcguggcccgcucaagc

SEQ ID NO: 639395 - RNA, 19 nt, Artificial Sequence
  Description of Artificial Sequence: Synthetic oligonucleotide
aagggauacuggguagcau

SEQ ID NO: 639396 - RNA, 19 nt, Artificial Sequence
  Description of Artificial Sequence: Synthetic oligonucleotide
gacgggguucccuggccug

SEQ ID NO: 639397 - RNA, 19 nt, Artificial Sequence
  Description of Artificial Sequence: Synthetic oligonucleotide
ugccccgcaugggucagcg

SEQ ID NO: 639398 - RNA, 19 nt, Artificial Sequence
  Description of Artificial Sequence: Synthetic oligonucleotide
gccgcugguugucagcgcg

SEQ ID NO: 639399 - RNA, 19 nt, Artificial Sequence
  Description of Artificial Sequence: Synthetic oligonucleotide
agacgggguucccuggccu

SEQ ID NO: 639400 - RNA, 19 nt, Artificial Sequence
  Description of Artificial Sequence: Synthetic oligonucleotide
aggccggcgcuccuucgac

SEQ ID NO: 639401 - RNA, 19 nt, Artificial Sequence
  Description of Artificial Sequence: Synthetic oligonucleotide
ggcggcacagggcucuugg

SEQ ID NO: 639402 - RNA, 19 nt, Artificial Sequence
  Description of Artificial Sequence: Synthetic oligonucleotide
cucuggagccuucccugcc

SEQ ID NO: 639403 - RNA, 19 nt, Artificial Sequence
  Description of Artificial Sequence: Synthetic oligonucleotide
cucagcguucuccacgcca

SEQ ID NO: 639404 - RNA, 19 nt, Artificial Sequence
  Description of Artificial Sequence: Synthetic oligonucleotide
cauccccaagagaggggcc

SEQ ID NO: 639405 - RNA, 19 nt, Artificial Sequence
  Description of Artificial Sequence: Synthetic oligonucleotide
ucguggccgaccuuucgau

SEQ ID NO: 639406 - RNA, 19 nt, Artificial Sequence
  Description of Artificial Sequence: Synthetic oligonucleotide
cugagcgcugcagaccgag

SEQ ID NO: 639407 - RNA, 19 nt, Artificial Sequence
  Description of Artificial Sequence: Synthetic oligonucleotide
cuacgggcaguggagccgc

SEQ ID NO: 639408 - RNA, 19 nt, Artificial Sequence
  Description of Artificial Sequence: Synthetic oligonucleotide
ucucggcaaagcguuccug

SEQ ID NO: 639409 - RNA, 19 nt, Artificial Sequence
  Description of Artificial Sequence: Synthetic oligonucleotide
ggguucccuggccugagag

SEQ ID NO: 639410 - RNA, 19 nt, Artificial Sequence
  Description of Artificial Sequence: Synthetic oligonucleotide
gggucagcgaauccaucgc

SEQ ID NO: 639411 - RNA, 19 nt, Artificial Sequence
  Description of Artificial Sequence: Synthetic oligonucleotide
ggauacugauccuggcuuc

SEQ ID NO: 639412 - RNA, 19 nt, Artificial Sequence
  Description of Artificial Sequence: Synthetic oligonucleotide
ggagguuauggcuucucaa

SEQ ID NO: 639413 - RNA, 19 nt, Artificial Sequence
  Description of Artificial Sequence: Synthetic oligonucleotide
cccgagaggagguuauggc

SEQ ID NO: 639414 - RNA, 19 nt, Artificial Sequence
  Description of Artificial Sequence: Synthetic oligonucleotide
caucacacgugagguggcc

SEQ ID NO: 639415 - RNA, 19 nt, Artificial Sequence
  Description of Artificial Sequence: Synthetic oligonucleotide
aaggggugcgugugucaaa

SEQ ID NO: 639416 - RNA, 19 nt, Artificial Sequence
  Description of Artificial Sequence: Synthetic oligonucleotide
gcugucuacgggcagugga

SEQ ID NO: 639417 - RNA, 19 nt, Artificial Sequence
  Description of Artificial Sequence: Synthetic oligonucleotide
uggccgaccuuucgaugcu

SEQ ID NO: 639418 - RNA, 19 nt, Artificial Sequence
  Description of Artificial Sequence: Synthetic oligonucleotide
ccagacaaugggugggaag

SEQ ID NO: 639419 - RNA, 19 nt, Artificial Sequence
  Description of Artificial Sequence: Synthetic oligonucleotide
caaacgacacacggagcuc

SEQ ID NO: 639420 - RNA, 19 nt, Artificial Sequence
  Description of Artificial Sequence: Synthetic oligonucleotide
uaggaccuccgccgauccc

SEQ ID NO: 639421 - RNA, 19 nt, Artificial Sequence
  Description of Artificial Sequence: Synthetic oligonucleotide
uggagaccgccgcgccugg

SEQ ID NO: 639422 - RNA, 19 nt, Artificial Sequence
  Description of Artificial Sequence: Synthetic oligonucleotide
cagccaggucacagggccg

SEQ ID NO: 639423 - RNA, 19 nt, Artificial Sequence
  Description of Artificial Sequence: Synthetic oligonucleotide
cugcgcucgaaucucucca

SEQ ID NO: 639424 - RNA, 19 nt, Artificial Sequence
  Description of Artificial Sequence: Synthetic oligonucleotide
cacgaagccgcucguucuc

SEQ ID NO: 639425 - RNA, 19 nt, Artificial Sequence
  Description of Artificial Sequence: Synthetic oligonucleotide
auccgaagaaggaggcaug

SEQ ID NO: 639426 - RNA, 19 nt, Artificial Sequence
  Description of Artificial Sequence: Synthetic oligonucleotide
cuggagaccgccgcgccug

SEQ ID NO: 639427 - RNA, 19 nt, Artificial Sequence
  Description of Artificial Sequence: Synthetic oligonucleotide
cccuguguagaccuccgag

SEQ ID NO: 639428 - RNA, 19 nt, Artificial Sequence
  Description of Artificial Sequence: Synthetic oligonucleotide
gcugcucaaacgacacacg

SEQ ID NO: 639429 - RNA, 19 nt, Artificial Sequence
  Description of Artificial Sequence: Synthetic oligonucleotide
ugcuguuggagggcaccug

SEQ ID NO: 639430 - RNA, 19 nt, Artificial Sequence
  Description of Artificial Sequence: Synthetic oligonucleotide
auuucccuaccuggcucag

SEQ ID NO: 639431 - RNA, 19 nt, Artificial Sequence
  Description of Artificial Sequence: Synthetic oligonucleotide
aacgacacacggagcuccu

SEQ ID NO: 639432 - RNA, 19 nt, Artificial Sequence
  Description of Artificial Sequence: Synthetic oligonucleotide
caucggguucuuccuguuc

SEQ ID NO: 639433 - RNA, 19 nt, Artificial Sequence
  Description of Artificial Sequence: Synthetic oligonucleotide
gaagacaacccucccuauu

SEQ ID NO: 639434 - RNA, 19 nt, Artificial Sequence
  Description of Artificial Sequence: Synthetic oligonucleotide
aggggugcgugugucaaaa

SEQ ID NO: 639435 - RNA, 19 nt, Artificial Sequence
  Description of Artificial Sequence: Synthetic oligonucleotide
gagcgagccuuccgcugag

SEQ ID NO: 639436 - RNA, 19 nt, Artificial Sequence
  Description of Artificial Sequence: Synthetic oligonucleotide
ggcggagugauccgaagaa

SEQ ID NO: 639437 - RNA, 19 nt, Artificial Sequence
  Description of Artificial Sequence: Synthetic oligonucleotide
gacuuuauuuguggugccu

SEQ ID NO: 639438 - RNA, 19 nt, Artificial Sequence
  Description of Artificial Sequence: Synthetic oligonucleotide
cuuggccucggcucugaga

SEQ ID NO: 639439 - RNA, 19 nt, Artificial Sequence
  Description of Artificial Sequence: Synthetic oligonucleotide
cagcgcggaggucggacag

SEQ ID NO: 639440 - RNA, 19 nt, Artificial Sequence
  Description of Artificial Sequence: Synthetic oligonucleotide
cucguggccgaccuuucga

SEQ ID NO: 639441 - RNA, 19 nt, Artificial Sequence
  Description of Artificial Sequence: Synthetic oligonucleotide
gcgcuccuucgacagaucc

SEQ ID NO: 639442 - RNA, 19 nt, Artificial Sequence
  Description of Artificial Sequence: Synthetic oligonucleotide
gagggcgggccucucggca

SEQ ID NO: 639443 - RNA, 19 nt, Artificial Sequence
  Description of Artificial Sequence: Synthetic oligonucleotide
ucucggcaacauuucccua

SEQ ID NO: 639444 - RNA, 19 nt, Artificial Sequence
  Description of Artificial Sequence: Synthetic oligonucleotide
acgccauugagggcucuug

SEQ ID NO: 639445 - RNA, 19 nt, Artificial Sequence
  Description of Artificial Sequence: Synthetic oligonucleotide
gcgcugcagaccgagaacc

SEQ ID NO: 639446 - RNA, 19 nt, Artificial Sequence
  Description of Artificial Sequence: Synthetic oligonucleotide
agaccgccgcgccuggaga

SEQ ID NO: 639447 - RNA, 19 nt, Artificial Sequence
  Description of Artificial Sequence: Synthetic oligonucleotide
gacggcaggcguccuccac

SEQ ID NO: 639448 - RNA, 19 nt, Artificial Sequence
  Description of Artificial Sequence: Synthetic oligonucleotide
uggcaaugucacgacuuua

SEQ ID NO: 639449 - RNA, 19 nt, Artificial Sequence
  Description of Artificial Sequence: Synthetic oligonucleotide
ggccucggcucugagaggc

SEQ ID NO: 639450 - RNA, 19 nt, Artificial Sequence
  Description of Artificial Sequence: Synthetic oligonucleotide
auaaggcgggagcgagccu

SEQ ID NO: 639451 - RNA, 19 nt, Artificial Sequence
  Description of Artificial Sequence: Synthetic oligonucleotide
cccucagcguucuccacgc

SEQ ID NO: 639452 - RNA, 19 nt, Artificial Sequence
  Description of Artificial Sequence: Synthetic oligonucleotide
gaccuccgccgaucccugg

SEQ ID NO: 639453 - RNA, 19 nt, Artificial Sequence
  Description of Artificial Sequence: Synthetic oligonucleotide
ccugcgcucgaaucucucc

SEQ ID NO: 639454 - RNA, 19 nt, Artificial Sequence
  Description of Artificial Sequence: Synthetic oligonucleotide
agcuugcuaaugacgcgga

SEQ ID NO: 639455 - RNA, 19 nt, Artificial Sequence
  Description of Artificial Sequence: Synthetic oligonucleotide
ggagcgagccuuccgcuga

SEQ ID NO: 639456 - RNA, 19 nt, Artificial Sequence
  Description of Artificial Sequence: Synthetic oligonucleotide
cccucccuauugcacacgg

SEQ ID NO: 639457 - RNA, 19 nt, Artificial Sequence
  Description of Artificial Sequence: Synthetic oligonucleotide
ucgcucguggccgaccuuu

SEQ ID NO: 639458 - RNA, 19 nt, Artificial Sequence
  Description of Artificial Sequence: Synthetic oligonucleotide
gggauacuggguagcauca

SEQ ID NO: 639459 - RNA, 19 nt, Artificial Sequence
  Description of Artificial Sequence: Synthetic oligonucleotide
gcgggagcgagccuuccgc

SEQ ID NO: 639460 - RNA, 19 nt, Artificial Sequence
  Description of Artificial Sequence: Synthetic oligonucleotide
gcugcgagggcauuuggcu

SEQ ID NO: 639461 - RNA, 19 nt, Artificial Sequence
  Description of Artificial Sequence: Synthetic oligonucleotide
gagaggggcccgcggcccc

SEQ ID NO: 639462 - RNA, 19 nt, Artificial Sequence
  Description of Artificial Sequence: Synthetic oligonucleotide
gccggcgcuccuucgacag

SEQ ID NO: 639463 - RNA, 19 nt, Artificial Sequence
  Description of Artificial Sequence: Synthetic oligonucleotide
ggugcgggagccccuccag

SEQ ID NO: 639464 - RNA, 19 nt, Artificial Sequence
  Description of Artificial Sequence: Synthetic oligonucleotide
ucccuaccuggcucagccu

SEQ ID NO: 639465 - RNA, 19 nt, Artificial Sequence
  Description of Artificial Sequence: Synthetic oligonucleotide
agcgcggaggucggacagg

SEQ ID NO: 639466 - RNA, 19 nt, Artificial Sequence
  Description of Artificial Sequence: Synthetic oligonucleotide
augacgcggaucagugcug

SEQ ID NO: 639467 - RNA, 19 nt, Artificial Sequence
  Description of Artificial Sequence: Synthetic oligonucleotide
uugagggcucuugguugca

SEQ ID NO: 639468 - RNA, 19 nt, Artificial Sequence
  Description of Artificial Sequence: Synthetic oligonucleotide
gucuccgagaaggguccag

SEQ ID NO: 639469 - RNA, 19 nt, Artificial Sequence
  Description of Artificial Sequence: Synthetic oligonucleotide
gcggagugauccgaagaag

SEQ ID NO: 639470 - RNA, 19 nt, Artificial Sequence
  Description of Artificial Sequence: Synthetic oligonucleotide
gcucguggccgaccuuucg

SEQ ID NO: 639471 - RNA, 19 nt, Artificial Sequence
  Description of Artificial Sequence: Synthetic oligonucleotide
acgcugucuacgggcagug

SEQ ID NO: 639472 - RNA, 19 nt, Artificial Sequence
  Description of Artificial Sequence: Synthetic oligonucleotide
gagccgccauccacggugc

SEQ ID NO: 639473 - RNA, 19 nt, Artificial Sequence
  Description of Artificial Sequence: Synthetic oligonucleotide
ggcgccucucucugggcag

SEQ ID NO: 639474 - RNA, 19 nt, Artificial Sequence
  Description of Artificial Sequence: Synthetic oligonucleotide
acgcggaucagugcugcau

SEQ ID NO: 639475 - RNA, 19 nt, Artificial Sequence
  Description of Artificial Sequence: Synthetic oligonucleotide
cuccguucugccggccccg

SEQ ID NO: 639476 - RNA, 19 nt, Artificial Sequence
  Description of Artificial Sequence: Synthetic oligonucleotide
gcagggguagggguuauuc

SEQ ID NO: 639477 - RNA, 19 nt, Artificial Sequence
  Description of Artificial Sequence: Synthetic oligonucleotide
ggaucccugcuggggaggg

SEQ ID NO: 639478 - RNA, 19 nt, Artificial Sequence
  Description of Artificial Sequence: Synthetic oligonucleotide
aggucacgcccuguguaga

SEQ ID NO: 639479 - RNA, 19 nt, Artificial Sequence
  Description of Artificial Sequence: Synthetic oligonucleotide
ggcgggagcgagccuuccg

SEQ ID NO: 639480 - RNA, 19 nt, Artificial Sequence
  Description of Artificial Sequence: Synthetic oligonucleotide
acccucccuauugcacacg

SEQ ID NO: 639481 - RNA, 19 nt, Artificial Sequence
  Description of Artificial Sequence: Synthetic oligonucleotide
gggagcgagccuuccgcug

SEQ ID NO: 639482 - RNA, 19 nt, Artificial Sequence
  Description of Artificial Sequence: Synthetic oligonucleotide
gcuaaugacgcggaucagu

SEQ ID NO: 639483 - RNA, 19 nt, Artificial Sequence
  Description of Artificial Sequence: Synthetic oligonucleotide
aggcguccuccacacccca

SEQ ID NO: 639484 - RNA, 19 nt, Artificial Sequence
  Description of Artificial Sequence: Synthetic oligonucleotide
gaccuccgagacuggcgca

SEQ ID NO: 639485 - RNA, 19 nt, Artificial Sequence
  Description of Artificial Sequence: Synthetic oligonucleotide
ggcugcgagggcauuuggc

SEQ ID NO: 639486 - RNA, 19 nt, Artificial Sequence
  Description of Artificial Sequence: Synthetic oligonucleotide
cuggcgcauaaggcgggag

SEQ ID NO: 639487 - RNA, 19 nt, Artificial Sequence
  Description of Artificial Sequence: Synthetic oligonucleotide
gggcggagugauccgaaga

SEQ ID NO: 639488 - RNA, 19 nt, Artificial Sequence
  Description of Artificial Sequence: Synthetic oligonucleotide
cuucucacggcugcucaaa

SEQ ID NO: 639489 - RNA, 19 nt, Artificial Sequence
  Description of Artificial Sequence: Synthetic oligonucleotide
aggcgggagcgagccuucc

SEQ ID NO: 639490 - RNA, 19 nt, Artificial Sequence
  Description of Artificial Sequence: Synthetic oligonucleotide
gaccgccgcgccuggagaa

SEQ ID NO: 639491 - RNA, 19 nt, Artificial Sequence
  Description of Artificial Sequence: Synthetic oligonucleotide
ggggcggagugauccgaag

SEQ ID NO: 639492 - RNA, 19 nt, Artificial Sequence
  Description of Artificial Sequence: Synthetic oligonucleotide
ccgccauccacggugcugc

SEQ ID NO: 639493 - RNA, 19 nt, Artificial Sequence
  Description of Artificial Sequence: Synthetic oligonucleotide
gguaggaccuccgccgauc

SEQ ID NO: 639494 - RNA, 19 nt, Artificial Sequence
  Description of Artificial Sequence: Synthetic oligonucleotide
gacgcggaucagugcugca

SEQ ID NO: 639495 - RNA, 19 nt, Artificial Sequence
  Description of Artificial Sequence: Synthetic oligonucleotide
cccuauauacaggcccacc

SEQ ID NO: 639496 - RNA, 19 nt, Artificial Sequence
  Description of Artificial Sequence: Synthetic oligonucleotide
ggcaaugucacgacuuuau

SEQ ID NO: 639497 - RNA, 19 nt, Artificial Sequence
  Description of Artificial Sequence: Synthetic oligonucleotide
ggauacuggguagcaucac

SEQ ID NO: 639498 - RNA, 19 nt, Artificial Sequence
  Description of Artificial Sequence: Synthetic oligonucleotide
ccacucucggcaacauuuc

SEQ ID NO: 639499 - RNA, 19 nt, Artificial Sequence
  Description of Artificial Sequence: Synthetic oligonucleotide
cccaccgugcucagccagg

SEQ ID NO: 639500 - RNA, 19 nt, Artificial Sequence
  Description of Artificial Sequence: Synthetic oligonucleotide
uacggugcgggagccccuc

SEQ ID NO: 639501 - RNA, 19 nt, Artificial Sequence
  Description of Artificial Sequence: Synthetic oligonucleotide
caccgugcucagccaggag

SEQ ID NO: 639502 - RNA, 19 nt, Artificial Sequence
  Description of Artificial Sequence: Synthetic oligonucleotide
acuggcgcauaaggcggga

SEQ ID NO: 639503 - RNA, 19 nt, Artificial Sequence
  Description of Artificial Sequence: Synthetic oligonucleotide
ggacccgaggucuccgaga

SEQ ID NO: 639504 - RNA, 19 nt, Artificial Sequence
  Description of Artificial Sequence: Synthetic oligonucleotide
gcagcuguauaaauacggu

SEQ ID NO: 639505 - RNA, 19 nt, Artificial Sequence
  Description of Artificial Sequence: Synthetic oligonucleotide
ccaggagacggcaggcguc

SEQ ID NO: 639506 - RNA, 19 nt, Artificial Sequence
  Description of Artificial Sequence: Synthetic oligonucleotide
ccgaccuuucgaugcuccc

SEQ ID NO: 639507 - RNA, 19 nt, Artificial Sequence
  Description of Artificial Sequence: Synthetic oligonucleotide
ggggugcgugugucaaaag

SEQ ID NO: 639508 - RNA, 19 nt, Artificial Sequence
  Description of Artificial Sequence: Synthetic oligonucleotide
ggcuccguucugccggccc

SEQ ID NO: 639509 - RNA, 19 nt, Artificial Sequence
  Description of Artificial Sequence: Synthetic oligonucleotide
gcggaucagugcugcauuc

SEQ ID NO: 639510 - RNA, 19 nt, Artificial Sequence
  Description of Artificial Sequence: Synthetic oligonucleotide
gggcucuuggcacauuccu

SEQ ID NO: 639511 - RNA, 19 nt, Artificial Sequence
  Description of Artificial Sequence: Synthetic oligonucleotide
aggauggggcggagugauc

SEQ ID NO: 639512 - RNA, 19 nt, Artificial Sequence
  Description of Artificial Sequence: Synthetic oligonucleotide
gcgcggaggucggacaggg

SEQ ID NO: 639513 - RNA, 19 nt, Artificial Sequence
  Description of Artificial Sequence: Synthetic oligonucleotide
ggggcucuuggcacauucc

SEQ ID NO: 639514 - RNA, 19 nt, Artificial Sequence
  Description of Artificial Sequence: Synthetic oligonucleotide
ucuccacgccagggacccg

SEQ ID NO: 639515 - RNA, 19 nt, Artificial Sequence
  Description of Artificial Sequence: Synthetic oligonucleotide
accgccgcgccuggagaag

SEQ ID NO: 639516 - RNA, 19 nt, Artificial Sequence
  Description of Artificial Sequence: Synthetic oligonucleotide
gcauaaggcgggagcgagc

SEQ ID NO: 639517 - RNA, 19 nt, Artificial Sequence
  Description of Artificial Sequence: Synthetic oligonucleotide
acgggguucccuggccuga

SEQ ID NO: 639518 - RNA, 19 nt, Artificial Sequence
  Description of Artificial Sequence: Synthetic oligonucleotide
cgcgccuggagaagggagc

SEQ ID NO: 639519 - RNA, 19 nt, Artificial Sequence
  Description of Artificial Sequence: Synthetic oligonucleotide
gccgaccuuucgaugcucc

SEQ ID NO: 639520 - RNA, 19 nt, Artificial Sequence
  Description of Artificial Sequence: Synthetic oligonucleotide
uucgcucguggccgaccuu

SEQ ID NO: 639521 - RNA, 19 nt, Artificial Sequence
  Description of Artificial Sequence: Synthetic oligonucleotide
aggcuccguucugccggcc

SEQ ID NO: 639522 - RNA, 19 nt, Artificial Sequence
  Description of Artificial Sequence: Synthetic oligonucleotide
gcgccuggagaagggagcc

SEQ ID NO: 639523 - RNA, 19 nt, Artificial Sequence
  Description of Artificial Sequence: Synthetic oligonucleotide
gcaucacacgugagguggc

SEQ ID NO: 639524 - RNA, 19 nt, Artificial Sequence
  Description of Artificial Sequence: Synthetic oligonucleotide
agccuuccgcugagacucg

SEQ ID NO: 639525 - RNA, 19 nt, Artificial Sequence
  Description of Artificial Sequence: Synthetic oligonucleotide
cuucgcucguggccgaccu

SEQ ID NO: 639526 - RNA, 19 nt, Artificial Sequence
  Description of Artificial Sequence: Synthetic oligonucleotide
gcccggggcagccacucug

SEQ ID NO: 639527 - RNA, 19 nt, Artificial Sequence
  Description of Artificial Sequence: Synthetic oligonucleotide
cccacucucggcaacauuu

SEQ ID NO: 639528 - RNA, 19 nt, Artificial Sequence
  Description of Artificial Sequence: Synthetic oligonucleotide
cgcauaaggcgggagcgag

SEQ ID NO: 639529 - RNA, 19 nt, Artificial Sequence
  Description of Artificial Sequence: Synthetic oligonucleotide
ccgcgccuggagaagggag

SEQ ID NO: 639530 - RNA, 19 nt, Artificial Sequence
  Description of Artificial Sequence: Synthetic oligonucleotide
cggacccuauauacaggcc

SEQ ID NO: 639531 - RNA, 19 nt, Artificial Sequence
  Description of Artificial Sequence: Synthetic oligonucleotide
cacaggcaucugguaggac

SEQ ID NO: 639532 - RNA, 19 nt, Artificial Sequence
  Description of Artificial Sequence: Synthetic oligonucleotide
ggagggcgggccucucggc

SEQ ID NO: 639533 - RNA, 19 nt, Artificial Sequence
  Description of Artificial Sequence: Synthetic oligonucleotide
ccgagaggagguuauggcu

SEQ ID NO: 639534 - RNA, 19 nt, Artificial Sequence
  Description of Artificial Sequence: Synthetic oligonucleotide
ugucagcgcggaggucgga

SEQ ID NO: 639535 - RNA, 19 nt, Artificial Sequence
  Description of Artificial Sequence: Synthetic oligonucleotide
ccugugcuuugucucaaaa

SEQ ID NO: 639536 - RNA, 19 nt, Artificial Sequence
  Description of Artificial Sequence: Synthetic oligonucleotide
cuccgagacuggcgcauaa

SEQ ID NO: 639537 - RNA, 19 nt, Artificial Sequence
  Description of Artificial Sequence: Synthetic oligonucleotide
cuggcucagccucccaccu

SEQ ID NO: 639538 - RNA, 19 nt, Artificial Sequence
  Description of Artificial Sequence: Synthetic oligonucleotide
cugcaccccuccucucuga

SEQ ID NO: 639539 - RNA, 19 nt, Artificial Sequence
  Description of Artificial Sequence: Synthetic oligonucleotide
ccacaccccagucgggcug

SEQ ID NO: 639540 - RNA, 19 nt, Artificial Sequence
  Description of Artificial Sequence: Synthetic oligonucleotide
ccccgcaugggucagcgaa

SEQ ID NO: 639541 - RNA, 19 nt, Artificial Sequence
  Description of Artificial Sequence: Synthetic oligonucleotide
gcaaugucacgacuuuauu

SEQ ID NO: 639542 - RNA, 19 nt, Artificial Sequence
  Description of Artificial Sequence: Synthetic oligonucleotide
uggcggcacagggcucuug

SEQ ID NO: 639543 - RNA, 19 nt, Artificial Sequence
  Description of Artificial Sequence: Synthetic oligonucleotide
gcguggcccgcucaagcuc

SEQ ID NO: 639544 - RNA, 19 nt, Artificial Sequence
  Description of Artificial Sequence: Synthetic oligonucleotide
auacggugcgggagccccu

SEQ ID NO: 639545 - RNA, 19 nt, Artificial Sequence
  Description of Artificial Sequence: Synthetic oligonucleotide
cucucggcaaagcguuccu

SEQ ID NO: 639546 - RNA, 19 nt, Artificial Sequence
  Description of Artificial Sequence: Synthetic oligonucleotide
aggaggcauggcagccuca

SEQ ID NO: 639547 - RNA, 19 nt, Artificial Sequence
  Description of Artificial Sequence: Synthetic oligonucleotide
cugcgagggcauuuggcuu

SEQ ID NO: 639548 - RNA, 19 nt, Artificial Sequence
  Description of Artificial Sequence: Synthetic oligonucleotide
agccgccauccacggugcu

SEQ ID NO: 639549 - RNA, 19 nt, Artificial Sequence
  Description of Artificial Sequence: Synthetic oligonucleotide
gccgccuguggucccuggc

SEQ ID NO: 639550 - RNA, 19 nt, Artificial Sequence
  Description of Artificial Sequence: Synthetic oligonucleotide
cuugcgcuccagggcccug

SEQ ID NO: 639551 - RNA, 19 nt, Artificial Sequence
  Description of Artificial Sequence: Synthetic oligonucleotide
cguggccgaccuuucgaug

SEQ ID NO: 639552 - RNA, 19 nt, Artificial Sequence
  Description of Artificial Sequence: Synthetic oligonucleotide
ugcccgucgggcgccucuc

SEQ ID NO: 639553 - RNA, 19 nt, Artificial Sequence
  Description of Artificial Sequence: Synthetic oligonucleotide
ccccuccucucugagggac

SEQ ID NO: 639554 - RNA, 19 nt, Artificial Sequence
  Description of Artificial Sequence: Synthetic oligonucleotide
ggcccugcgcucgaaucuc

SEQ ID NO: 639555 - RNA, 19 nt, Artificial Sequence
  Description of Artificial Sequence: Synthetic oligonucleotide
gggcccugcgcucgaaucu

SEQ ID NO: 639556 - RNA, 19 nt, Artificial Sequence
  Description of Artificial Sequence: Synthetic oligonucleotide
acgacacacggagcuccuu

SEQ ID NO: 639557 - RNA, 19 nt, Artificial Sequence
  Description of Artificial Sequence: Synthetic oligonucleotide
ccauugagggcucuugguu

SEQ ID NO: 639558 - RNA, 19 nt, Artificial Sequence
  Description of Artificial Sequence: Synthetic oligonucleotide
ggccgccuguggucccugg

SEQ ID NO: 639559 - RNA, 19 nt, Artificial Sequence
  Description of Artificial Sequence: Synthetic oligonucleotide
uggccgccuguggucccug

SEQ ID NO: 639560 - RNA, 19 nt, Artificial Sequence
  Description of Artificial Sequence: Synthetic oligonucleotide
ggucccaucucuggugccu

SEQ ID NO: 639561 - RNA, 19 nt, Artificial Sequence
  Description of Artificial Sequence: Synthetic oligonucleotide
ccgcaugggucagcgaauc

SEQ ID NO: 639562 - RNA, 19 nt, Artificial Sequence
  Description of Artificial Sequence: Synthetic oligonucleotide
ccuucgcucguggccgacc

SEQ ID NO: 639563 - RNA, 19 nt, Artificial Sequence
  Description of Artificial Sequence: Synthetic oligonucleotide
gcguccuccacaccccagu

SEQ ID NO: 639564 - RNA, 19 nt, Artificial Sequence
  Description of Artificial Sequence: Synthetic oligonucleotide
cggcaggcguccuccacac

SEQ ID NO: 639565 - RNA, 19 nt, Artificial Sequence
  Description of Artificial Sequence: Synthetic oligonucleotide
gccgcugccccgcaugggu

SEQ ID NO: 639566 - RNA, 19 nt, Artificial Sequence
  Description of Artificial Sequence: Synthetic oligonucleotide
gccgaucccuggagucagg

SEQ ID NO: 639567 - RNA, 19 nt, Artificial Sequence
  Description of Artificial Sequence: Synthetic oligonucleotide
cccugcgcucgaaucucuc

SEQ ID NO: 639568 - RNA, 19 nt, Artificial Sequence
  Description of Artificial Sequence: Synthetic oligonucleotide
ccuuccgcugagacucgga

SEQ ID NO: 639569 - RNA, 19 nt, Artificial Sequence
  Description of Artificial Sequence: Synthetic oligonucleotide
cugccccgcaugggucagc

SEQ ID NO: 639570 - RNA, 19 nt, Artificial Sequence
  Description of Artificial Sequence: Synthetic oligonucleotide
gcccuguguagaccuccga

SEQ ID NO: 639571 - RNA, 19 nt, Artificial Sequence
  Description of Artificial Sequence: Synthetic oligonucleotide
gcugccccgcaugggucag

SEQ ID NO: 639572 - RNA, 19 nt, Artificial Sequence
  Description of Artificial Sequence: Synthetic oligonucleotide
gcgcauaaggcgggagcga

SEQ ID NO: 639573 - RNA, 19 nt, Artificial Sequence
  Description of Artificial Sequence: Synthetic oligonucleotide
ccucccuauugcacacgga

SEQ ID NO: 639574 - RNA, 19 nt, Artificial Sequence
  Description of Artificial Sequence: Synthetic oligonucleotide
ccggaagcuuccaucgggu

SEQ ID NO: 639575 - RNA, 19 nt, Artificial Sequence
  Description of Artificial Sequence: Synthetic oligonucleotide
caccccagucgggcugcug

SEQ ID NO: 639576 - RNA, 19 nt, Artificial Sequence
  Description of Artificial Sequence: Synthetic oligonucleotide
cacccuguccacccugguu

SEQ ID NO: 639577 - RNA, 19 nt, Artificial Sequence
  Description of Artificial Sequence: Synthetic oligonucleotide
ccgccgcgccuggagaagg

SEQ ID NO: 639578 - RNA, 19 nt, Artificial Sequence
  Description of Artificial Sequence: Synthetic oligonucleotide
gggguucccuggccugaga

SEQ ID NO: 639579 - RNA, 19 nt, Artificial Sequence
  Description of Artificial Sequence: Synthetic oligonucleotide
cgccgaucccuggagucag

SEQ ID NO: 639580 - RNA, 19 nt, Artificial Sequence
  Description of Artificial Sequence: Synthetic oligonucleotide
ccgcugccccgcauggguc

SEQ ID NO: 639581 - RNA, 19 nt, Artificial Sequence
  Description of Artificial Sequence: Synthetic oligonucleotide
gcgggccucucggcaaagc

SEQ ID NO: 639582 - RNA, 19 nt, Artificial Sequence
  Description of Artificial Sequence: Synthetic oligonucleotide
gcgagggcauuuggcuuca

SEQ ID NO: 639583 - RNA, 19 nt, Artificial Sequence
  Description of Artificial Sequence: Synthetic oligonucleotide
ggccgaccuuucgaugcuc

SEQ ID NO: 639584 - RNA, 19 nt, Artificial Sequence
  Description of Artificial Sequence: Synthetic oligonucleotide
ggcgggccucucggcaaag

SEQ ID NO: 639585 - RNA, 19 nt, Artificial Sequence
  Description of Artificial Sequence: Synthetic oligonucleotide
cgcucgaaucucuccagcu

SEQ ID NO: 639586 - RNA, 19 nt, Artificial Sequence
  Description of Artificial Sequence: Synthetic oligonucleotide
gcaaagcguuccugccgcu

SEQ ID NO: 639587 - RNA, 19 nt, Artificial Sequence
  Description of Artificial Sequence: Synthetic oligonucleotide
gccuguggucccuggcccu

SEQ ID NO: 639588 - RNA, 19 nt, Artificial Sequence
  Description of Artificial Sequence: Synthetic oligonucleotide
ugccagccgcagggugguc

SEQ ID NO: 639589 - RNA, 19 nt, Artificial Sequence
  Description of Artificial Sequence: Synthetic oligonucleotide
cugcccgucgggcgccucu

SEQ ID NO: 639590 - RNA, 19 nt, Artificial Sequence
  Description of Artificial Sequence: Synthetic oligonucleotide
gccgcgccuggagaaggga

SEQ ID NO: 639591 - RNA, 19 nt, Artificial Sequence
  Description of Artificial Sequence: Synthetic oligonucleotide
gccucucggcaaagcguuc

SEQ ID NO: 639592 - RNA, 19 nt, Artificial Sequence
  Description of Artificial Sequence: Synthetic oligonucleotide
cugcggccuugcgcuccag

SEQ ID NO: 639593 - RNA, 19 nt, Artificial Sequence
  Description of Artificial Sequence: Synthetic oligonucleotide
ccgccgaucccuggaguca

SEQ ID NO: 639594 - RNA, 19 nt, Artificial Sequence
  Description of Artificial Sequence: Synthetic oligonucleotide
ccggguucugaggucccga

SEQ ID NO: 639595 - RNA, 19 nt, Artificial Sequence
  Description of Artificial Sequence: Synthetic oligonucleotide
cgcucguggccgaccuuuc

SEQ ID NO: 639596 - RNA, 19 nt, Artificial Sequence
  Description of Artificial Sequence: Synthetic oligonucleotide
cccagacaaugggugggaa

SEQ ID NO: 639597 - RNA, 19 nt, Artificial Sequence
  Description of Artificial Sequence: Synthetic oligonucleotide
gccucacgaagccgcucgu

SEQ ID NO: 639598 - RNA, 19 nt, Artificial Sequence
  Description of Artificial Sequence: Synthetic oligonucleotide
gggugaucagcugccucuu

SEQ ID NO: 639599 - RNA, 19 nt, Artificial Sequence
  Description of Artificial Sequence: Synthetic oligonucleotide
ggagaccgccgcgccugga

SEQ ID NO: 639600 - RNA, 19 nt, Artificial Sequence
  Description of Artificial Sequence: Synthetic oligonucleotide
cgaccuuucgaugcucccu

SEQ ID NO: 639601 - RNA, 19 nt, Artificial Sequence
  Description of Artificial Sequence: Synthetic oligonucleotide
cgaucccuggagucaggua

SEQ ID NO: 639602 - RNA, 19 nt, Artificial Sequence
  Description of Artificial Sequence: Synthetic oligonucleotide
ccgucgggcgccucucucu

SEQ ID NO: 639603 - RNA, 19 nt, Artificial Sequence
  Description of Artificial Sequence: Synthetic oligonucleotide
cccgcaugggucagcgaau

SEQ ID NO: 639604 - RNA, 19 nt, Artificial Sequence
  Description of Artificial Sequence: Synthetic oligonucleotide
cggugcugcacuccaggcu

SEQ ID NO: 639605 - RNA, 19 nt, Artificial Sequence
  Description of Artificial Sequence: Synthetic oligonucleotide
cuggccgccuguggucccu

SEQ ID NO: 639606 - RNA, 19 nt, Artificial Sequence
  Description of Artificial Sequence: Synthetic oligonucleotide
gcagggcccucagcguucu

SEQ ID NO: 639607 - RNA, 19 nt, Artificial Sequence
  Description of Artificial Sequence: Synthetic oligonucleotide
cccuucgcucguggccgac

SEQ ID NO: 639608 - RNA, 19 nt, Artificial Sequence
  Description of Artificial Sequence: Synthetic oligonucleotide
gccccgcaugggucagcga

SEQ ID NO: 639609 - RNA, 19 nt, Artificial Sequence
  Description of Artificial Sequence: Synthetic oligonucleotide
ccgcucguucucccuccga

SEQ ID NO: 639610 - RNA, 19 nt, Artificial Sequence
  Description of Artificial Sequence: Synthetic oligonucleotide
cggugcgggagccccucca

SEQ ID NO: 639611 - RNA, 19 nt, Artificial Sequence
  Description of Artificial Sequence: Synthetic oligonucleotide
ccaucggguucuuccuguu

SEQ ID NO: 639612 - RNA, 19 nt, Artificial Sequence
  Description of Artificial Sequence: Synthetic oligonucleotide
ccggcgcuccuucgacaga

SEQ ID NO: 639613 - RNA, 19 nt, Artificial Sequence
  Description of Artificial Sequence: Synthetic oligonucleotide
ccccuucgcucguggccga

SEQ ID NO: 639614 - RNA, 19 nt, Artificial Sequence
  Description of Artificial Sequence: Synthetic oligonucleotide
cgcugcguggcccgcucaa

SEQ ID NO: 639615 - RNA, 19 nt, Artificial Sequence
  Description of Artificial Sequence: Synthetic oligonucleotide
cgggagcgagccuuccgcu

SEQ ID NO: 639616 - RNA, 19 nt, Artificial Sequence
  Description of Artificial Sequence: Synthetic oligonucleotide
gcccugcgcucgaaucucu

SEQ ID NO: 639617 - RNA, 19 nt, Artificial Sequence
  Description of Artificial Sequence: Synthetic oligonucleotide
ccuccgagacuggcgcaua

SEQ ID NO: 639618 - RNA, 19 nt, Artificial Sequence
  Description of Artificial Sequence: Synthetic oligonucleotide
cggaagcuuccaucggguu

SEQ ID NO: 639619 - RNA, 19 nt, Artificial Sequence
  Description of Artificial Sequence: Synthetic oligonucleotide
ccgcugcguggcccgcuca

SEQ ID NO: 639620 - RNA, 19 nt, Artificial Sequence
  Description of Artificial Sequence: Synthetic oligonucleotide
ccccaccaggccggcgcuc

SEQ ID NO: 639621 - RNA, 19 nt, Artificial Sequence
  Description of Artificial Sequence: Synthetic oligonucleotide
gccucggcucugagaggcu

SEQ ID NO: 639622 - RNA, 19 nt, Artificial Sequence
  Description of Artificial Sequence: Synthetic oligonucleotide
guggggcucuuggcacauu

SEQ ID NO: 639623 - RNA, 19 nt, Artificial Sequence
  Description of Artificial Sequence: Synthetic oligonucleotide
cggcgcuccuucgacagau

SEQ ID NO: 639624 - RNA, 19 nt, Artificial Sequence
  Description of Artificial Sequence: Synthetic oligonucleotide
ccugcccgucgggcgccuc

SEQ ID NO: 639625 - RNA, 19 nt, Artificial Sequence
  Description of Artificial Sequence: Synthetic oligonucleotide
ccgcugagacucggacucu

SEQ ID NO: 639626 - RNA, 19 nt, Artificial Sequence
  Description of Artificial Sequence: Synthetic oligonucleotide
cgcugagacucggacucuu

SEQ ID NO: 639627 - RNA, 19 nt, Artificial Sequence
  Description of Artificial Sequence: Synthetic oligonucleotide
cgaugcucccuggccgccu

SEQ ID NO: 639628 - RNA, 19 nt, Artificial Sequence
  Description of Artificial Sequence: Synthetic oligonucleotide
aauaauaagagcuccccac

SEQ ID NO: 639629 - RNA, 19 nt, Artificial Sequence
  Description of Artificial Sequence: Synthetic oligonucleotide
uaguaaaugccuuugaugg

SEQ ID NO: 639630 - RNA, 19 nt, Artificial Sequence
  Description of Artificial Sequence: Synthetic oligonucleotide
aaaaguaugaggguguugg

SEQ ID NO: 639631 - RNA, 19 nt, Artificial Sequence
  Description of Artificial Sequence: Synthetic oligonucleotide
aauugggcuggguagaggc

SEQ ID NO: 639632 - RNA, 19 nt, Artificial Sequence
  Description of Artificial Sequence: Synthetic oligonucleotide
ugauaagguaaaauguucg

SEQ ID NO: 639633 - RNA, 19 nt, Artificial Sequence
  Description of Artificial Sequence: Synthetic oligonucleotide
aagguaaaauguucgggcc

SEQ ID NO: 639634 - RNA, 19 nt, Artificial Sequence
  Description of Artificial Sequence: Synthetic oligonucleotide
uauaauugguggcagagcc

SEQ ID NO: 639635 - RNA, 19 nt, Artificial Sequence
  Description of Artificial Sequence: Synthetic oligonucleotide
auacacaaagacuuguccc

SEQ ID NO: 639636 - RNA, 19 nt, Artificial Sequence
  Description of Artificial Sequence: Synthetic oligonucleotide
aaaaugaggauguuuguca

SEQ ID NO: 639637 - RNA, 19 nt, Artificial Sequence
  Description of Artificial Sequence: Synthetic oligonucleotide
agaagagugguauagaacu

SEQ ID NO: 639638 - RNA, 19 nt, Artificial Sequence
  Description of Artificial Sequence: Synthetic oligonucleotide
auuuaauaauaagagcucc

SEQ ID NO: 639639 - RNA, 19 nt, Artificial Sequence
  Description of Artificial Sequence: Synthetic oligonucleotide
agugguauagaacucagug

SEQ ID NO: 639640 - RNA, 19 nt, Artificial Sequence
  Description of Artificial Sequence: Synthetic oligonucleotide
auaauaagagcuccccacc

SEQ ID NO: 639641 - RNA, 19 nt, Artificial Sequence
  Description of Artificial Sequence: Synthetic oligonucleotide
uuucgggugauauaauugg

SEQ ID NO: 639642 - RNA, 19 nt, Artificial Sequence
  Description of Artificial Sequence: Synthetic oligonucleotide
uaagguaaaauguucgggc

SEQ ID NO: 639643 - RNA, 19 nt, Artificial Sequence
  Description of Artificial Sequence: Synthetic oligonucleotide
gauaagguaaaauguucgg

SEQ ID NO: 639644 - RNA, 19 nt, Artificial Sequence
  Description of Artificial Sequence: Synthetic oligonucleotide
uuuaauaauaagagcuccc

SEQ ID NO: 639645 - RNA, 19 nt, Artificial Sequence
  Description of Artificial Sequence: Synthetic oligonucleotide
aaaugugggguaccgcucc

SEQ ID NO: 639646 - RNA, 19 nt, Artificial Sequence
  Description of Artificial Sequence: Synthetic oligonucleotide
ugagugacugguaaaggcg

SEQ ID NO: 639647 - RNA, 19 nt, Artificial Sequence
  Description of Artificial Sequence: Synthetic oligonucleotide
uccuugauaagguaaaaug

SEQ ID NO: 639648 - RNA, 19 nt, Artificial Sequence
  Description of Artificial Sequence: Synthetic oligonucleotide
aauuucaggccuucgaaga

SEQ ID NO: 639649 - RNA, 19 nt, Artificial Sequence
  Description of Artificial Sequence: Synthetic oligonucleotide
uaagaauugggcuggguag

SEQ ID NO: 639650 - RNA, 19 nt, Artificial Sequence
  Description of Artificial Sequence: Synthetic oligonucleotide
aguugcacuagcuugcuuc

SEQ ID NO: 639651 - RNA, 19 nt, Artificial Sequence
  Description of Artificial Sequence: Synthetic oligonucleotide
ugguauagaacucagugaa

SEQ ID NO: 639652 - RNA, 19 nt, Artificial Sequence
  Description of Artificial Sequence: Synthetic oligonucleotide
aaggcggaaguucacaaag

SEQ ID NO: 639653 - RNA, 19 nt, Artificial Sequence
  Description of Artificial Sequence: Synthetic oligonucleotide
aauccaaugcauauguguc

SEQ ID NO: 639654 - RNA, 19 nt, Artificial Sequence
  Description of Artificial Sequence: Synthetic oligonucleotide
aaaacuccugaugauaaag

SEQ ID NO: 639655 - RNA, 19 nt, Artificial Sequence
  Description of Artificial Sequence: Synthetic oligonucleotide
uccaguuucacagugccgg

SEQ ID NO: 639656 - RNA, 19 nt, Artificial Sequence
  Description of Artificial Sequence: Synthetic oligonucleotide
uuaauaauaagagcucccc

SEQ ID NO: 639657 - RNA, 19 nt, Artificial Sequence
  Description of Artificial Sequence: Synthetic oligonucleotide
aauaaaugugggguaccgc

SEQ ID NO: 639658 - RNA, 19 nt, Artificial Sequence
  Description of Artificial Sequence: Synthetic oligonucleotide
cauccugagaauuacgggc

SEQ ID NO: 639659 - RNA, 19 nt, Artificial Sequence
  Description of Artificial Sequence: Synthetic oligonucleotide
uagggugcaauccauacga

SEQ ID NO: 639660 - RNA, 19 nt, Artificial Sequence
  Description of Artificial Sequence: Synthetic oligonucleotide
uucacaaagcccagaagag

SEQ ID NO: 639661 - RNA, 19 nt, Artificial Sequence
  Description of Artificial Sequence: Synthetic oligonucleotide
auagugaagguugagugac

SEQ ID NO: 639662 - RNA, 19 nt, Artificial Sequence
  Description of Artificial Sequence: Synthetic oligonucleotide
gauauaauugguggcagag

SEQ ID NO: 639663 - RNA, 19 nt, Artificial Sequence
  Description of Artificial Sequence: Synthetic oligonucleotide
uucucagauacgaagggug

SEQ ID NO: 639664 - RNA, 19 nt, Artificial Sequence
  Description of Artificial Sequence: Synthetic oligonucleotide
ucaucgagaucccucagag

SEQ ID NO: 639665 - RNA, 19 nt, Artificial Sequence
  Description of Artificial Sequence: Synthetic oligonucleotide
ucauagguggcuccgauac

SEQ ID NO: 639666 - RNA, 19 nt, Artificial Sequence
  Description of Artificial Sequence: Synthetic oligonucleotide
uggaguaagaauugggcug

SEQ ID NO: 639667 - RNA, 19 nt, Artificial Sequence
  Description of Artificial Sequence: Synthetic oligonucleotide
aaaggccaaugcuucacgg

SEQ ID NO: 639668 - RNA, 19 nt, Artificial Sequence
  Description of Artificial Sequence: Synthetic oligonucleotide
uuuguuucgggugauauaa

SEQ ID NO: 639669 - RNA, 19 nt, Artificial Sequence
  Description of Artificial Sequence: Synthetic oligonucleotide
gacaggaagacuuugcgca

SEQ ID NO: 639670 - RNA, 19 nt, Artificial Sequence
  Description of Artificial Sequence: Synthetic oligonucleotide
auaagguaaaauguucggg

SEQ ID NO: 639671 - RNA, 19 nt, Artificial Sequence
  Description of Artificial Sequence: Synthetic oligonucleotide
aaguuguugacaaugggcu

SEQ ID NO: 639672 - RNA, 19 nt, Artificial Sequence
  Description of Artificial Sequence: Synthetic oligonucleotide
aauuccacaaugagccggc

SEQ ID NO: 639673 - RNA, 19 nt, Artificial Sequence
  Description of Artificial Sequence: Synthetic oligonucleotide
gaauuucaggccuucgaag

SEQ ID NO: 639674 - RNA, 19 nt, Artificial Sequence
  Description of Artificial Sequence: Synthetic oligonucleotide
aaguccagccauuuaauaa

SEQ ID NO: 639675 - RNA, 19 nt, Artificial Sequence
  Description of Artificial Sequence: Synthetic oligonucleotide
cauugacagggcaucaucg

SEQ ID NO: 639676 - RNA, 19 nt, Artificial Sequence
  Description of Artificial Sequence: Synthetic oligonucleotide
aaaguaugaggguguuggg

SEQ ID NO: 639677 - RNA, 19 nt, Artificial Sequence
  Description of Artificial Sequence: Synthetic oligonucleotide
gagaauuacgggcacagca

SEQ ID NO: 639678 - RNA, 19 nt, Artificial Sequence
  Description of Artificial Sequence: Synthetic oligonucleotide
ucagccugauaguaaaugc

SEQ ID NO: 639679 - RNA, 19 nt, Artificial Sequence
  Description of Artificial Sequence: Synthetic oligonucleotide
agcaaaaugaggauguuug

SEQ ID NO: 639680 - RNA, 19 nt, Artificial Sequence
  Description of Artificial Sequence: Synthetic oligonucleotide
augaggauguuugucagac

SEQ ID NO: 639681 - RNA, 19 nt, Artificial Sequence
  Description of Artificial Sequence: Synthetic oligonucleotide
aucaauaaaugugggguac

SEQ ID NO: 639682 - RNA, 19 nt, Artificial Sequence
  Description of Artificial Sequence: Synthetic oligonucleotide
ucaacaaucugguggguga

SEQ ID NO: 639683 - RNA, 19 nt, Artificial Sequence
  Description of Artificial Sequence: Synthetic oligonucleotide
uguccagacaccagcauga

SEQ ID NO: 639684 - RNA, 19 nt, Artificial Sequence
  Description of Artificial Sequence: Synthetic oligonucleotide
uccaauugacugcaaaagu

SEQ ID NO: 639685 - RNA, 19 nt, Artificial Sequence
  Description of Artificial Sequence: Synthetic oligonucleotide
gaauuccacaaugagccgg

SEQ ID NO: 639686 - RNA, 19 nt, Artificial Sequence
  Description of Artificial Sequence: Synthetic oligonucleotide
uccuggaguaagaauuggg

SEQ ID NO: 639687 - RNA, 19 nt, Artificial Sequence
  Description of Artificial Sequence: Synthetic oligonucleotide
agguaaaauguucgggccg

SEQ ID NO: 639688 - RNA, 19 nt, Artificial Sequence
  Description of Artificial Sequence: Synthetic oligonucleotide
cugaaguuguugacaaugg

SEQ ID NO: 639689 - RNA, 19 nt, Artificial Sequence
  Description of Artificial Sequence: Synthetic oligonucleotide
uagugcaugaauuccacaa

SEQ ID NO: 639690 - RNA, 19 nt, Artificial Sequence
  Description of Artificial Sequence: Synthetic oligonucleotide
cacccuuauuccaagacag

SEQ ID NO: 639691 - RNA, 19 nt, Artificial Sequence
  Description of Artificial Sequence: Synthetic oligonucleotide
auauaauugguggcagagc

SEQ ID NO: 639692 - RNA, 19 nt, Artificial Sequence
  Description of Artificial Sequence: Synthetic oligonucleotide
aaaauguucgggccgccgu

SEQ ID NO: 639693 - RNA, 19 nt, Artificial Sequence
  Description of Artificial Sequence: Synthetic oligonucleotide
auagggugcaauccauacg

SEQ ID NO: 639694 - RNA, 19 nt, Artificial Sequence
  Description of Artificial Sequence: Synthetic oligonucleotide
gaggaauuuaauguccuug

SEQ ID NO: 639695 - RNA, 19 nt, Artificial Sequence
  Description of Artificial Sequence: Synthetic oligonucleotide
ucgggugauauaauuggug

SEQ ID NO: 639696 - RNA, 19 nt, Artificial Sequence
  Description of Artificial Sequence: Synthetic oligonucleotide
acauugacagggcaucauc

SEQ ID NO: 639697 - RNA, 19 nt, Artificial Sequence
  Description of Artificial Sequence: Synthetic oligonucleotide
ugaugcaggagucugugau

SEQ ID NO: 639698 - RNA, 19 nt, Artificial Sequence
  Description of Artificial Sequence: Synthetic oligonucleotide
guaccugccaaugaugggg

SEQ ID NO: 639699 - RNA, 19 nt, Artificial Sequence
  Description of Artificial Sequence: Synthetic oligonucleotide
ggauagugaagguugagug

SEQ ID NO: 639700 - RNA, 19 nt, Artificial Sequence
  Description of Artificial Sequence: Synthetic oligonucleotide
ucaaguuuguagcuggguu

SEQ ID NO: 639701 - RNA, 19 nt, Artificial Sequence
  Description of Artificial Sequence: Synthetic oligonucleotide
gauagugaagguugaguga

SEQ ID NO: 639702 - RNA, 19 nt, Artificial Sequence
  Description of Artificial Sequence: Synthetic oligonucleotide
ucccauagcuccuuguuga

SEQ ID NO: 639703 - RNA, 19 nt, Artificial Sequence
  Description of Artificial Sequence: Synthetic oligonucleotide
gaccuucuagcuugggugg

SEQ ID NO: 639704 - RNA, 19 nt, Artificial Sequence
  Description of Artificial Sequence: Synthetic oligonucleotide
gauacgaagggugagaggu

SEQ ID NO: 639705 - RNA, 19 nt, Artificial Sequence
  Description of Artificial Sequence: Synthetic oligonucleotide
uguacguaguaccugccaa

SEQ ID NO: 639706 - RNA, 19 nt, Artificial Sequence
  Description of Artificial Sequence: Synthetic oligonucleotide
auaaaggccaaugcuucac

SEQ ID NO: 639707 - RNA, 19 nt, Artificial Sequence
  Description of Artificial Sequence: Synthetic oligonucleotide
caguaggaaacucaucggc

SEQ ID NO: 639708 - RNA, 19 nt, Artificial Sequence
  Description of Artificial Sequence: Synthetic oligonucleotide
ucauggaggaggaauuuaa

SEQ ID NO: 639709 - RNA, 19 nt, Artificial Sequence
  Description of Artificial Sequence: Synthetic oligonucleotide
ugcacuagcuugcuucugc

SEQ ID NO: 639710 - RNA, 19 nt, Artificial Sequence
  Description of Artificial Sequence: Synthetic oligonucleotide
aacaccuuguacucccuga

SEQ ID NO: 639711 - RNA, 19 nt, Artificial Sequence
  Description of Artificial Sequence: Synthetic oligonucleotide
aagagugguauagaacuca

SEQ ID NO: 639712 - RNA, 19 nt, Artificial Sequence
  Description of Artificial Sequence: Synthetic oligonucleotide
aacucaucggccucagccu

SEQ ID NO: 639713 - RNA, 19 nt, Artificial Sequence
  Description of Artificial Sequence: Synthetic oligonucleotide
ucucagauacgaaggguga

SEQ ID NO: 639714 - RNA, 19 nt, Artificial Sequence
  Description of Artificial Sequence: Synthetic oligonucleotide
aagacuuugcgcagggcuc

SEQ ID NO: 639715 - RNA, 19 nt, Artificial Sequence
  Description of Artificial Sequence: Synthetic oligonucleotide
aaugaggauguuugucaga

SEQ ID NO: 639716 - RNA, 19 nt, Artificial Sequence
  Description of Artificial Sequence: Synthetic oligonucleotide
auuuaauguccuugauaag

SEQ ID NO: 639717 - RNA, 19 nt, Artificial Sequence
  Description of Artificial Sequence: Synthetic oligonucleotide
acucgugaguugcacuagc

SEQ ID NO: 639718 - RNA, 19 nt, Artificial Sequence
  Description of Artificial Sequence: Synthetic oligonucleotide
auuucaggccuucgaagag

SEQ ID NO: 639719 - RNA, 19 nt, Artificial Sequence
  Description of Artificial Sequence: Synthetic oligonucleotide
auagcugaauggucugcac

SEQ ID NO: 639720 - RNA, 19 nt, Artificial Sequence
  Description of Artificial Sequence: Synthetic oligonucleotide
aaauguucgggccgccgug

SEQ ID NO: 639721 - RNA, 19 nt, Artificial Sequence
  Description of Artificial Sequence: Synthetic oligonucleotide
cagccugauaguaaaugcc

SEQ ID NO: 639722 - RNA, 19 nt, Artificial Sequence
  Description of Artificial Sequence: Synthetic oligonucleotide
ugccuuucagaaugcacag

SEQ ID NO: 639723 - RNA, 19 nt, Artificial Sequence
  Description of Artificial Sequence: Synthetic oligonucleotide
aaaguccagccauuuaaua

SEQ ID NO: 639724 - RNA, 19 nt, Artificial Sequence
  Description of Artificial Sequence: Synthetic oligonucleotide
caaugagccggcgacauag

SEQ ID NO: 639725 - RNA, 19 nt, Artificial Sequence
  Description of Artificial Sequence: Synthetic oligonucleotide
acaaagacuugucccagga

SEQ ID NO: 639726 - RNA, 19 nt, Artificial Sequence
  Description of Artificial Sequence: Synthetic oligonucleotide
uaugcuuuucggagcuucc

SEQ ID NO: 639727 - RNA, 19 nt, Artificial Sequence
  Description of Artificial Sequence: Synthetic oligonucleotide
ugauauaauugguggcaga

SEQ ID NO: 639728 - RNA, 19 nt, Artificial Sequence
  Description of Artificial Sequence: Synthetic oligonucleotide
acugagcgcugcuaguuuc

SEQ ID NO: 639729 - RNA, 19 nt, Artificial Sequence
  Description of Artificial Sequence: Synthetic oligonucleotide
agaauuacgggcacagcag

SEQ ID NO: 639730 - RNA, 19 nt, Artificial Sequence
  Description of Artificial Sequence: Synthetic oligonucleotide
cuguaguccacaucuguug

SEQ ID NO: 639731 - RNA, 19 nt, Artificial Sequence
  Description of Artificial Sequence: Synthetic oligonucleotide
auaugcuuuucggagcuuc

SEQ ID NO: 639732 - RNA, 19 nt, Artificial Sequence
  Description of Artificial Sequence: Synthetic oligonucleotide
uggggcuguacguaguacc

SEQ ID NO: 639733 - RNA, 19 nt, Artificial Sequence
  Description of Artificial Sequence: Synthetic oligonucleotide
cagcaccucagccugauag

SEQ ID NO: 639734 - RNA, 19 nt, Artificial Sequence
  Description of Artificial Sequence: Synthetic oligonucleotide
agcacauugacagggcauc

SEQ ID NO: 639735 - RNA, 19 nt, Artificial Sequence
  Description of Artificial Sequence: Synthetic oligonucleotide
ucaauaaaugugggguacc

SEQ ID NO: 639736 - RNA, 19 nt, Artificial Sequence
  Description of Artificial Sequence: Synthetic oligonucleotide
gacguagugcaugaauucc

SEQ ID NO: 639737 - RNA, 19 nt, Artificial Sequence
  Description of Artificial Sequence: Synthetic oligonucleotide
gaauggucugcacauggca

SEQ ID NO: 639738 - RNA, 19 nt, Artificial Sequence
  Description of Artificial Sequence: Synthetic oligonucleotide
aguucacaaagcccagaag

SEQ ID NO: 639739 - RNA, 19 nt, Artificial Sequence
  Description of Artificial Sequence: Synthetic oligonucleotide
uuauuguccuucaggcgcu

SEQ ID NO: 639740 - RNA, 19 nt, Artificial Sequence
  Description of Artificial Sequence: Synthetic oligonucleotide
aguaccugccaaugauggg

SEQ ID NO: 639741 - RNA, 19 nt, Artificial Sequence
  Description of Artificial Sequence: Synthetic oligonucleotide
uucuagcuuggguggauag

SEQ ID NO: 639742 - RNA, 19 nt, Artificial Sequence
  Description of Artificial Sequence: Synthetic oligonucleotide
aguaaaugccuuugaugga

SEQ ID NO: 639743 - RNA, 19 nt, Artificial Sequence
  Description of Artificial Sequence: Synthetic oligonucleotide
ugacguagugcaugaauuc

SEQ ID NO: 639744 - RNA, 19 nt, Artificial Sequence
  Description of Artificial Sequence: Synthetic oligonucleotide
uaauugguggcagagccuc

SEQ ID NO: 639745 - RNA, 19 nt, Artificial Sequence
  Description of Artificial Sequence: Synthetic oligonucleotide
gaagaauuucaggccuucg

SEQ ID NO: 639746 - RNA, 19 nt, Artificial Sequence
  Description of Artificial Sequence: Synthetic oligonucleotide
auugacagggcaucaucga

SEQ ID NO: 639747 - RNA, 19 nt, Artificial Sequence
  Description of Artificial Sequence: Synthetic oligonucleotide
aaagguacuucucccgcuu

SEQ ID NO: 639748 - RNA, 19 nt, Artificial Sequence
  Description of Artificial Sequence: Synthetic oligonucleotide
aauguucgggccgccgugg

SEQ ID NO: 639749 - RNA, 19 nt, Artificial Sequence
  Description of Artificial Sequence: Synthetic oligonucleotide
aaucagcguccacuucuuc

SEQ ID NO: 639750 - RNA, 19 nt, Artificial Sequence
  Description of Artificial Sequence: Synthetic oligonucleotide
aagaauugggcuggguaga

SEQ ID NO: 639751 - RNA, 19 nt, Artificial Sequence
  Description of Artificial Sequence: Synthetic oligonucleotide
aaaggcggaaguucacaaa

SEQ ID NO: 639752 - RNA, 19 nt, Artificial Sequence
  Description of Artificial Sequence: Synthetic oligonucleotide
uguuucgggugauauaauu

SEQ ID NO: 639753 - RNA, 19 nt, Artificial Sequence
  Description of Artificial Sequence: Synthetic oligonucleotide
gauaaaggccaaugcuuca

SEQ ID NO: 639754 - RNA, 19 nt, Artificial Sequence
  Description of Artificial Sequence: Synthetic oligonucleotide
gacccuguaguccacaucu

SEQ ID NO: 639755 - RNA, 19 nt, Artificial Sequence
  Description of Artificial Sequence: Synthetic oligonucleotide
acauagcugaauggucugc

SEQ ID NO: 639756 - RNA, 19 nt, Artificial Sequence
  Description of Artificial Sequence: Synthetic oligonucleotide
uaaaugugggguaccgcuc

SEQ ID NO: 639757 - RNA, 19 nt, Artificial Sequence
  Description of Artificial Sequence: Synthetic oligonucleotide
ucagauacgaagggugaga

SEQ ID NO: 639758 - RNA, 19 nt, Artificial Sequence
  Description of Artificial Sequence: Synthetic oligonucleotide
uucgggugauauaauuggu

SEQ ID NO: 639759 - RNA, 19 nt, Artificial Sequence
  Description of Artificial Sequence: Synthetic oligonucleotide
guagcuggguuuauugucc

SEQ ID NO: 639760 - RNA, 19 nt, Artificial Sequence
  Description of Artificial Sequence: Synthetic oligonucleotide
ggaguaagaauugggcugg

SEQ ID NO: 639761 - RNA, 19 nt, Artificial Sequence
  Description of Artificial Sequence: Synthetic oligonucleotide
cugagaauuacgggcacag

SEQ ID NO: 639762 - RNA, 19 nt, Artificial Sequence
  Description of Artificial Sequence: Synthetic oligonucleotide
gcucauacaggccuugucc

SEQ ID NO: 639763 - RNA, 19 nt, Artificial Sequence
  Description of Artificial Sequence: Synthetic oligonucleotide
agcgcugcuaguuucucca

SEQ ID NO: 639764 - RNA, 19 nt, Artificial Sequence
  Description of Artificial Sequence: Synthetic oligonucleotide
ccuggaguaagaauugggc

SEQ ID NO: 639765 - RNA, 19 nt, Artificial Sequence
  Description of Artificial Sequence: Synthetic oligonucleotide
guaagaauugggcugggua

SEQ ID NO: 639766 - RNA, 19 nt, Artificial Sequence
  Description of Artificial Sequence: Synthetic oligonucleotide
aacuucacaggaggcuagg

SEQ ID NO: 639767 - RNA, 19 nt, Artificial Sequence
  Description of Artificial Sequence: Synthetic oligonucleotide
agugaagguugagugacug

SEQ ID NO: 639768 - RNA, 19 nt, Artificial Sequence
  Description of Artificial Sequence: Synthetic oligonucleotide
augauaaaggccaaugcuu

SEQ ID NO: 639769 - RNA, 19 nt, Artificial Sequence
  Description of Artificial Sequence: Synthetic oligonucleotide
ugcacagccgccugaaauc

SEQ ID NO: 639770 - RNA, 19 nt, Artificial Sequence
  Description of Artificial Sequence: Synthetic oligonucleotide
cucacagcgucaucauggg

SEQ ID NO: 639771 - RNA, 19 nt, Artificial Sequence
  Description of Artificial Sequence: Synthetic oligonucleotide
auccauacgaugggcugcc

SEQ ID NO: 639772 - RNA, 19 nt, Artificial Sequence
  Description of Artificial Sequence: Synthetic oligonucleotide
ucagacuccuggaguaaga

SEQ ID NO: 639773 - RNA, 19 nt, Artificial Sequence
  Description of Artificial Sequence: Synthetic oligonucleotide
aauuacgggcacagcagug

SEQ ID NO: 639774 - RNA, 19 nt, Artificial Sequence
  Description of Artificial Sequence: Synthetic oligonucleotide
gauuuugcgccgcuugcca

SEQ ID NO: 639775 - RNA, 19 nt, Artificial Sequence
  Description of Artificial Sequence: Synthetic oligonucleotide
gugauauaauugguggcag

SEQ ID NO: 639776 - RNA, 19 nt, Artificial Sequence
  Description of Artificial Sequence: Synthetic oligonucleotide
ugaacuucacaggaggcua

SEQ ID NO: 639777 - RNA, 19 nt, Artificial Sequence
  Description of Artificial Sequence: Synthetic oligonucleotide
agugcaugaauuccacaau

SEQ ID NO: 639778 - RNA, 19 nt, Artificial Sequence
  Description of Artificial Sequence: Synthetic oligonucleotide
aaugagccggcgacauagc

SEQ ID NO: 639779 - RNA, 19 nt, Artificial Sequence
  Description of Artificial Sequence: Synthetic oligonucleotide
ugccaaacaugaucuuuug

SEQ ID NO: 639780 - RNA, 19 nt, Artificial Sequence
  Description of Artificial Sequence: Synthetic oligonucleotide
uacguaguaccugccaaug

SEQ ID NO: 639781 - RNA, 19 nt, Artificial Sequence
  Description of Artificial Sequence: Synthetic oligonucleotide
ugcaauccauacgaugggc

SEQ ID NO: 639782 - RNA, 19 nt, Artificial Sequence
  Description of Artificial Sequence: Synthetic oligonucleotide
ucgggcagcgaugacguag

SEQ ID NO: 639783 - RNA, 19 nt, Artificial Sequence
  Description of Artificial Sequence: Synthetic oligonucleotide
gguugagugacugguaaag

SEQ ID NO: 639784 - RNA, 19 nt, Artificial Sequence
  Description of Artificial Sequence: Synthetic oligonucleotide
acggauuuugcgccgcuug

SEQ ID NO: 639785 - RNA, 19 nt, Artificial Sequence
  Description of Artificial Sequence: Synthetic oligonucleotide
gaucaugggagaaagcaua

SEQ ID NO: 639786 - RNA, 19 nt, Artificial Sequence
  Description of Artificial Sequence: Synthetic oligonucleotide
aucaucgagaucccucaga

SEQ ID NO: 639787 - RNA, 19 nt, Artificial Sequence
  Description of Artificial Sequence: Synthetic oligonucleotide
ucccucagagcaucaauaa

SEQ ID NO: 639788 - RNA, 19 nt, Artificial Sequence
  Description of Artificial Sequence: Synthetic oligonucleotide
cagauacgaagggugagag

SEQ ID NO: 639789 - RNA, 19 nt, Artificial Sequence
  Description of Artificial Sequence: Synthetic oligonucleotide
aaguuuguagcuggguuua

SEQ ID NO: 639790 - RNA, 19 nt, Artificial Sequence
  Description of Artificial Sequence: Synthetic oligonucleotide
ggcggaaguucacaaagcc

SEQ ID NO: 639791 - RNA, 19 nt, Artificial Sequence
  Description of Artificial Sequence: Synthetic oligonucleotide
caucuguuggaugaucaug

SEQ ID NO: 639792 - RNA, 19 nt, Artificial Sequence
  Description of Artificial Sequence: Synthetic oligonucleotide
agagccucguucauacuuc

SEQ ID NO: 639793 - RNA, 19 nt, Artificial Sequence
  Description of Artificial Sequence: Synthetic oligonucleotide
cuauaguaggcaccaccac

SEQ ID NO: 639794 - RNA, 19 nt, Artificial Sequence
  Description of Artificial Sequence: Synthetic oligonucleotide
agacuuugcgcagggcucg

SEQ ID NO: 639795 - RNA, 19 nt, Artificial Sequence
  Description of Artificial Sequence: Synthetic oligonucleotide
uacgaagggugagaggugu

SEQ ID NO: 639796 - RNA, 19 nt, Artificial Sequence
  Description of Artificial Sequence: Synthetic oligonucleotide
uuugcgcagggcucgggca

SEQ ID NO: 639797 - RNA, 19 nt, Artificial Sequence
  Description of Artificial Sequence: Synthetic oligonucleotide
cuguggaaagcaaagcaaa

SEQ ID NO: 639798 - RNA, 19 nt, Artificial Sequence
  Description of Artificial Sequence: Synthetic oligonucleotide
gaauuccauucgcucuucc

SEQ ID NO: 639799 - RNA, 19 nt, Artificial Sequence
  Description of Artificial Sequence: Synthetic oligonucleotide
acgggcacagcaguguagg

SEQ ID NO: 639800 - RNA, 19 nt, Artificial Sequence
  Description of Artificial Sequence: Synthetic oligonucleotide
cauggcacuugcccguccg

SEQ ID NO: 639801 - RNA, 19 nt, Artificial Sequence
  Description of Artificial Sequence: Synthetic oligonucleotide
uaauguccuugauaaggua

SEQ ID NO: 639802 - RNA, 19 nt, Artificial Sequence
  Description of Artificial Sequence: Synthetic oligonucleotide
uacgggcacagcaguguag

SEQ ID NO: 639803 - RNA, 19 nt, Artificial Sequence
  Description of Artificial Sequence: Synthetic oligonucleotide
agagugguauagaacucag

SEQ ID NO: 639804 - RNA, 19 nt, Artificial Sequence
  Description of Artificial Sequence: Synthetic oligonucleotide
ucggagcuuccgaacaaac

SEQ ID NO: 639805 - RNA, 19 nt, Artificial Sequence
  Description of Artificial Sequence: Synthetic oligonucleotide
guaguaccugccaaugaug

SEQ ID NO: 639806 - RNA, 19 nt, Artificial Sequence
  Description of Artificial Sequence: Synthetic oligonucleotide
auuacgggcacagcagugu

SEQ ID NO: 639807 - RNA, 19 nt, Artificial Sequence
  Description of Artificial Sequence: Synthetic oligonucleotide
gguaaaauguucgggccgc

SEQ ID NO: 639808 - RNA, 19 nt, Artificial Sequence
  Description of Artificial Sequence: Synthetic oligonucleotide
accaaaaguaugagggugu

SEQ ID NO: 639809 - RNA, 19 nt, Artificial Sequence
  Description of Artificial Sequence: Synthetic oligonucleotide
ugucauagguggcuccgau

SEQ ID NO: 639810 - RNA, 19 nt, Artificial Sequence
  Description of Artificial Sequence: Synthetic oligonucleotide
ggccucuuuguccagacac

SEQ ID NO: 639811 - RNA, 19 nt, Artificial Sequence
  Description of Artificial Sequence: Synthetic oligonucleotide
aaugugggguaccgcuccu

SEQ ID NO: 639812 - RNA, 19 nt, Artificial Sequence
  Description of Artificial Sequence: Synthetic oligonucleotide
aggcggaaguucacaaagc

SEQ ID NO: 639813 - RNA, 19 nt, Artificial Sequence
  Description of Artificial Sequence: Synthetic oligonucleotide
gaauugggcuggguagagg

SEQ ID NO: 639814 - RNA, 19 nt, Artificial Sequence
  Description of Artificial Sequence: Synthetic oligonucleotide
ugcucauacaggccuuguc

SEQ ID NO: 639815 - RNA, 19 nt, Artificial Sequence
  Description of Artificial Sequence: Synthetic oligonucleotide
ggcuguacguaguaccugc

SEQ ID NO: 639816 - RNA, 19 nt, Artificial Sequence
  Description of Artificial Sequence: Synthetic oligonucleotide
cuuugcgcagggcucgggc

SEQ ID NO: 639817 - RNA, 19 nt, Artificial Sequence
  Description of Artificial Sequence: Synthetic oligonucleotide
agcgucaucaugggcuuuc

SEQ ID NO: 639818 - RNA, 19 nt, Artificial Sequence
  Description of Artificial Sequence: Synthetic oligonucleotide
caggccuucgaagaguuuc

SEQ ID NO: 639819 - RNA, 19 nt, Artificial Sequence
  Description of Artificial Sequence: Synthetic oligonucleotide
uuuugcgccgcuugccaaa

SEQ ID NO: 639820 - RNA, 19 nt, Artificial Sequence
  Description of Artificial Sequence: Synthetic oligonucleotide
augcuuuucggagcuuccg

SEQ ID NO: 639821 - RNA, 19 nt, Artificial Sequence
  Description of Artificial Sequence: Synthetic oligonucleotide
acccuuauuccaagacagc

SEQ ID NO: 639822 - RNA, 19 nt, Artificial Sequence
  Description of Artificial Sequence: Synthetic oligonucleotide
uccugagaauuacgggcac

SEQ ID NO: 639823 - RNA, 19 nt, Artificial Sequence
  Description of Artificial Sequence: Synthetic oligonucleotide
cucagauacgaagggugag

SEQ ID NO: 639824 - RNA, 19 nt, Artificial Sequence
  Description of Artificial Sequence: Synthetic oligonucleotide
acagccgccugaaaucagg

SEQ ID NO: 639825 - RNA, 19 nt, Artificial Sequence
  Description of Artificial Sequence: Synthetic oligonucleotide
guaggaaacucaucggccu

SEQ ID NO: 639826 - RNA, 19 nt, Artificial Sequence
  Description of Artificial Sequence: Synthetic oligonucleotide
cuccgauacacaaagacuu

SEQ ID NO: 639827 - RNA, 19 nt, Artificial Sequence
  Description of Artificial Sequence: Synthetic oligonucleotide
ugagaauuacgggcacagc

SEQ ID NO: 639828 - RNA, 19 nt, Artificial Sequence
  Description of Artificial Sequence: Synthetic oligonucleotide
uccgugggaagguggagaa

SEQ ID NO: 639829 - RNA, 19 nt, Artificial Sequence
  Description of Artificial Sequence: Synthetic oligonucleotide
caucgagaucccucagagc

SEQ ID NO: 639830 - RNA, 19 nt, Artificial Sequence
  Description of Artificial Sequence: Synthetic oligonucleotide
agaaugcacagccgccuga

SEQ ID NO: 639831 - RNA, 19 nt, Artificial Sequence
  Description of Artificial Sequence: Synthetic oligonucleotide
agaauugggcuggguagag

SEQ ID NO: 639832 - RNA, 19 nt, Artificial Sequence
  Description of Artificial Sequence: Synthetic oligonucleotide
caucaauaaauguggggua

SEQ ID NO: 639833 - RNA, 19 nt, Artificial Sequence
  Description of Artificial Sequence: Synthetic oligonucleotide
caucaguaggaaacucauc

SEQ ID NO: 639834 - RNA, 19 nt, Artificial Sequence
  Description of Artificial Sequence: Synthetic oligonucleotide
gaauuacgggcacagcagu

SEQ ID NO: 639835 - RNA, 19 nt, Artificial Sequence
  Description of Artificial Sequence: Synthetic oligonucleotide
ugcgccgcuugccaaacau

SEQ ID NO: 639836 - RNA, 19 nt, Artificial Sequence
  Description of Artificial Sequence: Synthetic oligonucleotide
ucuagcuuggguggauagu

SEQ ID NO: 639837 - RNA, 19 nt, Artificial Sequence
  Description of Artificial Sequence: Synthetic oligonucleotide
ggcauucacacagucaaac

SEQ ID NO: 639838 - RNA, 19 nt, Artificial Sequence
  Description of Artificial Sequence: Synthetic oligonucleotide
uccuuccuucucagauacg

SEQ ID NO: 639839 - RNA, 19 nt, Artificial Sequence
  Description of Artificial Sequence: Synthetic oligonucleotide
aagcacauugacagggcau

SEQ ID NO: 639840 - RNA, 19 nt, Artificial Sequence
  Description of Artificial Sequence: Synthetic oligonucleotide
cuggaguaagaauugggcu

SEQ ID NO: 639841 - RNA, 19 nt, Artificial Sequence
  Description of Artificial Sequence: Synthetic oligonucleotide
uacucgugaguugcacuag

SEQ ID NO: 639842 - RNA, 19 nt, Artificial Sequence
  Description of Artificial Sequence: Synthetic oligonucleotide
acguaguaccugccaauga

SEQ ID NO: 639843 - RNA, 19 nt, Artificial Sequence
  Description of Artificial Sequence: Synthetic oligonucleotide
gcuagggcuggucacacac

SEQ ID NO: 639844 - RNA, 19 nt, Artificial Sequence
  Description of Artificial Sequence: Synthetic oligonucleotide
ugaggauguuugucagacu

SEQ ID NO: 639845 - RNA, 19 nt, Artificial Sequence
  Description of Artificial Sequence: Synthetic oligonucleotide
guacucgugaguugcacua

SEQ ID NO: 639846 - RNA, 19 nt, Artificial Sequence
  Description of Artificial Sequence: Synthetic oligonucleotide
ucgcucuucccauaugcuu

SEQ ID NO: 639847 - RNA, 19 nt, Artificial Sequence
  Description of Artificial Sequence: Synthetic oligonucleotide
guaaaggcggaaguucaca

SEQ ID NO: 639848 - RNA, 19 nt, Artificial Sequence
  Description of Artificial Sequence: Synthetic oligonucleotide
ugcaaaaguccagccauuu

SEQ ID NO: 639849 - RNA, 19 nt, Artificial Sequence
  Description of Artificial Sequence: Synthetic oligonucleotide
uaccgcuccuugacaaugu

SEQ ID NO: 639850 - RNA, 19 nt, Artificial Sequence
  Description of Artificial Sequence: Synthetic oligonucleotide
gcugguacucgugaguugc

SEQ ID NO: 639851 - RNA, 19 nt, Artificial Sequence
  Description of Artificial Sequence: Synthetic oligonucleotide
cucauggggauaaaugccu

SEQ ID NO: 639852 - RNA, 19 nt, Artificial Sequence
  Description of Artificial Sequence: Synthetic oligonucleotide
ggccucacggauuuugcgc

SEQ ID NO: 639853 - RNA, 19 nt, Artificial Sequence
  Description of Artificial Sequence: Synthetic oligonucleotide
uuacgggcacagcagugua

SEQ ID NO: 639854 - RNA, 19 nt, Artificial Sequence
  Description of Artificial Sequence: Synthetic oligonucleotide
aaugcacagccgccugaaa

SEQ ID NO: 639855 - RNA, 19 nt, Artificial Sequence
  Description of Artificial Sequence: Synthetic oligonucleotide
gagcgcugcuaguuucucc

SEQ ID NO: 639856 - RNA, 19 nt, Artificial Sequence
  Description of Artificial Sequence: Synthetic oligonucleotide
gguauagaacucagugaag

SEQ ID NO: 639857 - RNA, 19 nt, Artificial Sequence
  Description of Artificial Sequence: Synthetic oligonucleotide
auaauugguggcagagccu

SEQ ID NO: 639858 - RNA, 19 nt, Artificial Sequence
  Description of Artificial Sequence: Synthetic oligonucleotide
ggggaauguaaucuccuuc

SEQ ID NO: 639859 - RNA, 19 nt, Artificial Sequence
  Description of Artificial Sequence: Synthetic oligonucleotide
caaaaguaugaggguguug

SEQ ID NO: 639860 - RNA, 19 nt, Artificial Sequence
  Description of Artificial Sequence: Synthetic oligonucleotide
uccugaugauaaaggccaa

SEQ ID NO: 639861 - RNA, 19 nt, Artificial Sequence
  Description of Artificial Sequence: Synthetic oligonucleotide
uagcuggguuuauuguccu

SEQ ID NO: 639862 - RNA, 19 nt, Artificial Sequence
  Description of Artificial Sequence: Synthetic oligonucleotide
gauguuugucagacuccug

SEQ ID NO: 639863 - RNA, 19 nt, Artificial Sequence
  Description of Artificial Sequence: Synthetic oligonucleotide
uuguuucgggugauauaau

SEQ ID NO: 639864 - RNA, 19 nt, Artificial Sequence
  Description of Artificial Sequence: Synthetic oligonucleotide
ccuugauaagguaaaaugu

SEQ ID NO: 639865 - RNA, 19 nt, Artificial Sequence
  Description of Artificial Sequence: Synthetic oligonucleotide
acguagugcaugaauucca

SEQ ID NO: 639866 - RNA, 19 nt, Artificial Sequence
  Description of Artificial Sequence: Synthetic oligonucleotide
ugacccuguaguccacauc

SEQ ID NO: 639867 - RNA, 19 nt, Artificial Sequence
  Description of Artificial Sequence: Synthetic oligonucleotide
gcucauggggauaaaugcc

SEQ ID NO: 639868 - RNA, 19 nt, Artificial Sequence
  Description of Artificial Sequence: Synthetic oligonucleotide
gucagacuccuggaguaag

SEQ ID NO: 639869 - RNA, 19 nt, Artificial Sequence
  Description of Artificial Sequence: Synthetic oligonucleotide
gaacucagugaagguggcc

SEQ ID NO: 639870 - RNA, 19 nt, Artificial Sequence
  Description of Artificial Sequence: Synthetic oligonucleotide
auuuugcgccgcuugccaa

SEQ ID NO: 639871 - RNA, 19 nt, Artificial Sequence
  Description of Artificial Sequence: Synthetic oligonucleotide
ggcacuugcccguccgugg

SEQ ID NO: 639872 - RNA, 19 nt, Artificial Sequence
  Description of Artificial Sequence: Synthetic oligonucleotide
cucaucggccucagccucc

SEQ ID NO: 639873 - RNA, 19 nt, Artificial Sequence
  Description of Artificial Sequence: Synthetic oligonucleotide
cacccacuggggcuguacg

SEQ ID NO: 639874 - RNA, 19 nt, Artificial Sequence
  Description of Artificial Sequence: Synthetic oligonucleotide
agccuccucuauaguaggc

SEQ ID NO: 639875 - RNA, 19 nt, Artificial Sequence
  Description of Artificial Sequence: Synthetic oligonucleotide
gaguaagaauugggcuggg

SEQ ID NO: 639876 - RNA, 19 nt, Artificial Sequence
  Description of Artificial Sequence: Synthetic oligonucleotide
gguggcagagccucguuca

SEQ ID NO: 639877 - RNA, 19 nt, Artificial Sequence
  Description of Artificial Sequence: Synthetic oligonucleotide
gccucacggauuuugcgcc

SEQ ID NO: 639878 - RNA, 19 nt, Artificial Sequence
  Description of Artificial Sequence: Synthetic oligonucleotide
agguugagugacugguaaa

SEQ ID NO: 639879 - RNA, 19 nt, Artificial Sequence
  Description of Artificial Sequence: Synthetic oligonucleotide
ucgguucaggaagaauuuc

SEQ ID NO: 639880 - RNA, 19 nt, Artificial Sequence
  Description of Artificial Sequence: Synthetic oligonucleotide
caucaucgagaucccucag

SEQ ID NO: 639881 - RNA, 19 nt, Artificial Sequence
  Description of Artificial Sequence: Synthetic oligonucleotide
gccucguucauacuucuuc

SEQ ID NO: 639882 - RNA, 19 nt, Artificial Sequence
  Description of Artificial Sequence: Synthetic oligonucleotide
gcaucaucgagaucccuca

SEQ ID NO: 639883 - RNA, 19 nt, Artificial Sequence
  Description of Artificial Sequence: Synthetic oligonucleotide
aguaagaauugggcugggu

SEQ ID NO: 639884 - RNA, 19 nt, Artificial Sequence
  Description of Artificial Sequence: Synthetic oligonucleotide
caggaagaauuucaggccu

SEQ ID NO: 639885 - RNA, 19 nt, Artificial Sequence
  Description of Artificial Sequence: Synthetic oligonucleotide
cccaccaaaacuccugaug

SEQ ID NO: 639886 - RNA, 19 nt, Artificial Sequence
  Description of Artificial Sequence: Synthetic oligonucleotide
uugucucugccugggcuug

SEQ ID NO: 639887 - RNA, 19 nt, Artificial Sequence
  Description of Artificial Sequence: Synthetic oligonucleotide
ggugaugcaggagucugug

SEQ ID NO: 639888 - RNA, 19 nt, Artificial Sequence
  Description of Artificial Sequence: Synthetic oligonucleotide
cuggguuuauuguccuuca

SEQ ID NO: 639889 - RNA, 19 nt, Artificial Sequence
  Description of Artificial Sequence: Synthetic oligonucleotide
ugguacucgugaguugcac

SEQ ID NO: 639890 - RNA, 19 nt, Artificial Sequence
  Description of Artificial Sequence: Synthetic oligonucleotide
ggagaaagcauagggugca

SEQ ID NO: 639891 - RNA, 19 nt, Artificial Sequence
  Description of Artificial Sequence: Synthetic oligonucleotide
ccaaaacuccugaugauaa

SEQ ID NO: 639892 - RNA, 19 nt, Artificial Sequence
  Description of Artificial Sequence: Synthetic oligonucleotide
uucgggccgccguggaacc

SEQ ID NO: 639893 - RNA, 19 nt, Artificial Sequence
  Description of Artificial Sequence: Synthetic oligonucleotide
acggggcaccucucgguuc

SEQ ID NO: 639894 - RNA, 19 nt, Artificial Sequence
  Description of Artificial Sequence: Synthetic oligonucleotide
ggcucgggcagcgaugacg

SEQ ID NO: 639895 - RNA, 19 nt, Artificial Sequence
  Description of Artificial Sequence: Synthetic oligonucleotide
uucggagcuuccgaacaaa

SEQ ID NO: 639896 - RNA, 19 nt, Artificial Sequence
  Description of Artificial Sequence: Synthetic oligonucleotide
guugcacuagcuugcuucu

SEQ ID NO: 639897 - RNA, 19 nt, Artificial Sequence
  Description of Artificial Sequence: Synthetic oligonucleotide
ucacggauuuugcgccgcu

SEQ ID NO: 639898 - RNA, 19 nt, Artificial Sequence
  Description of Artificial Sequence: Synthetic oligonucleotide
acacccacuggggcuguac

SEQ ID NO: 639899 - RNA, 19 nt, Artificial Sequence
  Description of Artificial Sequence: Synthetic oligonucleotide
cuguacguaguaccugcca

SEQ ID NO: 639900 - RNA, 19 nt, Artificial Sequence
  Description of Artificial Sequence: Synthetic oligonucleotide
augacccuguaguccacau

SEQ ID NO: 639901 - RNA, 19 nt, Artificial Sequence
  Description of Artificial Sequence: Synthetic oligonucleotide
uggcacuugcccguccgug

SEQ ID NO: 639902 - RNA, 19 nt, Artificial Sequence
  Description of Artificial Sequence: Synthetic oligonucleotide
cauucgcucuucccauaug

SEQ ID NO: 639903 - RNA, 19 nt, Artificial Sequence
  Description of Artificial Sequence: Synthetic oligonucleotide
cagacuggcacugagcgcu

SEQ ID NO: 639904 - RNA, 19 nt, Artificial Sequence
  Description of Artificial Sequence: Synthetic oligonucleotide
guucgggccgccguggaac

SEQ ID NO: 639905 - RNA, 19 nt, Artificial Sequence
  Description of Artificial Sequence: Synthetic oligonucleotide
ggauuuugcgccgcuugcc

SEQ ID NO: 639906 - RNA, 19 nt, Artificial Sequence
  Description of Artificial Sequence: Synthetic oligonucleotide
ccuccucuauaguaggcac

SEQ ID NO: 639907 - RNA, 19 nt, Artificial Sequence
  Description of Artificial Sequence: Synthetic oligonucleotide
uccugcgaucuuccuccug

SEQ ID NO: 639908 - RNA, 19 nt, Artificial Sequence
  Description of Artificial Sequence: Synthetic oligonucleotide
gcggaaguucacaaagccc

SEQ ID NO: 639909 - RNA, 19 nt, Artificial Sequence
  Description of Artificial Sequence: Synthetic oligonucleotide
auacgaagggugagaggug

SEQ ID NO: 639910 - RNA, 19 nt, Artificial Sequence
  Description of Artificial Sequence: Synthetic oligonucleotide
cucacggauuuugcgccgc

SEQ ID NO: 639911 - RNA, 19 nt, Artificial Sequence
  Description of Artificial Sequence: Synthetic oligonucleotide
agugacugguaaaggcgga

SEQ ID NO: 639912 - RNA, 19 nt, Artificial Sequence
  Description of Artificial Sequence: Synthetic oligonucleotide
gcuggguuuauuguccuuc

SEQ ID NO: 639913 - RNA, 19 nt, Artificial Sequence
  Description of Artificial Sequence: Synthetic oligonucleotide
gcacuagcuugcuucugcc

SEQ ID NO: 639914 - RNA, 19 nt, Artificial Sequence
  Description of Artificial Sequence: Synthetic oligonucleotide
uguucgggccgccguggaa

SEQ ID NO: 639915 - RNA, 19 nt, Artificial Sequence
  Description of Artificial Sequence: Synthetic oligonucleotide
cacagccgccugaaaucag

SEQ ID NO: 639916 - RNA, 19 nt, Artificial Sequence
  Description of Artificial Sequence: Synthetic oligonucleotide
ggaggagccgggcauucac

SEQ ID NO: 639917 - RNA, 19 nt, Artificial Sequence
  Description of Artificial Sequence: Synthetic oligonucleotide
gcuguggaaagcaaagcaa

SEQ ID NO: 639918 - RNA, 19 nt, Artificial Sequence
  Description of Artificial Sequence: Synthetic oligonucleotide
uugcacuagcuugcuucug

SEQ ID NO: 639919 - RNA, 19 nt, Artificial Sequence
  Description of Artificial Sequence: Synthetic oligonucleotide
ccggcgacauagcugaaug

SEQ ID NO: 639920 - RNA, 19 nt, Artificial Sequence
  Description of Artificial Sequence: Synthetic oligonucleotide
ggaggcuagggcuggucac

SEQ ID NO: 639921 - RNA, 19 nt, Artificial Sequence
  Description of Artificial Sequence: Synthetic oligonucleotide
cccaucaguaggaaacuca

SEQ ID NO: 639922 - RNA, 19 nt, Artificial Sequence
  Description of Artificial Sequence: Synthetic oligonucleotide
cguagugcaugaauuccac

SEQ ID NO: 639923 - RNA, 19 nt, Artificial Sequence
  Description of Artificial Sequence: Synthetic oligonucleotide
cacuagcuugcuucugcca

SEQ ID NO: 639924 - RNA, 19 nt, Artificial Sequence
  Description of Artificial Sequence: Synthetic oligonucleotide
ccauacgaugggcugcccc

SEQ ID NO: 639925 - RNA, 19 nt, Artificial Sequence
  Description of Artificial Sequence: Synthetic oligonucleotide
gugagagguagcuggugcu

SEQ ID NO: 639926 - RNA, 19 nt, Artificial Sequence
  Description of Artificial Sequence: Synthetic oligonucleotide
gccguggaacccuuguuca

SEQ ID NO: 639927 - RNA, 19 nt, Artificial Sequence
  Description of Artificial Sequence: Synthetic oligonucleotide
gguaaaggcggaaguucac

SEQ ID NO: 639928 - RNA, 19 nt, Artificial Sequence
  Description of Artificial Sequence: Synthetic oligonucleotide
cuugcccguccgugggaag

SEQ ID NO: 639929 - RNA, 19 nt, Artificial Sequence
  Description of Artificial Sequence: Synthetic oligonucleotide
aggccuucgaagaguuucu

SEQ ID NO: 639930 - RNA, 19 nt, Artificial Sequence
  Description of Artificial Sequence: Synthetic oligonucleotide
guacguaguaccugccaau

SEQ ID NO: 639931 - RNA, 19 nt, Artificial Sequence
  Description of Artificial Sequence: Synthetic oligonucleotide
ugagcgcugcuaguuucuc

SEQ ID NO: 639932 - RNA, 19 nt, Artificial Sequence
  Description of Artificial Sequence: Synthetic oligonucleotide
ggacacauccccaccaaaa

SEQ ID NO: 639933 - RNA, 19 nt, Artificial Sequence
  Description of Artificial Sequence: Synthetic oligonucleotide
cauagguggcuccgauaca

SEQ ID NO: 639934 - RNA, 19 nt, Artificial Sequence
  Description of Artificial Sequence: Synthetic oligonucleotide
gcaaaaugaggauguuugu

SEQ ID NO: 639935 - RNA, 19 nt, Artificial Sequence
  Description of Artificial Sequence: Synthetic oligonucleotide
acaaugagccggcgacaua

SEQ ID NO: 639936 - RNA, 19 nt, Artificial Sequence
  Description of Artificial Sequence: Synthetic oligonucleotide
ggcgacauagcugaauggu

SEQ ID NO: 639937 - RNA, 19 nt, Artificial Sequence
  Description of Artificial Sequence: Synthetic oligonucleotide
aggugcgcuuccuccuccu

SEQ ID NO: 639938 - RNA, 19 nt, Artificial Sequence
  Description of Artificial Sequence: Synthetic oligonucleotide
gaccgacaggugcgcuucc

SEQ ID NO: 639939 - RNA, 19 nt, Artificial Sequence
  Description of Artificial Sequence: Synthetic oligonucleotide
ucaggccuucgaagaguuu

SEQ ID NO: 639940 - RNA, 19 nt, Artificial Sequence
  Description of Artificial Sequence: Synthetic oligonucleotide
cucgugaguugcacuagcu

SEQ ID NO: 639941 - RNA, 19 nt, Artificial Sequence
  Description of Artificial Sequence: Synthetic oligonucleotide
uuccugcgaucuuccuccu

SEQ ID NO: 639942 - RNA, 19 nt, Artificial Sequence
  Description of Artificial Sequence: Synthetic oligonucleotide
ccucacggauuuugcgccg

SEQ ID NO: 639943 - RNA, 19 nt, Artificial Sequence
  Description of Artificial Sequence: Synthetic oligonucleotide
ggguaccgcuccuugacaa

SEQ ID NO: 639944 - RNA, 19 nt, Artificial Sequence
  Description of Artificial Sequence: Synthetic oligonucleotide
cgacaggugcgcuuccucc

SEQ ID NO: 639945 - RNA, 19 nt, Artificial Sequence
  Description of Artificial Sequence: Synthetic oligonucleotide
gguacucgugaguugcacu

SEQ ID NO: 639946 - RNA, 19 nt, Artificial Sequence
  Description of Artificial Sequence: Synthetic oligonucleotide
uauuguccuucaggcgcuc

SEQ ID NO: 639947 - RNA, 19 nt, Artificial Sequence
  Description of Artificial Sequence: Synthetic oligonucleotide
guccuugauaagguaaaau

SEQ ID NO: 639948 - RNA, 19 nt, Artificial Sequence
  Description of Artificial Sequence: Synthetic oligonucleotide
cucauggaggaggaauuua

SEQ ID NO: 639949 - RNA, 19 nt, Artificial Sequence
  Description of Artificial Sequence: Synthetic oligonucleotide
ggcugguacucgugaguug

SEQ ID NO: 639950 - RNA, 19 nt, Artificial Sequence
  Description of Artificial Sequence: Synthetic oligonucleotide
ccagacuggcacugagcgc

SEQ ID NO: 639951 - RNA, 19 nt, Artificial Sequence
  Description of Artificial Sequence: Synthetic oligonucleotide
acuugcccguccgugggaa

SEQ ID NO: 639952 - RNA, 19 nt, Artificial Sequence
  Description of Artificial Sequence: Synthetic oligonucleotide
gcgacauagcugaaugguc

SEQ ID NO: 639953 - RNA, 19 nt, Artificial Sequence
  Description of Artificial Sequence: Synthetic oligonucleotide
cugguacucgugaguugca

SEQ ID NO: 639954 - RNA, 19 nt, Artificial Sequence
  Description of Artificial Sequence: Synthetic oligonucleotide
ggccaaugcuucacggggc

SEQ ID NO: 639955 - RNA, 19 nt, Artificial Sequence
  Description of Artificial Sequence: Synthetic oligonucleotide
gcgaucuuccuccugugcu

SEQ ID NO: 639956 - RNA, 19 nt, Artificial Sequence
  Description of Artificial Sequence: Synthetic oligonucleotide
aguuuguagcuggguuuau

SEQ ID NO: 639957 - RNA, 19 nt, Artificial Sequence
  Description of Artificial Sequence: Synthetic oligonucleotide
gugacugguaaaggcggaa

SEQ ID NO: 639958 - RNA, 19 nt, Artificial Sequence
  Description of Artificial Sequence: Synthetic oligonucleotide
ugcccguccgugggaaggu

SEQ ID NO: 639959 - RNA, 19 nt, Artificial Sequence
  Description of Artificial Sequence: Synthetic oligonucleotide
gcuccgauacacaaagacu

SEQ ID NO: 639960 - RNA, 19 nt, Artificial Sequence
  Description of Artificial Sequence: Synthetic oligonucleotide
gcuguacguaguaccugcc

SEQ ID NO: 639961 - RNA, 19 nt, Artificial Sequence
  Description of Artificial Sequence: Synthetic oligonucleotide
cagaccucacagcgucauc

SEQ ID NO: 639962 - RNA, 19 nt, Artificial Sequence
  Description of Artificial Sequence: Synthetic oligonucleotide
cccguccgugggaaggugg

SEQ ID NO: 639963 - RNA, 19 nt, Artificial Sequence
  Description of Artificial Sequence: Synthetic oligonucleotide
cggauuuugcgccgcuugc

SEQ ID NO: 639964 - RNA, 19 nt, Artificial Sequence
  Description of Artificial Sequence: Synthetic oligonucleotide
accgacaggugcgcuuccu

SEQ ID NO: 639965 - RNA, 19 nt, Artificial Sequence
  Description of Artificial Sequence: Synthetic oligonucleotide
ccucuuuguccagacacca

SEQ ID NO: 639966 - RNA, 19 nt, Artificial Sequence
  Description of Artificial Sequence: Synthetic oligonucleotide
cauggggauaaaugccuuu

SEQ ID NO: 639967 - RNA, 19 nt, Artificial Sequence
  Description of Artificial Sequence: Synthetic oligonucleotide
gcacagccgccugaaauca

SEQ ID NO: 639968 - RNA, 19 nt, Artificial Sequence
  Description of Artificial Sequence: Synthetic oligonucleotide
guggaacccuuguucacuu

SEQ ID NO: 639969 - RNA, 19 nt, Artificial Sequence
  Description of Artificial Sequence: Synthetic oligonucleotide
cgacauagcugaauggucu

SEQ ID NO: 639970 - RNA, 19 nt, Artificial Sequence
  Description of Artificial Sequence: Synthetic oligonucleotide
gggcuguacguaguaccug

SEQ ID NO: 639971 - RNA, 19 nt, Artificial Sequence
  Description of Artificial Sequence: Synthetic oligonucleotide
ccaagaccgacaggugcgc

SEQ ID NO: 639972 - RNA, 19 nt, Artificial Sequence
  Description of Artificial Sequence: Synthetic oligonucleotide
ccauaugcuuuucggagcu

SEQ ID NO: 639973 - RNA, 19 nt, Artificial Sequence
  Description of Artificial Sequence: Synthetic oligonucleotide
ccuuauuccaagacagcau

SEQ ID NO: 639974 - RNA, 19 nt, Artificial Sequence
  Description of Artificial Sequence: Synthetic oligonucleotide
agaccucccauagcuccuu

SEQ ID NO: 639975 - RNA, 19 nt, Artificial Sequence
  Description of Artificial Sequence: Synthetic oligonucleotide
agggugcaauccauacgau

SEQ ID NO: 639976 - RNA, 19 nt, Artificial Sequence
  Description of Artificial Sequence: Synthetic oligonucleotide
ccguggaacccuuguucac

SEQ ID NO: 639977 - RNA, 19 nt, Artificial Sequence
  Description of Artificial Sequence: Synthetic oligonucleotide
gcuuuguuucgggugauau

SEQ ID NO: 639978 - RNA, 19 nt, Artificial Sequence
  Description of Artificial Sequence: Synthetic oligonucleotide
gggguaccgcuccuugaca

SEQ ID NO: 639979 - RNA, 19 nt, Artificial Sequence
  Description of Artificial Sequence: Synthetic oligonucleotide
cgccgcuugccaaacauga

SEQ ID NO: 639980 - RNA, 19 nt, Artificial Sequence
  Description of Artificial Sequence: Synthetic oligonucleotide
ccaaugcauauguguccuc

SEQ ID NO: 639981 - RNA, 19 nt, Artificial Sequence
  Description of Artificial Sequence: Synthetic oligonucleotide
cacaaugagccggcgacau

SEQ ID NO: 639982 - RNA, 19 nt, Artificial Sequence
  Description of Artificial Sequence: Synthetic oligonucleotide
ccugcgaucuuccuccugu

SEQ ID NO: 639983 - RNA, 19 nt, Artificial Sequence
  Description of Artificial Sequence: Synthetic oligonucleotide
cgccguggaacccuuguuc

SEQ ID NO: 639984 - RNA, 19 nt, Artificial Sequence
  Description of Artificial Sequence: Synthetic oligonucleotide
cagaccucccauagcuccu

SEQ ID NO: 639985 - RNA, 19 nt, Artificial Sequence
  Description of Artificial Sequence: Synthetic oligonucleotide
caacuuccagugagaggua

SEQ ID NO: 639986 - RNA, 19 nt, Artificial Sequence
  Description of Artificial Sequence: Synthetic oligonucleotide
ggaggaauuuaauguccuu

SEQ ID NO: 639987 - RNA, 19 nt, Artificial Sequence
  Description of Artificial Sequence: Synthetic oligonucleotide
ccugauaguaaaugccuuu

SEQ ID NO: 639988 - RNA, 19 nt, Artificial Sequence
  Description of Artificial Sequence: Synthetic oligonucleotide
gcacauugacagggcauca

SEQ ID NO: 639989 - RNA, 19 nt, Artificial Sequence
  Description of Artificial Sequence: Synthetic oligonucleotide
cacucgggccagacuggca

SEQ ID NO: 639990 - RNA, 19 nt, Artificial Sequence
  Description of Artificial Sequence: Synthetic oligonucleotide
cugccacagggaggaggag

SEQ ID NO: 639991 - RNA, 19 nt, Artificial Sequence
  Description of Artificial Sequence: Synthetic oligonucleotide
ucgggccgccguggaaccc

SEQ ID NO: 639992 - RNA, 19 nt, Artificial Sequence
  Description of Artificial Sequence: Synthetic oligonucleotide
cacuugcccguccguggga

SEQ ID NO: 639993 - RNA, 19 nt, Artificial Sequence
  Description of Artificial Sequence: Synthetic oligonucleotide
gcaccucagccugauagua

SEQ ID NO: 639994 - RNA, 19 nt, Artificial Sequence
  Description of Artificial Sequence: Synthetic oligonucleotide
gaguugcacuagcuugcuu

SEQ ID NO: 639995 - RNA, 19 nt, Artificial Sequence
  Description of Artificial Sequence: Synthetic oligonucleotide
cacauugacagggcaucau

SEQ ID NO: 639996 - RNA, 19 nt, Artificial Sequence
  Description of Artificial Sequence: Synthetic oligonucleotide
ccgacaggugcgcuuccuc

SEQ ID NO: 639997 - RNA, 19 nt, Artificial Sequence
  Description of Artificial Sequence: Synthetic oligonucleotide
gcauagggugcaauccaua

SEQ ID NO: 639998 - RNA, 19 nt, Artificial Sequence
  Description of Artificial Sequence: Synthetic oligonucleotide
guggcagagccucguucau

SEQ ID NO: 639999 - RNA, 19 nt, Artificial Sequence
  Description of Artificial Sequence: Synthetic oligonucleotide
gggcagcgaugacguagug

SEQ ID NO: 640000 - RNA, 19 nt, Artificial Sequence
  Description of Artificial Sequence: Synthetic oligonucleotide
ccgauacacaaagacuugu

SEQ ID NO: 640001 - RNA, 19 nt, Artificial Sequence
  Description of Artificial Sequence: Synthetic oligonucleotide
cacugagcgcugcuaguuu

SEQ ID NO: 640002 - RNA, 19 nt, Artificial Sequence
  Description of Artificial Sequence: Synthetic oligonucleotide
ccguccgugggaaggugga

SEQ ID NO: 640003 - RNA, 19 nt, Artificial Sequence
  Description of Artificial Sequence: Synthetic oligonucleotide
cucucgguucaggaagaau

SEQ ID NO: 640004 - RNA, 19 nt, Artificial Sequence
  Description of Artificial Sequence: Synthetic oligonucleotide
caccuggggcuucuucccu

SEQ ID NO: 640005 - RNA, 19 nt, Artificial Sequence
  Description of Artificial Sequence: Synthetic oligonucleotide
gccugauaguaaaugccuu

SEQ ID NO: 640006 - RNA, 19 nt, Artificial Sequence
  Description of Artificial Sequence: Synthetic oligonucleotide
caagaccgacaggugcgcu

SEQ ID NO: 640007 - RNA, 19 nt, Artificial Sequence
  Description of Artificial Sequence: Synthetic oligonucleotide
ccccacaucacaucaucuu

SEQ ID NO: 640008 - RNA, 19 nt, Artificial Sequence
  Description of Artificial Sequence: Synthetic oligonucleotide
gggcugguacucgugaguu

SEQ ID NO: 640009 - RNA, 19 nt, Artificial Sequence
  Description of Artificial Sequence: Synthetic oligonucleotide
ggagaagaggaagcacauu

SEQ ID NO: 640010 - RNA, 19 nt, Artificial Sequence
  Description of Artificial Sequence: Synthetic oligonucleotide
gccgccguggaacccuugu

SEQ ID NO: 640011 - RNA, 19 nt, Artificial Sequence
  Description of Artificial Sequence: Synthetic oligonucleotide
ccauucgcucuucccauau

SEQ ID NO: 640012 - RNA, 19 nt, Artificial Sequence
  Description of Artificial Sequence: Synthetic oligonucleotide
gcacugagcgcugcuaguu

SEQ ID NO: 640013 - RNA, 19 nt, Artificial Sequence
  Description of Artificial Sequence: Synthetic oligonucleotide
ggcuuuguuucgggugaua

SEQ ID NO: 640014 - RNA, 19 nt, Artificial Sequence
  Description of Artificial Sequence: Synthetic oligonucleotide
cauaugcuuuucggagcuu

SEQ ID NO: 640015 - RNA, 19 nt, Artificial Sequence
  Description of Artificial Sequence: Synthetic oligonucleotide
cguggaacccuuguucacu

SEQ ID NO: 640016 - RNA, 19 nt, Artificial Sequence
  Description of Artificial Sequence: Synthetic oligonucleotide
ccugaugauaaaggccaau

SEQ ID NO: 640017 - RNA, 19 nt, Artificial Sequence
  Description of Artificial Sequence: Synthetic oligonucleotide
gcccguccgugggaaggug

SEQ ID NO: 640018 - RNA, 19 nt, Artificial Sequence
  Description of Artificial Sequence: Synthetic oligonucleotide
cgcuccacagaauuccauu

SEQ ID NO: 640019 - RNA, 19 nt, Artificial Sequence
  Description of Artificial Sequence: Synthetic oligonucleotide
cacggauuuugcgccgcuu

SEQ ID NO: 640020 - RNA, 19 nt, Artificial Sequence
  Description of Artificial Sequence: Synthetic oligonucleotide
gccgcuugccaaacaugau

SEQ ID NO: 640021 - RNA, 19 nt, Artificial Sequence
  Description of Artificial Sequence: Synthetic oligonucleotide
cgucaucaugggcuuuccu

SEQ ID NO: 640022 - RNA, 19 nt, Artificial Sequence
  Description of Artificial Sequence: Synthetic oligonucleotide
cgaugacguagugcaugaa

SEQ ID NO: 640023 - RNA, 19 nt, Artificial Sequence
  Description of Artificial Sequence: Synthetic oligonucleotide
ccgccguggaacccuuguu

SEQ ID NO: 640024 - RNA, 19 nt, Artificial Sequence
  Description of Artificial Sequence: Synthetic oligonucleotide
aauuuauaaaguuagugcu

SEQ ID NO: 640025 - RNA, 19 nt, Artificial Sequence
  Description of Artificial Sequence: Synthetic oligonucleotide
gaaauuaucccucugagug

SEQ ID NO: 640026 - RNA, 19 nt, Artificial Sequence
  Description of Artificial Sequence: Synthetic oligonucleotide
ucuauaacuaucaaaaccu

SEQ ID NO: 640027 - RNA, 19 nt, Artificial Sequence
  Description of Artificial Sequence: Synthetic oligonucleotide
ugauaaagaagauagccgg

SEQ ID NO: 640028 - RNA, 19 nt, Artificial Sequence
  Description of Artificial Sequence: Synthetic oligonucleotide
aauuuaaugagguagucaa

SEQ ID NO: 640029 - RNA, 19 nt, Artificial Sequence
  Description of Artificial Sequence: Synthetic oligonucleotide
aagcauuugagcuacaagu

SEQ ID NO: 640030 - RNA, 19 nt, Artificial Sequence
  Description of Artificial Sequence: Synthetic oligonucleotide
gaucaaauacaauagguug

SEQ ID NO: 640031 - RNA, 19 nt, Artificial Sequence
  Description of Artificial Sequence: Synthetic oligonucleotide
aauugaaucuaccaagcug

SEQ ID NO: 640032 - RNA, 19 nt, Artificial Sequence
  Description of Artificial Sequence: Synthetic oligonucleotide
augagauugacauacagug

SEQ ID NO: 640033 - RNA, 19 nt, Artificial Sequence
  Description of Artificial Sequence: Synthetic oligonucleotide
auauucucuagcuugcagc

SEQ ID NO: 640034 - RNA, 19 nt, Artificial Sequence
  Description of Artificial Sequence: Synthetic oligonucleotide
uccucuauaacuaucaaaa

SEQ ID NO: 640035 - RNA, 19 nt, Artificial Sequence
  Description of Artificial Sequence: Synthetic oligonucleotide
aauagguuggucuaaaguu

SEQ ID NO: 640036 - RNA, 19 nt, Artificial Sequence
  Description of Artificial Sequence: Synthetic oligonucleotide
ucuaccaagcugaagauca

SEQ ID NO: 640037 - RNA, 19 nt, Artificial Sequence
  Description of Artificial Sequence: Synthetic oligonucleotide
uguaauucccauuggaagc

SEQ ID NO: 640038 - RNA, 19 nt, Artificial Sequence
  Description of Artificial Sequence: Synthetic oligonucleotide
aaaguuagugcuaauuguc

SEQ ID NO: 640039 - RNA, 19 nt, Artificial Sequence
  Description of Artificial Sequence: Synthetic oligonucleotide
uguucuauguguauagcug

SEQ ID NO: 640040 - RNA, 19 nt, Artificial Sequence
  Description of Artificial Sequence: Synthetic oligonucleotide
uugaaucugggucaugagg

SEQ ID NO: 640041 - RNA, 19 nt, Artificial Sequence
  Description of Artificial Sequence: Synthetic oligonucleotide
acuguuaaaagucucgcug

SEQ ID NO: 640042 - RNA, 19 nt, Artificial Sequence
  Description of Artificial Sequence: Synthetic oligonucleotide
aauaaccugaguugagcag

SEQ ID NO: 640043 - RNA, 19 nt, Artificial Sequence
  Description of Artificial Sequence: Synthetic oligonucleotide
uuccgaagaagccugauca

SEQ ID NO: 640044 - RNA, 19 nt, Artificial Sequence
  Description of Artificial Sequence: Synthetic oligonucleotide
ugaggguuugucaaaaucu

SEQ ID NO: 640045 - RNA, 19 nt, Artificial Sequence
  Description of Artificial Sequence: Synthetic oligonucleotide
aaauaaccugaguugagca

SEQ ID NO: 640046 - RNA, 19 nt, Artificial Sequence
  Description of Artificial Sequence: Synthetic oligonucleotide
cagucaaucaaucaccagg

SEQ ID NO: 640047 - RNA, 19 nt, Artificial Sequence
  Description of Artificial Sequence: Synthetic oligonucleotide
auacggauucauuaguaac

SEQ ID NO: 640048 - RNA, 19 nt, Artificial Sequence
  Description of Artificial Sequence: Synthetic oligonucleotide
ugcguuaauauuaaacacu

SEQ ID NO: 640049 - RNA, 19 nt, Artificial Sequence
  Description of Artificial Sequence: Synthetic oligonucleotide
uuuccuuagauucacuagu

SEQ ID NO: 640050 - RNA, 19 nt, Artificial Sequence
  Description of Artificial Sequence: Synthetic oligonucleotide
ucaaucaaucaccagggca

SEQ ID NO: 640051 - RNA, 19 nt, Artificial Sequence
  Description of Artificial Sequence: Synthetic oligonucleotide
uuugauugggcuaaguuuu

SEQ ID NO: 640052 - RNA, 19 nt, Artificial Sequence
  Description of Artificial Sequence: Synthetic oligonucleotide
uguucuuuucaguggaggg

SEQ ID NO: 640053 - RNA, 19 nt, Artificial Sequence
  Description of Artificial Sequence: Synthetic oligonucleotide
auuguaacuugucugaagu

SEQ ID NO: 640054 - RNA, 19 nt, Artificial Sequence
  Description of Artificial Sequence: Synthetic oligonucleotide
aagaggguccucuauaacu

SEQ ID NO: 640055 - RNA, 19 nt, Artificial Sequence
  Description of Artificial Sequence: Synthetic oligonucleotide
auagacguguacuggaagg

SEQ ID NO: 640056 - RNA, 19 nt, Artificial Sequence
  Description of Artificial Sequence: Synthetic oligonucleotide
ucauuaguaaccucccucc

SEQ ID NO: 640057 - RNA, 19 nt, Artificial Sequence
  Description of Artificial Sequence: Synthetic oligonucleotide
aaccuuuguagccaccagg

SEQ ID NO: 640058 - RNA, 19 nt, Artificial Sequence
  Description of Artificial Sequence: Synthetic oligonucleotide
uaaaguuagugcuaauugu

SEQ ID NO: 640059 - RNA, 19 nt, Artificial Sequence
  Description of Artificial Sequence: Synthetic oligonucleotide
auacauacgugccauucac

SEQ ID NO: 640060 - RNA, 19 nt, Artificial Sequence
  Description of Artificial Sequence: Synthetic oligonucleotide
cuuacuuguggaaacggcc

SEQ ID NO: 640061 - RNA, 19 nt, Artificial Sequence
  Description of Artificial Sequence: Synthetic oligonucleotide
ugaucaguaguaaccaagc

SEQ ID NO: 640062 - RNA, 19 nt, Artificial Sequence
  Description of Artificial Sequence: Synthetic oligonucleotide
ugagauugacauacagugg

SEQ ID NO: 640063 - RNA, 19 nt, Artificial Sequence
  Description of Artificial Sequence: Synthetic oligonucleotide
uggaaauuaucccucugag

SEQ ID NO: 640064 - RNA, 19 nt, Artificial Sequence
  Description of Artificial Sequence: Synthetic oligonucleotide
uuuuacuccgaacugaauu

SEQ ID NO: 640065 - RNA, 19 nt, Artificial Sequence
  Description of Artificial Sequence: Synthetic oligonucleotide
auacgugccauucacuggg

SEQ ID NO: 640066 - RNA, 19 nt, Artificial Sequence
  Description of Artificial Sequence: Synthetic oligonucleotide
gaaacggccaucucagagg

SEQ ID NO: 640067 - RNA, 19 nt, Artificial Sequence
  Description of Artificial Sequence: Synthetic oligonucleotide
guucuauguguauagcugg

SEQ ID NO: 640068 - RNA, 19 nt, Artificial Sequence
  Description of Artificial Sequence: Synthetic oligonucleotide
aaggauuacuuuuccuuag

SEQ ID NO: 640069 - RNA, 19 nt, Artificial Sequence
  Description of Artificial Sequence: Synthetic oligonucleotide
auugggcuaaguuuuguuc

SEQ ID NO: 640070 - RNA, 19 nt, Artificial Sequence
  Description of Artificial Sequence: Synthetic oligonucleotide
cugauuguaauucccauug

SEQ ID NO: 640071 - RNA, 19 nt, Artificial Sequence
  Description of Artificial Sequence: Synthetic oligonucleotide
auaacuaucaaaaccuuug

SEQ ID NO: 640072 - RNA, 19 nt, Artificial Sequence
  Description of Artificial Sequence: Synthetic oligonucleotide
aucaaauacaauagguugg

SEQ ID NO: 640073 - RNA, 19 nt, Artificial Sequence
  Description of Artificial Sequence: Synthetic oligonucleotide
auauucacuguguaacuag

SEQ ID NO: 640074 - RNA, 19 nt, Artificial Sequence
  Description of Artificial Sequence: Synthetic oligonucleotide
uaaccaagcaagcauuuga

SEQ ID NO: 640075 - RNA, 19 nt, Artificial Sequence
  Description of Artificial Sequence: Synthetic oligonucleotide
uuguaugucguuccuacca

SEQ ID NO: 640076 - RNA, 19 nt, Artificial Sequence
  Description of Artificial Sequence: Synthetic oligonucleotide
agauucacuagugagaacu

SEQ ID NO: 640077 - RNA, 19 nt, Artificial Sequence
  Description of Artificial Sequence: Synthetic oligonucleotide
auaggcugacaccaagacc

SEQ ID NO: 640078 - RNA, 19 nt, Artificial Sequence
  Description of Artificial Sequence: Synthetic oligonucleotide
ucuguuucaguuuccgaag

SEQ ID NO: 640079 - RNA, 19 nt, Artificial Sequence
  Description of Artificial Sequence: Synthetic oligonucleotide
uggaccauuaacacaguug

SEQ ID NO: 640080 - RNA, 19 nt, Artificial Sequence
  Description of Artificial Sequence: Synthetic oligonucleotide
ucccugaucuuuuauaaca

SEQ ID NO: 640081 - RNA, 19 nt, Artificial Sequence
  Description of Artificial Sequence: Synthetic oligonucleotide
uuaaaagucucgcugucuc

SEQ ID NO: 640082 - RNA, 19 nt, Artificial Sequence
  Description of Artificial Sequence: Synthetic oligonucleotide
aacucgcauuugcugaggc

SEQ ID NO: 640083 - RNA, 19 nt, Artificial Sequence
  Description of Artificial Sequence: Synthetic oligonucleotide
gauacuguagaaacuggag

SEQ ID NO: 640084 - RNA, 19 nt, Artificial Sequence
  Description of Artificial Sequence: Synthetic oligonucleotide
aagccugaucaguaguaac

SEQ ID NO: 640085 - RNA, 19 nt, Artificial Sequence
  Description of Artificial Sequence: Synthetic oligonucleotide
cuacaaguaacugaggaug

SEQ ID NO: 640086 - RNA, 19 nt, Artificial Sequence
  Description of Artificial Sequence: Synthetic oligonucleotide
uugagcuacaaguaacuga

SEQ ID NO: 640087 - RNA, 19 nt, Artificial Sequence
  Description of Artificial Sequence: Synthetic oligonucleotide
gaguguaagguguuccagg

SEQ ID NO: 640088 - RNA, 19 nt, Artificial Sequence
  Description of Artificial Sequence: Synthetic oligonucleotide
aguaaguggaccauuaaca

SEQ ID NO: 640089 - RNA, 19 nt, Artificial Sequence
  Description of Artificial Sequence: Synthetic oligonucleotide
uuagauucacuagugagaa

SEQ ID NO: 640090 - RNA, 19 nt, Artificial Sequence
  Description of Artificial Sequence: Synthetic oligonucleotide
uguguaagcgcaaccauau

SEQ ID NO: 640091 - RNA, 19 nt, Artificial Sequence
  Description of Artificial Sequence: Synthetic oligonucleotide
aagcaagcauuugagcuac

SEQ ID NO: 640092 - RNA, 19 nt, Artificial Sequence
  Description of Artificial Sequence: Synthetic oligonucleotide
aaguaagugcagaugcugg

SEQ ID NO: 640093 - RNA, 19 nt, Artificial Sequence
  Description of Artificial Sequence: Synthetic oligonucleotide
ugauuguaauucccauugg

SEQ ID NO: 640094 - RNA, 19 nt, Artificial Sequence
  Description of Artificial Sequence: Synthetic oligonucleotide
cugaucaguaguaaccaag

SEQ ID NO: 640095 - RNA, 19 nt, Artificial Sequence
  Description of Artificial Sequence: Synthetic oligonucleotide
gauauucucuagcuugcag

SEQ ID NO: 640096 - RNA, 19 nt, Artificial Sequence
  Description of Artificial Sequence: Synthetic oligonucleotide
acauacgugccauucacug

SEQ ID NO: 640097 - RNA, 19 nt, Artificial Sequence
  Description of Artificial Sequence: Synthetic oligonucleotide
cauuugagcuacaaguaac

SEQ ID NO: 640098 - RNA, 19 nt, Artificial Sequence
  Description of Artificial Sequence: Synthetic oligonucleotide
uauucucuagcuugcagcu

SEQ ID NO: 640099 - RNA, 19 nt, Artificial Sequence
  Description of Artificial Sequence: Synthetic oligonucleotide
agcgcaaccauaucugguc

SEQ ID NO: 640100 - RNA, 19 nt, Artificial Sequence
  Description of Artificial Sequence: Synthetic oligonucleotide
aaaaucuagacagauucuu

SEQ ID NO: 640101 - RNA, 19 nt, Artificial Sequence
  Description of Artificial Sequence: Synthetic oligonucleotide
cauugcuggaaauuauccc

SEQ ID NO: 640102 - RNA, 19 nt, Artificial Sequence
  Description of Artificial Sequence: Synthetic oligonucleotide
ucuagcuugcagcugcagc

SEQ ID NO: 640103 - RNA, 19 nt, Artificial Sequence
  Description of Artificial Sequence: Synthetic oligonucleotide
guaaguggaccauuaacac

SEQ ID NO: 640104 - RNA, 19 nt, Artificial Sequence
  Description of Artificial Sequence: Synthetic oligonucleotide
cuuagauucacuagugaga

SEQ ID NO: 640105 - RNA, 19 nt, Artificial Sequence
  Description of Artificial Sequence: Synthetic oligonucleotide
guuuguaugucguuccuac

SEQ ID NO: 640106 - RNA, 19 nt, Artificial Sequence
  Description of Artificial Sequence: Synthetic oligonucleotide
gauuggauguucuggcagc

SEQ ID NO: 640107 - RNA, 19 nt, Artificial Sequence
  Description of Artificial Sequence: Synthetic oligonucleotide
uauaacuaucaaaaccuuu

SEQ ID NO: 640108 - RNA, 19 nt, Artificial Sequence
  Description of Artificial Sequence: Synthetic oligonucleotide
ggugcguuaauauuaaaca

SEQ ID NO: 640109 - RNA, 19 nt, Artificial Sequence
  Description of Artificial Sequence: Synthetic oligonucleotide
accgauacggauucauuag

SEQ ID NO: 640110 - RNA, 19 nt, Artificial Sequence
  Description of Artificial Sequence: Synthetic oligonucleotide
ucucacuaccuuccaaaag

SEQ ID NO: 640111 - RNA, 19 nt, Artificial Sequence
  Description of Artificial Sequence: Synthetic oligonucleotide
auagguuggucuaaaguuc

SEQ ID NO: 640112 - RNA, 19 nt, Artificial Sequence
  Description of Artificial Sequence: Synthetic oligonucleotide
uuuacuccgaacugaauuu

SEQ ID NO: 640113 - RNA, 19 nt, Artificial Sequence
  Description of Artificial Sequence: Synthetic oligonucleotide
aggugcguuaauauuaaac

SEQ ID NO: 640114 - RNA, 19 nt, Artificial Sequence
  Description of Artificial Sequence: Synthetic oligonucleotide
gaagaagccugaucaguag

SEQ ID NO: 640115 - RNA, 19 nt, Artificial Sequence
  Description of Artificial Sequence: Synthetic oligonucleotide
cuauguguauagcugggag

SEQ ID NO: 640116 - RNA, 19 nt, Artificial Sequence
  Description of Artificial Sequence: Synthetic oligonucleotide
uuccuuagauucacuagug

SEQ ID NO: 640117 - RNA, 19 nt, Artificial Sequence
  Description of Artificial Sequence: Synthetic oligonucleotide
auuaacacaguugaggguu

SEQ ID NO: 640118 - RNA, 19 nt, Artificial Sequence
  Description of Artificial Sequence: Synthetic oligonucleotide
uggaauugcacuugagggu

SEQ ID NO: 640119 - RNA, 19 nt, Artificial Sequence
  Description of Artificial Sequence: Synthetic oligonucleotide
ucuuuuacuccgaacugaa

SEQ ID NO: 640120 - RNA, 19 nt, Artificial Sequence
  Description of Artificial Sequence: Synthetic oligonucleotide
agcuacuuccauaaaucgc

SEQ ID NO: 640121 - RNA, 19 nt, Artificial Sequence
  Description of Artificial Sequence: Synthetic oligonucleotide
gauucauuaguaaccuccc

SEQ ID NO: 640122 - RNA, 19 nt, Artificial Sequence
  Description of Artificial Sequence: Synthetic oligonucleotide
ucuagacagauucuugcau

SEQ ID NO: 640123 - RNA, 19 nt, Artificial Sequence
  Description of Artificial Sequence: Synthetic oligonucleotide
gagauugacauacaguggu

SEQ ID NO: 640124 - RNA, 19 nt, Artificial Sequence
  Description of Artificial Sequence: Synthetic oligonucleotide
uugaggguuugucaaaauc

SEQ ID NO: 640125 - RNA, 19 nt, Artificial Sequence
  Description of Artificial Sequence: Synthetic oligonucleotide
uugauuguagccaggcgaa

SEQ ID NO: 640126 - RNA, 19 nt, Artificial Sequence
  Description of Artificial Sequence: Synthetic oligonucleotide
agaauuuaaugagguaguc

SEQ ID NO: 640127 - RNA, 19 nt, Artificial Sequence
  Description of Artificial Sequence: Synthetic oligonucleotide
aggaugucaccuguaaugg

SEQ ID NO: 640128 - RNA, 19 nt, Artificial Sequence
  Description of Artificial Sequence: Synthetic oligonucleotide
uuugagaacugagacauuu

SEQ ID NO: 640129 - RNA, 19 nt, Artificial Sequence
  Description of Artificial Sequence: Synthetic oligonucleotide
uugcauaaaguuacaaguu

SEQ ID NO: 640130 - RNA, 19 nt, Artificial Sequence
  Description of Artificial Sequence: Synthetic oligonucleotide
aagaccacuagaugucccu

SEQ ID NO: 640131 - RNA, 19 nt, Artificial Sequence
  Description of Artificial Sequence: Synthetic oligonucleotide
auuuugauugggcuaaguu

SEQ ID NO: 640132 - RNA, 19 nt, Artificial Sequence
  Description of Artificial Sequence: Synthetic oligonucleotide
aaaccuuuguagccaccag

SEQ ID NO: 640133 - RNA, 19 nt, Artificial Sequence
  Description of Artificial Sequence: Synthetic oligonucleotide
cagcuacuuccauaaaucg

SEQ ID NO: 640134 - RNA, 19 nt, Artificial Sequence
  Description of Artificial Sequence: Synthetic oligonucleotide
ucacccaaauuguucagga

SEQ ID NO: 640135 - RNA, 19 nt, Artificial Sequence
  Description of Artificial Sequence: Synthetic oligonucleotide
aagaagauagccggaaaau

SEQ ID NO: 640136 - RNA, 19 nt, Artificial Sequence
  Description of Artificial Sequence: Synthetic oligonucleotide
cugacuaccgaugaacggc

SEQ ID NO: 640137 - RNA, 19 nt, Artificial Sequence
  Description of Artificial Sequence: Synthetic oligonucleotide
aaguugaggcagucaguuc

SEQ ID NO: 640138 - RNA, 19 nt, Artificial Sequence
  Description of Artificial Sequence: Synthetic oligonucleotide
agcuuuagcauguggaaaa

SEQ ID NO: 640139 - RNA, 19 nt, Artificial Sequence
  Description of Artificial Sequence: Synthetic oligonucleotide
ugaggguuaagugcaaaca

SEQ ID NO: 640140 - RNA, 19 nt, Artificial Sequence
  Description of Artificial Sequence: Synthetic oligonucleotide
gugcguuaauauuaaacac

SEQ ID NO: 640141 - RNA, 19 nt, Artificial Sequence
  Description of Artificial Sequence: Synthetic oligonucleotide
uggcauuggguuauugucu

SEQ ID NO: 640142 - RNA, 19 nt, Artificial Sequence
  Description of Artificial Sequence: Synthetic oligonucleotide
uguagccaccaggagaccg

SEQ ID NO: 640143 - RNA, 19 nt, Artificial Sequence
  Description of Artificial Sequence: Synthetic oligonucleotide
uggaauuggccugaagacc

SEQ ID NO: 640144 - RNA, 19 nt, Artificial Sequence
  Description of Artificial Sequence: Synthetic oligonucleotide
ggaccauuaacacaguuga

SEQ ID NO: 640145 - RNA, 19 nt, Artificial Sequence
  Description of Artificial Sequence: Synthetic oligonucleotide
uguuaaaagucucgcuguc

SEQ ID NO: 640146 - RNA, 19 nt, Artificial Sequence
  Description of Artificial Sequence: Synthetic oligonucleotide
ugucuuacuuggaacaguu

SEQ ID NO: 640147 - RNA, 19 nt, Artificial Sequence
  Description of Artificial Sequence: Synthetic oligonucleotide
uaauggaugcugagauucc

SEQ ID NO: 640148 - RNA, 19 nt, Artificial Sequence
  Description of Artificial Sequence: Synthetic oligonucleotide
uccccaaccagucaaucaa

SEQ ID NO: 640149 - RNA, 19 nt, Artificial Sequence
  Description of Artificial Sequence: Synthetic oligonucleotide
augucguuccuaccacugc

SEQ ID NO: 640150 - RNA, 19 nt, Artificial Sequence
  Description of Artificial Sequence: Synthetic oligonucleotide
agaagauagccggaaaaug

SEQ ID NO: 640151 - RNA, 19 nt, Artificial Sequence
  Description of Artificial Sequence: Synthetic oligonucleotide
aguacaaggaugacugcuc

SEQ ID NO: 640152 - RNA, 19 nt, Artificial Sequence
  Description of Artificial Sequence: Synthetic oligonucleotide
caucuggucuucaacacuc

SEQ ID NO: 640153 - RNA, 19 nt, Artificial Sequence
  Description of Artificial Sequence: Synthetic oligonucleotide
gaagcccuuugacaagggg

SEQ ID NO: 640154 - RNA, 19 nt, Artificial Sequence
  Description of Artificial Sequence: Synthetic oligonucleotide
ugucguuccuaccacugcu

SEQ ID NO: 640155 - RNA, 19 nt, Artificial Sequence
  Description of Artificial Sequence: Synthetic oligonucleotide
auaacauugcuggaaauua

SEQ ID NO: 640156 - RNA, 19 nt, Artificial Sequence
  Description of Artificial Sequence: Synthetic oligonucleotide
uccuuagauucacuaguga

SEQ ID NO: 640157 - RNA, 19 nt, Artificial Sequence
  Description of Artificial Sequence: Synthetic oligonucleotide
caguaaguggaccauuaac

SEQ ID NO: 640158 - RNA, 19 nt, Artificial Sequence
  Description of Artificial Sequence: Synthetic oligonucleotide
aguaguaaccaagcaagca

SEQ ID NO: 640159 - RNA, 19 nt, Artificial Sequence
  Description of Artificial Sequence: Synthetic oligonucleotide
uuugagcuacaaguaacug

SEQ ID NO: 640160 - RNA, 19 nt, Artificial Sequence
  Description of Artificial Sequence: Synthetic oligonucleotide
aaucgcuccccuguguaag

SEQ ID NO: 640161 - RNA, 19 nt, Artificial Sequence
  Description of Artificial Sequence: Synthetic oligonucleotide
ugcagcugauuguaauucc

SEQ ID NO: 640162 - RNA, 19 nt, Artificial Sequence
  Description of Artificial Sequence: Synthetic oligonucleotide
auacauauucacuguguaa

SEQ ID NO: 640163 - RNA, 19 nt, Artificial Sequence
  Description of Artificial Sequence: Synthetic oligonucleotide
ccuuagauucacuagugag

SEQ ID NO: 640164 - RNA, 19 nt, Artificial Sequence
  Description of Artificial Sequence: Synthetic oligonucleotide
guagaaacuggagaagcug

SEQ ID NO: 640165 - RNA, 19 nt, Artificial Sequence
  Description of Artificial Sequence: Synthetic oligonucleotide
ucacuaccuuccaaaaggu

SEQ ID NO: 640166 - RNA, 19 nt, Artificial Sequence
  Description of Artificial Sequence: Synthetic oligonucleotide
acaauagguuggucuaaag

SEQ ID NO: 640167 - RNA, 19 nt, Artificial Sequence
  Description of Artificial Sequence: Synthetic oligonucleotide
aggcaaauacauugcacca

SEQ ID NO: 640168 - RNA, 19 nt, Artificial Sequence
  Description of Artificial Sequence: Synthetic oligonucleotide
guguauagcugggaguugg

SEQ ID NO: 640169 - RNA, 19 nt, Artificial Sequence
  Description of Artificial Sequence: Synthetic oligonucleotide
caccaggagaccgauacgg

SEQ ID NO: 640170 - RNA, 19 nt, Artificial Sequence
  Description of Artificial Sequence: Synthetic oligonucleotide
aucauuuugauugggcuaa

SEQ ID NO: 640171 - RNA, 19 nt, Artificial Sequence
  Description of Artificial Sequence: Synthetic oligonucleotide
aauuaucccucugagugua

SEQ ID NO: 640172 - RNA, 19 nt, Artificial Sequence
  Description of Artificial Sequence: Synthetic oligonucleotide
auucacggccagcuuuagc

SEQ ID NO: 640173 - RNA, 19 nt, Artificial Sequence
  Description of Artificial Sequence: Synthetic oligonucleotide
cuuacuuggaacaguucca

SEQ ID NO: 640174 - RNA, 19 nt, Artificial Sequence
  Description of Artificial Sequence: Synthetic oligonucleotide
uuaaugagguagucaaguu

SEQ ID NO: 640175 - RNA, 19 nt, Artificial Sequence
  Description of Artificial Sequence: Synthetic oligonucleotide
guaagcgcaaccauaucug

SEQ ID NO: 640176 - RNA, 19 nt, Artificial Sequence
  Description of Artificial Sequence: Synthetic oligonucleotide
acguguacuggaaggaugg

SEQ ID NO: 640177 - RNA, 19 nt, Artificial Sequence
  Description of Artificial Sequence: Synthetic oligonucleotide
agauagccggaaaaugugg

SEQ ID NO: 640178 - RNA, 19 nt, Artificial Sequence
  Description of Artificial Sequence: Synthetic oligonucleotide
ugacuaccgaugaacggcu

SEQ ID NO: 640179 - RNA, 19 nt, Artificial Sequence
  Description of Artificial Sequence: Synthetic oligonucleotide
uaacuagcaaggcuacauc

SEQ ID NO: 640180 - RNA, 19 nt, Artificial Sequence
  Description of Artificial Sequence: Synthetic oligonucleotide
uaaaucgcuccccugugua

SEQ ID NO: 640181 - RNA, 19 nt, Artificial Sequence
  Description of Artificial Sequence: Synthetic oligonucleotide
auuguaauucccauuggaa

SEQ ID NO: 640182 - RNA, 19 nt, Artificial Sequence
  Description of Artificial Sequence: Synthetic oligonucleotide
aggggauagacguguacug

SEQ ID NO: 640183 - RNA, 19 nt, Artificial Sequence
  Description of Artificial Sequence: Synthetic oligonucleotide
guacaaggaugacugcucc

SEQ ID NO: 640184 - RNA, 19 nt, Artificial Sequence
  Description of Artificial Sequence: Synthetic oligonucleotide
uuuccgaagaagccugauc

SEQ ID NO: 640185 - RNA, 19 nt, Artificial Sequence
  Description of Artificial Sequence: Synthetic oligonucleotide
uguuucaguuuccgaagaa

SEQ ID NO: 640186 - RNA, 19 nt, Artificial Sequence
  Description of Artificial Sequence: Synthetic oligonucleotide
uguauagcugggaguuggc

SEQ ID NO: 640187 - RNA, 19 nt, Artificial Sequence
  Description of Artificial Sequence: Synthetic oligonucleotide
ggaaacggccaucucagag

SEQ ID NO: 640188 - RNA, 19 nt, Artificial Sequence
  Description of Artificial Sequence: Synthetic oligonucleotide
ucgcauuugcugaggcagg

SEQ ID NO: 640189 - RNA, 19 nt, Artificial Sequence
  Description of Artificial Sequence: Synthetic oligonucleotide
accauaucuggucucccug

SEQ ID NO: 640190 - RNA, 19 nt, Artificial Sequence
  Description of Artificial Sequence: Synthetic oligonucleotide
ggaaacauacucgugggug

SEQ ID NO: 640191 - RNA, 19 nt, Artificial Sequence
  Description of Artificial Sequence: Synthetic oligonucleotide
uaaaagucucgcugucucu

SEQ ID NO: 640192 - RNA, 19 nt, Artificial Sequence
  Description of Artificial Sequence: Synthetic oligonucleotide
cuggcuuacuuguggaaac

SEQ ID NO: 640193 - RNA, 19 nt, Artificial Sequence
  Description of Artificial Sequence: Synthetic oligonucleotide
uaauugucauucugcucca

SEQ ID NO: 640194 - RNA, 19 nt, Artificial Sequence
  Description of Artificial Sequence: Synthetic oligonucleotide
guagucaaguuucuuugga

SEQ ID NO: 640195 - RNA, 19 nt, Artificial Sequence
  Description of Artificial Sequence: Synthetic oligonucleotide
ugaaucuaccaagcugaag

SEQ ID NO: 640196 - RNA, 19 nt, Artificial Sequence
  Description of Artificial Sequence: Synthetic oligonucleotide
ugggcuaaguuuuguucug

SEQ ID NO: 640197 - RNA, 19 nt, Artificial Sequence
  Description of Artificial Sequence: Synthetic oligonucleotide
ucacuagugagaacuucau

SEQ ID NO: 640198 - RNA, 19 nt, Artificial Sequence
  Description of Artificial Sequence: Synthetic oligonucleotide
ucuguucuauguguauagc

SEQ ID NO: 640199 - RNA, 19 nt, Artificial Sequence
  Description of Artificial Sequence: Synthetic oligonucleotide
cuuuucaguggagggagag

SEQ ID NO: 640200 - RNA, 19 nt, Artificial Sequence
  Description of Artificial Sequence: Synthetic oligonucleotide
uuccccaaccagucaauca

SEQ ID NO: 640201 - RNA, 19 nt, Artificial Sequence
  Description of Artificial Sequence: Synthetic oligonucleotide
aucgcuccccuguguaagc

SEQ ID NO: 640202 - RNA, 19 nt, Artificial Sequence
  Description of Artificial Sequence: Synthetic oligonucleotide
uacauacgugccauucacu

SEQ ID NO: 640203 - RNA, 19 nt, Artificial Sequence
  Description of Artificial Sequence: Synthetic oligonucleotide
ucuauguguauagcuggga

SEQ ID NO: 640204 - RNA, 19 nt, Artificial Sequence
  Description of Artificial Sequence: Synthetic oligonucleotide
cugaaggcgacugugacga

SEQ ID NO: 640205 - RNA, 19 nt, Artificial Sequence
  Description of Artificial Sequence: Synthetic oligonucleotide
cacguguacauccucucac

SEQ ID NO: 640206 - RNA, 19 nt, Artificial Sequence
  Description of Artificial Sequence: Synthetic oligonucleotide
aggauuacuuuuccuuaga

SEQ ID NO: 640207 - RNA, 19 nt, Artificial Sequence
  Description of Artificial Sequence: Synthetic oligonucleotide
gugacgauggaauugcacu

SEQ ID NO: 640208 - RNA, 19 nt, Artificial Sequence
  Description of Artificial Sequence: Synthetic oligonucleotide
gaccgauacggauucauua

SEQ ID NO: 640209 - RNA, 19 nt, Artificial Sequence
  Description of Artificial Sequence: Synthetic oligonucleotide
uggcuuacuuguggaaacg

SEQ ID NO: 640210 - RNA, 19 nt, Artificial Sequence
  Description of Artificial Sequence: Synthetic oligonucleotide
ugacgauggaauugcacuu

SEQ ID NO: 640211 - RNA, 19 nt, Artificial Sequence
  Description of Artificial Sequence: Synthetic oligonucleotide
gagaggugcguuaauauua

SEQ ID NO: 640212 - RNA, 19 nt, Artificial Sequence
  Description of Artificial Sequence: Synthetic oligonucleotide
acauacucgugggugcugg

SEQ ID NO: 640213 - RNA, 19 nt, Artificial Sequence
  Description of Artificial Sequence: Synthetic oligonucleotide
aaguuccuugaaucugggu

SEQ ID NO: 640214 - RNA, 19 nt, Artificial Sequence
  Description of Artificial Sequence: Synthetic oligonucleotide
uaagugcagaugcuggcuu

SEQ ID NO: 640215 - RNA, 19 nt, Artificial Sequence
  Description of Artificial Sequence: Synthetic oligonucleotide
cauuggguuauugucugug

SEQ ID NO: 640216 - RNA, 19 nt, Artificial Sequence
  Description of Artificial Sequence: Synthetic oligonucleotide
augguugcuagcugucuca

SEQ ID NO: 640217 - RNA, 19 nt, Artificial Sequence
  Description of Artificial Sequence: Synthetic oligonucleotide
gauuguagccaggcgaaca

SEQ ID NO: 640218 - RNA, 19 nt, Artificial Sequence
  Description of Artificial Sequence: Synthetic oligonucleotide
gauagccggaaaaugugga

SEQ ID NO: 640219 - RNA, 19 nt, Artificial Sequence
  Description of Artificial Sequence: Synthetic oligonucleotide
ucuaaaguuccaggagcca

SEQ ID NO: 640220 - RNA, 19 nt, Artificial Sequence
  Description of Artificial Sequence: Synthetic oligonucleotide
acggauucauuaguaaccu

SEQ ID NO: 640221 - RNA, 19 nt, Artificial Sequence
  Description of Artificial Sequence: Synthetic oligonucleotide
aggcaacucgcauuugcug

SEQ ID NO: 640222 - RNA, 19 nt, Artificial Sequence
  Description of Artificial Sequence: Synthetic oligonucleotide
ccagauuggauguucuggc

SEQ ID NO: 640223 - RNA, 19 nt, Artificial Sequence
  Description of Artificial Sequence: Synthetic oligonucleotide
aaggcaacucgcauuugcu

SEQ ID NO: 640224 - RNA, 19 nt, Artificial Sequence
  Description of Artificial Sequence: Synthetic oligonucleotide
uuacuuggaacaguuccau

SEQ ID NO: 640225 - RNA, 19 nt, Artificial Sequence
  Description of Artificial Sequence: Synthetic oligonucleotide
acuaccgaugaacggcuga

SEQ ID NO: 640226 - RNA, 19 nt, Artificial Sequence
  Description of Artificial Sequence: Synthetic oligonucleotide
agugcagaugcuggcuuac

SEQ ID NO: 640227 - RNA, 19 nt, Artificial Sequence
  Description of Artificial Sequence: Synthetic oligonucleotide
ggauuuggagaaguaagug

SEQ ID NO: 640228 - RNA, 19 nt, Artificial Sequence
  Description of Artificial Sequence: Synthetic oligonucleotide
ccagcuacuuccauaaauc

SEQ ID NO: 640229 - RNA, 19 nt, Artificial Sequence
  Description of Artificial Sequence: Synthetic oligonucleotide
cuagacagauucuugcaua

SEQ ID NO: 640230 - RNA, 19 nt, Artificial Sequence
  Description of Artificial Sequence: Synthetic oligonucleotide
gguuaagugcaaacaauac

SEQ ID NO: 640231 - RNA, 19 nt, Artificial Sequence
  Description of Artificial Sequence: Synthetic oligonucleotide
ucuuuucaguggagggaga

SEQ ID NO: 640232 - RNA, 19 nt, Artificial Sequence
  Description of Artificial Sequence: Synthetic oligonucleotide
gaaggcgacugugacgaug

SEQ ID NO: 640233 - RNA, 19 nt, Artificial Sequence
  Description of Artificial Sequence: Synthetic oligonucleotide
caaggauuacuuuuccuua

SEQ ID NO: 640234 - RNA, 19 nt, Artificial Sequence
  Description of Artificial Sequence: Synthetic oligonucleotide
uacaauagguuggucuaaa

SEQ ID NO: 640235 - RNA, 19 nt, Artificial Sequence
  Description of Artificial Sequence: Synthetic oligonucleotide
uccgggagucuccuugccc

SEQ ID NO: 640236 - RNA, 19 nt, Artificial Sequence
  Description of Artificial Sequence: Synthetic oligonucleotide
acguguacauccucucaca

SEQ ID NO: 640237 - RNA, 19 nt, Artificial Sequence
  Description of Artificial Sequence: Synthetic oligonucleotide
ggcauuggguuauugucug

SEQ ID NO: 640238 - RNA, 19 nt, Artificial Sequence
  Description of Artificial Sequence: Synthetic oligonucleotide
aggguuugucaaaaucuag

SEQ ID NO: 640239 - RNA, 19 nt, Artificial Sequence
  Description of Artificial Sequence: Synthetic oligonucleotide
gccagauuggauguucugg

SEQ ID NO: 640240 - RNA, 19 nt, Artificial Sequence
  Description of Artificial Sequence: Synthetic oligonucleotide
caugguugcuagcugucuc

SEQ ID NO: 640241 - RNA, 19 nt, Artificial Sequence
  Description of Artificial Sequence: Synthetic oligonucleotide
ggaauuggccugaagacca

SEQ ID NO: 640242 - RNA, 19 nt, Artificial Sequence
  Description of Artificial Sequence: Synthetic oligonucleotide
cacccaaauuguucaggag

SEQ ID NO: 640243 - RNA, 19 nt, Artificial Sequence
  Description of Artificial Sequence: Synthetic oligonucleotide
gguacccggucucuggagg

SEQ ID NO: 640244 - RNA, 19 nt, Artificial Sequence
  Description of Artificial Sequence: Synthetic oligonucleotide
ucucauggucuggagcacc

SEQ ID NO: 640245 - RNA, 19 nt, Artificial Sequence
  Description of Artificial Sequence: Synthetic oligonucleotide
cuaccgaugaacggcugag

SEQ ID NO: 640246 - RNA, 19 nt, Artificial Sequence
  Description of Artificial Sequence: Synthetic oligonucleotide
uuacuccgaacugaauuuc

SEQ ID NO: 640247 - RNA, 19 nt, Artificial Sequence
  Description of Artificial Sequence: Synthetic oligonucleotide
gaugaacggcugagcaggg

SEQ ID NO: 640248 - RNA, 19 nt, Artificial Sequence
  Description of Artificial Sequence: Synthetic oligonucleotide
uguaacuagcaaggcuaca

SEQ ID NO: 640249 - RNA, 19 nt, Artificial Sequence
  Description of Artificial Sequence: Synthetic oligonucleotide
gaccauuaacacaguugag

SEQ ID NO: 640250 - RNA, 19 nt, Artificial Sequence
  Description of Artificial Sequence: Synthetic oligonucleotide
caagcaagcauuugagcua

SEQ ID NO: 640251 - RNA, 19 nt, Artificial Sequence
  Description of Artificial Sequence: Synthetic oligonucleotide
cauucacugggcaauugaa

SEQ ID NO: 640252 - RNA, 19 nt, Artificial Sequence
  Description of Artificial Sequence: Synthetic oligonucleotide
caauagguuggucuaaagu

SEQ ID NO: 640253 - RNA, 19 nt, Artificial Sequence
  Description of Artificial Sequence: Synthetic oligonucleotide
cuacuuccauaaaucgcuc

SEQ ID NO: 640254 - RNA, 19 nt, Artificial Sequence
  Description of Artificial Sequence: Synthetic oligonucleotide
uacucgugggugcugggua

SEQ ID NO: 640255 - RNA, 19 nt, Artificial Sequence
  Description of Artificial Sequence: Synthetic oligonucleotide
agccggaaaauguggagua

SEQ ID NO: 640256 - RNA, 19 nt, Artificial Sequence
  Description of Artificial Sequence: Synthetic oligonucleotide
guaaccucccuccacgugu

SEQ ID NO: 640257 - RNA, 19 nt, Artificial Sequence
  Description of Artificial Sequence: Synthetic oligonucleotide
agcauuugagcuacaagua

SEQ ID NO: 640258 - RNA, 19 nt, Artificial Sequence
  Description of Artificial Sequence: Synthetic oligonucleotide
accugaguugagcagcuua

SEQ ID NO: 640259 - RNA, 19 nt, Artificial Sequence
  Description of Artificial Sequence: Synthetic oligonucleotide
agccaggcgaacaagggga

SEQ ID NO: 640260 - RNA, 19 nt, Artificial Sequence
  Description of Artificial Sequence: Synthetic oligonucleotide
uguguauagcugggaguug

SEQ ID NO: 640261 - RNA, 19 nt, Artificial Sequence
  Description of Artificial Sequence: Synthetic oligonucleotide
ggcaacucgcauuugcuga

SEQ ID NO: 640262 - RNA, 19 nt, Artificial Sequence
  Description of Artificial Sequence: Synthetic oligonucleotide
aagcgcaaccauaucuggu

SEQ ID NO: 640263 - RNA, 19 nt, Artificial Sequence
  Description of Artificial Sequence: Synthetic oligonucleotide
cuguuaaaagucucgcugu

SEQ ID NO: 640264 - RNA, 19 nt, Artificial Sequence
  Description of Artificial Sequence: Synthetic oligonucleotide
agccagauuggauguucug

SEQ ID NO: 640265 - RNA, 19 nt, Artificial Sequence
  Description of Artificial Sequence: Synthetic oligonucleotide
ucauuuugauugggcuaag

SEQ ID NO: 640266 - RNA, 19 nt, Artificial Sequence
  Description of Artificial Sequence: Synthetic oligonucleotide
cucaccugagaggaaucgc

SEQ ID NO: 640267 - RNA, 19 nt, Artificial Sequence
  Description of Artificial Sequence: Synthetic oligonucleotide
acucgcauuugcugaggca

SEQ ID NO: 640268 - RNA, 19 nt, Artificial Sequence
  Description of Artificial Sequence: Synthetic oligonucleotide
uaauucccauuggaagcug

SEQ ID NO: 640269 - RNA, 19 nt, Artificial Sequence
  Description of Artificial Sequence: Synthetic oligonucleotide
gucccugaucuuuuauaac

SEQ ID NO: 640270 - RNA, 19 nt, Artificial Sequence
  Description of Artificial Sequence: Synthetic oligonucleotide
ugagaggaaucgcuccauu

SEQ ID NO: 640271 - RNA, 19 nt, Artificial Sequence
  Description of Artificial Sequence: Synthetic oligonucleotide
ccauaucuggucucccugg

SEQ ID NO: 640272 - RNA, 19 nt, Artificial Sequence
  Description of Artificial Sequence: Synthetic oligonucleotide
acuugaggguuugucaaaa

SEQ ID NO: 640273 - RNA, 19 nt, Artificial Sequence
  Description of Artificial Sequence: Synthetic oligonucleotide
cauacucgugggugcuggg

SEQ ID NO: 640274 - RNA, 19 nt, Artificial Sequence
  Description of Artificial Sequence: Synthetic oligonucleotide
gaauggcaugguugcuagc

SEQ ID NO: 640275 - RNA, 19 nt, Artificial Sequence
  Description of Artificial Sequence: Synthetic oligonucleotide
gaggguuugucaaaaucua

SEQ ID NO: 640276 - RNA, 19 nt, Artificial Sequence
  Description of Artificial Sequence: Synthetic oligonucleotide
ucucuagcuugcagcugca

SEQ ID NO: 640277 - RNA, 19 nt, Artificial Sequence
  Description of Artificial Sequence: Synthetic oligonucleotide
ggggauagacguguacugg

SEQ ID NO: 640278 - RNA, 19 nt, Artificial Sequence
  Description of Artificial Sequence: Synthetic oligonucleotide
aguucaguaaguggaccau

SEQ ID NO: 640279 - RNA, 19 nt, Artificial Sequence
  Description of Artificial Sequence: Synthetic oligonucleotide
acaaggggauucuuucauu

SEQ ID NO: 640280 - RNA, 19 nt, Artificial Sequence
  Description of Artificial Sequence: Synthetic oligonucleotide
gcuacuuccauaaaucgcu

SEQ ID NO: 640281 - RNA, 19 nt, Artificial Sequence
  Description of Artificial Sequence: Synthetic oligonucleotide
gcaacucgcauuugcugag

SEQ ID NO: 640282 - RNA, 19 nt, Artificial Sequence
  Description of Artificial Sequence: Synthetic oligonucleotide
ggguuugucaaaaucuaga

SEQ ID NO: 640283 - RNA, 19 nt, Artificial Sequence
  Description of Artificial Sequence: Synthetic oligonucleotide
gguuggucuaaaguuccag

SEQ ID NO: 640284 - RNA, 19 nt, Artificial Sequence
  Description of Artificial Sequence: Synthetic oligonucleotide
agaggguccucuauaacua

SEQ ID NO: 640285 - RNA, 19 nt, Artificial Sequence
  Description of Artificial Sequence: Synthetic oligonucleotide
aggguccucuauaacuauc

SEQ ID NO: 640286 - RNA, 19 nt, Artificial Sequence
  Description of Artificial Sequence: Synthetic oligonucleotide
ggcuuacuuguggaaacgg

SEQ ID NO: 640287 - RNA, 19 nt, Artificial Sequence
  Description of Artificial Sequence: Synthetic oligonucleotide
cgaugaacggcugagcagg

SEQ ID NO: 640288 - RNA, 19 nt, Artificial Sequence
  Description of Artificial Sequence: Synthetic oligonucleotide
aggcuugaaagggugcugu

SEQ ID NO: 640289 - RNA, 19 nt, Artificial Sequence
  Description of Artificial Sequence: Synthetic oligonucleotide
ccucuauaacuaucaaaac

SEQ ID NO: 640290 - RNA, 19 nt, Artificial Sequence
  Description of Artificial Sequence: Synthetic oligonucleotide
uugaaagggugcugugcua

SEQ ID NO: 640291 - RNA, 19 nt, Artificial Sequence
  Description of Artificial Sequence: Synthetic oligonucleotide
ucguuccuaccacugcuuu

SEQ ID NO: 640292 - RNA, 19 nt, Artificial Sequence
  Description of Artificial Sequence: Synthetic oligonucleotide
cauuaguaaccucccucca

SEQ ID NO: 640293 - RNA, 19 nt, Artificial Sequence
  Description of Artificial Sequence: Synthetic oligonucleotide
guaacuagcaaggcuacau

SEQ ID NO: 640294 - RNA, 19 nt, Artificial Sequence
  Description of Artificial Sequence: Synthetic oligonucleotide
ugcucaccugagaggaauc

SEQ ID NO: 640295 - RNA, 19 nt, Artificial Sequence
  Description of Artificial Sequence: Synthetic oligonucleotide
ucuuucagggcaggucagu

SEQ ID NO: 640296 - RNA, 19 nt, Artificial Sequence
  Description of Artificial Sequence: Synthetic oligonucleotide
aucgcuccauucugcuuug

SEQ ID NO: 640297 - RNA, 19 nt, Artificial Sequence
  Description of Artificial Sequence: Synthetic oligonucleotide
caggaugguacccggucuc

SEQ ID NO: 640298 - RNA, 19 nt, Artificial Sequence
  Description of Artificial Sequence: Synthetic oligonucleotide
agaggugcguuaauauuaa

SEQ ID NO: 640299 - RNA, 19 nt, Artificial Sequence
  Description of Artificial Sequence: Synthetic oligonucleotide
auacaauagguuggucuaa

SEQ ID NO: 640300 - RNA, 19 nt, Artificial Sequence
  Description of Artificial Sequence: Synthetic oligonucleotide
uaaccucccuccacgugua

SEQ ID NO: 640301 - RNA, 19 nt, Artificial Sequence
  Description of Artificial Sequence: Synthetic oligonucleotide
guguaacuagcaaggcuac

SEQ ID NO: 640302 - RNA, 19 nt, Artificial Sequence
  Description of Artificial Sequence: Synthetic oligonucleotide
agaccacuagaugucccug

SEQ ID NO: 640303 - RNA, 19 nt, Artificial Sequence
  Description of Artificial Sequence: Synthetic oligonucleotide
ugcugugcuaauggaugcu

SEQ ID NO: 640304 - RNA, 19 nt, Artificial Sequence
  Description of Artificial Sequence: Synthetic oligonucleotide
gcuuacuuguggaaacggc

SEQ ID NO: 640305 - RNA, 19 nt, Artificial Sequence
  Description of Artificial Sequence: Synthetic oligonucleotide
cuccauucugcuuuggaau

SEQ ID NO: 640306 - RNA, 19 nt, Artificial Sequence
  Description of Artificial Sequence: Synthetic oligonucleotide
ugauuguagccaggcgaac

SEQ ID NO: 640307 - RNA, 19 nt, Artificial Sequence
  Description of Artificial Sequence: Synthetic oligonucleotide
gcaaccauaucuggucucc

SEQ ID NO: 640308 - RNA, 19 nt, Artificial Sequence
  Description of Artificial Sequence: Synthetic oligonucleotide
ugguacauucacggccagc

SEQ ID NO: 640309 - RNA, 19 nt, Artificial Sequence
  Description of Artificial Sequence: Synthetic oligonucleotide
cauuaacacaguugagggu

SEQ ID NO: 640310 - RNA, 19 nt, Artificial Sequence
  Description of Artificial Sequence: Synthetic oligonucleotide
gguacauucacggccagcu

SEQ ID NO: 640311 - RNA, 19 nt, Artificial Sequence
  Description of Artificial Sequence: Synthetic oligonucleotide
aauugucauucugcuccaa

SEQ ID NO: 640312 - RNA, 19 nt, Artificial Sequence
  Description of Artificial Sequence: Synthetic oligonucleotide
acucgugggugcuggguaa

SEQ ID NO: 640313 - RNA, 19 nt, Artificial Sequence
  Description of Artificial Sequence: Synthetic oligonucleotide
cagaugcuggcuuacuugu

SEQ ID NO: 640314 - RNA, 19 nt, Artificial Sequence
  Description of Artificial Sequence: Synthetic oligonucleotide
aguuggcauuggguuauug

SEQ ID NO: 640315 - RNA, 19 nt, Artificial Sequence
  Description of Artificial Sequence: Synthetic oligonucleotide
guuaaaagucucgcugucu

SEQ ID NO: 640316 - RNA, 19 nt, Artificial Sequence
  Description of Artificial Sequence: Synthetic oligonucleotide
gcaaggauuacuuuuccuu

SEQ ID NO: 640317 - RNA, 19 nt, Artificial Sequence
  Description of Artificial Sequence: Synthetic oligonucleotide
gcucaccugagaggaaucg

SEQ ID NO: 640318 - RNA, 19 nt, Artificial Sequence
  Description of Artificial Sequence: Synthetic oligonucleotide
uuguggaaacggccaucuc

SEQ ID NO: 640319 - RNA, 19 nt, Artificial Sequence
  Description of Artificial Sequence: Synthetic oligonucleotide
uaacacaguugaggguuaa

SEQ ID NO: 640320 - RNA, 19 nt, Artificial Sequence
  Description of Artificial Sequence: Synthetic oligonucleotide
agacguguacuggaaggau

SEQ ID NO: 640321 - RNA, 19 nt, Artificial Sequence
  Description of Artificial Sequence: Synthetic oligonucleotide
gaauuggccugaagaccac

SEQ ID NO: 640322 - RNA, 19 nt, Artificial Sequence
  Description of Artificial Sequence: Synthetic oligonucleotide
auacucgugggugcugggu

SEQ ID NO: 640323 - RNA, 19 nt, Artificial Sequence
  Description of Artificial Sequence: Synthetic oligonucleotide
acgugccauucacugggca

SEQ ID NO: 640324 - RNA, 19 nt, Artificial Sequence
  Description of Artificial Sequence: Synthetic oligonucleotide
cuauaacuaucaaaaccuu

SEQ ID NO: 640325 - RNA, 19 nt, Artificial Sequence
  Description of Artificial Sequence: Synthetic oligonucleotide
ggcuaaguuuuguucugca

SEQ ID NO: 640326 - RNA, 19 nt, Artificial Sequence
  Description of Artificial Sequence: Synthetic oligonucleotide
ggucucacccaaauuguuc

SEQ ID NO: 640327 - RNA, 19 nt, Artificial Sequence
  Description of Artificial Sequence: Synthetic oligonucleotide
ggguccucuauaacuauca

SEQ ID NO: 640328 - RNA, 19 nt, Artificial Sequence
  Description of Artificial Sequence: Synthetic oligonucleotide
cacuguuaaaagucucgcu

SEQ ID NO: 640329 - RNA, 19 nt, Artificial Sequence
  Description of Artificial Sequence: Synthetic oligonucleotide
uuccagcuacuuccauaaa

SEQ ID NO: 640330 - RNA, 19 nt, Artificial Sequence
  Description of Artificial Sequence: Synthetic oligonucleotide
agggagaggugcguuaaua

SEQ ID NO: 640331 - RNA, 19 nt, Artificial Sequence
  Description of Artificial Sequence: Synthetic oligonucleotide
ccgaugaacggcugagcag

SEQ ID NO: 640332 - RNA, 19 nt, Artificial Sequence
  Description of Artificial Sequence: Synthetic oligonucleotide
agauugacauacaguggua

SEQ ID NO: 640333 - RNA, 19 nt, Artificial Sequence
  Description of Artificial Sequence: Synthetic oligonucleotide
auuggccugaagaccacua

SEQ ID NO: 640334 - RNA, 19 nt, Artificial Sequence
  Description of Artificial Sequence: Synthetic oligonucleotide
cacuugcaggagguaacug

SEQ ID NO: 640335 - RNA, 19 nt, Artificial Sequence
  Description of Artificial Sequence: Synthetic oligonucleotide
guagccaccaggagaccga

SEQ ID NO: 640336 - RNA, 19 nt, Artificial Sequence
  Description of Artificial Sequence: Synthetic oligonucleotide
guaugucguuccuaccacu

SEQ ID NO: 640337 - RNA, 19 nt, Artificial Sequence
  Description of Artificial Sequence: Synthetic oligonucleotide
ugguugcuagcugucucau

SEQ ID NO: 640338 - RNA, 19 nt, Artificial Sequence
  Description of Artificial Sequence: Synthetic oligonucleotide
gaggugcguuaauauuaaa

SEQ ID NO: 640339 - RNA, 19 nt, Artificial Sequence
  Description of Artificial Sequence: Synthetic oligonucleotide
ccgaacugaauuucaaucu

SEQ ID NO: 640340 - RNA, 19 nt, Artificial Sequence
  Description of Artificial Sequence: Synthetic oligonucleotide
cguguacauccucucacag

SEQ ID NO: 640341 - RNA, 19 nt, Artificial Sequence
  Description of Artificial Sequence: Synthetic oligonucleotide
cucuagcuugcagcugcag

SEQ ID NO: 640342 - RNA, 19 nt, Artificial Sequence
  Description of Artificial Sequence: Synthetic oligonucleotide
augccugacuaccgaugaa

SEQ ID NO: 640343 - RNA, 19 nt, Artificial Sequence
  Description of Artificial Sequence: Synthetic oligonucleotide
aggcgaacaaggggauucu

SEQ ID NO: 640344 - RNA, 19 nt, Artificial Sequence
  Description of Artificial Sequence: Synthetic oligonucleotide
gggcuaaguuuuguucugc

SEQ ID NO: 640345 - RNA, 19 nt, Artificial Sequence
  Description of Artificial Sequence: Synthetic oligonucleotide
gcaggggauagacguguac

SEQ ID NO: 640346 - RNA, 19 nt, Artificial Sequence
  Description of Artificial Sequence: Synthetic oligonucleotide
gagaccgauacggauucau

SEQ ID NO: 640347 - RNA, 19 nt, Artificial Sequence
  Description of Artificial Sequence: Synthetic oligonucleotide
agaccgauacggauucauu

SEQ ID NO: 640348 - RNA, 19 nt, Artificial Sequence
  Description of Artificial Sequence: Synthetic oligonucleotide
ggcugucuguucuaugugu

SEQ ID NO: 640349 - RNA, 19 nt, Artificial Sequence
  Description of Artificial Sequence: Synthetic oligonucleotide
acccggucucuggagguug

SEQ ID NO: 640350 - RNA, 19 nt, Artificial Sequence
  Description of Artificial Sequence: Synthetic oligonucleotide
gaacggcugagcagggucu

SEQ ID NO: 640351 - RNA, 19 nt, Artificial Sequence
  Description of Artificial Sequence: Synthetic oligonucleotide
ucgcuccauucugcuuugg

SEQ ID NO: 640352 - RNA, 19 nt, Artificial Sequence
  Description of Artificial Sequence: Synthetic oligonucleotide
augaacggcugagcagggu

SEQ ID NO: 640353 - RNA, 19 nt, Artificial Sequence
  Description of Artificial Sequence: Synthetic oligonucleotide
gauucacuagugagaacuu

SEQ ID NO: 640354 - RNA, 19 nt, Artificial Sequence
  Description of Artificial Sequence: Synthetic oligonucleotide
gaggguccucuauaacuau

SEQ ID NO: 640355 - RNA, 19 nt, Artificial Sequence
  Description of Artificial Sequence: Synthetic oligonucleotide
gucucauggucuggagcac

SEQ ID NO: 640356 - RNA, 19 nt, Artificial Sequence
  Description of Artificial Sequence: Synthetic oligonucleotide
caggagaccgauacggauu

SEQ ID NO: 640357 - RNA, 19 nt, Artificial Sequence
  Description of Artificial Sequence: Synthetic oligonucleotide
gcuggcuuacuuguggaaa

SEQ ID NO: 640358 - RNA, 19 nt, Artificial Sequence
  Description of Artificial Sequence: Synthetic oligonucleotide
ggguuauugucuguguacu

SEQ ID NO: 640359 - RNA, 19 nt, Artificial Sequence
  Description of Artificial Sequence: Synthetic oligonucleotide
ccauaaaucgcuccccugu

SEQ ID NO: 640360 - RNA, 19 nt, Artificial Sequence
  Description of Artificial Sequence: Synthetic oligonucleotide
ggcaaggauuacuuuuccu

SEQ ID NO: 640361 - RNA, 19 nt, Artificial Sequence
  Description of Artificial Sequence: Synthetic oligonucleotide
gggagaggugcguuaauau

SEQ ID NO: 640362 - RNA, 19 nt, Artificial Sequence
  Description of Artificial Sequence: Synthetic oligonucleotide
ugccauucacugggcaauu

SEQ ID NO: 640363 - RNA, 19 nt, Artificial Sequence
  Description of Artificial Sequence: Synthetic oligonucleotide
guacccggucucuggaggu

SEQ ID NO: 640364 - RNA, 19 nt, Artificial Sequence
  Description of Artificial Sequence: Synthetic oligonucleotide
ucgugggugcuggguaaaa

SEQ ID NO: 640365 - RNA, 19 nt, Artificial Sequence
  Description of Artificial Sequence: Synthetic oligonucleotide
gagccagauuggauguucu

SEQ ID NO: 640366 - RNA, 19 nt, Artificial Sequence
  Description of Artificial Sequence: Synthetic oligonucleotide
cuugaggguuugucaaaau

SEQ ID NO: 640367 - RNA, 19 nt, Artificial Sequence
  Description of Artificial Sequence: Synthetic oligonucleotide
cgauggaauugcacuugag

SEQ ID NO: 640368 - RNA, 19 nt, Artificial Sequence
  Description of Artificial Sequence: Synthetic oligonucleotide
ugaaggcgacugugacgau

SEQ ID NO: 640369 - RNA, 19 nt, Artificial Sequence
  Description of Artificial Sequence: Synthetic oligonucleotide
ggaugguacccggucucug

SEQ ID NO: 640370 - RNA, 19 nt, Artificial Sequence
  Description of Artificial Sequence: Synthetic oligonucleotide
aaccugaguugagcagcuu

SEQ ID NO: 640371 - RNA, 19 nt, Artificial Sequence
  Description of Artificial Sequence: Synthetic oligonucleotide
auuaucccucugaguguaa

SEQ ID NO: 640372 - RNA, 19 nt, Artificial Sequence
  Description of Artificial Sequence: Synthetic oligonucleotide
gugccauucacugggcaau

SEQ ID NO: 640373 - RNA, 19 nt, Artificial Sequence
  Description of Artificial Sequence: Synthetic oligonucleotide
ggcaaauacauugcaccau

SEQ ID NO: 640374 - RNA, 19 nt, Artificial Sequence
  Description of Artificial Sequence: Synthetic oligonucleotide
caucaggaugguacccggu

SEQ ID NO: 640375 - RNA, 19 nt, Artificial Sequence
  Description of Artificial Sequence: Synthetic oligonucleotide
ccugaucaguaguaaccaa

SEQ ID NO: 640376 - RNA, 19 nt, Artificial Sequence
  Description of Artificial Sequence: Synthetic oligonucleotide
cccggucucuggagguugg

SEQ ID NO: 640377 - RNA, 19 nt, Artificial Sequence
  Description of Artificial Sequence: Synthetic oligonucleotide
uacccggucucuggagguu

SEQ ID NO: 640378 - RNA, 19 nt, Artificial Sequence
  Description of Artificial Sequence: Synthetic oligonucleotide
cacuaccuuccaaaagguu

SEQ ID NO: 640379 - RNA, 19 nt, Artificial Sequence
  Description of Artificial Sequence: Synthetic oligonucleotide
cuuucagggcaggucaguu

SEQ ID NO: 640380 - RNA, 19 nt, Artificial Sequence
  Description of Artificial Sequence: Synthetic oligonucleotide
cgcaaccauaucuggucuc

SEQ ID NO: 640381 - RNA, 19 nt, Artificial Sequence
  Description of Artificial Sequence: Synthetic oligonucleotide
cggauucauuaguaaccuc

SEQ ID NO: 640382 - RNA, 19 nt, Artificial Sequence
  Description of Artificial Sequence: Synthetic oligonucleotide
cgugggugcuggguaaaag

SEQ ID NO: 640383 - RNA, 19 nt, Artificial Sequence
  Description of Artificial Sequence: Synthetic oligonucleotide
agcaagcauuugagcuaca

SEQ ID NO: 640384 - RNA, 19 nt, Artificial Sequence
  Description of Artificial Sequence: Synthetic oligonucleotide
gcgcaaccauaucuggucu

SEQ ID NO: 640385 - RNA, 19 nt, Artificial Sequence
  Description of Artificial Sequence: Synthetic oligonucleotide
cgugccauucacugggcaa

SEQ ID NO: 640386 - RNA, 19 nt, Artificial Sequence
  Description of Artificial Sequence: Synthetic oligonucleotide
ccgauacggauucauuagu

SEQ ID NO: 640387 - RNA, 19 nt, Artificial Sequence
  Description of Artificial Sequence: Synthetic oligonucleotide
cugagaggaaucgcuccau

SEQ ID NO: 640388 - RNA, 19 nt, Artificial Sequence
  Description of Artificial Sequence: Synthetic oligonucleotide
cucgugggugcuggguaaa

SEQ ID NO: 640389 - RNA, 19 nt, Artificial Sequence
  Description of Artificial Sequence: Synthetic oligonucleotide
ggagguugggcugucuguu

SEQ ID NO: 640390 - RNA, 19 nt, Artificial Sequence
  Description of Artificial Sequence: Synthetic oligonucleotide
gucguuccuaccacugcuu

SEQ ID NO: 640391 - RNA, 19 nt, Artificial Sequence
  Description of Artificial Sequence: Synthetic oligonucleotide
gcgaacaaggggauucuuu

SEQ ID NO: 640392 - RNA, 19 nt, Artificial Sequence
  Description of Artificial Sequence: Synthetic oligonucleotide
augcuccgggagucuccuu

SEQ ID NO: 640393 - RNA, 19 nt, Artificial Sequence
  Description of Artificial Sequence: Synthetic oligonucleotide
cgggagucuccuugcccag

SEQ ID NO: 640394 - RNA, 19 nt, Artificial Sequence
  Description of Artificial Sequence: Synthetic oligonucleotide
ccggucucuggagguuggg

SEQ ID NO: 640395 - RNA, 19 nt, Artificial Sequence
  Description of Artificial Sequence: Synthetic oligonucleotide
ggagaccgauacggauuca

SEQ ID NO: 640396 - RNA, 19 nt, Artificial Sequence
  Description of Artificial Sequence: Synthetic oligonucleotide
ggcaggggauagacgugua

SEQ ID NO: 640397 - RNA, 19 nt, Artificial Sequence
  Description of Artificial Sequence: Synthetic oligonucleotide
gaguuggcauuggguuauu

SEQ ID NO: 640398 - RNA, 19 nt, Artificial Sequence
  Description of Artificial Sequence: Synthetic oligonucleotide
ggcgaacaaggggauucuu

SEQ ID NO: 640399 - RNA, 19 nt, Artificial Sequence
  Description of Artificial Sequence: Synthetic oligonucleotide
gccaggcgaacaaggggau

SEQ ID NO: 640400 - RNA, 19 nt, Artificial Sequence
  Description of Artificial Sequence: Synthetic oligonucleotide
cgacugugacgauggaauu

SEQ ID NO: 640401 - RNA, 19 nt, Artificial Sequence
  Description of Artificial Sequence: Synthetic oligonucleotide
aauaacauaaauaaugccc

SEQ ID NO: 640402 - RNA, 19 nt, Artificial Sequence
  Description of Artificial Sequence: Synthetic oligonucleotide
aaauaacauaaauaaugcc

SEQ ID NO: 640403 - RNA, 19 nt, Artificial Sequence
  Description of Artificial Sequence: Synthetic oligonucleotide
auauacuaguguuauaacc

SEQ ID NO: 640404 - RNA, 19 nt, Artificial Sequence
  Description of Artificial Sequence: Synthetic oligonucleotide
uauacuaguguuauaaccc

SEQ ID NO: 640405 - RNA, 19 nt, Artificial Sequence
  Description of Artificial Sequence: Synthetic oligonucleotide
gaugcuuauaacaaaaccg

SEQ ID NO: 640406 - RNA, 19 nt, Artificial Sequence
  Description of Artificial Sequence: Synthetic oligonucleotide
uaaacuauguucaaggagu

SEQ ID NO: 640407 - RNA, 19 nt, Artificial Sequence
  Description of Artificial Sequence: Synthetic oligonucleotide
ucacguuuggguuaaaugg

SEQ ID NO: 640408 - RNA, 19 nt, Artificial Sequence
  Description of Artificial Sequence: Synthetic oligonucleotide
uuuuacacgauacauacaa

SEQ ID NO: 640409 - RNA, 19 nt, Artificial Sequence
  Description of Artificial Sequence: Synthetic oligonucleotide
aauauacuaguguuauaac

SEQ ID NO: 640410 - RNA, 19 nt, Artificial Sequence
  Description of Artificial Sequence: Synthetic oligonucleotide
aaugaaaacaccaacggcu

SEQ ID NO: 640411 - RNA, 19 nt, Artificial Sequence
  Description of Artificial Sequence: Synthetic oligonucleotide
acuuugaccgcauagaaug

SEQ ID NO: 640412 - RNA, 19 nt, Artificial Sequence
  Description of Artificial Sequence: Synthetic oligonucleotide
aaaaccgucugucaucagg

SEQ ID NO: 640413 - RNA, 19 nt, Artificial Sequence
  Description of Artificial Sequence: Synthetic oligonucleotide
uuggcguucgauaagcucg

SEQ ID NO: 640414 - RNA, 19 nt, Artificial Sequence
  Description of Artificial Sequence: Synthetic oligonucleotide
aucccaguuaauuagagag

SEQ ID NO: 640415 - RNA, 19 nt, Artificial Sequence
  Description of Artificial Sequence: Synthetic oligonucleotide
auuauaaccauguuaauua

SEQ ID NO: 640416 - RNA, 19 nt, Artificial Sequence
  Description of Artificial Sequence: Synthetic oligonucleotide
aaauauacuaguguuauaa

SEQ ID NO: 640417 - RNA, 19 nt, Artificial Sequence
  Description of Artificial Sequence: Synthetic oligonucleotide
uuucaaaauggacugaacu

SEQ ID NO: 640418 - RNA, 19 nt, Artificial Sequence
  Description of Artificial Sequence: Synthetic oligonucleotide
uaaaacuuugaccgcauag

SEQ ID NO: 640419 - RNA, 19 nt, Artificial Sequence
  Description of Artificial Sequence: Synthetic oligonucleotide
aauauucgugaucacagcu

SEQ ID NO: 640420 - RNA, 19 nt, Artificial Sequence
  Description of Artificial Sequence: Synthetic oligonucleotide
aacaaaaccgucugucauc

SEQ ID NO: 640421 - RNA, 19 nt, Artificial Sequence
  Description of Artificial Sequence: Synthetic oligonucleotide
uacaagacagcuccgaggc

SEQ ID NO: 640422 - RNA, 19 nt, Artificial Sequence
  Description of Artificial Sequence: Synthetic oligonucleotide
aaagcuuuggagcuaacaa

SEQ ID NO: 640423 - RNA, 19 nt, Artificial Sequence
  Description of Artificial Sequence: Synthetic oligonucleotide
ugcaagaccguuucaauag

SEQ ID NO: 640424 - RNA, 19 nt, Artificial Sequence
  Description of Artificial Sequence: Synthetic oligonucleotide
aaacugaacacucugcgau

SEQ ID NO: 640425 - RNA, 19 nt, Artificial Sequence
  Description of Artificial Sequence: Synthetic oligonucleotide
uuuguugagaaggacuugg

SEQ ID NO: 640426 - RNA, 19 nt, Artificial Sequence
  Description of Artificial Sequence: Synthetic oligonucleotide
uuaaucuccauaaagucuu

SEQ ID NO: 640427 - RNA, 19 nt, Artificial Sequence
  Description of Artificial Sequence: Synthetic oligonucleotide
gauaagaaugcugucgggg

SEQ ID NO: 640428 - RNA, 19 nt, Artificial Sequence
  Description of Artificial Sequence: Synthetic oligonucleotide
agucagaugguuuagcaug

SEQ ID NO: 640429 - RNA, 19 nt, Artificial Sequence
  Description of Artificial Sequence: Synthetic oligonucleotide
uucggaaccaccccaagag

SEQ ID NO: 640430 - RNA, 19 nt, Artificial Sequence
  Description of Artificial Sequence: Synthetic oligonucleotide
aaugagaucaucccaguua

SEQ ID NO: 640431 - RNA, 19 nt, Artificial Sequence
  Description of Artificial Sequence: Synthetic oligonucleotide
acaccaacggcuuugacug

SEQ ID NO: 640432 - RNA, 19 nt, Artificial Sequence
  Description of Artificial Sequence: Synthetic oligonucleotide
aaauaaugcccauuuuaca

SEQ ID NO: 640433 - RNA, 19 nt, Artificial Sequence
  Description of Artificial Sequence: Synthetic oligonucleotide
uguuaauuacaguacauua

SEQ ID NO: 640434 - RNA, 19 nt, Artificial Sequence
  Description of Artificial Sequence: Synthetic oligonucleotide
uuucaauagauuuuaguua

SEQ ID NO: 640435 - RNA, 19 nt, Artificial Sequence
  Description of Artificial Sequence: Synthetic oligonucleotide
aacaccaacggcuuugacu

SEQ ID NO: 640436 - RNA, 19 nt, Artificial Sequence
  Description of Artificial Sequence: Synthetic oligonucleotide
cuuauaacaaaaccgucug

SEQ ID NO: 640437 - RNA, 19 nt, Artificial Sequence
  Description of Artificial Sequence: Synthetic oligonucleotide
cuucuguaaaacuuugacc

SEQ ID NO: 640438 - RNA, 19 nt, Artificial Sequence
  Description of Artificial Sequence: Synthetic oligonucleotide
uccggcuauaaaauggagg

SEQ ID NO: 640439 - RNA, 19 nt, Artificial Sequence
  Description of Artificial Sequence: Synthetic oligonucleotide
aaaccgucugucaucaggc

SEQ ID NO: 640440 - RNA, 19 nt, Artificial Sequence
  Description of Artificial Sequence: Synthetic oligonucleotide
guuaauguagucaaggaca

SEQ ID NO: 640441 - RNA, 19 nt, Artificial Sequence
  Description of Artificial Sequence: Synthetic oligonucleotide
acacgggaaauccacaagg

SEQ ID NO: 640442 - RNA, 19 nt, Artificial Sequence
  Description of Artificial Sequence: Synthetic oligonucleotide
ucagcuggcaacuccaaag

SEQ ID NO: 640443 - RNA, 19 nt, Artificial Sequence
  Description of Artificial Sequence: Synthetic oligonucleotide
ucuauaaacuauguucaag

SEQ ID NO: 640444 - RNA, 19 nt, Artificial Sequence
  Description of Artificial Sequence: Synthetic oligonucleotide
aggagaucccucuuagacc

SEQ ID NO: 640445 - RNA, 19 nt, Artificial Sequence
  Description of Artificial Sequence: Synthetic oligonucleotide
aaaacuuugaccgcauaga

SEQ ID NO: 640446 - RNA, 19 nt, Artificial Sequence
  Description of Artificial Sequence: Synthetic oligonucleotide
uauaaacuauguucaagga

SEQ ID NO: 640447 - RNA, 19 nt, Artificial Sequence
  Description of Artificial Sequence: Synthetic oligonucleotide
aguacauuaaaaugauggu

SEQ ID NO: 640448 - RNA, 19 nt, Artificial Sequence
  Description of Artificial Sequence: Synthetic oligonucleotide
aggcguagcacacucacac

SEQ ID NO: 640449 - RNA, 19 nt, Artificial Sequence
  Description of Artificial Sequence: Synthetic oligonucleotide
ugucguacaucucagcugu

SEQ ID NO: 640450 - RNA, 19 nt, Artificial Sequence
  Description of Artificial Sequence: Synthetic oligonucleotide
caaaauggacugaacuucg

SEQ ID NO: 640451 - RNA, 19 nt, Artificial Sequence
  Description of Artificial Sequence: Synthetic oligonucleotide
uauucgugaucacagcuca

SEQ ID NO: 640452 - RNA, 19 nt, Artificial Sequence
  Description of Artificial Sequence: Synthetic oligonucleotide
uccguuaagcaucuggaug

SEQ ID NO: 640453 - RNA, 19 nt, Artificial Sequence
  Description of Artificial Sequence: Synthetic oligonucleotide
uuuccguuaagcaucugga

SEQ ID NO: 640454 - RNA, 19 nt, Artificial Sequence
  Description of Artificial Sequence: Synthetic oligonucleotide
cacgauacauacaauaauc

SEQ ID NO: 640455 - RNA, 19 nt, Artificial Sequence
  Description of Artificial Sequence: Synthetic oligonucleotide
uguacagacuuucuuuuac

SEQ ID NO: 640456 - RNA, 19 nt, Artificial Sequence
  Description of Artificial Sequence: Synthetic oligonucleotide
uauaacaaaaccgucuguc

SEQ ID NO: 640457 - RNA, 19 nt, Artificial Sequence
  Description of Artificial Sequence: Synthetic oligonucleotide
agucuguaaguuuaaauau

SEQ ID NO: 640458 - RNA, 19 nt, Artificial Sequence
  Description of Artificial Sequence: Synthetic oligonucleotide
cuuuccguuaagcaucugg

SEQ ID NO: 640459 - RNA, 19 nt, Artificial Sequence
  Description of Artificial Sequence: Synthetic oligonucleotide
auacaagacagcuccgagg

SEQ ID NO: 640460 - RNA, 19 nt, Artificial Sequence
  Description of Artificial Sequence: Synthetic oligonucleotide
aauuagagagaagaaaaua

SEQ ID NO: 640461 - RNA, 19 nt, Artificial Sequence
  Description of Artificial Sequence: Synthetic oligonucleotide
uacacgauacauacaauaa

SEQ ID NO: 640462 - RNA, 19 nt, Artificial Sequence
  Description of Artificial Sequence: Synthetic oligonucleotide
aacggcuuugacugacagc

SEQ ID NO: 640463 - RNA, 19 nt, Artificial Sequence
  Description of Artificial Sequence: Synthetic oligonucleotide
uucaaaauggacugaacuu

SEQ ID NO: 640464 - RNA, 19 nt, Artificial Sequence
  Description of Artificial Sequence: Synthetic oligonucleotide
uaauuagagagaagaaaau

SEQ ID NO: 640465 - RNA, 19 nt, Artificial Sequence
  Description of Artificial Sequence: Synthetic oligonucleotide
uucuaaacgagaccugcca

SEQ ID NO: 640466 - RNA, 19 nt, Artificial Sequence
  Description of Artificial Sequence: Synthetic oligonucleotide
uuugucggcagucuggaaa

SEQ ID NO: 640467 - RNA, 19 nt, Artificial Sequence
  Description of Artificial Sequence: Synthetic oligonucleotide
uuuacaggugacauuuuaa

SEQ ID NO: 640468 - RNA, 19 nt, Artificial Sequence
  Description of Artificial Sequence: Synthetic oligonucleotide
uuauggaguacuucaggug

SEQ ID NO: 640469 - RNA, 19 nt, Artificial Sequence
  Description of Artificial Sequence: Synthetic oligonucleotide
auugguuuauugcacacaa

SEQ ID NO: 640470 - RNA, 19 nt, Artificial Sequence
  Description of Artificial Sequence: Synthetic oligonucleotide
cacguuuggguuaaauggg

SEQ ID NO: 640471 - RNA, 19 nt, Artificial Sequence
  Description of Artificial Sequence: Synthetic oligonucleotide
cagacuuucuuuuacacga

SEQ ID NO: 640472 - RNA, 19 nt, Artificial Sequence
  Description of Artificial Sequence: Synthetic oligonucleotide
aucguugcaagaccguuuc

SEQ ID NO: 640473 - RNA, 19 nt, Artificial Sequence
  Description of Artificial Sequence: Synthetic oligonucleotide
uuacaggugacauuuuaaa

SEQ ID NO: 640474 - RNA, 19 nt, Artificial Sequence
  Description of Artificial Sequence: Synthetic oligonucleotide
aacuauguucaaggagugc

SEQ ID NO: 640475 - RNA, 19 nt, Artificial Sequence
  Description of Artificial Sequence: Synthetic oligonucleotide
uguucagaggaaagagucc

SEQ ID NO: 640476 - RNA, 19 nt, Artificial Sequence
  Description of Artificial Sequence: Synthetic oligonucleotide
uuugacugacagcuggggc

SEQ ID NO: 640477 - RNA, 19 nt, Artificial Sequence
  Description of Artificial Sequence: Synthetic oligonucleotide
acuauguucaaggagugca

SEQ ID NO: 640478 - RNA, 19 nt, Artificial Sequence
  Description of Artificial Sequence: Synthetic oligonucleotide
caauaaucaggaaugacaa

SEQ ID NO: 640479 - RNA, 19 nt, Artificial Sequence
  Description of Artificial Sequence: Synthetic oligonucleotide
cuugugucuggcuagaaga

SEQ ID NO: 640480 - RNA, 19 nt, Artificial Sequence
  Description of Artificial Sequence: Synthetic oligonucleotide
agauccuucggaaccaccc

SEQ ID NO: 640481 - RNA, 19 nt, Artificial Sequence
  Description of Artificial Sequence: Synthetic oligonucleotide
acagaccugcaggagaucc

SEQ ID NO: 640482 - RNA, 19 nt, Artificial Sequence
  Description of Artificial Sequence: Synthetic oligonucleotide
gaauauucgugaucacagc

SEQ ID NO: 640483 - RNA, 19 nt, Artificial Sequence
  Description of Artificial Sequence: Synthetic oligonucleotide
uugcaaaccaaaauugguu

SEQ ID NO: 640484 - RNA, 19 nt, Artificial Sequence
  Description of Artificial Sequence: Synthetic oligonucleotide
ugcacaucguugcaagacc

SEQ ID NO: 640485 - RNA, 19 nt, Artificial Sequence
  Description of Artificial Sequence: Synthetic oligonucleotide
uucaagauguucugucagc

SEQ ID NO: 640486 - RNA, 19 nt, Artificial Sequence
  Description of Artificial Sequence: Synthetic oligonucleotide
cuaaacgagaccugccaag

SEQ ID NO: 640487 - RNA, 19 nt, Artificial Sequence
  Description of Artificial Sequence: Synthetic oligonucleotide
cacaagguagaaagaaaag

SEQ ID NO: 640488 - RNA, 19 nt, Artificial Sequence
  Description of Artificial Sequence: Synthetic oligonucleotide
caguuaauuagagagaaga

SEQ ID NO: 640489 - RNA, 19 nt, Artificial Sequence
  Description of Artificial Sequence: Synthetic oligonucleotide
acaaauaagucuguaaguu

SEQ ID NO: 640490 - RNA, 19 nt, Artificial Sequence
  Description of Artificial Sequence: Synthetic oligonucleotide
auacuaguguuauaaccca

SEQ ID NO: 640491 - RNA, 19 nt, Artificial Sequence
  Description of Artificial Sequence: Synthetic oligonucleotide
uagcaugaggauuggagga

SEQ ID NO: 640492 - RNA, 19 nt, Artificial Sequence
  Description of Artificial Sequence: Synthetic oligonucleotide
aggaauuguacauauuaua

SEQ ID NO: 640493 - RNA, 19 nt, Artificial Sequence
  Description of Artificial Sequence: Synthetic oligonucleotide
caggagaucccucuuagac

SEQ ID NO: 640494 - RNA, 19 nt, Artificial Sequence
  Description of Artificial Sequence: Synthetic oligonucleotide
aaggcuaacuaaaacacuu

SEQ ID NO: 640495 - RNA, 19 nt, Artificial Sequence
  Description of Artificial Sequence: Synthetic oligonucleotide
cuggccgugauaagaaugc

SEQ ID NO: 640496 - RNA, 19 nt, Artificial Sequence
  Description of Artificial Sequence: Synthetic oligonucleotide
cucacguuuggguuaaaug

SEQ ID NO: 640497 - RNA, 19 nt, Artificial Sequence
  Description of Artificial Sequence: Synthetic oligonucleotide
aaguacaguuugucggcag

SEQ ID NO: 640498 - RNA, 19 nt, Artificial Sequence
  Description of Artificial Sequence: Synthetic oligonucleotide
agaccguuucaauagauuu

SEQ ID NO: 640499 - RNA, 19 nt, Artificial Sequence
  Description of Artificial Sequence: Synthetic oligonucleotide
uaaugcccauuuuacaggu

SEQ ID NO: 640500 - RNA, 19 nt, Artificial Sequence
  Description of Artificial Sequence: Synthetic oligonucleotide
aaaguuagugugguaggga

SEQ ID NO: 640501 - RNA, 19 nt, Artificial Sequence
  Description of Artificial Sequence: Synthetic oligonucleotide
ugaacacucugcgauagga

SEQ ID NO: 640502 - RNA, 19 nt, Artificial Sequence
  Description of Artificial Sequence: Synthetic oligonucleotide
uugucguacaucucagcug

SEQ ID NO: 640503 - RNA, 19 nt, Artificial Sequence
  Description of Artificial Sequence: Synthetic oligonucleotide
ucuaaacgagaccugccaa

SEQ ID NO: 640504 - RNA, 19 nt, Artificial Sequence
  Description of Artificial Sequence: Synthetic oligonucleotide
ccggcuauaaaauggaggc

SEQ ID NO: 640505 - RNA, 19 nt, Artificial Sequence
  Description of Artificial Sequence: Synthetic oligonucleotide
ucaggcguagcacacucac

SEQ ID NO: 640506 - RNA, 19 nt, Artificial Sequence
  Description of Artificial Sequence: Synthetic oligonucleotide
uaaacgagaccugccaagc

SEQ ID NO: 640507 - RNA, 19 nt, Artificial Sequence
  Description of Artificial Sequence: Synthetic oligonucleotide
gauuggaggacggaccaag

SEQ ID NO: 640508 - RNA, 19 nt, Artificial Sequence
  Description of Artificial Sequence: Synthetic oligonucleotide
ugcuuauaacaaaaccguc

SEQ ID NO: 640509 - RNA, 19 nt, Artificial Sequence
  Description of Artificial Sequence: Synthetic oligonucleotide
auugcaaaccaaaauuggu

SEQ ID NO: 640510 - RNA, 19 nt, Artificial Sequence
  Description of Artificial Sequence: Synthetic oligonucleotide
cuucuaaacgagaccugcc

SEQ ID NO: 640511 - RNA, 19 nt, Artificial Sequence
  Description of Artificial Sequence: Synthetic oligonucleotide
caaugugucccugugaguc

SEQ ID NO: 640512 - RNA, 19 nt, Artificial Sequence
  Description of Artificial Sequence: Synthetic oligonucleotide
gaagcagcguucccucugg

SEQ ID NO: 640513 - RNA, 19 nt, Artificial Sequence
  Description of Artificial Sequence: Synthetic oligonucleotide
ucccaguuaauuagagaga

SEQ ID NO: 640514 - RNA, 19 nt, Artificial Sequence
  Description of Artificial Sequence: Synthetic oligonucleotide
cauacaagacagcuccgag

SEQ ID NO: 640515 - RNA, 19 nt, Artificial Sequence
  Description of Artificial Sequence: Synthetic oligonucleotide
acacgauacauacaauaau

SEQ ID NO: 640516 - RNA, 19 nt, Artificial Sequence
  Description of Artificial Sequence: Synthetic oligonucleotide
ggcuaacuaaaacacuuag

SEQ ID NO: 640517 - RNA, 19 nt, Artificial Sequence
  Description of Artificial Sequence: Synthetic oligonucleotide
cauagagcaucucauacaa

SEQ ID NO: 640518 - RNA, 19 nt, Artificial Sequence
  Description of Artificial Sequence: Synthetic oligonucleotide
uguucacacgggaaaucca

SEQ ID NO: 640519 - RNA, 19 nt, Artificial Sequence
  Description of Artificial Sequence: Synthetic oligonucleotide
ugucccacauuguaguguc

SEQ ID NO: 640520 - RNA, 19 nt, Artificial Sequence
  Description of Artificial Sequence: Synthetic oligonucleotide
ccguuaagcaucuggaugc

SEQ ID NO: 640521 - RNA, 19 nt, Artificial Sequence
  Description of Artificial Sequence: Synthetic oligonucleotide
uggcguucgauaagcucgg

SEQ ID NO: 640522 - RNA, 19 nt, Artificial Sequence
  Description of Artificial Sequence: Synthetic oligonucleotide
aaacgagaccugccaagcu

SEQ ID NO: 640523 - RNA, 19 nt, Artificial Sequence
  Description of Artificial Sequence: Synthetic oligonucleotide
cuuugaccgcauagaaugc

SEQ ID NO: 640524 - RNA, 19 nt, Artificial Sequence
  Description of Artificial Sequence: Synthetic oligonucleotide
acgauacauacaauaauca

SEQ ID NO: 640525 - RNA, 19 nt, Artificial Sequence
  Description of Artificial Sequence: Synthetic oligonucleotide
agaagcgagcccgugguuc

SEQ ID NO: 640526 - RNA, 19 nt, Artificial Sequence
  Description of Artificial Sequence: Synthetic oligonucleotide
uuuacacgauacauacaau

SEQ ID NO: 640527 - RNA, 19 nt, Artificial Sequence
  Description of Artificial Sequence: Synthetic oligonucleotide
gauccuucggaaccacccc

SEQ ID NO: 640528 - RNA, 19 nt, Artificial Sequence
  Description of Artificial Sequence: Synthetic oligonucleotide
ggagcuaacaagaucucag

SEQ ID NO: 640529 - RNA, 19 nt, Artificial Sequence
  Description of Artificial Sequence: Synthetic oligonucleotide
gaacuucgaggguuguuug

SEQ ID NO: 640530 - RNA, 19 nt, Artificial Sequence
  Description of Artificial Sequence: Synthetic oligonucleotide
ugaacuucgaggguuguuu

SEQ ID NO: 640531 - RNA, 19 nt, Artificial Sequence
  Description of Artificial Sequence: Synthetic oligonucleotide
agcaugaggauuggaggac

SEQ ID NO: 640532 - RNA, 19 nt, Artificial Sequence
  Description of Artificial Sequence: Synthetic oligonucleotide
ucgugaucacagcucagac

SEQ ID NO: 640533 - RNA, 19 nt, Artificial Sequence
  Description of Artificial Sequence: Synthetic oligonucleotide
acaaaaccgucugucauca

SEQ ID NO: 640534 - RNA, 19 nt, Artificial Sequence
  Description of Artificial Sequence: Synthetic oligonucleotide
guguuauaacccaauguac

SEQ ID NO: 640535 - RNA, 19 nt, Artificial Sequence
  Description of Artificial Sequence: Synthetic oligonucleotide
aggauuggaggacggacca

SEQ ID NO: 640536 - RNA, 19 nt, Artificial Sequence
  Description of Artificial Sequence: Synthetic oligonucleotide
gcuuauggaguacuucagg

SEQ ID NO: 640537 - RNA, 19 nt, Artificial Sequence
  Description of Artificial Sequence: Synthetic oligonucleotide
ggaauuguacauauuauaa

SEQ ID NO: 640538 - RNA, 19 nt, Artificial Sequence
  Description of Artificial Sequence: Synthetic oligonucleotide
uuccggcuauaaaauggag

SEQ ID NO: 640539 - RNA, 19 nt, Artificial Sequence
  Description of Artificial Sequence: Synthetic oligonucleotide
auaugauucuuaaucucca

SEQ ID NO: 640540 - RNA, 19 nt, Artificial Sequence
  Description of Artificial Sequence: Synthetic oligonucleotide
cuguucacacgggaaaucc

SEQ ID NO: 640541 - RNA, 19 nt, Artificial Sequence
  Description of Artificial Sequence: Synthetic oligonucleotide
uucgugaucacagcucaga

SEQ ID NO: 640542 - RNA, 19 nt, Artificial Sequence
  Description of Artificial Sequence: Synthetic oligonucleotide
gaggauuggaggacggacc

SEQ ID NO: 640543 - RNA, 19 nt, Artificial Sequence
  Description of Artificial Sequence: Synthetic oligonucleotide
aagucucuauaaacuaugu

SEQ ID NO: 640544 - RNA, 19 nt, Artificial Sequence
  Description of Artificial Sequence: Synthetic oligonucleotide
ucccucuuagaccugcauc

SEQ ID NO: 640545 - RNA, 19 nt, Artificial Sequence
  Description of Artificial Sequence: Synthetic oligonucleotide
uugcaagaccguuucaaua

SEQ ID NO: 640546 - RNA, 19 nt, Artificial Sequence
  Description of Artificial Sequence: Synthetic oligonucleotide
gcacauugcagaauauucg

SEQ ID NO: 640547 - RNA, 19 nt, Artificial Sequence
  Description of Artificial Sequence: Synthetic oligonucleotide
uacuaguguuauaacccaa

SEQ ID NO: 640548 - RNA, 19 nt, Artificial Sequence
  Description of Artificial Sequence: Synthetic oligonucleotide
acccaauguacagacuuuc

SEQ ID NO: 640549 - RNA, 19 nt, Artificial Sequence
  Description of Artificial Sequence: Synthetic oligonucleotide
auaagcucggggcuccgug

SEQ ID NO: 640550 - RNA, 19 nt, Artificial Sequence
  Description of Artificial Sequence: Synthetic oligonucleotide
aauggaagucagaugguuu

SEQ ID NO: 640551 - RNA, 19 nt, Artificial Sequence
  Description of Artificial Sequence: Synthetic oligonucleotide
uuugaccgcauagaaugcu

SEQ ID NO: 640552 - RNA, 19 nt, Artificial Sequence
  Description of Artificial Sequence: Synthetic oligonucleotide
gguaccguugugcucaaug

SEQ ID NO: 640553 - RNA, 19 nt, Artificial Sequence
  Description of Artificial Sequence: Synthetic oligonucleotide
aagugccgaaggucacugg

SEQ ID NO: 640554 - RNA, 19 nt, Artificial Sequence
  Description of Artificial Sequence: Synthetic oligonucleotide
uccuucuaaacgagaccug

SEQ ID NO: 640555 - RNA, 19 nt, Artificial Sequence
  Description of Artificial Sequence: Synthetic oligonucleotide
ucagaauguugucguacau

SEQ ID NO: 640556 - RNA, 19 nt, Artificial Sequence
  Description of Artificial Sequence: Synthetic oligonucleotide
uaaugagaucaucccaguu

SEQ ID NO: 640557 - RNA, 19 nt, Artificial Sequence
  Description of Artificial Sequence: Synthetic oligonucleotide
cuuauggaguacuucaggu

SEQ ID NO: 640558 - RNA, 19 nt, Artificial Sequence
  Description of Artificial Sequence: Synthetic oligonucleotide
auacaauaaucaggaauga

SEQ ID NO: 640559 - RNA, 19 nt, Artificial Sequence
  Description of Artificial Sequence: Synthetic oligonucleotide
acguuuggguuaaaugggg

SEQ ID NO: 640560 - RNA, 19 nt, Artificial Sequence
  Description of Artificial Sequence: Synthetic oligonucleotide
cgggaaauccacaagguag

SEQ ID NO: 640561 - RNA, 19 nt, Artificial Sequence
  Description of Artificial Sequence: Synthetic oligonucleotide
agucucuauaaacuauguu

SEQ ID NO: 640562 - RNA, 19 nt, Artificial Sequence
  Description of Artificial Sequence: Synthetic oligonucleotide
ugaccgcauagaaugcuuc

SEQ ID NO: 640563 - RNA, 19 nt, Artificial Sequence
  Description of Artificial Sequence: Synthetic oligonucleotide
aaaauggacugaacuucga

SEQ ID NO: 640564 - RNA, 19 nt, Artificial Sequence
  Description of Artificial Sequence: Synthetic oligonucleotide
uggacugaacuucgagggu

SEQ ID NO: 640565 - RNA, 19 nt, Artificial Sequence
  Description of Artificial Sequence: Synthetic oligonucleotide
cguucgauaagcucggggc

SEQ ID NO: 640566 - RNA, 19 nt, Artificial Sequence
  Description of Artificial Sequence: Synthetic oligonucleotide
accaacggcuuugacugac

SEQ ID NO: 640567 - RNA, 19 nt, Artificial Sequence
  Description of Artificial Sequence: Synthetic oligonucleotide
agaccugcaucuuccuucu

SEQ ID NO: 640568 - RNA, 19 nt, Artificial Sequence
  Description of Artificial Sequence: Synthetic oligonucleotide
cgauacauacaauaaucag

SEQ ID NO: 640569 - RNA, 19 nt, Artificial Sequence
  Description of Artificial Sequence: Synthetic oligonucleotide
gugguucuaggaagcagcg

SEQ ID NO: 640570 - RNA, 19 nt, Artificial Sequence
  Description of Artificial Sequence: Synthetic oligonucleotide
caaacugaacacucugcga

SEQ ID NO: 640571 - RNA, 19 nt, Artificial Sequence
  Description of Artificial Sequence: Synthetic oligonucleotide
ccaagguugauuuguugag

SEQ ID NO: 640572 - RNA, 19 nt, Artificial Sequence
  Description of Artificial Sequence: Synthetic oligonucleotide
uuccguuaagcaucuggau

SEQ ID NO: 640573 - RNA, 19 nt, Artificial Sequence
  Description of Artificial Sequence: Synthetic oligonucleotide
guuggcguucgauaagcuc

SEQ ID NO: 640574 - RNA, 19 nt, Artificial Sequence
  Description of Artificial Sequence: Synthetic oligonucleotide
ucggaaccaccccaagagu

SEQ ID NO: 640575 - RNA, 19 nt, Artificial Sequence
  Description of Artificial Sequence: Synthetic oligonucleotide
uaagcucggggcuccguga

SEQ ID NO: 640576 - RNA, 19 nt, Artificial Sequence
  Description of Artificial Sequence: Synthetic oligonucleotide
acauugcagaauauucgug

SEQ ID NO: 640577 - RNA, 19 nt, Artificial Sequence
  Description of Artificial Sequence: Synthetic oligonucleotide
agcagcguucccucuggag

SEQ ID NO: 640578 - RNA, 19 nt, Artificial Sequence
  Description of Artificial Sequence: Synthetic oligonucleotide
uagcccaaggcacuugcua

SEQ ID NO: 640579 - RNA, 19 nt, Artificial Sequence
  Description of Artificial Sequence: Synthetic oligonucleotide
uugaccgcauagaaugcuu

SEQ ID NO: 640580 - RNA, 19 nt, Artificial Sequence
  Description of Artificial Sequence: Synthetic oligonucleotide
ggcacauugcagaauauuc

SEQ ID NO: 640581 - RNA, 19 nt, Artificial Sequence
  Description of Artificial Sequence: Synthetic oligonucleotide
agauuuuauugcaaaccaa

SEQ ID NO: 640582 - RNA, 19 nt, Artificial Sequence
  Description of Artificial Sequence: Synthetic oligonucleotide
caacggcuuugacugacag

SEQ ID NO: 640583 - RNA, 19 nt, Artificial Sequence
  Description of Artificial Sequence: Synthetic oligonucleotide
acuaguguuauaacccaau

SEQ ID NO: 640584 - RNA, 19 nt, Artificial Sequence
  Description of Artificial Sequence: Synthetic oligonucleotide
uaccguugugcucaauguu

SEQ ID NO: 640585 - RNA, 19 nt, Artificial Sequence
  Description of Artificial Sequence: Synthetic oligonucleotide
ucagcagaacguuccgcuc

SEQ ID NO: 640586 - RNA, 19 nt, Artificial Sequence
  Description of Artificial Sequence: Synthetic oligonucleotide
ggagaucccucuuagaccu

SEQ ID NO: 640587 - RNA, 19 nt, Artificial Sequence
  Description of Artificial Sequence: Synthetic oligonucleotide
caucaggcguagcacacuc

SEQ ID NO: 640588 - RNA, 19 nt, Artificial Sequence
  Description of Artificial Sequence: Synthetic oligonucleotide
aagaccguuucaauagauu

SEQ ID NO: 640589 - RNA, 19 nt, Artificial Sequence
  Description of Artificial Sequence: Synthetic oligonucleotide
agcagaacguuccgcucug

SEQ ID NO: 640590 - RNA, 19 nt, Artificial Sequence
  Description of Artificial Sequence: Synthetic oligonucleotide
uucgauaagcucggggcuc

SEQ ID NO: 640591 - RNA, 19 nt, Artificial Sequence
  Description of Artificial Sequence: Synthetic oligonucleotide
aguuugucggcagucugga

SEQ ID NO: 640592 - RNA, 19 nt, Artificial Sequence
  Description of Artificial Sequence: Synthetic oligonucleotide
ggaggacggaccaagguug

SEQ ID NO: 640593 - RNA, 19 nt, Artificial Sequence
  Description of Artificial Sequence: Synthetic oligonucleotide
ucgauaagcucggggcucc

SEQ ID NO: 640594 - RNA, 19 nt, Artificial Sequence
  Description of Artificial Sequence: Synthetic oligonucleotide
cacauugcagaauauucgu

SEQ ID NO: 640595 - RNA, 19 nt, Artificial Sequence
  Description of Artificial Sequence: Synthetic oligonucleotide
ugguuucaacuggaggggc

SEQ ID NO: 640596 - RNA, 19 nt, Artificial Sequence
  Description of Artificial Sequence: Synthetic oligonucleotide
guaaacucggggucaaagu

SEQ ID NO: 640597 - RNA, 19 nt, Artificial Sequence
  Description of Artificial Sequence: Synthetic oligonucleotide
acaguacauuaaaaugaug

SEQ ID NO: 640598 - RNA, 19 nt, Artificial Sequence
  Description of Artificial Sequence: Synthetic oligonucleotide
ccacgguccugucauaugg

SEQ ID NO: 640599 - RNA, 19 nt, Artificial Sequence
  Description of Artificial Sequence: Synthetic oligonucleotide
caaugucccacauuguagu

SEQ ID NO: 640600 - RNA, 19 nt, Artificial Sequence
  Description of Artificial Sequence: Synthetic oligonucleotide
aaaacacgcaggagauccu

SEQ ID NO: 640601 - RNA, 19 nt, Artificial Sequence
  Description of Artificial Sequence: Synthetic oligonucleotide
acgggaaauccacaaggua

SEQ ID NO: 640602 - RNA, 19 nt, Artificial Sequence
  Description of Artificial Sequence: Synthetic oligonucleotide
cugaacacucugcgauagg

SEQ ID NO: 640603 - RNA, 19 nt, Artificial Sequence
  Description of Artificial Sequence: Synthetic oligonucleotide
uccacgguccugucauaug

SEQ ID NO: 640604 - RNA, 19 nt, Artificial Sequence
  Description of Artificial Sequence: Synthetic oligonucleotide
uggggcauugguccauaaa

SEQ ID NO: 640605 - RNA, 19 nt, Artificial Sequence
  Description of Artificial Sequence: Synthetic oligonucleotide
aaacacgcaggagauccuu

SEQ ID NO: 640606 - RNA, 19 nt, Artificial Sequence
  Description of Artificial Sequence: Synthetic oligonucleotide
uuucaacuggaggggcuug

SEQ ID NO: 640607 - RNA, 19 nt, Artificial Sequence
  Description of Artificial Sequence: Synthetic oligonucleotide
gugagguugggagauuuuc

SEQ ID NO: 640608 - RNA, 19 nt, Artificial Sequence
  Description of Artificial Sequence: Synthetic oligonucleotide
uggguccacucacguuugg

SEQ ID NO: 640609 - RNA, 19 nt, Artificial Sequence
  Description of Artificial Sequence: Synthetic oligonucleotide
guuccggcuauaaaaugga

SEQ ID NO: 640610 - RNA, 19 nt, Artificial Sequence
  Description of Artificial Sequence: Synthetic oligonucleotide
acgugguaccguugugcuc

SEQ ID NO: 640611 - RNA, 19 nt, Artificial Sequence
  Description of Artificial Sequence: Synthetic oligonucleotide
uggacgugguaccguugug

SEQ ID NO: 640612 - RNA, 19 nt, Artificial Sequence
  Description of Artificial Sequence: Synthetic oligonucleotide
cauguuaauuacaguacau

SEQ ID NO: 640613 - RNA, 19 nt, Artificial Sequence
  Description of Artificial Sequence: Synthetic oligonucleotide
cucuauaaacuauguucaa

SEQ ID NO: 640614 - RNA, 19 nt, Artificial Sequence
  Description of Artificial Sequence: Synthetic oligonucleotide
gacggaccaagguugauuu

SEQ ID NO: 640615 - RNA, 19 nt, Artificial Sequence
  Description of Artificial Sequence: Synthetic oligonucleotide
gcuuauaacaaaaccgucu

SEQ ID NO: 640616 - RNA, 19 nt, Artificial Sequence
  Description of Artificial Sequence: Synthetic oligonucleotide
ugguagggaggaggaauug

SEQ ID NO: 640617 - RNA, 19 nt, Artificial Sequence
  Description of Artificial Sequence: Synthetic oligonucleotide
gaggaauuguacauauuau

SEQ ID NO: 640618 - RNA, 19 nt, Artificial Sequence
  Description of Artificial Sequence: Synthetic oligonucleotide
gcuaacuaaaacacuuaga

SEQ ID NO: 640619 - RNA, 19 nt, Artificial Sequence
  Description of Artificial Sequence: Synthetic oligonucleotide
uuagugugguagggaggag

SEQ ID NO: 640620 - RNA, 19 nt, Artificial Sequence
  Description of Artificial Sequence: Synthetic oligonucleotide
gacgugguaccguugugcu

SEQ ID NO: 640621 - RNA, 19 nt, Artificial Sequence
  Description of Artificial Sequence: Synthetic oligonucleotide
aagguggacgugguaccgu

SEQ ID NO: 640622 - RNA, 19 nt, Artificial Sequence
  Description of Artificial Sequence: Synthetic oligonucleotide
accguugugcucaauguuu

SEQ ID NO: 640623 - RNA, 19 nt, Artificial Sequence
  Description of Artificial Sequence: Synthetic oligonucleotide
gagggguuggcguucgaua

SEQ ID NO: 640624 - RNA, 19 nt, Artificial Sequence
  Description of Artificial Sequence: Synthetic oligonucleotide
gcguucgauaagcucgggg

SEQ ID NO: 640625 - RNA, 19 nt, Artificial Sequence
  Description of Artificial Sequence: Synthetic oligonucleotide
cuucggaaccaccccaaga

SEQ ID NO: 640626 - RNA, 19 nt, Artificial Sequence
  Description of Artificial Sequence: Synthetic oligonucleotide
ggaagcagcguucccucug

SEQ ID NO: 640627 - RNA, 19 nt, Artificial Sequence
  Description of Artificial Sequence: Synthetic oligonucleotide
gcagcguucccucuggaga

SEQ ID NO: 640628 - RNA, 19 nt, Artificial Sequence
  Description of Artificial Sequence: Synthetic oligonucleotide
aggcgcauaggagaagcca

SEQ ID NO: 640629 - RNA, 19 nt, Artificial Sequence
  Description of Artificial Sequence: Synthetic oligonucleotide
ccauguuaauuacaguaca

SEQ ID NO: 640630 - RNA, 19 nt, Artificial Sequence
  Description of Artificial Sequence: Synthetic oligonucleotide
guaccguugugcucaaugu

SEQ ID NO: 640631 - RNA, 19 nt, Artificial Sequence
  Description of Artificial Sequence: Synthetic oligonucleotide
ggaggcgcauaggagaagc

SEQ ID NO: 640632 - RNA, 19 nt, Artificial Sequence
  Description of Artificial Sequence: Synthetic oligonucleotide
ucggggcuccgugagguug

SEQ ID NO: 640633 - RNA, 19 nt, Artificial Sequence
  Description of Artificial Sequence: Synthetic oligonucleotide
guucgauaagcucggggcu

SEQ ID NO: 640634 - RNA, 19 nt, Artificial Sequence
  Description of Artificial Sequence: Synthetic oligonucleotide
acacucugcgauaggaaaa

SEQ ID NO: 640635 - RNA, 19 nt, Artificial Sequence
  Description of Artificial Sequence: Synthetic oligonucleotide
ggacgugguaccguugugc

SEQ ID NO: 640636 - RNA, 19 nt, Artificial Sequence
  Description of Artificial Sequence: Synthetic oligonucleotide
ccuugugucuggcuagaag

SEQ ID NO: 640637 - RNA, 19 nt, Artificial Sequence
  Description of Artificial Sequence: Synthetic oligonucleotide
uggaguacuucaggugcaa

SEQ ID NO: 640638 - RNA, 19 nt, Artificial Sequence
  Description of Artificial Sequence: Synthetic oligonucleotide
gaagcgagcccgugguucu

SEQ ID NO: 640639 - RNA, 19 nt, Artificial Sequence
  Description of Artificial Sequence: Synthetic oligonucleotide
acaucguugcaagaccguu

SEQ ID NO: 640640 - RNA, 19 nt, Artificial Sequence
  Description of Artificial Sequence: Synthetic oligonucleotide
auggaguacuucaggugca

SEQ ID NO: 640641 - RNA, 19 nt, Artificial Sequence
  Description of Artificial Sequence: Synthetic oligonucleotide
gcuggccgugauaagaaug

SEQ ID NO: 640642 - RNA, 19 nt, Artificial Sequence
  Description of Artificial Sequence: Synthetic oligonucleotide
gaggcgcauaggagaagcc

SEQ ID NO: 640643 - RNA, 19 nt, Artificial Sequence
  Description of Artificial Sequence: Synthetic oligonucleotide
aggaagcagcguucccucu

SEQ ID NO: 640644 - RNA, 19 nt, Artificial Sequence
  Description of Artificial Sequence: Synthetic oligonucleotide
ggguuggcguucgauaagc

SEQ ID NO: 640645 - RNA, 19 nt, Artificial Sequence
  Description of Artificial Sequence: Synthetic oligonucleotide
ucggggucaaagugccgaa

SEQ ID NO: 640646 - RNA, 19 nt, Artificial Sequence
  Description of Artificial Sequence: Synthetic oligonucleotide
aucccucuuagaccugcau

SEQ ID NO: 640647 - RNA, 19 nt, Artificial Sequence
  Description of Artificial Sequence: Synthetic oligonucleotide
gucaaggacaaaguacagu

SEQ ID NO: 640648 - RNA, 19 nt, Artificial Sequence
  Description of Artificial Sequence: Synthetic oligonucleotide
acguuccgcucugacauga

SEQ ID NO: 640649 - RNA, 19 nt, Artificial Sequence
  Description of Artificial Sequence: Synthetic oligonucleotide
agauagcccaaggcacuug

SEQ ID NO: 640650 - RNA, 19 nt, Artificial Sequence
  Description of Artificial Sequence: Synthetic oligonucleotide
acucacguuuggguuaaau

SEQ ID NO: 640651 - RNA, 19 nt, Artificial Sequence
  Description of Artificial Sequence: Synthetic oligonucleotide
auucgugaucacagcucag

SEQ ID NO: 640652 - RNA, 19 nt, Artificial Sequence
  Description of Artificial Sequence: Synthetic oligonucleotide
augaggauuggaggacgga

SEQ ID NO: 640653 - RNA, 19 nt, Artificial Sequence
  Description of Artificial Sequence: Synthetic oligonucleotide
agguggacgugguaccguu

SEQ ID NO: 640654 - RNA, 19 nt, Artificial Sequence
  Description of Artificial Sequence: Synthetic oligonucleotide
uggccgugauaagaaugcu

SEQ ID NO: 640655 - RNA, 19 nt, Artificial Sequence
  Description of Artificial Sequence: Synthetic oligonucleotide
ggccgugauaagaaugcug

SEQ ID NO: 640656 - RNA, 19 nt, Artificial Sequence
  Description of Artificial Sequence: Synthetic oligonucleotide
ggcguagcacacucacacc

SEQ ID NO: 640657 - RNA, 19 nt, Artificial Sequence
  Description of Artificial Sequence: Synthetic oligonucleotide
gccgugauaagaaugcugu

SEQ ID NO: 640658 - RNA, 19 nt, Artificial Sequence
  Description of Artificial Sequence: Synthetic oligonucleotide
guuuagcaugaggauugga

SEQ ID NO: 640659 - RNA, 19 nt, Artificial Sequence
  Description of Artificial Sequence: Synthetic oligonucleotide
aggcuaacuaaaacacuua

SEQ ID NO: 640660 - RNA, 19 nt, Artificial Sequence
  Description of Artificial Sequence: Synthetic oligonucleotide
ggacaaugugucccuguga

SEQ ID NO: 640661 - RNA, 19 nt, Artificial Sequence
  Description of Artificial Sequence: Synthetic oligonucleotide
uagaagcgagcccgugguu

SEQ ID NO: 640662 - RNA, 19 nt, Artificial Sequence
  Description of Artificial Sequence: Synthetic oligonucleotide
gggguuggcguucgauaag

SEQ ID NO: 640663 - RNA, 19 nt, Artificial Sequence
  Description of Artificial Sequence: Synthetic oligonucleotide
gcaagaccguuucaauaga

SEQ ID NO: 640664 - RNA, 19 nt, Artificial Sequence
  Description of Artificial Sequence: Synthetic oligonucleotide
ggagaugguagaacagcuc

SEQ ID NO: 640665 - RNA, 19 nt, Artificial Sequence
  Description of Artificial Sequence: Synthetic oligonucleotide
cccaguuaauuagagagaa

SEQ ID NO: 640666 - RNA, 19 nt, Artificial Sequence
  Description of Artificial Sequence: Synthetic oligonucleotide
ccguuaauguagucaagga

SEQ ID NO: 640667 - RNA, 19 nt, Artificial Sequence
  Description of Artificial Sequence: Synthetic oligonucleotide
guggacgugguaccguugu

SEQ ID NO: 640668 - RNA, 19 nt, Artificial Sequence
  Description of Artificial Sequence: Synthetic oligonucleotide
ggguccacucacguuuggg

SEQ ID NO: 640669 - RNA, 19 nt, Artificial Sequence
  Description of Artificial Sequence: Synthetic oligonucleotide
ugucggcagucuggaaaga

SEQ ID NO: 640670 - RNA, 19 nt, Artificial Sequence
  Description of Artificial Sequence: Synthetic oligonucleotide
gaggacggaccaagguuga

SEQ ID NO: 640671 - RNA, 19 nt, Artificial Sequence
  Description of Artificial Sequence: Synthetic oligonucleotide
caagaccguuucaauagau

SEQ ID NO: 640672 - RNA, 19 nt, Artificial Sequence
  Description of Artificial Sequence: Synthetic oligonucleotide
gguccacucacguuugggu

SEQ ID NO: 640673 - RNA, 19 nt, Artificial Sequence
  Description of Artificial Sequence: Synthetic oligonucleotide
agcgagcccgugguucuag

SEQ ID NO: 640674 - RNA, 19 nt, Artificial Sequence
  Description of Artificial Sequence: Synthetic oligonucleotide
ggcaacuccaaaggcuaac

SEQ ID NO: 640675 - RNA, 19 nt, Artificial Sequence
  Description of Artificial Sequence: Synthetic oligonucleotide
acuuggcggaggagagggg

SEQ ID NO: 640676 - RNA, 19 nt, Artificial Sequence
  Description of Artificial Sequence: Synthetic oligonucleotide
cuuagaccugcaucuuccu

SEQ ID NO: 640677 - RNA, 19 nt, Artificial Sequence
  Description of Artificial Sequence: Synthetic oligonucleotide
ccgcucugacaugauaugc

SEQ ID NO: 640678 - RNA, 19 nt, Artificial Sequence
  Description of Artificial Sequence: Synthetic oligonucleotide
cagcagaacguuccgcucu

SEQ ID NO: 640679 - RNA, 19 nt, Artificial Sequence
  Description of Artificial Sequence: Synthetic oligonucleotide
cgugguaccguugugcuca

SEQ ID NO: 640680 - RNA, 19 nt, Artificial Sequence
  Description of Artificial Sequence: Synthetic oligonucleotide
gcgcauaggagaagccaag

SEQ ID NO: 640681 - RNA, 19 nt, Artificial Sequence
  Description of Artificial Sequence: Synthetic oligonucleotide
cuccaccguuaauguaguc

SEQ ID NO: 640682 - RNA, 19 nt, Artificial Sequence
  Description of Artificial Sequence: Synthetic oligonucleotide
guccacucacguuuggguu

SEQ ID NO: 640683 - RNA, 19 nt, Artificial Sequence
  Description of Artificial Sequence: Synthetic oligonucleotide
gagaucccucuuagaccug

SEQ ID NO: 640684 - RNA, 19 nt, Artificial Sequence
  Description of Artificial Sequence: Synthetic oligonucleotide
aucaggcguagcacacuca

SEQ ID NO: 640685 - RNA, 19 nt, Artificial Sequence
  Description of Artificial Sequence: Synthetic oligonucleotide
caucguugcaagaccguuu

SEQ ID NO: 640686 - RNA, 19 nt, Artificial Sequence
  Description of Artificial Sequence: Synthetic oligonucleotide
guuugucggcagucuggaa

SEQ ID NO: 640687 - RNA, 19 nt, Artificial Sequence
  Description of Artificial Sequence: Synthetic oligonucleotide
cacaucguugcaagaccgu

SEQ ID NO: 640688 - RNA, 19 nt, Artificial Sequence
  Description of Artificial Sequence: Synthetic oligonucleotide
cuugacgcuggccgugaua

SEQ ID NO: 640689 - RNA, 19 nt, Artificial Sequence
  Description of Artificial Sequence: Synthetic oligonucleotide
cugcaggagaucccucuua

SEQ ID NO: 640690 - RNA, 19 nt, Artificial Sequence
  Description of Artificial Sequence: Synthetic oligonucleotide
ccgugauaagaaugcuguc

SEQ ID NO: 640691 - RNA, 19 nt, Artificial Sequence
  Description of Artificial Sequence: Synthetic oligonucleotide
ccaauggaguuggggacug

SEQ ID NO: 640692 - RNA, 19 nt, Artificial Sequence
  Description of Artificial Sequence: Synthetic oligonucleotide
guuucaacuggaggggcuu

SEQ ID NO: 640693 - RNA, 19 nt, Artificial Sequence
  Description of Artificial Sequence: Synthetic oligonucleotide
ccuucggaaccaccccaag

SEQ ID NO: 640694 - RNA, 19 nt, Artificial Sequence
  Description of Artificial Sequence: Synthetic oligonucleotide
gccuugcugaguuuguaau

SEQ ID NO: 640695 - RNA, 19 nt, Artificial Sequence
  Description of Artificial Sequence: Synthetic oligonucleotide
gucguacaucucagcugug

SEQ ID NO: 640696 - RNA, 19 nt, Artificial Sequence
  Description of Artificial Sequence: Synthetic oligonucleotide
gauaagcucggggcuccgu

SEQ ID NO: 640697 - RNA, 19 nt, Artificial Sequence
  Description of Artificial Sequence: Synthetic oligonucleotide
gcgagcccgugguucuagg

SEQ ID NO: 640698 - RNA, 19 nt, Artificial Sequence
  Description of Artificial Sequence: Synthetic oligonucleotide
gguggacgugguaccguug

SEQ ID NO: 640699 - RNA, 19 nt, Artificial Sequence
  Description of Artificial Sequence: Synthetic oligonucleotide
gcccgugguucuaggaagc

SEQ ID NO: 640700 - RNA, 19 nt, Artificial Sequence
  Description of Artificial Sequence: Synthetic oligonucleotide
gguuucaacuggaggggcu

SEQ ID NO: 640701 - RNA, 19 nt, Artificial Sequence
  Description of Artificial Sequence: Synthetic oligonucleotide
gcagauagcccaaggcacu

SEQ ID NO: 640702 - RNA, 19 nt, Artificial Sequence
  Description of Artificial Sequence: Synthetic oligonucleotide
gaguccaugggaggcgcau

SEQ ID NO: 640703 - RNA, 19 nt, Artificial Sequence
  Description of Artificial Sequence: Synthetic oligonucleotide
aggacggaccaagguugau

SEQ ID NO: 640704 - RNA, 19 nt, Artificial Sequence
  Description of Artificial Sequence: Synthetic oligonucleotide
ggcguucgauaagcucggg

SEQ ID NO: 640705 - RNA, 19 nt, Artificial Sequence
  Description of Artificial Sequence: Synthetic oligonucleotide
aagcgagcccgugguucua

SEQ ID NO: 640706 - RNA, 19 nt, Artificial Sequence
  Description of Artificial Sequence: Synthetic oligonucleotide
gccaauggaguuggggacu

SEQ ID NO: 640707 - RNA, 19 nt, Artificial Sequence
  Description of Artificial Sequence: Synthetic oligonucleotide
ccaacggcuuugacugaca

SEQ ID NO: 640708 - RNA, 19 nt, Artificial Sequence
  Description of Artificial Sequence: Synthetic oligonucleotide
gugguaccguugugcucaa

SEQ ID NO: 640709 - RNA, 19 nt, Artificial Sequence
  Description of Artificial Sequence: Synthetic oligonucleotide
ggauuggaggacggaccaa

SEQ ID NO: 640710 - RNA, 19 nt, Artificial Sequence
  Description of Artificial Sequence: Synthetic oligonucleotide
ccauuuuacaggugacauu

SEQ ID NO: 640711 - RNA, 19 nt, Artificial Sequence
  Description of Artificial Sequence: Synthetic oligonucleotide
gaguuggggacuggcucuu

SEQ ID NO: 640712 - RNA, 19 nt, Artificial Sequence
  Description of Artificial Sequence: Synthetic oligonucleotide
ugguaccguugugcucaau

SEQ ID NO: 640713 - RNA, 19 nt, Artificial Sequence
  Description of Artificial Sequence: Synthetic oligonucleotide
ggacggaccaagguugauu

SEQ ID NO: 640714 - RNA, 19 nt, Artificial Sequence
  Description of Artificial Sequence: Synthetic oligonucleotide
gguuggcguucgauaagcu

SEQ ID NO: 640715 - RNA, 19 nt, Artificial Sequence
  Description of Artificial Sequence: Synthetic oligonucleotide
cagauagcccaaggcacuu

SEQ ID NO: 640716 - RNA, 19 nt, Artificial Sequence
  Description of Artificial Sequence: Synthetic oligonucleotide
cugaacuucgaggguuguu

SEQ ID NO: 640717 - RNA, 19 nt, Artificial Sequence
  Description of Artificial Sequence: Synthetic oligonucleotide
gaggugccuugcugaguuu

SEQ ID NO: 640718 - RNA, 19 nt, Artificial Sequence
  Description of Artificial Sequence: Synthetic oligonucleotide
cggcuuugacugacagcug

SEQ ID NO: 640719 - RNA, 19 nt, Artificial Sequence
  Description of Artificial Sequence: Synthetic oligonucleotide
ccguugugcucaauguuuu

SEQ ID NO: 640720 - RNA, 19 nt, Artificial Sequence
  Description of Artificial Sequence: Synthetic oligonucleotide
gcagaacguuccgcucuga

SEQ ID NO: 640721 - RNA, 19 nt, Artificial Sequence
  Description of Artificial Sequence: Synthetic oligonucleotide
cgagcccgugguucuagga

SEQ ID NO: 640722 - RNA, 19 nt, Artificial Sequence
  Description of Artificial Sequence: Synthetic oligonucleotide
cgauaagcucggggcuccg

SEQ ID NO: 640723 - RNA, 19 nt, Artificial Sequence
  Description of Artificial Sequence: Synthetic oligonucleotide
cccgugguucuaggaagca

SEQ ID NO: 640724 - RNA, 19 nt, Artificial Sequence
  Description of Artificial Sequence: Synthetic oligonucleotide
ggcugcuuauggaguacuu

SEQ ID NO: 640725 - RNA, 19 nt, Artificial Sequence
  Description of Artificial Sequence: Synthetic oligonucleotide
cucggggcuccgugagguu

SEQ ID NO: 640726 - RNA, 19 nt, Artificial Sequence
  Description of Artificial Sequence: Synthetic oligonucleotide
cacucacguuuggguuaaa

SEQ ID NO: 640727 - RNA, 19 nt, Artificial Sequence
  Description of Artificial Sequence: Synthetic oligonucleotide
gggcuccgugagguuggga

SEQ ID NO: 640728 - RNA, 19 nt, Artificial Sequence
  Description of Artificial Sequence: Synthetic oligonucleotide
cgugagguugggagauuuu

SEQ ID NO: 640729 - RNA, 19 nt, Artificial Sequence
  Description of Artificial Sequence: Synthetic oligonucleotide
cgcuggccgugauaagaau

SEQ ID NO: 640730 - RNA, 19 nt, Artificial Sequence
  Description of Artificial Sequence: Synthetic oligonucleotide
  modified_base (6)..(6): a, c, u, g, unknown or other
aaaacnacaaguuauagca

SEQ ID NO: 640731 - RNA, 19 nt, Artificial Sequence
  Description of Artificial Sequence: Synthetic oligonucleotide
  modified_base (4)..(4): a, c, u, g, unknown or other
aacnacaaguuauagcacc

SEQ ID NO: 640732 - RNA, 19 nt, Artificial Sequence
  Description of Artificial Sequence: Synthetic oligonucleotide
auuaagucgaaguucaccc

SEQ ID NO: 640733 - RNA, 19 nt, Artificial Sequence
  Description of Artificial Sequence: Synthetic oligonucleotide
aauuuuauccuggaggagc

SEQ ID NO: 640734 - RNA, 19 nt, Artificial Sequence
  Description of Artificial Sequence: Synthetic oligonucleotide
aagagaguuagacugcagc

SEQ ID NO: 640735 - RNA, 19 nt, Artificial Sequence
  Description of Artificial Sequence: Synthetic oligonucleotide
aauccgagaaccucuaggg

SEQ ID NO: 640736 - RNA, 19 nt, Artificial Sequence
  Description of Artificial Sequence: Synthetic oligonucleotide
aaaguacauagguuaagac

SEQ ID NO: 640737 - RNA, 19 nt, Artificial Sequence
  Description of Artificial Sequence: Synthetic oligonucleotide
acuacauuuggauacagag

SEQ ID NO: 640738 - RNA, 19 nt, Artificial Sequence
  Description of Artificial Sequence: Synthetic oligonucleotide
acauagaagggccagauag

SEQ ID NO: 640739 - RNA, 19 nt, Artificial Sequence
  Description of Artificial Sequence: Synthetic oligonucleotide
ucuauuaagucgaaguuca

SEQ ID NO: 640740 - RNA, 19 nt, Artificial Sequence
  Description of Artificial Sequence: Synthetic oligonucleotide
agaaguaucaaucauguau

SEQ ID NO: 640741 - RNA, 19 nt, Artificial Sequence
  Description of Artificial Sequence: Synthetic oligonucleotide
aguuauagcaccugggagg

SEQ ID NO: 640742 - RNA, 19 nt, Artificial Sequence
  Description of Artificial Sequence: Synthetic oligonucleotide
aguaauuauaaccugcucu

SEQ ID NO: 640743 - RNA, 19 nt, Artificial Sequence
  Description of Artificial Sequence: Synthetic oligonucleotide
uucguaacaaacuucaacu

SEQ ID NO: 640744 - RNA, 19 nt, Artificial Sequence
  Description of Artificial Sequence: Synthetic oligonucleotide
gauaacacaucuaugacug

SEQ ID NO: 640745 - RNA, 19 nt, Artificial Sequence
  Description of Artificial Sequence: Synthetic oligonucleotide
gaaucgaugacauaaacaa

SEQ ID NO: 640746 - RNA, 19 nt, Artificial Sequence
  Description of Artificial Sequence: Synthetic oligonucleotide
auuagcuugagacacaaau

SEQ ID NO: 640747 - RNA, 19 nt, Artificial Sequence
  Description of Artificial Sequence: Synthetic oligonucleotide
uaauccgagaaccucuagg

SEQ ID NO: 640748 - RNA, 19 nt, Artificial Sequence
  Description of Artificial Sequence: Synthetic oligonucleotide
uugguggaaauuauaaucu

SEQ ID NO: 640749 - RNA, 19 nt, Artificial Sequence
  Description of Artificial Sequence: Synthetic oligonucleotide
uggaaaaugucucuuccag

SEQ ID NO: 640750 - RNA, 19 nt, Artificial Sequence
  Description of Artificial Sequence: Synthetic oligonucleotide
ugauaguucaccgaggaug

SEQ ID NO: 640751 - RNA, 19 nt, Artificial Sequence
  Description of Artificial Sequence: Synthetic oligonucleotide
aaagaaguaucaaucaugu

SEQ ID NO: 640752 - RNA, 19 nt, Artificial Sequence
  Description of Artificial Sequence: Synthetic oligonucleotide
caagugauagcccagcggg

SEQ ID NO: 640753 - RNA, 19 nt, Artificial Sequence
  Description of Artificial Sequence: Synthetic oligonucleotide
ucauguauagacaaugcau

SEQ ID NO: 640754 - RNA, 19 nt, Artificial Sequence
  Description of Artificial Sequence: Synthetic oligonucleotide
uccacuacuggucuucugg

SEQ ID NO: 640755 - RNA, 19 nt, Artificial Sequence
  Description of Artificial Sequence: Synthetic oligonucleotide
ggaagauagacccaaacag

SEQ ID NO: 640756 - RNA, 19 nt, Artificial Sequence
  Description of Artificial Sequence: Synthetic oligonucleotide
uuaguuacaccuacuggag

SEQ ID NO: 640757 - RNA, 19 nt, Artificial Sequence
  Description of Artificial Sequence: Synthetic oligonucleotide
ucaaccgcacuuuugaggc

SEQ ID NO: 640758 - RNA, 19 nt, Artificial Sequence
  Description of Artificial Sequence: Synthetic oligonucleotide
ugcaguaauuauaaccugc

SEQ ID NO: 640759 - RNA, 19 nt, Artificial Sequence
  Description of Artificial Sequence: Synthetic oligonucleotide
ugguacaacagguaggggc

SEQ ID NO: 640760 - RNA, 19 nt, Artificial Sequence
  Description of Artificial Sequence: Synthetic oligonucleotide
ugacacuccaaauugugcc

SEQ ID NO: 640761 - RNA, 19 nt, Artificial Sequence
  Description of Artificial Sequence: Synthetic oligonucleotide
ucuaacaaggcuucuauua

SEQ ID NO: 640762 - RNA, 19 nt, Artificial Sequence
  Description of Artificial Sequence: Synthetic oligonucleotide
gugaauugccguuugaggc

SEQ ID NO: 640763 - RNA, 19 nt, Artificial Sequence
  Description of Artificial Sequence: Synthetic oligonucleotide
aaucaauauguggugguuc

SEQ ID NO: 640764 - RNA, 19 nt, Artificial Sequence
  Description of Artificial Sequence: Synthetic oligonucleotide
acuacuggucuucuggaac

SEQ ID NO: 640765 - RNA, 19 nt, Artificial Sequence
  Description of Artificial Sequence: Synthetic oligonucleotide
gacuuaaaggccaagcuug

SEQ ID NO: 640766 - RNA, 19 nt, Artificial Sequence
  Description of Artificial Sequence: Synthetic oligonucleotide
aaguaucaaucauguauag

SEQ ID NO: 640767 - RNA, 19 nt, Artificial Sequence
  Description of Artificial Sequence: Synthetic oligonucleotide
acagcgaaguuccuuuacc

SEQ ID NO: 640768 - RNA, 19 nt, Artificial Sequence
  Description of Artificial Sequence: Synthetic oligonucleotide
auaugcacauagaagggcc

SEQ ID NO: 640769 - RNA, 19 nt, Artificial Sequence
  Description of Artificial Sequence: Synthetic oligonucleotide
caauaguucagugaauugc

SEQ ID NO: 640770 - RNA, 19 nt, Artificial Sequence
  Description of Artificial Sequence: Synthetic oligonucleotide
ucuaugacugcgccuauug

SEQ ID NO: 640771 - RNA, 19 nt, Artificial Sequence
  Description of Artificial Sequence: Synthetic oligonucleotide
ucagacaauaguucaguga

SEQ ID NO: 640772 - RNA, 19 nt, Artificial Sequence
  Description of Artificial Sequence: Synthetic oligonucleotide
caagcuugcagcaauggug

SEQ ID NO: 640773 - RNA, 19 nt, Artificial Sequence
  Description of Artificial Sequence: Synthetic oligonucleotide
uucaguccgagguagaagu

SEQ ID NO: 640774 - RNA, 19 nt, Artificial Sequence
  Description of Artificial Sequence: Synthetic oligonucleotide
  modified_base (5)..(5): a, c, u, g, unknown or other
aaacnacaaguuauagcac

SEQ ID NO: 640775 - RNA, 19 nt, Artificial Sequence
  Description of Artificial Sequence: Synthetic oligonucleotide
ugguucaaugagccgagcg

SEQ ID NO: 640776 - RNA, 19 nt, Artificial Sequence
  Description of Artificial Sequence: Synthetic oligonucleotide
uauuaagucgaaguucacc

SEQ ID NO: 640777 - RNA, 19 nt, Artificial Sequence
  Description of Artificial Sequence: Synthetic oligonucleotide
aagauagacccaaacagca

SEQ ID NO: 640778 - RNA, 19 nt, Artificial Sequence
  Description of Artificial Sequence: Synthetic oligonucleotide
guaacaaacuucaacucag

SEQ ID NO: 640779 - RNA, 19 nt, Artificial Sequence
  Description of Artificial Sequence: Synthetic oligonucleotide
uucucaugguacaacaggu

SEQ ID NO: 640780 - RNA, 19 nt, Artificial Sequence
  Description of Artificial Sequence: Synthetic oligonucleotide
aaggcuucuauuaagucga

SEQ ID NO: 640781 - RNA, 19 nt, Artificial Sequence
  Description of Artificial Sequence: Synthetic oligonucleotide
uuuuaucccagggagacac

SEQ ID NO: 640782 - RNA, 19 nt, Artificial Sequence
  Description of Artificial Sequence: Synthetic oligonucleotide
uuaugagagcuaaacauuu

SEQ ID NO: 640783 - RNA, 19 nt, Artificial Sequence
  Description of Artificial Sequence: Synthetic oligonucleotide
agaugagugaagaggaugg

SEQ ID NO: 640784 - RNA, 19 nt, Artificial Sequence
  Description of Artificial Sequence: Synthetic oligonucleotide
aaucgaugacauaaacaac

SEQ ID NO: 640785 - RNA, 19 nt, Artificial Sequence
  Description of Artificial Sequence: Synthetic oligonucleotide
uugguacagucacaaagag

SEQ ID NO: 640786 - RNA, 19 nt, Artificial Sequence
  Description of Artificial Sequence: Synthetic oligonucleotide
caaucaugcugauaauccg

SEQ ID NO: 640787 - RNA, 19 nt, Artificial Sequence
  Description of Artificial Sequence: Synthetic oligonucleotide
ugcugauaauccgagaacc

SEQ ID NO: 640788 - RNA, 19 nt, Artificial Sequence
  Description of Artificial Sequence: Synthetic oligonucleotide
acgaagagaaucaauaugu

SEQ ID NO: 640789 - RNA, 19 nt, Artificial Sequence
  Description of Artificial Sequence: Synthetic oligonucleotide
ucgaaguucacccuuucaa

SEQ ID NO: 640790 - RNA, 19 nt, Artificial Sequence
  Description of Artificial Sequence: Synthetic oligonucleotide
ugaaugugcacguauccgu

SEQ ID NO: 640791 - RNA, 19 nt, Artificial Sequence
  Description of Artificial Sequence: Synthetic oligonucleotide
cuucguaacaaacuucaac

SEQ ID NO: 640792 - RNA, 19 nt, Artificial Sequence
  Description of Artificial Sequence: Synthetic oligonucleotide
uaccaaacguggaaaaugu

SEQ ID NO: 640793 - RNA, 19 nt, Artificial Sequence
  Description of Artificial Sequence: Synthetic oligonucleotide
uccgagaaccucuagggca

SEQ ID NO: 640794 - RNA, 19 nt, Artificial Sequence
  Description of Artificial Sequence: Synthetic oligonucleotide
acaaauggaagcagacucc

SEQ ID NO: 640795 - RNA, 19 nt, Artificial Sequence
  Description of Artificial Sequence: Synthetic oligonucleotide
gagaaucaauauguggugg

SEQ ID NO: 640796 - RNA, 19 nt, Artificial Sequence
  Description of Artificial Sequence: Synthetic oligonucleotide
cuugcagcaauggugagag

SEQ ID NO: 640797 - RNA, 19 nt, Artificial Sequence
  Description of Artificial Sequence: Synthetic oligonucleotide
gaccugauaguucaccgag

SEQ ID NO: 640798 - RNA, 19 nt, Artificial Sequence
  Description of Artificial Sequence: Synthetic oligonucleotide
uaaacacucggcuaguuuu

SEQ ID NO: 640799 - RNA, 19 nt, Artificial Sequence
  Description of Artificial Sequence: Synthetic oligonucleotide
ucucggauaaacacucggc

SEQ ID NO: 640800 - RNA, 19 nt, Artificial Sequence
  Description of Artificial Sequence: Synthetic oligonucleotide
aucuugauuucugcuagcc

SEQ ID NO: 640801 - RNA, 19 nt, Artificial Sequence
  Description of Artificial Sequence: Synthetic oligonucleotide
ugacauaaacaacaucauc

SEQ ID NO: 640802 - RNA, 19 nt, Artificial Sequence
  Description of Artificial Sequence: Synthetic oligonucleotide
cuaucugaugggaagcagc

SEQ ID NO: 640803 - RNA, 19 nt, Artificial Sequence
  Description of Artificial Sequence: Synthetic oligonucleotide
auagcuguuccaauggcac

SEQ ID NO: 640804 - RNA, 19 nt, Artificial Sequence
  Description of Artificial Sequence: Synthetic oligonucleotide
uaauuauaaccugcucucg

SEQ ID NO: 640805 - RNA, 19 nt, Artificial Sequence
  Description of Artificial Sequence: Synthetic oligonucleotide
agagaguuagacugcagcu

SEQ ID NO: 640806 - RNA, 19 nt, Artificial Sequence
  Description of Artificial Sequence: Synthetic oligonucleotide
aauugugccgggagugucc

SEQ ID NO: 640807 - RNA, 19 nt, Artificial Sequence
  Description of Artificial Sequence: Synthetic oligonucleotide
uucggcugcagucugacaa

SEQ ID NO: 640808 - RNA, 19 nt, Artificial Sequence
  Description of Artificial Sequence: Synthetic oligonucleotide
aaagaggcaagcuggguuu

SEQ ID NO: 640809 - RNA, 19 nt, Artificial Sequence
  Description of Artificial Sequence: Synthetic oligonucleotide
auuauaaccugcucucgca

SEQ ID NO: 640810 - RNA, 19 nt, Artificial Sequence
  Description of Artificial Sequence: Synthetic oligonucleotide
cugcacuacauuuggauac

SEQ ID NO: 640811 - RNA, 19 nt, Artificial Sequence
  Description of Artificial Sequence: Synthetic oligonucleotide
cucaaccgcacuuuugagg

SEQ ID NO: 640812 - RNA, 19 nt, Artificial Sequence
  Description of Artificial Sequence: Synthetic oligonucleotide
aguuaaggcucccaagucu

SEQ ID NO: 640813 - RNA, 19 nt, Artificial Sequence
  Description of Artificial Sequence: Synthetic oligonucleotide
aucaauauguggugguuca

SEQ ID NO: 640814 - RNA, 19 nt, Artificial Sequence
  Description of Artificial Sequence: Synthetic oligonucleotide
uuauggagcucucagcaau

SEQ ID NO: 640815 - RNA, 19 nt, Artificial Sequence
  Description of Artificial Sequence: Synthetic oligonucleotide
guauagacaaugcauaaua

SEQ ID NO: 640816 - RNA, 19 nt, Artificial Sequence
  Description of Artificial Sequence: Synthetic oligonucleotide
caaucauguauagacaaug

SEQ ID NO: 640817 - RNA, 19 nt, Artificial Sequence
  Description of Artificial Sequence: Synthetic oligonucleotide
agucuuacuguguggugac

SEQ ID NO: 640818 - RNA, 19 nt, Artificial Sequence
  Description of Artificial Sequence: Synthetic oligonucleotide
ugaauugccguuugaggcu

SEQ ID NO: 640819 - RNA, 19 nt, Artificial Sequence
  Description of Artificial Sequence: Synthetic oligonucleotide
uucuauuaagucgaaguuc

SEQ ID NO: 640820 - RNA, 19 nt, Artificial Sequence
  Description of Artificial Sequence: Synthetic oligonucleotide
auccaaggagaccacgaac

SEQ ID NO: 640821 - RNA, 19 nt, Artificial Sequence
  Description of Artificial Sequence: Synthetic oligonucleotide
aaaagagaguuagacugca

SEQ ID NO: 640822 - RNA, 19 nt, Artificial Sequence
  Description of Artificial Sequence: Synthetic oligonucleotide
accucuagggcacguacac

SEQ ID NO: 640823 - RNA, 19 nt, Artificial Sequence
  Description of Artificial Sequence: Synthetic oligonucleotide
cuaugucagacaauaguuc

SEQ ID NO: 640824 - RNA, 19 nt, Artificial Sequence
  Description of Artificial Sequence: Synthetic oligonucleotide
agagcauuagcuugagaca

SEQ ID NO: 640825 - RNA, 19 nt, Artificial Sequence
  Description of Artificial Sequence: Synthetic oligonucleotide
auuggagauuaugagagcu

SEQ ID NO: 640826 - RNA, 19 nt, Artificial Sequence
  Description of Artificial Sequence: Synthetic oligonucleotide
agagcuaaacauuucuaaa

SEQ ID NO: 640827 - RNA, 19 nt, Artificial Sequence
  Description of Artificial Sequence: Synthetic oligonucleotide
agcucgaccuuuucucugc

SEQ ID NO: 640828 - RNA, 19 nt, Artificial Sequence
  Description of Artificial Sequence: Synthetic oligonucleotide
uugugaacaaauggaagca

SEQ ID NO: 640829 - RNA, 19 nt, Artificial Sequence
  Description of Artificial Sequence: Synthetic oligonucleotide
cacgaagagaaucaauaug

SEQ ID NO: 640830 - RNA, 19 nt, Artificial Sequence
  Description of Artificial Sequence: Synthetic oligonucleotide
auaccaaacguggaaaaug

SEQ ID NO: 640831 - RNA, 19 nt, Artificial Sequence
  Description of Artificial Sequence: Synthetic oligonucleotide
cuuuaagagcugauggcug

SEQ ID NO: 640832 - RNA, 19 nt, Artificial Sequence
  Description of Artificial Sequence: Synthetic oligonucleotide
cauucaguuugguacaguc

SEQ ID NO: 640833 - RNA, 19 nt, Artificial Sequence
  Description of Artificial Sequence: Synthetic oligonucleotide
aaucaugcugauaauccga

SEQ ID NO: 640834 - RNA, 19 nt, Artificial Sequence
  Description of Artificial Sequence: Synthetic oligonucleotide
uuuuguacucagcugccaa

SEQ ID NO: 640835 - RNA, 19 nt, Artificial Sequence
  Description of Artificial Sequence: Synthetic oligonucleotide
aaccgcacuuuugaggcac

SEQ ID NO: 640836 - RNA, 19 nt, Artificial Sequence
  Description of Artificial Sequence: Synthetic oligonucleotide
uuauaaccugcucucgcac

SEQ ID NO: 640837 - RNA, 19 nt, Artificial Sequence
  Description of Artificial Sequence: Synthetic oligonucleotide
ucgaccuuuucucugcaga

SEQ ID NO: 640838 - RNA, 19 nt, Artificial Sequence
  Description of Artificial Sequence: Synthetic oligonucleotide
auccgagaaccucuagggc

SEQ ID NO: 640839 - RNA, 19 nt, Artificial Sequence
  Description of Artificial Sequence: Synthetic oligonucleotide
acacaaauguguccucuag

SEQ ID NO: 640840 - RNA, 19 nt, Artificial Sequence
  Description of Artificial Sequence: Synthetic oligonucleotide
uacaaaccggauccaacca

SEQ ID NO: 640841 - RNA, 19 nt, Artificial Sequence
  Description of Artificial Sequence: Synthetic oligonucleotide
aaccaagcauuucuccuca

SEQ ID NO: 640842 - RNA, 19 nt, Artificial Sequence
  Description of Artificial Sequence: Synthetic oligonucleotide
aaauugugccgggaguguc

SEQ ID NO: 640843 - RNA, 19 nt, Artificial Sequence
  Description of Artificial Sequence: Synthetic oligonucleotide
agcaucaguuugccgauuc

SEQ ID NO: 640844 - RNA, 19 nt, Artificial Sequence
  Description of Artificial Sequence: Synthetic oligonucleotide
aaugugcacguauccguca

SEQ ID NO: 640845 - RNA, 19 nt, Artificial Sequence
  Description of Artificial Sequence: Synthetic oligonucleotide
gaaguaucaaucauguaua

SEQ ID NO: 640846 - RNA, 19 nt, Artificial Sequence
  Description of Artificial Sequence: Synthetic oligonucleotide
caauccacucuaacaaggc

SEQ ID NO: 640847 - RNA, 19 nt, Artificial Sequence
  Description of Artificial Sequence: Synthetic oligonucleotide
uuuggacuguccuaccacu

SEQ ID NO: 640848 - RNA, 19 nt, Artificial Sequence
  Description of Artificial Sequence: Synthetic oligonucleotide
gucucggauaaacacucgg

SEQ ID NO: 640849 - RNA, 19 nt, Artificial Sequence
  Description of Artificial Sequence: Synthetic oligonucleotide
uaugacugcgccuauuguu

SEQ ID NO: 640850 - RNA, 19 nt, Artificial Sequence
  Description of Artificial Sequence: Synthetic oligonucleotide
aacccuaugucagacaaua

SEQ ID NO: 640851 - RNA, 19 nt, Artificial Sequence
  Description of Artificial Sequence: Synthetic oligonucleotide
agcgaaguuccuuuaccag

SEQ ID NO: 640852 - RNA, 19 nt, Artificial Sequence
  Description of Artificial Sequence: Synthetic oligonucleotide
uaugcacauagaagggcca

SEQ ID NO: 640853 - RNA, 19 nt, Artificial Sequence
  Description of Artificial Sequence: Synthetic oligonucleotide
ucaaucauguauagacaau

SEQ ID NO: 640854 - RNA, 19 nt, Artificial Sequence
  Description of Artificial Sequence: Synthetic oligonucleotide
uccaaauugugccgggagu

SEQ ID NO: 640855 - RNA, 19 nt, Artificial Sequence
  Description of Artificial Sequence: Synthetic oligonucleotide
agcgaacacagauuggaga

SEQ ID NO: 640856 - RNA, 19 nt, Artificial Sequence
  Description of Artificial Sequence: Synthetic oligonucleotide
gagagccggguccagacag

SEQ ID NO: 640857 - RNA, 19 nt, Artificial Sequence
  Description of Artificial Sequence: Synthetic oligonucleotide
uggugguucaaugagccga

SEQ ID NO: 640858 - RNA, 19 nt, Artificial Sequence
  Description of Artificial Sequence: Synthetic oligonucleotide
acaacuccacuacuggucu

SEQ ID NO: 640859 - RNA, 19 nt, Artificial Sequence
  Description of Artificial Sequence: Synthetic oligonucleotide
uccacucuaacaaggcuuc

SEQ ID NO: 640860 - RNA, 19 nt, Artificial Sequence
  Description of Artificial Sequence: Synthetic oligonucleotide
agaaucgaugacauaaaca

SEQ ID NO: 640861 - RNA, 19 nt, Artificial Sequence
  Description of Artificial Sequence: Synthetic oligonucleotide
ucuagggcacguacacagg

SEQ ID NO: 640862 - RNA, 19 nt, Artificial Sequence
  Description of Artificial Sequence: Synthetic oligonucleotide
gauuggagauuaugagagc

SEQ ID NO: 640863 - RNA, 19 nt, Artificial Sequence
  Description of Artificial Sequence: Synthetic oligonucleotide
gguauuugcugcuuuaaga

SEQ ID NO: 640864 - RNA, 19 nt, Artificial Sequence
  Description of Artificial Sequence: Synthetic oligonucleotide
ucguaacaaacuucaacuc

SEQ ID NO: 640865 - RNA, 19 nt, Artificial Sequence
  Description of Artificial Sequence: Synthetic oligonucleotide
aggugaauuucauucaguu

SEQ ID NO: 640866 - RNA, 19 nt, Artificial Sequence
  Description of Artificial Sequence: Synthetic oligonucleotide
acguauccgucauucuucg

SEQ ID NO: 640867 - RNA, 19 nt, Artificial Sequence
  Description of Artificial Sequence: Synthetic oligonucleotide
cucacauccacuggcagag

SEQ ID NO: 640868 - RNA, 19 nt, Artificial Sequence
  Description of Artificial Sequence: Synthetic oligonucleotide
uuaagucgaaguucacccu

SEQ ID NO: 640869 - RNA, 19 nt, Artificial Sequence
  Description of Artificial Sequence: Synthetic oligonucleotide
uuuguacucagcugccaac

SEQ ID NO: 640870 - RNA, 19 nt, Artificial Sequence
  Description of Artificial Sequence: Synthetic oligonucleotide
uccgucauucuucguaaca

SEQ ID NO: 640871 - RNA, 19 nt, Artificial Sequence
  Description of Artificial Sequence: Synthetic oligonucleotide
aguuugccgauucucacau

SEQ ID NO: 640872 - RNA, 19 nt, Artificial Sequence
  Description of Artificial Sequence: Synthetic oligonucleotide
aguuaugaggugaauuuca

SEQ ID NO: 640873 - RNA, 19 nt, Artificial Sequence
  Description of Artificial Sequence: Synthetic oligonucleotide
gugaaugugcacguauccg

SEQ ID NO: 640874 - RNA, 19 nt, Artificial Sequence
  Description of Artificial Sequence: Synthetic oligonucleotide
ucucacauccacuggcaga

SEQ ID NO: 640875 - RNA, 19 nt, Artificial Sequence
  Description of Artificial Sequence: Synthetic oligonucleotide
ucaguuugccgauucucac

SEQ ID NO: 640876 - RNA, 19 nt, Artificial Sequence
  Description of Artificial Sequence: Synthetic oligonucleotide
uauaaccugcucucgcacu

SEQ ID NO: 640877 - RNA, 19 nt, Artificial Sequence
  Description of Artificial Sequence: Synthetic oligonucleotide
cagauuggagauuaugaga

SEQ ID NO: 640878 - RNA, 19 nt, Artificial Sequence
  Description of Artificial Sequence: Synthetic oligonucleotide
gagaguuagacugcagcug

SEQ ID NO: 640879 - RNA, 19 nt, Artificial Sequence
  Description of Artificial Sequence: Synthetic oligonucleotide
uauccgucauucuucguaa

SEQ ID NO: 640880 - RNA, 19 nt, Artificial Sequence
  Description of Artificial Sequence: Synthetic oligonucleotide
caugcugauaauccgagaa

SEQ ID NO: 640881 - RNA, 19 nt, Artificial Sequence
  Description of Artificial Sequence: Synthetic oligonucleotide
auagguuaagacagaaacu

SEQ ID NO: 640882 - RNA, 19 nt, Artificial Sequence
  Description of Artificial Sequence: Synthetic oligonucleotide
uguauagacaaugcauaau

SEQ ID NO: 640883 - RNA, 19 nt, Artificial Sequence
  Description of Artificial Sequence: Synthetic oligonucleotide
uggagauuaugagagcuaa

SEQ ID NO: 640884 - RNA, 19 nt, Artificial Sequence
  Description of Artificial Sequence: Synthetic oligonucleotide
cuuacuguguggugacaag

SEQ ID NO: 640885 - RNA, 19 nt, Artificial Sequence
  Description of Artificial Sequence: Synthetic oligonucleotide
cagaaucgaugacauaaac

SEQ ID NO: 640886 - RNA, 19 nt, Artificial Sequence
  Description of Artificial Sequence: Synthetic oligonucleotide
gaacuuuccuucugggguc

SEQ ID NO: 640887 - RNA, 19 nt, Artificial Sequence
  Description of Artificial Sequence: Synthetic oligonucleotide
cacguauccgucauucuuc

SEQ ID NO: 640888 - RNA, 19 nt, Artificial Sequence
  Description of Artificial Sequence: Synthetic oligonucleotide
ugaccugauaguucaccga

SEQ ID NO: 640889 - RNA, 19 nt, Artificial Sequence
  Description of Artificial Sequence: Synthetic oligonucleotide
ucucaaccgcacuuuugag

SEQ ID NO: 640890 - RNA, 19 nt, Artificial Sequence
  Description of Artificial Sequence: Synthetic oligonucleotide
acucggcuaguuuugauuu

SEQ ID NO: 640891 - RNA, 19 nt, Artificial Sequence
  Description of Artificial Sequence: Synthetic oligonucleotide
gaaccucuagggcacguac

SEQ ID NO: 640892 - RNA, 19 nt, Artificial Sequence
  Description of Artificial Sequence: Synthetic oligonucleotide
auugugccgggaguguccc

SEQ ID NO: 640893 - RNA, 19 nt, Artificial Sequence
  Description of Artificial Sequence: Synthetic oligonucleotide
ucggauaaacacucggcua

SEQ ID NO: 640894 - RNA, 19 nt, Artificial Sequence
  Description of Artificial Sequence: Synthetic oligonucleotide
ugcaacacggccagcucga

SEQ ID NO: 640895 - RNA, 19 nt, Artificial Sequence
  Description of Artificial Sequence: Synthetic oligonucleotide
ugccgauucucacauccac

SEQ ID NO: 640896 - RNA, 19 nt, Artificial Sequence
  Description of Artificial Sequence: Synthetic oligonucleotide
cuguguggugacaagcuuc

SEQ ID NO: 640897 - RNA, 19 nt, Artificial Sequence
  Description of Artificial Sequence: Synthetic oligonucleotide
ggugaaugugcacguaucc

SEQ ID NO: 640898 - RNA, 19 nt, Artificial Sequence
  Description of Artificial Sequence: Synthetic oligonucleotide
uacauagguuaagacagaa

SEQ ID NO: 640899 - RNA, 19 nt, Artificial Sequence
  Description of Artificial Sequence: Synthetic oligonucleotide
cacguacacagguccaugc

SEQ ID NO: 640900 - RNA, 19 nt, Artificial Sequence
  Description of Artificial Sequence: Synthetic oligonucleotide
ucagcugccaacccuuaua

SEQ ID NO: 640901 - RNA, 19 nt, Artificial Sequence
  Description of Artificial Sequence: Synthetic oligonucleotide
aaacacucggcuaguuuug

SEQ ID NO: 640902 - RNA, 19 nt, Artificial Sequence
  Description of Artificial Sequence: Synthetic oligonucleotide
aacgcuccccucugaagcu

SEQ ID NO: 640903 - RNA, 19 nt, Artificial Sequence
  Description of Artificial Sequence: Synthetic oligonucleotide
aguaucaaucauguauaga

SEQ ID NO: 640904 - RNA, 19 nt, Artificial Sequence
  Description of Artificial Sequence: Synthetic oligonucleotide
acaucuaugacugcgccua

SEQ ID NO: 640905 - RNA, 19 nt, Artificial Sequence
  Description of Artificial Sequence: Synthetic oligonucleotide
auaauccgagaaccucuag

SEQ ID NO: 640906 - RNA, 19 nt, Artificial Sequence
  Description of Artificial Sequence: Synthetic oligonucleotide
ugggugaaugugcacguau

SEQ ID NO: 640907 - RNA, 19 nt, Artificial Sequence
  Description of Artificial Sequence: Synthetic oligonucleotide
uuucugcuagccccgguaa

SEQ ID NO: 640908 - RNA, 19 nt, Artificial Sequence
  Description of Artificial Sequence: Synthetic oligonucleotide
cuccaaauugugccgggag

SEQ ID NO: 640909 - RNA, 19 nt, Artificial Sequence
  Description of Artificial Sequence: Synthetic oligonucleotide
gaguuaaggcucccaaguc

SEQ ID NO: 640910 - RNA, 19 nt, Artificial Sequence
  Description of Artificial Sequence: Synthetic oligonucleotide
uuggagauuaugagagcua

SEQ ID NO: 640911 - RNA, 19 nt, Artificial Sequence
  Description of Artificial Sequence: Synthetic oligonucleotide
augacugcgccuauuguug

SEQ ID NO: 640912 - RNA, 19 nt, Artificial Sequence
  Description of Artificial Sequence: Synthetic oligonucleotide
aagugauagcccagcgggg

SEQ ID NO: 640913 - RNA, 19 nt, Artificial Sequence
  Description of Artificial Sequence: Synthetic oligonucleotide
caaaccggauccaaccauc

SEQ ID NO: 640914 - RNA, 19 nt, Artificial Sequence
  Description of Artificial Sequence: Synthetic oligonucleotide
cacuuuugaggcacgaaga

SEQ ID NO: 640915 - RNA, 19 nt, Artificial Sequence
  Description of Artificial Sequence: Synthetic oligonucleotide
uauagcaccugggagggua

SEQ ID NO: 640916 - RNA, 19 nt, Artificial Sequence
  Description of Artificial Sequence: Synthetic oligonucleotide
cuuuugaguuaugagguga

SEQ ID NO: 640917 - RNA, 19 nt, Artificial Sequence
  Description of Artificial Sequence: Synthetic oligonucleotide
ugacaagcuucacaaucau

SEQ ID NO: 640918 - RNA, 19 nt, Artificial Sequence
  Description of Artificial Sequence: Synthetic oligonucleotide
aaucuuaguuacaccuacu

SEQ ID NO: 640919 - RNA, 19 nt, Artificial Sequence
  Description of Artificial Sequence: Synthetic oligonucleotide
  modified_base (3)..(3): a, c, u, g, unknown or other
acnacaaguuauagcaccu

SEQ ID NO: 640920 - RNA, 19 nt, Artificial Sequence
  Description of Artificial Sequence: Synthetic oligonucleotide
acacuccaaauugugccgg

SEQ ID NO: 640921 - RNA, 19 nt, Artificial Sequence
  Description of Artificial Sequence: Synthetic oligonucleotide
cucucaaccgcacuuuuga

SEQ ID NO: 640922 - RNA, 19 nt, Artificial Sequence
  Description of Artificial Sequence: Synthetic oligonucleotide
acauucacuuuugaguuau

SEQ ID NO: 640923 - RNA, 19 nt, Artificial Sequence
  Description of Artificial Sequence: Synthetic oligonucleotide
accuacuggagguuuuaca

SEQ ID NO: 640924 - RNA, 19 nt, Artificial Sequence
  Description of Artificial Sequence: Synthetic oligonucleotide
cugcaguaauuauaaccug

SEQ ID NO: 640925 - RNA, 19 nt, Artificial Sequence
  Description of Artificial Sequence: Synthetic oligonucleotide
acaaaccggauccaaccau

SEQ ID NO: 640926 - RNA, 19 nt, Artificial Sequence
  Description of Artificial Sequence: Synthetic oligonucleotide
guauccgucauucuucgua

SEQ ID NO: 640927 - RNA, 19 nt, Artificial Sequence
  Description of Artificial Sequence: Synthetic oligonucleotide
ucaguccgagguagaagug

SEQ ID NO: 640928 - RNA, 19 nt, Artificial Sequence
  Description of Artificial Sequence: Synthetic oligonucleotide
aacuucaacucagcugacu

SEQ ID NO: 640929 - RNA, 19 nt, Artificial Sequence
  Description of Artificial Sequence: Synthetic oligonucleotide
gcuucuauuaagucgaagu

SEQ ID NO: 640930 - RNA, 19 nt, Artificial Sequence
  Description of Artificial Sequence: Synthetic oligonucleotide
gaguuaugaggugaauuuc

SEQ ID NO: 640931 - RNA, 19 nt, Artificial Sequence
  Description of Artificial Sequence: Synthetic oligonucleotide
gagguuuuacaaacaccgc

SEQ ID NO: 640932 - RNA, 19 nt, Artificial Sequence
  Description of Artificial Sequence: Synthetic oligonucleotide
aauuucccuugcucugaga

SEQ ID NO: 640933 - RNA, 19 nt, Artificial Sequence
  Description of Artificial Sequence: Synthetic oligonucleotide
aggaugggugaaugugcac

SEQ ID NO: 640934 - RNA, 19 nt, Artificial Sequence
  Description of Artificial Sequence: Synthetic oligonucleotide
gagaccacgaacgcucccc

SEQ ID NO: 640935 - RNA, 19 nt, Artificial Sequence
  Description of Artificial Sequence: Synthetic oligonucleotide
ggggaaagaaguaucaauc

SEQ ID NO: 640936 - RNA, 19 nt, Artificial Sequence
  Description of Artificial Sequence: Synthetic oligonucleotide
uuaaggcucccaagucucu

SEQ ID NO: 640937 - RNA, 19 nt, Artificial Sequence
  Description of Artificial Sequence: Synthetic oligonucleotide
guuaaggcucccaagucuc

SEQ ID NO: 640938 - RNA, 19 nt, Artificial Sequence
  Description of Artificial Sequence: Synthetic oligonucleotide
aaacuucaacucagcugac

SEQ ID NO: 640939 - RNA, 19 nt, Artificial Sequence
  Description of Artificial Sequence: Synthetic oligonucleotide
gaacacagauuggagauua

SEQ ID NO: 640940 - RNA, 19 nt, Artificial Sequence
  Description of Artificial Sequence: Synthetic oligonucleotide
auuucugcuagccccggua

SEQ ID NO: 640941 - RNA, 19 nt, Artificial Sequence
  Description of Artificial Sequence: Synthetic oligonucleotide
agacagcggaagauagacc

SEQ ID NO: 640942 - RNA, 19 nt, Artificial Sequence
  Description of Artificial Sequence: Synthetic oligonucleotide
aucaguuugccgauucuca

SEQ ID NO: 640943 - RNA, 19 nt, Artificial Sequence
  Description of Artificial Sequence: Synthetic oligonucleotide
ugguggaaauuauaaucuu

SEQ ID NO: 640944 - RNA, 19 nt, Artificial Sequence
  Description of Artificial Sequence: Synthetic oligonucleotide
ugcacuacauuuggauaca

SEQ ID NO: 640945 - RNA, 19 nt, Artificial Sequence
  Description of Artificial Sequence: Synthetic oligonucleotide
ucaaauugucugaccugau

SEQ ID NO: 640946 - RNA, 19 nt, Artificial Sequence
  Description of Artificial Sequence: Synthetic oligonucleotide
uccaaccaucauccaagga

SEQ ID NO: 640947 - RNA, 19 nt, Artificial Sequence
  Description of Artificial Sequence: Synthetic oligonucleotide
auccgucauucuucguaac

SEQ ID NO: 640948 - RNA, 19 nt, Artificial Sequence
  Description of Artificial Sequence: Synthetic oligonucleotide
aaacaccgccugcugcucu

SEQ ID NO: 640949 - RNA, 19 nt, Artificial Sequence
  Description of Artificial Sequence: Synthetic oligonucleotide
gguucaaugagccgagcga

SEQ ID NO: 640950 - RNA, 19 nt, Artificial Sequence
  Description of Artificial Sequence: Synthetic oligonucleotide
agugauagcccagcggggu

SEQ ID NO: 640951 - RNA, 19 nt, Artificial Sequence
  Description of Artificial Sequence: Synthetic oligonucleotide
aaaccggauccaaccauca

SEQ ID NO: 640952 - RNA, 19 nt, Artificial Sequence
  Description of Artificial Sequence: Synthetic oligonucleotide
agcggggucagcuuuucau

SEQ ID NO: 640953 - RNA, 19 nt, Artificial Sequence
  Description of Artificial Sequence: Synthetic oligonucleotide
caguaauuauaaccugcuc

SEQ ID NO: 640954 - RNA, 19 nt, Artificial Sequence
  Description of Artificial Sequence: Synthetic oligonucleotide
ugacuucggcugcagucug

SEQ ID NO: 640955 - RNA, 19 nt, Artificial Sequence
  Description of Artificial Sequence: Synthetic oligonucleotide
auucaguuugguacaguca

SEQ ID NO: 640956 - RNA, 19 nt, Artificial Sequence
  Description of Artificial Sequence: Synthetic oligonucleotide
auggcacucuuuguauuuc

SEQ ID NO: 640957 - RNA, 19 nt, Artificial Sequence
  Description of Artificial Sequence: Synthetic oligonucleotide
ucggcuaguuuugauuuuc

SEQ ID NO: 640958 - RNA, 19 nt, Artificial Sequence
  Description of Artificial Sequence: Synthetic oligonucleotide
uugccgauucucacaucca

SEQ ID NO: 640959 - RNA, 19 nt, Artificial Sequence
  Description of Artificial Sequence: Synthetic oligonucleotide
ggauaacacaucuaugacu

SEQ ID NO: 640960 - RNA, 19 nt, Artificial Sequence
  Description of Artificial Sequence: Synthetic oligonucleotide
uggguuuuggacuguccua

SEQ ID NO: 640961 - RNA, 19 nt, Artificial Sequence
  Description of Artificial Sequence: Synthetic oligonucleotide
acguacacagguccaugcu

SEQ ID NO: 640962 - RNA, 19 nt, Artificial Sequence
  Description of Artificial Sequence: Synthetic oligonucleotide
uggcacucuuuguauuucu

SEQ ID NO: 640963 - RNA, 19 nt, Artificial Sequence
  Description of Artificial Sequence: Synthetic oligonucleotide
caucaguuugccgauucuc

SEQ ID NO: 640964 - RNA, 19 nt, Artificial Sequence
  Description of Artificial Sequence: Synthetic oligonucleotide
auaaucuuaguuacaccua

SEQ ID NO: 640965 - RNA, 19 nt, Artificial Sequence
  Description of Artificial Sequence: Synthetic oligonucleotide
auugccguuugaggcuagc

SEQ ID NO: 640966 - RNA, 19 nt, Artificial Sequence
  Description of Artificial Sequence: Synthetic oligonucleotide
cuucaguccgagguagaag

SEQ ID NO: 640967 - RNA, 19 nt, Artificial Sequence
  Description of Artificial Sequence: Synthetic oligonucleotide
ugugccgggagugucccca

SEQ ID NO: 640968 - RNA, 19 nt, Artificial Sequence
  Description of Artificial Sequence: Synthetic oligonucleotide
ggauggauaacacaucuau

SEQ ID NO: 640969 - RNA, 19 nt, Artificial Sequence
  Description of Artificial Sequence: Synthetic oligonucleotide
cacuccaaauugugccggg

SEQ ID NO: 640970 - RNA, 19 nt, Artificial Sequence
  Description of Artificial Sequence: Synthetic oligonucleotide
aacacucggcuaguuuuga

SEQ ID NO: 640971 - RNA, 19 nt, Artificial Sequence
  Description of Artificial Sequence: Synthetic oligonucleotide
cagucugacaacuccacua

SEQ ID NO: 640972 - RNA, 19 nt, Artificial Sequence
  Description of Artificial Sequence: Synthetic oligonucleotide
  modified_base (2)..(2): a, c, u, g, unknown or other
cnacaaguuauagcaccug

SEQ ID NO: 640973 - RNA, 19 nt, Artificial Sequence
  Description of Artificial Sequence: Synthetic oligonucleotide
ugagagccggguccagaca

SEQ ID NO: 640974 - RNA, 19 nt, Artificial Sequence
  Description of Artificial Sequence: Synthetic oligonucleotide
aucaaugguuauggagcuc

SEQ ID NO: 640975 - RNA, 19 nt, Artificial Sequence
  Description of Artificial Sequence: Synthetic oligonucleotide
guucaaugagccgagcgaa

SEQ ID NO: 640976 - RNA, 19 nt, Artificial Sequence
  Description of Artificial Sequence: Synthetic oligonucleotide
uuugaguuaugaggugaau

SEQ ID NO: 640977 - RNA, 19 nt, Artificial Sequence
  Description of Artificial Sequence: Synthetic oligonucleotide
cacagcgaaguuccuuuac

SEQ ID NO: 640978 - RNA, 19 nt, Artificial Sequence
  Description of Artificial Sequence: Synthetic oligonucleotide
cagcgaaguuccuuuacca

SEQ ID NO: 640979 - RNA, 19 nt, Artificial Sequence
  Description of Artificial Sequence: Synthetic oligonucleotide
accaaacguggaaaauguc

SEQ ID NO: 640980 - RNA, 19 nt, Artificial Sequence
  Description of Artificial Sequence: Synthetic oligonucleotide
aaccggauccaaccaucau

SEQ ID NO: 640981 - RNA, 19 nt, Artificial Sequence
  Description of Artificial Sequence: Synthetic oligonucleotide
aacuuuccuucuggggucu

SEQ ID NO: 640982 - RNA, 19 nt, Artificial Sequence
  Description of Artificial Sequence: Synthetic oligonucleotide
ccaagugauagcccagcgg

SEQ ID NO: 640983 - RNA, 19 nt, Artificial Sequence
  Description of Artificial Sequence: Synthetic oligonucleotide
ggaguuaaggcucccaagu

SEQ ID NO: 640984 - RNA, 19 nt, Artificial Sequence
  Description of Artificial Sequence: Synthetic oligonucleotide
uagggcacguacacagguc

SEQ ID NO: 640985 - RNA, 19 nt, Artificial Sequence
  Description of Artificial Sequence: Synthetic oligonucleotide
gaacaaauggaagcagacu

SEQ ID NO: 640986 - RNA, 19 nt, Artificial Sequence
  Description of Artificial Sequence: Synthetic oligonucleotide
acuguguggugacaagcuu

SEQ ID NO: 640987 - RNA, 19 nt, Artificial Sequence
  Description of Artificial Sequence: Synthetic oligonucleotide
aaccucuagggcacguaca

SEQ ID NO: 640988 - RNA, 19 nt, Artificial Sequence
  Description of Artificial Sequence: Synthetic oligonucleotide
cauucuucguaacaaacuu

SEQ ID NO: 640989 - RNA, 19 nt, Artificial Sequence
  Description of Artificial Sequence: Synthetic oligonucleotide
accugauaguucaccgagg

SEQ ID NO: 640990 - RNA, 19 nt, Artificial Sequence
  Description of Artificial Sequence: Synthetic oligonucleotide
augagccgagcgaacacag

SEQ ID NO: 640991 - RNA, 19 nt, Artificial Sequence
  Description of Artificial Sequence: Synthetic oligonucleotide
uugccguuugaggcuagcc

SEQ ID NO: 640992 - RNA, 19 nt, Artificial Sequence
  Description of Artificial Sequence: Synthetic oligonucleotide
cagucuuacugugugguga

SEQ ID NO: 640993 - RNA, 19 nt, Artificial Sequence
  Description of Artificial Sequence: Synthetic oligonucleotide
cucggauaaacacucggcu

SEQ ID NO: 640994 - RNA, 19 nt, Artificial Sequence
  Description of Artificial Sequence: Synthetic oligonucleotide
aggagaccacgaacgcucc

SEQ ID NO: 640995 - RNA, 19 nt, Artificial Sequence
  Description of Artificial Sequence: Synthetic oligonucleotide
gauaauccgagaaccucua

SEQ ID NO: 640996 - RNA, 19 nt, Artificial Sequence
  Description of Artificial Sequence: Synthetic oligonucleotide
cacuacauuuggauacaga

SEQ ID NO: 640997 - RNA, 19 nt, Artificial Sequence
  Description of Artificial Sequence: Synthetic oligonucleotide
uacaccuacuggagguuuu

SEQ ID NO: 640998 - RNA, 19 nt, Artificial Sequence
  Description of Artificial Sequence: Synthetic oligonucleotide
ucaauauguggugguucaa

SEQ ID NO: 640999 - RNA, 19 nt, Artificial Sequence
  Description of Artificial Sequence: Synthetic oligonucleotide
cuucuauuaagucgaaguu

SEQ ID NO: 641000 - RNA, 19 nt, Artificial Sequence
  Description of Artificial Sequence: Synthetic oligonucleotide
augugcacguauccgucau

SEQ ID NO: 641001 - RNA, 19 nt, Artificial Sequence
  Description of Artificial Sequence: Synthetic oligonucleotide
ggcacgaagagaaucaaua

SEQ ID NO: 641002 - RNA, 19 nt, Artificial Sequence
  Description of Artificial Sequence: Synthetic oligonucleotide
ccacaauccacucuaacaa

SEQ ID NO: 641003 - RNA, 19 nt, Artificial Sequence
  Description of Artificial Sequence: Synthetic oligonucleotide
cagucacaaagaggcaagc

SEQ ID NO: 641004 - RNA, 19 nt, Artificial Sequence
  Description of Artificial Sequence: Synthetic oligonucleotide
aggccaagcuugcagcaau

SEQ ID NO: 641005 - RNA, 19 nt, Artificial Sequence
  Description of Artificial Sequence: Synthetic oligonucleotide
augguacaacagguagggg

SEQ ID NO: 641006 - RNA, 19 nt, Artificial Sequence
  Description of Artificial Sequence: Synthetic oligonucleotide
agaccacgaacgcuccccu

SEQ ID NO: 641007 - RNA, 19 nt, Artificial Sequence
  Description of Artificial Sequence: Synthetic oligonucleotide
aucuggaguuaaggcuccc

SEQ ID NO: 641008 - RNA, 19 nt, Artificial Sequence
  Description of Artificial Sequence: Synthetic oligonucleotide
gagccgagcgaacacagau

SEQ ID NO: 641009 - RNA, 19 nt, Artificial Sequence
  Description of Artificial Sequence: Synthetic oligonucleotide
ggggacuuaaaggccaagc

SEQ ID NO: 641010 - RNA, 19 nt, Artificial Sequence
  Description of Artificial Sequence: Synthetic oligonucleotide
cagcucgaccuuuucucug

SEQ ID NO: 641011 - RNA, 19 nt, Artificial Sequence
  Description of Artificial Sequence: Synthetic oligonucleotide
ggugguucaaugagccgag

SEQ ID NO: 641012 - RNA, 19 nt, Artificial Sequence
  Description of Artificial Sequence: Synthetic oligonucleotide
aaggccaagcuugcagcaa

SEQ ID NO: 641013 - RNA, 19 nt, Artificial Sequence
  Description of Artificial Sequence: Synthetic oligonucleotide
cuuaggcauagcuguucca

SEQ ID NO: 641014 - RNA, 19 nt, Artificial Sequence
  Description of Artificial Sequence: Synthetic oligonucleotide
gcgccuauuguugaaaaga

SEQ ID NO: 641015 - RNA, 19 nt, Artificial Sequence
  Description of Artificial Sequence: Synthetic oligonucleotide
ccaaacguggaaaaugucu

SEQ ID NO: 641016 - RNA, 19 nt, Artificial Sequence
  Description of Artificial Sequence: Synthetic oligonucleotide
ucacagcgaaguuccuuua

SEQ ID NO: 641017 - RNA, 19 nt, Artificial Sequence
  Description of Artificial Sequence: Synthetic oligonucleotide
cuccucaugcccaguaaaa

SEQ ID NO: 641018 - RNA, 19 nt, Artificial Sequence
  Description of Artificial Sequence: Synthetic oligonucleotide
ccugauaguucaccgagga

SEQ ID NO: 641019 - RNA, 19 nt, Artificial Sequence
  Description of Artificial Sequence: Synthetic oligonucleotide
aauugccguuugaggcuag

SEQ ID NO: 641020 - RNA, 19 nt, Artificial Sequence
  Description of Artificial Sequence: Synthetic oligonucleotide
gacuguccuaccacugaca

SEQ ID NO: 641021 - RNA, 19 nt, Artificial Sequence
  Description of Artificial Sequence: Synthetic oligonucleotide
acgaacgcuccccucugaa

SEQ ID NO: 641022 - RNA, 19 nt, Artificial Sequence
  Description of Artificial Sequence: Synthetic oligonucleotide
agcuggguuuuggacuguc

SEQ ID NO: 641023 - RNA, 19 nt, Artificial Sequence
  Description of Artificial Sequence: Synthetic oligonucleotide
gcuacaaaccggauccaac

SEQ ID NO: 641024 - RNA, 19 nt, Artificial Sequence
  Description of Artificial Sequence: Synthetic oligonucleotide
auagcaccugggaggguag

SEQ ID NO: 641025 - RNA, 19 nt, Artificial Sequence
  Description of Artificial Sequence: Synthetic oligonucleotide
acccuuauaugcacauaga

SEQ ID NO: 641026 - RNA, 19 nt, Artificial Sequence
  Description of Artificial Sequence: Synthetic oligonucleotide
ucccuuugccggcaucaua

SEQ ID NO: 641027 - RNA, 19 nt, Artificial Sequence
  Description of Artificial Sequence: Synthetic oligonucleotide
gaauugccguuugaggcua

SEQ ID NO: 641028 - RNA, 19 nt, Artificial Sequence
  Description of Artificial Sequence: Synthetic oligonucleotide
ugugcacguauccgucauu

SEQ ID NO: 641029 - RNA, 19 nt, Artificial Sequence
  Description of Artificial Sequence: Synthetic oligonucleotide
guacauagguuaagacaga

SEQ ID NO: 641030 - RNA, 19 nt, Artificial Sequence
  Description of Artificial Sequence: Synthetic oligonucleotide
gguacaacagguaggggcu

SEQ ID NO: 641031 - RNA, 19 nt, Artificial Sequence
  Description of Artificial Sequence: Synthetic oligonucleotide
gcuaucugaugggaagcag

SEQ ID NO: 641032 - RNA, 19 nt, Artificial Sequence
  Description of Artificial Sequence: Synthetic oligonucleotide
ccgagaaccucuagggcac

SEQ ID NO: 641033 - RNA, 19 nt, Artificial Sequence
  Description of Artificial Sequence: Synthetic oligonucleotide
acugcgccuauuguugaaa

SEQ ID NO: 641034 - RNA, 19 nt, Artificial Sequence
  Description of Artificial Sequence: Synthetic oligonucleotide
ggggucuugaccugcacua

SEQ ID NO: 641035 - RNA, 19 nt, Artificial Sequence
  Description of Artificial Sequence: Synthetic oligonucleotide
acacucggcuaguuuugau

SEQ ID NO: 641036 - RNA, 19 nt, Artificial Sequence
  Description of Artificial Sequence: Synthetic oligonucleotide
cuagggcacguacacaggu

SEQ ID NO: 641037 - RNA, 19 nt, Artificial Sequence
  Description of Artificial Sequence: Synthetic oligonucleotide
ggucuugaccugcacuaca

SEQ ID NO: 641038 - RNA, 19 nt, Artificial Sequence
  Description of Artificial Sequence: Synthetic oligonucleotide
acccuaugucagacaauag

SEQ ID NO: 641039 - RNA, 19 nt, Artificial Sequence
  Description of Artificial Sequence: Synthetic oligonucleotide
agacaauaguucagugaau

SEQ ID NO: 641040 - RNA, 19 nt, Artificial Sequence
  Description of Artificial Sequence: Synthetic oligonucleotide
guucaccgaggauggguga

SEQ ID NO: 641041 - RNA, 19 nt, Artificial Sequence
  Description of Artificial Sequence: Synthetic oligonucleotide
ccuaugucagacaauaguu

SEQ ID NO: 641042 - RNA, 19 nt, Artificial Sequence
  Description of Artificial Sequence: Synthetic oligonucleotide
ggcuucuauuaagucgaag

SEQ ID NO: 641043 - RNA, 19 nt, Artificial Sequence
  Description of Artificial Sequence: Synthetic oligonucleotide
ggacuuaaaggccaagcuu

SEQ ID NO: 641044 - RNA, 19 nt, Artificial Sequence
  Description of Artificial Sequence: Synthetic oligonucleotide
cuccacuacuggucuucug

SEQ ID NO: 641045 - RNA, 19 nt, Artificial Sequence
  Description of Artificial Sequence: Synthetic oligonucleotide
gcgaaguuccuuuaccagu

SEQ ID NO: 641046 - RNA, 19 nt, Artificial Sequence
  Description of Artificial Sequence: Synthetic oligonucleotide
gaggcacgaagagaaucaa

SEQ ID NO: 641047 - RNA, 19 nt, Artificial Sequence
  Description of Artificial Sequence: Synthetic oligonucleotide
gauaucagcuugggauucu

SEQ ID NO: 641048 - RNA, 19 nt, Artificial Sequence
  Description of Artificial Sequence: Synthetic oligonucleotide
ggaguguccccauguuuuc

SEQ ID NO: 641049 - RNA, 19 nt, Artificial Sequence
  Description of Artificial Sequence: Synthetic oligonucleotide
gacugcgccuauuguugaa

SEQ ID NO: 641050 - RNA, 19 nt, Artificial Sequence
  Description of Artificial Sequence: Synthetic oligonucleotide
gcaguaauuauaaccugcu

SEQ ID NO: 641051 - RNA, 19 nt, Artificial Sequence
  Description of Artificial Sequence: Synthetic oligonucleotide
agacacaaaaggggacuua

SEQ ID NO: 641052 - RNA, 19 nt, Artificial Sequence
  Description of Artificial Sequence: Synthetic oligonucleotide
cggaagauagacccaaaca

SEQ ID NO: 641053 - RNA, 19 nt, Artificial Sequence
  Description of Artificial Sequence: Synthetic oligonucleotide
cugcgccuauuguugaaaa

SEQ ID NO: 641054 - RNA, 19 nt, Artificial Sequence
  Description of Artificial Sequence: Synthetic oligonucleotide
agguaggggcugucaaauu

SEQ ID NO: 641055 - RNA, 19 nt, Artificial Sequence
  Description of Artificial Sequence: Synthetic oligonucleotide
caccuacuggagguuuuac

SEQ ID NO: 641056 - RNA, 19 nt, Artificial Sequence
  Description of Artificial Sequence: Synthetic oligonucleotide
caaacaccgccugcugcuc

SEQ ID NO: 641057 - RNA, 19 nt, Artificial Sequence
  Description of Artificial Sequence: Synthetic oligonucleotide
guuugccgauucucacauc

SEQ ID NO: 641058 - RNA, 19 nt, Artificial Sequence
  Description of Artificial Sequence: Synthetic oligonucleotide
uuauagcaccugggagggu

SEQ ID NO: 641059 - RNA, 19 nt, Artificial Sequence
  Description of Artificial Sequence: Synthetic oligonucleotide
gggugaaugugcacguauc

SEQ ID NO: 641060 - RNA, 19 nt, Artificial Sequence
  Description of Artificial Sequence: Synthetic oligonucleotide
cugacuucggcugcagucu

SEQ ID NO: 641061 - RNA, 19 nt, Artificial Sequence
  Description of Artificial Sequence: Synthetic oligonucleotide
accgcacuuuugaggcacg

SEQ ID NO: 641062 - RNA, 19 nt, Artificial Sequence
  Description of Artificial Sequence: Synthetic oligonucleotide
cuaugacugcgccuauugu

SEQ ID NO: 641063 - RNA, 19 nt, Artificial Sequence
  Description of Artificial Sequence: Synthetic oligonucleotide
ucccuugcucugagacccu

SEQ ID NO: 641064 - RNA, 19 nt, Artificial Sequence
  Description of Artificial Sequence: Synthetic oligonucleotide
gcggggucagcuuuucauc

SEQ ID NO: 641065 - RNA, 19 nt, Artificial Sequence
  Description of Artificial Sequence: Synthetic oligonucleotide
ccagucuuacuguguggug

SEQ ID NO: 641066 - RNA, 19 nt, Artificial Sequence
  Description of Artificial Sequence: Synthetic oligonucleotide
gauaaacacucggcuaguu

SEQ ID NO: 641067 - RNA, 19 nt, Artificial Sequence
  Description of Artificial Sequence: Synthetic oligonucleotide
gcauuagcuugagacacaa

SEQ ID NO: 641068 - RNA, 19 nt, Artificial Sequence
  Description of Artificial Sequence: Synthetic oligonucleotide
ggagaccacgaacgcuccc

SEQ ID NO: 641069 - RNA, 19 nt, Artificial Sequence
  Description of Artificial Sequence: Synthetic oligonucleotide
cccuaugucagacaauagu

SEQ ID NO: 641070 - RNA, 19 nt, Artificial Sequence
  Description of Artificial Sequence: Synthetic oligonucleotide
gcacgaagagaaucaauau

SEQ ID NO: 641071 - RNA, 19 nt, Artificial Sequence
  Description of Artificial Sequence: Synthetic oligonucleotide
uugugccgggagugucccc

SEQ ID NO: 641072 - RNA, 19 nt, Artificial Sequence
  Description of Artificial Sequence: Synthetic oligonucleotide
cagcggaagauagacccaa

SEQ ID NO: 641073 - RNA, 19 nt, Artificial Sequence
  Description of Artificial Sequence: Synthetic oligonucleotide
aggcacgaagagaaucaau

SEQ ID NO: 641074 - RNA, 19 nt, Artificial Sequence
  Description of Artificial Sequence: Synthetic oligonucleotide
acaccuacuggagguuuua

SEQ ID NO: 641075 - RNA, 19 nt, Artificial Sequence
  Description of Artificial Sequence: Synthetic oligonucleotide
gaccugcacuacauuugga

SEQ ID NO: 641076 - RNA, 19 nt, Artificial Sequence
  Description of Artificial Sequence: Synthetic oligonucleotide
aucuaugacugcgccuauu

SEQ ID NO: 641077 - RNA, 19 nt, Artificial Sequence
  Description of Artificial Sequence: Synthetic oligonucleotide
cacucggcuaguuuugauu

SEQ ID NO: 641078 - RNA, 19 nt, Artificial Sequence
  Description of Artificial Sequence: Synthetic oligonucleotide
aucugaugggaagcagcua

SEQ ID NO: 641079 - RNA, 19 nt, Artificial Sequence
  Description of Artificial Sequence: Synthetic oligonucleotide
cccaagucucucaaccgca

SEQ ID NO: 641080 - RNA, 19 nt, Artificial Sequence
  Description of Artificial Sequence: Synthetic oligonucleotide
cgagcgaacacagauugga

SEQ ID NO: 641081 - RNA, 19 nt, Artificial Sequence
  Description of Artificial Sequence: Synthetic oligonucleotide
caaccgcacuuuugaggca

SEQ ID NO: 641082 - RNA, 19 nt, Artificial Sequence
  Description of Artificial Sequence: Synthetic oligonucleotide
gacuucggcugcagucuga

SEQ ID NO: 641083 - RNA, 19 nt, Artificial Sequence
  Description of Artificial Sequence: Synthetic oligonucleotide
cagcugccaacccuuauau

SEQ ID NO: 641084 - RNA, 19 nt, Artificial Sequence
  Description of Artificial Sequence: Synthetic oligonucleotide
caaauugugccgggagugu

SEQ ID NO: 641085 - RNA, 19 nt, Artificial Sequence
  Description of Artificial Sequence: Synthetic oligonucleotide
gcugauaauccgagaaccu

SEQ ID NO: 641086 - RNA, 19 nt, Artificial Sequence
  Description of Artificial Sequence: Synthetic oligonucleotide
gcacguacacagguccaug

SEQ ID NO: 641087 - RNA, 19 nt, Artificial Sequence
  Description of Artificial Sequence: Synthetic oligonucleotide
guucagugaauugccguuu

SEQ ID NO: 641088 - RNA, 19 nt, Artificial Sequence
  Description of Artificial Sequence: Synthetic oligonucleotide
agccgagcgaacacagauu

SEQ ID NO: 641089 - RNA, 19 nt, Artificial Sequence
  Description of Artificial Sequence: Synthetic oligonucleotide
cuucggcugcagucugaca

SEQ ID NO: 641090 - RNA, 19 nt, Artificial Sequence
  Description of Artificial Sequence: Synthetic oligonucleotide
gucuucaguccgagguaga

SEQ ID NO: 641091 - RNA, 19 nt, Artificial Sequence
  Description of Artificial Sequence: Synthetic oligonucleotide
gucugaccugauaguucac

SEQ ID NO: 641092 - RNA, 19 nt, Artificial Sequence
  Description of Artificial Sequence: Synthetic oligonucleotide
cagguaggggcugucaaau

SEQ ID NO: 641093 - RNA, 19 nt, Artificial Sequence
  Description of Artificial Sequence: Synthetic oligonucleotide
gcacguauccgucauucuu

SEQ ID NO: 641094 - RNA, 19 nt, Artificial Sequence
  Description of Artificial Sequence: Synthetic oligonucleotide
ugccggcaucauaucucuu

SEQ ID NO: 641095 - RNA, 19 nt, Artificial Sequence
  Description of Artificial Sequence: Synthetic oligonucleotide
aucccuuugccggcaucau

SEQ ID NO: 641096 - RNA, 19 nt, Artificial Sequence
  Description of Artificial Sequence: Synthetic oligonucleotide
augggugaaugugcacgua

SEQ ID NO: 641097 - RNA, 19 nt, Artificial Sequence
  Description of Artificial Sequence: Synthetic oligonucleotide
ccgucauucuucguaacaa

SEQ ID NO: 641098 - RNA, 19 nt, Artificial Sequence
  Description of Artificial Sequence: Synthetic oligonucleotide
cuguccuaccacugacacu

SEQ ID NO: 641099 - RNA, 19 nt, Artificial Sequence
  Description of Artificial Sequence: Synthetic oligonucleotide
guccuaccacugacacucc

SEQ ID NO: 641100 - RNA, 19 nt, Artificial Sequence
  Description of Artificial Sequence: Synthetic oligonucleotide
gccggcaucauaucucuuu

SEQ ID NO: 641101 - RNA, 19 nt, Artificial Sequence
  Description of Artificial Sequence: Synthetic oligonucleotide
ggauaaacacucggcuagu

SEQ ID NO: 641102 - RNA, 19 nt, Artificial Sequence
  Description of Artificial Sequence: Synthetic oligonucleotide
gcucgaccuuuucucugca

SEQ ID NO: 641103 - RNA, 19 nt, Artificial Sequence
  Description of Artificial Sequence: Synthetic oligonucleotide
aggcuucuauuaagucgaa

SEQ ID NO: 641104 - RNA, 19 nt, Artificial Sequence
  Description of Artificial Sequence: Synthetic oligonucleotide
cucggcuaguuuugauuuu

SEQ ID NO: 641105 - RNA, 19 nt, Artificial Sequence
  Description of Artificial Sequence: Synthetic oligonucleotide
gccgauucucacauccacu

SEQ ID NO: 641106 - RNA, 19 nt, Artificial Sequence
  Description of Artificial Sequence: Synthetic oligonucleotide
caccgccugcugcucuuca

SEQ ID NO: 641107 - RNA, 19 nt, Artificial Sequence
  Description of Artificial Sequence: Synthetic oligonucleotide
gggcacguacacaggucca

SEQ ID NO: 641108 - RNA, 19 nt, Artificial Sequence
  Description of Artificial Sequence: Synthetic oligonucleotide
ccagcucgaccuuuucucu

SEQ ID NO: 641109 - RNA, 19 nt, Artificial Sequence
  Description of Artificial Sequence: Synthetic oligonucleotide
cagcggggucagcuuuuca

SEQ ID NO: 641110 - RNA, 19 nt, Artificial Sequence
  Description of Artificial Sequence: Synthetic oligonucleotide
caucuaugacugcgccuau

SEQ ID NO: 641111 - RNA, 19 nt, Artificial Sequence
  Description of Artificial Sequence: Synthetic oligonucleotide
gccuugcagaggagcaaga

SEQ ID NO: 641112 - RNA, 19 nt, Artificial Sequence
  Description of Artificial Sequence: Synthetic oligonucleotide
cgagaaccucuagggcacg

SEQ ID NO: 641113 - RNA, 19 nt, Artificial Sequence
  Description of Artificial Sequence: Synthetic oligonucleotide
ggcacguacacagguccau

SEQ ID NO: 641114 - RNA, 19 nt, Artificial Sequence
  Description of Artificial Sequence: Synthetic oligonucleotide
ccccucugaagcugcacau

SEQ ID NO: 641115 - RNA, 19 nt, Artificial Sequence
  Description of Artificial Sequence: Synthetic oligonucleotide
cggauccaaccaucaucca

SEQ ID NO: 641116 - RNA, 19 nt, Artificial Sequence
  Description of Artificial Sequence: Synthetic oligonucleotide
ccgcacuuuugaggcacga

SEQ ID NO: 641117 - RNA, 19 nt, Artificial Sequence
  Description of Artificial Sequence: Synthetic oligonucleotide
ccggguccagacagcggaa

SEQ ID NO: 641118 - RNA, 19 nt, Artificial Sequence
  Description of Artificial Sequence: Synthetic oligonucleotide
ccguuugaggcuagccauu

SEQ ID NO: 641119 - RNA, 19 nt, Artificial Sequence
  Description of Artificial Sequence: Synthetic oligonucleotide
cguauccgucauucuucgu

SEQ ID NO: 641120 - RNA, 19 nt, Artificial Sequence
  Description of Artificial Sequence: Synthetic oligonucleotide
cccagcggggucagcuuuu

SEQ ID NO: 641121 - RNA, 19 nt, Artificial Sequence
  Description of Artificial Sequence: Synthetic oligonucleotide
gaauuaacaguuuagaagg

SEQ ID NO: 641122 - RNA, 19 nt, Artificial Sequence
  Description of Artificial Sequence: Synthetic oligonucleotide
aaugcaagcagccaagucc

SEQ ID NO: 641123 - RNA, 19 nt, Artificial Sequence
  Description of Artificial Sequence: Synthetic oligonucleotide
aaaagugacaguuaaugug

SEQ ID NO: 641124 - RNA, 19 nt, Artificial Sequence
  Description of Artificial Sequence: Synthetic oligonucleotide
agaauuaacaguuuagaag

SEQ ID NO: 641125 - RNA, 19 nt, Artificial Sequence
  Description of Artificial Sequence: Synthetic oligonucleotide
aaagccuguaaacauauag

SEQ ID NO: 641126 - RNA, 19 nt, Artificial Sequence
  Description of Artificial Sequence: Synthetic oligonucleotide
uuauauuagagcaaggaaa

SEQ ID NO: 641127 - RNA, 19 nt, Artificial Sequence
  Description of Artificial Sequence: Synthetic oligonucleotide
aguccuuagucauaaagcc

SEQ ID NO: 641128 - RNA, 19 nt, Artificial Sequence
  Description of Artificial Sequence: Synthetic oligonucleotide
uaguacuuaauuuuaauga

SEQ ID NO: 641129 - RNA, 19 nt, Artificial Sequence
  Description of Artificial Sequence: Synthetic oligonucleotide
aaugaugaugggcuuuacc

SEQ ID NO: 641130 - RNA, 19 nt, Artificial Sequence
  Description of Artificial Sequence: Synthetic oligonucleotide
aucauguucauuaaggugg

SEQ ID NO: 641131 - RNA, 19 nt, Artificial Sequence
  Description of Artificial Sequence: Synthetic oligonucleotide
aaaguuaugcaccacguau

SEQ ID NO: 641132 - RNA, 19 nt, Artificial Sequence
  Description of Artificial Sequence: Synthetic oligonucleotide
uccuuagucauaaagccag

SEQ ID NO: 641133 - RNA, 19 nt, Artificial Sequence
  Description of Artificial Sequence: Synthetic oligonucleotide
uauauuagagcaaggaaaa

SEQ ID NO: 641134 - RNA, 19 nt, Artificial Sequence
  Description of Artificial Sequence: Synthetic oligonucleotide
aaugauucgugucauuuca

SEQ ID NO: 641135 - RNA, 19 nt, Artificial Sequence
  Description of Artificial Sequence: Synthetic oligonucleotide
uauuguucacauuuuagug

SEQ ID NO: 641136 - RNA, 19 nt, Artificial Sequence
  Description of Artificial Sequence: Synthetic oligonucleotide
uuguccaugaacucaaaag

SEQ ID NO: 641137 - RNA, 19 nt, Artificial Sequence
  Description of Artificial Sequence: Synthetic oligonucleotide
uuuagaaggacuggaauag

SEQ ID NO: 641138 - RNA, 19 nt, Artificial Sequence
  Description of Artificial Sequence: Synthetic oligonucleotide
uuggguaagccuuuaaugc

SEQ ID NO: 641139 - RNA, 19 nt, Artificial Sequence
  Description of Artificial Sequence: Synthetic oligonucleotide
uuugaaacguccaucguac

SEQ ID NO: 641140 - RNA, 19 nt, Artificial Sequence
  Description of Artificial Sequence: Synthetic oligonucleotide
uaagucauagcugugcagg

SEQ ID NO: 641141 - RNA, 19 nt, Artificial Sequence
  Description of Artificial Sequence: Synthetic oligonucleotide
uuaguugccacgaagacuu

SEQ ID NO: 641142 - RNA, 19 nt, Artificial Sequence
  Description of Artificial Sequence: Synthetic oligonucleotide
aauugacuuauccucguug

SEQ ID NO: 641143 - RNA, 19 nt, Artificial Sequence
  Description of Artificial Sequence: Synthetic oligonucleotide
ugacaguuaaugugaaugg

SEQ ID NO: 641144 - RNA, 19 nt, Artificial Sequence
  Description of Artificial Sequence: Synthetic oligonucleotide
agugacgugugacagugcc

SEQ ID NO: 641145 - RNA, 19 nt, Artificial Sequence
  Description of Artificial Sequence: Synthetic oligonucleotide
auaaccuugggcuacugag

SEQ ID NO: 641146 - RNA, 19 nt, Artificial Sequence
  Description of Artificial Sequence: Synthetic oligonucleotide
ugacgaccaaugaugaugg

SEQ ID NO: 641147 - RNA, 19 nt, Artificial Sequence
  Description of Artificial Sequence: Synthetic oligonucleotide
auuaguggcaucacgauuc

SEQ ID NO: 641148 - RNA, 19 nt, Artificial Sequence
  Description of Artificial Sequence: Synthetic oligonucleotide
ugaaaugugcuaccugggg

SEQ ID NO: 641149 - RNA, 19 nt, Artificial Sequence
  Description of Artificial Sequence: Synthetic oligonucleotide
uauacuugguauauuggac

SEQ ID NO: 641150 - RNA, 19 nt, Artificial Sequence
  Description of Artificial Sequence: Synthetic oligonucleotide
aaaguuuggccugagcuag

SEQ ID NO: 641151 - RNA, 19 nt, Artificial Sequence
  Description of Artificial Sequence: Synthetic oligonucleotide
uccauaagcaugacgacca

SEQ ID NO: 641152 - RNA, 19 nt, Artificial Sequence
  Description of Artificial Sequence: Synthetic oligonucleotide
aguuaaugugaauggguac

SEQ ID NO: 641153 - RNA, 19 nt, Artificial Sequence
  Description of Artificial Sequence: Synthetic oligonucleotide
uuagauacaaaggccagcc

SEQ ID NO: 641154 - RNA, 19 nt, Artificial Sequence
  Description of Artificial Sequence: Synthetic oligonucleotide
cuuauagggaagcauacug

SEQ ID NO: 641155 - RNA, 19 nt, Artificial Sequence
  Description of Artificial Sequence: Synthetic oligonucleotide
ugagccuaugcucauacca

SEQ ID NO: 641156 - RNA, 19 nt, Artificial Sequence
  Description of Artificial Sequence: Synthetic oligonucleotide
aaagugacaguuaauguga

SEQ ID NO: 641157 - RNA, 19 nt, Artificial Sequence
  Description of Artificial Sequence: Synthetic oligonucleotide
ggugcuuagauacaaaggc

SEQ ID NO: 641158 - RNA, 19 nt, Artificial Sequence
  Description of Artificial Sequence: Synthetic oligonucleotide
uagggaagcauacuguagc

SEQ ID NO: 641159 - RNA, 19 nt, Artificial Sequence
  Description of Artificial Sequence: Synthetic oligonucleotide
aaccuugggcuacugaguc

SEQ ID NO: 641160 - RNA, 19 nt, Artificial Sequence
  Description of Artificial Sequence: Synthetic oligonucleotide
uguuaucaagcuuugcucu

SEQ ID NO: 641161 - RNA, 19 nt, Artificial Sequence
  Description of Artificial Sequence: Synthetic oligonucleotide
ugaacauuggguaagccuu

SEQ ID NO: 641162 - RNA, 19 nt, Artificial Sequence
  Description of Artificial Sequence: Synthetic oligonucleotide
caaacugggauuuguauug

SEQ ID NO: 641163 - RNA, 19 nt, Artificial Sequence
  Description of Artificial Sequence: Synthetic oligonucleotide
auaguguucaauaucaacu

SEQ ID NO: 641164 - RNA, 19 nt, Artificial Sequence
  Description of Artificial Sequence: Synthetic oligonucleotide
uuugcagauaauagcuucc

SEQ ID NO: 641165 - RNA, 19 nt, Artificial Sequence
  Description of Artificial Sequence: Synthetic oligonucleotide
ucuguauuggucuccauaa

SEQ ID NO: 641166 - RNA, 19 nt, Artificial Sequence
  Description of Artificial Sequence: Synthetic oligonucleotide
uuuaaucaguucccaaaug

SEQ ID NO: 641167 - RNA, 19 nt, Artificial Sequence
  Description of Artificial Sequence: Synthetic oligonucleotide
uuagguuaggccacaggag

SEQ ID NO: 641168 - RNA, 19 nt, Artificial Sequence
  Description of Artificial Sequence: Synthetic oligonucleotide
ucuacagcuggaauucucc

SEQ ID NO: 641169 - RNA, 19 nt, Artificial Sequence
  Description of Artificial Sequence: Synthetic oligonucleotide
uguucaauaucaacuugug

SEQ ID NO: 641170 - RNA, 19 nt, Artificial Sequence
  Description of Artificial Sequence: Synthetic oligonucleotide
uuggugcuuagauacaaag

SEQ ID NO: 641171 - RNA, 19 nt, Artificial Sequence
  Description of Artificial Sequence: Synthetic oligonucleotide
ucaaguagucagaacguug

SEQ ID NO: 641172 - RNA, 19 nt, Artificial Sequence
  Description of Artificial Sequence: Synthetic oligonucleotide
ugagaauuaacaguuuaga

SEQ ID NO: 641173 - RNA, 19 nt, Artificial Sequence
  Description of Artificial Sequence: Synthetic oligonucleotide
cuaacauaauuccugcuac

SEQ ID NO: 641174 - RNA, 19 nt, Artificial Sequence
  Description of Artificial Sequence: Synthetic oligonucleotide
auucgugucauuucaucuc

SEQ ID NO: 641175 - RNA, 19 nt, Artificial Sequence
  Description of Artificial Sequence: Synthetic oligonucleotide
auuaagguggcaauaacug

SEQ ID NO: 641176 - RNA, 19 nt, Artificial Sequence
  Description of Artificial Sequence: Synthetic oligonucleotide
auuaacaguuuagaaggac

SEQ ID NO: 641177 - RNA, 19 nt, Artificial Sequence
  Description of Artificial Sequence: Synthetic oligonucleotide
uuauagggaagcauacugu

SEQ ID NO: 641178 - RNA, 19 nt, Artificial Sequence
  Description of Artificial Sequence: Synthetic oligonucleotide
agaauguuccggauggugc

SEQ ID NO: 641179 - RNA, 19 nt, Artificial Sequence
  Description of Artificial Sequence: Synthetic oligonucleotide
acuuaguugccacgaagac

SEQ ID NO: 641180 - RNA, 19 nt, Artificial Sequence
  Description of Artificial Sequence: Synthetic oligonucleotide
ucaaaguuaugcaccacgu

SEQ ID NO: 641181 - RNA, 19 nt, Artificial Sequence
  Description of Artificial Sequence: Synthetic oligonucleotide
ugugaauggguacuaacau

SEQ ID NO: 641182 - RNA, 19 nt, Artificial Sequence
  Description of Artificial Sequence: Synthetic oligonucleotide
auacuugguauauuggaca

SEQ ID NO: 641183 - RNA, 19 nt, Artificial Sequence
  Description of Artificial Sequence: Synthetic oligonucleotide
uugaacauuggguaagccu

SEQ ID NO: 641184 - RNA, 19 nt, Artificial Sequence
  Description of Artificial Sequence: Synthetic oligonucleotide
uccaaguuuguccaugaac

SEQ ID NO: 641185 - RNA, 19 nt, Artificial Sequence
  Description of Artificial Sequence: Synthetic oligonucleotide
cauuucaucuccuugcauc

SEQ ID NO: 641186 - RNA, 19 nt, Artificial Sequence
  Description of Artificial Sequence: Synthetic oligonucleotide
ucguacuucuucagaauag

SEQ ID NO: 641187 - RNA, 19 nt, Artificial Sequence
  Description of Artificial Sequence: Synthetic oligonucleotide
uuuggugauuuccacauuu

SEQ ID NO: 641188 - RNA, 19 nt, Artificial Sequence
  Description of Artificial Sequence: Synthetic oligonucleotide
agguuaucucuacuuuucc

SEQ ID NO: 641189 - RNA, 19 nt, Artificial Sequence
  Description of Artificial Sequence: Synthetic oligonucleotide
uucgugucauuucaucucc

SEQ ID NO: 641190 - RNA, 19 nt, Artificial Sequence
  Description of Artificial Sequence: Synthetic oligonucleotide
uuguuaucaagcuuugcuc

SEQ ID NO: 641191 - RNA, 19 nt, Artificial Sequence
  Description of Artificial Sequence: Synthetic oligonucleotide
auugacuuauccucguugu

SEQ ID NO: 641192 - RNA, 19 nt, Artificial Sequence
  Description of Artificial Sequence: Synthetic oligonucleotide
aaacaggccaucagaaauc

SEQ ID NO: 641193 - RNA, 19 nt, Artificial Sequence
  Description of Artificial Sequence: Synthetic oligonucleotide
acuaacauaauuccugcua

SEQ ID NO: 641194 - RNA, 19 nt, Artificial Sequence
  Description of Artificial Sequence: Synthetic oligonucleotide
acguuguauuucuuuauag

SEQ ID NO: 641195 - RNA, 19 nt, Artificial Sequence
  Description of Artificial Sequence: Synthetic oligonucleotide
aucacgauucucuaugccu

SEQ ID NO: 641196 - RNA, 19 nt, Artificial Sequence
  Description of Artificial Sequence: Synthetic oligonucleotide
acuggaauaguguucaaua

SEQ ID NO: 641197 - RNA, 19 nt, Artificial Sequence
  Description of Artificial Sequence: Synthetic oligonucleotide
caucauguucauuaaggug

SEQ ID NO: 641198 - RNA, 19 nt, Artificial Sequence
  Description of Artificial Sequence: Synthetic oligonucleotide
acgaccaaugaugaugggc

SEQ ID NO: 641199 - RNA, 19 nt, Artificial Sequence
  Description of Artificial Sequence: Synthetic oligonucleotide
guacuaacauaauuccugc

SEQ ID NO: 641200 - RNA, 19 nt, Artificial Sequence
  Description of Artificial Sequence: Synthetic oligonucleotide
uguuucaacuugaacuccu

SEQ ID NO: 641201 - RNA, 19 nt, Artificial Sequence
  Description of Artificial Sequence: Synthetic oligonucleotide
aaacugggauuuguauugc

SEQ ID NO: 641202 - RNA, 19 nt, Artificial Sequence
  Description of Artificial Sequence: Synthetic oligonucleotide
acagucuuaccaucuggac

SEQ ID NO: 641203 - RNA, 19 nt, Artificial Sequence
  Description of Artificial Sequence: Synthetic oligonucleotide
aguugcucuguauuggucu

SEQ ID NO: 641204 - RNA, 19 nt, Artificial Sequence
  Description of Artificial Sequence: Synthetic oligonucleotide
ugguguguagguuaucucu

SEQ ID NO: 641205 - RNA, 19 nt, Artificial Sequence
  Description of Artificial Sequence: Synthetic oligonucleotide
ugcauuucagcuacauaca

SEQ ID NO: 641206 - RNA, 19 nt, Artificial Sequence
  Description of Artificial Sequence: Synthetic oligonucleotide
agccuguaaacauauagaa

SEQ ID NO: 641207 - RNA, 19 nt, Artificial Sequence
  Description of Artificial Sequence: Synthetic oligonucleotide
cauaauuccugcuacuaca

SEQ ID NO: 641208 - RNA, 19 nt, Artificial Sequence
  Description of Artificial Sequence: Synthetic oligonucleotide
guuguauuucuuuauagcu

SEQ ID NO: 641209 - RNA, 19 nt, Artificial Sequence
  Description of Artificial Sequence: Synthetic oligonucleotide
ugaccucaaaguuuggccu

SEQ ID NO: 641210 - RNA, 19 nt, Artificial Sequence
  Description of Artificial Sequence: Synthetic oligonucleotide
augacgaccaaugaugaug

SEQ ID NO: 641211 - RNA, 19 nt, Artificial Sequence
  Description of Artificial Sequence: Synthetic oligonucleotide
gguacuaacauaauuccug

SEQ ID NO: 641212 - RNA, 19 nt, Artificial Sequence
  Description of Artificial Sequence: Synthetic oligonucleotide
ucccuuauugcucauggau

SEQ ID NO: 641213 - RNA, 19 nt, Artificial Sequence
  Description of Artificial Sequence: Synthetic oligonucleotide
uccuugagugcuauuaaaa

SEQ ID NO: 641214 - RNA, 19 nt, Artificial Sequence
  Description of Artificial Sequence: Synthetic oligonucleotide
gauucucuaugccuaaguc

SEQ ID NO: 641215 - RNA, 19 nt, Artificial Sequence
  Description of Artificial Sequence: Synthetic oligonucleotide
agaacguugaacauugggu

SEQ ID NO: 641216 - RNA, 19 nt, Artificial Sequence
  Description of Artificial Sequence: Synthetic oligonucleotide
auuuuaguguacuucugau

SEQ ID NO: 641217 - RNA, 19 nt, Artificial Sequence
  Description of Artificial Sequence: Synthetic oligonucleotide
uuguucacauuuuagugua

SEQ ID NO: 641218 - RNA, 19 nt, Artificial Sequence
  Description of Artificial Sequence: Synthetic oligonucleotide
agcaugacgaccaaugaug

SEQ ID NO: 641219 - RNA, 19 nt, Artificial Sequence
  Description of Artificial Sequence: Synthetic oligonucleotide
uggguaagccuuuaaugca

SEQ ID NO: 641220 - RNA, 19 nt, Artificial Sequence
  Description of Artificial Sequence: Synthetic oligonucleotide
uacuugguauauuggacac

SEQ ID NO: 641221 - RNA, 19 nt, Artificial Sequence
  Description of Artificial Sequence: Synthetic oligonucleotide
gaacguugaacauugggua

SEQ ID NO: 641222 - RNA, 19 nt, Artificial Sequence
  Description of Artificial Sequence: Synthetic oligonucleotide
ucauuaagguggcaauaac

SEQ ID NO: 641223 - RNA, 19 nt, Artificial Sequence
  Description of Artificial Sequence: Synthetic oligonucleotide
aaaaguuccccaucauguu

SEQ ID NO: 641224 - RNA, 19 nt, Artificial Sequence
  Description of Artificial Sequence: Synthetic oligonucleotide
uuuagucuacagcuggaau

SEQ ID NO: 641225 - RNA, 19 nt, Artificial Sequence
  Description of Artificial Sequence: Synthetic oligonucleotide
gcauuuagucuacagcugg

SEQ ID NO: 641226 - RNA, 19 nt, Artificial Sequence
  Description of Artificial Sequence: Synthetic oligonucleotide
uguucauuaagguggcaau

SEQ ID NO: 641227 - RNA, 19 nt, Artificial Sequence
  Description of Artificial Sequence: Synthetic oligonucleotide
gucagaacguugaacauug

SEQ ID NO: 641228 - RNA, 19 nt, Artificial Sequence
  Description of Artificial Sequence: Synthetic oligonucleotide
ugacuuauccucguuguac

SEQ ID NO: 641229 - RNA, 19 nt, Artificial Sequence
  Description of Artificial Sequence: Synthetic oligonucleotide
aagccuguaaacauauaga

SEQ ID NO: 641230 - RNA, 19 nt, Artificial Sequence
  Description of Artificial Sequence: Synthetic oligonucleotide
uuggugauuuccacauuug

SEQ ID NO: 641231 - RNA, 19 nt, Artificial Sequence
  Description of Artificial Sequence: Synthetic oligonucleotide
gaaacguccaucguacuuc

SEQ ID NO: 641232 - RNA, 19 nt, Artificial Sequence
  Description of Artificial Sequence: Synthetic oligonucleotide
aucaguugcucuguauugg

SEQ ID NO: 641233 - RNA, 19 nt, Artificial Sequence
  Description of Artificial Sequence: Synthetic oligonucleotide
caaguagucagaacguuga

SEQ ID NO: 641234 - RNA, 19 nt, Artificial Sequence
  Description of Artificial Sequence: Synthetic oligonucleotide
uaugucaccuuuugaguuc

SEQ ID NO: 641235 - RNA, 19 nt, Artificial Sequence
  Description of Artificial Sequence: Synthetic oligonucleotide
acucacagacaacagggga

SEQ ID NO: 641236 - RNA, 19 nt, Artificial Sequence
  Description of Artificial Sequence: Synthetic oligonucleotide
ucacgauucucuaugccua

SEQ ID NO: 641237 - RNA, 19 nt, Artificial Sequence
  Description of Artificial Sequence: Synthetic oligonucleotide
ucaauugacuuauccucgu

SEQ ID NO: 641238 - RNA, 19 nt, Artificial Sequence
  Description of Artificial Sequence: Synthetic oligonucleotide
aaacguccaucguacuucu

SEQ ID NO: 641239 - RNA, 19 nt, Artificial Sequence
  Description of Artificial Sequence: Synthetic oligonucleotide
augaacucaaaaguauuca

SEQ ID NO: 641240 - RNA, 19 nt, Artificial Sequence
  Description of Artificial Sequence: Synthetic oligonucleotide
cucaacccucuucucaucg

SEQ ID NO: 641241 - RNA, 19 nt, Artificial Sequence
  Description of Artificial Sequence: Synthetic oligonucleotide
uaacauaauuccugcuacu

SEQ ID NO: 641242 - RNA, 19 nt, Artificial Sequence
  Description of Artificial Sequence: Synthetic oligonucleotide
acucaaaaguauucaagua

SEQ ID NO: 641243 - RNA, 19 nt, Artificial Sequence
  Description of Artificial Sequence: Synthetic oligonucleotide
guagugacgugugacagug

SEQ ID NO: 641244 - RNA, 19 nt, Artificial Sequence
  Description of Artificial Sequence: Synthetic oligonucleotide
cauuuguuucaacuugaac

SEQ ID NO: 641245 - RNA, 19 nt, Artificial Sequence
  Description of Artificial Sequence: Synthetic oligonucleotide
agcucucccacacagugca

SEQ ID NO: 641246 - RNA, 19 nt, Artificial Sequence
  Description of Artificial Sequence: Synthetic oligonucleotide
cuuagauacaaaggccagc

SEQ ID NO: 641247 - RNA, 19 nt, Artificial Sequence
  Description of Artificial Sequence: Synthetic oligonucleotide
ucugaccucaaaguuuggc

SEQ ID NO: 641248 - RNA, 19 nt, Artificial Sequence
  Description of Artificial Sequence: Synthetic oligonucleotide
cuuuaaugcaagcagccaa

SEQ ID NO: 641249 - RNA, 19 nt, Artificial Sequence
  Description of Artificial Sequence: Synthetic oligonucleotide
ucaacccucuucucaucgg

SEQ ID NO: 641250 - RNA, 19 nt, Artificial Sequence
  Description of Artificial Sequence: Synthetic oligonucleotide
ugauucgugucauuucauc

SEQ ID NO: 641251 - RNA, 19 nt, Artificial Sequence
  Description of Artificial Sequence: Synthetic oligonucleotide
uacuuuuccaggcccggga

SEQ ID NO: 641252 - RNA, 19 nt, Artificial Sequence
  Description of Artificial Sequence: Synthetic oligonucleotide
gacuuauccucguuguaca

SEQ ID NO: 641253 - RNA, 19 nt, Artificial Sequence
  Description of Artificial Sequence: Synthetic oligonucleotide
cuaagucauagcugugcag

SEQ ID NO: 641254 - RNA, 19 nt, Artificial Sequence
  Description of Artificial Sequence: Synthetic oligonucleotide
uguaaaccuguggacuuag

SEQ ID NO: 641255 - RNA, 19 nt, Artificial Sequence
  Description of Artificial Sequence: Synthetic oligonucleotide
ugaaacguccaucguacuu

SEQ ID NO: 641256 - RNA, 19 nt, Artificial Sequence
  Description of Artificial Sequence: Synthetic oligonucleotide
gauggucgcacacuugaca

SEQ ID NO: 641257 - RNA, 19 nt, Artificial Sequence
  Description of Artificial Sequence: Synthetic oligonucleotide
cauuuuaguguacuucuga

SEQ ID NO: 641258 - RNA, 19 nt, Artificial Sequence
  Description of Artificial Sequence: Synthetic oligonucleotide
uugaacuccucaacccucu

SEQ ID NO: 641259 - RNA, 19 nt, Artificial Sequence
  Description of Artificial Sequence: Synthetic oligonucleotide
cuccauaagcaugacgacc

SEQ ID NO: 641260 - RNA, 19 nt, Artificial Sequence
  Description of Artificial Sequence: Synthetic oligonucleotide
ucauuaguggcaucacgau

SEQ ID NO: 641261 - RNA, 19 nt, Artificial Sequence
  Description of Artificial Sequence: Synthetic oligonucleotide
uuuacccagccugucacca

SEQ ID NO: 641262 - RNA, 19 nt, Artificial Sequence
  Description of Artificial Sequence: Synthetic oligonucleotide
uugcagauaauagcuuccc

SEQ ID NO: 641263 - RNA, 19 nt, Artificial Sequence
  Description of Artificial Sequence: Synthetic oligonucleotide
ugcagauaauagcuucccu

SEQ ID NO: 641264 - RNA, 19 nt, Artificial Sequence
  Description of Artificial Sequence: Synthetic oligonucleotide
gagccuaugcucauaccag

SEQ ID NO: 641265 - RNA, 19 nt, Artificial Sequence
  Description of Artificial Sequence: Synthetic oligonucleotide
ggcaucacgauucucuaug

SEQ ID NO: 641266 - RNA, 19 nt, Artificial Sequence
  Description of Artificial Sequence: Synthetic oligonucleotide
gacaccaacguuguauuuc

SEQ ID NO: 641267 - RNA, 19 nt, Artificial Sequence
  Description of Artificial Sequence: Synthetic oligonucleotide
gaccucaaaguuuggccug

SEQ ID NO: 641268 - RNA, 19 nt, Artificial Sequence
  Description of Artificial Sequence: Synthetic oligonucleotide
uuuuacaggcccagauaaa

SEQ ID NO: 641269 - RNA, 19 nt, Artificial Sequence
  Description of Artificial Sequence: Synthetic oligonucleotide
aucguacuucuucagaaua

SEQ ID NO: 641270 - RNA, 19 nt, Artificial Sequence
  Description of Artificial Sequence: Synthetic oligonucleotide
ucagaacguugaacauugg

SEQ ID NO: 641271 - RNA, 19 nt, Artificial Sequence
  Description of Artificial Sequence: Synthetic oligonucleotide
augccaagggaaccauaac

SEQ ID NO: 641272 - RNA, 19 nt, Artificial Sequence
  Description of Artificial Sequence: Synthetic oligonucleotide
uuauagcuucugcagcauc

SEQ ID NO: 641273 - RNA, 19 nt, Artificial Sequence
  Description of Artificial Sequence: Synthetic oligonucleotide
caacccucuucucaucggg

SEQ ID NO: 641274 - RNA, 19 nt, Artificial Sequence
  Description of Artificial Sequence: Synthetic oligonucleotide
uuauugcucauggaugaaa

SEQ ID NO: 641275 - RNA, 19 nt, Artificial Sequence
  Description of Artificial Sequence: Synthetic oligonucleotide
cuaugcucauaccagaucu

SEQ ID NO: 641276 - RNA, 19 nt, Artificial Sequence
  Description of Artificial Sequence: Synthetic oligonucleotide
gguggcaauaacuguauga

SEQ ID NO: 641277 - RNA, 19 nt, Artificial Sequence
  Description of Artificial Sequence: Synthetic oligonucleotide
ugacgugugacagugccau

SEQ ID NO: 641278 - RNA, 19 nt, Artificial Sequence
  Description of Artificial Sequence: Synthetic oligonucleotide
cauuaagguggcaauaacu

SEQ ID NO: 641279 - RNA, 19 nt, Artificial Sequence
  Description of Artificial Sequence: Synthetic oligonucleotide
uuaguggcaucacgauucu

SEQ ID NO: 641280 - RNA, 19 nt, Artificial Sequence
  Description of Artificial Sequence: Synthetic oligonucleotide
gcuauuguucacauuuuag

SEQ ID NO: 641281 - RNA, 19 nt, Artificial Sequence
  Description of Artificial Sequence: Synthetic oligonucleotide
acguugaacauuggguaag

SEQ ID NO: 641282 - RNA, 19 nt, Artificial Sequence
  Description of Artificial Sequence: Synthetic oligonucleotide
aaguagucagaacguugaa

SEQ ID NO: 641283 - RNA, 19 nt, Artificial Sequence
  Description of Artificial Sequence: Synthetic oligonucleotide
guuaaugugaauggguacu

SEQ ID NO: 641284 - RNA, 19 nt, Artificial Sequence
  Description of Artificial Sequence: Synthetic oligonucleotide
uuaaugugaauggguacua

SEQ ID NO: 641285 - RNA, 19 nt, Artificial Sequence
  Description of Artificial Sequence: Synthetic oligonucleotide
uguuguuaucaagcuuugc

SEQ ID NO: 641286 - RNA, 19 nt, Artificial Sequence
  Description of Artificial Sequence: Synthetic oligonucleotide
ucccugaagacagugccac

SEQ ID NO: 641287 - RNA, 19 nt, Artificial Sequence
  Description of Artificial Sequence: Synthetic oligonucleotide
aacccucuucucaucgggg

SEQ ID NO: 641288 - RNA, 19 nt, Artificial Sequence
  Description of Artificial Sequence: Synthetic oligonucleotide
uuguauugcuugucauaga

SEQ ID NO: 641289 - RNA, 19 nt, Artificial Sequence
  Description of Artificial Sequence: Synthetic oligonucleotide
caugcgguagugacgugug

SEQ ID NO: 641290 - RNA, 19 nt, Artificial Sequence
  Description of Artificial Sequence: Synthetic oligonucleotide
caguuaaugugaaugggua

SEQ ID NO: 641291 - RNA, 19 nt, Artificial Sequence
  Description of Artificial Sequence: Synthetic oligonucleotide
agauaauagcuucccugaa

SEQ ID NO: 641292 - RNA, 19 nt, Artificial Sequence
  Description of Artificial Sequence: Synthetic oligonucleotide
cuuuacccagccugucacc

SEQ ID NO: 641293 - RNA, 19 nt, Artificial Sequence
  Description of Artificial Sequence: Synthetic oligonucleotide
ugcacaucgccaucauagu

SEQ ID NO: 641294 - RNA, 19 nt, Artificial Sequence
  Description of Artificial Sequence: Synthetic oligonucleotide
ggacuuaguugccacgaag

SEQ ID NO: 641295 - RNA, 19 nt, Artificial Sequence
  Description of Artificial Sequence: Synthetic oligonucleotide
ucauuucaucuccuugcau

SEQ ID NO: 641296 - RNA, 19 nt, Artificial Sequence
  Description of Artificial Sequence: Synthetic oligonucleotide
cuaugccuaagucauagcu

SEQ ID NO: 641297 - RNA, 19 nt, Artificial Sequence
  Description of Artificial Sequence: Synthetic oligonucleotide
uuagaaggacuggaauagu

SEQ ID NO: 641298 - RNA, 19 nt, Artificial Sequence
  Description of Artificial Sequence: Synthetic oligonucleotide
gggcuacugagucugacug

SEQ ID NO: 641299 - RNA, 19 nt, Artificial Sequence
  Description of Artificial Sequence: Synthetic oligonucleotide
gguacaugcgguagugacg

SEQ ID NO: 641300 - RNA, 19 nt, Artificial Sequence
  Description of Artificial Sequence: Synthetic oligonucleotide
acacgaaccaccauguauu

SEQ ID NO: 641301 - RNA, 19 nt, Artificial Sequence
  Description of Artificial Sequence: Synthetic oligonucleotide
cccgggaacaacaaaauca

SEQ ID NO: 641302 - RNA, 19 nt, Artificial Sequence
  Description of Artificial Sequence: Synthetic oligonucleotide
caagucuugugugagcuca

SEQ ID NO: 641303 - RNA, 19 nt, Artificial Sequence
  Description of Artificial Sequence: Synthetic oligonucleotide
aagucuugugugagcucac

SEQ ID NO: 641304 - RNA, 19 nt, Artificial Sequence
  Description of Artificial Sequence: Synthetic oligonucleotide
uugacuuauccucguugua

SEQ ID NO: 641305 - RNA, 19 nt, Artificial Sequence
  Description of Artificial Sequence: Synthetic oligonucleotide
uugguguguagguuaucuc

SEQ ID NO: 641306 - RNA, 19 nt, Artificial Sequence
  Description of Artificial Sequence: Synthetic oligonucleotide
ggaacugugugcaaaaucu

SEQ ID NO: 641307 - RNA, 19 nt, Artificial Sequence
  Description of Artificial Sequence: Synthetic oligonucleotide
augcaccacguaugucacc

SEQ ID NO: 641308 - RNA, 19 nt, Artificial Sequence
  Description of Artificial Sequence: Synthetic oligonucleotide
caaaguuuggccugagcua

SEQ ID NO: 641309 - RNA, 19 nt, Artificial Sequence
  Description of Artificial Sequence: Synthetic oligonucleotide
ugugcuaccugggguaggu

SEQ ID NO: 641310 - RNA, 19 nt, Artificial Sequence
  Description of Artificial Sequence: Synthetic oligonucleotide
uuacccagccugucaccag

SEQ ID NO: 641311 - RNA, 19 nt, Artificial Sequence
  Description of Artificial Sequence: Synthetic oligonucleotide
guugaacauuggguaagcc

SEQ ID NO: 641312 - RNA, 19 nt, Artificial Sequence
  Description of Artificial Sequence: Synthetic oligonucleotide
uugaaacguccaucguacu

SEQ ID NO: 641313 - RNA, 19 nt, Artificial Sequence
  Description of Artificial Sequence: Synthetic oligonucleotide
uggucgcacacuugacacc

SEQ ID NO: 641314 - RNA, 19 nt, Artificial Sequence
  Description of Artificial Sequence: Synthetic oligonucleotide
gaaccauaaccuugggcua

SEQ ID NO: 641315 - RNA, 19 nt, Artificial Sequence
  Description of Artificial Sequence: Synthetic oligonucleotide
uucccuuauugcucaugga

SEQ ID NO: 641316 - RNA, 19 nt, Artificial Sequence
  Description of Artificial Sequence: Synthetic oligonucleotide
augaugggcuuuacccagc

SEQ ID NO: 641317 - RNA, 19 nt, Artificial Sequence
  Description of Artificial Sequence: Synthetic oligonucleotide
acaugcgguagugacgugu

SEQ ID NO: 641318 - RNA, 19 nt, Artificial Sequence
  Description of Artificial Sequence: Synthetic oligonucleotide
agguaauacuuagguuagg

SEQ ID NO: 641319 - RNA, 19 nt, Artificial Sequence
  Description of Artificial Sequence: Synthetic oligonucleotide
gacgaccaaugaugauggg

SEQ ID NO: 641320 - RNA, 19 nt, Artificial Sequence
  Description of Artificial Sequence: Synthetic oligonucleotide
agugcaacauuugcacaca

SEQ ID NO: 641321 - RNA, 19 nt, Artificial Sequence
  Description of Artificial Sequence: Synthetic oligonucleotide
agucagaacguugaacauu

SEQ ID NO: 641322 - RNA, 19 nt, Artificial Sequence
  Description of Artificial Sequence: Synthetic oligonucleotide
gccacgaagacuugucccc

SEQ ID NO: 641323 - RNA, 19 nt, Artificial Sequence
  Description of Artificial Sequence: Synthetic oligonucleotide
uggacuuaguugccacgaa

SEQ ID NO: 641324 - RNA, 19 nt, Artificial Sequence
  Description of Artificial Sequence: Synthetic oligonucleotide
guguucaauaucaacuugu

SEQ ID NO: 641325 - RNA, 19 nt, Artificial Sequence
  Description of Artificial Sequence: Synthetic oligonucleotide
ggauggugccauuugguga

SEQ ID NO: 641326 - RNA, 19 nt, Artificial Sequence
  Description of Artificial Sequence: Synthetic oligonucleotide
guucccaaaugauucgugu

SEQ ID NO: 641327 - RNA, 19 nt, Artificial Sequence
  Description of Artificial Sequence: Synthetic oligonucleotide
aguucccaaaugauucgug

SEQ ID NO: 641328 - RNA, 19 nt, Artificial Sequence
  Description of Artificial Sequence: Synthetic oligonucleotide
ucgugucauuucaucuccu

SEQ ID NO: 641329 - RNA, 19 nt, Artificial Sequence
  Description of Artificial Sequence: Synthetic oligonucleotide
ggguagguaauacuuaggu

SEQ ID NO: 641330 - RNA, 19 nt, Artificial Sequence
  Description of Artificial Sequence: Synthetic oligonucleotide
guaugucaccuuuugaguu

SEQ ID NO: 641331 - RNA, 19 nt, Artificial Sequence
  Description of Artificial Sequence: Synthetic oligonucleotide
cugcuacuacacaauaaaa

SEQ ID NO: 641332 - RNA, 19 nt, Artificial Sequence
  Description of Artificial Sequence: Synthetic oligonucleotide
guacaugcgguagugacgu

SEQ ID NO: 641333 - RNA, 19 nt, Artificial Sequence
  Description of Artificial Sequence: Synthetic oligonucleotide
ucacccuuauagggaagca

SEQ ID NO: 641334 - RNA, 19 nt, Artificial Sequence
  Description of Artificial Sequence: Synthetic oligonucleotide
uacuuagguuaggccacag

SEQ ID NO: 641335 - RNA, 19 nt, Artificial Sequence
  Description of Artificial Sequence: Synthetic oligonucleotide
guccuuagucauaaagcca

SEQ ID NO: 641336 - RNA, 19 nt, Artificial Sequence
  Description of Artificial Sequence: Synthetic oligonucleotide
cuacagcuggaauucucca

SEQ ID NO: 641337 - RNA, 19 nt, Artificial Sequence
  Description of Artificial Sequence: Synthetic oligonucleotide
caguuuagaaggacuggaa

SEQ ID NO: 641338 - RNA, 19 nt, Artificial Sequence
  Description of Artificial Sequence: Synthetic oligonucleotide
cuugguauauuggacacau

SEQ ID NO: 641339 - RNA, 19 nt, Artificial Sequence
  Description of Artificial Sequence: Synthetic oligonucleotide
acuugguauauuggacaca

SEQ ID NO: 641340 - RNA, 19 nt, Artificial Sequence
  Description of Artificial Sequence: Synthetic oligonucleotide
gcucauggaugaaaugugc

SEQ ID NO: 641341 - RNA, 19 nt, Artificial Sequence
  Description of Artificial Sequence: Synthetic oligonucleotide
ccugcuacuacacaauaaa

SEQ ID NO: 641342 - RNA, 19 nt, Artificial Sequence
  Description of Artificial Sequence: Synthetic oligonucleotide
gguaagccuuuaaugcaag

SEQ ID NO: 641343 - RNA, 19 nt, Artificial Sequence
  Description of Artificial Sequence: Synthetic oligonucleotide
cauaaccuugggcuacuga

SEQ ID NO: 641344 - RNA, 19 nt, Artificial Sequence
  Description of Artificial Sequence: Synthetic oligonucleotide
uagugacgugugacagugc

SEQ ID NO: 641345 - RNA, 19 nt, Artificial Sequence
  Description of Artificial Sequence: Synthetic oligonucleotide
gcaucacgauucucuaugc

SEQ ID NO: 641346 - RNA, 19 nt, Artificial Sequence
  Description of Artificial Sequence: Synthetic oligonucleotide
ucuuaccaucuggacaaau

SEQ ID NO: 641347 - RNA, 19 nt, Artificial Sequence
  Description of Artificial Sequence: Synthetic oligonucleotide
cacuggucaucaugccaag

SEQ ID NO: 641348 - RNA, 19 nt, Artificial Sequence
  Description of Artificial Sequence: Synthetic oligonucleotide
cuuaguugccacgaagacu

SEQ ID NO: 641349 - RNA, 19 nt, Artificial Sequence
  Description of Artificial Sequence: Synthetic oligonucleotide
gccauuuggugauuuccac

SEQ ID NO: 641350 - RNA, 19 nt, Artificial Sequence
  Description of Artificial Sequence: Synthetic oligonucleotide
uugguauauuggacacaua

SEQ ID NO: 641351 - RNA, 19 nt, Artificial Sequence
  Description of Artificial Sequence: Synthetic oligonucleotide
caaaguuaugcaccacgua

SEQ ID NO: 641352 - RNA, 19 nt, Artificial Sequence
  Description of Artificial Sequence: Synthetic oligonucleotide
caaaccuccagccugcauu

SEQ ID NO: 641353 - RNA, 19 nt, Artificial Sequence
  Description of Artificial Sequence: Synthetic oligonucleotide
gggguagguaauacuuagg

SEQ ID NO: 641354 - RNA, 19 nt, Artificial Sequence
  Description of Artificial Sequence: Synthetic oligonucleotide
cuacugagucugacugcac

SEQ ID NO: 641355 - RNA, 19 nt, Artificial Sequence
  Description of Artificial Sequence: Synthetic oligonucleotide
aggcccgggaacaacaaaa

SEQ ID NO: 641356 - RNA, 19 nt, Artificial Sequence
  Description of Artificial Sequence: Synthetic oligonucleotide
guguagguuaucucuacuu

SEQ ID NO: 641357 - RNA, 19 nt, Artificial Sequence
  Description of Artificial Sequence: Synthetic oligonucleotide
gcuacugagucugacugca

SEQ ID NO: 641358 - RNA, 19 nt, Artificial Sequence
  Description of Artificial Sequence: Synthetic oligonucleotide
cacaucgccaucauaguuu

SEQ ID NO: 641359 - RNA, 19 nt, Artificial Sequence
  Description of Artificial Sequence: Synthetic oligonucleotide
cacguaugucaccuuuuga

SEQ ID NO: 641360 - RNA, 19 nt, Artificial Sequence
  Description of Artificial Sequence: Synthetic oligonucleotide
ggcuacugagucugacugc

SEQ ID NO: 641361 - RNA, 19 nt, Artificial Sequence
  Description of Artificial Sequence: Synthetic oligonucleotide
uaguugccacgaagacuug

SEQ ID NO: 641362 - RNA, 19 nt, Artificial Sequence
  Description of Artificial Sequence: Synthetic oligonucleotide
ccaauccucgggaccaagc

SEQ ID NO: 641363 - RNA, 19 nt, Artificial Sequence
  Description of Artificial Sequence: Synthetic oligonucleotide
ggucgcacacuugacacca

SEQ ID NO: 641364 - RNA, 19 nt, Artificial Sequence
  Description of Artificial Sequence: Synthetic oligonucleotide
agucuugugugagcucacu

SEQ ID NO: 641365 - RNA, 19 nt, Artificial Sequence
  Description of Artificial Sequence: Synthetic oligonucleotide
ccuuagucauaaagccagc

SEQ ID NO: 641366 - RNA, 19 nt, Artificial Sequence
  Description of Artificial Sequence: Synthetic oligonucleotide
cugggguagguaauacuua

SEQ ID NO: 641367 - RNA, 19 nt, Artificial Sequence
  Description of Artificial Sequence: Synthetic oligonucleotide
ccaucguacuucuucagaa

SEQ ID NO: 641368 - RNA, 19 nt, Artificial Sequence
  Description of Artificial Sequence: Synthetic oligonucleotide
uagcuugggccaccauguc

SEQ ID NO: 641369 - RNA, 19 nt, Artificial Sequence
  Description of Artificial Sequence: Synthetic oligonucleotide
ccacguaugucaccuuuug

SEQ ID NO: 641370 - RNA, 19 nt, Artificial Sequence
  Description of Artificial Sequence: Synthetic oligonucleotide
ccuaagucauagcugugca

SEQ ID NO: 641371 - RNA, 19 nt, Artificial Sequence
  Description of Artificial Sequence: Synthetic oligonucleotide
ggacacauagaugcucuuc

SEQ ID NO: 641372 - RNA, 19 nt, Artificial Sequence
  Description of Artificial Sequence: Synthetic oligonucleotide
ccaacguuguauuucuuua

SEQ ID NO: 641373 - RNA, 19 nt, Artificial Sequence
  Description of Artificial Sequence: Synthetic oligonucleotide
augauucgugucauuucau

SEQ ID NO: 641374 - RNA, 19 nt, Artificial Sequence
  Description of Artificial Sequence: Synthetic oligonucleotide
agguuaggccacaggagaa

SEQ ID NO: 641375 - RNA, 19 nt, Artificial Sequence
  Description of Artificial Sequence: Synthetic oligonucleotide
uacaugcgguagugacgug

SEQ ID NO: 641376 - RNA, 19 nt, Artificial Sequence
  Description of Artificial Sequence: Synthetic oligonucleotide
gagcuaguuuggcuuucaa

SEQ ID NO: 641377 - RNA, 19 nt, Artificial Sequence
  Description of Artificial Sequence: Synthetic oligonucleotide
gcaugacgaccaaugauga

SEQ ID NO: 641378 - RNA, 19 nt, Artificial Sequence
  Description of Artificial Sequence: Synthetic oligonucleotide
aguuuggccugagcuaguu

SEQ ID NO: 641379 - RNA, 19 nt, Artificial Sequence
  Description of Artificial Sequence: Synthetic oligonucleotide
cacgauucucuaugccuaa

SEQ ID NO: 641380 - RNA, 19 nt, Artificial Sequence
  Description of Artificial Sequence: Synthetic oligonucleotide
caacaccgccaccuucuuc

SEQ ID NO: 641381 - RNA, 19 nt, Artificial Sequence
  Description of Artificial Sequence: Synthetic oligonucleotide
gcgguagugacgugugaca

SEQ ID NO: 641382 - RNA, 19 nt, Artificial Sequence
  Description of Artificial Sequence: Synthetic oligonucleotide
cauuaguggcaucacgauu

SEQ ID NO: 641383 - RNA, 19 nt, Artificial Sequence
  Description of Artificial Sequence: Synthetic oligonucleotide
gucugaccucaaaguuugg

SEQ ID NO: 641384 - RNA, 19 nt, Artificial Sequence
  Description of Artificial Sequence: Synthetic oligonucleotide
ggguaagccuuuaaugcaa

SEQ ID NO: 641385 - RNA, 19 nt, Artificial Sequence
  Description of Artificial Sequence: Synthetic oligonucleotide
cuuauugcucauggaugaa

SEQ ID NO: 641386 - RNA, 19 nt, Artificial Sequence
  Description of Artificial Sequence: Synthetic oligonucleotide
caucguacuucuucagaau

SEQ ID NO: 641387 - RNA, 19 nt, Artificial Sequence
  Description of Artificial Sequence: Synthetic oligonucleotide
cauggcugccaugcauuuc

SEQ ID NO: 641388 - RNA, 19 nt, Artificial Sequence
  Description of Artificial Sequence: Synthetic oligonucleotide
cgaccaaugaugaugggcu

SEQ ID NO: 641389 - RNA, 19 nt, Artificial Sequence
  Description of Artificial Sequence: Synthetic oligonucleotide
ggugauuuccacauuuguu

SEQ ID NO: 641390 - RNA, 19 nt, Artificial Sequence
  Description of Artificial Sequence: Synthetic oligonucleotide
gaacugugugcaaaaucuu

SEQ ID NO: 641391 - RNA, 19 nt, Artificial Sequence
  Description of Artificial Sequence: Synthetic oligonucleotide
gugacgugugacagugcca

SEQ ID NO: 641392 - RNA, 19 nt, Artificial Sequence
  Description of Artificial Sequence: Synthetic oligonucleotide
gcccgggaacaacaaaauc

SEQ ID NO: 641393 - RNA, 19 nt, Artificial Sequence
  Description of Artificial Sequence: Synthetic oligonucleotide
ccacccagaauguuccgga

SEQ ID NO: 641394 - RNA, 19 nt, Artificial Sequence
  Description of Artificial Sequence: Synthetic oligonucleotide
gguagugacgugugacagu

SEQ ID NO: 641395 - RNA, 19 nt, Artificial Sequence
  Description of Artificial Sequence: Synthetic oligonucleotide
acgaaccaccauguauuuu

SEQ ID NO: 641396 - RNA, 19 nt, Artificial Sequence
  Description of Artificial Sequence: Synthetic oligonucleotide
gaagcauacuguagcuauu

SEQ ID NO: 641397 - RNA, 19 nt, Artificial Sequence
  Description of Artificial Sequence: Synthetic oligonucleotide
cuugggcuacugagucuga

SEQ ID NO: 641398 - RNA, 19 nt, Artificial Sequence
  Description of Artificial Sequence: Synthetic oligonucleotide
gacgucuucaagagccuuu

SEQ ID NO: 641399 - RNA, 19 nt, Artificial Sequence
  Description of Artificial Sequence: Synthetic oligonucleotide
caaugggguugguggaugu

SEQ ID NO: 641400 - RNA, 19 nt, Artificial Sequence
  Description of Artificial Sequence: Synthetic oligonucleotide
cgguagugacgugugacag

SEQ ID NO: 641401 - RNA, 19 nt, Artificial Sequence
  Description of Artificial Sequence: Synthetic oligonucleotide
cguccaucguacuucuuca

SEQ ID NO: 641402 - RNA, 19 nt, Artificial Sequence
  Description of Artificial Sequence: Synthetic oligonucleotide
caugacgaccaaugaugau

SEQ ID NO: 641403 - RNA, 19 nt, Artificial Sequence
  Description of Artificial Sequence: Synthetic oligonucleotide
ccuuuagacagagccaucu

SEQ ID NO: 641404 - RNA, 19 nt, Artificial Sequence
  Description of Artificial Sequence: Synthetic oligonucleotide
cagacgucuucaagagccu

SEQ ID NO: 641405 - RNA, 19 nt, Artificial Sequence
  Description of Artificial Sequence: Synthetic oligonucleotide
caauugacuuauccucguu

SEQ ID NO: 641406 - RNA, 19 nt, Artificial Sequence
  Description of Artificial Sequence: Synthetic oligonucleotide
agccaaguccuuagucaua

SEQ ID NO: 641407 - RNA, 19 nt, Artificial Sequence
  Description of Artificial Sequence: Synthetic oligonucleotide
aacguccaucguacuucuu

SEQ ID NO: 641408 - RNA, 19 nt, Artificial Sequence
  Description of Artificial Sequence: Synthetic oligonucleotide
cacgaaccaccauguauuu

SEQ ID NO: 641409 - RNA, 19 nt, Artificial Sequence
  Description of Artificial Sequence: Synthetic oligonucleotide
guaaaccuguggacuuagu

SEQ ID NO: 641410 - RNA, 19 nt, Artificial Sequence
  Description of Artificial Sequence: Synthetic oligonucleotide
caggcccgggaacaacaaa

SEQ ID NO: 641411 - RNA, 19 nt, Artificial Sequence
  Description of Artificial Sequence: Synthetic oligonucleotide
gcccauggcaacaccgcca

SEQ ID NO: 641412 - RNA, 19 nt, Artificial Sequence
  Description of Artificial Sequence: Synthetic oligonucleotide
gcacaucgccaucauaguu

SEQ ID NO: 641413 - RNA, 19 nt, Artificial Sequence
  Description of Artificial Sequence: Synthetic oligonucleotide
ggccugagcuaguuuggcu

SEQ ID NO: 641414 - RNA, 19 nt, Artificial Sequence
  Description of Artificial Sequence: Synthetic oligonucleotide
cacccagaauguuccggau

SEQ ID NO: 641415 - RNA, 19 nt, Artificial Sequence
  Description of Artificial Sequence: Synthetic oligonucleotide
gccagccucaauggucuca

SEQ ID NO: 641416 - RNA, 19 nt, Artificial Sequence
  Description of Artificial Sequence: Synthetic oligonucleotide
gccuuuagacagagccauc

SEQ ID NO: 641417 - RNA, 19 nt, Artificial Sequence
  Description of Artificial Sequence: Synthetic oligonucleotide
ccaagggaaccauaaccuu

SEQ ID NO: 641418 - RNA, 19 nt, Artificial Sequence
  Description of Artificial Sequence: Synthetic oligonucleotide
cguacuucuucagaauagu

SEQ ID NO: 641419 - RNA, 19 nt, Artificial Sequence
  Description of Artificial Sequence: Synthetic oligonucleotide
ccauaagcaugacgaccaa

SEQ ID NO: 641420 - RNA, 19 nt, Artificial Sequence
  Description of Artificial Sequence: Synthetic oligonucleotide
ggcccgggaacaacaaaau

SEQ ID NO: 641421 - RNA, 19 nt, Artificial Sequence
  Description of Artificial Sequence: Synthetic oligonucleotide
ccacacgaaccaccaugua

SEQ ID NO: 641422 - RNA, 19 nt, Artificial Sequence
  Description of Artificial Sequence: Synthetic oligonucleotide
aaucucucgaacuguaugc

SEQ ID NO: 641423 - RNA, 19 nt, Artificial Sequence
  Description of Artificial Sequence: Synthetic oligonucleotide
auaaccaggagucuuaugg

SEQ ID NO: 641424 - RNA, 19 nt, Artificial Sequence
  Description of Artificial Sequence: Synthetic oligonucleotide
aguacuucaacaaagguuc

SEQ ID NO: 641425 - RNA, 19 nt, Artificial Sequence
  Description of Artificial Sequence: Synthetic oligonucleotide
uauaguagcgugcaaaaug

SEQ ID NO: 641426 - RNA, 19 nt, Artificial Sequence
  Description of Artificial Sequence: Synthetic oligonucleotide
guaaagguccccuugaaag

SEQ ID NO: 641427 - RNA, 19 nt, Artificial Sequence
  Description of Artificial Sequence: Synthetic oligonucleotide
aaaacuaccccucucccca

SEQ ID NO: 641428 - RNA, 19 nt, Artificial Sequence
  Description of Artificial Sequence: Synthetic oligonucleotide
uugugauuagguuccaagg

SEQ ID NO: 641429 - RNA, 19 nt, Artificial Sequence
  Description of Artificial Sequence: Synthetic oligonucleotide
cauaacauagucagugggg

SEQ ID NO: 641430 - RNA, 19 nt, Artificial Sequence
  Description of Artificial Sequence: Synthetic oligonucleotide
acauaacauagucaguggg

SEQ ID NO: 641431 - RNA, 19 nt, Artificial Sequence
  Description of Artificial Sequence: Synthetic oligonucleotide
ugguacuugaccuugcgcc

SEQ ID NO: 641432 - RNA, 19 nt, Artificial Sequence
  Description of Artificial Sequence: Synthetic oligonucleotide
gagaauugaagugaauggg

SEQ ID NO: 641433 - RNA, 19 nt, Artificial Sequence
  Description of Artificial Sequence: Synthetic oligonucleotide
guagcgugcaaaaugaggg

SEQ ID NO: 641434 - RNA, 19 nt, Artificial Sequence
  Description of Artificial Sequence: Synthetic oligonucleotide
uguacuuuauucagacugc

SEQ ID NO: 641435 - RNA, 19 nt, Artificial Sequence
  Description of Artificial Sequence: Synthetic oligonucleotide
aacucauuguauugcucac

SEQ ID NO: 641436 - RNA, 19 nt, Artificial Sequence
  Description of Artificial Sequence: Synthetic oligonucleotide
uggagaauugaagugaaug

SEQ ID NO: 641437 - RNA, 19 nt, Artificial Sequence
  Description of Artificial Sequence: Synthetic oligonucleotide
aaagguccccuugaaagac

SEQ ID NO: 641438 - RNA, 19 nt, Artificial Sequence
  Description of Artificial Sequence: Synthetic oligonucleotide
ggguacauaacauagucag

SEQ ID NO: 641439 - RNA, 19 nt, Artificial Sequence
  Description of Artificial Sequence: Synthetic oligonucleotide
auccuaaacuaucaggcag

SEQ ID NO: 641440 - RNA, 19 nt, Artificial Sequence
  Description of Artificial Sequence: Synthetic oligonucleotide
ugggcagguauccagacug

SEQ ID NO: 641441 - RNA, 19 nt, Artificial Sequence
  Description of Artificial Sequence: Synthetic oligonucleotide
acguaaggaaccuucgagg

SEQ ID NO: 641442 - RNA, 19 nt, Artificial Sequence
  Description of Artificial Sequence: Synthetic oligonucleotide
gacguaaggaaccuucgag

SEQ ID NO: 641443 - RNA, 19 nt, Artificial Sequence
  Description of Artificial Sequence: Synthetic oligonucleotide
cuuuauucagacugcuggg

SEQ ID NO: 641444 - RNA, 19 nt, Artificial Sequence
  Description of Artificial Sequence: Synthetic oligonucleotide
agugaagcagugccuaugg

SEQ ID NO: 641445 - RNA, 19 nt, Artificial Sequence
  Description of Artificial Sequence: Synthetic oligonucleotide
uauugcucacugauuaccc

SEQ ID NO: 641446 - RNA, 19 nt, Artificial Sequence
  Description of Artificial Sequence: Synthetic oligonucleotide
accauggacuacuauacag

SEQ ID NO: 641447 - RNA, 19 nt, Artificial Sequence
  Description of Artificial Sequence: Synthetic oligonucleotide
guacccauccaccaaacag

SEQ ID NO: 641448 - RNA, 19 nt, Artificial Sequence
  Description of Artificial Sequence: Synthetic oligonucleotide
gguucaaugacugaguagc

SEQ ID NO: 641449 - RNA, 19 nt, Artificial Sequence
  Description of Artificial Sequence: Synthetic oligonucleotide
uuggauaggcagauggagc

SEQ ID NO: 641450 - RNA, 19 nt, Artificial Sequence
  Description of Artificial Sequence: Synthetic oligonucleotide
cagaguaugggacagugac

SEQ ID NO: 641451 - RNA, 19 nt, Artificial Sequence
  Description of Artificial Sequence: Synthetic oligonucleotide
agucuuauggcugcuaguc

SEQ ID NO: 641452 - RNA, 19 nt, Artificial Sequence
  Description of Artificial Sequence: Synthetic oligonucleotide
ugaagagggaugcucaauc

SEQ ID NO: 641453 - RNA, 19 nt, Artificial Sequence
  Description of Artificial Sequence: Synthetic oligonucleotide
aacccauuccacaguaccc

SEQ ID NO: 641454 - RNA, 19 nt, Artificial Sequence
  Description of Artificial Sequence: Synthetic oligonucleotide
aaaaccucacaguggccag

SEQ ID NO: 641455 - RNA, 19 nt, Artificial Sequence
  Description of Artificial Sequence: Synthetic oligonucleotide
gugccuauggaucuuguag

SEQ ID NO: 641456 - RNA, 19 nt, Artificial Sequence
  Description of Artificial Sequence: Synthetic oligonucleotide
ugggaucugucuaagggca

SEQ ID NO: 641457 - RNA, 19 nt, Artificial Sequence
  Description of Artificial Sequence: Synthetic oligonucleotide
auuauaguagcgugcaaaa

SEQ ID NO: 641458 - RNA, 19 nt, Artificial Sequence
  Description of Artificial Sequence: Synthetic oligonucleotide
agagggaugcucaaucacc

SEQ ID NO: 641459 - RNA, 19 nt, Artificial Sequence
  Description of Artificial Sequence: Synthetic oligonucleotide
uggcauagucacaccaugg

SEQ ID NO: 641460 - RNA, 19 nt, Artificial Sequence
  Description of Artificial Sequence: Synthetic oligonucleotide
cugucuaagggcaucccgg

SEQ ID NO: 641461 - RNA, 19 nt, Artificial Sequence
  Description of Artificial Sequence: Synthetic oligonucleotide
cucggaauguccuuuuccc

SEQ ID NO: 641462 - RNA, 19 nt, Artificial Sequence
  Description of Artificial Sequence: Synthetic oligonucleotide
acaccauggacuacuauac

SEQ ID NO: 641463 - RNA, 19 nt, Artificial Sequence
  Description of Artificial Sequence: Synthetic oligonucleotide
ucucuuggacguaaggaac

SEQ ID NO: 641464 - RNA, 19 nt, Artificial Sequence
  Description of Artificial Sequence: Synthetic oligonucleotide
aaacccaggccacugggca

SEQ ID NO: 641465 - RNA, 19 nt, Artificial Sequence
  Description of Artificial Sequence: Synthetic oligonucleotide
agccuugugauuagguucc

SEQ ID NO: 641466 - RNA, 19 nt, Artificial Sequence
  Description of Artificial Sequence: Synthetic oligonucleotide
cuuuacaagcuuccuuccg

SEQ ID NO: 641467 - RNA, 19 nt, Artificial Sequence
  Description of Artificial Sequence: Synthetic oligonucleotide
aguagcgugcaaaaugagg

SEQ ID NO: 641468 - RNA, 19 nt, Artificial Sequence
  Description of Artificial Sequence: Synthetic oligonucleotide
acaguggguaucaauaaag

SEQ ID NO: 641469 - RNA, 19 nt, Artificial Sequence
  Description of Artificial Sequence: Synthetic oligonucleotide
uuggacguaaggaaccuuc

SEQ ID NO: 641470 - RNA, 19 nt, Artificial Sequence
  Description of Artificial Sequence: Synthetic oligonucleotide
agggcucgcaaucaggaag

SEQ ID NO: 641471 - RNA, 19 nt, Artificial Sequence
  Description of Artificial Sequence: Synthetic oligonucleotide
caguggguaucaauaaagc

SEQ ID NO: 641472 - RNA, 19 nt, Artificial Sequence
  Description of Artificial Sequence: Synthetic oligonucleotide
aagcccaccgacauguuag

SEQ ID NO: 641473 - RNA, 19 nt, Artificial Sequence
  Description of Artificial Sequence: Synthetic oligonucleotide
gaguaugggacagugacuc

SEQ ID NO: 641474 - RNA, 19 nt, Artificial Sequence
  Description of Artificial Sequence: Synthetic oligonucleotide
cucucgaacuguaugcaag

SEQ ID NO: 641475 - RNA, 19 nt, Artificial Sequence
  Description of Artificial Sequence: Synthetic oligonucleotide
gaaaaccucacaguggcca

SEQ ID NO: 641476 - RNA, 19 nt, Artificial Sequence
  Description of Artificial Sequence: Synthetic oligonucleotide
uuuauucagacugcuggga

SEQ ID NO: 641477 - RNA, 19 nt, Artificial Sequence
  Description of Artificial Sequence: Synthetic oligonucleotide
aucucuuggacguaaggaa

SEQ ID NO: 641478 - RNA, 19 nt, Artificial Sequence
  Description of Artificial Sequence: Synthetic oligonucleotide
ugccuauggaucuuguagu

SEQ ID NO: 641479 - RNA, 19 nt, Artificial Sequence
  Description of Artificial Sequence: Synthetic oligonucleotide
cuuggauaggcagauggag

SEQ ID NO: 641480 - RNA, 19 nt, Artificial Sequence
  Description of Artificial Sequence: Synthetic oligonucleotide
auaguagcgugcaaaauga

SEQ ID NO: 641481 - RNA, 19 nt, Artificial Sequence
  Description of Artificial Sequence: Synthetic oligonucleotide
agugguacuugaccuugcg

SEQ ID NO: 641482 - RNA, 19 nt, Artificial Sequence
  Description of Artificial Sequence: Synthetic oligonucleotide
ugaagccuugugauuaggu

SEQ ID NO: 641483 - RNA, 19 nt, Artificial Sequence
  Description of Artificial Sequence: Synthetic oligonucleotide
uuagguuccaaggguaaca

SEQ ID NO: 641484 - RNA, 19 nt, Artificial Sequence
  Description of Artificial Sequence: Synthetic oligonucleotide
caaaacuaccccucucccc

SEQ ID NO: 641485 - RNA, 19 nt, Artificial Sequence
  Description of Artificial Sequence: Synthetic oligonucleotide
aaagguucaaugacugagu

SEQ ID NO: 641486 - RNA, 19 nt, Artificial Sequence
  Description of Artificial Sequence: Synthetic oligonucleotide
augacugaguagcugccag

SEQ ID NO: 641487 - RNA, 19 nt, Artificial Sequence
  Description of Artificial Sequence: Synthetic oligonucleotide
aaggcaugcaaaagcuuuc

SEQ ID NO: 641488 - RNA, 19 nt, Artificial Sequence
  Description of Artificial Sequence: Synthetic oligonucleotide
uuugacccuggcaaucucu

SEQ ID NO: 641489 - RNA, 19 nt, Artificial Sequence
  Description of Artificial Sequence: Synthetic oligonucleotide
agaauugaagugaauggga

SEQ ID NO: 641490 - RNA, 19 nt, Artificial Sequence
  Description of Artificial Sequence: Synthetic oligonucleotide
auucucauuauaguagcgu

SEQ ID NO: 641491 - RNA, 19 nt, Artificial Sequence
  Description of Artificial Sequence: Synthetic oligonucleotide
uuagaggaaugaacacuca

SEQ ID NO: 641492 - RNA, 19 nt, Artificial Sequence
  Description of Artificial Sequence: Synthetic oligonucleotide
acugauuacccuggggccg

SEQ ID NO: 641493 - RNA, 19 nt, Artificial Sequence
  Description of Artificial Sequence: Synthetic oligonucleotide
auuagguuccaaggguaac

SEQ ID NO: 641494 - RNA, 19 nt, Artificial Sequence
  Description of Artificial Sequence: Synthetic oligonucleotide
ugaggaggguacauaacau

SEQ ID NO: 641495 - RNA, 19 nt, Artificial Sequence
  Description of Artificial Sequence: Synthetic oligonucleotide
caagcuuccuuccgaagag

SEQ ID NO: 641496 - RNA, 19 nt, Artificial Sequence
  Description of Artificial Sequence: Synthetic oligonucleotide
gauggagcccauccuaaac

SEQ ID NO: 641497 - RNA, 19 nt, Artificial Sequence
  Description of Artificial Sequence: Synthetic oligonucleotide
guaaagcauguccagguga

SEQ ID NO: 641498 - RNA, 19 nt, Artificial Sequence
  Description of Artificial Sequence: Synthetic oligonucleotide
gaucucuuggacguaagga

SEQ ID NO: 641499 - RNA, 19 nt, Artificial Sequence
  Description of Artificial Sequence: Synthetic oligonucleotide
auggagcccauccuaaacu

SEQ ID NO: 641500 - RNA, 19 nt, Artificial Sequence
  Description of Artificial Sequence: Synthetic oligonucleotide
ugggacacccuuccgacgu

SEQ ID NO: 641501 - RNA, 19 nt, Artificial Sequence
  Description of Artificial Sequence: Synthetic oligonucleotide
cacugauuacccuggggcc

SEQ ID NO: 641502 - RNA, 19 nt, Artificial Sequence
  Description of Artificial Sequence: Synthetic oligonucleotide
cuugugagaguaguccagg

SEQ ID NO: 641503 - RNA, 19 nt, Artificial Sequence
  Description of Artificial Sequence: Synthetic oligonucleotide
cagacuggccaacucauug

SEQ ID NO: 641504 - RNA, 19 nt, Artificial Sequence
  Description of Artificial Sequence: Synthetic oligonucleotide
ucggaauguccuuuucccc

SEQ ID NO: 641505 - RNA, 19 nt, Artificial Sequence
  Description of Artificial Sequence: Synthetic oligonucleotide
uccaaugggaucugucuaa

SEQ ID NO: 641506 - RNA, 19 nt, Artificial Sequence
  Description of Artificial Sequence: Synthetic oligonucleotide
uccuuagggaaggaagugc

SEQ ID NO: 641507 - RNA, 19 nt, Artificial Sequence
  Description of Artificial Sequence: Synthetic oligonucleotide
ugacaguggguaucaauaa

SEQ ID NO: 641508 - RNA, 19 nt, Artificial Sequence
  Description of Artificial Sequence: Synthetic oligonucleotide
ggcaaaacuaccccucucc

SEQ ID NO: 641509 - RNA, 19 nt, Artificial Sequence
  Description of Artificial Sequence: Synthetic oligonucleotide
ucgagggcucgcaaucagg

SEQ ID NO: 641510 - RNA, 19 nt, Artificial Sequence
  Description of Artificial Sequence: Synthetic oligonucleotide
auaaagcccuccuccaggu

SEQ ID NO: 641511 - RNA, 19 nt, Artificial Sequence
  Description of Artificial Sequence: Synthetic oligonucleotide
aguccaguagcuggcauag

SEQ ID NO: 641512 - RNA, 19 nt, Artificial Sequence
  Description of Artificial Sequence: Synthetic oligonucleotide
gaauugaagugaaugggaa

SEQ ID NO: 641513 - RNA, 19 nt, Artificial Sequence
  Description of Artificial Sequence: Synthetic oligonucleotide
uaguagcgugcaaaaugag

SEQ ID NO: 641514 - RNA, 19 nt, Artificial Sequence
  Description of Artificial Sequence: Synthetic oligonucleotide
uuccuuccgaagagaagcc

SEQ ID NO: 641515 - RNA, 19 nt, Artificial Sequence
  Description of Artificial Sequence: Synthetic oligonucleotide
cugaaacuccuuagggaag

SEQ ID NO: 641516 - RNA, 19 nt, Artificial Sequence
  Description of Artificial Sequence: Synthetic oligonucleotide
guaaggaaccuucgagggc

SEQ ID NO: 641517 - RNA, 19 nt, Artificial Sequence
  Description of Artificial Sequence: Synthetic oligonucleotide
ugggcguacuggcaaagac

SEQ ID NO: 641518 - RNA, 19 nt, Artificial Sequence
  Description of Artificial Sequence: Synthetic oligonucleotide
cauagucacaccauggacu

SEQ ID NO: 641519 - RNA, 19 nt, Artificial Sequence
  Description of Artificial Sequence: Synthetic oligonucleotide
augcaaaagcuuucuuucu

SEQ ID NO: 641520 - RNA, 19 nt, Artificial Sequence
  Description of Artificial Sequence: Synthetic oligonucleotide
gaagucagagaugcagccc

SEQ ID NO: 641521 - RNA, 19 nt, Artificial Sequence
  Description of Artificial Sequence: Synthetic oligonucleotide
gacugaguagcugccagug

SEQ ID NO: 641522 - RNA, 19 nt, Artificial Sequence
  Description of Artificial Sequence: Synthetic oligonucleotide
agcaggcaaaacuaccccu

SEQ ID NO: 641523 - RNA, 19 nt, Artificial Sequence
  Description of Artificial Sequence: Synthetic oligonucleotide
uucaagggaggagugggca

SEQ ID NO: 641524 - RNA, 19 nt, Artificial Sequence
  Description of Artificial Sequence: Synthetic oligonucleotide
aguacugcugugaagccca

SEQ ID NO: 641525 - RNA, 19 nt, Artificial Sequence
  Description of Artificial Sequence: Synthetic oligonucleotide
auugcucacugauuacccu

SEQ ID NO: 641526 - RNA, 19 nt, Artificial Sequence
  Description of Artificial Sequence: Synthetic oligonucleotide
gauaaccaggagucuuaug

SEQ ID NO: 641527 - RNA, 19 nt, Artificial Sequence
  Description of Artificial Sequence: Synthetic oligonucleotide
uucgagggcucgcaaucag

SEQ ID NO: 641528 - RNA, 19 nt, Artificial Sequence
  Description of Artificial Sequence: Synthetic oligonucleotide
uuccaaggguaacauccca

SEQ ID NO: 641529 - RNA, 19 nt, Artificial Sequence
  Description of Artificial Sequence: Synthetic oligonucleotide
cuaucaggcagcacugguc

SEQ ID NO: 641530 - RNA, 19 nt, Artificial Sequence
  Description of Artificial Sequence: Synthetic oligonucleotide
auuacccuggggccguguc

SEQ ID NO: 641531 - RNA, 19 nt, Artificial Sequence
  Description of Artificial Sequence: Synthetic oligonucleotide
uccaaggguaacaucccau

SEQ ID NO: 641532 - RNA, 19 nt, Artificial Sequence
  Description of Artificial Sequence: Synthetic oligonucleotide
gaucugucuaagggcaucc

SEQ ID NO: 641533 - RNA, 19 nt, Artificial Sequence
  Description of Artificial Sequence: Synthetic oligonucleotide
caaugggaucugucuaagg

SEQ ID NO: 641534 - RNA, 19 nt, Artificial Sequence
  Description of Artificial Sequence: Synthetic oligonucleotide
ucgaggacgcgacgcacag

SEQ ID NO: 641535 - RNA, 19 nt, Artificial Sequence
  Description of Artificial Sequence: Synthetic oligonucleotide
ugugaagcccaccgacaug

SEQ ID NO: 641536 - RNA, 19 nt, Artificial Sequence
  Description of Artificial Sequence: Synthetic oligonucleotide
uuguaaagguccccuugaa

SEQ ID NO: 641537 - RNA, 19 nt, Artificial Sequence
  Description of Artificial Sequence: Synthetic oligonucleotide
ucccauaggccaucaguca

SEQ ID NO: 641538 - RNA, 19 nt, Artificial Sequence
  Description of Artificial Sequence: Synthetic oligonucleotide
ucgccagcaggcaaaacua

SEQ ID NO: 641539 - RNA, 19 nt, Artificial Sequence
  Description of Artificial Sequence: Synthetic oligonucleotide
aguguacuuuauucagacu

SEQ ID NO: 641540 - RNA, 19 nt, Artificial Sequence
  Description of Artificial Sequence: Synthetic oligonucleotide
agacuggccaacucauugu

SEQ ID NO: 641541 - RNA, 19 nt, Artificial Sequence
  Description of Artificial Sequence: Synthetic oligonucleotide
cauuauaguagcgugcaaa

SEQ ID NO: 641542 - RNA, 19 nt, Artificial Sequence
  Description of Artificial Sequence: Synthetic oligonucleotide
cguaaggaaccuucgaggg

SEQ ID NO: 641543 - RNA, 19 nt, Artificial Sequence
  Description of Artificial Sequence: Synthetic oligonucleotide
ggagucuuauggcugcuag

SEQ ID NO: 641544 - RNA, 19 nt, Artificial Sequence
  Description of Artificial Sequence: Synthetic oligonucleotide
agcuucacggcaguggaug

SEQ ID NO: 641545 - RNA, 19 nt, Artificial Sequence
  Description of Artificial Sequence: Synthetic oligonucleotide
cacauugccgggcucccgg

SEQ ID NO: 641546 - RNA, 19 nt, Artificial Sequence
  Description of Artificial Sequence: Synthetic oligonucleotide
cccauccuaaacuaucagg

SEQ ID NO: 641547 - RNA, 19 nt, Artificial Sequence
  Description of Artificial Sequence: Synthetic oligonucleotide
ugcucccuguucaaagacu

SEQ ID NO: 641548 - RNA, 19 nt, Artificial Sequence
  Description of Artificial Sequence: Synthetic oligonucleotide
ggaguaaagcauguccagg

SEQ ID NO: 641549 - RNA, 19 nt, Artificial Sequence
  Description of Artificial Sequence: Synthetic oligonucleotide
uccgaagagaagccauuuc

SEQ ID NO: 641550 - RNA, 19 nt, Artificial Sequence
  Description of Artificial Sequence: Synthetic oligonucleotide
uaacauagucaguggggaa

SEQ ID NO: 641551 - RNA, 19 nt, Artificial Sequence
  Description of Artificial Sequence: Synthetic oligonucleotide
gucuuauggcugcuagucc

SEQ ID NO: 641552 - RNA, 19 nt, Artificial Sequence
  Description of Artificial Sequence: Synthetic oligonucleotide
cacaccauggacuacuaua

SEQ ID NO: 641553 - RNA, 19 nt, Artificial Sequence
  Description of Artificial Sequence: Synthetic oligonucleotide
ugguguagcgagguggugu

SEQ ID NO: 641554 - RNA, 19 nt, Artificial Sequence
  Description of Artificial Sequence: Synthetic oligonucleotide
aggcgacugguguucuccc

SEQ ID NO: 641555 - RNA, 19 nt, Artificial Sequence
  Description of Artificial Sequence: Synthetic oligonucleotide
uuauaguagcgugcaaaau

SEQ ID NO: 641556 - RNA, 19 nt, Artificial Sequence
  Description of Artificial Sequence: Synthetic oligonucleotide
agcgugcaaaaugagggug

SEQ ID NO: 641557 - RNA, 19 nt, Artificial Sequence
  Description of Artificial Sequence: Synthetic oligonucleotide
cagcaggcaaaacuacccc

SEQ ID NO: 641558 - RNA, 19 nt, Artificial Sequence
  Description of Artificial Sequence: Synthetic oligonucleotide
ugcgcuugcugggacaccc

SEQ ID NO: 641559 - RNA, 19 nt, Artificial Sequence
  Description of Artificial Sequence: Synthetic oligonucleotide
cauccuaaacuaucaggca

SEQ ID NO: 641560 - RNA, 19 nt, Artificial Sequence
  Description of Artificial Sequence: Synthetic oligonucleotide
agggugacagccaaaggcu

SEQ ID NO: 641561 - RNA, 19 nt, Artificial Sequence
  Description of Artificial Sequence: Synthetic oligonucleotide
ggaucucuuggacguaagg

SEQ ID NO: 641562 - RNA, 19 nt, Artificial Sequence
  Description of Artificial Sequence: Synthetic oligonucleotide
auugccgggcucccgggag

SEQ ID NO: 641563 - RNA, 19 nt, Artificial Sequence
  Description of Artificial Sequence: Synthetic oligonucleotide
gaggcgacugguguucucc

SEQ ID NO: 641564 - RNA, 19 nt, Artificial Sequence
  Description of Artificial Sequence: Synthetic oligonucleotide
gacauguuagggaaguacu

SEQ ID NO: 641565 - RNA, 19 nt, Artificial Sequence
  Description of Artificial Sequence: Synthetic oligonucleotide
aucugucuaagggcauccc

SEQ ID NO: 641566 - RNA, 19 nt, Artificial Sequence
  Description of Artificial Sequence: Synthetic oligonucleotide
gaugaggaggguacauaac

SEQ ID NO: 641567 - RNA, 19 nt, Artificial Sequence
  Description of Artificial Sequence: Synthetic oligonucleotide
uauccagacuggccaacuc

SEQ ID NO: 641568 - RNA, 19 nt, Artificial Sequence
  Description of Artificial Sequence: Synthetic oligonucleotide
ccguaaggcaugcaaaagc

SEQ ID NO: 641569 - RNA, 19 nt, Artificial Sequence
  Description of Artificial Sequence: Synthetic oligonucleotide
ucuuggacguaaggaaccu

SEQ ID NO: 641570 - RNA, 19 nt, Artificial Sequence
  Description of Artificial Sequence: Synthetic oligonucleotide
aacuggucggcuggaggag

SEQ ID NO: 641571 - RNA, 19 nt, Artificial Sequence
  Description of Artificial Sequence: Synthetic oligonucleotide
uggagcccauccuaaacua

SEQ ID NO: 641572 - RNA, 19 nt, Artificial Sequence
  Description of Artificial Sequence: Synthetic oligonucleotide
aguacccauccaccaaaca

SEQ ID NO: 641573 - RNA, 19 nt, Artificial Sequence
  Description of Artificial Sequence: Synthetic oligonucleotide
cacccuuccgacgugcugc

SEQ ID NO: 641574 - RNA, 19 nt, Artificial Sequence
  Description of Artificial Sequence: Synthetic oligonucleotide
gugacaguggguaucaaua

SEQ ID NO: 641575 - RNA, 19 nt, Artificial Sequence
  Description of Artificial Sequence: Synthetic oligonucleotide
accgccagaguaugggaca

SEQ ID NO: 641576 - RNA, 19 nt, Artificial Sequence
  Description of Artificial Sequence: Synthetic oligonucleotide
agcgagguggugucuccuc

SEQ ID NO: 641577 - RNA, 19 nt, Artificial Sequence
  Description of Artificial Sequence: Synthetic oligonucleotide
cugcgaacuggucggcugg

SEQ ID NO: 641578 - RNA, 19 nt, Artificial Sequence
  Description of Artificial Sequence: Synthetic oligonucleotide
guaugcaaggccaggccug

SEQ ID NO: 641579 - RNA, 19 nt, Artificial Sequence
  Description of Artificial Sequence: Synthetic oligonucleotide
cugaguguuucagcaagac

SEQ ID NO: 641580 - RNA, 19 nt, Artificial Sequence
  Description of Artificial Sequence: Synthetic oligonucleotide
gugcgggccacaucguucc

SEQ ID NO: 641581 - RNA, 19 nt, Artificial Sequence
  Description of Artificial Sequence: Synthetic oligonucleotide
caacaaagguucaaugacu

SEQ ID NO: 641582 - RNA, 19 nt, Artificial Sequence
  Description of Artificial Sequence: Synthetic oligonucleotide
uaguccaguagcuggcaua

SEQ ID NO: 641583 - RNA, 19 nt, Artificial Sequence
  Description of Artificial Sequence: Synthetic oligonucleotide
uaccccucuccccaaccca

SEQ ID NO: 641584 - RNA, 19 nt, Artificial Sequence
  Description of Artificial Sequence: Synthetic oligonucleotide
ugggacuuagaggaaugaa

SEQ ID NO: 641585 - RNA, 19 nt, Artificial Sequence
  Description of Artificial Sequence: Synthetic oligonucleotide
gauuagguuccaaggguaa

SEQ ID NO: 641586 - RNA, 19 nt, Artificial Sequence
  Description of Artificial Sequence: Synthetic oligonucleotide
uggaucccaccaauggaua

SEQ ID NO: 641587 - RNA, 19 nt, Artificial Sequence
  Description of Artificial Sequence: Synthetic oligonucleotide
agcccaccgacauguuagg

SEQ ID NO: 641588 - RNA, 19 nt, Artificial Sequence
  Description of Artificial Sequence: Synthetic oligonucleotide
uguagcgagguggugucuc

SEQ ID NO: 641589 - RNA, 19 nt, Artificial Sequence
  Description of Artificial Sequence: Synthetic oligonucleotide
gaugggcguacuggcaaag

SEQ ID NO: 641590 - RNA, 19 nt, Artificial Sequence
  Description of Artificial Sequence: Synthetic oligonucleotide
ggacgcgacgcacagcugc

SEQ ID NO: 641591 - RNA, 19 nt, Artificial Sequence
  Description of Artificial Sequence: Synthetic oligonucleotide
aucucucgaacuguaugca

SEQ ID NO: 641592 - RNA, 19 nt, Artificial Sequence
  Description of Artificial Sequence: Synthetic oligonucleotide
gcauagucacaccauggac

SEQ ID NO: 641593 - RNA, 19 nt, Artificial Sequence
  Description of Artificial Sequence: Synthetic oligonucleotide
cuaccccucuccccaaccc

SEQ ID NO: 641594 - RNA, 19 nt, Artificial Sequence
  Description of Artificial Sequence: Synthetic oligonucleotide
ucccaccaauggauaacca

SEQ ID NO: 641595 - RNA, 19 nt, Artificial Sequence
  Description of Artificial Sequence: Synthetic oligonucleotide
cccaccaauggauaaccag

SEQ ID NO: 641596 - RNA, 19 nt, Artificial Sequence
  Description of Artificial Sequence: Synthetic oligonucleotide
ggcauagucacaccaugga

SEQ ID NO: 641597 - RNA, 19 nt, Artificial Sequence
  Description of Artificial Sequence: Synthetic oligonucleotide
gacgcgacgcacagcugcg

SEQ ID NO: 641598 - RNA, 19 nt, Artificial Sequence
  Description of Artificial Sequence: Synthetic oligonucleotide
acuggucggcuggaggagg

SEQ ID NO: 641599 - RNA, 19 nt, Artificial Sequence
  Description of Artificial Sequence: Synthetic oligonucleotide
guagcgagguggugucucc

SEQ ID NO: 641600 - RNA, 19 nt, Artificial Sequence
  Description of Artificial Sequence: Synthetic oligonucleotide
ccccuugaaagacagcuug

SEQ ID NO: 641601 - RNA, 19 nt, Artificial Sequence
  Description of Artificial Sequence: Synthetic oligonucleotide
agaguaugggacagugacu

SEQ ID NO: 641602 - RNA, 19 nt, Artificial Sequence
  Description of Artificial Sequence: Synthetic oligonucleotide
uccuuccgaagagaagcca

SEQ ID NO: 641603 - RNA, 19 nt, Artificial Sequence
  Description of Artificial Sequence: Synthetic oligonucleotide
ggcguacuggcaaagacuc

SEQ ID NO: 641604 - RNA, 19 nt, Artificial Sequence
  Description of Artificial Sequence: Synthetic oligonucleotide
uacuugaccuugcgccgcu

SEQ ID NO: 641605 - RNA, 19 nt, Artificial Sequence
  Description of Artificial Sequence: Synthetic oligonucleotide
gucuaagggcaucccgggc

SEQ ID NO: 641606 - RNA, 19 nt, Artificial Sequence
  Description of Artificial Sequence: Synthetic oligonucleotide
cacuggucauccuuugcca

SEQ ID NO: 641607 - RNA, 19 nt, Artificial Sequence
  Description of Artificial Sequence: Synthetic oligonucleotide
agauggagcccauccuaaa

SEQ ID NO: 641608 - RNA, 19 nt, Artificial Sequence
  Description of Artificial Sequence: Synthetic oligonucleotide
guagaggcgacugguguuc

SEQ ID NO: 641609 - RNA, 19 nt, Artificial Sequence
  Description of Artificial Sequence: Synthetic oligonucleotide
gaccgccagaguaugggac

SEQ ID NO: 641610 - RNA, 19 nt, Artificial Sequence
  Description of Artificial Sequence: Synthetic oligonucleotide
cuggucggcuggaggaggc

SEQ ID NO: 641611 - RNA, 19 nt, Artificial Sequence
  Description of Artificial Sequence: Synthetic oligonucleotide
agaggcgacugguguucuc

SEQ ID NO: 641612 - RNA, 19 nt, Artificial Sequence
  Description of Artificial Sequence: Synthetic oligonucleotide
gguguucucccggaggacc

SEQ ID NO: 641613 - RNA, 19 nt, Artificial Sequence
  Description of Artificial Sequence: Synthetic oligonucleotide
gcaaaaugagggugacagc

SEQ ID NO: 641614 - RNA, 19 nt, Artificial Sequence
  Description of Artificial Sequence: Synthetic oligonucleotide
uucaggaguuccucccaua

SEQ ID NO: 641615 - RNA, 19 nt, Artificial Sequence
  Description of Artificial Sequence: Synthetic oligonucleotide
guaggucaguacugcugug

SEQ ID NO: 641616 - RNA, 19 nt, Artificial Sequence
  Description of Artificial Sequence: Synthetic oligonucleotide
uuccgaagagaagccauuu

SEQ ID NO: 641617 - RNA, 19 nt, Artificial Sequence
  Description of Artificial Sequence: Synthetic oligonucleotide
aggcaugcaaaagcuuucu

SEQ ID NO: 641618 - RNA, 19 nt, Artificial Sequence
  Description of Artificial Sequence: Synthetic oligonucleotide
uccccuugaaagacagcuu

SEQ ID NO: 641619 - RNA, 19 nt, Artificial Sequence
  Description of Artificial Sequence: Synthetic oligonucleotide
cagggugcaaagaggaucu

SEQ ID NO: 641620 - RNA, 19 nt, Artificial Sequence
  Description of Artificial Sequence: Synthetic oligonucleotide
cccauaggccaucagucag

SEQ ID NO: 641621 - RNA, 19 nt, Artificial Sequence
  Description of Artificial Sequence: Synthetic oligonucleotide
cuaaacuaucaggcagcac

SEQ ID NO: 641622 - RNA, 19 nt, Artificial Sequence
  Description of Artificial Sequence: Synthetic oligonucleotide
ucccgguggcuccuuggca

SEQ ID NO: 641623 - RNA, 19 nt, Artificial Sequence
  Description of Artificial Sequence: Synthetic oligonucleotide
acacccuuccgacgugcug

SEQ ID NO: 641624 - RNA, 19 nt, Artificial Sequence
  Description of Artificial Sequence: Synthetic oligonucleotide
ccaaggguaacaucccauc

SEQ ID NO: 641625 - RNA, 19 nt, Artificial Sequence
  Description of Artificial Sequence: Synthetic oligonucleotide
ccuugcgccgcuccgacgc

SEQ ID NO: 641626 - RNA, 19 nt, Artificial Sequence
  Description of Artificial Sequence: Synthetic oligonucleotide
gguguagcgaggugguguc

SEQ ID NO: 641627 - RNA, 19 nt, Artificial Sequence
  Description of Artificial Sequence: Synthetic oligonucleotide
caaacagcaggugaagccu

SEQ ID NO: 641628 - RNA, 19 nt, Artificial Sequence
  Description of Artificial Sequence: Synthetic oligonucleotide
accuucgagggcucgcaau

SEQ ID NO: 641629 - RNA, 19 nt, Artificial Sequence
  Description of Artificial Sequence: Synthetic oligonucleotide
ugaccuugcgccgcuccga

SEQ ID NO: 641630 - RNA, 19 nt, Artificial Sequence
  Description of Artificial Sequence: Synthetic oligonucleotide
gaccuugcgccgcuccgac

SEQ ID NO: 641631 - RNA, 19 nt, Artificial Sequence
  Description of Artificial Sequence: Synthetic oligonucleotide
gaaccuucgagggcucgca

SEQ ID NO: 641632 - RNA, 19 nt, Artificial Sequence
  Description of Artificial Sequence: Synthetic oligonucleotide
gacgcacagcugcgaacug

SEQ ID NO: 641633 - RNA, 19 nt, Artificial Sequence
  Description of Artificial Sequence: Synthetic oligonucleotide
gguacacuugugagaguag

SEQ ID NO: 641634 - RNA, 19 nt, Artificial Sequence
  Description of Artificial Sequence: Synthetic oligonucleotide
gagucuuauggcugcuagu

SEQ ID NO: 641635 - RNA, 19 nt, Artificial Sequence
  Description of Artificial Sequence: Synthetic oligonucleotide
gcugcgaacuggucggcug

SEQ ID NO: 641636 - RNA, 19 nt, Artificial Sequence
  Description of Artificial Sequence: Synthetic oligonucleotide
uccucggcaccuggcgagg

SEQ ID NO: 641637 - RNA, 19 nt, Artificial Sequence
  Description of Artificial Sequence: Synthetic oligonucleotide
agcuuccuuccgaagagaa

SEQ ID NO: 641638 - RNA, 19 nt, Artificial Sequence
  Description of Artificial Sequence: Synthetic oligonucleotide
uguucucccggaggaccgc

SEQ ID NO: 641639 - RNA, 19 nt, Artificial Sequence
  Description of Artificial Sequence: Synthetic oligonucleotide
uccucucggaauguccuuu

SEQ ID NO: 641640 - RNA, 19 nt, Artificial Sequence
  Description of Artificial Sequence: Synthetic oligonucleotide
cucucggaauguccuuuuc

SEQ ID NO: 641641 - RNA, 19 nt, Artificial Sequence
  Description of Artificial Sequence: Synthetic oligonucleotide
gggcucgcaaucaggaagc

SEQ ID NO: 641642 - RNA, 19 nt, Artificial Sequence
  Description of Artificial Sequence: Synthetic oligonucleotide
agggugcgucuguuuccac

SEQ ID NO: 641643 - RNA, 19 nt, Artificial Sequence
  Description of Artificial Sequence: Synthetic oligonucleotide
gccuauggaucuuguaguc

SEQ ID NO: 641644 - RNA, 19 nt, Artificial Sequence
  Description of Artificial Sequence: Synthetic oligonucleotide
cuuagggaaggaagugcua

SEQ ID NO: 641645 - RNA, 19 nt, Artificial Sequence
  Description of Artificial Sequence: Synthetic oligonucleotide
guacuuuauucagacugcu

SEQ ID NO: 641646 - RNA, 19 nt, Artificial Sequence
  Description of Artificial Sequence: Synthetic oligonucleotide
gacgugcugccccaguggu

SEQ ID NO: 641647 - RNA, 19 nt, Artificial Sequence
  Description of Artificial Sequence: Synthetic oligonucleotide
accuugcgccgcuccgacg

SEQ ID NO: 641648 - RNA, 19 nt, Artificial Sequence
  Description of Artificial Sequence: Synthetic oligonucleotide
ccaauggauaaccaggagu

SEQ ID NO: 641649 - RNA, 19 nt, Artificial Sequence
  Description of Artificial Sequence: Synthetic oligonucleotide
ggguaacaucccauccugg

SEQ ID NO: 641650 - RNA, 19 nt, Artificial Sequence
  Description of Artificial Sequence: Synthetic oligonucleotide
cucgaggacgcgacgcaca

SEQ ID NO: 641651 - RNA, 19 nt, Artificial Sequence
  Description of Artificial Sequence: Synthetic oligonucleotide
gcugcuaguccaguagcug

SEQ ID NO: 641652 - RNA, 19 nt, Artificial Sequence
  Description of Artificial Sequence: Synthetic oligonucleotide
gcccauccuaaacuaucag

SEQ ID NO: 641653 - RNA, 19 nt, Artificial Sequence
  Description of Artificial Sequence: Synthetic oligonucleotide
uccgacgugcugccccagu

SEQ ID NO: 641654 - RNA, 19 nt, Artificial Sequence
  Description of Artificial Sequence: Synthetic oligonucleotide
cacucaaaagguccuggcu

SEQ ID NO: 641655 - RNA, 19 nt, Artificial Sequence
  Description of Artificial Sequence: Synthetic oligonucleotide
caccauggacuacuauaca

SEQ ID NO: 641656 - RNA, 19 nt, Artificial Sequence
  Description of Artificial Sequence: Synthetic oligonucleotide
guacuucaacaaagguuca

SEQ ID NO: 641657 - RNA, 19 nt, Artificial Sequence
  Description of Artificial Sequence: Synthetic oligonucleotide
ccuucgagggcucgcaauc

SEQ ID NO: 641658 - RNA, 19 nt, Artificial Sequence
  Description of Artificial Sequence: Synthetic oligonucleotide
gcagauggagcccauccua

SEQ ID NO: 641659 - RNA, 19 nt, Artificial Sequence
  Description of Artificial Sequence: Synthetic oligonucleotide
cuggccaacucauuguauu

SEQ ID NO: 641660 - RNA, 19 nt, Artificial Sequence
  Description of Artificial Sequence: Synthetic oligonucleotide
cgacauguuagggaaguac

SEQ ID NO: 641661 - RNA, 19 nt, Artificial Sequence
  Description of Artificial Sequence: Synthetic oligonucleotide
uagaggcgacugguguucu

SEQ ID NO: 641662 - RNA, 19 nt, Artificial Sequence
  Description of Artificial Sequence: Synthetic oligonucleotide
cuuccgacgugcugcccca

SEQ ID NO: 641663 - RNA, 19 nt, Artificial Sequence
  Description of Artificial Sequence: Synthetic oligonucleotide
ggaugcucaaucaccaccu

SEQ ID NO: 641664 - RNA, 19 nt, Artificial Sequence
  Description of Artificial Sequence: Synthetic oligonucleotide
uagcgagguggugucuccu

SEQ ID NO: 641665 - RNA, 19 nt, Artificial Sequence
  Description of Artificial Sequence: Synthetic oligonucleotide
agggugcaaagaggaucuc

SEQ ID NO: 641666 - RNA, 19 nt, Artificial Sequence
  Description of Artificial Sequence: Synthetic oligonucleotide
cugggacuuagaggaauga

SEQ ID NO: 641667 - RNA, 19 nt, Artificial Sequence
  Description of Artificial Sequence: Synthetic oligonucleotide
cuugcgccgcuccgacgcc

SEQ ID NO: 641668 - RNA, 19 nt, Artificial Sequence
  Description of Artificial Sequence: Synthetic oligonucleotide
ugcgggccacaucguuccc

SEQ ID NO: 641669 - RNA, 19 nt, Artificial Sequence
  Description of Artificial Sequence: Synthetic oligonucleotide
augggcguacuggcaaaga

SEQ ID NO: 641670 - RNA, 19 nt, Artificial Sequence
  Description of Artificial Sequence: Synthetic oligonucleotide
ggaaccuucgagggcucgc

SEQ ID NO: 641671 - RNA, 19 nt, Artificial Sequence
  Description of Artificial Sequence: Synthetic oligonucleotide
ccaaugggaucugucuaag

SEQ ID NO: 641672 - RNA, 19 nt, Artificial Sequence
  Description of Artificial Sequence: Synthetic oligonucleotide
cccaccgacauguuaggga

SEQ ID NO: 641673 - RNA, 19 nt, Artificial Sequence
  Description of Artificial Sequence: Synthetic oligonucleotide
cuucgagggcucgcaauca

SEQ ID NO: 641674 - RNA, 19 nt, Artificial Sequence
  Description of Artificial Sequence: Synthetic oligonucleotide
ggaucugucuaagggcauc

SEQ ID NO: 641675 - RNA, 19 nt, Artificial Sequence
  Description of Artificial Sequence: Synthetic oligonucleotide
ggaggaccgccagaguaug

SEQ ID NO: 641676 - RNA, 19 nt, Artificial Sequence
  Description of Artificial Sequence: Synthetic oligonucleotide
uggucggcuggaggaggcc

SEQ ID NO: 641677 - RNA, 19 nt, Artificial Sequence
  Description of Artificial Sequence: Synthetic oligonucleotide
aucugaccagucacucccu

SEQ ID NO: 641678 - RNA, 19 nt, Artificial Sequence
  Description of Artificial Sequence: Synthetic oligonucleotide
agcugcgaacuggucggcu

SEQ ID NO: 641679 - RNA, 19 nt, Artificial Sequence
  Description of Artificial Sequence: Synthetic oligonucleotide
uggccccucgaggacgcga

SEQ ID NO: 641680 - RNA, 19 nt, Artificial Sequence
  Description of Artificial Sequence: Synthetic oligonucleotide
ugauuacccuggggccgug

SEQ ID NO: 641681 - RNA, 19 nt, Artificial Sequence
  Description of Artificial Sequence: Synthetic oligonucleotide
ggaccgccagaguauggga

SEQ ID NO: 641682 - RNA, 19 nt, Artificial Sequence
  Description of Artificial Sequence: Synthetic oligonucleotide
ccgggcuuucagacgcugg

SEQ ID NO: 641683 - RNA, 19 nt, Artificial Sequence
  Description of Artificial Sequence: Synthetic oligonucleotide
cuuccgaagagaagccauu

SEQ ID NO: 641684 - RNA, 19 nt, Artificial Sequence
  Description of Artificial Sequence: Synthetic oligonucleotide
guauccagacuggccaacu

SEQ ID NO: 641685 - RNA, 19 nt, Artificial Sequence
  Description of Artificial Sequence: Synthetic oligonucleotide
ggugcaaagaggaucucuu

SEQ ID NO: 641686 - RNA, 19 nt, Artificial Sequence
  Description of Artificial Sequence: Synthetic oligonucleotide
cugguguagcgagguggug

SEQ ID NO: 641687 - RNA, 19 nt, Artificial Sequence
  Description of Artificial Sequence: Synthetic oligonucleotide
ggacacccuuccgacgugc

SEQ ID NO: 641688 - RNA, 19 nt, Artificial Sequence
  Description of Artificial Sequence: Synthetic oligonucleotide
ugucgccagcaggcaaaac

SEQ ID NO: 641689 - RNA, 19 nt, Artificial Sequence
  Description of Artificial Sequence: Synthetic oligonucleotide
ccuaaacuaucaggcagca

SEQ ID NO: 641690 - RNA, 19 nt, Artificial Sequence
  Description of Artificial Sequence: Synthetic oligonucleotide
agaggaucucuuggacgua

SEQ ID NO: 641691 - RNA, 19 nt, Artificial Sequence
  Description of Artificial Sequence: Synthetic oligonucleotide
gcgacgcacagcugcgaac

SEQ ID NO: 641692 - RNA, 19 nt, Artificial Sequence
  Description of Artificial Sequence: Synthetic oligonucleotide
gaaguagggugcgucuguu

SEQ ID NO: 641693 - RNA, 19 nt, Artificial Sequence
  Description of Artificial Sequence: Synthetic oligonucleotide
gcccaccgacauguuaggg

SEQ ID NO: 641694 - RNA, 19 nt, Artificial Sequence
  Description of Artificial Sequence: Synthetic oligonucleotide
ggaugggcguacuggcaaa

SEQ ID NO: 641695 - RNA, 19 nt, Artificial Sequence
  Description of Artificial Sequence: Synthetic oligonucleotide
cgagggcucgcaaucagga

SEQ ID NO: 641696 - RNA, 19 nt, Artificial Sequence
  Description of Artificial Sequence: Synthetic oligonucleotide
ccagaguaugggacaguga

SEQ ID NO: 641697 - RNA, 19 nt, Artificial Sequence
  Description of Artificial Sequence: Synthetic oligonucleotide
caaagacuccucggcaccu

SEQ ID NO: 641698 - RNA, 19 nt, Artificial Sequence
  Description of Artificial Sequence: Synthetic oligonucleotide
cuauacagaugaggagggu

SEQ ID NO: 641699 - RNA, 19 nt, Artificial Sequence
  Description of Artificial Sequence: Synthetic oligonucleotide
cuggagaauugaagugaau

SEQ ID NO: 641700 - RNA, 19 nt, Artificial Sequence
  Description of Artificial Sequence: Synthetic oligonucleotide
cgugcgggccacaucguuc

SEQ ID NO: 641701 - RNA, 19 nt, Artificial Sequence
  Description of Artificial Sequence: Synthetic oligonucleotide
cagcugcgaacuggucggc

SEQ ID NO: 641702 - RNA, 19 nt, Artificial Sequence
  Description of Artificial Sequence: Synthetic oligonucleotide
gggcguacuggcaaagacu

SEQ ID NO: 641703 - RNA, 19 nt, Artificial Sequence
  Description of Artificial Sequence: Synthetic oligonucleotide
ggccuggaugggcguacug

SEQ ID NO: 641704 - RNA, 19 nt, Artificial Sequence
  Description of Artificial Sequence: Synthetic oligonucleotide
cugcgcuugcugggacacc

SEQ ID NO: 641705 - RNA, 19 nt, Artificial Sequence
  Description of Artificial Sequence: Synthetic oligonucleotide
gcguacuggcaaagacucc

SEQ ID NO: 641706 - RNA, 19 nt, Artificial Sequence
  Description of Artificial Sequence: Synthetic oligonucleotide
aggugcggcggcgggcuga

SEQ ID NO: 641707 - RNA, 19 nt, Artificial Sequence
  Description of Artificial Sequence: Synthetic oligonucleotide
ggaacuggugugguacacu

SEQ ID NO: 641708 - RNA, 19 nt, Artificial Sequence
  Description of Artificial Sequence: Synthetic oligonucleotide
cugauuacccuggggccgu

SEQ ID NO: 641709 - RNA, 19 nt, Artificial Sequence
  Description of Artificial Sequence: Synthetic oligonucleotide
ccccucgaggacgcgacgc

SEQ ID NO: 641710 - RNA, 19 nt, Artificial Sequence
  Description of Artificial Sequence: Synthetic oligonucleotide
ccgccagaguaugggacag

SEQ ID NO: 641711 - RNA, 19 nt, Artificial Sequence
  Description of Artificial Sequence: Synthetic oligonucleotide
cugaagagggaugcucaau

SEQ ID NO: 641712 - RNA, 19 nt, Artificial Sequence
  Description of Artificial Sequence: Synthetic oligonucleotide
ccuuccgaagagaagccau

SEQ ID NO: 641713 - RNA, 19 nt, Artificial Sequence
  Description of Artificial Sequence: Synthetic oligonucleotide
gacacccuuccgacgugcu

SEQ ID NO: 641714 - RNA, 19 nt, Artificial Sequence
  Description of Artificial Sequence: Synthetic oligonucleotide
aggacgcgacgcacagcug

SEQ ID NO: 641715 - RNA, 19 nt, Artificial Sequence
  Description of Artificial Sequence: Synthetic oligonucleotide
gcgaacuggucggcuggag

SEQ ID NO: 641716 - RNA, 19 nt, Artificial Sequence
  Description of Artificial Sequence: Synthetic oligonucleotide
gauuacccuggggccgugu

SEQ ID NO: 641717 - RNA, 19 nt, Artificial Sequence
  Description of Artificial Sequence: Synthetic oligonucleotide
gugucgccagcaggcaaaa

SEQ ID NO: 641718 - RNA, 19 nt, Artificial Sequence
  Description of Artificial Sequence: Synthetic oligonucleotide
ggauaaccaggagucuuau

SEQ ID NO: 641719 - RNA, 19 nt, Artificial Sequence
  Description of Artificial Sequence: Synthetic oligonucleotide
cgugucgccagcaggcaaa

SEQ ID NO: 641720 - RNA, 19 nt, Artificial Sequence
  Description of Artificial Sequence: Synthetic oligonucleotide
ggguaucaauaaagcccuc

SEQ ID NO: 641721 - RNA, 19 nt, Artificial Sequence
  Description of Artificial Sequence: Synthetic oligonucleotide
gccgggcuuucagacgcug

SEQ ID NO: 641722 - RNA, 19 nt, Artificial Sequence
  Description of Artificial Sequence: Synthetic oligonucleotide
cuggccccucgaggacgcg

SEQ ID NO: 641723 - RNA, 19 nt, Artificial Sequence
  Description of Artificial Sequence: Synthetic oligonucleotide
ccucggcaccuggcgaggg

SEQ ID NO: 641724 - RNA, 19 nt, Artificial Sequence
  Description of Artificial Sequence: Synthetic oligonucleotide
ggagcccauccuaaacuau

SEQ ID NO: 641725 - RNA, 19 nt, Artificial Sequence
  Description of Artificial Sequence: Synthetic oligonucleotide
gcaaucucucgaacuguau

SEQ ID NO: 641726 - RNA, 19 nt, Artificial Sequence
  Description of Artificial Sequence: Synthetic oligonucleotide
gugcgucuguuuccacaau

SEQ ID NO: 641727 - RNA, 19 nt, Artificial Sequence
  Description of Artificial Sequence: Synthetic oligonucleotide
guguagcgagguggugucu

SEQ ID NO: 641728 - RNA, 19 nt, Artificial Sequence
  Description of Artificial Sequence: Synthetic oligonucleotide
cgacgcacagcugcgaacu

SEQ ID NO: 641729 - RNA, 19 nt, Artificial Sequence
  Description of Artificial Sequence: Synthetic oligonucleotide
cggcgggcugagcuccggg

SEQ ID NO: 641730 - RNA, 19 nt, Artificial Sequence
  Description of Artificial Sequence: Synthetic oligonucleotide
ccgugucgccagcaggcaa

SEQ ID NO: 641731 - RNA, 19 nt, Artificial Sequence
  Description of Artificial Sequence: Synthetic oligonucleotide
cgaggacgcgacgcacagc

SEQ ID NO: 641732 - RNA, 19 nt, Artificial Sequence
  Description of Artificial Sequence: Synthetic oligonucleotide
cggaggaccgccagaguau

SEQ ID NO: 641733 - RNA, 19 nt, Artificial Sequence
  Description of Artificial Sequence: Synthetic oligonucleotide
ccucucggaauguccuuuu

SEQ ID NO: 641734 - RNA, 19 nt, Artificial Sequence
  Description of Artificial Sequence: Synthetic oligonucleotide
ccgacauguuagggaagua

SEQ ID NO: 641735 - RNA, 19 nt, Artificial Sequence
  Description of Artificial Sequence: Synthetic oligonucleotide
ccauccugguuugcucagu

SEQ ID NO: 641736 - RNA, 19 nt, Artificial Sequence
  Description of Artificial Sequence: Synthetic oligonucleotide
ccgugcgggccacaucguu

SEQ ID NO: 641737 - RNA, 19 nt, Artificial Sequence
  Description of Artificial Sequence: Synthetic oligonucleotide
aaagaguuaaaauaacuuc

SEQ ID NO: 641738 - RNA, 19 nt, Artificial Sequence
  Description of Artificial Sequence: Synthetic oligonucleotide
ugaauuaauauggagaagg

SEQ ID NO: 641739 - RNA, 19 nt, Artificial Sequence
  Description of Artificial Sequence: Synthetic oligonucleotide
augacauguaguuuaaucc

SEQ ID NO: 641740 - RNA, 19 nt, Artificial Sequence
  Description of Artificial Sequence: Synthetic oligonucleotide
uuauaacuuacuaugauca

SEQ ID NO: 641741 - RNA, 19 nt, Artificial Sequence
  Description of Artificial Sequence: Synthetic oligonucleotide
aagaguuaaaauaacuucg

SEQ ID NO: 641742 - RNA, 19 nt, Artificial Sequence
  Description of Artificial Sequence: Synthetic oligonucleotide
ucugagacgauucacaucu

SEQ ID NO: 641743 - RNA, 19 nt, Artificial Sequence
  Description of Artificial Sequence: Synthetic oligonucleotide
aauuaauauggagaaggcc

SEQ ID NO: 641744 - RNA, 19 nt, Artificial Sequence
  Description of Artificial Sequence: Synthetic oligonucleotide
aaaugauuacaaaacauuc

SEQ ID NO: 641745 - RNA, 19 nt, Artificial Sequence
  Description of Artificial Sequence: Synthetic oligonucleotide
cuuacuaugaucacguaag

SEQ ID NO: 641746 - RNA, 19 nt, Artificial Sequence
  Description of Artificial Sequence: Synthetic oligonucleotide
ugaaacuaagcuaagcccc

SEQ ID NO: 641747 - RNA, 19 nt, Artificial Sequence
  Description of Artificial Sequence: Synthetic oligonucleotide
uauaaugcuaaauuuaaaa

SEQ ID NO: 641748 - RNA, 19 nt, Artificial Sequence
  Description of Artificial Sequence: Synthetic oligonucleotide
ucaacacuuagauagaucu

SEQ ID NO: 641749 - RNA, 19 nt, Artificial Sequence
  Description of Artificial Sequence: Synthetic oligonucleotide
aaagguauaaugcuaaauu

SEQ ID NO: 641750 - RNA, 19 nt, Artificial Sequence
  Description of Artificial Sequence: Synthetic oligonucleotide
aauaacuucgguaacuguc

SEQ ID NO: 641751 - RNA, 19 nt, Artificial Sequence
  Description of Artificial Sequence: Synthetic oligonucleotide
uacauggugaauauuuggg

SEQ ID NO: 641752 - RNA, 19 nt, Artificial Sequence
  Description of Artificial Sequence: Synthetic oligonucleotide
ugugauauaauuucaugca

SEQ ID NO: 641753 - RNA, 19 nt, Artificial Sequence
  Description of Artificial Sequence: Synthetic oligonucleotide
uuaagugccaucaguaccc

SEQ ID NO: 641754 - RNA, 19 nt, Artificial Sequence
  Description of Artificial Sequence: Synthetic oligonucleotide
aucaguacccaccuagucc

SEQ ID NO: 641755 - RNA, 19 nt, Artificial Sequence
  Description of Artificial Sequence: Synthetic oligonucleotide
auaccuacugcuuugguag

SEQ ID NO: 641756 - RNA, 19 nt, Artificial Sequence
  Description of Artificial Sequence: Synthetic oligonucleotide
aggguuucuagucaacucc

SEQ ID NO: 641757 - RNA, 19 nt, Artificial Sequence
  Description of Artificial Sequence: Synthetic oligonucleotide
acuuagauagaucucagga

SEQ ID NO: 641758 - RNA, 19 nt, Artificial Sequence
  Description of Artificial Sequence: Synthetic oligonucleotide
uuuauaacuuacuaugauc

SEQ ID NO: 641759 - RNA, 19 nt, Artificial Sequence
  Description of Artificial Sequence: Synthetic oligonucleotide
augauuacaaaacauucca

SEQ ID NO: 641760 - RNA, 19 nt, Artificial Sequence
  Description of Artificial Sequence: Synthetic oligonucleotide
aucuauacgcacaaaauac

SEQ ID NO: 641761 - RNA, 19 nt, Artificial Sequence
  Description of Artificial Sequence: Synthetic oligonucleotide
uuuaagauuccuuaaugaa

SEQ ID NO: 641762 - RNA, 19 nt, Artificial Sequence
  Description of Artificial Sequence: Synthetic oligonucleotide
auuaauauggagaaggcca

SEQ ID NO: 641763 - RNA, 19 nt, Artificial Sequence
  Description of Artificial Sequence: Synthetic oligonucleotide
ucaguauugugucuaaugu

SEQ ID NO: 641764 - RNA, 19 nt, Artificial Sequence
  Description of Artificial Sequence: Synthetic oligonucleotide
uuauuuaguaguugguuca

SEQ ID NO: 641765 - RNA, 19 nt, Artificial Sequence
  Description of Artificial Sequence: Synthetic oligonucleotide
uuacauggugaauauuugg

SEQ ID NO: 641766 - RNA, 19 nt, Artificial Sequence
  Description of Artificial Sequence: Synthetic oligonucleotide
ugucauugcuuucuaagag

SEQ ID NO: 641767 - RNA, 19 nt, Artificial Sequence
  Description of Artificial Sequence: Synthetic oligonucleotide
ugaagugcauaccugagac

SEQ ID NO: 641768 - RNA, 19 nt, Artificial Sequence
  Description of Artificial Sequence: Synthetic oligonucleotide
uaagaagguacccacagaa

SEQ ID NO: 641769 - RNA, 19 nt, Artificial Sequence
  Description of Artificial Sequence: Synthetic oligonucleotide
uaacuuacuaugaucacgu

SEQ ID NO: 641770 - RNA, 19 nt, Artificial Sequence
  Description of Artificial Sequence: Synthetic oligonucleotide
augucaaccgcuuuuaaug

SEQ ID NO: 641771 - RNA, 19 nt, Artificial Sequence
  Description of Artificial Sequence: Synthetic oligonucleotide
auguguuuuagguuagugg

SEQ ID NO: 641772 - RNA, 19 nt, Artificial Sequence
  Description of Artificial Sequence: Synthetic oligonucleotide
agagcuauagcauuugccu

SEQ ID NO: 641773 - RNA, 19 nt, Artificial Sequence
  Description of Artificial Sequence: Synthetic oligonucleotide
uucgguaacugucugagac

SEQ ID NO: 641774 - RNA, 19 nt, Artificial Sequence
  Description of Artificial Sequence: Synthetic oligonucleotide
aacacuuagauagaucuca

SEQ ID NO: 641775 - RNA, 19 nt, Artificial Sequence
  Description of Artificial Sequence: Synthetic oligonucleotide
agugcuagaacccuuggug

SEQ ID NO: 641776 - RNA, 19 nt, Artificial Sequence
  Description of Artificial Sequence: Synthetic oligonucleotide
uaugugauauaauuucaug

SEQ ID NO: 641777 - RNA, 19 nt, Artificial Sequence
  Description of Artificial Sequence: Synthetic oligonucleotide
aaugaagaugcacuaccug

SEQ ID NO: 641778 - RNA, 19 nt, Artificial Sequence
  Description of Artificial Sequence: Synthetic oligonucleotide
agaaucgauuuucacuccc

SEQ ID NO: 641779 - RNA, 19 nt, Artificial Sequence
  Description of Artificial Sequence: Synthetic oligonucleotide
aaaauaacuucgguaacug

SEQ ID NO: 641780 - RNA, 19 nt, Artificial Sequence
  Description of Artificial Sequence: Synthetic oligonucleotide
uuuggugcacucaugguug

SEQ ID NO: 641781 - RNA, 19 nt, Artificial Sequence
  Description of Artificial Sequence: Synthetic oligonucleotide
auaacuuacuaugaucacg

SEQ ID NO: 641782 - RNA, 19 nt, Artificial Sequence
  Description of Artificial Sequence: Synthetic oligonucleotide
cuugggaggaguuauuuag

SEQ ID NO: 641783 - RNA, 19 nt, Artificial Sequence
  Description of Artificial Sequence: Synthetic oligonucleotide
ucaguuuguaaacgcaugc

SEQ ID NO: 641784 - RNA, 19 nt, Artificial Sequence
  Description of Artificial Sequence: Synthetic oligonucleotide
uugaucaaucucuugggag

SEQ ID NO: 641785 - RNA, 19 nt, Artificial Sequence
  Description of Artificial Sequence: Synthetic oligonucleotide
gaaguggaugauuaaauuc

SEQ ID NO: 641786 - RNA, 19 nt, Artificial Sequence
  Description of Artificial Sequence: Synthetic oligonucleotide
ugacauguaguuuaaucca

SEQ ID NO: 641787 - RNA, 19 nt, Artificial Sequence
  Description of Artificial Sequence: Synthetic oligonucleotide
uaguuuaauccagagauca

SEQ ID NO: 641788 - RNA, 19 nt, Artificial Sequence
  Description of Artificial Sequence: Synthetic oligonucleotide
ugucuaauguaauuucuug

SEQ ID NO: 641789 - RNA, 19 nt, Artificial Sequence
  Description of Artificial Sequence: Synthetic oligonucleotide
ucuauacgcacaaaauaca

SEQ ID NO: 641790 - RNA, 19 nt, Artificial Sequence
  Description of Artificial Sequence: Synthetic oligonucleotide
uaagcuaagccccaccgug

SEQ ID NO: 641791 - RNA, 19 nt, Artificial Sequence
  Description of Artificial Sequence: Synthetic oligonucleotide
ugugguuuacucaguauug

SEQ ID NO: 641792 - RNA, 19 nt, Artificial Sequence
  Description of Artificial Sequence: Synthetic oligonucleotide
gaucucaggacauuauuug

SEQ ID NO: 641793 - RNA, 19 nt, Artificial Sequence
  Description of Artificial Sequence: Synthetic oligonucleotide
aguaaggcucaacuuuugc

SEQ ID NO: 641794 - RNA, 19 nt, Artificial Sequence
  Description of Artificial Sequence: Synthetic oligonucleotide
aaguggaugauuaaauucu

SEQ ID NO: 641795 - RNA, 19 nt, Artificial Sequence
  Description of Artificial Sequence: Synthetic oligonucleotide
aguuaaaauaacuucggua

SEQ ID NO: 641796 - RNA, 19 nt, Artificial Sequence
  Description of Artificial Sequence: Synthetic oligonucleotide
acuaagcuaagccccaccg

SEQ ID NO: 641797 - RNA, 19 nt, Artificial Sequence
  Description of Artificial Sequence: Synthetic oligonucleotide
auacgcacaaaauacaaau

SEQ ID NO: 641798 - RNA, 19 nt, Artificial Sequence
  Description of Artificial Sequence: Synthetic oligonucleotide
aacccuuggugugaggucc

SEQ ID NO: 641799 - RNA, 19 nt, Artificial Sequence
  Description of Artificial Sequence: Synthetic oligonucleotide
cuuaagugccaucaguacc

SEQ ID NO: 641800 - RNA, 19 nt, Artificial Sequence
  Description of Artificial Sequence: Synthetic oligonucleotide
acgcacaaaauacaaauca

SEQ ID NO: 641801 - RNA, 19 nt, Artificial Sequence
  Description of Artificial Sequence: Synthetic oligonucleotide
uuagcgaaugacauguagu

SEQ ID NO: 641802 - RNA, 19 nt, Artificial Sequence
  Description of Artificial Sequence: Synthetic oligonucleotide
aacauuagcgaaugacaug

SEQ ID NO: 641803 - RNA, 19 nt, Artificial Sequence
  Description of Artificial Sequence: Synthetic oligonucleotide
cuuagauagaucucaggac

SEQ ID NO: 641804 - RNA, 19 nt, Artificial Sequence
  Description of Artificial Sequence: Synthetic oligonucleotide
cucaaauccacaccagugg

SEQ ID NO: 641805 - RNA, 19 nt, Artificial Sequence
  Description of Artificial Sequence: Synthetic oligonucleotide
acgauucacaucuaagaag

SEQ ID NO: 641806 - RNA, 19 nt, Artificial Sequence
  Description of Artificial Sequence: Synthetic oligonucleotide
gugaaacuaagcuaagccc

SEQ ID NO: 641807 - RNA, 19 nt, Artificial Sequence
  Description of Artificial Sequence: Synthetic oligonucleotide
aagaugcacuaccuggagg

SEQ ID NO: 641808 - RNA, 19 nt, Artificial Sequence
  Description of Artificial Sequence: Synthetic oligonucleotide
auuagcgaaugacauguag

SEQ ID NO: 641809 - RNA, 19 nt, Artificial Sequence
  Description of Artificial Sequence: Synthetic oligonucleotide
guuaguggaagcuauguga

SEQ ID NO: 641810 - RNA, 19 nt, Artificial Sequence
  Description of Artificial Sequence: Synthetic oligonucleotide
uguuuuagcugugagucag

SEQ ID NO: 641811 - RNA, 19 nt, Artificial Sequence
  Description of Artificial Sequence: Synthetic oligonucleotide
ggugaaacuaagcuaagcc

SEQ ID NO: 641812 - RNA, 19 nt, Artificial Sequence
  Description of Artificial Sequence: Synthetic oligonucleotide
ugcaucuauacgcacaaaa

SEQ ID NO: 641813 - RNA, 19 nt, Artificial Sequence
  Description of Artificial Sequence: Synthetic oligonucleotide
aacgcaugcucacacucuc

SEQ ID NO: 641814 - RNA, 19 nt, Artificial Sequence
  Description of Artificial Sequence: Synthetic oligonucleotide
uuucaugcaucuauacgca

SEQ ID NO: 641815 - RNA, 19 nt, Artificial Sequence
  Description of Artificial Sequence: Synthetic oligonucleotide
aucucaggacauuauuugg

SEQ ID NO: 641816 - RNA, 19 nt, Artificial Sequence
  Description of Artificial Sequence: Synthetic oligonucleotide
agacgauucacaucuaaga

SEQ ID NO: 641817 - RNA, 19 nt, Artificial Sequence
  Description of Artificial Sequence: Synthetic oligonucleotide
guuuaagauuccuuaauga

SEQ ID NO: 641818 - RNA, 19 nt, Artificial Sequence
  Description of Artificial Sequence: Synthetic oligonucleotide
aaggccaaaagaugaguca

SEQ ID NO: 641819 - RNA, 19 nt, Artificial Sequence
  Description of Artificial Sequence: Synthetic oligonucleotide
uuuuaaugaagaugcacua

SEQ ID NO: 641820 - RNA, 19 nt, Artificial Sequence
  Description of Artificial Sequence: Synthetic oligonucleotide
acauuagcgaaugacaugu

SEQ ID NO: 641821 - RNA, 19 nt, Artificial Sequence
  Description of Artificial Sequence: Synthetic oligonucleotide
ucaguacccaccuaguccu

SEQ ID NO: 641822 - RNA, 19 nt, Artificial Sequence
  Description of Artificial Sequence: Synthetic oligonucleotide
ucaacacuggcauaucugu

SEQ ID NO: 641823 - RNA, 19 nt, Artificial Sequence
  Description of Artificial Sequence: Synthetic oligonucleotide
ugaagaugcacuaccugga

SEQ ID NO: 641824 - RNA, 19 nt, Artificial Sequence
  Description of Artificial Sequence: Synthetic oligonucleotide
cuguuuaauaguugcacug

SEQ ID NO: 641825 - RNA, 19 nt, Artificial Sequence
  Description of Artificial Sequence: Synthetic oligonucleotide
cacuuuacccaacaagucc

SEQ ID NO: 641826 - RNA, 19 nt, Artificial Sequence
  Description of Artificial Sequence: Synthetic oligonucleotide
uuaauauggagaaggccaa

SEQ ID NO: 641827 - RNA, 19 nt, Artificial Sequence
  Description of Artificial Sequence: Synthetic oligonucleotide
cauuauuuggagaaaggca

SEQ ID NO: 641828 - RNA, 19 nt, Artificial Sequence
  Description of Artificial Sequence: Synthetic oligonucleotide
ucuaagagcccguaucucu

SEQ ID NO: 641829 - RNA, 19 nt, Artificial Sequence
  Description of Artificial Sequence: Synthetic oligonucleotide
uuaguggaagcuaugugau

SEQ ID NO: 641830 - RNA, 19 nt, Artificial Sequence
  Description of Artificial Sequence: Synthetic oligonucleotide
uaaugaagaugcacuaccu

SEQ ID NO: 641831 - RNA, 19 nt, Artificial Sequence
  Description of Artificial Sequence: Synthetic oligonucleotide
uuuagugggagaaucgauu

SEQ ID NO: 641832 - RNA, 19 nt, Artificial Sequence
  Description of Artificial Sequence: Synthetic oligonucleotide
uucuagucaacucccaguc

SEQ ID NO: 641833 - RNA, 19 nt, Artificial Sequence
  Description of Artificial Sequence: Synthetic oligonucleotide
ugacacacucaacacuuag

SEQ ID NO: 641834 - RNA, 19 nt, Artificial Sequence
  Description of Artificial Sequence: Synthetic oligonucleotide
aggcaguaaauuucaaaag

SEQ ID NO: 641835 - RNA, 19 nt, Artificial Sequence
  Description of Artificial Sequence: Synthetic oligonucleotide
auauggagaaggccaaaag

SEQ ID NO: 641836 - RNA, 19 nt, Artificial Sequence
  Description of Artificial Sequence: Synthetic oligonucleotide
guaaggcucaacuuuugcc

SEQ ID NO: 641837 - RNA, 19 nt, Artificial Sequence
  Description of Artificial Sequence: Synthetic oligonucleotide
ucacguaagaaauugucuu

SEQ ID NO: 641838 - RNA, 19 nt, Artificial Sequence
  Description of Artificial Sequence: Synthetic oligonucleotide
guuuaauaguugcacugag

SEQ ID NO: 641839 - RNA, 19 nt, Artificial Sequence
  Description of Artificial Sequence: Synthetic oligonucleotide
ggagaaucgauuuucacuc

SEQ ID NO: 641840 - RNA, 19 nt, Artificial Sequence
  Description of Artificial Sequence: Synthetic oligonucleotide
cucaguauugugucuaaug

SEQ ID NO: 641841 - RNA, 19 nt, Artificial Sequence
  Description of Artificial Sequence: Synthetic oligonucleotide
uugucuaccaguccugggu

SEQ ID NO: 641842 - RNA, 19 nt, Artificial Sequence
  Description of Artificial Sequence: Synthetic oligonucleotide
agugggagaaucgauuuuc

SEQ ID NO: 641843 - RNA, 19 nt, Artificial Sequence
  Description of Artificial Sequence: Synthetic oligonucleotide
aaaagguauaaugcuaaau

SEQ ID NO: 641844 - RNA, 19 nt, Artificial Sequence
  Description of Artificial Sequence: Synthetic oligonucleotide
uuagguuaguggaagcuau

SEQ ID NO: 641845 - RNA, 19 nt, Artificial Sequence
  Description of Artificial Sequence: Synthetic oligonucleotide
uaaacgcaugcucacacuc

SEQ ID NO: 641846 - RNA, 19 nt, Artificial Sequence
  Description of Artificial Sequence: Synthetic oligonucleotide
acucaugguugauaccuac

SEQ ID NO: 641847 - RNA, 19 nt, Artificial Sequence
  Description of Artificial Sequence: Synthetic oligonucleotide
uguuuaauaguugcacuga

SEQ ID NO: 641848 - RNA, 19 nt, Artificial Sequence
  Description of Artificial Sequence: Synthetic oligonucleotide
uauacgcacaaaauacaaa

SEQ ID NO: 641849 - RNA, 19 nt, Artificial Sequence
  Description of Artificial Sequence: Synthetic oligonucleotide
cucacuaucugcauggcca

SEQ ID NO: 641850 - RNA, 19 nt, Artificial Sequence
  Description of Artificial Sequence: Synthetic oligonucleotide
gaggauguguuuuagguua

SEQ ID NO: 641851 - RNA, 19 nt, Artificial Sequence
  Description of Artificial Sequence: Synthetic oligonucleotide
gaagguacccacagaaugc

SEQ ID NO: 641852 - RNA, 19 nt, Artificial Sequence
  Description of Artificial Sequence: Synthetic oligonucleotide
uauaacuuacuaugaucac

SEQ ID NO: 641853 - RNA, 19 nt, Artificial Sequence
  Description of Artificial Sequence: Synthetic oligonucleotide
uuuugguuugaucgagcgc

SEQ ID NO: 641854 - RNA, 19 nt, Artificial Sequence
  Description of Artificial Sequence: Synthetic oligonucleotide
uaggcauugugagaaggcg

SEQ ID NO: 641855 - RNA, 19 nt, Artificial Sequence
  Description of Artificial Sequence: Synthetic oligonucleotide
acacacucaacacuuagau

SEQ ID NO: 641856 - RNA, 19 nt, Artificial Sequence
  Description of Artificial Sequence: Synthetic oligonucleotide
aucgauuuucacucccagg

SEQ ID NO: 641857 - RNA, 19 nt, Artificial Sequence
  Description of Artificial Sequence: Synthetic oligonucleotide
ucgguaacugucugagacg

SEQ ID NO: 641858 - RNA, 19 nt, Artificial Sequence
  Description of Artificial Sequence: Synthetic oligonucleotide
cgauucacaucuaagaagg

SEQ ID NO: 641859 - RNA, 19 nt, Artificial Sequence
  Description of Artificial Sequence: Synthetic oligonucleotide
gagaucacugcuucugggc

SEQ ID NO: 641860 - RNA, 19 nt, Artificial Sequence
  Description of Artificial Sequence: Synthetic oligonucleotide
auaggcauugugagaaggc

SEQ ID NO: 641861 - RNA, 19 nt, Artificial Sequence
  Description of Artificial Sequence: Synthetic oligonucleotide
uuuuagguuaguggaagcu

SEQ ID NO: 641862 - RNA, 19 nt, Artificial Sequence
  Description of Artificial Sequence: Synthetic oligonucleotide
ugucaaccgcuuuuaauga

SEQ ID NO: 641863 - RNA, 19 nt, Artificial Sequence
  Description of Artificial Sequence: Synthetic oligonucleotide
ucgagcgcgagacaguugu

SEQ ID NO: 641864 - RNA, 19 nt, Artificial Sequence
  Description of Artificial Sequence: Synthetic oligonucleotide
guauaaaguucagugcuag

SEQ ID NO: 641865 - RNA, 19 nt, Artificial Sequence
  Description of Artificial Sequence: Synthetic oligonucleotide
gacauguaguuuaauccag

SEQ ID NO: 641866 - RNA, 19 nt, Artificial Sequence
  Description of Artificial Sequence: Synthetic oligonucleotide
gcucaugccaacauuagcg

SEQ ID NO: 641867 - RNA, 19 nt, Artificial Sequence
  Description of Artificial Sequence: Synthetic oligonucleotide
cagagcuauagcauuugcc

SEQ ID NO: 641868 - RNA, 19 nt, Artificial Sequence
  Description of Artificial Sequence: Synthetic oligonucleotide
aggccaaaagaugagucac

SEQ ID NO: 641869 - RNA, 19 nt, Artificial Sequence
  Description of Artificial Sequence: Synthetic oligonucleotide
uguuggcucaguuuguaaa

SEQ ID NO: 641870 - RNA, 19 nt, Artificial Sequence
  Description of Artificial Sequence: Synthetic oligonucleotide
uccacagcaagauugcuuu

SEQ ID NO: 641871 - RNA, 19 nt, Artificial Sequence
  Description of Artificial Sequence: Synthetic oligonucleotide
auugugagaaggcgcuuuc

SEQ ID NO: 641872 - RNA, 19 nt, Artificial Sequence
  Description of Artificial Sequence: Synthetic oligonucleotide
uuuacucaguauugugucu

SEQ ID NO: 641873 - RNA, 19 nt, Artificial Sequence
  Description of Artificial Sequence: Synthetic oligonucleotide
gacgauucacaucuaagaa

SEQ ID NO: 641874 - RNA, 19 nt, Artificial Sequence
  Description of Artificial Sequence: Synthetic oligonucleotide
gugaacucugcuuuuccag

SEQ ID NO: 641875 - RNA, 19 nt, Artificial Sequence
  Description of Artificial Sequence: Synthetic oligonucleotide
uuacuaugaucacguaaga

SEQ ID NO: 641876 - RNA, 19 nt, Artificial Sequence
  Description of Artificial Sequence: Synthetic oligonucleotide
accgcuuuuaaugaagaug

SEQ ID NO: 641877 - RNA, 19 nt, Artificial Sequence
  Description of Artificial Sequence: Synthetic oligonucleotide
ugguuuacucaguauugug

SEQ ID NO: 641878 - RNA, 19 nt, Artificial Sequence
  Description of Artificial Sequence: Synthetic oligonucleotide
acuucgguaacugucugag

SEQ ID NO: 641879 - RNA, 19 nt, Artificial Sequence
  Description of Artificial Sequence: Synthetic oligonucleotide
aauauggagaaggccaaaa

SEQ ID NO: 641880 - RNA, 19 nt, Artificial Sequence
  Description of Artificial Sequence: Synthetic oligonucleotide
uggccaguaaggcucaacu

SEQ ID NO: 641881 - RNA, 19 nt, Artificial Sequence
  Description of Artificial Sequence: Synthetic oligonucleotide
gaucacguaagaaauuguc

SEQ ID NO: 641882 - RNA, 19 nt, Artificial Sequence
  Description of Artificial Sequence: Synthetic oligonucleotide
agaugagucacaguuauuu

SEQ ID NO: 641883 - RNA, 19 nt, Artificial Sequence
  Description of Artificial Sequence: Synthetic oligonucleotide
guuucuagucaacucccag

SEQ ID NO: 641884 - RNA, 19 nt, Artificial Sequence
  Description of Artificial Sequence: Synthetic oligonucleotide
gguaucaucuuguuuuagc

SEQ ID NO: 641885 - RNA, 19 nt, Artificial Sequence
  Description of Artificial Sequence: Synthetic oligonucleotide
ucacuuuacccaacaaguc

SEQ ID NO: 641886 - RNA, 19 nt, Artificial Sequence
  Description of Artificial Sequence: Synthetic oligonucleotide
uuucucaacacuggcauau

SEQ ID NO: 641887 - RNA, 19 nt, Artificial Sequence
  Description of Artificial Sequence: Synthetic oligonucleotide
gauguguuuuagguuagug

SEQ ID NO: 641888 - RNA, 19 nt, Artificial Sequence
  Description of Artificial Sequence: Synthetic oligonucleotide
uacgcacaaaauacaaauc

SEQ ID NO: 641889 - RNA, 19 nt, Artificial Sequence
  Description of Artificial Sequence: Synthetic oligonucleotide
uuugggagacacuggguga

SEQ ID NO: 641890 - RNA, 19 nt, Artificial Sequence
  Description of Artificial Sequence: Synthetic oligonucleotide
uuagugggagaaucgauuu

SEQ ID NO: 641891 - RNA, 19 nt, Artificial Sequence
  Description of Artificial Sequence: Synthetic oligonucleotide
ucucacuaucugcauggcc

SEQ ID NO: 641892 - RNA, 19 nt, Artificial Sequence
  Description of Artificial Sequence: Synthetic oligonucleotide
ugaucacguaagaaauugu

SEQ ID NO: 641893 - RNA, 19 nt, Artificial Sequence
  Description of Artificial Sequence: Synthetic oligonucleotide
gagacgauucacaucuaag

SEQ ID NO: 641894 - RNA, 19 nt, Artificial Sequence
  Description of Artificial Sequence: Synthetic oligonucleotide
aggauguugagugaacucu

SEQ ID NO: 641895 - RNA, 19 nt, Artificial Sequence
  Description of Artificial Sequence: Synthetic oligonucleotide
uuuuagcugugagucaggc

SEQ ID NO: 641896 - RNA, 19 nt, Artificial Sequence
  Description of Artificial Sequence: Synthetic oligonucleotide
aguucggaggcucacugca

SEQ ID NO: 641897 - RNA, 19 nt, Artificial Sequence
  Description of Artificial Sequence: Synthetic oligonucleotide
uauaaaguucagugcuaga

SEQ ID NO: 641898 - RNA, 19 nt, Artificial Sequence
  Description of Artificial Sequence: Synthetic oligonucleotide
uagcgaaugacauguaguu

SEQ ID NO: 641899 - RNA, 19 nt, Artificial Sequence
  Description of Artificial Sequence: Synthetic oligonucleotide
cacuuagauagaucucagg

SEQ ID NO: 641900 - RNA, 19 nt, Artificial Sequence
  Description of Artificial Sequence: Synthetic oligonucleotide
ugagacgauucacaucuaa

SEQ ID NO: 641901 - RNA, 19 nt, Artificial Sequence
  Description of Artificial Sequence: Synthetic oligonucleotide
agcgcgagacaguugugac

SEQ ID NO: 641902 - RNA, 19 nt, Artificial Sequence
  Description of Artificial Sequence: Synthetic oligonucleotide
acagacucagaagacagga

SEQ ID NO: 641903 - RNA, 19 nt, Artificial Sequence
  Description of Artificial Sequence: Synthetic oligonucleotide
uuuacccaacaaguccugg

SEQ ID NO: 641904 - RNA, 19 nt, Artificial Sequence
  Description of Artificial Sequence: Synthetic oligonucleotide
ucaggacauuauuuggaga

SEQ ID NO: 641905 - RNA, 19 nt, Artificial Sequence
  Description of Artificial Sequence: Synthetic oligonucleotide
caggacauuauuuggagaa

SEQ ID NO: 641906 - RNA, 19 nt, Artificial Sequence
  Description of Artificial Sequence: Synthetic oligonucleotide
uugcuuggugaaacuaagc

SEQ ID NO: 641907 - RNA, 19 nt, Artificial Sequence
  Description of Artificial Sequence: Synthetic oligonucleotide
agaucacugcuucugggcu

SEQ ID NO: 641908 - RNA, 19 nt, Artificial Sequence
  Description of Artificial Sequence: Synthetic oligonucleotide
guuugaucgagcgcgagac

SEQ ID NO: 641909 - RNA, 19 nt, Artificial Sequence
  Description of Artificial Sequence: Synthetic oligonucleotide
auaacuucgguaacugucu

SEQ ID NO: 641910 - RNA, 19 nt, Artificial Sequence
  Description of Artificial Sequence: Synthetic oligonucleotide
guuuuagguuaguggaagc

SEQ ID NO: 641911 - RNA, 19 nt, Artificial Sequence
  Description of Artificial Sequence: Synthetic oligonucleotide
aguuauuuaguaguugguu

SEQ ID NO: 641912 - RNA, 19 nt, Artificial Sequence
  Description of Artificial Sequence: Synthetic oligonucleotide
aacuucgguaacugucuga

SEQ ID NO: 641913 - RNA, 19 nt, Artificial Sequence
  Description of Artificial Sequence: Synthetic oligonucleotide
gauaccuacugcuuuggua

SEQ ID NO: 641914 - RNA, 19 nt, Artificial Sequence
  Description of Artificial Sequence: Synthetic oligonucleotide
ucuagucaacucccaguca

SEQ ID NO: 641915 - RNA, 19 nt, Artificial Sequence
  Description of Artificial Sequence: Synthetic oligonucleotide
auugcagugucacuuucau

SEQ ID NO: 641916 - RNA, 19 nt, Artificial Sequence
  Description of Artificial Sequence: Synthetic oligonucleotide
gcaugauccacuuucugug

SEQ ID NO: 641917 - RNA, 19 nt, Artificial Sequence
  Description of Artificial Sequence: Synthetic oligonucleotide
uucggaggcucacugcagc

SEQ ID NO: 641918 - RNA, 19 nt, Artificial Sequence
  Description of Artificial Sequence: Synthetic oligonucleotide
acguaagaaauugucuuug

SEQ ID NO: 641919 - RNA, 19 nt, Artificial Sequence
  Description of Artificial Sequence: Synthetic oligonucleotide
aggcauugugagaaggcgc

SEQ ID NO: 641920 - RNA, 19 nt, Artificial Sequence
  Description of Artificial Sequence: Synthetic oligonucleotide
uuuagguuaguggaagcua

SEQ ID NO: 641921 - RNA, 19 nt, Artificial Sequence
  Description of Artificial Sequence: Synthetic oligonucleotide
uaggugguugaucaaucuc

SEQ ID NO: 641922 - RNA, 19 nt, Artificial Sequence
  Description of Artificial Sequence: Synthetic oligonucleotide
ggacuuaagccgcucaugc

SEQ ID NO: 641923 - RNA, 19 nt, Artificial Sequence
  Description of Artificial Sequence: Synthetic oligonucleotide
guaguugguucacuuuacc

SEQ ID NO: 641924 - RNA, 19 nt, Artificial Sequence
  Description of Artificial Sequence: Synthetic oligonucleotide
gagaaucgauuuucacucc

SEQ ID NO: 641925 - RNA, 19 nt, Artificial Sequence
  Description of Artificial Sequence: Synthetic oligonucleotide
cuauacgcacaaaauacaa

SEQ ID NO: 641926 - RNA, 19 nt, Artificial Sequence
  Description of Artificial Sequence: Synthetic oligonucleotide
uggcucaguuuguaaacgc

SEQ ID NO: 641927 - RNA, 19 nt, Artificial Sequence
  Description of Artificial Sequence: Synthetic oligonucleotide
uagaucucaggacauuauu

SEQ ID NO: 641928 - RNA, 19 nt, Artificial Sequence
  Description of Artificial Sequence: Synthetic oligonucleotide
ucuucccaccaaauaacaa

SEQ ID NO: 641929 - RNA, 19 nt, Artificial Sequence
  Description of Artificial Sequence: Synthetic oligonucleotide
aucacguaagaaauugucu

SEQ ID NO: 641930 - RNA, 19 nt, Artificial Sequence
  Description of Artificial Sequence: Synthetic oligonucleotide
auaguugcacugaguacac

SEQ ID NO: 641931 - RNA, 19 nt, Artificial Sequence
  Description of Artificial Sequence: Synthetic oligonucleotide
guaucaucuuguuuuagcu

SEQ ID NO: 641932 - RNA, 19 nt, Artificial Sequence
  Description of Artificial Sequence: Synthetic oligonucleotide
caucuauacgcacaaaaua

SEQ ID NO: 641933 - RNA, 19 nt, Artificial Sequence
  Description of Artificial Sequence: Synthetic oligonucleotide
aauugcagugucacuuuca

SEQ ID NO: 641934 - RNA, 19 nt, Artificial Sequence
  Description of Artificial Sequence: Synthetic oligonucleotide
aagugccaucaguacccac

SEQ ID NO: 641935 - RNA, 19 nt, Artificial Sequence
  Description of Artificial Sequence: Synthetic oligonucleotide
ggaugauuaaauucuucca

SEQ ID NO: 641936 - RNA, 19 nt, Artificial Sequence
  Description of Artificial Sequence: Synthetic oligonucleotide
uuuagcugugagucaggcu

SEQ ID NO: 641937 - RNA, 19 nt, Artificial Sequence
  Description of Artificial Sequence: Synthetic oligonucleotide
uacuaugaucacguaagaa

SEQ ID NO: 641938 - RNA, 19 nt, Artificial Sequence
  Description of Artificial Sequence: Synthetic oligonucleotide
aggucuggcuuccuuaagu

SEQ ID NO: 641939 - RNA, 19 nt, Artificial Sequence
  Description of Artificial Sequence: Synthetic oligonucleotide
uugugauguuucucaacac

SEQ ID NO: 641940 - RNA, 19 nt, Artificial Sequence
  Description of Artificial Sequence: Synthetic oligonucleotide
aggugguugaucaaucucu

SEQ ID NO: 641941 - RNA, 19 nt, Artificial Sequence
  Description of Artificial Sequence: Synthetic oligonucleotide
aagcuaugugauauaauuu

SEQ ID NO: 641942 - RNA, 19 nt, Artificial Sequence
  Description of Artificial Sequence: Synthetic oligonucleotide
cacugagauguuucauagg

SEQ ID NO: 641943 - RNA, 19 nt, Artificial Sequence
  Description of Artificial Sequence: Synthetic oligonucleotide
cugcuggccaguaaggcuc

SEQ ID NO: 641944 - RNA, 19 nt, Artificial Sequence
  Description of Artificial Sequence: Synthetic oligonucleotide
uggcuggacagcuucauuu

SEQ ID NO: 641945 - RNA, 19 nt, Artificial Sequence
  Description of Artificial Sequence: Synthetic oligonucleotide
uuacucaguauugugucua

SEQ ID NO: 641946 - RNA, 19 nt, Artificial Sequence
  Description of Artificial Sequence: Synthetic oligonucleotide
acuuuagugggagaaucga

SEQ ID NO: 641947 - RNA, 19 nt, Artificial Sequence
  Description of Artificial Sequence: Synthetic oligonucleotide
agaacccuuggugugaggu

SEQ ID NO: 641948 - RNA, 19 nt, Artificial Sequence
  Description of Artificial Sequence: Synthetic oligonucleotide
uaccuacugcuuugguagg

SEQ ID NO: 641949 - RNA, 19 nt, Artificial Sequence
  Description of Artificial Sequence: Synthetic oligonucleotide
ugcaugcuacucauuugcu

SEQ ID NO: 641950 - RNA, 19 nt, Artificial Sequence
  Description of Artificial Sequence: Synthetic oligonucleotide
caguaaauuucaaaaggua

SEQ ID NO: 641951 - RNA, 19 nt, Artificial Sequence
  Description of Artificial Sequence: Synthetic oligonucleotide
gcauaccugagacagacuc

SEQ ID NO: 641952 - RNA, 19 nt, Artificial Sequence
  Description of Artificial Sequence: Synthetic oligonucleotide
ucaaucucuugggaggagu

SEQ ID NO: 641953 - RNA, 19 nt, Artificial Sequence
  Description of Artificial Sequence: Synthetic oligonucleotide
aaccgcuuuuaaugaagau

SEQ ID NO: 641954 - RNA, 19 nt, Artificial Sequence
  Description of Artificial Sequence: Synthetic oligonucleotide
cacaucagguucuuuucuc

SEQ ID NO: 641955 - RNA, 19 nt, Artificial Sequence
  Description of Artificial Sequence: Synthetic oligonucleotide
ugggagaaucgauuuucac

SEQ ID NO: 641956 - RNA, 19 nt, Artificial Sequence
  Description of Artificial Sequence: Synthetic oligonucleotide
uuccuuacauggugaauau

SEQ ID NO: 641957 - RNA, 19 nt, Artificial Sequence
  Description of Artificial Sequence: Synthetic oligonucleotide
aggaguuauuuaguaguug

SEQ ID NO: 641958 - RNA, 19 nt, Artificial Sequence
  Description of Artificial Sequence: Synthetic oligonucleotide
gugcauaccugagacagac

SEQ ID NO: 641959 - RNA, 19 nt, Artificial Sequence
  Description of Artificial Sequence: Synthetic oligonucleotide
aguucagugcuagaacccu

SEQ ID NO: 641960 - RNA, 19 nt, Artificial Sequence
  Description of Artificial Sequence: Synthetic oligonucleotide
aaacgcaugcucacacucu

SEQ ID NO: 641961 - RNA, 19 nt, Artificial Sequence
  Description of Artificial Sequence: Synthetic oligonucleotide
ucuugggaggaguuauuua

SEQ ID NO: 641962 - RNA, 19 nt, Artificial Sequence
  Description of Artificial Sequence: Synthetic oligonucleotide
caacacuuagauagaucuc

SEQ ID NO: 641963 - RNA, 19 nt, Artificial Sequence
  Description of Artificial Sequence: Synthetic oligonucleotide
uucaacccucagcacugcc

SEQ ID NO: 641964 - RNA, 19 nt, Artificial Sequence
  Description of Artificial Sequence: Synthetic oligonucleotide
ugucuaccaguccuggguu

SEQ ID NO: 641965 - RNA, 19 nt, Artificial Sequence
  Description of Artificial Sequence: Synthetic oligonucleotide
agcaaagcauuugggaaga

SEQ ID NO: 641966 - RNA, 19 nt, Artificial Sequence
  Description of Artificial Sequence: Synthetic oligonucleotide
gaagugcauaccugagaca

SEQ ID NO: 641967 - RNA, 19 nt, Artificial Sequence
  Description of Artificial Sequence: Synthetic oligonucleotide
aauccagagaucacugcuu

SEQ ID NO: 641968 - RNA, 19 nt, Artificial Sequence
  Description of Artificial Sequence: Synthetic oligonucleotide
uugguaucaucuuguuuua

SEQ ID NO: 641969 - RNA, 19 nt, Artificial Sequence
  Description of Artificial Sequence: Synthetic oligonucleotide
uuguaaacgcaugcucaca

SEQ ID NO: 641970 - RNA, 19 nt, Artificial Sequence
  Description of Artificial Sequence: Synthetic oligonucleotide
ugggacuuaagccgcucau

SEQ ID NO: 641971 - RNA, 19 nt, Artificial Sequence
  Description of Artificial Sequence: Synthetic oligonucleotide
ccucuguuggcucaguuug

SEQ ID NO: 641972 - RNA, 19 nt, Artificial Sequence
  Description of Artificial Sequence: Synthetic oligonucleotide
caucaguacccaccuaguc

SEQ ID NO: 641973 - RNA, 19 nt, Artificial Sequence
  Description of Artificial Sequence: Synthetic oligonucleotide
gcgaaugacauguaguuua

SEQ ID NO: 641974 - RNA, 19 nt, Artificial Sequence
  Description of Artificial Sequence: Synthetic oligonucleotide
acacuuagauagaucucag

SEQ ID NO: 641975 - RNA, 19 nt, Artificial Sequence
  Description of Artificial Sequence: Synthetic oligonucleotide
ugaucgagcgcgagacagu

SEQ ID NO: 641976 - RNA, 19 nt, Artificial Sequence
  Description of Artificial Sequence: Synthetic oligonucleotide
uugguuugaucgagcgcga

SEQ ID NO: 641977 - RNA, 19 nt, Artificial Sequence
  Description of Artificial Sequence: Synthetic oligonucleotide
gaaucgauuuucacuccca

SEQ ID NO: 641978 - RNA, 19 nt, Artificial Sequence
  Description of Artificial Sequence: Synthetic oligonucleotide
ucccagucaaucucacuau

SEQ ID NO: 641979 - RNA, 19 nt, Artificial Sequence
  Description of Artificial Sequence: Synthetic oligonucleotide
ucuaccaguccuggguugu

SEQ ID NO: 641980 - RNA, 19 nt, Artificial Sequence
  Description of Artificial Sequence: Synthetic oligonucleotide
cauaccugagacagacuca

SEQ ID NO: 641981 - RNA, 19 nt, Artificial Sequence
  Description of Artificial Sequence: Synthetic oligonucleotide
cuaucugcauggccaggag

SEQ ID NO: 641982 - RNA, 19 nt, Artificial Sequence
  Description of Artificial Sequence: Synthetic oligonucleotide
cugagauguuucauaggca

SEQ ID NO: 641983 - RNA, 19 nt, Artificial Sequence
  Description of Artificial Sequence: Synthetic oligonucleotide
guuuuagcugugagucagg

SEQ ID NO: 641984 - RNA, 19 nt, Artificial Sequence
  Description of Artificial Sequence: Synthetic oligonucleotide
caacauuagcgaaugacau

SEQ ID NO: 641985 - RNA, 19 nt, Artificial Sequence
  Description of Artificial Sequence: Synthetic oligonucleotide
aggcucaacuuuugcccuc

SEQ ID NO: 641986 - RNA, 19 nt, Artificial Sequence
  Description of Artificial Sequence: Synthetic oligonucleotide
aacuuacuaugaucacgua

SEQ ID NO: 641987 - RNA, 19 nt, Artificial Sequence
  Description of Artificial Sequence: Synthetic oligonucleotide
gugauauaauuucaugcau

SEQ ID NO: 641988 - RNA, 19 nt, Artificial Sequence
  Description of Artificial Sequence: Synthetic oligonucleotide
uucacuuuagugggagaau

SEQ ID NO: 641989 - RNA, 19 nt, Artificial Sequence
  Description of Artificial Sequence: Synthetic oligonucleotide
ugguaggugguugaucaau

SEQ ID NO: 641990 - RNA, 19 nt, Artificial Sequence
  Description of Artificial Sequence: Synthetic oligonucleotide
caaccgcuuuuaaugaaga

SEQ ID NO: 641991 - RNA, 19 nt, Artificial Sequence
  Description of Artificial Sequence: Synthetic oligonucleotide
caaauccacaccaguggga

SEQ ID NO: 641992 - RNA, 19 nt, Artificial Sequence
  Description of Artificial Sequence: Synthetic oligonucleotide
gaacccuuggugugagguc

SEQ ID NO: 641993 - RNA, 19 nt, Artificial Sequence
  Description of Artificial Sequence: Synthetic oligonucleotide
cuucacuuuagugggagaa

SEQ ID NO: 641994 - RNA, 19 nt, Artificial Sequence
  Description of Artificial Sequence: Synthetic oligonucleotide
gcucaaauccacaccagug

SEQ ID NO: 641995 - RNA, 19 nt, Artificial Sequence
  Description of Artificial Sequence: Synthetic oligonucleotide
gggagaaucgauuuucacu

SEQ ID NO: 641996 - RNA, 19 nt, Artificial Sequence
  Description of Artificial Sequence: Synthetic oligonucleotide
gguacccacagaaugcaug

SEQ ID NO: 641997 - RNA, 19 nt, Artificial Sequence
  Description of Artificial Sequence: Synthetic oligonucleotide
uaagccgcucaugccaaca

SEQ ID NO: 641998 - RNA, 19 nt, Artificial Sequence
  Description of Artificial Sequence: Synthetic oligonucleotide
uugggagacacugggugaa

SEQ ID NO: 641999 - RNA, 19 nt, Artificial Sequence
  Description of Artificial Sequence: Synthetic oligonucleotide
uucuaagagcccguaucuc

SEQ ID NO: 642000 - RNA, 19 nt, Artificial Sequence
  Description of Artificial Sequence: Synthetic oligonucleotide
uagucaacucccagucaau

SEQ ID NO: 642001 - RNA, 19 nt, Artificial Sequence
  Description of Artificial Sequence: Synthetic oligonucleotide
caguauugugucuaaugua

SEQ ID NO: 642002 - RNA, 19 nt, Artificial Sequence
  Description of Artificial Sequence: Synthetic oligonucleotide
cuaugugauauaauuucau

SEQ ID NO: 642003 - RNA, 19 nt, Artificial Sequence
  Description of Artificial Sequence: Synthetic oligonucleotide
aaucucuugggaggaguua

SEQ ID NO: 642004 - RNA, 19 nt, Artificial Sequence
  Description of Artificial Sequence: Synthetic oligonucleotide
aaauugucuuugggagaca

SEQ ID NO: 642005 - RNA, 19 nt, Artificial Sequence
  Description of Artificial Sequence: Synthetic oligonucleotide
gaaugucaaccgcuuuuaa

SEQ ID NO: 642006 - RNA, 19 nt, Artificial Sequence
  Description of Artificial Sequence: Synthetic oligonucleotide
ugcauaccugagacagacu

SEQ ID NO: 642007 - RNA, 19 nt, Artificial Sequence
  Description of Artificial Sequence: Synthetic oligonucleotide
uagaacccuuggugugagg

SEQ ID NO: 642008 - RNA, 19 nt, Artificial Sequence
  Description of Artificial Sequence: Synthetic oligonucleotide
caguucggaggcucacugc

SEQ ID NO: 642009 - RNA, 19 nt, Artificial Sequence
  Description of Artificial Sequence: Synthetic oligonucleotide
gcuaugugauauaauuuca

SEQ ID NO: 642010 - RNA, 19 nt, Artificial Sequence
  Description of Artificial Sequence: Synthetic oligonucleotide
gucuaccaguccuggguug

SEQ ID NO: 642011 - RNA, 19 nt, Artificial Sequence
  Description of Artificial Sequence: Synthetic oligonucleotide
cuuaagccgcucaugccaa

SEQ ID NO: 642012 - RNA, 19 nt, Artificial Sequence
  Description of Artificial Sequence: Synthetic oligonucleotide
aggauguguuuuagguuag

SEQ ID NO: 642013 - RNA, 19 nt, Artificial Sequence
  Description of Artificial Sequence: Synthetic oligonucleotide
aucugaagccagccuggcu

SEQ ID NO: 642014 - RNA, 19 nt, Artificial Sequence
  Description of Artificial Sequence: Synthetic oligonucleotide
agugggacuuaagccgcuc

SEQ ID NO: 642015 - RNA, 19 nt, Artificial Sequence
  Description of Artificial Sequence: Synthetic oligonucleotide
acccaccuaguccucacau

SEQ ID NO: 642016 - RNA, 19 nt, Artificial Sequence
  Description of Artificial Sequence: Synthetic oligonucleotide
auccacaccagugggacuu

SEQ ID NO: 642017 - RNA, 19 nt, Artificial Sequence
  Description of Artificial Sequence: Synthetic oligonucleotide
ggcacaucagguucuuuuc

SEQ ID NO: 642018 - RNA, 19 nt, Artificial Sequence
  Description of Artificial Sequence: Synthetic oligonucleotide
ugguuugaucgagcgcgag

SEQ ID NO: 642019 - RNA, 19 nt, Artificial Sequence
  Description of Artificial Sequence: Synthetic oligonucleotide
cucauggacugaaguauaa

SEQ ID NO: 642020 - RNA, 19 nt, Artificial Sequence
  Description of Artificial Sequence: Synthetic oligonucleotide
uaagugccaucaguaccca

SEQ ID NO: 642021 - RNA, 19 nt, Artificial Sequence
  Description of Artificial Sequence: Synthetic oligonucleotide
uacccaccuaguccucaca

SEQ ID NO: 642022 - RNA, 19 nt, Artificial Sequence
  Description of Artificial Sequence: Synthetic oligonucleotide
uaguggaagcuaugugaua

SEQ ID NO: 642023 - RNA, 19 nt, Artificial Sequence
  Description of Artificial Sequence: Synthetic oligonucleotide
gaguuggauucaggaagug

SEQ ID NO: 642024 - RNA, 19 nt, Artificial Sequence
  Description of Artificial Sequence: Synthetic oligonucleotide
cacuaccuggaggacuugc

SEQ ID NO: 642025 - RNA, 19 nt, Artificial Sequence
  Description of Artificial Sequence: Synthetic oligonucleotide
gaugcacuaccuggaggac

SEQ ID NO: 642026 - RNA, 19 nt, Artificial Sequence
  Description of Artificial Sequence: Synthetic oligonucleotide
ucucuugggaggaguuauu

SEQ ID NO: 642027 - RNA, 19 nt, Artificial Sequence
  Description of Artificial Sequence: Synthetic oligonucleotide
uuaagccgcucaugccaac

SEQ ID NO: 642028 - RNA, 19 nt, Artificial Sequence
  Description of Artificial Sequence: Synthetic oligonucleotide
caccuaguccucacaucac

SEQ ID NO: 642029 - RNA, 19 nt, Artificial Sequence
  Description of Artificial Sequence: Synthetic oligonucleotide
cuaauguaauuucuugguu

SEQ ID NO: 642030 - RNA, 19 nt, Artificial Sequence
  Description of Artificial Sequence: Synthetic oligonucleotide
gagcgcgagacaguuguga

SEQ ID NO: 642031 - RNA, 19 nt, Artificial Sequence
  Description of Artificial Sequence: Synthetic oligonucleotide
gucaaccgcuuuuaaugaa

SEQ ID NO: 642032 - RNA, 19 nt, Artificial Sequence
  Description of Artificial Sequence: Synthetic oligonucleotide
gguuuacucaguauugugu

SEQ ID NO: 642033 - RNA, 19 nt, Artificial Sequence
  Description of Artificial Sequence: Synthetic oligonucleotide
ccaccuaguccucacauca

SEQ ID NO: 642034 - RNA, 19 nt, Artificial Sequence
  Description of Artificial Sequence: Synthetic oligonucleotide
cugugguuuacucaguauu

SEQ ID NO: 642035 - RNA, 19 nt, Artificial Sequence
  Description of Artificial Sequence: Synthetic oligonucleotide
agcgaaugacauguaguuu

SEQ ID NO: 642036 - RNA, 19 nt, Artificial Sequence
  Description of Artificial Sequence: Synthetic oligonucleotide
ugcuacucauuugcuuuaa

SEQ ID NO: 642037 - RNA, 19 nt, Artificial Sequence
  Description of Artificial Sequence: Synthetic oligonucleotide
gguaaauuuucugguuauc

SEQ ID NO: 642038 - RNA, 19 nt, Artificial Sequence
  Description of Artificial Sequence: Synthetic oligonucleotide
gguuugaucgagcgcgaga

SEQ ID NO: 642039 - RNA, 19 nt, Artificial Sequence
  Description of Artificial Sequence: Synthetic oligonucleotide
guuaucugcuggccaguaa

SEQ ID NO: 642040 - RNA, 19 nt, Artificial Sequence
  Description of Artificial Sequence: Synthetic oligonucleotide
uccaguucggaggcucacu

SEQ ID NO: 642041 - RNA, 19 nt, Artificial Sequence
  Description of Artificial Sequence: Synthetic oligonucleotide
cuuuagugggagaaucgau

SEQ ID NO: 642042 - RNA, 19 nt, Artificial Sequence
  Description of Artificial Sequence: Synthetic oligonucleotide
cgcgagacaguugugacag

SEQ ID NO: 642043 - RNA, 19 nt, Artificial Sequence
  Description of Artificial Sequence: Synthetic oligonucleotide
guaaacgcaugcucacacu

SEQ ID NO: 642044 - RNA, 19 nt, Artificial Sequence
  Description of Artificial Sequence: Synthetic oligonucleotide
guucggaggcucacugcag

SEQ ID NO: 642045 - RNA, 19 nt, Artificial Sequence
  Description of Artificial Sequence: Synthetic oligonucleotide
gcuacaagguggaucucug

SEQ ID NO: 642046 - RNA, 19 nt, Artificial Sequence
  Description of Artificial Sequence: Synthetic oligonucleotide
guaacugucugagacgauu

SEQ ID NO: 642047 - RNA, 19 nt, Artificial Sequence
  Description of Artificial Sequence: Synthetic oligonucleotide
accuacugcuuugguaggu

SEQ ID NO: 642048 - RNA, 19 nt, Artificial Sequence
  Description of Artificial Sequence: Synthetic oligonucleotide
ggaaguggaugauuaaauu

SEQ ID NO: 642049 - RNA, 19 nt, Artificial Sequence
  Description of Artificial Sequence: Synthetic oligonucleotide
gugggagaaucgauuuuca

SEQ ID NO: 642050 - RNA, 19 nt, Artificial Sequence
  Description of Artificial Sequence: Synthetic oligonucleotide
ugcuuucuaagagcccgua

SEQ ID NO: 642051 - RNA, 19 nt, Artificial Sequence
  Description of Artificial Sequence: Synthetic oligonucleotide
ggguucaacccucagcacu

SEQ ID NO: 642052 - RNA, 19 nt, Artificial Sequence
  Description of Artificial Sequence: Synthetic oligonucleotide
ggaggcucacugcagcauc

SEQ ID NO: 642053 - RNA, 19 nt, Artificial Sequence
  Description of Artificial Sequence: Synthetic oligonucleotide
ccaguucggaggcucacug

SEQ ID NO: 642054 - RNA, 19 nt, Artificial Sequence
  Description of Artificial Sequence: Synthetic oligonucleotide
gggacuuaagccgcucaug

SEQ ID NO: 642055 - RNA, 19 nt, Artificial Sequence
  Description of Artificial Sequence: Synthetic oligonucleotide
cucaugguugauaccuacu

SEQ ID NO: 642056 - RNA, 19 nt, Artificial Sequence
  Description of Artificial Sequence: Synthetic oligonucleotide
cacguaagaaauugucuuu

SEQ ID NO: 642057 - RNA, 19 nt, Artificial Sequence
  Description of Artificial Sequence: Synthetic oligonucleotide
agugcauaccugagacaga

SEQ ID NO: 642058 - RNA, 19 nt, Artificial Sequence
  Description of Artificial Sequence: Synthetic oligonucleotide
uccuuacauggugaauauu

SEQ ID NO: 642059 - RNA, 19 nt, Artificial Sequence
  Description of Artificial Sequence: Synthetic oligonucleotide
cauguugcuuggugaaacu

SEQ ID NO: 642060 - RNA, 19 nt, Artificial Sequence
  Description of Artificial Sequence: Synthetic oligonucleotide
cuucgguaacugucugaga

SEQ ID NO: 642061 - RNA, 19 nt, Artificial Sequence
  Description of Artificial Sequence: Synthetic oligonucleotide
cuaagcuaagccccaccgu

SEQ ID NO: 642062 - RNA, 19 nt, Artificial Sequence
  Description of Artificial Sequence: Synthetic oligonucleotide
ggcucaguuuguaaacgca

SEQ ID NO: 642063 - RNA, 19 nt, Artificial Sequence
  Description of Artificial Sequence: Synthetic oligonucleotide
ggaaugucaaccgcuuuua

SEQ ID NO: 642064 - RNA, 19 nt, Artificial Sequence
  Description of Artificial Sequence: Synthetic oligonucleotide
guggaagcuaugugauaua

SEQ ID NO: 642065 - RNA, 19 nt, Artificial Sequence
  Description of Artificial Sequence: Synthetic oligonucleotide
cuaagagcccguaucucuu

SEQ ID NO: 642066 - RNA, 19 nt, Artificial Sequence
  Description of Artificial Sequence: Synthetic oligonucleotide
agccgcucaugccaacauu

SEQ ID NO: 642067 - RNA, 19 nt, Artificial Sequence
  Description of Artificial Sequence: Synthetic oligonucleotide
gcuagaacccuugguguga

SEQ ID NO: 642068 - RNA, 19 nt, Artificial Sequence
  Description of Artificial Sequence: Synthetic oligonucleotide
cuggccaguaaggcucaac

SEQ ID NO: 642069 - RNA, 19 nt, Artificial Sequence
  Description of Artificial Sequence: Synthetic oligonucleotide
ggcauugugagaaggcgcu

SEQ ID NO: 642070 - RNA, 19 nt, Artificial Sequence
  Description of Artificial Sequence: Synthetic oligonucleotide
ccgcucaugccaacauuag

SEQ ID NO: 642071 - RNA, 19 nt, Artificial Sequence
  Description of Artificial Sequence: Synthetic oligonucleotide
cauuagcgaaugacaugua

SEQ ID NO: 642072 - RNA, 19 nt, Artificial Sequence
  Description of Artificial Sequence: Synthetic oligonucleotide
gaucgagcgcgagacaguu

SEQ ID NO: 642073 - RNA, 19 nt, Artificial Sequence
  Description of Artificial Sequence: Synthetic oligonucleotide
cgcucaugccaacauuagc

SEQ ID NO: 642074 - RNA, 19 nt, Artificial Sequence
  Description of Artificial Sequence: Synthetic oligonucleotide
cuaccaguccuggguugug

SEQ ID NO: 642075 - RNA, 19 nt, Artificial Sequence
  Description of Artificial Sequence: Synthetic oligonucleotide
cccagucaaucucacuauc

SEQ ID NO: 642076 - RNA, 19 nt, Artificial Sequence
  Description of Artificial Sequence: Synthetic oligonucleotide
ccuaguccucacaucacaa

SEQ ID NO: 642077 - RNA, 19 nt, Artificial Sequence
  Description of Artificial Sequence: Synthetic oligonucleotide
gcuauagcauuugccucca

SEQ ID NO: 642078 - RNA, 19 nt, Artificial Sequence
  Description of Artificial Sequence: Synthetic oligonucleotide
ccagucaaucucacuaucu

SEQ ID NO: 642079 - RNA, 19 nt, Artificial Sequence
  Description of Artificial Sequence: Synthetic oligonucleotide
aucgagcgcgagacaguug

SEQ ID NO: 642080 - RNA, 19 nt, Artificial Sequence
  Description of Artificial Sequence: Synthetic oligonucleotide
acgcaugcucacacucuca

SEQ ID NO: 642081 - RNA, 19 nt, Artificial Sequence
  Description of Artificial Sequence: Synthetic oligonucleotide
cccaacaaguccugguaaa

SEQ ID NO: 642082 - RNA, 19 nt, Artificial Sequence
  Description of Artificial Sequence: Synthetic oligonucleotide
gcuacucauuugcuuuaaa

SEQ ID NO: 642083 - RNA, 19 nt, Artificial Sequence
  Description of Artificial Sequence: Synthetic oligonucleotide
gcgcgagacaguugugaca

SEQ ID NO: 642084 - RNA, 19 nt, Artificial Sequence
  Description of Artificial Sequence: Synthetic oligonucleotide
ggcuacaagguggaucucu

SEQ ID NO: 642085 - RNA, 19 nt, Artificial Sequence
  Description of Artificial Sequence: Synthetic oligonucleotide
augcaucuauacgcacaaa

SEQ ID NO: 642086 - RNA, 19 nt, Artificial Sequence
  Description of Artificial Sequence: Synthetic oligonucleotide
gccgcucaugccaacauua

SEQ ID NO: 642087 - RNA, 19 nt, Artificial Sequence
  Description of Artificial Sequence: Synthetic oligonucleotide
cauugugagaaggcgcuuu

SEQ ID NO: 642088 - RNA, 19 nt, Artificial Sequence
  Description of Artificial Sequence: Synthetic oligonucleotide
cuuuugcccucuguuggcu

SEQ ID NO: 642089 - RNA, 19 nt, Artificial Sequence
  Description of Artificial Sequence: Synthetic oligonucleotide
gcaugcuacucauuugcuu

SEQ ID NO: 642090 - RNA, 19 nt, Artificial Sequence
  Description of Artificial Sequence: Synthetic oligonucleotide
cgaaugacauguaguuuaa

SEQ ID NO: 642091 - RNA, 19 nt, Artificial Sequence
  Description of Artificial Sequence: Synthetic oligonucleotide
cgguaacugucugagacga

SEQ ID NO: 642092 - RNA, 19 nt, Artificial Sequence
  Description of Artificial Sequence: Synthetic oligonucleotide
ccaguaaggcucaacuuuu

SEQ ID NO: 642093 - RNA, 19 nt, Artificial Sequence
  Description of Artificial Sequence: Synthetic oligonucleotide
ggaagcuaugugauauaau

SEQ ID NO: 642094 - RNA, 19 nt, Artificial Sequence
  Description of Artificial Sequence: Synthetic oligonucleotide
cugagacgauucacaucua

SEQ ID NO: 642095 - RNA, 19 nt, Artificial Sequence
  Description of Artificial Sequence: Synthetic oligonucleotide
gcuuucuaagagcccguau

SEQ ID NO: 642096 - RNA, 19 nt, Artificial Sequence
  Description of Artificial Sequence: Synthetic oligonucleotide
gcgagacaguugugacagc

SEQ ID NO: 642097 - RNA, 19 nt, Artificial Sequence
  Description of Artificial Sequence: Synthetic oligonucleotide
ggccaguaaggcucaacuu

SEQ ID NO: 642098 - RNA, 19 nt, Artificial Sequence
  Description of Artificial Sequence: Synthetic oligonucleotide
caccgugcuucugucugaa

SEQ ID NO: 642099 - RNA, 19 nt, Artificial Sequence
  Description of Artificial Sequence: Synthetic oligonucleotide
ggacuggaggauguguuuu

SEQ ID NO: 642100 - RNA, 19 nt, Artificial Sequence
  Description of Artificial Sequence: Synthetic oligonucleotide
gggagacacugggugaagu

SEQ ID NO: 642101 - RNA, 19 nt, Artificial Sequence
  Description of Artificial Sequence: Synthetic oligonucleotide
cagugggacuuaagccgcu

SEQ ID NO: 642102 - RNA, 19 nt, Artificial Sequence
  Description of Artificial Sequence: Synthetic oligonucleotide
cccguaucucuucauguau

SEQ ID NO: 642103 - RNA, 19 nt, Artificial Sequence
  Description of Artificial Sequence: Synthetic oligonucleotide
ggcucaacuuuugcccucu

SEQ ID NO: 642104 - RNA, 19 nt, Artificial Sequence
  Description of Artificial Sequence: Synthetic oligonucleotide
ccaccgugcuucugucuga

SEQ ID NO: 642105 - RNA, 19 nt, Artificial Sequence
  Description of Artificial Sequence: Synthetic oligonucleotide
ccguaucucuucauguauu

SEQ ID NO: 642106 - RNA, 19 nt, Artificial Sequence
  Description of Artificial Sequence: Synthetic oligonucleotide
ggugaauauuugggguuuu

SEQ ID NO: 642107 - RNA, 19 nt, Artificial Sequence
  Description of Artificial Sequence: Synthetic oligonucleotide
cgagcgcgagacaguugug

SEQ ID NO: 642108 - RNA, 19 nt, Artificial Sequence
  Description of Artificial Sequence: Synthetic oligonucleotide
gguaacugucugagacgau

SEQ ID NO: 642109 - RNA, 19 nt, Artificial Sequence
  Description of Artificial Sequence: Synthetic oligonucleotide
gcuaagccccaccgugcuu

SEQ ID NO: 642110 - RNA, 19 nt, Artificial Sequence
  Description of Artificial Sequence: Synthetic oligonucleotide
gcauugugagaaggcgcuu

SEQ ID NO: 642111 - RNA, 19 nt, Artificial Sequence
  Description of Artificial Sequence: Synthetic oligonucleotide
aauuauuagacagugaagc

SEQ ID NO: 642112 - RNA, 19 nt, Artificial Sequence
  Description of Artificial Sequence: Synthetic oligonucleotide
aaaucauuggaucagauag

SEQ ID NO: 642113 - RNA, 19 nt, Artificial Sequence
  Description of Artificial Sequence: Synthetic oligonucleotide
aguaagaucaaacaguuac

SEQ ID NO: 642114 - RNA, 19 nt, Artificial Sequence
  Description of Artificial Sequence: Synthetic oligonucleotide
aaauaaacaagccgggccc

SEQ ID NO: 642115 - RNA, 19 nt, Artificial Sequence
  Description of Artificial Sequence: Synthetic oligonucleotide
aauagugucacauccaaag

SEQ ID NO: 642116 - RNA, 19 nt, Artificial Sequence
  Description of Artificial Sequence: Synthetic oligonucleotide
aaaacaaacaaaacaaaac

SEQ ID NO: 642117 - RNA, 19 nt, Artificial Sequence
  Description of Artificial Sequence: Synthetic oligonucleotide
uacuauaugagccuuaucu

SEQ ID NO: 642118 - RNA, 19 nt, Artificial Sequence
  Description of Artificial Sequence: Synthetic oligonucleotide
aaaccuaaagccaagguac

SEQ ID NO: 642119 - RNA, 19 nt, Artificial Sequence
  Description of Artificial Sequence: Synthetic oligonucleotide
ucuaugguaacacauaaga

SEQ ID NO: 642120 - RNA, 19 nt, Artificial Sequence
  Description of Artificial Sequence: Synthetic oligonucleotide
uucauuaucagcugcaaag

SEQ ID NO: 642121 - RNA, 19 nt, Artificial Sequence
  Description of Artificial Sequence: Synthetic oligonucleotide
uuucgugcgaauuaaaacc

SEQ ID NO: 642122 - RNA, 19 nt, Artificial Sequence
  Description of Artificial Sequence: Synthetic oligonucleotide
uuugauuaugaaaacgcag

SEQ ID NO: 642123 - RNA, 19 nt, Artificial Sequence
  Description of Artificial Sequence: Synthetic oligonucleotide
accacgaucauuuucuccc

SEQ ID NO: 642124 - RNA, 19 nt, Artificial Sequence
  Description of Artificial Sequence: Synthetic oligonucleotide
aaaauuagagugcacaaau

SEQ ID NO: 642125 - RNA, 19 nt, Artificial Sequence
  Description of Artificial Sequence: Synthetic oligonucleotide
aauaagguuaccaauuguc

SEQ ID NO: 642126 - RNA, 19 nt, Artificial Sequence
  Description of Artificial Sequence: Synthetic oligonucleotide
aauacaaugugccaaucca

SEQ ID NO: 642127 - RNA, 19 nt, Artificial Sequence
  Description of Artificial Sequence: Synthetic oligonucleotide
uaaauaaacaagccgggcc

SEQ ID NO: 642128 - RNA, 19 nt, Artificial Sequence
  Description of Artificial Sequence: Synthetic oligonucleotide
agaagauauaacuucaaug

SEQ ID NO: 642129 - RNA, 19 nt, Artificial Sequence
  Description of Artificial Sequence: Synthetic oligonucleotide
ucuauacauauuaugaccu

SEQ ID NO: 642130 - RNA, 19 nt, Artificial Sequence
  Description of Artificial Sequence: Synthetic oligonucleotide
cuauacuucacuacaaagc

SEQ ID NO: 642131 - RNA, 19 nt, Artificial Sequence
  Description of Artificial Sequence: Synthetic oligonucleotide
aaaagcgaaauauucauua

SEQ ID NO: 642132 - RNA, 19 nt, Artificial Sequence
  Description of Artificial Sequence: Synthetic oligonucleotide
cagaguaaaaucuuuagug

SEQ ID NO: 642133 - RNA, 19 nt, Artificial Sequence
  Description of Artificial Sequence: Synthetic oligonucleotide
guauacuuauuucugaugc

SEQ ID NO: 642134 - RNA, 19 nt, Artificial Sequence
  Description of Artificial Sequence: Synthetic oligonucleotide
aaaacuaauaguuggugaa

SEQ ID NO: 642135 - RNA, 19 nt, Artificial Sequence
  Description of Artificial Sequence: Synthetic oligonucleotide
aauuauugcuacuauacuu

SEQ ID NO: 642136 - RNA, 19 nt, Artificial Sequence
  Description of Artificial Sequence: Synthetic oligonucleotide
uauuagacagugaagcacc

SEQ ID NO: 642137 - RNA, 19 nt, Artificial Sequence
  Description of Artificial Sequence: Synthetic oligonucleotide
cauuggaucagauaguuug

SEQ ID NO: 642138 - RNA, 19 nt, Artificial Sequence
  Description of Artificial Sequence: Synthetic oligonucleotide
aaagugugauaccagaaga

SEQ ID NO: 642139 - RNA, 19 nt, Artificial Sequence
  Description of Artificial Sequence: Synthetic oligonucleotide
uuaagcaugccaaaaggug

SEQ ID NO: 642140 - RNA, 19 nt, Artificial Sequence
  Description of Artificial Sequence: Synthetic oligonucleotide
aagcgaaauauucauuauc

SEQ ID NO: 642141 - RNA, 19 nt, Artificial Sequence
  Description of Artificial Sequence: Synthetic oligonucleotide
aucaugacgauucagaaau

SEQ ID NO: 642142 - RNA, 19 nt, Artificial Sequence
  Description of Artificial Sequence: Synthetic oligonucleotide
agaaugaucacucaggcuu

SEQ ID NO: 642143 - RNA, 19 nt, Artificial Sequence
  Description of Artificial Sequence: Synthetic oligonucleotide
aaaccaaugcaggugaggg

SEQ ID NO: 642144 - RNA, 19 nt, Artificial Sequence
  Description of Artificial Sequence: Synthetic oligonucleotide
cgaauuaaaaccuaaagcc

SEQ ID NO: 642145 - RNA, 19 nt, Artificial Sequence
  Description of Artificial Sequence: Synthetic oligonucleotide
uggugaaugucuuuaaagc

SEQ ID NO: 642146 - RNA, 19 nt, Artificial Sequence
  Description of Artificial Sequence: Synthetic oligonucleotide
uaguuagccauuauucuag

SEQ ID NO: 642147 - RNA, 19 nt, Artificial Sequence
  Description of Artificial Sequence: Synthetic oligonucleotide
gacaauauaagguuucaca

SEQ ID NO: 642148 - RNA, 19 nt, Artificial Sequence
  Description of Artificial Sequence: Synthetic oligonucleotide
auuaccaacuaguuuuggg

SEQ ID NO: 642149 - RNA, 19 nt, Artificial Sequence
  Description of Artificial Sequence: Synthetic oligonucleotide
auuuacugacuacaucagc

SEQ ID NO: 642150 - RNA, 19 nt, Artificial Sequence
  Description of Artificial Sequence: Synthetic oligonucleotide
uaaacucuugaucauguac

SEQ ID NO: 642151 - RNA, 19 nt, Artificial Sequence
  Description of Artificial Sequence: Synthetic oligonucleotide
auuauugcuacuauacuuc

SEQ ID NO: 642152 - RNA, 19 nt, Artificial Sequence
  Description of Artificial Sequence: Synthetic oligonucleotide
caagguaccacauaaucac

SEQ ID NO: 642153 - RNA, 19 nt, Artificial Sequence
  Description of Artificial Sequence: Synthetic oligonucleotide
aaaacgcagaguaaaaucu

SEQ ID NO: 642154 - RNA, 19 nt, Artificial Sequence
  Description of Artificial Sequence: Synthetic oligonucleotide
ucuucuaccaccugaugag

SEQ ID NO: 642155 - RNA, 19 nt, Artificial Sequence
  Description of Artificial Sequence: Synthetic oligonucleotide
acuauacuucacuacaaag

SEQ ID NO: 642156 - RNA, 19 nt, Artificial Sequence
  Description of Artificial Sequence: Synthetic oligonucleotide
uuagccauuauucuagcaa

SEQ ID NO: 642157 - RNA, 19 nt, Artificial Sequence
  Description of Artificial Sequence: Synthetic oligonucleotide
gucuauacauauuaugacc

SEQ ID NO: 642158 - RNA, 19 nt, Artificial Sequence
  Description of Artificial Sequence: Synthetic oligonucleotide
aagauauaacuucaaugga

SEQ ID NO: 642159 - RNA, 19 nt, Artificial Sequence
  Description of Artificial Sequence: Synthetic oligonucleotide
acuacaucagcuccaaaag

SEQ ID NO: 642160 - RNA, 19 nt, Artificial Sequence
  Description of Artificial Sequence: Synthetic oligonucleotide
aaagguugcccagucaaac

SEQ ID NO: 642161 - RNA, 19 nt, Artificial Sequence
  Description of Artificial Sequence: Synthetic oligonucleotide
acauuacacagauggaacg

SEQ ID NO: 642162 - RNA, 19 nt, Artificial Sequence
  Description of Artificial Sequence: Synthetic oligonucleotide
uguacagaaauuauugcua

SEQ ID NO: 642163 - RNA, 19 nt, Artificial Sequence
  Description of Artificial Sequence: Synthetic oligonucleotide
agugcacaaauccaaauca

SEQ ID NO: 642164 - RNA, 19 nt, Artificial Sequence
  Description of Artificial Sequence: Synthetic oligonucleotide
aaauguuucuugcaguaau

SEQ ID NO: 642165 - RNA, 19 nt, Artificial Sequence
  Description of Artificial Sequence: Synthetic oligonucleotide
ucaauuagacaacuuuuac

SEQ ID NO: 642166 - RNA, 19 nt, Artificial Sequence
  Description of Artificial Sequence: Synthetic oligonucleotide
uggguaauacuauaugagc

SEQ ID NO: 642167 - RNA, 19 nt, Artificial Sequence
  Description of Artificial Sequence: Synthetic oligonucleotide
aaaguaguuagccauuauu

SEQ ID NO: 642168 - RNA, 19 nt, Artificial Sequence
  Description of Artificial Sequence: Synthetic oligonucleotide
auugcuacuauacuucacu

SEQ ID NO: 642169 - RNA, 19 nt, Artificial Sequence
  Description of Artificial Sequence: Synthetic oligonucleotide
ugagccuuaucuuaaacaa

SEQ ID NO: 642170 - RNA, 19 nt, Artificial Sequence
  Description of Artificial Sequence: Synthetic oligonucleotide
aaaucaugacgauucagaa

SEQ ID NO: 642171 - RNA, 19 nt, Artificial Sequence
  Description of Artificial Sequence: Synthetic oligonucleotide
ucaucauacgccagcauug

SEQ ID NO: 642172 - RNA, 19 nt, Artificial Sequence
  Description of Artificial Sequence: Synthetic oligonucleotide
cuuucaucggguaacuacc

SEQ ID NO: 642173 - RNA, 19 nt, Artificial Sequence
  Description of Artificial Sequence: Synthetic oligonucleotide
auauuaugaccuuugauua

SEQ ID NO: 642174 - RNA, 19 nt, Artificial Sequence
  Description of Artificial Sequence: Synthetic oligonucleotide
ugacauguucaauaaagac

SEQ ID NO: 642175 - RNA, 19 nt, Artificial Sequence
  Description of Artificial Sequence: Synthetic oligonucleotide
ucauacgccagcauuguca

SEQ ID NO: 642176 - RNA, 19 nt, Artificial Sequence
  Description of Artificial Sequence: Synthetic oligonucleotide
aauaaacaagccgggcccc

SEQ ID NO: 642177 - RNA, 19 nt, Artificial Sequence
  Description of Artificial Sequence: Synthetic oligonucleotide
ucuucgguggauuagcugu

SEQ ID NO: 642178 - RNA, 19 nt, Artificial Sequence
  Description of Artificial Sequence: Synthetic oligonucleotide
uuuguuaaugcuaacccuu

SEQ ID NO: 642179 - RNA, 19 nt, Artificial Sequence
  Description of Artificial Sequence: Synthetic oligonucleotide
uuaccaacuaguuuugggu

SEQ ID NO: 642180 - RNA, 19 nt, Artificial Sequence
  Description of Artificial Sequence: Synthetic oligonucleotide
auuaaauaaacaagccggg

SEQ ID NO: 642181 - RNA, 19 nt, Artificial Sequence
  Description of Artificial Sequence: Synthetic oligonucleotide
aaauaagguuaccaauugu

SEQ ID NO: 642182 - RNA, 19 nt, Artificial Sequence
  Description of Artificial Sequence: Synthetic oligonucleotide
aacgucaugcuuucaucgg

SEQ ID NO: 642183 - RNA, 19 nt, Artificial Sequence
  Description of Artificial Sequence: Synthetic oligonucleotide
uaagugaagaaaacuaaua

SEQ ID NO: 642184 - RNA, 19 nt, Artificial Sequence
  Description of Artificial Sequence: Synthetic oligonucleotide
aaagacuuuagaaucacau

SEQ ID NO: 642185 - RNA, 19 nt, Artificial Sequence
  Description of Artificial Sequence: Synthetic oligonucleotide
gaaaacuaauaguugguga

SEQ ID NO: 642186 - RNA, 19 nt, Artificial Sequence
  Description of Artificial Sequence: Synthetic oligonucleotide
cacauggcaauuauuagac

SEQ ID NO: 642187 - RNA, 19 nt, Artificial Sequence
  Description of Artificial Sequence: Synthetic oligonucleotide
uuuguaucaauuagacaac

SEQ ID NO: 642188 - RNA, 19 nt, Artificial Sequence
  Description of Artificial Sequence: Synthetic oligonucleotide
uaucaauuagacaacuuuu

SEQ ID NO: 642189 - RNA, 19 nt, Artificial Sequence
  Description of Artificial Sequence: Synthetic oligonucleotide
uuaaaaccuaaagccaagg

SEQ ID NO: 642190 - RNA, 19 nt, Artificial Sequence
  Description of Artificial Sequence: Synthetic oligonucleotide
aacuaguuuuggguaauac

SEQ ID NO: 642191 - RNA, 19 nt, Artificial Sequence
  Description of Artificial Sequence: Synthetic oligonucleotide
augaaugcguuuuaaagaa

SEQ ID NO: 642192 - RNA, 19 nt, Artificial Sequence
  Description of Artificial Sequence: Synthetic oligonucleotide
auaagguuaccaauugucg

SEQ ID NO: 642193 - RNA, 19 nt, Artificial Sequence
  Description of Artificial Sequence: Synthetic oligonucleotide
caguaaaucacccggcucc

SEQ ID NO: 642194 - RNA, 19 nt, Artificial Sequence
  Description of Artificial Sequence: Synthetic oligonucleotide
agaaucacauccaauagug

SEQ ID NO: 642195 - RNA, 19 nt, Artificial Sequence
  Description of Artificial Sequence: Synthetic oligonucleotide
uugacauguucaauaaaga

SEQ ID NO: 642196 - RNA, 19 nt, Artificial Sequence
  Description of Artificial Sequence: Synthetic oligonucleotide
aguaguuagccauuauucu

SEQ ID NO: 642197 - RNA, 19 nt, Artificial Sequence
  Description of Artificial Sequence: Synthetic oligonucleotide
cacuaaaaccacauuacac

SEQ ID NO: 642198 - RNA, 19 nt, Artificial Sequence
  Description of Artificial Sequence: Synthetic oligonucleotide
ucggguaacuaccacagcu

SEQ ID NO: 642199 - RNA, 19 nt, Artificial Sequence
  Description of Artificial Sequence: Synthetic oligonucleotide
agcucgacaaaucaagucu

SEQ ID NO: 642200 - RNA, 19 nt, Artificial Sequence
  Description of Artificial Sequence: Synthetic oligonucleotide
uuauuagacagugaagcac

SEQ ID NO: 642201 - RNA, 19 nt, Artificial Sequence
  Description of Artificial Sequence: Synthetic oligonucleotide
auuauuagacagugaagca

SEQ ID NO: 642202 - RNA, 19 nt, Artificial Sequence
  Description of Artificial Sequence: Synthetic oligonucleotide
aacuaauaguuggugaaug

SEQ ID NO: 642203 - RNA, 19 nt, Artificial Sequence
  Description of Artificial Sequence: Synthetic oligonucleotide
ugcuacugcacaauagagc

SEQ ID NO: 642204 - RNA, 19 nt, Artificial Sequence
  Description of Artificial Sequence: Synthetic oligonucleotide
ugaggcauaaguuuucuua

SEQ ID NO: 642205 - RNA, 19 nt, Artificial Sequence
  Description of Artificial Sequence: Synthetic oligonucleotide
aaauuagagugcacaaauc

SEQ ID NO: 642206 - RNA, 19 nt, Artificial Sequence
  Description of Artificial Sequence: Synthetic oligonucleotide
aauauuauguccaucccua

SEQ ID NO: 642207 - RNA, 19 nt, Artificial Sequence
  Description of Artificial Sequence: Synthetic oligonucleotide
gcgaauuaaaaccuaaagc

SEQ ID NO: 642208 - RNA, 19 nt, Artificial Sequence
  Description of Artificial Sequence: Synthetic oligonucleotide
uauuauguccaucccuaug

SEQ ID NO: 642209 - RNA, 19 nt, Artificial Sequence
  Description of Artificial Sequence: Synthetic oligonucleotide
acuaguuuuggguaauacu

SEQ ID NO: 642210 - RNA, 19 nt, Artificial Sequence
  Description of Artificial Sequence: Synthetic oligonucleotide
uuaaauaaacaagccgggc

SEQ ID NO: 642211 - RNA, 19 nt, Artificial Sequence
  Description of Artificial Sequence: Synthetic oligonucleotide
caauuauuagacagugaag

SEQ ID NO: 642212 - RNA, 19 nt, Artificial Sequence
  Description of Artificial Sequence: Synthetic oligonucleotide
aaucaugacgauucagaaa

SEQ ID NO: 642213 - RNA, 19 nt, Artificial Sequence
  Description of Artificial Sequence: Synthetic oligonucleotide
uaccaauugucguuuagca

SEQ ID NO: 642214 - RNA, 19 nt, Artificial Sequence
  Description of Artificial Sequence: Synthetic oligonucleotide
uuucuuuacuagaauuccu

SEQ ID NO: 642215 - RNA, 19 nt, Artificial Sequence
  Description of Artificial Sequence: Synthetic oligonucleotide
ccuuugauuaugaaaacgc

SEQ ID NO: 642216 - RNA, 19 nt, Artificial Sequence
  Description of Artificial Sequence: Synthetic oligonucleotide
ugcguuuuaaagaacuuuu

SEQ ID NO: 642217 - RNA, 19 nt, Artificial Sequence
  Description of Artificial Sequence: Synthetic oligonucleotide
aagccaagguaccacauaa

SEQ ID NO: 642218 - RNA, 19 nt, Artificial Sequence
  Description of Artificial Sequence: Synthetic oligonucleotide
uucgugcgaauuaaaaccu

SEQ ID NO: 642219 - RNA, 19 nt, Artificial Sequence
  Description of Artificial Sequence: Synthetic oligonucleotide
aaagcgaaauauucauuau

SEQ ID NO: 642220 - RNA, 19 nt, Artificial Sequence
  Description of Artificial Sequence: Synthetic oligonucleotide
cuaguuuuggguaauacua

SEQ ID NO: 642221 - RNA, 19 nt, Artificial Sequence
  Description of Artificial Sequence: Synthetic oligonucleotide
aagcacccgauacucagag

SEQ ID NO: 642222 - RNA, 19 nt, Artificial Sequence
  Description of Artificial Sequence: Synthetic oligonucleotide
auguuaacagaguucucag

SEQ ID NO: 642223 - RNA, 19 nt, Artificial Sequence
  Description of Artificial Sequence: Synthetic oligonucleotide
guuucgugcgaauuaaaac

SEQ ID NO: 642224 - RNA, 19 nt, Artificial Sequence
  Description of Artificial Sequence: Synthetic oligonucleotide
uacuccuugacauuuguua

SEQ ID NO: 642225 - RNA, 19 nt, Artificial Sequence
  Description of Artificial Sequence: Synthetic oligonucleotide
aguuagccauuauucuagc

SEQ ID NO: 642226 - RNA, 19 nt, Artificial Sequence
  Description of Artificial Sequence: Synthetic oligonucleotide
uguuucgugcgaauuaaaa

SEQ ID NO: 642227 - RNA, 19 nt, Artificial Sequence
  Description of Artificial Sequence: Synthetic oligonucleotide
uuagugacaaagccuuaca

SEQ ID NO: 642228 - RNA, 19 nt, Artificial Sequence
  Description of Artificial Sequence: Synthetic oligonucleotide
agcgaaauauucauuauca

SEQ ID NO: 642229 - RNA, 19 nt, Artificial Sequence
  Description of Artificial Sequence: Synthetic oligonucleotide
aucccuaugaagcuuacaa

SEQ ID NO: 642230 - RNA, 19 nt, Artificial Sequence
  Description of Artificial Sequence: Synthetic oligonucleotide
aaaugcuacugcacaauag

SEQ ID NO: 642231 - RNA, 19 nt, Artificial Sequence
  Description of Artificial Sequence: Synthetic oligonucleotide
ugcugcaauaaacucuuga

SEQ ID NO: 642232 - RNA, 19 nt, Artificial Sequence
  Description of Artificial Sequence: Synthetic oligonucleotide
aguaauacaaugugccaau

SEQ ID NO: 642233 - RNA, 19 nt, Artificial Sequence
  Description of Artificial Sequence: Synthetic oligonucleotide
aaccuaaagccaagguacc

SEQ ID NO: 642234 - RNA, 19 nt, Artificial Sequence
  Description of Artificial Sequence: Synthetic oligonucleotide
uuacacagauggaacguca

SEQ ID NO: 642235 - RNA, 19 nt, Artificial Sequence
  Description of Artificial Sequence: Synthetic oligonucleotide
augagccuuaucuuaaaca

SEQ ID NO: 642236 - RNA, 19 nt, Artificial Sequence
  Description of Artificial Sequence: Synthetic oligonucleotide
accuuugauuaugaaaacg

SEQ ID NO: 642237 - RNA, 19 nt, Artificial Sequence
  Description of Artificial Sequence: Synthetic oligonucleotide
agaaaacuaauaguuggug

SEQ ID NO: 642238 - RNA, 19 nt, Artificial Sequence
  Description of Artificial Sequence: Synthetic oligonucleotide
aauacuauaugagccuuau

SEQ ID NO: 642239 - RNA, 19 nt, Artificial Sequence
  Description of Artificial Sequence: Synthetic oligonucleotide
gcuaguuuaacugggaugc

SEQ ID NO: 642240 - RNA, 19 nt, Artificial Sequence
  Description of Artificial Sequence: Synthetic oligonucleotide
aauagagcaucaauaaauu

SEQ ID NO: 642241 - RNA, 19 nt, Artificial Sequence
  Description of Artificial Sequence: Synthetic oligonucleotide
ugugauaccagaagauaua

SEQ ID NO: 642242 - RNA, 19 nt, Artificial Sequence
  Description of Artificial Sequence: Synthetic oligonucleotide
acaguaaaucacccggcuc

SEQ ID NO: 642243 - RNA, 19 nt, Artificial Sequence
  Description of Artificial Sequence: Synthetic oligonucleotide
caucggguaacuaccacag

SEQ ID NO: 642244 - RNA, 19 nt, Artificial Sequence
  Description of Artificial Sequence: Synthetic oligonucleotide
acuaauaguuggugaaugu

SEQ ID NO: 642245 - RNA, 19 nt, Artificial Sequence
  Description of Artificial Sequence: Synthetic oligonucleotide
agcuaguuuaacugggaug

SEQ ID NO: 642246 - RNA, 19 nt, Artificial Sequence
  Description of Artificial Sequence: Synthetic oligonucleotide
cauauuaugaccuuugauu

SEQ ID NO: 642247 - RNA, 19 nt, Artificial Sequence
  Description of Artificial Sequence: Synthetic oligonucleotide
acguccagaauucagucca

SEQ ID NO: 642248 - RNA, 19 nt, Artificial Sequence
  Description of Artificial Sequence: Synthetic oligonucleotide
ugguacuuagcuuucuuuc

SEQ ID NO: 642249 - RNA, 19 nt, Artificial Sequence
  Description of Artificial Sequence: Synthetic oligonucleotide
uuuagugacaaagccuuac

SEQ ID NO: 642250 - RNA, 19 nt, Artificial Sequence
  Description of Artificial Sequence: Synthetic oligonucleotide
ucaucggguaacuaccaca

SEQ ID NO: 642251 - RNA, 19 nt, Artificial Sequence
  Description of Artificial Sequence: Synthetic oligonucleotide
agaaauuauugcuacuaua

SEQ ID NO: 642252 - RNA, 19 nt, Artificial Sequence
  Description of Artificial Sequence: Synthetic oligonucleotide
gcaauuauuagacagugaa

SEQ ID NO: 642253 - RNA, 19 nt, Artificial Sequence
  Description of Artificial Sequence: Synthetic oligonucleotide
uacuauacuucacuacaaa

SEQ ID NO: 642254 - RNA, 19 nt, Artificial Sequence
  Description of Artificial Sequence: Synthetic oligonucleotide
guacuuagcuuucuuucag

SEQ ID NO: 642255 - RNA, 19 nt, Artificial Sequence
  Description of Artificial Sequence: Synthetic oligonucleotide
agaauucaguccaccauac

SEQ ID NO: 642256 - RNA, 19 nt, Artificial Sequence
  Description of Artificial Sequence: Synthetic oligonucleotide
uuaugaccuuugauuauga

SEQ ID NO: 642257 - RNA, 19 nt, Artificial Sequence
  Description of Artificial Sequence: Synthetic oligonucleotide
uggcaauuauuagacagug

SEQ ID NO: 642258 - RNA, 19 nt, Artificial Sequence
  Description of Artificial Sequence: Synthetic oligonucleotide
gauauaacuucaauggaua

SEQ ID NO: 642259 - RNA, 19 nt, Artificial Sequence
  Description of Artificial Sequence: Synthetic oligonucleotide
guggauuagcuguucgagg

SEQ ID NO: 642260 - RNA, 19 nt, Artificial Sequence
  Description of Artificial Sequence: Synthetic oligonucleotide
ugugccuguuguuaagucu

SEQ ID NO: 642261 - RNA, 19 nt, Artificial Sequence
  Description of Artificial Sequence: Synthetic oligonucleotide
agauauaacuucaauggau

SEQ ID NO: 642262 - RNA, 19 nt, Artificial Sequence
  Description of Artificial Sequence: Synthetic oligonucleotide
uuuugaggcauaaguuuuc

SEQ ID NO: 642263 - RNA, 19 nt, Artificial Sequence
  Description of Artificial Sequence: Synthetic oligonucleotide
uucagaugguuucaauauc

SEQ ID NO: 642264 - RNA, 19 nt, Artificial Sequence
  Description of Artificial Sequence: Synthetic oligonucleotide
acgucaugcuuucaucggg

SEQ ID NO: 642265 - RNA, 19 nt, Artificial Sequence
  Description of Artificial Sequence: Synthetic oligonucleotide
ugcuacuauacuucacuac

SEQ ID NO: 642266 - RNA, 19 nt, Artificial Sequence
  Description of Artificial Sequence: Synthetic oligonucleotide
acaauagagcaucaauaaa

SEQ ID NO: 642267 - RNA, 19 nt, Artificial Sequence
  Description of Artificial Sequence: Synthetic oligonucleotide
aacaagcccaaaauaauua

SEQ ID NO: 642268 - RNA, 19 nt, Artificial Sequence
  Description of Artificial Sequence: Synthetic oligonucleotide
cauaaguagcuaagugaag

SEQ ID NO: 642269 - RNA, 19 nt, Artificial Sequence
  Description of Artificial Sequence: Synthetic oligonucleotide
auaaucacauuaccaacua

SEQ ID NO: 642270 - RNA, 19 nt, Artificial Sequence
  Description of Artificial Sequence: Synthetic oligonucleotide
ggguaauacuauaugagcc

SEQ ID NO: 642271 - RNA, 19 nt, Artificial Sequence
  Description of Artificial Sequence: Synthetic oligonucleotide
ucgguggauuagcuguucg

SEQ ID NO: 642272 - RNA, 19 nt, Artificial Sequence
  Description of Artificial Sequence: Synthetic oligonucleotide
ugccaaaagguguuucgug

SEQ ID NO: 642273 - RNA, 19 nt, Artificial Sequence
  Description of Artificial Sequence: Synthetic oligonucleotide
uuacugacuacaucagcuc

SEQ ID NO: 642274 - RNA, 19 nt, Artificial Sequence
  Description of Artificial Sequence: Synthetic oligonucleotide
cacauuaccaacuaguuuu

SEQ ID NO: 642275 - RNA, 19 nt, Artificial Sequence
  Description of Artificial Sequence: Synthetic oligonucleotide
ugagcucgacaaaucaagu

SEQ ID NO: 642276 - RNA, 19 nt, Artificial Sequence
  Description of Artificial Sequence: Synthetic oligonucleotide
uguuaacagaguucucagu

SEQ ID NO: 642277 - RNA, 19 nt, Artificial Sequence
  Description of Artificial Sequence: Synthetic oligonucleotide
ucacauuaccaacuaguuu

SEQ ID NO: 642278 - RNA, 19 nt, Artificial Sequence
  Description of Artificial Sequence: Synthetic oligonucleotide
guuaccaauugucguuuag

SEQ ID NO: 642279 - RNA, 19 nt, Artificial Sequence
  Description of Artificial Sequence: Synthetic oligonucleotide
ccuuaucuuaaacaaaaug

SEQ ID NO: 642280 - RNA, 19 nt, Artificial Sequence
  Description of Artificial Sequence: Synthetic oligonucleotide
aaacuaauaguuggugaau

SEQ ID NO: 642281 - RNA, 19 nt, Artificial Sequence
  Description of Artificial Sequence: Synthetic oligonucleotide
caugcuuucaucggguaac

SEQ ID NO: 642282 - RNA, 19 nt, Artificial Sequence
  Description of Artificial Sequence: Synthetic oligonucleotide
gcuacuauacuucacuaca

SEQ ID NO: 642283 - RNA, 19 nt, Artificial Sequence
  Description of Artificial Sequence: Synthetic oligonucleotide
gaucagauaguuuguauau

SEQ ID NO: 642284 - RNA, 19 nt, Artificial Sequence
  Description of Artificial Sequence: Synthetic oligonucleotide
aucacccggcuccaacucc

SEQ ID NO: 642285 - RNA, 19 nt, Artificial Sequence
  Description of Artificial Sequence: Synthetic oligonucleotide
gacaaagccuuacagucaa

SEQ ID NO: 642286 - RNA, 19 nt, Artificial Sequence
  Description of Artificial Sequence: Synthetic oligonucleotide
aauaguuggugaaugucuu

SEQ ID NO: 642287 - RNA, 19 nt, Artificial Sequence
  Description of Artificial Sequence: Synthetic oligonucleotide
uuaacagaguucucaguuu

SEQ ID NO: 642288 - RNA, 19 nt, Artificial Sequence
  Description of Artificial Sequence: Synthetic oligonucleotide
uagcuaagugaagaaaacu

SEQ ID NO: 642289 - RNA, 19 nt, Artificial Sequence
  Description of Artificial Sequence: Synthetic oligonucleotide
uuagacagugaagcacccg

SEQ ID NO: 642290 - RNA, 19 nt, Artificial Sequence
  Description of Artificial Sequence: Synthetic oligonucleotide
gugaaugucuuuaaagcuc

SEQ ID NO: 642291 - RNA, 19 nt, Artificial Sequence
  Description of Artificial Sequence: Synthetic oligonucleotide
uguuaaugcuaacccuuaa

SEQ ID NO: 642292 - RNA, 19 nt, Artificial Sequence
  Description of Artificial Sequence: Synthetic oligonucleotide
uuuccaaggcuugucaaaa

SEQ ID NO: 642293 - RNA, 19 nt, Artificial Sequence
  Description of Artificial Sequence: Synthetic oligonucleotide
aaagccaagguaccacaua

SEQ ID NO: 642294 - RNA, 19 nt, Artificial Sequence
  Description of Artificial Sequence: Synthetic oligonucleotide
gauggaacgucaugcuuuc

SEQ ID NO: 642295 - RNA, 19 nt, Artificial Sequence
  Description of Artificial Sequence: Synthetic oligonucleotide
ucggggcagaaaauaaggu

SEQ ID NO: 642296 - RNA, 19 nt, Artificial Sequence
  Description of Artificial Sequence: Synthetic oligonucleotide
auagagcaucaauaaauua

SEQ ID NO: 642297 - RNA, 19 nt, Artificial Sequence
  Description of Artificial Sequence: Synthetic oligonucleotide
gggcauuauaaauauuaug

SEQ ID NO: 642298 - RNA, 19 nt, Artificial Sequence
  Description of Artificial Sequence: Synthetic oligonucleotide
aaguagcuaagugaagaaa

SEQ ID NO: 642299 - RNA, 19 nt, Artificial Sequence
  Description of Artificial Sequence: Synthetic oligonucleotide
uuguuaaugcuaacccuua

SEQ ID NO: 642300 - RNA, 19 nt, Artificial Sequence
  Description of Artificial Sequence: Synthetic oligonucleotide
aagcccacuagaaauaauu

SEQ ID NO: 642301 - RNA, 19 nt, Artificial Sequence
  Description of Artificial Sequence: Synthetic oligonucleotide
auacuauaugagccuuauc

SEQ ID NO: 642302 - RNA, 19 nt, Artificial Sequence
  Description of Artificial Sequence: Synthetic oligonucleotide
aaccaaugcaggugagggu

SEQ ID NO: 642303 - RNA, 19 nt, Artificial Sequence
  Description of Artificial Sequence: Synthetic oligonucleotide
acgaucauuuucuccccag

SEQ ID NO: 642304 - RNA, 19 nt, Artificial Sequence
  Description of Artificial Sequence: Synthetic oligonucleotide
guaguuagccauuauucua

SEQ ID NO: 642305 - RNA, 19 nt, Artificial Sequence
  Description of Artificial Sequence: Synthetic oligonucleotide
uaauacuauaugagccuua

SEQ ID NO: 642306 - RNA, 19 nt, Artificial Sequence
  Description of Artificial Sequence: Synthetic oligonucleotide
uuugaggcauaaguuuucu

SEQ ID NO: 642307 - RNA, 19 nt, Artificial Sequence
  Description of Artificial Sequence: Synthetic oligonucleotide
guaucaauuagacaacuuu

SEQ ID NO: 642308 - RNA, 19 nt, Artificial Sequence
  Description of Artificial Sequence: Synthetic oligonucleotide
ucaugcuuucaucggguaa

SEQ ID NO: 642309 - RNA, 19 nt, Artificial Sequence
  Description of Artificial Sequence: Synthetic oligonucleotide
uaauucggggcagaaaaua

SEQ ID NO: 642310 - RNA, 19 nt, Artificial Sequence
  Description of Artificial Sequence: Synthetic oligonucleotide
gagcucgacaaaucaaguc

SEQ ID NO: 642311 - RNA, 19 nt, Artificial Sequence
  Description of Artificial Sequence: Synthetic oligonucleotide
guagcuaagugaagaaaac

SEQ ID NO: 642312 - RNA, 19 nt, Artificial Sequence
  Description of Artificial Sequence: Synthetic oligonucleotide
cuaugguaacacauaagaa

SEQ ID NO: 642313 - RNA, 19 nt, Artificial Sequence
  Description of Artificial Sequence: Synthetic oligonucleotide
cauacugguacuuagcuuu

SEQ ID NO: 642314 - RNA, 19 nt, Artificial Sequence
  Description of Artificial Sequence: Synthetic oligonucleotide
auucauuaucagcugcaaa

SEQ ID NO: 642315 - RNA, 19 nt, Artificial Sequence
  Description of Artificial Sequence: Synthetic oligonucleotide
aucggguaacuaccacagc

SEQ ID NO: 642316 - RNA, 19 nt, Artificial Sequence
  Description of Artificial Sequence: Synthetic oligonucleotide
uucuucgguggauuagcug

SEQ ID NO: 642317 - RNA, 19 nt, Artificial Sequence
  Description of Artificial Sequence: Synthetic oligonucleotide
uggauuuaacuuuguugaa

SEQ ID NO: 642318 - RNA, 19 nt, Artificial Sequence
  Description of Artificial Sequence: Synthetic oligonucleotide
gccaaaagguguuucgugc

SEQ ID NO: 642319 - RNA, 19 nt, Artificial Sequence
  Description of Artificial Sequence: Synthetic oligonucleotide
caccauacugguacuuagc

SEQ ID NO: 642320 - RNA, 19 nt, Artificial Sequence
  Description of Artificial Sequence: Synthetic oligonucleotide
aacaagccgggccccacga

SEQ ID NO: 642321 - RNA, 19 nt, Artificial Sequence
  Description of Artificial Sequence: Synthetic oligonucleotide
gugucacauccaaagaacc

SEQ ID NO: 642322 - RNA, 19 nt, Artificial Sequence
  Description of Artificial Sequence: Synthetic oligonucleotide
aacauucacauggcaauua

SEQ ID NO: 642323 - RNA, 19 nt, Artificial Sequence
  Description of Artificial Sequence: Synthetic oligonucleotide
uucaucggguaacuaccac

SEQ ID NO: 642324 - RNA, 19 nt, Artificial Sequence
  Description of Artificial Sequence: Synthetic oligonucleotide
accaauugucguuuagcaa

SEQ ID NO: 642325 - RNA, 19 nt, Artificial Sequence
  Description of Artificial Sequence: Synthetic oligonucleotide
gauacucagagcugacaaa

SEQ ID NO: 642326 - RNA, 19 nt, Artificial Sequence
  Description of Artificial Sequence: Synthetic oligonucleotide
aucauacgccagcauuguc

SEQ ID NO: 642327 - RNA, 19 nt, Artificial Sequence
  Description of Artificial Sequence: Synthetic oligonucleotide
ccaaaagguguuucgugcg

SEQ ID NO: 642328 - RNA, 19 nt, Artificial Sequence
  Description of Artificial Sequence: Synthetic oligonucleotide
uugcuacuauacuucacua

SEQ ID NO: 642329 - RNA, 19 nt, Artificial Sequence
  Description of Artificial Sequence: Synthetic oligonucleotide
aggcauaaguuuucuuagu

SEQ ID NO: 642330 - RNA, 19 nt, Artificial Sequence
  Description of Artificial Sequence: Synthetic oligonucleotide
aucauuggaucagauaguu

SEQ ID NO: 642331 - RNA, 19 nt, Artificial Sequence
  Description of Artificial Sequence: Synthetic oligonucleotide
gcgaaauauucauuaucag

SEQ ID NO: 642332 - RNA, 19 nt, Artificial Sequence
  Description of Artificial Sequence: Synthetic oligonucleotide
caggacguccagaauucag

SEQ ID NO: 642333 - RNA, 19 nt, Artificial Sequence
  Description of Artificial Sequence: Synthetic oligonucleotide
gguacuuagcuuucuuuca

SEQ ID NO: 642334 - RNA, 19 nt, Artificial Sequence
  Description of Artificial Sequence: Synthetic oligonucleotide
gguaauacuauaugagccu

SEQ ID NO: 642335 - RNA, 19 nt, Artificial Sequence
  Description of Artificial Sequence: Synthetic oligonucleotide
guucgagguggagugacag

SEQ ID NO: 642336 - RNA, 19 nt, Artificial Sequence
  Description of Artificial Sequence: Synthetic oligonucleotide
ggguaacuaccacagcuag

SEQ ID NO: 642337 - RNA, 19 nt, Artificial Sequence
  Description of Artificial Sequence: Synthetic oligonucleotide
auauuauguccaucccuau

SEQ ID NO: 642338 - RNA, 19 nt, Artificial Sequence
  Description of Artificial Sequence: Synthetic oligonucleotide
aacacauaagaagggcauu

SEQ ID NO: 642339 - RNA, 19 nt, Artificial Sequence
  Description of Artificial Sequence: Synthetic oligonucleotide
cauuaccaacuaguuuugg

SEQ ID NO: 642340 - RNA, 19 nt, Artificial Sequence
  Description of Artificial Sequence: Synthetic oligonucleotide
aaacgcagaguaaaaucuu

SEQ ID NO: 642341 - RNA, 19 nt, Artificial Sequence
  Description of Artificial Sequence: Synthetic oligonucleotide
gaaaaguaguuagccauua

SEQ ID NO: 642342 - RNA, 19 nt, Artificial Sequence
  Description of Artificial Sequence: Synthetic oligonucleotide
ugaggguaauuaccagaaa

SEQ ID NO: 642343 - RNA, 19 nt, Artificial Sequence
  Description of Artificial Sequence: Synthetic oligonucleotide
aacgcagaguaaaaucuuu

SEQ ID NO: 642344 - RNA, 19 nt, Artificial Sequence
  Description of Artificial Sequence: Synthetic oligonucleotide
gaucacucaggcuuuguau

SEQ ID NO: 642345 - RNA, 19 nt, Artificial Sequence
  Description of Artificial Sequence: Synthetic oligonucleotide
uguucgagguggagugaca

SEQ ID NO: 642346 - RNA, 19 nt, Artificial Sequence
  Description of Artificial Sequence: Synthetic oligonucleotide
ggugaggguaauuaccaga

SEQ ID NO: 642347 - RNA, 19 nt, Artificial Sequence
  Description of Artificial Sequence: Synthetic oligonucleotide
gagagggaaagaagagcgc

SEQ ID NO: 642348 - RNA, 19 nt, Artificial Sequence
  Description of Artificial Sequence: Synthetic oligonucleotide
ucauuggaucagauaguuu

SEQ ID NO: 642349 - RNA, 19 nt, Artificial Sequence
  Description of Artificial Sequence: Synthetic oligonucleotide
cuacuauacuucacuacaa

SEQ ID NO: 642350 - RNA, 19 nt, Artificial Sequence
  Description of Artificial Sequence: Synthetic oligonucleotide
ggaucagauaguuuguaua

SEQ ID NO: 642351 - RNA, 19 nt, Artificial Sequence
  Description of Artificial Sequence: Synthetic oligonucleotide
auaugagccuuaucuuaaa

SEQ ID NO: 642352 - RNA, 19 nt, Artificial Sequence
  Description of Artificial Sequence: Synthetic oligonucleotide
aucacauuaccaacuaguu

SEQ ID NO: 642353 - RNA, 19 nt, Artificial Sequence
  Description of Artificial Sequence: Synthetic oligonucleotide
caguaauacaaugugccaa

SEQ ID NO: 642354 - RNA, 19 nt, Artificial Sequence
  Description of Artificial Sequence: Synthetic oligonucleotide
guaacuaccacagcuaguu

SEQ ID NO: 642355 - RNA, 19 nt, Artificial Sequence
  Description of Artificial Sequence: Synthetic oligonucleotide
acauuaccaacuaguuuug

SEQ ID NO: 642356 - RNA, 19 nt, Artificial Sequence
  Description of Artificial Sequence: Synthetic oligonucleotide
uccaaaucaguggcaauuu

SEQ ID NO: 642357 - RNA, 19 nt, Artificial Sequence
  Description of Artificial Sequence: Synthetic oligonucleotide
acaguuacauaaguagcua

SEQ ID NO: 642358 - RNA, 19 nt, Artificial Sequence
  Description of Artificial Sequence: Synthetic oligonucleotide
ucgacaaaucaagucuaaa

SEQ ID NO: 642359 - RNA, 19 nt, Artificial Sequence
  Description of Artificial Sequence: Synthetic oligonucleotide
aggcuuuguaucaauuaga

SEQ ID NO: 642360 - RNA, 19 nt, Artificial Sequence
  Description of Artificial Sequence: Synthetic oligonucleotide
aagguguuucgugcgaauu

SEQ ID NO: 642361 - RNA, 19 nt, Artificial Sequence
  Description of Artificial Sequence: Synthetic oligonucleotide
gugauaccagaagauauaa

SEQ ID NO: 642362 - RNA, 19 nt, Artificial Sequence
  Description of Artificial Sequence: Synthetic oligonucleotide
cccacuagaaauaauuaaa

SEQ ID NO: 642363 - RNA, 19 nt, Artificial Sequence
  Description of Artificial Sequence: Synthetic oligonucleotide
cauacgccagcauugucaa

SEQ ID NO: 642364 - RNA, 19 nt, Artificial Sequence
  Description of Artificial Sequence: Synthetic oligonucleotide
ccaagguaccacauaauca

SEQ ID NO: 642365 - RNA, 19 nt, Artificial Sequence
  Description of Artificial Sequence: Synthetic oligonucleotide
acaucuaugguaacacaua

SEQ ID NO: 642366 - RNA, 19 nt, Artificial Sequence
  Description of Artificial Sequence: Synthetic oligonucleotide
ccacauaaucacauuacca

SEQ ID NO: 642367 - RNA, 19 nt, Artificial Sequence
  Description of Artificial Sequence: Synthetic oligonucleotide
caauugucguuuagcaaaa

SEQ ID NO: 642368 - RNA, 19 nt, Artificial Sequence
  Description of Artificial Sequence: Synthetic oligonucleotide
agggcauuauaaauauuau

SEQ ID NO: 642369 - RNA, 19 nt, Artificial Sequence
  Description of Artificial Sequence: Synthetic oligonucleotide
caagccgggccccacgaac

SEQ ID NO: 642370 - RNA, 19 nt, Artificial Sequence
  Description of Artificial Sequence: Synthetic oligonucleotide
caaaagguguuucgugcga

SEQ ID NO: 642371 - RNA, 19 nt, Artificial Sequence
  Description of Artificial Sequence: Synthetic oligonucleotide
ggaacgucaugcuuucauc

SEQ ID NO: 642372 - RNA, 19 nt, Artificial Sequence
  Description of Artificial Sequence: Synthetic oligonucleotide
gcaguaauacaaugugcca

SEQ ID NO: 642373 - RNA, 19 nt, Artificial Sequence
  Description of Artificial Sequence: Synthetic oligonucleotide
guaauacaaugugccaauc

SEQ ID NO: 642374 - RNA, 19 nt, Artificial Sequence
  Description of Artificial Sequence: Synthetic oligonucleotide
cgcagaguaaaaucuuuag

SEQ ID NO: 642375 - RNA, 19 nt, Artificial Sequence
  Description of Artificial Sequence: Synthetic oligonucleotide
augacgauucagaaauuua

SEQ ID NO: 642376 - RNA, 19 nt, Artificial Sequence
  Description of Artificial Sequence: Synthetic oligonucleotide
accuaaagccaagguacca

SEQ ID NO: 642377 - RNA, 19 nt, Artificial Sequence
  Description of Artificial Sequence: Synthetic oligonucleotide
uaacuaccacagcuaguuu

SEQ ID NO: 642378 - RNA, 19 nt, Artificial Sequence
  Description of Artificial Sequence: Synthetic oligonucleotide
gcuuuguaucaauuagaca

SEQ ID NO: 642379 - RNA, 19 nt, Artificial Sequence
  Description of Artificial Sequence: Synthetic oligonucleotide
ucaugacgauucagaaauu

SEQ ID NO: 642380 - RNA, 19 nt, Artificial Sequence
  Description of Artificial Sequence: Synthetic oligonucleotide
cuguucgagguggagugac

SEQ ID NO: 642381 - RNA, 19 nt, Artificial Sequence
  Description of Artificial Sequence: Synthetic oligonucleotide
acccgauacucagagcuga

SEQ ID NO: 642382 - RNA, 19 nt, Artificial Sequence
  Description of Artificial Sequence: Synthetic oligonucleotide
acagcuaguuuaacuggga

SEQ ID NO: 642383 - RNA, 19 nt, Artificial Sequence
  Description of Artificial Sequence: Synthetic oligonucleotide
ugccuguuguuaagucuuc

SEQ ID NO: 642384 - RNA, 19 nt, Artificial Sequence
  Description of Artificial Sequence: Synthetic oligonucleotide
auaacagaguauacuuauu

SEQ ID NO: 642385 - RNA, 19 nt, Artificial Sequence
  Description of Artificial Sequence: Synthetic oligonucleotide
cauuaucagcugcaaaggu

SEQ ID NO: 642386 - RNA, 19 nt, Artificial Sequence
  Description of Artificial Sequence: Synthetic oligonucleotide
cuccccgccgagcagcgag

SEQ ID NO: 642387 - RNA, 19 nt, Artificial Sequence
  Description of Artificial Sequence: Synthetic oligonucleotide
cacccgauacucagagcug

SEQ ID NO: 642388 - RNA, 19 nt, Artificial Sequence
  Description of Artificial Sequence: Synthetic oligonucleotide
gcguuuuaaagaacuuuug

SEQ ID NO: 642389 - RNA, 19 nt, Artificial Sequence
  Description of Artificial Sequence: Synthetic oligonucleotide
ggagugacaggacguccag

SEQ ID NO: 642390 - RNA, 19 nt, Artificial Sequence
  Description of Artificial Sequence: Synthetic oligonucleotide
caauagugucacauccaaa

SEQ ID NO: 642391 - RNA, 19 nt, Artificial Sequence
  Description of Artificial Sequence: Synthetic oligonucleotide
gcccacuagaaauaauuaa

SEQ ID NO: 642392 - RNA, 19 nt, Artificial Sequence
  Description of Artificial Sequence: Synthetic oligonucleotide
agccgggccccacgaaccg

SEQ ID NO: 642393 - RNA, 19 nt, Artificial Sequence
  Description of Artificial Sequence: Synthetic oligonucleotide
ccaaagaaccacagaucug

SEQ ID NO: 642394 - RNA, 19 nt, Artificial Sequence
  Description of Artificial Sequence: Synthetic oligonucleotide
cucgacaaaucaagucuaa

SEQ ID NO: 642395 - RNA, 19 nt, Artificial Sequence
  Description of Artificial Sequence: Synthetic oligonucleotide
ccuaaagccaagguaccac

SEQ ID NO: 642396 - RNA, 19 nt, Artificial Sequence
  Description of Artificial Sequence: Synthetic oligonucleotide
gaauucaguccaccauacu

SEQ ID NO: 642397 - RNA, 19 nt, Artificial Sequence
  Description of Artificial Sequence: Synthetic oligonucleotide
agcccacuagaaauaauua

SEQ ID NO: 642398 - RNA, 19 nt, Artificial Sequence
  Description of Artificial Sequence: Synthetic oligonucleotide
cagaagauauaacuucaau

SEQ ID NO: 642399 - RNA, 19 nt, Artificial Sequence
  Description of Artificial Sequence: Synthetic oligonucleotide
cacacgccgggagaagccc

SEQ ID NO: 642400 - RNA, 19 nt, Artificial Sequence
  Description of Artificial Sequence: Synthetic oligonucleotide
gaagagcgccagcuuucca

SEQ ID NO: 642401 - RNA, 19 nt, Artificial Sequence
  Description of Artificial Sequence: Synthetic oligonucleotide
agcucuucccauauuucua

SEQ ID NO: 642402 - RNA, 19 nt, Artificial Sequence
  Description of Artificial Sequence: Synthetic oligonucleotide
guaauacuauaugagccuu

SEQ ID NO: 642403 - RNA, 19 nt, Artificial Sequence
  Description of Artificial Sequence: Synthetic oligonucleotide
gguguuucgugcgaauuaa

SEQ ID NO: 642404 - RNA, 19 nt, Artificial Sequence
  Description of Artificial Sequence: Synthetic oligonucleotide
uucgguggauuagcuguuc

SEQ ID NO: 642405 - RNA, 19 nt, Artificial Sequence
  Description of Artificial Sequence: Synthetic oligonucleotide
ggcagaaaauaagguuacc

SEQ ID NO: 642406 - RNA, 19 nt, Artificial Sequence
  Description of Artificial Sequence: Synthetic oligonucleotide
augugccaauccauaaaau

SEQ ID NO: 642407 - RNA, 19 nt, Artificial Sequence
  Description of Artificial Sequence: Synthetic oligonucleotide
acgcagaguaaaaucuuua

SEQ ID NO: 642408 - RNA, 19 nt, Artificial Sequence
  Description of Artificial Sequence: Synthetic oligonucleotide
cuguuguuaagucuuccuu

SEQ ID NO: 642409 - RNA, 19 nt, Artificial Sequence
  Description of Artificial Sequence: Synthetic oligonucleotide
cagaaugaucacucaggcu

SEQ ID NO: 642410 - RNA, 19 nt, Artificial Sequence
  Description of Artificial Sequence: Synthetic oligonucleotide
gggccccacgaaccgagcg

SEQ ID NO: 642411 - RNA, 19 nt, Artificial Sequence
  Description of Artificial Sequence: Synthetic oligonucleotide
gccgggagaagcccacuag

SEQ ID NO: 642412 - RNA, 19 nt, Artificial Sequence
  Description of Artificial Sequence: Synthetic oligonucleotide
ccacgaucauuuucucccc

SEQ ID NO: 642413 - RNA, 19 nt, Artificial Sequence
  Description of Artificial Sequence: Synthetic oligonucleotide
cacgaucauuuucucccca

SEQ ID NO: 642414 - RNA, 19 nt, Artificial Sequence
  Description of Artificial Sequence: Synthetic oligonucleotide
gagagcgcgcgcacacgcc

SEQ ID NO: 642415 - RNA, 19 nt, Artificial Sequence
  Description of Artificial Sequence: Synthetic oligonucleotide
cacgccgggagaagcccac

SEQ ID NO: 642416 - RNA, 19 nt, Artificial Sequence
  Description of Artificial Sequence: Synthetic oligonucleotide
cacgaaccgagcgcaucag

SEQ ID NO: 642417 - RNA, 19 nt, Artificial Sequence
  Description of Artificial Sequence: Synthetic oligonucleotide
gucaugcuuucaucgggua

SEQ ID NO: 642418 - RNA, 19 nt, Artificial Sequence
  Description of Artificial Sequence: Synthetic oligonucleotide
ccacacucaucauacgcca

SEQ ID NO: 642419 - RNA, 19 nt, Artificial Sequence
  Description of Artificial Sequence: Synthetic oligonucleotide
cacuacaaagcaugucuau

SEQ ID NO: 642420 - RNA, 19 nt, Artificial Sequence
  Description of Artificial Sequence: Synthetic oligonucleotide
ggccccacgaaccgagcgc

SEQ ID NO: 642421 - RNA, 19 nt, Artificial Sequence
  Description of Artificial Sequence: Synthetic oligonucleotide
caugacgauucagaaauuu

SEQ ID NO: 642422 - RNA, 19 nt, Artificial Sequence
  Description of Artificial Sequence: Synthetic oligonucleotide
gagugacaggacguccaga

SEQ ID NO: 642423 - RNA, 19 nt, Artificial Sequence
  Description of Artificial Sequence: Synthetic oligonucleotide
cgaucauuuucuccccagc

SEQ ID NO: 642424 - RNA, 19 nt, Artificial Sequence
  Description of Artificial Sequence: Synthetic oligonucleotide
ugcuuucaucggguaacua

SEQ ID NO: 642425 - RNA, 19 nt, Artificial Sequence
  Description of Artificial Sequence: Synthetic oligonucleotide
gaaugaucacucaggcuuu

SEQ ID NO: 642426 - RNA, 19 nt, Artificial Sequence
  Description of Artificial Sequence: Synthetic oligonucleotide
cacugaccagcauucauuu

SEQ ID NO: 642427 - RNA, 19 nt, Artificial Sequence
  Description of Artificial Sequence: Synthetic oligonucleotide
cuugcuacuccuugacauu

SEQ ID NO: 642428 - RNA, 19 nt, Artificial Sequence
  Description of Artificial Sequence: Synthetic oligonucleotide
ggguaauuaccagaaaguu

SEQ ID NO: 642429 - RNA, 19 nt, Artificial Sequence
  Description of Artificial Sequence: Synthetic oligonucleotide
ccuugcuacuccuugacau

SEQ ID NO: 642430 - RNA, 19 nt, Artificial Sequence
  Description of Artificial Sequence: Synthetic oligonucleotide
acaagccgggccccacgaa

SEQ ID NO: 642431 - RNA, 19 nt, Artificial Sequence
  Description of Artificial Sequence: Synthetic oligonucleotide
gccuguuguuaagucuucc

SEQ ID NO: 642432 - RNA, 19 nt, Artificial Sequence
  Description of Artificial Sequence: Synthetic oligonucleotide
auacgccagcauugucaaa

SEQ ID NO: 642433 - RNA, 19 nt, Artificial Sequence
  Description of Artificial Sequence: Synthetic oligonucleotide
cagcuaguuuaacugggau

SEQ ID NO: 642434 - RNA, 19 nt, Artificial Sequence
  Description of Artificial Sequence: Synthetic oligonucleotide
caucccuaugaagcuuaca

SEQ ID NO: 642435 - RNA, 19 nt, Artificial Sequence
  Description of Artificial Sequence: Synthetic oligonucleotide
gcucgacaaaucaagucua

SEQ ID NO: 642436 - RNA, 19 nt, Artificial Sequence
  Description of Artificial Sequence: Synthetic oligonucleotide
caucauacgccagcauugu

SEQ ID NO: 642437 - RNA, 19 nt, Artificial Sequence
  Description of Artificial Sequence: Synthetic oligonucleotide
gcuacuccuugacauuugu

SEQ ID NO: 642438 - RNA, 19 nt, Artificial Sequence
  Description of Artificial Sequence: Synthetic oligonucleotide
guguuucgugcgaauuaaa

SEQ ID NO: 642439 - RNA, 19 nt, Artificial Sequence
  Description of Artificial Sequence: Synthetic oligonucleotide
cagauggaacgucaugcuu

SEQ ID NO: 642440 - RNA, 19 nt, Artificial Sequence
  Description of Artificial Sequence: Synthetic oligonucleotide
guaaaucacccggcuccaa

SEQ ID NO: 642441 - RNA, 19 nt, Artificial Sequence
  Description of Artificial Sequence: Synthetic oligonucleotide
ccacgaaccgagcgcauca

SEQ ID NO: 642442 - RNA, 19 nt, Artificial Sequence
  Description of Artificial Sequence: Synthetic oligonucleotide
cuacugcacaauagagcau

SEQ ID NO: 642443 - RNA, 19 nt, Artificial Sequence
  Description of Artificial Sequence: Synthetic oligonucleotide
cccgauacucagagcugac

SEQ ID NO: 642444 - RNA, 19 nt, Artificial Sequence
  Description of Artificial Sequence: Synthetic oligonucleotide
ccgagcagcgagagcgcgc

SEQ ID NO: 642445 - RNA, 19 nt, Artificial Sequence
  Description of Artificial Sequence: Synthetic oligonucleotide
ccaucccuaugaagcuuac

SEQ ID NO: 642446 - RNA, 19 nt, Artificial Sequence
  Description of Artificial Sequence: Synthetic oligonucleotide
gguaacuaccacagcuagu

SEQ ID NO: 642447 - RNA, 19 nt, Artificial Sequence
  Description of Artificial Sequence: Synthetic oligonucleotide
ccgggagaagcccacuaga

SEQ ID NO: 642448 - RNA, 19 nt, Artificial Sequence
  Description of Artificial Sequence: Synthetic oligonucleotide
caacuaguuuuggguaaua

SEQ ID NO: 642449 - RNA, 19 nt, Artificial Sequence
  Description of Artificial Sequence: Synthetic oligonucleotide
ccgggccccacgaaccgag

SEQ ID NO: 642450 - RNA, 19 nt, Artificial Sequence
  Description of Artificial Sequence: Synthetic oligonucleotide
gcaacacuaaaaccacauu

SEQ ID NO: 642451 - RNA, 19 nt, Artificial Sequence
  Description of Artificial Sequence: Synthetic oligonucleotide
cuucgguggauuagcuguu

SEQ ID NO: 642452 - RNA, 19 nt, Artificial Sequence
  Description of Artificial Sequence: Synthetic oligonucleotide
gguugcccagucaaacugu

SEQ ID NO: 642453 - RNA, 19 nt, Artificial Sequence
  Description of Artificial Sequence: Synthetic oligonucleotide
gggaugcuugucaucuuua

SEQ ID NO: 642454 - RNA, 19 nt, Artificial Sequence
  Description of Artificial Sequence: Synthetic oligonucleotide
gccccacgaaccgagcgca

SEQ ID NO: 642455 - RNA, 19 nt, Artificial Sequence
  Description of Artificial Sequence: Synthetic oligonucleotide
cggguaacuaccacagcua

SEQ ID NO: 642456 - RNA, 19 nt, Artificial Sequence
  Description of Artificial Sequence: Synthetic oligonucleotide
gcuguucgagguggaguga

SEQ ID NO: 642457 - RNA, 19 nt, Artificial Sequence
  Description of Artificial Sequence: Synthetic oligonucleotide
cccacgaaccgagcgcauc

SEQ ID NO: 642458 - RNA, 19 nt, Artificial Sequence
  Description of Artificial Sequence: Synthetic oligonucleotide
ccauacugguacuuagcuu

SEQ ID NO: 642459 - RNA, 19 nt, Artificial Sequence
  Description of Artificial Sequence: Synthetic oligonucleotide
ccaaaucaguggcaauuuu

SEQ ID NO: 642460 - RNA, 19 nt, Artificial Sequence
  Description of Artificial Sequence: Synthetic oligonucleotide
gcgcgcacacgccgggaga

SEQ ID NO: 642461 - RNA, 19 nt, Artificial Sequence
  Description of Artificial Sequence: Synthetic oligonucleotide
cgcgcacacgccgggagaa

SEQ ID NO: 642462 - RNA, 19 nt, Artificial Sequence
  Description of Artificial Sequence: Synthetic oligonucleotide
cgccgggagaagcccacua

SEQ ID NO: 642463 - RNA, 19 nt, Artificial Sequence
  Description of Artificial Sequence: Synthetic oligonucleotide
aauacuugaaguuuuacgc

SEQ ID NO: 642464 - RNA, 19 nt, Artificial Sequence
  Description of Artificial Sequence: Synthetic oligonucleotide
uauauauauauauauaaug

SEQ ID NO: 642465 - RNA, 19 nt, Artificial Sequence
  Description of Artificial Sequence: Synthetic oligonucleotide
uauauauauauauauauaa

SEQ ID NO: 642466 - RNA, 19 nt, Artificial Sequence
  Description of Artificial Sequence: Synthetic oligonucleotide
uuuauauauauauauauau

SEQ ID NO: 642467 - RNA, 19 nt, Artificial Sequence
  Description of Artificial Sequence: Synthetic oligonucleotide
aaagcauugaauucugguc

SEQ ID NO: 642468 - RNA, 19 nt, Artificial Sequence
  Description of Artificial Sequence: Synthetic oligonucleotide
cauaaagugaggaaaauag

SEQ ID NO: 642469 - RNA, 19 nt, Artificial Sequence
  Description of Artificial Sequence: Synthetic oligonucleotide
uuaaguaacauuaaccccu

SEQ ID NO: 642470 - RNA, 19 nt, Artificial Sequence
  Description of Artificial Sequence: Synthetic oligonucleotide
uuuacgcucagacuuaugg

SEQ ID NO: 642471 - RNA, 19 nt, Artificial Sequence
  Description of Artificial Sequence: Synthetic oligonucleotide
auuuuaaguaacauuaacc

SEQ ID NO: 642472 - RNA, 19 nt, Artificial Sequence
  Description of Artificial Sequence: Synthetic oligonucleotide
ucuauuaucccucagguuc

SEQ ID NO: 642473 - RNA, 19 nt, Artificial Sequence
  Description of Artificial Sequence: Synthetic oligonucleotide
ugcuuuaaaccacaaacgg

SEQ ID NO: 642474 - RNA, 19 nt, Artificial Sequence
  Description of Artificial Sequence: Synthetic oligonucleotide
aguaaucaacuuuaauugc

SEQ ID NO: 642475 - RNA, 19 nt, Artificial Sequence
  Description of Artificial Sequence: Synthetic oligonucleotide
uuuaggcuaagaaagauuc

SEQ ID NO: 642476 - RNA, 19 nt, Artificial Sequence
  Description of Artificial Sequence: Synthetic oligonucleotide
auauaauguaauuuuaagu

SEQ ID NO: 642477 - RNA, 19 nt, Artificial Sequence
  Description of Artificial Sequence: Synthetic oligonucleotide
acagucuauacagugaucc

SEQ ID NO: 642478 - RNA, 19 nt, Artificial Sequence
  Description of Artificial Sequence: Synthetic oligonucleotide
ugauuuacaacaguugagg

SEQ ID NO: 642479 - RNA, 19 nt, Artificial Sequence
  Description of Artificial Sequence: Synthetic oligonucleotide
auuaucggugcucaguccc

SEQ ID NO: 642480 - RNA, 19 nt, Artificial Sequence
  Description of Artificial Sequence: Synthetic oligonucleotide
uauauauauauaauguaau

SEQ ID NO: 642481 - RNA, 19 nt, Artificial Sequence
  Description of Artificial Sequence: Synthetic oligonucleotide
aaucuauuaucccucaggu

SEQ ID NO: 642482 - RNA, 19 nt, Artificial Sequence
  Description of Artificial Sequence: Synthetic oligonucleotide
uuuguaaucuauuaucccu

SEQ ID NO: 642483 - RNA, 19 nt, Artificial Sequence
  Description of Artificial Sequence: Synthetic oligonucleotide
aggaaaauugucuuuuagg

SEQ ID NO: 642484 - RNA, 19 nt, Artificial Sequence
  Description of Artificial Sequence: Synthetic oligonucleotide
aaguuuuacgcucagacuu

SEQ ID NO: 642485 - RNA, 19 nt, Artificial Sequence
  Description of Artificial Sequence: Synthetic oligonucleotide
aauacuacaaggugucucu

SEQ ID NO: 642486 - RNA, 19 nt, Artificial Sequence
  Description of Artificial Sequence: Synthetic oligonucleotide
acauuugcauguuaaaauc

SEQ ID NO: 642487 - RNA, 19 nt, Artificial Sequence
  Description of Artificial Sequence: Synthetic oligonucleotide
acaucaauuuggcagcugc

SEQ ID NO: 642488 - RNA, 19 nt, Artificial Sequence
  Description of Artificial Sequence: Synthetic oligonucleotide
aaaaucaccccacuggagu

SEQ ID NO: 642489 - RNA, 19 nt, Artificial Sequence
  Description of Artificial Sequence: Synthetic oligonucleotide
auauauauauauauaaugu

SEQ ID NO: 642490 - RNA, 19 nt, Artificial Sequence
  Description of Artificial Sequence: Synthetic oligonucleotide
uuuuauauauauauauaua

SEQ ID NO: 642491 - RNA, 19 nt, Artificial Sequence
  Description of Artificial Sequence: Synthetic oligonucleotide
auaacuauuaauauuacau

SEQ ID NO: 642492 - RNA, 19 nt, Artificial Sequence
  Description of Artificial Sequence: Synthetic oligonucleotide
uauauauauauauaaugua

SEQ ID NO: 642493 - RNA, 19 nt, Artificial Sequence
  Description of Artificial Sequence: Synthetic oligonucleotide
ucuuguuaagagaaaauaa

SEQ ID NO: 642494 - RNA, 19 nt, Artificial Sequence
  Description of Artificial Sequence: Synthetic oligonucleotide
auauuuggcagcccgcugc

SEQ ID NO: 642495 - RNA, 19 nt, Artificial Sequence
  Description of Artificial Sequence: Synthetic oligonucleotide
aacaauagguaauaagaaa

SEQ ID NO: 642496 - RNA, 19 nt, Artificial Sequence
  Description of Artificial Sequence: Synthetic oligonucleotide
uuauauauauauauauaua

SEQ ID NO: 642497 - RNA, 19 nt, Artificial Sequence
  Description of Artificial Sequence: Synthetic oligonucleotide
auaugguuggcuucagacc

SEQ ID NO: 642498 - RNA, 19 nt, Artificial Sequence
  Description of Artificial Sequence: Synthetic oligonucleotide
uaugguuggcuucagaccu

SEQ ID NO: 642499 - RNA, 19 nt, Artificial Sequence
  Description of Artificial Sequence: Synthetic oligonucleotide
aauucaagucugcauuauc

SEQ ID NO: 642500 - RNA, 19 nt, Artificial Sequence
  Description of Artificial Sequence: Synthetic oligonucleotide
agaauuagggaucugcuga

SEQ ID NO: 642501 - RNA, 19 nt, Artificial Sequence
  Description of Artificial Sequence: Synthetic oligonucleotide
uuauuggcaaggcaggagc

SEQ ID NO: 642502 - RNA, 19 nt, Artificial Sequence
  Description of Artificial Sequence: Synthetic oligonucleotide
aagaaggcgcugcugauag

SEQ ID NO: 642503 - RNA, 19 nt, Artificial Sequence
  Description of Artificial Sequence: Synthetic oligonucleotide
uaauaaaccuuauuggcaa

SEQ ID NO: 642504 - RNA, 19 nt, Artificial Sequence
  Description of Artificial Sequence: Synthetic oligonucleotide
cucccaaaauacuacaagg

SEQ ID NO: 642505 - RNA, 19 nt, Artificial Sequence
  Description of Artificial Sequence: Synthetic oligonucleotide
uucauauuuauaaguaauc

SEQ ID NO: 642506 - RNA, 19 nt, Artificial Sequence
  Description of Artificial Sequence: Synthetic oligonucleotide
uuuuacagaaaguguaugu

SEQ ID NO: 642507 - RNA, 19 nt, Artificial Sequence
  Description of Artificial Sequence: Synthetic oligonucleotide
agaaagcaagccaagaaac

SEQ ID NO: 642508 - RNA, 19 nt, Artificial Sequence
  Description of Artificial Sequence: Synthetic oligonucleotide
acuggaguaguuucuuacc

SEQ ID NO: 642509 - RNA, 19 nt, Artificial Sequence
  Description of Artificial Sequence: Synthetic oligonucleotide
uuaacagucuauacaguga

SEQ ID NO: 642510 - RNA, 19 nt, Artificial Sequence
  Description of Artificial Sequence: Synthetic oligonucleotide
aacguacuugauuggagag

SEQ ID NO: 642511 - RNA, 19 nt, Artificial Sequence
  Description of Artificial Sequence: Synthetic oligonucleotide
aaccuuauuggcaaggcag

SEQ ID NO: 642512 - RNA, 19 nt, Artificial Sequence
  Description of Artificial Sequence: Synthetic oligonucleotide
uucaagucugcauuaucgg

SEQ ID NO: 642513 - RNA, 19 nt, Artificial Sequence
  Description of Artificial Sequence: Synthetic oligonucleotide
guaacauuaaccccuuuug

SEQ ID NO: 642514 - RNA, 19 nt, Artificial Sequence
  Description of Artificial Sequence: Synthetic oligonucleotide
ucuaguguaugucuagugu

SEQ ID NO: 642515 - RNA, 19 nt, Artificial Sequence
  Description of Artificial Sequence: Synthetic oligonucleotide
ucuuaaaaugucucggaac

SEQ ID NO: 642516 - RNA, 19 nt, Artificial Sequence
  Description of Artificial Sequence: Synthetic oligonucleotide
auucaagucugcauuaucg

SEQ ID NO: 642517 - RNA, 19 nt, Artificial Sequence
  Description of Artificial Sequence: Synthetic oligonucleotide
cauaugguuggcuucagac

SEQ ID NO: 642518 - RNA, 19 nt, Artificial Sequence
  Description of Artificial Sequence: Synthetic oligonucleotide
auauauauauauaauguaa

SEQ ID NO: 642519 - RNA, 19 nt, Artificial Sequence
  Description of Artificial Sequence: Synthetic oligonucleotide
ugguauuuuaauauauuua

SEQ ID NO: 642520 - RNA, 19 nt, Artificial Sequence
  Description of Artificial Sequence: Synthetic oligonucleotide
ugucucggaacugugacgg

SEQ ID NO: 642521 - RNA, 19 nt, Artificial Sequence
  Description of Artificial Sequence: Synthetic oligonucleotide
auuuacaacaguugagggu

SEQ ID NO: 642522 - RNA, 19 nt, Artificial Sequence
  Description of Artificial Sequence: Synthetic oligonucleotide
uuugcucccaaaauacuac

SEQ ID NO: 642523 - RNA, 19 nt, Artificial Sequence
  Description of Artificial Sequence: Synthetic oligonucleotide
caucugacgucuuaaaaug

SEQ ID NO: 642524 - RNA, 19 nt, Artificial Sequence
  Description of Artificial Sequence: Synthetic oligonucleotide
aucaauuuggcagcugccc

SEQ ID NO: 642525 - RNA, 19 nt, Artificial Sequence
  Description of Artificial Sequence: Synthetic oligonucleotide
uuaucccucagguucaucu

SEQ ID NO: 642526 - RNA, 19 nt, Artificial Sequence
  Description of Artificial Sequence: Synthetic oligonucleotide
cauguuaaaaucaccccac

SEQ ID NO: 642527 - RNA, 19 nt, Artificial Sequence
  Description of Artificial Sequence: Synthetic oligonucleotide
ucccaaaauacuacaaggu

SEQ ID NO: 642528 - RNA, 19 nt, Artificial Sequence
  Description of Artificial Sequence: Synthetic oligonucleotide
uggcauauuuggcagcccg

SEQ ID NO: 642529 - RNA, 19 nt, Artificial Sequence
  Description of Artificial Sequence: Synthetic oligonucleotide
ugcauguuaaaaucacccc

SEQ ID NO: 642530 - RNA, 19 nt, Artificial Sequence
  Description of Artificial Sequence: Synthetic oligonucleotide
uaauaacuauuaauauuac

SEQ ID NO: 642531 - RNA, 19 nt, Artificial Sequence
  Description of Artificial Sequence: Synthetic oligonucleotide
ugcaugauuuacaacaguu

SEQ ID NO: 642532 - RNA, 19 nt, Artificial Sequence
  Description of Artificial Sequence: Synthetic oligonucleotide
ggcaaaaugcccuuguucc

SEQ ID NO: 642533 - RNA, 19 nt, Artificial Sequence
  Description of Artificial Sequence: Synthetic oligonucleotide
acaauagguaauaagaaau

SEQ ID NO: 642534 - RNA, 19 nt, Artificial Sequence
  Description of Artificial Sequence: Synthetic oligonucleotide
uaacauuaaccccuuuugu

SEQ ID NO: 642535 - RNA, 19 nt, Artificial Sequence
  Description of Artificial Sequence: Synthetic oligonucleotide
aguaaauaauaacuauuaa

SEQ ID NO: 642536 - RNA, 19 nt, Artificial Sequence
  Description of Artificial Sequence: Synthetic oligonucleotide
ucuuaauacuugaaguuuu

SEQ ID NO: 642537 - RNA, 19 nt, Artificial Sequence
  Description of Artificial Sequence: Synthetic oligonucleotide
aauuagggaucugcugacc

SEQ ID NO: 642538 - RNA, 19 nt, Artificial Sequence
  Description of Artificial Sequence: Synthetic oligonucleotide
uauauucuuuguaaucuau

SEQ ID NO: 642539 - RNA, 19 nt, Artificial Sequence
  Description of Artificial Sequence: Synthetic oligonucleotide
aaaugcccuuguuccaugg

SEQ ID NO: 642540 - RNA, 19 nt, Artificial Sequence
  Description of Artificial Sequence: Synthetic oligonucleotide
uacaaggugucucuagugu

SEQ ID NO: 642541 - RNA, 19 nt, Artificial Sequence
  Description of Artificial Sequence: Synthetic oligonucleotide
uaaaaucaccccacuggag

SEQ ID NO: 642542 - RNA, 19 nt, Artificial Sequence
  Description of Artificial Sequence: Synthetic oligonucleotide
agugauccaaaguucauau

SEQ ID NO: 642543 - RNA, 19 nt, Artificial Sequence
  Description of Artificial Sequence: Synthetic oligonucleotide
uuuugcucccaaaauacua

SEQ ID NO: 642544 - RNA, 19 nt, Artificial Sequence
  Description of Artificial Sequence: Synthetic oligonucleotide
ugaaagcauugaauucugg

SEQ ID NO: 642545 - RNA, 19 nt, Artificial Sequence
  Description of Artificial Sequence: Synthetic oligonucleotide
aaguuuuacagaaagugua

SEQ ID NO: 642546 - RNA, 19 nt, Artificial Sequence
  Description of Artificial Sequence: Synthetic oligonucleotide
aaaccucagacauuugcau

SEQ ID NO: 642547 - RNA, 19 nt, Artificial Sequence
  Description of Artificial Sequence: Synthetic oligonucleotide
uguggauuagaguuggcau

SEQ ID NO: 642548 - RNA, 19 nt, Artificial Sequence
  Description of Artificial Sequence: Synthetic oligonucleotide
gagagaauuagggaucugc

SEQ ID NO: 642549 - RNA, 19 nt, Artificial Sequence
  Description of Artificial Sequence: Synthetic oligonucleotide
ugcuagugagcugugaaag

SEQ ID NO: 642550 - RNA, 19 nt, Artificial Sequence
  Description of Artificial Sequence: Synthetic oligonucleotide
cuuuaauugcaugauuuac

SEQ ID NO: 642551 - RNA, 19 nt, Artificial Sequence
  Description of Artificial Sequence: Synthetic oligonucleotide
uauaaguaaucaacuuuaa

SEQ ID NO: 642552 - RNA, 19 nt, Artificial Sequence
  Description of Artificial Sequence: Synthetic oligonucleotide
auacuugaaguuuuacgcu

SEQ ID NO: 642553 - RNA, 19 nt, Artificial Sequence
  Description of Artificial Sequence: Synthetic oligonucleotide
cuaguguacucugugagag

SEQ ID NO: 642554 - RNA, 19 nt, Artificial Sequence
  Description of Artificial Sequence: Synthetic oligonucleotide
caagucugcauuaucggug

SEQ ID NO: 642555 - RNA, 19 nt, Artificial Sequence
  Description of Artificial Sequence: Synthetic oligonucleotide
ugcauaggauucauguucu

SEQ ID NO: 642556 - RNA, 19 nt, Artificial Sequence
  Description of Artificial Sequence: Synthetic oligonucleotide
ugaauucuggucugggcug

SEQ ID NO: 642557 - RNA, 19 nt, Artificial Sequence
  Description of Artificial Sequence: Synthetic oligonucleotide
auaaaccuuauuggcaagg

SEQ ID NO: 642558 - RNA, 19 nt, Artificial Sequence
  Description of Artificial Sequence: Synthetic oligonucleotide
cugcauaggauucauguuc

SEQ ID NO: 642559 - RNA, 19 nt, Artificial Sequence
  Description of Artificial Sequence: Synthetic oligonucleotide
uggagguuugccaugccug

SEQ ID NO: 642560 - RNA, 19 nt, Artificial Sequence
  Description of Artificial Sequence: Synthetic oligonucleotide
uguaaucuauuaucccuca

SEQ ID NO: 642561 - RNA, 19 nt, Artificial Sequence
  Description of Artificial Sequence: Synthetic oligonucleotide
uaguguaugucuaguguac

SEQ ID NO: 642562 - RNA, 19 nt, Artificial Sequence
  Description of Artificial Sequence: Synthetic oligonucleotide
ucugacgucuuaaaauguc

SEQ ID NO: 642563 - RNA, 19 nt, Artificial Sequence
  Description of Artificial Sequence: Synthetic oligonucleotide
aguaacauuaaccccuuuu

SEQ ID NO: 642564 - RNA, 19 nt, Artificial Sequence
  Description of Artificial Sequence: Synthetic oligonucleotide
gucuaguguacucugugag

SEQ ID NO: 642565 - RNA, 19 nt, Artificial Sequence
  Description of Artificial Sequence: Synthetic oligonucleotide
auauauauauauauauaau

SEQ ID NO: 642566 - RNA, 19 nt, Artificial Sequence
  Description of Artificial Sequence: Synthetic oligonucleotide
uguaugucuaguguacucu

SEQ ID NO: 642567 - RNA, 19 nt, Artificial Sequence
  Description of Artificial Sequence: Synthetic oligonucleotide
auagguaauaagaaauaca

SEQ ID NO: 642568 - RNA, 19 nt, Artificial Sequence
  Description of Artificial Sequence: Synthetic oligonucleotide
ucugcaccaguaaauaaua

SEQ ID NO: 642569 - RNA, 19 nt, Artificial Sequence
  Description of Artificial Sequence: Synthetic oligonucleotide
ucuaguguacucugugaga

SEQ ID NO: 642570 - RNA, 19 nt, Artificial Sequence
  Description of Artificial Sequence: Synthetic oligonucleotide
accucagacauuugcaugu

SEQ ID NO: 642571 - RNA, 19 nt, Artificial Sequence
  Description of Artificial Sequence: Synthetic oligonucleotide
aacggcugggguaaccagc

SEQ ID NO: 642572 - RNA, 19 nt, Artificial Sequence
  Description of Artificial Sequence: Synthetic oligonucleotide
uccuuuguuagauguaaaa

SEQ ID NO: 642573 - RNA, 19 nt, Artificial Sequence
  Description of Artificial Sequence: Synthetic oligonucleotide
uuaggcuaagaaagauuca

SEQ ID NO: 642574 - RNA, 19 nt, Artificial Sequence
  Description of Artificial Sequence: Synthetic oligonucleotide
auuagaguuggcauauuug

SEQ ID NO: 642575 - RNA, 19 nt, Artificial Sequence
  Description of Artificial Sequence: Synthetic oligonucleotide
uacuacaaggugucucuag

SEQ ID NO: 642576 - RNA, 19 nt, Artificial Sequence
  Description of Artificial Sequence: Synthetic oligonucleotide
gaacguacuugauuggaga

SEQ ID NO: 642577 - RNA, 19 nt, Artificial Sequence
  Description of Artificial Sequence: Synthetic oligonucleotide
auaauacaucaauuuggca

SEQ ID NO: 642578 - RNA, 19 nt, Artificial Sequence
  Description of Artificial Sequence: Synthetic oligonucleotide
acuacaaggugucucuagu

SEQ ID NO: 642579 - RNA, 19 nt, Artificial Sequence
  Description of Artificial Sequence: Synthetic oligonucleotide
aaaaugcccuuguuccaug

SEQ ID NO: 642580 - RNA, 19 nt, Artificial Sequence
  Description of Artificial Sequence: Synthetic oligonucleotide
aaacgguuacugcacaguu

SEQ ID NO: 642581 - RNA, 19 nt, Artificial Sequence
  Description of Artificial Sequence: Synthetic oligonucleotide
guaaucaacuuuaauugca

SEQ ID NO: 642582 - RNA, 19 nt, Artificial Sequence
  Description of Artificial Sequence: Synthetic oligonucleotide
uaaaccuuauuggcaaggc

SEQ ID NO: 642583 - RNA, 19 nt, Artificial Sequence
  Description of Artificial Sequence: Synthetic oligonucleotide
uuuaaaccacaaacgguua

SEQ ID NO: 642584 - RNA, 19 nt, Artificial Sequence
  Description of Artificial Sequence: Synthetic oligonucleotide
uggcuucagaccucagucg

SEQ ID NO: 642585 - RNA, 19 nt, Artificial Sequence
  Description of Artificial Sequence: Synthetic oligonucleotide
gaaagcauugaauucuggu

SEQ ID NO: 642586 - RNA, 19 nt, Artificial Sequence
  Description of Artificial Sequence: Synthetic oligonucleotide
gaaggcgcugcugauaggc

SEQ ID NO: 642587 - RNA, 19 nt, Artificial Sequence
  Description of Artificial Sequence: Synthetic oligonucleotide
uuacgcucagacuuaugga

SEQ ID NO: 642588 - RNA, 19 nt, Artificial Sequence
  Description of Artificial Sequence: Synthetic oligonucleotide
auugcuagugagcugugaa

SEQ ID NO: 642589 - RNA, 19 nt, Artificial Sequence
  Description of Artificial Sequence: Synthetic oligonucleotide
uucggaguggacaccuugc

SEQ ID NO: 642590 - RNA, 19 nt, Artificial Sequence
  Description of Artificial Sequence: Synthetic oligonucleotide
uuguggauuagaguuggca

SEQ ID NO: 642591 - RNA, 19 nt, Artificial Sequence
  Description of Artificial Sequence: Synthetic oligonucleotide
augucuaguguacucugug

SEQ ID NO: 642592 - RNA, 19 nt, Artificial Sequence
  Description of Artificial Sequence: Synthetic oligonucleotide
ugucuaguguacucuguga

SEQ ID NO: 642593 - RNA, 19 nt, Artificial Sequence
  Description of Artificial Sequence: Synthetic oligonucleotide
auugcaugauuuacaacag

SEQ ID NO: 642594 - RNA, 19 nt, Artificial Sequence
  Description of Artificial Sequence: Synthetic oligonucleotide
cuuuaaaccacaaacgguu

SEQ ID NO: 642595 - RNA, 19 nt, Artificial Sequence
  Description of Artificial Sequence: Synthetic oligonucleotide
cuugagggguggaaagagg

SEQ ID NO: 642596 - RNA, 19 nt, Artificial Sequence
  Description of Artificial Sequence: Synthetic oligonucleotide
gcauguuugcuuuaaacca

SEQ ID NO: 642597 - RNA, 19 nt, Artificial Sequence
  Description of Artificial Sequence: Synthetic oligonucleotide
aguguacucugugagaggu

SEQ ID NO: 642598 - RNA, 19 nt, Artificial Sequence
  Description of Artificial Sequence: Synthetic oligonucleotide
cuuguuaagagaaaauaau

SEQ ID NO: 642599 - RNA, 19 nt, Artificial Sequence
  Description of Artificial Sequence: Synthetic oligonucleotide
uucuuccauaaagugagga

SEQ ID NO: 642600 - RNA, 19 nt, Artificial Sequence
  Description of Artificial Sequence: Synthetic oligonucleotide
gggguaaccagccauaaca

SEQ ID NO: 642601 - RNA, 19 nt, Artificial Sequence
  Description of Artificial Sequence: Synthetic oligonucleotide
aaaacggcugggguaacca

SEQ ID NO: 642602 - RNA, 19 nt, Artificial Sequence
  Description of Artificial Sequence: Synthetic oligonucleotide
uggagcacaaaaguugacu

SEQ ID NO: 642603 - RNA, 19 nt, Artificial Sequence
  Description of Artificial Sequence: Synthetic oligonucleotide
acaaacgguuacugcacag

SEQ ID NO: 642604 - RNA, 19 nt, Artificial Sequence
  Description of Artificial Sequence: Synthetic oligonucleotide
uucuuacccucuuuuaaau

SEQ ID NO: 642605 - RNA, 19 nt, Artificial Sequence
  Description of Artificial Sequence: Synthetic oligonucleotide
uggaguaguuucuuacccu

SEQ ID NO: 642606 - RNA, 19 nt, Artificial Sequence
  Description of Artificial Sequence: Synthetic oligonucleotide
guaugucuaguguacucug

SEQ ID NO: 642607 - RNA, 19 nt, Artificial Sequence
  Description of Artificial Sequence: Synthetic oligonucleotide
ucggagaugggcugguaug

SEQ ID NO: 642608 - RNA, 19 nt, Artificial Sequence
  Description of Artificial Sequence: Synthetic oligonucleotide
agcauugaauucuggucug

SEQ ID NO: 642609 - RNA, 19 nt, Artificial Sequence
  Description of Artificial Sequence: Synthetic oligonucleotide
caucaauuuggcagcugcc

SEQ ID NO: 642610 - RNA, 19 nt, Artificial Sequence
  Description of Artificial Sequence: Synthetic oligonucleotide
aaaguugacuugaggggug

SEQ ID NO: 642611 - RNA, 19 nt, Artificial Sequence
  Description of Artificial Sequence: Synthetic oligonucleotide
aucaucugacgucuuaaaa

SEQ ID NO: 642612 - RNA, 19 nt, Artificial Sequence
  Description of Artificial Sequence: Synthetic oligonucleotide
uaguguacucugugagagg

SEQ ID NO: 642613 - RNA, 19 nt, Artificial Sequence
  Description of Artificial Sequence: Synthetic oligonucleotide
agucccagguccguggcgc

SEQ ID NO: 642614 - RNA, 19 nt, Artificial Sequence
  Description of Artificial Sequence: Synthetic oligonucleotide
  modified_base (17)..(17): a, c, u, g, unknown or other
cagaaaguguaugugunug

SEQ ID NO: 642615 - RNA, 19 nt, Artificial Sequence
  Description of Artificial Sequence: Synthetic oligonucleotide
cuacaaggugucucuagug

SEQ ID NO: 642616 - RNA, 19 nt, Artificial Sequence
  Description of Artificial Sequence: Synthetic oligonucleotide
guaaucuauuaucccucag

SEQ ID NO: 642617 - RNA, 19 nt, Artificial Sequence
  Description of Artificial Sequence: Synthetic oligonucleotide
uguugcaugugaugcugca

SEQ ID NO: 642618 - RNA, 19 nt, Artificial Sequence
  Description of Artificial Sequence: Synthetic oligonucleotide
cucuaguguaugucuagug

SEQ ID NO: 642619 - RNA, 19 nt, Artificial Sequence
  Description of Artificial Sequence: Synthetic oligonucleotide
uugcaugauuuacaacagu

SEQ ID NO: 642620 - RNA, 19 nt, Artificial Sequence
  Description of Artificial Sequence: Synthetic oligonucleotide
agguccguggcgcuugcac

SEQ ID NO: 642621 - RNA, 19 nt, Artificial Sequence
  Description of Artificial Sequence: Synthetic oligonucleotide
cuuauuggcaaggcaggag

SEQ ID NO: 642622 - RNA, 19 nt, Artificial Sequence
  Description of Artificial Sequence: Synthetic oligonucleotide
ugucccauauucccuugcu

SEQ ID NO: 642623 - RNA, 19 nt, Artificial Sequence
  Description of Artificial Sequence: Synthetic oligonucleotide
ugcauuaucggugcucagu

SEQ ID NO: 642624 - RNA, 19 nt, Artificial Sequence
  Description of Artificial Sequence: Synthetic oligonucleotide
gaauucuggucugggcugg

SEQ ID NO: 642625 - RNA, 19 nt, Artificial Sequence
  Description of Artificial Sequence: Synthetic oligonucleotide
gagcauaugcugcugugga

SEQ ID NO: 642626 - RNA, 19 nt, Artificial Sequence
  Description of Artificial Sequence: Synthetic oligonucleotide
aaucaccccacuggaguag

SEQ ID NO: 642627 - RNA, 19 nt, Artificial Sequence
  Description of Artificial Sequence: Synthetic oligonucleotide
uggauuagaguuggcauau

SEQ ID NO: 642628 - RNA, 19 nt, Artificial Sequence
  Description of Artificial Sequence: Synthetic oligonucleotide
uaaguaacauuaaccccuu

SEQ ID NO: 642629 - RNA, 19 nt, Artificial Sequence
  Description of Artificial Sequence: Synthetic oligonucleotide
guugagacuguggucgcgg

SEQ ID NO: 642630 - RNA, 19 nt, Artificial Sequence
  Description of Artificial Sequence: Synthetic oligonucleotide
uugcucccaaaauacuaca

SEQ ID NO: 642631 - RNA, 19 nt, Artificial Sequence
  Description of Artificial Sequence: Synthetic oligonucleotide
ugucucuaguguaugucua

SEQ ID NO: 642632 - RNA, 19 nt, Artificial Sequence
  Description of Artificial Sequence: Synthetic oligonucleotide
ugggccaucugucccauau

SEQ ID NO: 642633 - RNA, 19 nt, Artificial Sequence
  Description of Artificial Sequence: Synthetic oligonucleotide
ggaguggacaccuugcuga

SEQ ID NO: 642634 - RNA, 19 nt, Artificial Sequence
  Description of Artificial Sequence: Synthetic oligonucleotide
agaacguacuugauuggag

SEQ ID NO: 642635 - RNA, 19 nt, Artificial Sequence
  Description of Artificial Sequence: Synthetic oligonucleotide
aaaugucucggaacuguga

SEQ ID NO: 642636 - RNA, 19 nt, Artificial Sequence
  Description of Artificial Sequence: Synthetic oligonucleotide
accuuauuggcaaggcagg

SEQ ID NO: 642637 - RNA, 19 nt, Artificial Sequence
  Description of Artificial Sequence: Synthetic oligonucleotide
cucauuccucccaugggug

SEQ ID NO: 642638 - RNA, 19 nt, Artificial Sequence
  Description of Artificial Sequence: Synthetic oligonucleotide
cauuaucggugcucagucc

SEQ ID NO: 642639 - RNA, 19 nt, Artificial Sequence
  Description of Artificial Sequence: Synthetic oligonucleotide
agagaauuagggaucugcu

SEQ ID NO: 642640 - RNA, 19 nt, Artificial Sequence
  Description of Artificial Sequence: Synthetic oligonucleotide
ugcucccaaaauacuacaa

SEQ ID NO: 642641 - RNA, 19 nt, Artificial Sequence
  Description of Artificial Sequence: Synthetic oligonucleotide
gaaguuuuacgcucagacu

SEQ ID NO: 642642 - RNA, 19 nt, Artificial Sequence
  Description of Artificial Sequence: Synthetic oligonucleotide
ggcuaagaaagauucaaaa

SEQ ID NO: 642643 - RNA, 19 nt, Artificial Sequence
  Description of Artificial Sequence: Synthetic oligonucleotide
uuaucggugcucaguccca

SEQ ID NO: 642644 - RNA, 19 nt, Artificial Sequence
  Description of Artificial Sequence: Synthetic oligonucleotide
uccaaggaaaauugucuuu

SEQ ID NO: 642645 - RNA, 19 nt, Artificial Sequence
  Description of Artificial Sequence: Synthetic oligonucleotide
agucuauacagugauccaa

SEQ ID NO: 642646 - RNA, 19 nt, Artificial Sequence
  Description of Artificial Sequence: Synthetic oligonucleotide
gcucccaaaauacuacaag

SEQ ID NO: 642647 - RNA, 19 nt, Artificial Sequence
  Description of Artificial Sequence: Synthetic oligonucleotide
cuaguguaugucuagugua

SEQ ID NO: 642648 - RNA, 19 nt, Artificial Sequence
  Description of Artificial Sequence: Synthetic oligonucleotide
cugugccugauuugggagc

SEQ ID NO: 642649 - RNA, 19 nt, Artificial Sequence
  Description of Artificial Sequence: Synthetic oligonucleotide
aguuuuacagaaaguguau

SEQ ID NO: 642650 - RNA, 19 nt, Artificial Sequence
  Description of Artificial Sequence: Synthetic oligonucleotide
cuauuaucccucagguuca

SEQ ID NO: 642651 - RNA, 19 nt, Artificial Sequence
  Description of Artificial Sequence: Synthetic oligonucleotide
ugcaaggcugguucggagu

SEQ ID NO: 642652 - RNA, 19 nt, Artificial Sequence
  Description of Artificial Sequence: Synthetic oligonucleotide
uuuuacgcucagacuuaug

SEQ ID NO: 642653 - RNA, 19 nt, Artificial Sequence
  Description of Artificial Sequence: Synthetic oligonucleotide
caaguuuuacagaaagugu

SEQ ID NO: 642654 - RNA, 19 nt, Artificial Sequence
  Description of Artificial Sequence: Synthetic oligonucleotide
gcaaggcaggagcauaugg

SEQ ID NO: 642655 - RNA, 19 nt, Artificial Sequence
  Description of Artificial Sequence: Synthetic oligonucleotide
ugcuguggacucauagggu

SEQ ID NO: 642656 - RNA, 19 nt, Artificial Sequence
  Description of Artificial Sequence: Synthetic oligonucleotide
uugcuagugagcugugaaa

SEQ ID NO: 642657 - RNA, 19 nt, Artificial Sequence
  Description of Artificial Sequence: Synthetic oligonucleotide
aguuucuuacccucuuuua

SEQ ID NO: 642658 - RNA, 19 nt, Artificial Sequence
  Description of Artificial Sequence: Synthetic oligonucleotide
guucugcaaggcugguucg

SEQ ID NO: 642659 - RNA, 19 nt, Artificial Sequence
  Description of Artificial Sequence: Synthetic oligonucleotide
gucuuguuaagagaaaaua

SEQ ID NO: 642660 - RNA, 19 nt, Artificial Sequence
  Description of Artificial Sequence: Synthetic oligonucleotide
cuagugagcugugaaagca

SEQ ID NO: 642661 - RNA, 19 nt, Artificial Sequence
  Description of Artificial Sequence: Synthetic oligonucleotide
guccguggcgcuugcaccg

SEQ ID NO: 642662 - RNA, 19 nt, Artificial Sequence
  Description of Artificial Sequence: Synthetic oligonucleotide
ucuuacccucuuuuaaauu

SEQ ID NO: 642663 - RNA, 19 nt, Artificial Sequence
  Description of Artificial Sequence: Synthetic oligonucleotide
acggcugggguaaccagcc

SEQ ID NO: 642664 - RNA, 19 nt, Artificial Sequence
  Description of Artificial Sequence: Synthetic oligonucleotide
ucucggaacugugacggca

SEQ ID NO: 642665 - RNA, 19 nt, Artificial Sequence
  Description of Artificial Sequence: Synthetic oligonucleotide
acaaggugucucuagugua

SEQ ID NO: 642666 - RNA, 19 nt, Artificial Sequence
  Description of Artificial Sequence: Synthetic oligonucleotide
gucuuaaaaugucucggaa

SEQ ID NO: 642667 - RNA, 19 nt, Artificial Sequence
  Description of Artificial Sequence: Synthetic oligonucleotide
ggcgcuugcaccguggagg

SEQ ID NO: 642668 - RNA, 19 nt, Artificial Sequence
  Description of Artificial Sequence: Synthetic oligonucleotide
aggagcauaugguuggcuu

SEQ ID NO: 642669 - RNA, 19 nt, Artificial Sequence
  Description of Artificial Sequence: Synthetic oligonucleotide
ggagaacguacuugauugg

SEQ ID NO: 642670 - RNA, 19 nt, Artificial Sequence
  Description of Artificial Sequence: Synthetic oligonucleotide
gagaacguacuugauugga

SEQ ID NO: 642671 - RNA, 19 nt, Artificial Sequence
  Description of Artificial Sequence: Synthetic oligonucleotide
aucugcaccaguaaauaau

SEQ ID NO: 642672 - RNA, 19 nt, Artificial Sequence
  Description of Artificial Sequence: Synthetic oligonucleotide
aaauugucuuuuaggcuaa

SEQ ID NO: 642673 - RNA, 19 nt, Artificial Sequence
  Description of Artificial Sequence: Synthetic oligonucleotide
ucucuaguguaugucuagu

SEQ ID NO: 642674 - RNA, 19 nt, Artificial Sequence
  Description of Artificial Sequence: Synthetic oligonucleotide
aaagucuuguuaagagaaa

SEQ ID NO: 642675 - RNA, 19 nt, Artificial Sequence
  Description of Artificial Sequence: Synthetic oligonucleotide
ucggaguggacaccuugcu

SEQ ID NO: 642676 - RNA, 19 nt, Artificial Sequence
  Description of Artificial Sequence: Synthetic oligonucleotide
cuggggagaacguacuuga

SEQ ID NO: 642677 - RNA, 19 nt, Artificial Sequence
  Description of Artificial Sequence: Synthetic oligonucleotide
cuugaaccacacacacaag

SEQ ID NO: 642678 - RNA, 19 nt, Artificial Sequence
  Description of Artificial Sequence: Synthetic oligonucleotide
cuugauuggagagagaauu

SEQ ID NO: 642679 - RNA, 19 nt, Artificial Sequence
  Description of Artificial Sequence: Synthetic oligonucleotide
guguaugucuaguguacuc

SEQ ID NO: 642680 - RNA, 19 nt, Artificial Sequence
  Description of Artificial Sequence: Synthetic oligonucleotide
cuguggagaaacauggugu

SEQ ID NO: 642681 - RNA, 19 nt, Artificial Sequence
  Description of Artificial Sequence: Synthetic oligonucleotide
gauuagaguuggcauauuu

SEQ ID NO: 642682 - RNA, 19 nt, Artificial Sequence
  Description of Artificial Sequence: Synthetic oligonucleotide
ugaccaggcaugguaggug

SEQ ID NO: 642683 - RNA, 19 nt, Artificial Sequence
  Description of Artificial Sequence: Synthetic oligonucleotide
aguguaugucuaguguacu

SEQ ID NO: 642684 - RNA, 19 nt, Artificial Sequence
  Description of Artificial Sequence: Synthetic oligonucleotide
gaacugguugugguuggcc

SEQ ID NO: 642685 - RNA, 19 nt, Artificial Sequence
  Description of Artificial Sequence: Synthetic oligonucleotide
ggcuucagaccucagucgc

SEQ ID NO: 642686 - RNA, 19 nt, Artificial Sequence
  Description of Artificial Sequence: Synthetic oligonucleotide
acugugacggcauggcauu

SEQ ID NO: 642687 - RNA, 19 nt, Artificial Sequence
  Description of Artificial Sequence: Synthetic oligonucleotide
aucuauuaucccucagguu

SEQ ID NO: 642688 - RNA, 19 nt, Artificial Sequence
  Description of Artificial Sequence: Synthetic oligonucleotide
cauauuuggcagcccgcug

SEQ ID NO: 642689 - RNA, 19 nt, Artificial Sequence
  Description of Artificial Sequence: Synthetic oligonucleotide
ugcaccguggagguuugcc

SEQ ID NO: 642690 - RNA, 19 nt, Artificial Sequence
  Description of Artificial Sequence: Synthetic oligonucleotide
gaaaacggcugggguaacc

SEQ ID NO: 642691 - RNA, 19 nt, Artificial Sequence
  Description of Artificial Sequence: Synthetic oligonucleotide
acuugaaguuuuacgcuca

SEQ ID NO: 642692 - RNA, 19 nt, Artificial Sequence
  Description of Artificial Sequence: Synthetic oligonucleotide
uggacucauaggguugggc

SEQ ID NO: 642693 - RNA, 19 nt, Artificial Sequence
  Description of Artificial Sequence: Synthetic oligonucleotide
ugacggcauggcauuguga

SEQ ID NO: 642694 - RNA, 19 nt, Artificial Sequence
  Description of Artificial Sequence: Synthetic oligonucleotide
auauucuuuguaaucuauu

SEQ ID NO: 642695 - RNA, 19 nt, Artificial Sequence
  Description of Artificial Sequence: Synthetic oligonucleotide
agucuuguuaagagaaaau

SEQ ID NO: 642696 - RNA, 19 nt, Artificial Sequence
  Description of Artificial Sequence: Synthetic oligonucleotide
agguaauaagaaauacaaa

SEQ ID NO: 642697 - RNA, 19 nt, Artificial Sequence
  Description of Artificial Sequence: Synthetic oligonucleotide
uuagggaucugcugaccuu

SEQ ID NO: 642698 - RNA, 19 nt, Artificial Sequence
  Description of Artificial Sequence: Synthetic oligonucleotide
ugccccuguauauucugaa

SEQ ID NO: 642699 - RNA, 19 nt, Artificial Sequence
  Description of Artificial Sequence: Synthetic oligonucleotide
gcauuaucggugcucaguc

SEQ ID NO: 642700 - RNA, 19 nt, Artificial Sequence
  Description of Artificial Sequence: Synthetic oligonucleotide
ccaaaauacuacaaggugu

SEQ ID NO: 642701 - RNA, 19 nt, Artificial Sequence
  Description of Artificial Sequence: Synthetic oligonucleotide
uuaaccccuuuuguccucu

SEQ ID NO: 642702 - RNA, 19 nt, Artificial Sequence
  Description of Artificial Sequence: Synthetic oligonucleotide
gaacugugacggcauggca

SEQ ID NO: 642703 - RNA, 19 nt, Artificial Sequence
  Description of Artificial Sequence: Synthetic oligonucleotide
gcuagugagcugugaaagc

SEQ ID NO: 642704 - RNA, 19 nt, Artificial Sequence
  Description of Artificial Sequence: Synthetic oligonucleotide
uguugcugcggguggguau

SEQ ID NO: 642705 - RNA, 19 nt, Artificial Sequence
  Description of Artificial Sequence: Synthetic oligonucleotide
uguggucgcggagaaggga

SEQ ID NO: 642706 - RNA, 19 nt, Artificial Sequence
  Description of Artificial Sequence: Synthetic oligonucleotide
cugcagacuggcuccugcc

SEQ ID NO: 642707 - RNA, 19 nt, Artificial Sequence
  Description of Artificial Sequence: Synthetic oligonucleotide
ugguucggaguggacaccu

SEQ ID NO: 642708 - RNA, 19 nt, Artificial Sequence
  Description of Artificial Sequence: Synthetic oligonucleotide
gaccuugcaggugugggga

SEQ ID NO: 642709 - RNA, 19 nt, Artificial Sequence
  Description of Artificial Sequence: Synthetic oligonucleotide
gcugguucggaguggacac

SEQ ID NO: 642710 - RNA, 19 nt, Artificial Sequence
  Description of Artificial Sequence: Synthetic oligonucleotide
cuauacagugauccaaagu

SEQ ID NO: 642711 - RNA, 19 nt, Artificial Sequence
  Description of Artificial Sequence: Synthetic oligonucleotide
agaaggcgcugcugauagg

SEQ ID NO: 642712 - RNA, 19 nt, Artificial Sequence
  Description of Artificial Sequence: Synthetic oligonucleotide
gaccucagucgccucccag

SEQ ID NO: 642713 - RNA, 19 nt, Artificial Sequence
  Description of Artificial Sequence: Synthetic oligonucleotide
gacuuauggaauagaaaau

SEQ ID NO: 642714 - RNA, 19 nt, Artificial Sequence
  Description of Artificial Sequence: Synthetic oligonucleotide
gugacggcauggcauugug

SEQ ID NO: 642715 - RNA, 19 nt, Artificial Sequence
  Description of Artificial Sequence: Synthetic oligonucleotide
aucugacgucuuaaaaugu

SEQ ID NO: 642716 - RNA, 19 nt, Artificial Sequence
  Description of Artificial Sequence: Synthetic oligonucleotide
cugucccauauucccuugc

SEQ ID NO: 642717 - RNA, 19 nt, Artificial Sequence
  Description of Artificial Sequence: Synthetic oligonucleotide
gacccguggggcaugccag

SEQ ID NO: 642718 - RNA, 19 nt, Artificial Sequence
  Description of Artificial Sequence: Synthetic oligonucleotide
cauuccucccauggguggc

SEQ ID NO: 642719 - RNA, 19 nt, Artificial Sequence
  Description of Artificial Sequence: Synthetic oligonucleotide
aacgguuacugcacaguuu

SEQ ID NO: 642720 - RNA, 19 nt, Artificial Sequence
  Description of Artificial Sequence: Synthetic oligonucleotide
cugacgucuuaaaaugucu

SEQ ID NO: 642721 - RNA, 19 nt, Artificial Sequence
  Description of Artificial Sequence: Synthetic oligonucleotide
uuacaacaguugaggguuu

SEQ ID NO: 642722 - RNA, 19 nt, Artificial Sequence
  Description of Artificial Sequence: Synthetic oligonucleotide
uggucgcggagaagggaca

SEQ ID NO: 642723 - RNA, 19 nt, Artificial Sequence
  Description of Artificial Sequence: Synthetic oligonucleotide
ugccugcauaggauucaug

SEQ ID NO: 642724 - RNA, 19 nt, Artificial Sequence
  Description of Artificial Sequence: Synthetic oligonucleotide
ugguuggcuucagaccuca

SEQ ID NO: 642725 - RNA, 19 nt, Artificial Sequence
  Description of Artificial Sequence: Synthetic oligonucleotide
gcaaggcugguucggagug

SEQ ID NO: 642726 - RNA, 19 nt, Artificial Sequence
  Description of Artificial Sequence: Synthetic oligonucleotide
aagaaaccucagacauuug

SEQ ID NO: 642727 - RNA, 19 nt, Artificial Sequence
  Description of Artificial Sequence: Synthetic oligonucleotide
gagagagaauuagggaucu

SEQ ID NO: 642728 - RNA, 19 nt, Artificial Sequence
  Description of Artificial Sequence: Synthetic oligonucleotide
uuggcaaggcaggagcaua

SEQ ID NO: 642729 - RNA, 19 nt, Artificial Sequence
  Description of Artificial Sequence: Synthetic oligonucleotide
guggucgcggagaagggac

SEQ ID NO: 642730 - RNA, 19 nt, Artificial Sequence
  Description of Artificial Sequence: Synthetic oligonucleotide
gauugcuagugagcuguga

SEQ ID NO: 642731 - RNA, 19 nt, Artificial Sequence
  Description of Artificial Sequence: Synthetic oligonucleotide
cagugcacacuugaaccac

SEQ ID NO: 642732 - RNA, 19 nt, Artificial Sequence
  Description of Artificial Sequence: Synthetic oligonucleotide
aguuuuacgcucagacuua

SEQ ID NO: 642733 - RNA, 19 nt, Artificial Sequence
  Description of Artificial Sequence: Synthetic oligonucleotide
caucaucugacgucuuaaa

SEQ ID NO: 642734 - RNA, 19 nt, Artificial Sequence
  Description of Artificial Sequence: Synthetic oligonucleotide
cuugcaccguggagguuug

SEQ ID NO: 642735 - RNA, 19 nt, Artificial Sequence
  Description of Artificial Sequence: Synthetic oligonucleotide
acccguggggcaugccagg

SEQ ID NO: 642736 - RNA, 19 nt, Artificial Sequence
  Description of Artificial Sequence: Synthetic oligonucleotide
cucagucgccucccagugc

SEQ ID NO: 642737 - RNA, 19 nt, Artificial Sequence
  Description of Artificial Sequence: Synthetic oligonucleotide
ggacucauaggguugggcu

SEQ ID NO: 642738 - RNA, 19 nt, Artificial Sequence
  Description of Artificial Sequence: Synthetic oligonucleotide
cacuugaaccacacacaca

SEQ ID NO: 642739 - RNA, 19 nt, Artificial Sequence
  Description of Artificial Sequence: Synthetic oligonucleotide
gguccguggcgcuugcacc

SEQ ID NO: 642740 - RNA, 19 nt, Artificial Sequence
  Description of Artificial Sequence: Synthetic oligonucleotide
uggggagaacguacuugau

SEQ ID NO: 642741 - RNA, 19 nt, Artificial Sequence
  Description of Artificial Sequence: Synthetic oligonucleotide
acuugauuggagagagaau

SEQ ID NO: 642742 - RNA, 19 nt, Artificial Sequence
  Description of Artificial Sequence: Synthetic oligonucleotide
agugcacacuugaaccaca

SEQ ID NO: 642743 - RNA, 19 nt, Artificial Sequence
  Description of Artificial Sequence: Synthetic oligonucleotide
gguaaccagccauaacaaa

SEQ ID NO: 642744 - RNA, 19 nt, Artificial Sequence
  Description of Artificial Sequence: Synthetic oligonucleotide
agugagcugugaaagcauu

SEQ ID NO: 642745 - RNA, 19 nt, Artificial Sequence
  Description of Artificial Sequence: Synthetic oligonucleotide
cugcauuaucggugcucag

SEQ ID NO: 642746 - RNA, 19 nt, Artificial Sequence
  Description of Artificial Sequence: Synthetic oligonucleotide
ggagcacaaaaguugacuu

SEQ ID NO: 642747 - RNA, 19 nt, Artificial Sequence
  Description of Artificial Sequence: Synthetic oligonucleotide
guugcugcggguggguauc

SEQ ID NO: 642748 - RNA, 19 nt, Artificial Sequence
  Description of Artificial Sequence: Synthetic oligonucleotide
uacaacaguugaggguuuu

SEQ ID NO: 642749 - RNA, 19 nt, Artificial Sequence
  Description of Artificial Sequence: Synthetic oligonucleotide
agcuaccaguccaggaugu

SEQ ID NO: 642750 - RNA, 19 nt, Artificial Sequence
  Description of Artificial Sequence: Synthetic oligonucleotide
uauuaucccucagguucau

SEQ ID NO: 642751 - RNA, 19 nt, Artificial Sequence
  Description of Artificial Sequence: Synthetic oligonucleotide
uaaccccuuuuguccucug

SEQ ID NO: 642752 - RNA, 19 nt, Artificial Sequence
  Description of Artificial Sequence: Synthetic oligonucleotide
ugccugauuugggagcaua

SEQ ID NO: 642753 - RNA, 19 nt, Artificial Sequence
  Description of Artificial Sequence: Synthetic oligonucleotide
ggcauauuuggcagcccgc

SEQ ID NO: 642754 - RNA, 19 nt, Artificial Sequence
  Description of Artificial Sequence: Synthetic oligonucleotide
gugcucagucccagguccg

SEQ ID NO: 642755 - RNA, 19 nt, Artificial Sequence
  Description of Artificial Sequence: Synthetic oligonucleotide
guuguggauuagaguuggc

SEQ ID NO: 642756 - RNA, 19 nt, Artificial Sequence
  Description of Artificial Sequence: Synthetic oligonucleotide
gugcacacuugaaccacac

SEQ ID NO: 642757 - RNA, 19 nt, Artificial Sequence
  Description of Artificial Sequence: Synthetic oligonucleotide
gggaaaacggcugggguaa

SEQ ID NO: 642758 - RNA, 19 nt, Artificial Sequence
  Description of Artificial Sequence: Synthetic oligonucleotide
uucagaccucagucgccuc

SEQ ID NO: 642759 - RNA, 19 nt, Artificial Sequence
  Description of Artificial Sequence: Synthetic oligonucleotide
acgcucagacuuauggaau

SEQ ID NO: 642760 - RNA, 19 nt, Artificial Sequence
  Description of Artificial Sequence: Synthetic oligonucleotide
gggcaugccaggcugucca

SEQ ID NO: 642761 - RNA, 19 nt, Artificial Sequence
  Description of Artificial Sequence: Synthetic oligonucleotide
guggagguuugccaugccu

SEQ ID NO: 642762 - RNA, 19 nt, Artificial Sequence
  Description of Artificial Sequence: Synthetic oligonucleotide
gucgcggagaagggacagg

SEQ ID NO: 642763 - RNA, 19 nt, Artificial Sequence
  Description of Artificial Sequence: Synthetic oligonucleotide
ggggaaaacggcuggggua

SEQ ID NO: 642764 - RNA, 19 nt, Artificial Sequence
  Description of Artificial Sequence: Synthetic oligonucleotide
cuggcugacccguggggca

SEQ ID NO: 642765 - RNA, 19 nt, Artificial Sequence
  Description of Artificial Sequence: Synthetic oligonucleotide
gucucggaacugugacggc

SEQ ID NO: 642766 - RNA, 19 nt, Artificial Sequence
  Description of Artificial Sequence: Synthetic oligonucleotide
gcacaaaaguugacuugag

SEQ ID NO: 642767 - RNA, 19 nt, Artificial Sequence
  Description of Artificial Sequence: Synthetic oligonucleotide
ggacugugccugauuuggg

SEQ ID NO: 642768 - RNA, 19 nt, Artificial Sequence
  Description of Artificial Sequence: Synthetic oligonucleotide
cagugauccaaaguucaua

SEQ ID NO: 642769 - RNA, 19 nt, Artificial Sequence
  Description of Artificial Sequence: Synthetic oligonucleotide
auacuacaaggugucucua

SEQ ID NO: 642770 - RNA, 19 nt, Artificial Sequence
  Description of Artificial Sequence: Synthetic oligonucleotide
ggcugguucggaguggaca

SEQ ID NO: 642771 - RNA, 19 nt, Artificial Sequence
  Description of Artificial Sequence: Synthetic oligonucleotide
caaacgguuacugcacagu

SEQ ID NO: 642772 - RNA, 19 nt, Artificial Sequence
  Description of Artificial Sequence: Synthetic oligonucleotide
ggguaaccagccauaacaa

SEQ ID NO: 642773 - RNA, 19 nt, Artificial Sequence
  Description of Artificial Sequence: Synthetic oligonucleotide
gcaccguggagguuugcca

SEQ ID NO: 642774 - RNA, 19 nt, Artificial Sequence
  Description of Artificial Sequence: Synthetic oligonucleotide
caaaaugcccuuguuccau

SEQ ID NO: 642775 - RNA, 19 nt, Artificial Sequence
  Description of Artificial Sequence: Synthetic oligonucleotide
ggucgcggagaagggacag

SEQ ID NO: 642776 - RNA, 19 nt, Artificial Sequence
  Description of Artificial Sequence: Synthetic oligonucleotide
ccucagucgccucccagug

SEQ ID NO: 642777 - RNA, 19 nt, Artificial Sequence
  Description of Artificial Sequence: Synthetic oligonucleotide
caucuggcauguuugcuuu

SEQ ID NO: 642778 - RNA, 19 nt, Artificial Sequence
  Description of Artificial Sequence: Synthetic oligonucleotide
cucagacauuugcauguua

SEQ ID NO: 642779 - RNA, 19 nt, Artificial Sequence
  Description of Artificial Sequence: Synthetic oligonucleotide
gaacuggucuguggagaaa

SEQ ID NO: 642780 - RNA, 19 nt, Artificial Sequence
  Description of Artificial Sequence: Synthetic oligonucleotide
uugcugcggguggguaucc

SEQ ID NO: 642781 - RNA, 19 nt, Artificial Sequence
  Description of Artificial Sequence: Synthetic oligonucleotide
gcauaugguuggcuucaga

SEQ ID NO: 642782 - RNA, 19 nt, Artificial Sequence
  Description of Artificial Sequence: Synthetic oligonucleotide
guggcgcuugcaccgugga

SEQ ID NO: 642783 - RNA, 19 nt, Artificial Sequence
  Description of Artificial Sequence: Synthetic oligonucleotide
gcggguggguauccaauuc

SEQ ID NO: 642784 - RNA, 19 nt, Artificial Sequence
  Description of Artificial Sequence: Synthetic oligonucleotide
gcguugagacuguggucgc

SEQ ID NO: 642785 - RNA, 19 nt, Artificial Sequence
  Description of Artificial Sequence: Synthetic oligonucleotide
ccuggauugcuagugagcu

SEQ ID NO: 642786 - RNA, 19 nt, Artificial Sequence
  Description of Artificial Sequence: Synthetic oligonucleotide
guuuuacgcucagacuuau

SEQ ID NO: 642787 - RNA, 19 nt, Artificial Sequence
  Description of Artificial Sequence: Synthetic oligonucleotide
cucggaacugugacggcau

SEQ ID NO: 642788 - RNA, 19 nt, Artificial Sequence
  Description of Artificial Sequence: Synthetic oligonucleotide
cugggguaaccagccauaa

SEQ ID NO: 642789 - RNA, 19 nt, Artificial Sequence
  Description of Artificial Sequence: Synthetic oligonucleotide
gggagcugggccaucuguc

SEQ ID NO: 642790 - RNA, 19 nt, Artificial Sequence
  Description of Artificial Sequence: Synthetic oligonucleotide
ugcugcggguggguaucca

SEQ ID NO: 642791 - RNA, 19 nt, Artificial Sequence
  Description of Artificial Sequence: Synthetic oligonucleotide
ggggagaacguacuugauu

SEQ ID NO: 642792 - RNA, 19 nt, Artificial Sequence
  Description of Artificial Sequence: Synthetic oligonucleotide
uggcugacccguggggcau

SEQ ID NO: 642793 - RNA, 19 nt, Artificial Sequence
  Description of Artificial Sequence: Synthetic oligonucleotide
cucugguuuuagaaauguu

SEQ ID NO: 642794 - RNA, 19 nt, Artificial Sequence
  Description of Artificial Sequence: Synthetic oligonucleotide
gccccuguauauucugaaa

SEQ ID NO: 642795 - RNA, 19 nt, Artificial Sequence
  Description of Artificial Sequence: Synthetic oligonucleotide
uccguggcgcuugcaccgu

SEQ ID NO: 642796 - RNA, 19 nt, Artificial Sequence
  Description of Artificial Sequence: Synthetic oligonucleotide
caccguggagguuugccau

SEQ ID NO: 642797 - RNA, 19 nt, Artificial Sequence
  Description of Artificial Sequence: Synthetic oligonucleotide
ggauugcuagugagcugug

SEQ ID NO: 642798 - RNA, 19 nt, Artificial Sequence
  Description of Artificial Sequence: Synthetic oligonucleotide
cagucgccucccagugcac

SEQ ID NO: 642799 - RNA, 19 nt, Artificial Sequence
  Description of Artificial Sequence: Synthetic oligonucleotide
cuggucuguggagaaacau

SEQ ID NO: 642800 - RNA, 19 nt, Artificial Sequence
  Description of Artificial Sequence: Synthetic oligonucleotide
cguggcgcuugcaccgugg

SEQ ID NO: 642801 - RNA, 19 nt, Artificial Sequence
  Description of Artificial Sequence: Synthetic oligonucleotide
uugcaccguggagguuugc

SEQ ID NO: 642802 - RNA, 19 nt, Artificial Sequence
  Description of Artificial Sequence: Synthetic oligonucleotide
gcuugcaccguggagguuu

SEQ ID NO: 642803 - RNA, 19 nt, Artificial Sequence
  Description of Artificial Sequence: Synthetic oligonucleotide
ggguggguauccaauuccu

SEQ ID NO: 642804 - RNA, 19 nt, Artificial Sequence
  Description of Artificial Sequence: Synthetic oligonucleotide
cguugagacuguggucgcg

SEQ ID NO: 642805 - RNA, 19 nt, Artificial Sequence
  Description of Artificial Sequence: Synthetic oligonucleotide
ggaaaacggcugggguaac

SEQ ID NO: 642806 - RNA, 19 nt, Artificial Sequence
  Description of Artificial Sequence: Synthetic oligonucleotide
gcugggguaaccagccaua

SEQ ID NO: 642807 - RNA, 19 nt, Artificial Sequence
  Description of Artificial Sequence: Synthetic oligonucleotide
gccaugccugggccaauuc

SEQ ID NO: 642808 - RNA, 19 nt, Artificial Sequence
  Description of Artificial Sequence: Synthetic oligonucleotide
cugacccguggggcaugcc

SEQ ID NO: 642809 - RNA, 19 nt, Artificial Sequence
  Description of Artificial Sequence: Synthetic oligonucleotide
cccagguccguggcgcuug

SEQ ID NO: 642810 - RNA, 19 nt, Artificial Sequence
  Description of Artificial Sequence: Synthetic oligonucleotide
gcgcuugcaccguggaggu

SEQ ID NO: 642811 - RNA, 19 nt, Artificial Sequence
  Description of Artificial Sequence: Synthetic oligonucleotide
ccagguccguggcgcuugc

SEQ ID NO: 642812 - RNA, 19 nt, Artificial Sequence
  Description of Artificial Sequence: Synthetic oligonucleotide
gggacaggcuggggagaac

SEQ ID NO: 642813 - RNA, 19 nt, Artificial Sequence
  Description of Artificial Sequence: Synthetic oligonucleotide
gguggguauccaauuccuu

SEQ ID NO: 642814 - RNA, 19 nt, Artificial Sequence
  Description of Artificial Sequence: Synthetic oligonucleotide
caccccacuggaguaguuu

SEQ ID NO: 642815 - RNA, 19 nt, Artificial Sequence
  Description of Artificial Sequence: Synthetic oligonucleotide
ggcugacccguggggcaug

SEQ ID NO: 642816 - RNA, 19 nt, Artificial Sequence
  Description of Artificial Sequence: Synthetic oligonucleotide
gcccuuguuccaugggguu

SEQ ID NO: 642817 - RNA, 19 nt, Artificial Sequence
  Description of Artificial Sequence: Synthetic oligonucleotide
ccguggcgcuugcaccgug

SEQ ID NO: 642818 - RNA, 19 nt, Artificial Sequence
  Description of Artificial Sequence: Synthetic oligonucleotide
cagguccguggcgcuugca

SEQ ID NO: 642819 - RNA, 19 nt, Artificial Sequence
  Description of Artificial Sequence: Synthetic oligonucleotide
gguucggaguggacaccuu

SEQ ID NO: 642820 - RNA, 19 nt, Artificial Sequence
  Description of Artificial Sequence: Synthetic oligonucleotide
cgcuugcaccguggagguu

SEQ ID NO: 642821 - RNA, 19 nt, Artificial Sequence
  Description of Artificial Sequence: Synthetic oligonucleotide
aauaguaagaguccugggc

SEQ ID NO: 642822 - RNA, 19 nt, Artificial Sequence
  Description of Artificial Sequence: Synthetic oligonucleotide
ucuaccuugguccacaugg

SEQ ID NO: 642823 - RNA, 19 nt, Artificial Sequence
  Description of Artificial Sequence: Synthetic oligonucleotide
uuuucuaugcgauaugggg

SEQ ID NO: 642824 - RNA, 19 nt, Artificial Sequence
  Description of Artificial Sequence: Synthetic oligonucleotide
uuugccaaguuuaaggugc

SEQ ID NO: 642825 - RNA, 19 nt, Artificial Sequence
  Description of Artificial Sequence: Synthetic oligonucleotide
gguaaugauaccuaaaccc

SEQ ID NO: 642826 - RNA, 19 nt, Artificial Sequence
  Description of Artificial Sequence: Synthetic oligonucleotide
gacuugaugauugcgaucg

SEQ ID NO: 642827 - RNA, 19 nt, Artificial Sequence
  Description of Artificial Sequence: Synthetic oligonucleotide
acacucguuguccagauac

SEQ ID NO: 642828 - RNA, 19 nt, Artificial Sequence
  Description of Artificial Sequence: Synthetic oligonucleotide
ucaucccuggcuuacagcg

SEQ ID NO: 642829 - RNA, 19 nt, Artificial Sequence
  Description of Artificial Sequence: Synthetic oligonucleotide
aucguaguauuccuugucc

SEQ ID NO: 642830 - RNA, 19 nt, Artificial Sequence
  Description of Artificial Sequence: Synthetic oligonucleotide
ugguaggucuguaacaagg

SEQ ID NO: 642831 - RNA, 19 nt, Artificial Sequence
  Description of Artificial Sequence: Synthetic oligonucleotide
uguagagagcacagaaugg

SEQ ID NO: 642832 - RNA, 19 nt, Artificial Sequence
  Description of Artificial Sequence: Synthetic oligonucleotide
uugaugauugcgaucguag

SEQ ID NO: 642833 - RNA, 19 nt, Artificial Sequence
  Description of Artificial Sequence: Synthetic oligonucleotide
auugcgaucguaguauucc

SEQ ID NO: 642834 - RNA, 19 nt, Artificial Sequence
  Description of Artificial Sequence: Synthetic oligonucleotide
auucauuguagguauuggg

SEQ ID NO: 642835 - RNA, 19 nt, Artificial Sequence
  Description of Artificial Sequence: Synthetic oligonucleotide
agaguacccagcuuucugc

SEQ ID NO: 642836 - RNA, 19 nt, Artificial Sequence
  Description of Artificial Sequence: Synthetic oligonucleotide
uuuauuugcaugugguuac

SEQ ID NO: 642837 - RNA, 19 nt, Artificial Sequence
  Description of Artificial Sequence: Synthetic oligonucleotide
uuuaaggaucucaaucuug

SEQ ID NO: 642838 - RNA, 19 nt, Artificial Sequence
  Description of Artificial Sequence: Synthetic oligonucleotide
ugucuuuauuugcaugugg

SEQ ID NO: 642839 - RNA, 19 nt, Artificial Sequence
  Description of Artificial Sequence: Synthetic oligonucleotide
uagauauugccagugacag

SEQ ID NO: 642840 - RNA, 19 nt, Artificial Sequence
  Description of Artificial Sequence: Synthetic oligonucleotide
ucuaucaccagcucccucc

SEQ ID NO: 642841 - RNA, 19 nt, Artificial Sequence
  Description of Artificial Sequence: Synthetic oligonucleotide
ucucacaucugguaugggg

SEQ ID NO: 642842 - RNA, 19 nt, Artificial Sequence
  Description of Artificial Sequence: Synthetic oligonucleotide
agauacacacagaucaucc

SEQ ID NO: 642843 - RNA, 19 nt, Artificial Sequence
  Description of Artificial Sequence: Synthetic oligonucleotide
augguaugagcccucaagg

SEQ ID NO: 642844 - RNA, 19 nt, Artificial Sequence
  Description of Artificial Sequence: Synthetic oligonucleotide
auaguaagaguccugggca

SEQ ID NO: 642845 - RNA, 19 nt, Artificial Sequence
  Description of Artificial Sequence: Synthetic oligonucleotide
guagaaguggcucugccag

SEQ ID NO: 642846 - RNA, 19 nt, Artificial Sequence
  Description of Artificial Sequence: Synthetic oligonucleotide
uuggcaacgggcaguaggg

SEQ ID NO: 642847 - RNA, 19 nt, Artificial Sequence
  Description of Artificial Sequence: Synthetic oligonucleotide
uuaaggugcagagagucag

SEQ ID NO: 642848 - RNA, 19 nt, Artificial Sequence
  Description of Artificial Sequence: Synthetic oligonucleotide
aaguauccuugcuugcagg

SEQ ID NO: 642849 - RNA, 19 nt, Artificial Sequence
  Description of Artificial Sequence: Synthetic oligonucleotide
ucguuguccagauacacac

SEQ ID NO: 642850 - RNA, 19 nt, Artificial Sequence
  Description of Artificial Sequence: Synthetic oligonucleotide
uauucauuguagguauugg

SEQ ID NO: 642851 - RNA, 19 nt, Artificial Sequence
  Description of Artificial Sequence: Synthetic oligonucleotide
cagacaauaguaagagucc

SEQ ID NO: 642852 - RNA, 19 nt, Artificial Sequence
  Description of Artificial Sequence: Synthetic oligonucleotide
uggcaaauagguuccuugg

SEQ ID NO: 642853 - RNA, 19 nt, Artificial Sequence
  Description of Artificial Sequence: Synthetic oligonucleotide
ucugguaugggguuggcaa

SEQ ID NO: 642854 - RNA, 19 nt, Artificial Sequence
  Description of Artificial Sequence: Synthetic oligonucleotide
ucucuuagggcucugcuuc

SEQ ID NO: 642855 - RNA, 19 nt, Artificial Sequence
  Description of Artificial Sequence: Synthetic oligonucleotide
uuugcaugugguuacaauu

SEQ ID NO: 642856 - RNA, 19 nt, Artificial Sequence
  Description of Artificial Sequence: Synthetic oligonucleotide
ugcucagacaauaguaaga

SEQ ID NO: 642857 - RNA, 19 nt, Artificial Sequence
  Description of Artificial Sequence: Synthetic oligonucleotide
aaguggcucugccagauca

SEQ ID NO: 642858 - RNA, 19 nt, Artificial Sequence
  Description of Artificial Sequence: Synthetic oligonucleotide
guuggcaacgggcaguagg

SEQ ID NO: 642859 - RNA, 19 nt, Artificial Sequence
  Description of Artificial Sequence: Synthetic oligonucleotide
uuccaguauucauuguagg

SEQ ID NO: 642860 - RNA, 19 nt, Artificial Sequence
  Description of Artificial Sequence: Synthetic oligonucleotide
uugcaagugacucuaucac

SEQ ID NO: 642861 - RNA, 19 nt, Artificial Sequence
  Description of Artificial Sequence: Synthetic oligonucleotide
aagaguacccagcuuucug

SEQ ID NO: 642862 - RNA, 19 nt, Artificial Sequence
  Description of Artificial Sequence: Synthetic oligonucleotide
acaggagcggcacaucugg

SEQ ID NO: 642863 - RNA, 19 nt, Artificial Sequence
  Description of Artificial Sequence: Synthetic oligonucleotide
aucuguaaccuccgcuucc

SEQ ID NO: 642864 - RNA, 19 nt, Artificial Sequence
  Description of Artificial Sequence: Synthetic oligonucleotide
cuuacaagcugugucuugg

SEQ ID NO: 642865 - RNA, 19 nt, Artificial Sequence
  Description of Artificial Sequence: Synthetic oligonucleotide
cuggaaguauccuugcuug

SEQ ID NO: 642866 - RNA, 19 nt, Artificial Sequence
  Description of Artificial Sequence: Synthetic oligonucleotide
ccugguaagguguagagag

SEQ ID NO: 642867 - RNA, 19 nt, Artificial Sequence
  Description of Artificial Sequence: Synthetic oligonucleotide
gcacauuacagguugcucg

SEQ ID NO: 642868 - RNA, 19 nt, Artificial Sequence
  Description of Artificial Sequence: Synthetic oligonucleotide
cucggauugauuucugcag

SEQ ID NO: 642869 - RNA, 19 nt, Artificial Sequence
  Description of Artificial Sequence: Synthetic oligonucleotide
agagaggggugccucgucc

SEQ ID NO: 642870 - RNA, 19 nt, Artificial Sequence
  Description of Artificial Sequence: Synthetic oligonucleotide
ugcagaccgugucagagug

SEQ ID NO: 642871 - RNA, 19 nt, Artificial Sequence
  Description of Artificial Sequence: Synthetic oligonucleotide
aggucuguaacaaggacuc

SEQ ID NO: 642872 - RNA, 19 nt, Artificial Sequence
  Description of Artificial Sequence: Synthetic oligonucleotide
uccgaucacuggcacaagg

SEQ ID NO: 642873 - RNA, 19 nt, Artificial Sequence
  Description of Artificial Sequence: Synthetic oligonucleotide
ugcaagugacucuaucacc

SEQ ID NO: 642874 - RNA, 19 nt, Artificial Sequence
  Description of Artificial Sequence: Synthetic oligonucleotide
uuggccacgacuucccaag

SEQ ID NO: 642875 - RNA, 19 nt, Artificial Sequence
  Description of Artificial Sequence: Synthetic oligonucleotide
agcagagacaaacuugccu

SEQ ID NO: 642876 - RNA, 19 nt, Artificial Sequence
  Description of Artificial Sequence: Synthetic oligonucleotide
guaaccuccgcuuccgugc

SEQ ID NO: 642877 - RNA, 19 nt, Artificial Sequence
  Description of Artificial Sequence: Synthetic oligonucleotide
ucggauugauuucugcaga

SEQ ID NO: 642878 - RNA, 19 nt, Artificial Sequence
  Description of Artificial Sequence: Synthetic oligonucleotide
auauauagauauugccagu

SEQ ID NO: 642879 - RNA, 19 nt, Artificial Sequence
  Description of Artificial Sequence: Synthetic oligonucleotide
aacaaggacucaggcuugc

SEQ ID NO: 642880 - RNA, 19 nt, Artificial Sequence
  Description of Artificial Sequence: Synthetic oligonucleotide
cacauuacagguugcucgc

SEQ ID NO: 642881 - RNA, 19 nt, Artificial Sequence
  Description of Artificial Sequence: Synthetic oligonucleotide
uugauuucugcagaccgug

SEQ ID NO: 642882 - RNA, 19 nt, Artificial Sequence
  Description of Artificial Sequence: Synthetic oligonucleotide
ugguaagguguagagagca

SEQ ID NO: 642883 - RNA, 19 nt, Artificial Sequence
  Description of Artificial Sequence: Synthetic oligonucleotide
cagaucagggaaacguggg

SEQ ID NO: 642884 - RNA, 19 nt, Artificial Sequence
  Description of Artificial Sequence: Synthetic oligonucleotide
caggauaccgcagagcccc

SEQ ID NO: 642885 - RNA, 19 nt, Artificial Sequence
  Description of Artificial Sequence: Synthetic oligonucleotide
ucuguaaccuccgcuuccg

SEQ ID NO: 642886 - RNA, 19 nt, Artificial Sequence
  Description of Artificial Sequence: Synthetic oligonucleotide
auuucugcagaccguguca

SEQ ID NO: 642887 - RNA, 19 nt, Artificial Sequence
  Description of Artificial Sequence: Synthetic oligonucleotide
gauaccugguaaugauacc

SEQ ID NO: 642888 - RNA, 19 nt, Artificial Sequence
  Description of Artificial Sequence: Synthetic oligonucleotide
aagccuggcggcugggccg

SEQ ID NO: 642889 - RNA, 19 nt, Artificial Sequence
  Description of Artificial Sequence: Synthetic oligonucleotide
gguaugagcccucaaggcc

SEQ ID NO: 642890 - RNA, 19 nt, Artificial Sequence
  Description of Artificial Sequence: Synthetic oligonucleotide
ucuccuggauaccugguaa

SEQ ID NO: 642891 - RNA, 19 nt, Artificial Sequence
  Description of Artificial Sequence: Synthetic oligonucleotide
agacuugaugauugcgauc

SEQ ID NO: 642892 - RNA, 19 nt, Artificial Sequence
  Description of Artificial Sequence: Synthetic oligonucleotide
ucggguuuccgaucacugg

SEQ ID NO: 642893 - RNA, 19 nt, Artificial Sequence
  Description of Artificial Sequence: Synthetic oligonucleotide
uguaaccuccgcuuccgug

SEQ ID NO: 642894 - RNA, 19 nt, Artificial Sequence
  Description of Artificial Sequence: Synthetic oligonucleotide
ugaugauugcgaucguagu

SEQ ID NO: 642895 - RNA, 19 nt, Artificial Sequence
  Description of Artificial Sequence: Synthetic oligonucleotide
guuuucuaugcgauauggg

SEQ ID NO: 642896 - RNA, 19 nt, Artificial Sequence
  Description of Artificial Sequence: Synthetic oligonucleotide
guauucauuguagguauug

SEQ ID NO: 642897 - RNA, 19 nt, Artificial Sequence
  Description of Artificial Sequence: Synthetic oligonucleotide
ugccagaucagggaaacgu

SEQ ID NO: 642898 - RNA, 19 nt, Artificial Sequence
  Description of Artificial Sequence: Synthetic oligonucleotide
gauuucugcagaccguguc

SEQ ID NO: 642899 - RNA, 19 nt, Artificial Sequence
  Description of Artificial Sequence: Synthetic oligonucleotide
augccaagcuuugccaucc

SEQ ID NO: 642900 - RNA, 19 nt, Artificial Sequence
  Description of Artificial Sequence: Synthetic oligonucleotide
gaugauugcgaucguagua

SEQ ID NO: 642901 - RNA, 19 nt, Artificial Sequence
  Description of Artificial Sequence: Synthetic oligonucleotide
aacguggguuggcuuuugg

SEQ ID NO: 642902 - RNA, 19 nt, Artificial Sequence
  Description of Artificial Sequence: Synthetic oligonucleotide
ucuuacaagcugugucuug

SEQ ID NO: 642903 - RNA, 19 nt, Artificial Sequence
  Description of Artificial Sequence: Synthetic oligonucleotide
gaucguaguauuccuuguc

SEQ ID NO: 642904 - RNA, 19 nt, Artificial Sequence
  Description of Artificial Sequence: Synthetic oligonucleotide
ugguaugggguuggcaacg

SEQ ID NO: 642905 - RNA, 19 nt, Artificial Sequence
  Description of Artificial Sequence: Synthetic oligonucleotide
auggcggccuuuugggucg

SEQ ID NO: 642906 - RNA, 19 nt, Artificial Sequence
  Description of Artificial Sequence: Synthetic oligonucleotide
uuagggcucugcuucucag

SEQ ID NO: 642907 - RNA, 19 nt, Artificial Sequence
  Description of Artificial Sequence: Synthetic oligonucleotide
agugacucuaucaccagcu

SEQ ID NO: 642908 - RNA, 19 nt, Artificial Sequence
  Description of Artificial Sequence: Synthetic oligonucleotide
augauugcgaucguaguau

SEQ ID NO: 642909 - RNA, 19 nt, Artificial Sequence
  Description of Artificial Sequence: Synthetic oligonucleotide
uauugccagugacagucac

SEQ ID NO: 642910 - RNA, 19 nt, Artificial Sequence
  Description of Artificial Sequence: Synthetic oligonucleotide
ugggucucacaucugguau

SEQ ID NO: 642911 - RNA, 19 nt, Artificial Sequence
  Description of Artificial Sequence: Synthetic oligonucleotide
agagccuacccacacccug

SEQ ID NO: 642912 - RNA, 19 nt, Artificial Sequence
  Description of Artificial Sequence: Synthetic oligonucleotide
agcagacuugaugauugcg

SEQ ID NO: 642913 - RNA, 19 nt, Artificial Sequence
  Description of Artificial Sequence: Synthetic oligonucleotide
gaaaccuccucgaagccca

SEQ ID NO: 642914 - RNA, 19 nt, Artificial Sequence
  Description of Artificial Sequence: Synthetic oligonucleotide
aauagguuccuuggcccug

SEQ ID NO: 642915 - RNA, 19 nt, Artificial Sequence
  Description of Artificial Sequence: Synthetic oligonucleotide
acgaagccuugcaaggucc

SEQ ID NO: 642916 - RNA, 19 nt, Artificial Sequence
  Description of Artificial Sequence: Synthetic oligonucleotide
cguagcuucaucuguaacc

SEQ ID NO: 642917 - RNA, 19 nt, Artificial Sequence
  Description of Artificial Sequence: Synthetic oligonucleotide
gaggcugaauaugugcagc

SEQ ID NO: 642918 - RNA, 19 nt, Artificial Sequence
  Description of Artificial Sequence: Synthetic oligonucleotide
ggcaucagguggcaaauag

SEQ ID NO: 642919 - RNA, 19 nt, Artificial Sequence
  Description of Artificial Sequence: Synthetic oligonucleotide
aguaagaguccugggcagg

SEQ ID NO: 642920 - RNA, 19 nt, Artificial Sequence
  Description of Artificial Sequence: Synthetic oligonucleotide
ucgcagugcacacacucgu

SEQ ID NO: 642921 - RNA, 19 nt, Artificial Sequence
  Description of Artificial Sequence: Synthetic oligonucleotide
ugcaugugguuacaauuua

SEQ ID NO: 642922 - RNA, 19 nt, Artificial Sequence
  Description of Artificial Sequence: Synthetic oligonucleotide
ugaggccaagucucuuagg

SEQ ID NO: 642923 - RNA, 19 nt, Artificial Sequence
  Description of Artificial Sequence: Synthetic oligonucleotide
agagacaaacuugccuggg

SEQ ID NO: 642924 - RNA, 19 nt, Artificial Sequence
  Description of Artificial Sequence: Synthetic oligonucleotide
uugucuuuauuugcaugug

SEQ ID NO: 642925 - RNA, 19 nt, Artificial Sequence
  Description of Artificial Sequence: Synthetic oligonucleotide
ugccauuugcaccgugggc

SEQ ID NO: 642926 - RNA, 19 nt, Artificial Sequence
  Description of Artificial Sequence: Synthetic oligonucleotide
accgugucagagugggagg

SEQ ID NO: 642927 - RNA, 19 nt, Artificial Sequence
  Description of Artificial Sequence: Synthetic oligonucleotide
agaucagggaaacgugggu

SEQ ID NO: 642928 - RNA, 19 nt, Artificial Sequence
  Description of Artificial Sequence: Synthetic oligonucleotide
aagcccggacguccugagc

SEQ ID NO: 642929 - RNA, 19 nt, Artificial Sequence
  Description of Artificial Sequence: Synthetic oligonucleotide
cacagagucacaggagcgg

SEQ ID NO: 642930 - RNA, 19 nt, Artificial Sequence
  Description of Artificial Sequence: Synthetic oligonucleotide
aagaccggggucacugggg

SEQ ID NO: 642931 - RNA, 19 nt, Artificial Sequence
  Description of Artificial Sequence: Synthetic oligonucleotide
gcacagaauggucaggggc

SEQ ID NO: 642932 - RNA, 19 nt, Artificial Sequence
  Description of Artificial Sequence: Synthetic oligonucleotide
ucccaaacucuccuggaua

SEQ ID NO: 642933 - RNA, 19 nt, Artificial Sequence
  Description of Artificial Sequence: Synthetic oligonucleotide
ugucagagugggaggugcc

SEQ ID NO: 642934 - RNA, 19 nt, Artificial Sequence
  Description of Artificial Sequence: Synthetic oligonucleotide
uggauaccugguaaugaua

SEQ ID NO: 642935 - RNA, 19 nt, Artificial Sequence
  Description of Artificial Sequence: Synthetic oligonucleotide
gaugccaagcuuugccauc

SEQ ID NO: 642936 - RNA, 19 nt, Artificial Sequence
  Description of Artificial Sequence: Synthetic oligonucleotide
ccagaucagggaaacgugg

SEQ ID NO: 642937 - RNA, 19 nt, Artificial Sequence
  Description of Artificial Sequence: Synthetic oligonucleotide
ugaauaugugcagccucug

SEQ ID NO: 642938 - RNA, 19 nt, Artificial Sequence
  Description of Artificial Sequence: Synthetic oligonucleotide
ugaccagaccggguggagg

SEQ ID NO: 642939 - RNA, 19 nt, Artificial Sequence
  Description of Artificial Sequence: Synthetic oligonucleotide
gucccugugauguccuugc

SEQ ID NO: 642940 - RNA, 19 nt, Artificial Sequence
  Description of Artificial Sequence: Synthetic oligonucleotide
gggcgcaagucuuacaagc

SEQ ID NO: 642941 - RNA, 19 nt, Artificial Sequence
  Description of Artificial Sequence: Synthetic oligonucleotide
cucggguuuccgaucacug

SEQ ID NO: 642942 - RNA, 19 nt, Artificial Sequence
  Description of Artificial Sequence: Synthetic oligonucleotide
uucccaaacucuccuggau

SEQ ID NO: 642943 - RNA, 19 nt, Artificial Sequence
  Description of Artificial Sequence: Synthetic oligonucleotide
cauggcggccuuuuggguc

SEQ ID NO: 642944 - RNA, 19 nt, Artificial Sequence
  Description of Artificial Sequence: Synthetic oligonucleotide
uaaccuccgcuuccgugcc

SEQ ID NO: 642945 - RNA, 19 nt, Artificial Sequence
  Description of Artificial Sequence: Synthetic oligonucleotide
agaugccaagcuuugccau

SEQ ID NO: 642946 - RNA, 19 nt, Artificial Sequence
  Description of Artificial Sequence: Synthetic oligonucleotide
uaccugguaaugauaccua

SEQ ID NO: 642947 - RNA, 19 nt, Artificial Sequence
  Description of Artificial Sequence: Synthetic oligonucleotide
caggguaguggugaagagc

SEQ ID NO: 642948 - RNA, 19 nt, Artificial Sequence
  Description of Artificial Sequence: Synthetic oligonucleotide
uugcgaucguaguauuccu

SEQ ID NO: 642949 - RNA, 19 nt, Artificial Sequence
  Description of Artificial Sequence: Synthetic oligonucleotide
ggcaaauagguuccuuggc

SEQ ID NO: 642950 - RNA, 19 nt, Artificial Sequence
  Description of Artificial Sequence: Synthetic oligonucleotide
aaggggaaaccuccucgaa

SEQ ID NO: 642951 - RNA, 19 nt, Artificial Sequence
  Description of Artificial Sequence: Synthetic oligonucleotide
ccuccggucacaugaaugc

SEQ ID NO: 642952 - RNA, 19 nt, Artificial Sequence
  Description of Artificial Sequence: Synthetic oligonucleotide
acuggcccauuguauauau

SEQ ID NO: 642953 - RNA, 19 nt, Artificial Sequence
  Description of Artificial Sequence: Synthetic oligonucleotide
uaccaucaggcaucaggug

SEQ ID NO: 642954 - RNA, 19 nt, Artificial Sequence
  Description of Artificial Sequence: Synthetic oligonucleotide
acgacuucccaagccuggc

SEQ ID NO: 642955 - RNA, 19 nt, Artificial Sequence
  Description of Artificial Sequence: Synthetic oligonucleotide
auugauuucugcagaccgu

SEQ ID NO: 642956 - RNA, 19 nt, Artificial Sequence
  Description of Artificial Sequence: Synthetic oligonucleotide
ggcacaaggggaaaccucc

SEQ ID NO: 642957 - RNA, 19 nt, Artificial Sequence
  Description of Artificial Sequence: Synthetic oligonucleotide
ugagaagaguacccagcuu

SEQ ID NO: 642958 - RNA, 19 nt, Artificial Sequence
  Description of Artificial Sequence: Synthetic oligonucleotide
ccagaugccaagcuuugcc

SEQ ID NO: 642959 - RNA, 19 nt, Artificial Sequence
  Description of Artificial Sequence: Synthetic oligonucleotide
cugguaugggguuggcaac

SEQ ID NO: 642960 - RNA, 19 nt, Artificial Sequence
  Description of Artificial Sequence: Synthetic oligonucleotide
agcauugucccuggcucgg

SEQ ID NO: 642961 - RNA, 19 nt, Artificial Sequence
  Description of Artificial Sequence: Synthetic oligonucleotide
acccucguuccuccuugcc

SEQ ID NO: 642962 - RNA, 19 nt, Artificial Sequence
  Description of Artificial Sequence: Synthetic oligonucleotide
acccugcgaguccuggugg

SEQ ID NO: 642963 - RNA, 19 nt, Artificial Sequence
  Description of Artificial Sequence: Synthetic oligonucleotide
gcgaucguaguauuccuug

SEQ ID NO: 642964 - RNA, 19 nt, Artificial Sequence
  Description of Artificial Sequence: Synthetic oligonucleotide
cugguaggucuguaacaag

SEQ ID NO: 642965 - RNA, 19 nt, Artificial Sequence
  Description of Artificial Sequence: Synthetic oligonucleotide
ggucucacaucugguaugg

SEQ ID NO: 642966 - RNA, 19 nt, Artificial Sequence
  Description of Artificial Sequence: Synthetic oligonucleotide
agccuacccacacccugcg

SEQ ID NO: 642967 - RNA, 19 nt, Artificial Sequence
  Description of Artificial Sequence: Synthetic oligonucleotide
guaagaguccugggcaggc

SEQ ID NO: 642968 - RNA, 19 nt, Artificial Sequence
  Description of Artificial Sequence: Synthetic oligonucleotide
guaugggguuggcaacggg

SEQ ID NO: 642969 - RNA, 19 nt, Artificial Sequence
  Description of Artificial Sequence: Synthetic oligonucleotide
caucuguaaccuccgcuuc

SEQ ID NO: 642970 - RNA, 19 nt, Artificial Sequence
  Description of Artificial Sequence: Synthetic oligonucleotide
guagagagcacagaauggu

SEQ ID NO: 642971 - RNA, 19 nt, Artificial Sequence
  Description of Artificial Sequence: Synthetic oligonucleotide
ccgaucacuggcacaaggg

SEQ ID NO: 642972 - RNA, 19 nt, Artificial Sequence
  Description of Artificial Sequence: Synthetic oligonucleotide
gauugcgaucguaguauuc

SEQ ID NO: 642973 - RNA, 19 nt, Artificial Sequence
  Description of Artificial Sequence: Synthetic oligonucleotide
ggacugguaggucuguaac

SEQ ID NO: 642974 - RNA, 19 nt, Artificial Sequence
  Description of Artificial Sequence: Synthetic oligonucleotide
gacagcgggagcagcagac

SEQ ID NO: 642975 - RNA, 19 nt, Artificial Sequence
  Description of Artificial Sequence: Synthetic oligonucleotide
ugcgaucguaguauuccuu

SEQ ID NO: 642976 - RNA, 19 nt, Artificial Sequence
  Description of Artificial Sequence: Synthetic oligonucleotide
ggagggaugcuccuccaug

SEQ ID NO: 642977 - RNA, 19 nt, Artificial Sequence
  Description of Artificial Sequence: Synthetic oligonucleotide
gaaugccauuugcaccgug

SEQ ID NO: 642978 - RNA, 19 nt, Artificial Sequence
  Description of Artificial Sequence: Synthetic oligonucleotide
ggcugcacgcagcagagac

SEQ ID NO: 642979 - RNA, 19 nt, Artificial Sequence
  Description of Artificial Sequence: Synthetic oligonucleotide
ccuacccacacccugcgag

SEQ ID NO: 642980 - RNA, 19 nt, Artificial Sequence
  Description of Artificial Sequence: Synthetic oligonucleotide
cuuacagcggcacucgggu

SEQ ID NO: 642981 - RNA, 19 nt, Artificial Sequence
  Description of Artificial Sequence: Synthetic oligonucleotide
caaggggaaaccuccucga

SEQ ID NO: 642982 - RNA, 19 nt, Artificial Sequence
  Description of Artificial Sequence: Synthetic oligonucleotide
cagcagagacaaacuugcc

SEQ ID NO: 642983 - RNA, 19 nt, Artificial Sequence
  Description of Artificial Sequence: Synthetic oligonucleotide
ugagcaccacgaagccuug

SEQ ID NO: 642984 - RNA, 19 nt, Artificial Sequence
  Description of Artificial Sequence: Synthetic oligonucleotide
gagccuacccacacccugc

SEQ ID NO: 642985 - RNA, 19 nt, Artificial Sequence
  Description of Artificial Sequence: Synthetic oligonucleotide
aguuuaaggugcagagagu

SEQ ID NO: 642986 - RNA, 19 nt, Artificial Sequence
  Description of Artificial Sequence: Synthetic oligonucleotide
acguccugagcagcguugg

SEQ ID NO: 642987 - RNA, 19 nt, Artificial Sequence
  Description of Artificial Sequence: Synthetic oligonucleotide
acacacucguuguccagau

SEQ ID NO: 642988 - RNA, 19 nt, Artificial Sequence
  Description of Artificial Sequence: Synthetic oligonucleotide
ggagauucuucucccucug

SEQ ID NO: 642989 - RNA, 19 nt, Artificial Sequence
  Description of Artificial Sequence: Synthetic oligonucleotide
ggauugauuucugcagacc

SEQ ID NO: 642990 - RNA, 19 nt, Artificial Sequence
  Description of Artificial Sequence: Synthetic oligonucleotide
gggacucugcuguuguagc

SEQ ID NO: 642991 - RNA, 19 nt, Artificial Sequence
  Description of Artificial Sequence: Synthetic oligonucleotide
acgcagcagagacaaacuu

SEQ ID NO: 642992 - RNA, 19 nt, Artificial Sequence
  Description of Artificial Sequence: Synthetic oligonucleotide
gccuuucucagauaccauc

SEQ ID NO: 642993 - RNA, 19 nt, Artificial Sequence
  Description of Artificial Sequence: Synthetic oligonucleotide
ggaugcuccuccaugcagc

SEQ ID NO: 642994 - RNA, 19 nt, Artificial Sequence
  Description of Artificial Sequence: Synthetic oligonucleotide
uggcaacgggcaguagggg

SEQ ID NO: 642995 - RNA, 19 nt, Artificial Sequence
  Description of Artificial Sequence: Synthetic oligonucleotide
gcauccguagcuucaucug

SEQ ID NO: 642996 - RNA, 19 nt, Artificial Sequence
  Description of Artificial Sequence: Synthetic oligonucleotide
caagccaugccugcaucug

SEQ ID NO: 642997 - RNA, 19 nt, Artificial Sequence
  Description of Artificial Sequence: Synthetic oligonucleotide
cacaaggggaaaccuccuc

SEQ ID NO: 642998 - RNA, 19 nt, Artificial Sequence
  Description of Artificial Sequence: Synthetic oligonucleotide
gugggaagcccggacgucc

SEQ ID NO: 642999 - RNA, 19 nt, Artificial Sequence
  Description of Artificial Sequence: Synthetic oligonucleotide
gcucggauugauuucugca

SEQ ID NO: 643000 - RNA, 19 nt, Artificial Sequence
  Description of Artificial Sequence: Synthetic oligonucleotide
uguccgguucugcucugaa

SEQ ID NO: 643001 - RNA, 19 nt, Artificial Sequence
  Description of Artificial Sequence: Synthetic oligonucleotide
cugcaucugaggcugaaua

SEQ ID NO: 643002 - RNA, 19 nt, Artificial Sequence
  Description of Artificial Sequence: Synthetic oligonucleotide
cacccugcgaguccuggug

SEQ ID NO: 643003 - RNA, 19 nt, Artificial Sequence
  Description of Artificial Sequence: Synthetic oligonucleotide
ggucacaagccaugccugc

SEQ ID NO: 643004 - RNA, 19 nt, Artificial Sequence
  Description of Artificial Sequence: Synthetic oligonucleotide
guaugagcccucaaggccu

SEQ ID NO: 643005 - RNA, 19 nt, Artificial Sequence
  Description of Artificial Sequence: Synthetic oligonucleotide
guauucuggaaguauccuu

SEQ ID NO: 643006 - RNA, 19 nt, Artificial Sequence
  Description of Artificial Sequence: Synthetic oligonucleotide
aggcccugggucucacauc

SEQ ID NO: 643007 - RNA, 19 nt, Artificial Sequence
  Description of Artificial Sequence: Synthetic oligonucleotide
gggucucacaucugguaug

SEQ ID NO: 643008 - RNA, 19 nt, Artificial Sequence
  Description of Artificial Sequence: Synthetic oligonucleotide
agggaaacguggguuggcu

SEQ ID NO: 643009 - RNA, 19 nt, Artificial Sequence
  Description of Artificial Sequence: Synthetic oligonucleotide
uggguagaaguggcucugc

SEQ ID NO: 643010 - RNA, 19 nt, Artificial Sequence
  Description of Artificial Sequence: Synthetic oligonucleotide
ugcccugcuaguguccggu

SEQ ID NO: 643011 - RNA, 19 nt, Artificial Sequence
  Description of Artificial Sequence: Synthetic oligonucleotide
uggcucggauugauuucug

SEQ ID NO: 643012 - RNA, 19 nt, Artificial Sequence
  Description of Artificial Sequence: Synthetic oligonucleotide
cacuuggcuauguucccca

SEQ ID NO: 643013 - RNA, 19 nt, Artificial Sequence
  Description of Artificial Sequence: Synthetic oligonucleotide
acuugaugauugcgaucgu

SEQ ID NO: 643014 - RNA, 19 nt, Artificial Sequence
  Description of Artificial Sequence: Synthetic oligonucleotide
caggcgcaggccaggguag

SEQ ID NO: 643015 - RNA, 19 nt, Artificial Sequence
  Description of Artificial Sequence: Synthetic oligonucleotide
gcaacgggcaguaggggag

SEQ ID NO: 643016 - RNA, 19 nt, Artificial Sequence
  Description of Artificial Sequence: Synthetic oligonucleotide
cugugcccugcuagugucc

SEQ ID NO: 643017 - RNA, 19 nt, Artificial Sequence
  Description of Artificial Sequence: Synthetic oligonucleotide
cauggguagaaguggcucu

SEQ ID NO: 643018 - RNA, 19 nt, Artificial Sequence
  Description of Artificial Sequence: Synthetic oligonucleotide
gcucgcagugcacacacuc

SEQ ID NO: 643019 - RNA, 19 nt, Artificial Sequence
  Description of Artificial Sequence: Synthetic oligonucleotide
gcgcauggcggccuuuugg

SEQ ID NO: 643020 - RNA, 19 nt, Artificial Sequence
  Description of Artificial Sequence: Synthetic oligonucleotide
uugggucggcugaccagac

SEQ ID NO: 643021 - RNA, 19 nt, Artificial Sequence
  Description of Artificial Sequence: Synthetic oligonucleotide
ggcauggcacccuacuguc

SEQ ID NO: 643022 - RNA, 19 nt, Artificial Sequence
  Description of Artificial Sequence: Synthetic oligonucleotide
ggcucggauugauuucugc

SEQ ID NO: 643023 - RNA, 19 nt, Artificial Sequence
  Description of Artificial Sequence: Synthetic oligonucleotide
cccugggucucacaucugg

SEQ ID NO: 643024 - RNA, 19 nt, Artificial Sequence
  Description of Artificial Sequence: Synthetic oligonucleotide
caacgggcaguaggggagg

SEQ ID NO: 643025 - RNA, 19 nt, Artificial Sequence
  Description of Artificial Sequence: Synthetic oligonucleotide
auagguuccuuggcccugu

SEQ ID NO: 643026 - RNA, 19 nt, Artificial Sequence
  Description of Artificial Sequence: Synthetic oligonucleotide
cacacccugcgaguccugg

SEQ ID NO: 643027 - RNA, 19 nt, Artificial Sequence
  Description of Artificial Sequence: Synthetic oligonucleotide
gguaugggguuggcaacgg

SEQ ID NO: 643028 - RNA, 19 nt, Artificial Sequence
  Description of Artificial Sequence: Synthetic oligonucleotide
gcccauuguauauauagau

SEQ ID NO: 643029 - RNA, 19 nt, Artificial Sequence
  Description of Artificial Sequence: Synthetic oligonucleotide
accgugggccacuuggcua

SEQ ID NO: 643030 - RNA, 19 nt, Artificial Sequence
  Description of Artificial Sequence: Synthetic oligonucleotide
acucggguuuccgaucacu

SEQ ID NO: 643031 - RNA, 19 nt, Artificial Sequence
  Description of Artificial Sequence: Synthetic oligonucleotide
ccggcuggggcugagacgc

SEQ ID NO: 643032 - RNA, 19 nt, Artificial Sequence
  Description of Artificial Sequence: Synthetic oligonucleotide
cggguuuccgaucacuggc

SEQ ID NO: 643033 - RNA, 19 nt, Artificial Sequence
  Description of Artificial Sequence: Synthetic oligonucleotide
gggaaaccuccucgaagcc

SEQ ID NO: 643034 - RNA, 19 nt, Artificial Sequence
  Description of Artificial Sequence: Synthetic oligonucleotide
ggacccucguuccuccuug

SEQ ID NO: 643035 - RNA, 19 nt, Artificial Sequence
  Description of Artificial Sequence: Synthetic oligonucleotide
caggagcggcacaucuggc

SEQ ID NO: 643036 - RNA, 19 nt, Artificial Sequence
  Description of Artificial Sequence: Synthetic oligonucleotide
gaccggguggaggccagag

SEQ ID NO: 643037 - RNA, 19 nt, Artificial Sequence
  Description of Artificial Sequence: Synthetic oligonucleotide
gacccucguuccuccuugc

SEQ ID NO: 643038 - RNA, 19 nt, Artificial Sequence
  Description of Artificial Sequence: Synthetic oligonucleotide
gaucagggaaacguggguu

SEQ ID NO: 643039 - RNA, 19 nt, Artificial Sequence
  Description of Artificial Sequence: Synthetic oligonucleotide
caccggcuggggcugagac

SEQ ID NO: 643040 - RNA, 19 nt, Artificial Sequence
  Description of Artificial Sequence: Synthetic oligonucleotide
guccagauacacacagauc

SEQ ID NO: 643041 - RNA, 19 nt, Artificial Sequence
  Description of Artificial Sequence: Synthetic oligonucleotide
cuugaugauugcgaucgua

SEQ ID NO: 643042 - RNA, 19 nt, Artificial Sequence
  Description of Artificial Sequence: Synthetic oligonucleotide
ggcaacgggcaguagggga

SEQ ID NO: 643043 - RNA, 19 nt, Artificial Sequence
  Description of Artificial Sequence: Synthetic oligonucleotide
agcgggagcagcagacuug

SEQ ID NO: 643044 - RNA, 19 nt, Artificial Sequence
  Description of Artificial Sequence: Synthetic oligonucleotide
aggaaguauucuggaagua

SEQ ID NO: 643045 - RNA, 19 nt, Artificial Sequence
  Description of Artificial Sequence: Synthetic oligonucleotide
ggggagauucuucucccuc

SEQ ID NO: 643046 - RNA, 19 nt, Artificial Sequence
  Description of Artificial Sequence: Synthetic oligonucleotide
cugggucucacaucuggua

SEQ ID NO: 643047 - RNA, 19 nt, Artificial Sequence
  Description of Artificial Sequence: Synthetic oligonucleotide
ggagagaugguuccaguau

SEQ ID NO: 643048 - RNA, 19 nt, Artificial Sequence
  Description of Artificial Sequence: Synthetic oligonucleotide
gagagaggggugccucguc

SEQ ID NO: 643049 - RNA, 19 nt, Artificial Sequence
  Description of Artificial Sequence: Synthetic oligonucleotide
ggggcgcaagucuuacaag

SEQ ID NO: 643050 - RNA, 19 nt, Artificial Sequence
  Description of Artificial Sequence: Synthetic oligonucleotide
gcaagucuuacaagcugug

SEQ ID NO: 643051 - RNA, 19 nt, Artificial Sequence
  Description of Artificial Sequence: Synthetic oligonucleotide
uggacccucguuccuccuu

SEQ ID NO: 643052 - RNA, 19 nt, Artificial Sequence
  Description of Artificial Sequence: Synthetic oligonucleotide
gaagaguacccagcuuucu

SEQ ID NO: 643053 - RNA, 19 nt, Artificial Sequence
  Description of Artificial Sequence: Synthetic oligonucleotide
gguugcucgcagugcacac

SEQ ID NO: 643054 - RNA, 19 nt, Artificial Sequence
  Description of Artificial Sequence: Synthetic oligonucleotide
cucugggacugguaggucu

SEQ ID NO: 643055 - RNA, 19 nt, Artificial Sequence
  Description of Artificial Sequence: Synthetic oligonucleotide
gccagaucagggaaacgug

SEQ ID NO: 643056 - RNA, 19 nt, Artificial Sequence
  Description of Artificial Sequence: Synthetic oligonucleotide
cauccguagcuucaucugu

SEQ ID NO: 643057 - RNA, 19 nt, Artificial Sequence
  Description of Artificial Sequence: Synthetic oligonucleotide
guccuugcaagugacucua

SEQ ID NO: 643058 - RNA, 19 nt, Artificial Sequence
  Description of Artificial Sequence: Synthetic oligonucleotide
cccauuguauauauagaua

SEQ ID NO: 643059 - RNA, 19 nt, Artificial Sequence
  Description of Artificial Sequence: Synthetic oligonucleotide
uuacagcggcacucggguu

SEQ ID NO: 643060 - RNA, 19 nt, Artificial Sequence
  Description of Artificial Sequence: Synthetic oligonucleotide
aguauucauuguagguauu

SEQ ID NO: 643061 - RNA, 19 nt, Artificial Sequence
  Description of Artificial Sequence: Synthetic oligonucleotide
cucagacaauaguaagagu

SEQ ID NO: 643062 - RNA, 19 nt, Artificial Sequence
  Description of Artificial Sequence: Synthetic oligonucleotide
gcucacugucucacuaucc

SEQ ID NO: 643063 - RNA, 19 nt, Artificial Sequence
  Description of Artificial Sequence: Synthetic oligonucleotide
cugccagaucagggaaacg

SEQ ID NO: 643064 - RNA, 19 nt, Artificial Sequence
  Description of Artificial Sequence: Synthetic oligonucleotide
ccaggauaccgcagagccc

SEQ ID NO: 643065 - RNA, 19 nt, Artificial Sequence
  Description of Artificial Sequence: Synthetic oligonucleotide
cugcagagagaggggugcc

SEQ ID NO: 643066 - RNA, 19 nt, Artificial Sequence
  Description of Artificial Sequence: Synthetic oligonucleotide
aacgggcaguaggggagga

SEQ ID NO: 643067 - RNA, 19 nt, Artificial Sequence
  Description of Artificial Sequence: Synthetic oligonucleotide
aucagguggcaaauagguu

SEQ ID NO: 643068 - RNA, 19 nt, Artificial Sequence
  Description of Artificial Sequence: Synthetic oligonucleotide
guugcucgcagugcacaca

SEQ ID NO: 643069 - RNA, 19 nt, Artificial Sequence
  Description of Artificial Sequence: Synthetic oligonucleotide
gguaagguguagagagcac

SEQ ID NO: 643070 - RNA, 19 nt, Artificial Sequence
  Description of Artificial Sequence: Synthetic oligonucleotide
aggcaggcgcauggcggcc

SEQ ID NO: 643071 - RNA, 19 nt, Artificial Sequence
  Description of Artificial Sequence: Synthetic oligonucleotide
agcggcacaucuggcagaa

SEQ ID NO: 643072 - RNA, 19 nt, Artificial Sequence
  Description of Artificial Sequence: Synthetic oligonucleotide
ggucacaugaaugccauuu

SEQ ID NO: 643073 - RNA, 19 nt, Artificial Sequence
  Description of Artificial Sequence: Synthetic oligonucleotide
cagaccggguggaggccag

SEQ ID NO: 643074 - RNA, 19 nt, Artificial Sequence
  Description of Artificial Sequence: Synthetic oligonucleotide
gcacucggguuuccgauca

SEQ ID NO: 643075 - RNA, 19 nt, Artificial Sequence
  Description of Artificial Sequence: Synthetic oligonucleotide
ucacuggcacaaggggaaa

SEQ ID NO: 643076 - RNA, 19 nt, Artificial Sequence
  Description of Artificial Sequence: Synthetic oligonucleotide
cggauugauuucugcagac

SEQ ID NO: 643077 - RNA, 19 nt, Artificial Sequence
  Description of Artificial Sequence: Synthetic oligonucleotide
ggcccauuguauauauaga

SEQ ID NO: 643078 - RNA, 19 nt, Artificial Sequence
  Description of Artificial Sequence: Synthetic oligonucleotide
ccuuugccaaguuuaaggu

SEQ ID NO: 643079 - RNA, 19 nt, Artificial Sequence
  Description of Artificial Sequence: Synthetic oligonucleotide
gugcccugcuaguguccgg

SEQ ID NO: 643080 - RNA, 19 nt, Artificial Sequence
  Description of Artificial Sequence: Synthetic oligonucleotide
gggacugguaggucuguaa

SEQ ID NO: 643081 - RNA, 19 nt, Artificial Sequence
  Description of Artificial Sequence: Synthetic oligonucleotide
cuuccuccaagaccggggu

SEQ ID NO: 643082 - RNA, 19 nt, Artificial Sequence
  Description of Artificial Sequence: Synthetic oligonucleotide
ccacgacuucccaagccug

SEQ ID NO: 643083 - RNA, 19 nt, Artificial Sequence
  Description of Artificial Sequence: Synthetic oligonucleotide
cugucucagccagaugcca

SEQ ID NO: 643084 - RNA, 19 nt, Artificial Sequence
  Description of Artificial Sequence: Synthetic oligonucleotide
gagcaccacgaagccuugc

SEQ ID NO: 643085 - RNA, 19 nt, Artificial Sequence
  Description of Artificial Sequence: Synthetic oligonucleotide
ggcggcugggccgacgugc

SEQ ID NO: 643086 - RNA, 19 nt, Artificial Sequence
  Description of Artificial Sequence: Synthetic oligonucleotide
ggucggcugaccagaccgg

SEQ ID NO: 643087 - RNA, 19 nt, Artificial Sequence
  Description of Artificial Sequence: Synthetic oligonucleotide
agccuccggucacaugaau

SEQ ID NO: 643088 - RNA, 19 nt, Artificial Sequence
  Description of Artificial Sequence: Synthetic oligonucleotide
guagcaccacuuccuccaa

SEQ ID NO: 643089 - RNA, 19 nt, Artificial Sequence
  Description of Artificial Sequence: Synthetic oligonucleotide
cuggcucggauugauuucu

SEQ ID NO: 643090 - RNA, 19 nt, Artificial Sequence
  Description of Artificial Sequence: Synthetic oligonucleotide
cugcuaguguccgguucug

SEQ ID NO: 643091 - RNA, 19 nt, Artificial Sequence
  Description of Artificial Sequence: Synthetic oligonucleotide
gcacccuacugucucuguc

SEQ ID NO: 643092 - RNA, 19 nt, Artificial Sequence
  Description of Artificial Sequence: Synthetic oligonucleotide
uugcaccgugggccacuug

SEQ ID NO: 643093 - RNA, 19 nt, Artificial Sequence
  Description of Artificial Sequence: Synthetic oligonucleotide
cuacccacacccugcgagu

SEQ ID NO: 643094 - RNA, 19 nt, Artificial Sequence
  Description of Artificial Sequence: Synthetic oligonucleotide
cuaucaccagcucccuccu

SEQ ID NO: 643095 - RNA, 19 nt, Artificial Sequence
  Description of Artificial Sequence: Synthetic oligonucleotide
ggguuuccgaucacuggca

SEQ ID NO: 643096 - RNA, 19 nt, Artificial Sequence
  Description of Artificial Sequence: Synthetic oligonucleotide
ccguagcuucaucuguaac

SEQ ID NO: 643097 - RNA, 19 nt, Artificial Sequence
  Description of Artificial Sequence: Synthetic oligonucleotide
uggcggcugggccgacgug

SEQ ID NO: 643098 - RNA, 19 nt, Artificial Sequence
  Description of Artificial Sequence: Synthetic oligonucleotide
gggucuaccuugguccaca

SEQ ID NO: 643099 - RNA, 19 nt, Artificial Sequence
  Description of Artificial Sequence: Synthetic oligonucleotide
gguguagagagcacagaau

SEQ ID NO: 643100 - RNA, 19 nt, Artificial Sequence
  Description of Artificial Sequence: Synthetic oligonucleotide
cacucggguuuccgaucac

SEQ ID NO: 643101 - RNA, 19 nt, Artificial Sequence
  Description of Artificial Sequence: Synthetic oligonucleotide
ccauuugcaccgugggcca

SEQ ID NO: 643102 - RNA, 19 nt, Artificial Sequence
  Description of Artificial Sequence: Synthetic oligonucleotide
aggggacucugcuguugua

SEQ ID NO: 643103 - RNA, 19 nt, Artificial Sequence
  Description of Artificial Sequence: Synthetic oligonucleotide
gcuggagccagcauccgua

SEQ ID NO: 643104 - RNA, 19 nt, Artificial Sequence
  Description of Artificial Sequence: Synthetic oligonucleotide
cacugugcccugcuagugu

SEQ ID NO: 643105 - RNA, 19 nt, Artificial Sequence
  Description of Artificial Sequence: Synthetic oligonucleotide
accaggggacucugcuguu

SEQ ID NO: 643106 - RNA, 19 nt, Artificial Sequence
  Description of Artificial Sequence: Synthetic oligonucleotide
agguggcaaauagguuccu

SEQ ID NO: 643107 - RNA, 19 nt, Artificial Sequence
  Description of Artificial Sequence: Synthetic oligonucleotide
cugcagaccgugucagagu

SEQ ID NO: 643108 - RNA, 19 nt, Artificial Sequence
  Description of Artificial Sequence: Synthetic oligonucleotide
ggauaccgcagagccccag

SEQ ID NO: 643109 - RNA, 19 nt, Artificial Sequence
  Description of Artificial Sequence: Synthetic oligonucleotide
uggcugcacgcagcagaga

SEQ ID NO: 643110 - RNA, 19 nt, Artificial Sequence
  Description of Artificial Sequence: Synthetic oligonucleotide
ggcaguaggggaggaagua

SEQ ID NO: 643111 - RNA, 19 nt, Artificial Sequence
  Description of Artificial Sequence: Synthetic oligonucleotide
gucagagugggaggugccu

SEQ ID NO: 643112 - RNA, 19 nt, Artificial Sequence
  Description of Artificial Sequence: Synthetic oligonucleotide
ggaagcccggacguccuga

SEQ ID NO: 643113 - RNA, 19 nt, Artificial Sequence
  Description of Artificial Sequence: Synthetic oligonucleotide
ccacaugguaugagcccuc

SEQ ID NO: 643114 - RNA, 19 nt, Artificial Sequence
  Description of Artificial Sequence: Synthetic oligonucleotide
ggcgcaagucuuacaagcu

SEQ ID NO: 643115 - RNA, 19 nt, Artificial Sequence
  Description of Artificial Sequence: Synthetic oligonucleotide
cuggcccauuguauauaua

SEQ ID NO: 643116 - RNA, 19 nt, Artificial Sequence
  Description of Artificial Sequence: Synthetic oligonucleotide
aggcaucagguggcaaaua

SEQ ID NO: 643117 - RNA, 19 nt, Artificial Sequence
  Description of Artificial Sequence: Synthetic oligonucleotide
cgcaagucuuacaagcugu

SEQ ID NO: 643118 - RNA, 19 nt, Artificial Sequence
  Description of Artificial Sequence: Synthetic oligonucleotide
ccugcuaguguccgguucu

SEQ ID NO: 643119 - RNA, 19 nt, Artificial Sequence
  Description of Artificial Sequence: Synthetic oligonucleotide
gccgggccuggccuccagg

SEQ ID NO: 643120 - RNA, 19 nt, Artificial Sequence
  Description of Artificial Sequence: Synthetic oligonucleotide
agaccgugucagaguggga

SEQ ID NO: 643121 - RNA, 19 nt, Artificial Sequence
  Description of Artificial Sequence: Synthetic oligonucleotide
cccugugauguccuugcaa

SEQ ID NO: 643122 - RNA, 19 nt, Artificial Sequence
  Description of Artificial Sequence: Synthetic oligonucleotide
gcaugugguuacaauuuau

SEQ ID NO: 643123 - RNA, 19 nt, Artificial Sequence
  Description of Artificial Sequence: Synthetic oligonucleotide
ccaggggacucugcuguug

SEQ ID NO: 643124 - RNA, 19 nt, Artificial Sequence
  Description of Artificial Sequence: Synthetic oligonucleotide
aggcgcaggccaggguagu

SEQ ID NO: 643125 - RNA, 19 nt, Artificial Sequence
  Description of Artificial Sequence: Synthetic oligonucleotide
cugcgaguccuggugggua

SEQ ID NO: 643126 - RNA, 19 nt, Artificial Sequence
  Description of Artificial Sequence: Synthetic oligonucleotide
guguccgguucugcucuga

SEQ ID NO: 643127 - RNA, 19 nt, Artificial Sequence
  Description of Artificial Sequence: Synthetic oligonucleotide
cacacucguuguccagaua

SEQ ID NO: 643128 - RNA, 19 nt, Artificial Sequence
  Description of Artificial Sequence: Synthetic oligonucleotide
aggauaccgcagagcccca

SEQ ID NO: 643129 - RNA, 19 nt, Artificial Sequence
  Description of Artificial Sequence: Synthetic oligonucleotide
gguuggcaacgggcaguag

SEQ ID NO: 643130 - RNA, 19 nt, Artificial Sequence
  Description of Artificial Sequence: Synthetic oligonucleotide
cuuccgugccaggcuggca

SEQ ID NO: 643131 - RNA, 19 nt, Artificial Sequence
  Description of Artificial Sequence: Synthetic oligonucleotide
cagagccuacccacacccu

SEQ ID NO: 643132 - RNA, 19 nt, Artificial Sequence
  Description of Artificial Sequence: Synthetic oligonucleotide
agaccggguggaggccaga

SEQ ID NO: 643133 - RNA, 19 nt, Artificial Sequence
  Description of Artificial Sequence: Synthetic oligonucleotide
gcaguaggggaggaaguau

SEQ ID NO: 643134 - RNA, 19 nt, Artificial Sequence
  Description of Artificial Sequence: Synthetic oligonucleotide
cuguaaccuccgcuuccgu

SEQ ID NO: 643135 - RNA, 19 nt, Artificial Sequence
  Description of Artificial Sequence: Synthetic oligonucleotide
ggguuggcaacgggcagua

SEQ ID NO: 643136 - RNA, 19 nt, Artificial Sequence
  Description of Artificial Sequence: Synthetic oligonucleotide
gggaaacguggguuggcuu

SEQ ID NO: 643137 - RNA, 19 nt, Artificial Sequence
  Description of Artificial Sequence: Synthetic oligonucleotide
ggcauggguagaaguggcu

SEQ ID NO: 643138 - RNA, 19 nt, Artificial Sequence
  Description of Artificial Sequence: Synthetic oligonucleotide
ccugggucucacaucuggu

SEQ ID NO: 643139 - RNA, 19 nt, Artificial Sequence
  Description of Artificial Sequence: Synthetic oligonucleotide
cccugucagagggcauggc

SEQ ID NO: 643140 - RNA, 19 nt, Artificial Sequence
  Description of Artificial Sequence: Synthetic oligonucleotide
cgaucguaguauuccuugu

SEQ ID NO: 643141 - RNA, 19 nt, Artificial Sequence
  Description of Artificial Sequence: Synthetic oligonucleotide
ggcacccuacugucucugu

SEQ ID NO: 643142 - RNA, 19 nt, Artificial Sequence
  Description of Artificial Sequence: Synthetic oligonucleotide
ccgcagagccccagcagaa

SEQ ID NO: 643143 - RNA, 19 nt, Artificial Sequence
  Description of Artificial Sequence: Synthetic oligonucleotide
gcauugucccuggcucgga

SEQ ID NO: 643144 - RNA, 19 nt, Artificial Sequence
  Description of Artificial Sequence: Synthetic oligonucleotide
cucguuccuccuugccuuu

SEQ ID NO: 643145 - RNA, 19 nt, Artificial Sequence
  Description of Artificial Sequence: Synthetic oligonucleotide
ccagaccggguggaggcca

SEQ ID NO: 643146 - RNA, 19 nt, Artificial Sequence
  Description of Artificial Sequence: Synthetic oligonucleotide
gccuacccacacccugcga

SEQ ID NO: 643147 - RNA, 19 nt, Artificial Sequence
  Description of Artificial Sequence: Synthetic oligonucleotide
ggacguccugagcagcguu

SEQ ID NO: 643148 - RNA, 19 nt, Artificial Sequence
  Description of Artificial Sequence: Synthetic oligonucleotide
ggagugggauauggaggcu

SEQ ID NO: 643149 - RNA, 19 nt, Artificial Sequence
  Description of Artificial Sequence: Synthetic oligonucleotide
gcacaaggggaaaccuccu

SEQ ID NO: 643150 - RNA, 19 nt, Artificial Sequence
  Description of Artificial Sequence: Synthetic oligonucleotide
ggucuaccuugguccacau

SEQ ID NO: 643151 - RNA, 19 nt, Artificial Sequence
  Description of Artificial Sequence: Synthetic oligonucleotide
ccgugggccacuuggcuau

SEQ ID NO: 643152 - RNA, 19 nt, Artificial Sequence
  Description of Artificial Sequence: Synthetic oligonucleotide
ggccgggccuggccuccag

SEQ ID NO: 643153 - RNA, 19 nt, Artificial Sequence
  Description of Artificial Sequence: Synthetic oligonucleotide
gcgaguccugguggguaga

SEQ ID NO: 643154 - RNA, 19 nt, Artificial Sequence
  Description of Artificial Sequence: Synthetic oligonucleotide
gcggcacaucuggcagaag

SEQ ID NO: 643155 - RNA, 19 nt, Artificial Sequence
  Description of Artificial Sequence: Synthetic oligonucleotide
gcggccuuuugggucggcu

SEQ ID NO: 643156 - RNA, 19 nt, Artificial Sequence
  Description of Artificial Sequence: Synthetic oligonucleotide
ggcggccuuuugggucggc

SEQ ID NO: 643157 - RNA, 19 nt, Artificial Sequence
  Description of Artificial Sequence: Synthetic oligonucleotide
ccugcgaguccuggugggu

SEQ ID NO: 643158 - RNA, 19 nt, Artificial Sequence
  Description of Artificial Sequence: Synthetic oligonucleotide
cgugggccacuuggcuaug

SEQ ID NO: 643159 - RNA, 19 nt, Artificial Sequence
  Description of Artificial Sequence: Synthetic oligonucleotide
gcccugcuaguguccgguu

SEQ ID NO: 643160 - RNA, 19 nt, Artificial Sequence
  Description of Artificial Sequence: Synthetic oligonucleotide
cggacguccugagcagcgu

SEQ ID NO: 643161 - RNA, 19 nt, Artificial Sequence
  Description of Artificial Sequence: Synthetic oligonucleotide
gccuggcggcugggccgac

SEQ ID NO: 643162 - RNA, 19 nt, Artificial Sequence
  Description of Artificial Sequence: Synthetic oligonucleotide
auuguuagaacauaaagcg

SEQ ID NO: 643163 - RNA, 19 nt, Artificial Sequence
  Description of Artificial Sequence: Synthetic oligonucleotide
uuauaagacaauaugacag

SEQ ID NO: 643164 - RNA, 19 nt, Artificial Sequence
  Description of Artificial Sequence: Synthetic oligonucleotide
cauuguaugauccagacgg

SEQ ID NO: 643165 - RNA, 19 nt, Artificial Sequence
  Description of Artificial Sequence: Synthetic oligonucleotide
aaacuggacauucuaaacc

SEQ ID NO: 643166 - RNA, 19 nt, Artificial Sequence
  Description of Artificial Sequence: Synthetic oligonucleotide
ugugcuaucaucuauccgg

SEQ ID NO: 643167 - RNA, 19 nt, Artificial Sequence
  Description of Artificial Sequence: Synthetic oligonucleotide
uaaaucuauuuuaugaggg

SEQ ID NO: 643168 - RNA, 19 nt, Artificial Sequence
  Description of Artificial Sequence: Synthetic oligonucleotide
ucuuguacaauuaagacaa

SEQ ID NO: 643169 - RNA, 19 nt, Artificial Sequence
  Description of Artificial Sequence: Synthetic oligonucleotide
uauaacaagacuuuagggc

SEQ ID NO: 643170 - RNA, 19 nt, Artificial Sequence
  Description of Artificial Sequence: Synthetic oligonucleotide
aaagguauuacucugaauu

SEQ ID NO: 643171 - RNA, 19 nt, Artificial Sequence
  Description of Artificial Sequence: Synthetic oligonucleotide
uguuagaacauaaagcgag

SEQ ID NO: 643172 - RNA, 19 nt, Artificial Sequence
  Description of Artificial Sequence: Synthetic oligonucleotide
ugaauuaccaagaauguga

SEQ ID NO: 643173 - RNA, 19 nt, Artificial Sequence
  Description of Artificial Sequence: Synthetic oligonucleotide
uuuaaacacguacagagca

SEQ ID NO: 643174 - RNA, 19 nt, Artificial Sequence
  Description of Artificial Sequence: Synthetic oligonucleotide
acccguaucaacuuguucc

SEQ ID NO: 643175 - RNA, 19 nt, Artificial Sequence
  Description of Artificial Sequence: Synthetic oligonucleotide
aacugaacggaacaggaag

SEQ ID NO: 643176 - RNA, 19 nt, Artificial Sequence
  Description of Artificial Sequence: Synthetic oligonucleotide
uguucuacuacuaggcagg

SEQ ID NO: 643177 - RNA, 19 nt, Artificial Sequence
  Description of Artificial Sequence: Synthetic oligonucleotide
aaguccaucggucauguag

SEQ ID NO: 643178 - RNA, 19 nt, Artificial Sequence
  Description of Artificial Sequence: Synthetic oligonucleotide
uauauauuccgguaguuug

SEQ ID NO: 643179 - RNA, 19 nt, Artificial Sequence
  Description of Artificial Sequence: Synthetic oligonucleotide
auauaacaagacuuuaggg

SEQ ID NO: 643180 - RNA, 19 nt, Artificial Sequence
  Description of Artificial Sequence: Synthetic oligonucleotide
agagaaauacacucauugc

SEQ ID NO: 643181 - RNA, 19 nt, Artificial Sequence
  Description of Artificial Sequence: Synthetic oligonucleotide
auugcauuaauaucauggg

SEQ ID NO: 643182 - RNA, 19 nt, Artificial Sequence
  Description of Artificial Sequence: Synthetic oligonucleotide
ugaucuaaaaucuuguaaa

SEQ ID NO: 643183 - RNA, 19 nt, Artificial Sequence
  Description of Artificial Sequence: Synthetic oligonucleotide
ugcuaguuagaaaugaucu

SEQ ID NO: 643184 - RNA, 19 nt, Artificial Sequence
  Description of Artificial Sequence: Synthetic oligonucleotide
auaacaagacuuuagggcu

SEQ ID NO: 643185 - RNA, 19 nt, Artificial Sequence
  Description of Artificial Sequence: Synthetic oligonucleotide
aagguauuacucugaauuc

SEQ ID NO: 643186 - RNA, 19 nt, Artificial Sequence
  Description of Artificial Sequence: Synthetic oligonucleotide
uggauuauuccuucaauag

SEQ ID NO: 643187 - RNA, 19 nt, Artificial Sequence
  Description of Artificial Sequence: Synthetic oligonucleotide
agagacauccauuauaaga

SEQ ID NO: 643188 - RNA, 19 nt, Artificial Sequence
  Description of Artificial Sequence: Synthetic oligonucleotide
ucuuaccuugcuaaugugg

SEQ ID NO: 643189 - RNA, 19 nt, Artificial Sequence
  Description of Artificial Sequence: Synthetic oligonucleotide
gucaguaugaguuugguga

SEQ ID NO: 643190 - RNA, 19 nt, Artificial Sequence
  Description of Artificial Sequence: Synthetic oligonucleotide
aaugugaacugguauagaa

SEQ ID NO: 643191 - RNA, 19 nt, Artificial Sequence
  Description of Artificial Sequence: Synthetic oligonucleotide
auuaucuugguccagugga

SEQ ID NO: 643192 - RNA, 19 nt, Artificial Sequence
  Description of Artificial Sequence: Synthetic oligonucleotide
auuauuguaaggucccuag

SEQ ID NO: 643193 - RNA, 19 nt, Artificial Sequence
  Description of Artificial Sequence: Synthetic oligonucleotide
uccaaguauagcuacaacu

SEQ ID NO: 643194 - RNA, 19 nt, Artificial Sequence
  Description of Artificial Sequence: Synthetic oligonucleotide
uaugauaagaagacuaaua

SEQ ID NO: 643195 - RNA, 19 nt, Artificial Sequence
  Description of Artificial Sequence: Synthetic oligonucleotide
ucauugcuaaaucuguugc

SEQ ID NO: 643196 - RNA, 19 nt, Artificial Sequence
  Description of Artificial Sequence: Synthetic oligonucleotide
agacuaagcuguuuugggc

SEQ ID NO: 643197 - RNA, 19 nt, Artificial Sequence
  Description of Artificial Sequence: Synthetic oligonucleotide
aauaucauggguugggguu

SEQ ID NO: 643198 - RNA, 19 nt, Artificial Sequence
  Description of Artificial Sequence: Synthetic oligonucleotide
uguaugauccagacggucc

SEQ ID NO: 643199 - RNA, 19 nt, Artificial Sequence
  Description of Artificial Sequence: Synthetic oligonucleotide
uguguuuauaugcugccca

SEQ ID NO: 643200 - RNA, 19 nt, Artificial Sequence
  Description of Artificial Sequence: Synthetic oligonucleotide
gaacuguucuacuacuagg

SEQ ID NO: 643201 - RNA, 19 nt, Artificial Sequence
  Description of Artificial Sequence: Synthetic oligonucleotide
acaauuuacagcuaugaua

SEQ ID NO: 643202 - RNA, 19 nt, Artificial Sequence
  Description of Artificial Sequence: Synthetic oligonucleotide
uaugcugcccaacuuaaug

SEQ ID NO: 643203 - RNA, 19 nt, Artificial Sequence
  Description of Artificial Sequence: Synthetic oligonucleotide
aauuccuaaauaacaauga

SEQ ID NO: 643204 - RNA, 19 nt, Artificial Sequence
  Description of Artificial Sequence: Synthetic oligonucleotide
aaacaauuuacagcuauga

SEQ ID NO: 643205 - RNA, 19 nt, Artificial Sequence
  Description of Artificial Sequence: Synthetic oligonucleotide
cuuaccuugcuaauguggc

SEQ ID NO: 643206 - RNA, 19 nt, Artificial Sequence
  Description of Artificial Sequence: Synthetic oligonucleotide
uguaugguaauuguuagaa

SEQ ID NO: 643207 - RNA, 19 nt, Artificial Sequence
  Description of Artificial Sequence: Synthetic oligonucleotide
ggcucuauuaucuuggucc

SEQ ID NO: 643208 - RNA, 19 nt, Artificial Sequence
  Description of Artificial Sequence: Synthetic oligonucleotide
aauaugacagcagaacccu

SEQ ID NO: 643209 - RNA, 19 nt, Artificial Sequence
  Description of Artificial Sequence: Synthetic oligonucleotide
aagaauccugcaaagaucu

SEQ ID NO: 643210 - RNA, 19 nt, Artificial Sequence
  Description of Artificial Sequence: Synthetic oligonucleotide
uguaaggucccuaguauga

SEQ ID NO: 643211 - RNA, 19 nt, Artificial Sequence
  Description of Artificial Sequence: Synthetic oligonucleotide
gaauucaggaacaggaggc

SEQ ID NO: 643212 - RNA, 19 nt, Artificial Sequence
  Description of Artificial Sequence: Synthetic oligonucleotide
aaugaauuaccaagaaugu

SEQ ID NO: 643213 - RNA, 19 nt, Artificial Sequence
  Description of Artificial Sequence: Synthetic oligonucleotide
acggacauaauuaaauuuc

SEQ ID NO: 643214 - RNA, 19 nt, Artificial Sequence
  Description of Artificial Sequence: Synthetic oligonucleotide
aacggacauaauuaaauuu

SEQ ID NO: 643215 - RNA, 19 nt, Artificial Sequence
  Description of Artificial Sequence: Synthetic oligonucleotide
uaaggaacuguucuacuac

SEQ ID NO: 643216 - RNA, 19 nt, Artificial Sequence
  Description of Artificial Sequence: Synthetic oligonucleotide
ucccgcuccaagaaaaggg

SEQ ID NO: 643217 - RNA, 19 nt, Artificial Sequence
  Description of Artificial Sequence: Synthetic oligonucleotide
uuccagaauuaaaauaaga

SEQ ID NO: 643218 - RNA, 19 nt, Artificial Sequence
  Description of Artificial Sequence: Synthetic oligonucleotide
gacaguaaagaaugaguug

SEQ ID NO: 643219 - RNA, 19 nt, Artificial Sequence
  Description of Artificial Sequence: Synthetic oligonucleotide
aagacaguaaagaaugagu

SEQ ID NO: 643220 - RNA, 19 nt, Artificial Sequence
  Description of Artificial Sequence: Synthetic oligonucleotide
uuccuaaauaacaaugaau

SEQ ID NO: 643221 - RNA, 19 nt, Artificial Sequence
  Description of Artificial Sequence: Synthetic oligonucleotide
uaugagggaaauuuauuaa

SEQ ID NO: 643222 - RNA, 19 nt, Artificial Sequence
  Description of Artificial Sequence: Synthetic oligonucleotide
auucuuaccuugcuaaugu

SEQ ID NO: 643223 - RNA, 19 nt, Artificial Sequence
  Description of Artificial Sequence: Synthetic oligonucleotide
auagcuacaacugaacgga

SEQ ID NO: 643224 - RNA, 19 nt, Artificial Sequence
  Description of Artificial Sequence: Synthetic oligonucleotide
uuaauaucauggguugggg

SEQ ID NO: 643225 - RNA, 19 nt, Artificial Sequence
  Description of Artificial Sequence: Synthetic oligonucleotide
aaugaucuaaaaucuugua

SEQ ID NO: 643226 - RNA, 19 nt, Artificial Sequence
  Description of Artificial Sequence: Synthetic oligonucleotide
augaucuaaaaucuuguaa

SEQ ID NO: 643227 - RNA, 19 nt, Artificial Sequence
  Description of Artificial Sequence: Synthetic oligonucleotide
uuauaugcugcccaacuua

SEQ ID NO: 643228 - RNA, 19 nt, Artificial Sequence
  Description of Artificial Sequence: Synthetic oligonucleotide
agaagaaacggugcgcggc

SEQ ID NO: 643229 - RNA, 19 nt, Artificial Sequence
  Description of Artificial Sequence: Synthetic oligonucleotide
caugcaguucuaaccaugg

SEQ ID NO: 643230 - RNA, 19 nt, Artificial Sequence
  Description of Artificial Sequence: Synthetic oligonucleotide
uccauuacuggugggauag

SEQ ID NO: 643231 - RNA, 19 nt, Artificial Sequence
  Description of Artificial Sequence: Synthetic oligonucleotide
gauacaaucccaucuguaa

SEQ ID NO: 643232 - RNA, 19 nt, Artificial Sequence
  Description of Artificial Sequence: Synthetic oligonucleotide
gaugugcuaucaucuaucc

SEQ ID NO: 643233 - RNA, 19 nt, Artificial Sequence
  Description of Artificial Sequence: Synthetic oligonucleotide
uacaacugaacggaacagg

SEQ ID NO: 643234 - RNA, 19 nt, Artificial Sequence
  Description of Artificial Sequence: Synthetic oligonucleotide
gaagaaacggugcgcggcg

SEQ ID NO: 643235 - RNA, 19 nt, Artificial Sequence
  Description of Artificial Sequence: Synthetic oligonucleotide
ucaucuauccggcugccac

SEQ ID NO: 643236 - RNA, 19 nt, Artificial Sequence
  Description of Artificial Sequence: Synthetic oligonucleotide
gaguccucaccauuuaagc

SEQ ID NO: 643237 - RNA, 19 nt, Artificial Sequence
  Description of Artificial Sequence: Synthetic oligonucleotide
uauauuccgguaguuuggg

SEQ ID NO: 643238 - RNA, 19 nt, Artificial Sequence
  Description of Artificial Sequence: Synthetic oligonucleotide
uucuguauuugcugcaaug

SEQ ID NO: 643239 - RNA, 19 nt, Artificial Sequence
  Description of Artificial Sequence: Synthetic oligonucleotide
aguauagcuacaacugaac

SEQ ID NO: 643240 - RNA, 19 nt, Artificial Sequence
  Description of Artificial Sequence: Synthetic oligonucleotide
cuguucuacuacuaggcag

SEQ ID NO: 643241 - RNA, 19 nt, Artificial Sequence
  Description of Artificial Sequence: Synthetic oligonucleotide
ucuaaccauggcacaaugc

SEQ ID NO: 643242 - RNA, 19 nt, Artificial Sequence
  Description of Artificial Sequence: Synthetic oligonucleotide
acauaaagcgaggucuacc

SEQ ID NO: 643243 - RNA, 19 nt, Artificial Sequence
  Description of Artificial Sequence: Synthetic oligonucleotide
cagacuaagcuguuuuggg

SEQ ID NO: 643244 - RNA, 19 nt, Artificial Sequence
  Description of Artificial Sequence: Synthetic oligonucleotide
aguccaucggucauguagc

SEQ ID NO: 643245 - RNA, 19 nt, Artificial Sequence
  Description of Artificial Sequence: Synthetic oligonucleotide
uagaaagguauuacucuga

SEQ ID NO: 643246 - RNA, 19 nt, Artificial Sequence
  Description of Artificial Sequence: Synthetic oligonucleotide
uuggauuauuccuucaaua

SEQ ID NO: 643247 - RNA, 19 nt, Artificial Sequence
  Description of Artificial Sequence: Synthetic oligonucleotide
aauguccauuacugguggg

SEQ ID NO: 643248 - RNA, 19 nt, Artificial Sequence
  Description of Artificial Sequence: Synthetic oligonucleotide
uaaacccguaucaacuugu

SEQ ID NO: 643249 - RNA, 19 nt, Artificial Sequence
  Description of Artificial Sequence: Synthetic oligonucleotide
ugcuaaaucuguugcuugc

SEQ ID NO: 643250 - RNA, 19 nt, Artificial Sequence
  Description of Artificial Sequence: Synthetic oligonucleotide
aagaagacuaauacaggca

SEQ ID NO: 643251 - RNA, 19 nt, Artificial Sequence
  Description of Artificial Sequence: Synthetic oligonucleotide
uauucuuaccuugcuaaug

SEQ ID NO: 643252 - RNA, 19 nt, Artificial Sequence
  Description of Artificial Sequence: Synthetic oligonucleotide
uugcuaguuagaaaugauc

SEQ ID NO: 643253 - RNA, 19 nt, Artificial Sequence
  Description of Artificial Sequence: Synthetic oligonucleotide
gacuaagcuguuuugggca

SEQ ID NO: 643254 - RNA, 19 nt, Artificial Sequence
  Description of Artificial Sequence: Synthetic oligonucleotide
aacauaaagcgaggucuac

SEQ ID NO: 643255 - RNA, 19 nt, Artificial Sequence
  Description of Artificial Sequence: Synthetic oligonucleotide
ucuguauuugcugcaaugu

SEQ ID NO: 643256 - RNA, 19 nt, Artificial Sequence
  Description of Artificial Sequence: Synthetic oligonucleotide
uagcuagacuuuaaggaac

SEQ ID NO: 643257 - RNA, 19 nt, Artificial Sequence
  Description of Artificial Sequence: Synthetic oligonucleotide
acauuguaugauccagacg

SEQ ID NO: 643258 - RNA, 19 nt, Artificial Sequence
  Description of Artificial Sequence: Synthetic oligonucleotide
cuaaccauggcacaaugca

SEQ ID NO: 643259 - RNA, 19 nt, Artificial Sequence
  Description of Artificial Sequence: Synthetic oligonucleotide
gcacugauaaaauaaaauc

SEQ ID NO: 643260 - RNA, 19 nt, Artificial Sequence
  Description of Artificial Sequence: Synthetic oligonucleotide
uuaaggaacuguucuacua

SEQ ID NO: 643261 - RNA, 19 nt, Artificial Sequence
  Description of Artificial Sequence: Synthetic oligonucleotide
cucuuguacaauuaagaca

SEQ ID NO: 643262 - RNA, 19 nt, Artificial Sequence
  Description of Artificial Sequence: Synthetic oligonucleotide
guugggguuucuuacauga

SEQ ID NO: 643263 - RNA, 19 nt, Artificial Sequence
  Description of Artificial Sequence: Synthetic oligonucleotide
aacccguaucaacuuguuc

SEQ ID NO: 643264 - RNA, 19 nt, Artificial Sequence
  Description of Artificial Sequence: Synthetic oligonucleotide
auuccuaaauaacaaugaa

SEQ ID NO: 643265 - RNA, 19 nt, Artificial Sequence
  Description of Artificial Sequence: Synthetic oligonucleotide
auauauuccgguaguuugg

SEQ ID NO: 643266 - RNA, 19 nt, Artificial Sequence
  Description of Artificial Sequence: Synthetic oligonucleotide
uguuggauuauuccuucaa

SEQ ID NO: 643267 - RNA, 19 nt, Artificial Sequence
  Description of Artificial Sequence: Synthetic oligonucleotide
ugaucagauugauuccaag

SEQ ID NO: 643268 - RNA, 19 nt, Artificial Sequence
  Description of Artificial Sequence: Synthetic oligonucleotide
uccuaaauccaucuacgau

SEQ ID NO: 643269 - RNA, 19 nt, Artificial Sequence
  Description of Artificial Sequence: Synthetic oligonucleotide
uugcuaauguggccaagag

SEQ ID NO: 643270 - RNA, 19 nt, Artificial Sequence
  Description of Artificial Sequence: Synthetic oligonucleotide
ucuauuaucuugguccagu

SEQ ID NO: 643271 - RNA, 19 nt, Artificial Sequence
  Description of Artificial Sequence: Synthetic oligonucleotide
acaaugaauuaccaagaau

SEQ ID NO: 643272 - RNA, 19 nt, Artificial Sequence
  Description of Artificial Sequence: Synthetic oligonucleotide
gacuuuauauaacaagacu

SEQ ID NO: 643273 - RNA, 19 nt, Artificial Sequence
  Description of Artificial Sequence: Synthetic oligonucleotide
uacgauuuuguuuguuugu

SEQ ID NO: 643274 - RNA, 19 nt, Artificial Sequence
  Description of Artificial Sequence: Synthetic oligonucleotide
aaaugggcuuuacaaacua

SEQ ID NO: 643275 - RNA, 19 nt, Artificial Sequence
  Description of Artificial Sequence: Synthetic oligonucleotide
ggcauauauauuccgguag

SEQ ID NO: 643276 - RNA, 19 nt, Artificial Sequence
  Description of Artificial Sequence: Synthetic oligonucleotide
guuagaacauaaagcgagg

SEQ ID NO: 643277 - RNA, 19 nt, Artificial Sequence
  Description of Artificial Sequence: Synthetic oligonucleotide
gauagagacuggaggagag

SEQ ID NO: 643278 - RNA, 19 nt, Artificial Sequence
  Description of Artificial Sequence: Synthetic oligonucleotide
ccaaguauagcuacaacug

SEQ ID NO: 643279 - RNA, 19 nt, Artificial Sequence
  Description of Artificial Sequence: Synthetic oligonucleotide
agggaaacuguacuuccag

SEQ ID NO: 643280 - RNA, 19 nt, Artificial Sequence
  Description of Artificial Sequence: Synthetic oligonucleotide
ggauuauuccuucaauagc

SEQ ID NO: 643281 - RNA, 19 nt, Artificial Sequence
  Description of Artificial Sequence: Synthetic oligonucleotide
uggggauccaggaauugca

SEQ ID NO: 643282 - RNA, 19 nt, Artificial Sequence
  Description of Artificial Sequence: Synthetic oligonucleotide
ccuaaccuuaaauuuagag

SEQ ID NO: 643283 - RNA, 19 nt, Artificial Sequence
  Description of Artificial Sequence: Synthetic oligonucleotide
uguccuagaagcuggguua

SEQ ID NO: 643284 - RNA, 19 nt, Artificial Sequence
  Description of Artificial Sequence: Synthetic oligonucleotide
ucgcccuuacaaaaguggc

SEQ ID NO: 643285 - RNA, 19 nt, Artificial Sequence
  Description of Artificial Sequence: Synthetic oligonucleotide
acacguacagagcaugugu

SEQ ID NO: 643286 - RNA, 19 nt, Artificial Sequence
  Description of Artificial Sequence: Synthetic oligonucleotide
gacauucuaaacccguauc

SEQ ID NO: 643287 - RNA, 19 nt, Artificial Sequence
  Description of Artificial Sequence: Synthetic oligonucleotide
caugauuacauugaucaga

SEQ ID NO: 643288 - RNA, 19 nt, Artificial Sequence
  Description of Artificial Sequence: Synthetic oligonucleotide
accccugaauuauucuuac

SEQ ID NO: 643289 - RNA, 19 nt, Artificial Sequence
  Description of Artificial Sequence: Synthetic oligonucleotide
ugcuaauguggccaagagu

SEQ ID NO: 643290 - RNA, 19 nt, Artificial Sequence
  Description of Artificial Sequence: Synthetic oligonucleotide
aaagcgaggucuaccuuuc

SEQ ID NO: 643291 - RNA, 19 nt, Artificial Sequence
  Description of Artificial Sequence: Synthetic oligonucleotide
ugggcuuuacaaacuaaaa

SEQ ID NO: 643292 - RNA, 19 nt, Artificial Sequence
  Description of Artificial Sequence: Synthetic oligonucleotide
uuccuaaauccaucuacga

SEQ ID NO: 643293 - RNA, 19 nt, Artificial Sequence
  Description of Artificial Sequence: Synthetic oligonucleotide
ccaucggucauguagcugg

SEQ ID NO: 643294 - RNA, 19 nt, Artificial Sequence
  Description of Artificial Sequence: Synthetic oligonucleotide
ugcugcaauguccauuacu

SEQ ID NO: 643295 - RNA, 19 nt, Artificial Sequence
  Description of Artificial Sequence: Synthetic oligonucleotide
aaguauagcuacaacugaa

SEQ ID NO: 643296 - RNA, 19 nt, Artificial Sequence
  Description of Artificial Sequence: Synthetic oligonucleotide
augaauuaccaagaaugug

SEQ ID NO: 643297 - RNA, 19 nt, Artificial Sequence
  Description of Artificial Sequence: Synthetic oligonucleotide
aaacauuguaugauccaga

SEQ ID NO: 643298 - RNA, 19 nt, Artificial Sequence
  Description of Artificial Sequence: Synthetic oligonucleotide
aguccucaccauuuaagcu

SEQ ID NO: 643299 - RNA, 19 nt, Artificial Sequence
  Description of Artificial Sequence: Synthetic oligonucleotide
gaacggaacaggaaguuuc

SEQ ID NO: 643300 - RNA, 19 nt, Artificial Sequence
  Description of Artificial Sequence: Synthetic oligonucleotide
gaguagguacucuuguaca

SEQ ID NO: 643301 - RNA, 19 nt, Artificial Sequence
  Description of Artificial Sequence: Synthetic oligonucleotide
uccucaccauuuaagcucu

SEQ ID NO: 643302 - RNA, 19 nt, Artificial Sequence
  Description of Artificial Sequence: Synthetic oligonucleotide
agaaagguauuacucugaa

SEQ ID NO: 643303 - RNA, 19 nt, Artificial Sequence
  Description of Artificial Sequence: Synthetic oligonucleotide
uuaccuugcuaauguggcc

SEQ ID NO: 643304 - RNA, 19 nt, Artificial Sequence
  Description of Artificial Sequence: Synthetic oligonucleotide
agucaguaugaguuuggug

SEQ ID NO: 643305 - RNA, 19 nt, Artificial Sequence
  Description of Artificial Sequence: Synthetic oligonucleotide
uccuucaauagcuggugac

SEQ ID NO: 643306 - RNA, 19 nt, Artificial Sequence
  Description of Artificial Sequence: Synthetic oligonucleotide
caacccaagacuaagacau

SEQ ID NO: 643307 - RNA, 19 nt, Artificial Sequence
  Description of Artificial Sequence: Synthetic oligonucleotide
augugcuaucaucuauccg

SEQ ID NO: 643308 - RNA, 19 nt, Artificial Sequence
  Description of Artificial Sequence: Synthetic oligonucleotide
ugucgggacguguacuucc

SEQ ID NO: 643309 - RNA, 19 nt, Artificial Sequence
  Description of Artificial Sequence: Synthetic oligonucleotide
agcagaacccuagcuagac

SEQ ID NO: 643310 - RNA, 19 nt, Artificial Sequence
  Description of Artificial Sequence: Synthetic oligonucleotide
guagagacauccauuauaa

SEQ ID NO: 643311 - RNA, 19 nt, Artificial Sequence
  Description of Artificial Sequence: Synthetic oligonucleotide
uaccuugcuaauguggcca

SEQ ID NO: 643312 - RNA, 19 nt, Artificial Sequence
  Description of Artificial Sequence: Synthetic oligonucleotide
aauuauuguaaggucccua

SEQ ID NO: 643313 - RNA, 19 nt, Artificial Sequence
  Description of Artificial Sequence: Synthetic oligonucleotide
cuucucgucauuggcaacc

SEQ ID NO: 643314 - RNA, 19 nt, Artificial Sequence
  Description of Artificial Sequence: Synthetic oligonucleotide
uuccccgagaccuguaucu

SEQ ID NO: 643315 - RNA, 19 nt, Artificial Sequence
  Description of Artificial Sequence: Synthetic oligonucleotide
auuccgguaguuuggggcu

SEQ ID NO: 643316 - RNA, 19 nt, Artificial Sequence
  Description of Artificial Sequence: Synthetic oligonucleotide
ucagaccccugaauuauuc

SEQ ID NO: 643317 - RNA, 19 nt, Artificial Sequence
  Description of Artificial Sequence: Synthetic oligonucleotide
aguaugaguuuggugaccu

SEQ ID NO: 643318 - RNA, 19 nt, Artificial Sequence
  Description of Artificial Sequence: Synthetic oligonucleotide
aacacguacagagcaugug

SEQ ID NO: 643319 - RNA, 19 nt, Artificial Sequence
  Description of Artificial Sequence: Synthetic oligonucleotide
uguuuugggcaugauuaca

SEQ ID NO: 643320 - RNA, 19 nt, Artificial Sequence
  Description of Artificial Sequence: Synthetic oligonucleotide
agacauccauuauaagaca

SEQ ID NO: 643321 - RNA, 19 nt, Artificial Sequence
  Description of Artificial Sequence: Synthetic oligonucleotide
gacuaauacaggcagcccu

SEQ ID NO: 643322 - RNA, 19 nt, Artificial Sequence
  Description of Artificial Sequence: Synthetic oligonucleotide
agacuaauacaggcagccc

SEQ ID NO: 643323 - RNA, 19 nt, Artificial Sequence
  Description of Artificial Sequence: Synthetic oligonucleotide
auuuaagcucuuccuacau

SEQ ID NO: 643324 - RNA, 19 nt, Artificial Sequence
  Description of Artificial Sequence: Synthetic oligonucleotide
cuaaacccguaucaacuug

SEQ ID NO: 643325 - RNA, 19 nt, Artificial Sequence
  Description of Artificial Sequence: Synthetic oligonucleotide
gggcuuuacaaacuaaaac

SEQ ID NO: 643326 - RNA, 19 nt, Artificial Sequence
  Description of Artificial Sequence: Synthetic oligonucleotide
uccucaauaaagccugauu

SEQ ID NO: 643327 - RNA, 19 nt, Artificial Sequence
  Description of Artificial Sequence: Synthetic oligonucleotide
ugacagcagaacccuagcu

SEQ ID NO: 643328 - RNA, 19 nt, Artificial Sequence
  Description of Artificial Sequence: Synthetic oligonucleotide
uuagagaaauacacucauu

SEQ ID NO: 643329 - RNA, 19 nt, Artificial Sequence
  Description of Artificial Sequence: Synthetic oligonucleotide
cuggggcauauauauuccg

SEQ ID NO: 643330 - RNA, 19 nt, Artificial Sequence
  Description of Artificial Sequence: Synthetic oligonucleotide
guccuaaccuuaaauuuag

SEQ ID NO: 643331 - RNA, 19 nt, Artificial Sequence
  Description of Artificial Sequence: Synthetic oligonucleotide
agcauguguaugguaauug

SEQ ID NO: 643332 - RNA, 19 nt, Artificial Sequence
  Description of Artificial Sequence: Synthetic oligonucleotide
uccgccacuguucgccucg

SEQ ID NO: 643333 - RNA, 19 nt, Artificial Sequence
  Description of Artificial Sequence: Synthetic oligonucleotide
ugguugcaagguaacugcc

SEQ ID NO: 643334 - RNA, 19 nt, Artificial Sequence
  Description of Artificial Sequence: Synthetic oligonucleotide
uuauucuuaccuugcuaau

SEQ ID NO: 643335 - RNA, 19 nt, Artificial Sequence
  Description of Artificial Sequence: Synthetic oligonucleotide
auauuccgguaguuugggg

SEQ ID NO: 643336 - RNA, 19 nt, Artificial Sequence
  Description of Artificial Sequence: Synthetic oligonucleotide
acaacugaacggaacagga

SEQ ID NO: 643337 - RNA, 19 nt, Artificial Sequence
  Description of Artificial Sequence: Synthetic oligonucleotide
gcucucugaagauaaagac

SEQ ID NO: 643338 - RNA, 19 nt, Artificial Sequence
  Description of Artificial Sequence: Synthetic oligonucleotide
ucuaccuuucccagacuaa

SEQ ID NO: 643339 - RNA, 19 nt, Artificial Sequence
  Description of Artificial Sequence: Synthetic oligonucleotide
cuaccuuucccagacuaag

SEQ ID NO: 643340 - RNA, 19 nt, Artificial Sequence
  Description of Artificial Sequence: Synthetic oligonucleotide
agaguccucaccauuuaag

SEQ ID NO: 643341 - RNA, 19 nt, Artificial Sequence
  Description of Artificial Sequence: Synthetic oligonucleotide
ccuagcuagacuuuaagga

SEQ ID NO: 643342 - RNA, 19 nt, Artificial Sequence
  Description of Artificial Sequence: Synthetic oligonucleotide
gaagcacugauaaaauaaa

SEQ ID NO: 643343 - RNA, 19 nt, Artificial Sequence
  Description of Artificial Sequence: Synthetic oligonucleotide
ugcgcggcgacagaggagc

SEQ ID NO: 643344 - RNA, 19 nt, Artificial Sequence
  Description of Artificial Sequence: Synthetic oligonucleotide
ugaccucgcccuuacaaaa

SEQ ID NO: 643345 - RNA, 19 nt, Artificial Sequence
  Description of Artificial Sequence: Synthetic oligonucleotide
gguauuacucugaauucag

SEQ ID NO: 643346 - RNA, 19 nt, Artificial Sequence
  Description of Artificial Sequence: Synthetic oligonucleotide
aacaagacuuuagggcucu

SEQ ID NO: 643347 - RNA, 19 nt, Artificial Sequence
  Description of Artificial Sequence: Synthetic oligonucleotide
guaugguaauuguuagaac

SEQ ID NO: 643348 - RNA, 19 nt, Artificial Sequence
  Description of Artificial Sequence: Synthetic oligonucleotide
cauuacuggugggauagag

SEQ ID NO: 643349 - RNA, 19 nt, Artificial Sequence
  Description of Artificial Sequence: Synthetic oligonucleotide
ugucauugcuaaaucuguu

SEQ ID NO: 643350 - RNA, 19 nt, Artificial Sequence
  Description of Artificial Sequence: Synthetic oligonucleotide
acuaauacaggcagcccug

SEQ ID NO: 643351 - RNA, 19 nt, Artificial Sequence
  Description of Artificial Sequence: Synthetic oligonucleotide
agaaacggugcgcggcgac

SEQ ID NO: 643352 - RNA, 19 nt, Artificial Sequence
  Description of Artificial Sequence: Synthetic oligonucleotide
uucuuaccuugcuaaugug

SEQ ID NO: 643353 - RNA, 19 nt, Artificial Sequence
  Description of Artificial Sequence: Synthetic oligonucleotide
ugcaagguaacugccggac

SEQ ID NO: 643354 - RNA, 19 nt, Artificial Sequence
  Description of Artificial Sequence: Synthetic oligonucleotide
agcuacaacugaacggaac

SEQ ID NO: 643355 - RNA, 19 nt, Artificial Sequence
  Description of Artificial Sequence: Synthetic oligonucleotide
caaacggacauaauuaaau

SEQ ID NO: 643356 - RNA, 19 nt, Artificial Sequence
  Description of Artificial Sequence: Synthetic oligonucleotide
gagcaaacggacauaauua

SEQ ID NO: 643357 - RNA, 19 nt, Artificial Sequence
  Description of Artificial Sequence: Synthetic oligonucleotide
caaguauagcuacaacuga

SEQ ID NO: 643358 - RNA, 19 nt, Artificial Sequence
  Description of Artificial Sequence: Synthetic oligonucleotide
auauauauuccgguaguuu

SEQ ID NO: 643359 - RNA, 19 nt, Artificial Sequence
  Description of Artificial Sequence: Synthetic oligonucleotide
aggauacaaucccaucugu

SEQ ID NO: 643360 - RNA, 19 nt, Artificial Sequence
  Description of Artificial Sequence: Synthetic oligonucleotide
aagucaguaugaguuuggu

SEQ ID NO: 643361 - RNA, 19 nt, Artificial Sequence
  Description of Artificial Sequence: Synthetic oligonucleotide
gggaaauuauuguaagguc

SEQ ID NO: 643362 - RNA, 19 nt, Artificial Sequence
  Description of Artificial Sequence: Synthetic oligonucleotide
uugaggauacaaucccauc

SEQ ID NO: 643363 - RNA, 19 nt, Artificial Sequence
  Description of Artificial Sequence: Synthetic oligonucleotide
aaaauguguugaugugcua

SEQ ID NO: 643364 - RNA, 19 nt, Artificial Sequence
  Description of Artificial Sequence: Synthetic oligonucleotide
ggguuugccgaguagaguc

SEQ ID NO: 643365 - RNA, 19 nt, Artificial Sequence
  Description of Artificial Sequence: Synthetic oligonucleotide
aaacggugcgcggcgacag

SEQ ID NO: 643366 - RNA, 19 nt, Artificial Sequence
  Description of Artificial Sequence: Synthetic oligonucleotide
caagacuuuagggcucugg

SEQ ID NO: 643367 - RNA, 19 nt, Artificial Sequence
  Description of Artificial Sequence: Synthetic oligonucleotide
cuacaacugaacggaacag

SEQ ID NO: 643368 - RNA, 19 nt, Artificial Sequence
  Description of Artificial Sequence: Synthetic oligonucleotide
caucuauccggcugccacc

SEQ ID NO: 643369 - RNA, 19 nt, Artificial Sequence
  Description of Artificial Sequence: Synthetic oligonucleotide
ccauuuaagcucuuccuac

SEQ ID NO: 643370 - RNA, 19 nt, Artificial Sequence
  Description of Artificial Sequence: Synthetic oligonucleotide
uagguacucuuguacaauu

SEQ ID NO: 643371 - RNA, 19 nt, Artificial Sequence
  Description of Artificial Sequence: Synthetic oligonucleotide
aaacacguacagagcaugu

SEQ ID NO: 643372 - RNA, 19 nt, Artificial Sequence
  Description of Artificial Sequence: Synthetic oligonucleotide
cauaaagcgaggucuaccu

SEQ ID NO: 643373 - RNA, 19 nt, Artificial Sequence
  Description of Artificial Sequence: Synthetic oligonucleotide
uggacauucuaaacccgua

SEQ ID NO: 643374 - RNA, 19 nt, Artificial Sequence
  Description of Artificial Sequence: Synthetic oligonucleotide
gaauuauucuuaccuugcu

SEQ ID NO: 643375 - RNA, 19 nt, Artificial Sequence
  Description of Artificial Sequence: Synthetic oligonucleotide
cuaguaugaaagacaguaa

SEQ ID NO: 643376 - RNA, 19 nt, Artificial Sequence
  Description of Artificial Sequence: Synthetic oligonucleotide
ucucagaccccugaauuau

SEQ ID NO: 643377 - RNA, 19 nt, Artificial Sequence
  Description of Artificial Sequence: Synthetic oligonucleotide
cuauccggcugccaccacc

SEQ ID NO: 643378 - RNA, 19 nt, Artificial Sequence
  Description of Artificial Sequence: Synthetic oligonucleotide
guaauuguuagaacauaaa

SEQ ID NO: 643379 - RNA, 19 nt, Artificial Sequence
  Description of Artificial Sequence: Synthetic oligonucleotide
agaagugguugcaagguaa

SEQ ID NO: 643380 - RNA, 19 nt, Artificial Sequence
  Description of Artificial Sequence: Synthetic oligonucleotide
gacauccauuauaagacaa

SEQ ID NO: 643381 - RNA, 19 nt, Artificial Sequence
  Description of Artificial Sequence: Synthetic oligonucleotide
gcugugaaagaagugguug

SEQ ID NO: 643382 - RNA, 19 nt, Artificial Sequence
  Description of Artificial Sequence: Synthetic oligonucleotide
cuaauacaggcagcccugg

SEQ ID NO: 643383 - RNA, 19 nt, Artificial Sequence
  Description of Artificial Sequence: Synthetic oligonucleotide
gaagugguugcaagguaac

SEQ ID NO: 643384 - RNA, 19 nt, Artificial Sequence
  Description of Artificial Sequence: Synthetic oligonucleotide
auuccaaguauagcuacaa

SEQ ID NO: 643385 - RNA, 19 nt, Artificial Sequence
  Description of Artificial Sequence: Synthetic oligonucleotide
uuagagucucagaccccug

SEQ ID NO: 643386 - RNA, 19 nt, Artificial Sequence
  Description of Artificial Sequence: Synthetic oligonucleotide
acuacuaggcaggagcaaa

SEQ ID NO: 643387 - RNA, 19 nt, Artificial Sequence
  Description of Artificial Sequence: Synthetic oligonucleotide
aguccuaaccuuaaauuua

SEQ ID NO: 643388 - RNA, 19 nt, Artificial Sequence
  Description of Artificial Sequence: Synthetic oligonucleotide
agaccccugaauuauucuu

SEQ ID NO: 643389 - RNA, 19 nt, Artificial Sequence
  Description of Artificial Sequence: Synthetic oligonucleotide
gguagagacauccauuaua

SEQ ID NO: 643390 - RNA, 19 nt, Artificial Sequence
  Description of Artificial Sequence: Synthetic oligonucleotide
acuaagcuguuuugggcau

SEQ ID NO: 643391 - RNA, 19 nt, Artificial Sequence
  Description of Artificial Sequence: Synthetic oligonucleotide
uaauacaggcagcccuggu

SEQ ID NO: 643392 - RNA, 19 nt, Artificial Sequence
  Description of Artificial Sequence: Synthetic oligonucleotide
cccuagcuagacuuuaagg

SEQ ID NO: 643393 - RNA, 19 nt, Artificial Sequence
  Description of Artificial Sequence: Synthetic oligonucleotide
uuguaugauccagacgguc

SEQ ID NO: 643394 - RNA, 19 nt, Artificial Sequence
  Description of Artificial Sequence: Synthetic oligonucleotide
acugaacggaacaggaagu

SEQ ID NO: 643395 - RNA, 19 nt, Artificial Sequence
  Description of Artificial Sequence: Synthetic oligonucleotide
aagugguugcaagguaacu

SEQ ID NO: 643396 - RNA, 19 nt, Artificial Sequence
  Description of Artificial Sequence: Synthetic oligonucleotide
cuacuacuaggcaggagca

SEQ ID NO: 643397 - RNA, 19 nt, Artificial Sequence
  Description of Artificial Sequence: Synthetic oligonucleotide
gguaauuguuagaacauaa

SEQ ID NO: 643398 - RNA, 19 nt, Artificial Sequence
  Description of Artificial Sequence: Synthetic oligonucleotide
caucaagcccugucugacc

SEQ ID NO: 643399 - RNA, 19 nt, Artificial Sequence
  Description of Artificial Sequence: Synthetic oligonucleotide
ugguaauuguuagaacaua

SEQ ID NO: 643400 - RNA, 19 nt, Artificial Sequence
  Description of Artificial Sequence: Synthetic oligonucleotide
ccuaguaugaaagacagua

SEQ ID NO: 643401 - RNA, 19 nt, Artificial Sequence
  Description of Artificial Sequence: Synthetic oligonucleotide
gcaguucuaaccauggcac

SEQ ID NO: 643402 - RNA, 19 nt, Artificial Sequence
  Description of Artificial Sequence: Synthetic oligonucleotide
uuuugggcaugauuacauu

SEQ ID NO: 643403 - RNA, 19 nt, Artificial Sequence
  Description of Artificial Sequence: Synthetic oligonucleotide
agagcauguguaugguaau

SEQ ID NO: 643404 - RNA, 19 nt, Artificial Sequence
  Description of Artificial Sequence: Synthetic oligonucleotide
aaugggcuuuacaaacuaa

SEQ ID NO: 643405 - RNA, 19 nt, Artificial Sequence
  Description of Artificial Sequence: Synthetic oligonucleotide
gaauccugcaaagaucugu

SEQ ID NO: 643406 - RNA, 19 nt, Artificial Sequence
  Description of Artificial Sequence: Synthetic oligonucleotide
gauuccaaguauagcuaca

SEQ ID NO: 643407 - RNA, 19 nt, Artificial Sequence
  Description of Artificial Sequence: Synthetic oligonucleotide
aguagaguccucaccauuu

SEQ ID NO: 643408 - RNA, 19 nt, Artificial Sequence
  Description of Artificial Sequence: Synthetic oligonucleotide
auccauuauaagacaauau

SEQ ID NO: 643409 - RNA, 19 nt, Artificial Sequence
  Description of Artificial Sequence: Synthetic oligonucleotide
uccaguggauugcuaguua

SEQ ID NO: 643410 - RNA, 19 nt, Artificial Sequence
  Description of Artificial Sequence: Synthetic oligonucleotide
gcccuuacaaaaguggcag

SEQ ID NO: 643411 - RNA, 19 nt, Artificial Sequence
  Description of Artificial Sequence: Synthetic oligonucleotide
auugcuaguuagaaaugau

SEQ ID NO: 643412 - RNA, 19 nt, Artificial Sequence
  Description of Artificial Sequence: Synthetic oligonucleotide
aucccgcuccaagaaaagg

SEQ ID NO: 643413 - RNA, 19 nt, Artificial Sequence
  Description of Artificial Sequence: Synthetic oligonucleotide
augggcuuuacaaacuaaa

SEQ ID NO: 643414 - RNA, 19 nt, Artificial Sequence
  Description of Artificial Sequence: Synthetic oligonucleotide
ugaccugucgggacgugua

SEQ ID NO: 643415 - RNA, 19 nt, Artificial Sequence
  Description of Artificial Sequence: Synthetic oligonucleotide
uggcucuauuaucuugguc

SEQ ID NO: 643416 - RNA, 19 nt, Artificial Sequence
  Description of Artificial Sequence: Synthetic oligonucleotide
agcuagacuuuaaggaacu

SEQ ID NO: 643417 - RNA, 19 nt, Artificial Sequence
  Description of Artificial Sequence: Synthetic oligonucleotide
gggaaauuuauuaaaucua

SEQ ID NO: 643418 - RNA, 19 nt, Artificial Sequence
  Description of Artificial Sequence: Synthetic oligonucleotide
uucuacuacuaggcaggag

SEQ ID NO: 643419 - RNA, 19 nt, Artificial Sequence
  Description of Artificial Sequence: Synthetic oligonucleotide
ccagacuaagcuguuuugg

SEQ ID NO: 643420 - RNA, 19 nt, Artificial Sequence
  Description of Artificial Sequence: Synthetic oligonucleotide
aggucccuaguaugaaaga

SEQ ID NO: 643421 - RNA, 19 nt, Artificial Sequence
  Description of Artificial Sequence: Synthetic oligonucleotide
cauccauuauaagacaaua

SEQ ID NO: 643422 - RNA, 19 nt, Artificial Sequence
  Description of Artificial Sequence: Synthetic oligonucleotide
guauagaagcacugauaaa

SEQ ID NO: 643423 - RNA, 19 nt, Artificial Sequence
  Description of Artificial Sequence: Synthetic oligonucleotide
cuugcuaauguggccaaga

SEQ ID NO: 643424 - RNA, 19 nt, Artificial Sequence
  Description of Artificial Sequence: Synthetic oligonucleotide
ucuucucgucauuggcaac

SEQ ID NO: 643425 - RNA, 19 nt, Artificial Sequence
  Description of Artificial Sequence: Synthetic oligonucleotide
gugcuaucaucuauccggc

SEQ ID NO: 643426 - RNA, 19 nt, Artificial Sequence
  Description of Artificial Sequence: Synthetic oligonucleotide
acgauuuuguuuguuuguu

SEQ ID NO: 643427 - RNA, 19 nt, Artificial Sequence
  Description of Artificial Sequence: Synthetic oligonucleotide
uggguuacaauggcaucaa

SEQ ID NO: 643428 - RNA, 19 nt, Artificial Sequence
  Description of Artificial Sequence: Synthetic oligonucleotide
gagcucuggguuugccgag

SEQ ID NO: 643429 - RNA, 19 nt, Artificial Sequence
  Description of Artificial Sequence: Synthetic oligonucleotide
ccuucaauagcuggugacc

SEQ ID NO: 643430 - RNA, 19 nt, Artificial Sequence
  Description of Artificial Sequence: Synthetic oligonucleotide
gaaugugaacugguauaga

SEQ ID NO: 643431 - RNA, 19 nt, Artificial Sequence
  Description of Artificial Sequence: Synthetic oligonucleotide
ggagcaaacggacauaauu

SEQ ID NO: 643432 - RNA, 19 nt, Artificial Sequence
  Description of Artificial Sequence: Synthetic oligonucleotide
guguuuauaugcugcccaa

SEQ ID NO: 643433 - RNA, 19 nt, Artificial Sequence
  Description of Artificial Sequence: Synthetic oligonucleotide
auaucauggguugggguuu

SEQ ID NO: 643434 - RNA, 19 nt, Artificial Sequence
  Description of Artificial Sequence: Synthetic oligonucleotide
ugcuaucaucuauccggcu

SEQ ID NO: 643435 - RNA, 19 nt, Artificial Sequence
  Description of Artificial Sequence: Synthetic oligonucleotide
caguaugaguuuggugacc

SEQ ID NO: 643436 - RNA, 19 nt, Artificial Sequence
  Description of Artificial Sequence: Synthetic oligonucleotide
ggucccuaguaugaaagac

SEQ ID NO: 643437 - RNA, 19 nt, Artificial Sequence
  Description of Artificial Sequence: Synthetic oligonucleotide
caucggucauguagcuggc

SEQ ID NO: 643438 - RNA, 19 nt, Artificial Sequence
  Description of Artificial Sequence: Synthetic oligonucleotide
uagcuacaacugaacggaa

SEQ ID NO: 643439 - RNA, 19 nt, Artificial Sequence
  Description of Artificial Sequence: Synthetic oligonucleotide
auuguaugauccagacggu

SEQ ID NO: 643440 - RNA, 19 nt, Artificial Sequence
  Description of Artificial Sequence: Synthetic oligonucleotide
ucucggagcucuggguuug

SEQ ID NO: 643441 - RNA, 19 nt, Artificial Sequence
  Description of Artificial Sequence: Synthetic oligonucleotide
agguagagacauccauuau

SEQ ID NO: 643442 - RNA, 19 nt, Artificial Sequence
  Description of Artificial Sequence: Synthetic oligonucleotide
uccaucggucauguagcug

SEQ ID NO: 643443 - RNA, 19 nt, Artificial Sequence
  Description of Artificial Sequence: Synthetic oligonucleotide
gugaacugguauagaagca

SEQ ID NO: 643444 - RNA, 19 nt, Artificial Sequence
  Description of Artificial Sequence: Synthetic oligonucleotide
ucgggacguguacuucccc

SEQ ID NO: 643445 - RNA, 19 nt, Artificial Sequence
  Description of Artificial Sequence: Synthetic oligonucleotide
cccaagacuaagacaugcc

SEQ ID NO: 643446 - RNA, 19 nt, Artificial Sequence
  Description of Artificial Sequence: Synthetic oligonucleotide
aucuauccggcugccacca

SEQ ID NO: 643447 - RNA, 19 nt, Artificial Sequence
  Description of Artificial Sequence: Synthetic oligonucleotide
gggauagagacuggaggag

SEQ ID NO: 643448 - RNA, 19 nt, Artificial Sequence
  Description of Artificial Sequence: Synthetic oligonucleotide
uuugccgaguagaguccuc

SEQ ID NO: 643449 - RNA, 19 nt, Artificial Sequence
  Description of Artificial Sequence: Synthetic oligonucleotide
cauugcuaaaucuguugcu

SEQ ID NO: 643450 - RNA, 19 nt, Artificial Sequence
  Description of Artificial Sequence: Synthetic oligonucleotide
gaaaguccaucggucaugu

SEQ ID NO: 643451 - RNA, 19 nt, Artificial Sequence
  Description of Artificial Sequence: Synthetic oligonucleotide
gaacugguauagaagcacu

SEQ ID NO: 643452 - RNA, 19 nt, Artificial Sequence
  Description of Artificial Sequence: Synthetic oligonucleotide
uucucgucauuggcaaccu

SEQ ID NO: 643453 - RNA, 19 nt, Artificial Sequence
  Description of Artificial Sequence: Synthetic oligonucleotide
acuuccccgagaccuguau

SEQ ID NO: 643454 - RNA, 19 nt, Artificial Sequence
  Description of Artificial Sequence: Synthetic oligonucleotide
acuguacuuccagaauuaa

SEQ ID NO: 643455 - RNA, 19 nt, Artificial Sequence
  Description of Artificial Sequence: Synthetic oligonucleotide
cucuauuaucuugguccag

SEQ ID NO: 643456 - RNA, 19 nt, Artificial Sequence
  Description of Artificial Sequence: Synthetic oligonucleotide
ggauugcuaguuagaaaug

SEQ ID NO: 643457 - RNA, 19 nt, Artificial Sequence
  Description of Artificial Sequence: Synthetic oligonucleotide
aagaaacggugcgcggcga

SEQ ID NO: 643458 - RNA, 19 nt, Artificial Sequence
  Description of Artificial Sequence: Synthetic oligonucleotide
gcuaguuagaaaugaucua

SEQ ID NO: 643459 - RNA, 19 nt, Artificial Sequence
  Description of Artificial Sequence: Synthetic oligonucleotide
ccaagacuaagacaugcca

SEQ ID NO: 643460 - RNA, 19 nt, Artificial Sequence
  Description of Artificial Sequence: Synthetic oligonucleotide
ccuaaauccaucuacgauu

SEQ ID NO: 643461 - RNA, 19 nt, Artificial Sequence
  Description of Artificial Sequence: Synthetic oligonucleotide
agaaugaguugaggguccu

SEQ ID NO: 643462 - RNA, 19 nt, Artificial Sequence
  Description of Artificial Sequence: Synthetic oligonucleotide
gaccugucgggacguguac

SEQ ID NO: 643463 - RNA, 19 nt, Artificial Sequence
  Description of Artificial Sequence: Synthetic oligonucleotide
cacguacagagcaugugua

SEQ ID NO: 643464 - RNA, 19 nt, Artificial Sequence
  Description of Artificial Sequence: Synthetic oligonucleotide
cuguaaguccuaaccuuaa

SEQ ID NO: 643465 - RNA, 19 nt, Artificial Sequence
  Description of Artificial Sequence: Synthetic oligonucleotide
gaccccugaauuauucuua

SEQ ID NO: 643466 - RNA, 19 nt, Artificial Sequence
  Description of Artificial Sequence: Synthetic oligonucleotide
caacugaacggaacaggaa

SEQ ID NO: 643467 - RNA, 19 nt, Artificial Sequence
  Description of Artificial Sequence: Synthetic oligonucleotide
guuuugggcaugauuacau

SEQ ID NO: 643468 - RNA, 19 nt, Artificial Sequence
  Description of Artificial Sequence: Synthetic oligonucleotide
agguguggucuuuguuuca

SEQ ID NO: 643469 - RNA, 19 nt, Artificial Sequence
  Description of Artificial Sequence: Synthetic oligonucleotide
cuuccccgagaccuguauc

SEQ ID NO: 643470 - RNA, 19 nt, Artificial Sequence
  Description of Artificial Sequence: Synthetic oligonucleotide
cuggacauucuaaacccgu

SEQ ID NO: 643471 - RNA, 19 nt, Artificial Sequence
  Description of Artificial Sequence: Synthetic oligonucleotide
aaacccguaucaacuuguu

SEQ ID NO: 643472 - RNA, 19 nt, Artificial Sequence
  Description of Artificial Sequence: Synthetic oligonucleotide
cugcccaacuuaaugccaa

SEQ ID NO: 643473 - RNA, 19 nt, Artificial Sequence
  Description of Artificial Sequence: Synthetic oligonucleotide
cuaagcuguuuugggcaug

SEQ ID NO: 643474 - RNA, 19 nt, Artificial Sequence
  Description of Artificial Sequence: Synthetic oligonucleotide
caguucuaaccauggcaca

SEQ ID NO: 643475 - RNA, 19 nt, Artificial Sequence
  Description of Artificial Sequence: Synthetic oligonucleotide
gcauauauauuccgguagu

SEQ ID NO: 643476 - RNA, 19 nt, Artificial Sequence
  Description of Artificial Sequence: Synthetic oligonucleotide
ugcccaacuuaaugccaaa

SEQ ID NO: 643477 - RNA, 19 nt, Artificial Sequence
  Description of Artificial Sequence: Synthetic oligonucleotide
uggccaagaguagguacuc

SEQ ID NO: 643478 - RNA, 19 nt, Artificial Sequence
  Description of Artificial Sequence: Synthetic oligonucleotide
ggacguguacuuccccgag

SEQ ID NO: 643479 - RNA, 19 nt, Artificial Sequence
  Description of Artificial Sequence: Synthetic oligonucleotide
guagaguccucaccauuua

SEQ ID NO: 643480 - RNA, 19 nt, Artificial Sequence
  Description of Artificial Sequence: Synthetic oligonucleotide
gccgaguagaguccucacc

SEQ ID NO: 643481 - RNA, 19 nt, Artificial Sequence
  Description of Artificial Sequence: Synthetic oligonucleotide
cauguguaugguaauuguu

SEQ ID NO: 643482 - RNA, 19 nt, Artificial Sequence
  Description of Artificial Sequence: Synthetic oligonucleotide
ccgacuugguccccaaaag

SEQ ID NO: 643483 - RNA, 19 nt, Artificial Sequence
  Description of Artificial Sequence: Synthetic oligonucleotide
gcugaccucgcccuuacaa

SEQ ID NO: 643484 - RNA, 19 nt, Artificial Sequence
  Description of Artificial Sequence: Synthetic oligonucleotide
ggauagagacuggaggaga

SEQ ID NO: 643485 - RNA, 19 nt, Artificial Sequence
  Description of Artificial Sequence: Synthetic oligonucleotide
ggaccuguguuuucuagcu

SEQ ID NO: 643486 - RNA, 19 nt, Artificial Sequence
  Description of Artificial Sequence: Synthetic oligonucleotide
gaaacggugcgcggcgaca

SEQ ID NO: 643487 - RNA, 19 nt, Artificial Sequence
  Description of Artificial Sequence: Synthetic oligonucleotide
guccuagaagcuggguuac

SEQ ID NO: 643488 - RNA, 19 nt, Artificial Sequence
  Description of Artificial Sequence: Synthetic oligonucleotide
guugaggauacaaucccau

SEQ ID NO: 643489 - RNA, 19 nt, Artificial Sequence
  Description of Artificial Sequence: Synthetic oligonucleotide
uuccgguaguuuggggcug

SEQ ID NO: 643490 - RNA, 19 nt, Artificial Sequence
  Description of Artificial Sequence: Synthetic oligonucleotide
guaaggucccuaguaugaa

SEQ ID NO: 643491 - RNA, 19 nt, Artificial Sequence
  Description of Artificial Sequence: Synthetic oligonucleotide
ucccaucuguaaguccuaa

SEQ ID NO: 643492 - RNA, 19 nt, Artificial Sequence
  Description of Artificial Sequence: Synthetic oligonucleotide
uugggagggaagugaucuu

SEQ ID NO: 643493 - RNA, 19 nt, Artificial Sequence
  Description of Artificial Sequence: Synthetic oligonucleotide
gguugaggauacaauccca

SEQ ID NO: 643494 - RNA, 19 nt, Artificial Sequence
  Description of Artificial Sequence: Synthetic oligonucleotide
agaauccugcaaagaucug

SEQ ID NO: 643495 - RNA, 19 nt, Artificial Sequence
  Description of Artificial Sequence: Synthetic oligonucleotide
gcggcgacagaggagcccg

SEQ ID NO: 643496 - RNA, 19 nt, Artificial Sequence
  Description of Artificial Sequence: Synthetic oligonucleotide
ggggcauauauauuccggu

SEQ ID NO: 643497 - RNA, 19 nt, Artificial Sequence
  Description of Artificial Sequence: Synthetic oligonucleotide
uccuagaagcuggguuaca

SEQ ID NO: 643498 - RNA, 19 nt, Artificial Sequence
  Description of Artificial Sequence: Synthetic oligonucleotide
ggggauccaggaauugcag

SEQ ID NO: 643499 - RNA, 19 nt, Artificial Sequence
  Description of Artificial Sequence: Synthetic oligonucleotide
gggcauauauauuccggua

SEQ ID NO: 643500 - RNA, 19 nt, Artificial Sequence
  Description of Artificial Sequence: Synthetic oligonucleotide
ucuauccggcugccaccac

SEQ ID NO: 643501 - RNA, 19 nt, Artificial Sequence
  Description of Artificial Sequence: Synthetic oligonucleotide
gcauguguaugguaauugu

SEQ ID NO: 643502 - RNA, 19 nt, Artificial Sequence
  Description of Artificial Sequence: Synthetic oligonucleotide
gacuaagacaugccauguu

SEQ ID NO: 643503 - RNA, 19 nt, Artificial Sequence
  Description of Artificial Sequence: Synthetic oligonucleotide
cccagacuaagcuguuuug

SEQ ID NO: 643504 - RNA, 19 nt, Artificial Sequence
  Description of Artificial Sequence: Synthetic oligonucleotide
ucucgucauuggcaaccuu

SEQ ID NO: 643505 - RNA, 19 nt, Artificial Sequence
  Description of Artificial Sequence: Synthetic oligonucleotide
ggugcgcggcgacagagga

SEQ ID NO: 643506 - RNA, 19 nt, Artificial Sequence
  Description of Artificial Sequence: Synthetic oligonucleotide
aucuacgauuuuguuuguu

SEQ ID NO: 643507 - RNA, 19 nt, Artificial Sequence
  Description of Artificial Sequence: Synthetic oligonucleotide
accugucgggacguguacu

SEQ ID NO: 643508 - RNA, 19 nt, Artificial Sequence
  Description of Artificial Sequence: Synthetic oligonucleotide
gggacguguacuuccccga

SEQ ID NO: 643509 - RNA, 19 nt, Artificial Sequence
  Description of Artificial Sequence: Synthetic oligonucleotide
ucggccgcggauguccgaa

SEQ ID NO: 643510 - RNA, 19 nt, Artificial Sequence
  Description of Artificial Sequence: Synthetic oligonucleotide
ggacauucuaaacccguau

SEQ ID NO: 643511 - RNA, 19 nt, Artificial Sequence
  Description of Artificial Sequence: Synthetic oligonucleotide
gcaaacggacauaauuaaa

SEQ ID NO: 643512 - RNA, 19 nt, Artificial Sequence
  Description of Artificial Sequence: Synthetic oligonucleotide
ggauacaaucccaucugua

SEQ ID NO: 643513 - RNA, 19 nt, Artificial Sequence
  Description of Artificial Sequence: Synthetic oligonucleotide
auaugcugcccaacuuaau

SEQ ID NO: 643514 - RNA, 19 nt, Artificial Sequence
  Description of Artificial Sequence: Synthetic oligonucleotide
gccgacuugguccccaaaa

SEQ ID NO: 643515 - RNA, 19 nt, Artificial Sequence
  Description of Artificial Sequence: Synthetic oligonucleotide
gcuagacuuuaaggaacug

SEQ ID NO: 643516 - RNA, 19 nt, Artificial Sequence
  Description of Artificial Sequence: Synthetic oligonucleotide
ccucgcccuuacaaaagug

SEQ ID NO: 643517 - RNA, 19 nt, Artificial Sequence
  Description of Artificial Sequence: Synthetic oligonucleotide
ccaagaaugugaacuggua

SEQ ID NO: 643518 - RNA, 19 nt, Artificial Sequence
  Description of Artificial Sequence: Synthetic oligonucleotide
cccgcuccaagaaaaggga

SEQ ID NO: 643519 - RNA, 19 nt, Artificial Sequence
  Description of Artificial Sequence: Synthetic oligonucleotide
auaugacagcagaacccua

SEQ ID NO: 643520 - RNA, 19 nt, Artificial Sequence
  Description of Artificial Sequence: Synthetic oligonucleotide
cugucgggacguguacuuc

SEQ ID NO: 643521 - RNA, 19 nt, Artificial Sequence
  Description of Artificial Sequence: Synthetic oligonucleotide
cagaccccugaauuauucu

SEQ ID NO: 643522 - RNA, 19 nt, Artificial Sequence
  Description of Artificial Sequence: Synthetic oligonucleotide
acaagacuuuagggcucug

SEQ ID NO: 643523 - RNA, 19 nt, Artificial Sequence
  Description of Artificial Sequence: Synthetic oligonucleotide
auguggggauccaggaauu

SEQ ID NO: 643524 - RNA, 19 nt, Artificial Sequence
  Description of Artificial Sequence: Synthetic oligonucleotide
uccccgagaccuguaucuu

SEQ ID NO: 643525 - RNA, 19 nt, Artificial Sequence
  Description of Artificial Sequence: Synthetic oligonucleotide
gguccaguggauugcuagu

SEQ ID NO: 643526 - RNA, 19 nt, Artificial Sequence
  Description of Artificial Sequence: Synthetic oligonucleotide
gaggccgacuuggucccca

SEQ ID NO: 643527 - RNA, 19 nt, Artificial Sequence
  Description of Artificial Sequence: Synthetic oligonucleotide
aggagcaaacggacauaau

SEQ ID NO: 643528 - RNA, 19 nt, Artificial Sequence
  Description of Artificial Sequence: Synthetic oligonucleotide
guccaucggucauguagcu

SEQ ID NO: 643529 - RNA, 19 nt, Artificial Sequence
  Description of Artificial Sequence: Synthetic oligonucleotide
ccagacggucccagaacuc

SEQ ID NO: 643530 - RNA, 19 nt, Artificial Sequence
  Description of Artificial Sequence: Synthetic oligonucleotide
cccaaaagucaguaugagu

SEQ ID NO: 643531 - RNA, 19 nt, Artificial Sequence
  Description of Artificial Sequence: Synthetic oligonucleotide
cucggagcucuggguuugc

SEQ ID NO: 643532 - RNA, 19 nt, Artificial Sequence
  Description of Artificial Sequence: Synthetic oligonucleotide
gugcgcggcgacagaggag

SEQ ID NO: 643533 - RNA, 19 nt, Artificial Sequence
  Description of Artificial Sequence: Synthetic oligonucleotide
gcaagguaacugccggacu

SEQ ID NO: 643534 - RNA, 19 nt, Artificial Sequence
  Description of Artificial Sequence: Synthetic oligonucleotide
aggccgacuugguccccaa

SEQ ID NO: 643535 - RNA, 19 nt, Artificial Sequence
  Description of Artificial Sequence: Synthetic oligonucleotide
caucuggggcauauauauu

SEQ ID NO: 643536 - RNA, 19 nt, Artificial Sequence
  Description of Artificial Sequence: Synthetic oligonucleotide
cgcccuuacaaaaguggca

SEQ ID NO: 643537 - RNA, 19 nt, Artificial Sequence
  Description of Artificial Sequence: Synthetic oligonucleotide
gauucacaucuggggcaua

SEQ ID NO: 643538 - RNA, 19 nt, Artificial Sequence
  Description of Artificial Sequence: Synthetic oligonucleotide
cccgagaccuguaucuucu

SEQ ID NO: 643539 - RNA, 19 nt, Artificial Sequence
  Description of Artificial Sequence: Synthetic oligonucleotide
gcccaacuuaaugccaaaa

SEQ ID NO: 643540 - RNA, 19 nt, Artificial Sequence
  Description of Artificial Sequence: Synthetic oligonucleotide
gugaccugucgggacgugu

SEQ ID NO: 643541 - RNA, 19 nt, Artificial Sequence
  Description of Artificial Sequence: Synthetic oligonucleotide
ccgagaccuguaucuucuc

SEQ ID NO: 643542 - RNA, 19 nt, Artificial Sequence
  Description of Artificial Sequence: Synthetic oligonucleotide
ggugaccugucgggacgug

SEQ ID NO: 643543 - RNA, 19 nt, Artificial Sequence
  Description of Artificial Sequence: Synthetic oligonucleotide
cggugcgcggcgacagagg

SEQ ID NO: 643544 - RNA, 19 nt, Artificial Sequence
  Description of Artificial Sequence: Synthetic oligonucleotide
ggucuaccuuucccagacu

SEQ ID NO: 643545 - RNA, 19 nt, Artificial Sequence
  Description of Artificial Sequence: Synthetic oligonucleotide
guucgccucggccgcggau

SEQ ID NO: 643546 - RNA, 19 nt, Artificial Sequence
  Description of Artificial Sequence: Synthetic oligonucleotide
gcgacagaggagcccgcgu

SEQ ID NO: 643547 - RNA, 19 nt, Artificial Sequence
  Description of Artificial Sequence: Synthetic oligonucleotide
ccgccagaugccuccgcca

SEQ ID NO: 643548 - RNA, 19 nt, Artificial Sequence
  Description of Artificial Sequence: Synthetic oligonucleotide
ggaggccgacuuggucccc

SEQ ID NO: 643549 - RNA, 19 nt, Artificial Sequence
  Description of Artificial Sequence: Synthetic oligonucleotide
cccuaguaugaaagacagu

SEQ ID NO: 643550 - RNA, 19 nt, Artificial Sequence
  Description of Artificial Sequence: Synthetic oligonucleotide
cuuuagggcucuggcucuu

SEQ ID NO: 643551 - RNA, 19 nt, Artificial Sequence
  Description of Artificial Sequence: Synthetic oligonucleotide
ggccgacuugguccccaaa

SEQ ID NO: 643552 - RNA, 19 nt, Artificial Sequence
  Description of Artificial Sequence: Synthetic oligonucleotide
ccgcuccaagaaaagggau

SEQ ID NO: 643553 - RNA, 19 nt, Artificial Sequence
  Description of Artificial Sequence: Synthetic oligonucleotide
ccgccacuguucgccucgg

SEQ ID NO: 643554 - RNA, 19 nt, Artificial Sequence
  Description of Artificial Sequence: Synthetic oligonucleotide
gcgcggcgacagaggagcc

SEQ ID NO: 643555 - RNA, 19 nt, Artificial Sequence
  Description of Artificial Sequence: Synthetic oligonucleotide
cggcgacagaggagcccgc

SEQ ID NO: 643556 - RNA, 19 nt, Artificial Sequence
  Description of Artificial Sequence: Synthetic oligonucleotide
cuucgaaucaucuaaaacc

SEQ ID NO: 643557 - RNA, 19 nt, Artificial Sequence
  Description of Artificial Sequence: Synthetic oligonucleotide
gauaucuuggcuuggcgcg

SEQ ID NO: 643558 - RNA, 19 nt, Artificial Sequence
  Description of Artificial Sequence: Synthetic oligonucleotide
cuuaaagcggcacagcugg

SEQ ID NO: 643559 - RNA, 19 nt, Artificial Sequence
  Description of Artificial Sequence: Synthetic oligonucleotide
uucgaaucaucuaaaacca

SEQ ID NO: 643560 - RNA, 19 nt, Artificial Sequence
  Description of Artificial Sequence: Synthetic oligonucleotide
aaccgguuugccuuguccc

SEQ ID NO: 643561 - RNA, 19 nt, Artificial Sequence
  Description of Artificial Sequence: Synthetic oligonucleotide
ucuggcauggagacaaugg

SEQ ID NO: 643562 - RNA, 19 nt, Artificial Sequence
  Description of Artificial Sequence: Synthetic oligonucleotide
ugacccuacaaucaggaug

SEQ ID NO: 643563 - RNA, 19 nt, Artificial Sequence
  Description of Artificial Sequence: Synthetic oligonucleotide
ucuaggccaagaaacuugg

SEQ ID NO: 643564 - RNA, 19 nt, Artificial Sequence
  Description of Artificial Sequence: Synthetic oligonucleotide
aagaccucgaggaagagug

SEQ ID NO: 643565 - RNA, 19 nt, Artificial Sequence
  Description of Artificial Sequence: Synthetic oligonucleotide
gguaacuagggauauaccc

SEQ ID NO: 643566 - RNA, 19 nt, Artificial Sequence
  Description of Artificial Sequence: Synthetic oligonucleotide
uagggauauacccugacau

SEQ ID NO: 643567 - RNA, 19 nt, Artificial Sequence
  Description of Artificial Sequence: Synthetic oligonucleotide
gaaguagagaccuguggcc

SEQ ID NO: 643568 - RNA, 19 nt, Artificial Sequence
  Description of Artificial Sequence: Synthetic oligonucleotide
uccccuauuuucuuagagg

SEQ ID NO: 643569 - RNA, 19 nt, Artificial Sequence
  Description of Artificial Sequence: Synthetic oligonucleotide
ggcaacguggaucagaucc

SEQ ID NO: 643570 - RNA, 19 nt, Artificial Sequence
  Description of Artificial Sequence: Synthetic oligonucleotide
caaagauggcgucagagac

SEQ ID NO: 643571 - RNA, 19 nt, Artificial Sequence
  Description of Artificial Sequence: Synthetic oligonucleotide
agcuguucgcgcuuaaccg

SEQ ID NO: 643572 - RNA, 19 nt, Artificial Sequence
  Description of Artificial Sequence: Synthetic oligonucleotide
uuuucgugaccccacacuc

SEQ ID NO: 643573 - RNA, 19 nt, Artificial Sequence
  Description of Artificial Sequence: Synthetic oligonucleotide
gagacaaugggugacuggc

SEQ ID NO: 643574 - RNA, 19 nt, Artificial Sequence
  Description of Artificial Sequence: Synthetic oligonucleotide
ugacuugcccaguucaaag

SEQ ID NO: 643575 - RNA, 19 nt, Artificial Sequence
  Description of Artificial Sequence: Synthetic oligonucleotide
agugauaaccgguuugccu

SEQ ID NO: 643576 - RNA, 19 nt, Artificial Sequence
  Description of Artificial Sequence: Synthetic oligonucleotide
auagcggacagcugcccgc

SEQ ID NO: 643577 - RNA, 19 nt, Artificial Sequence
  Description of Artificial Sequence: Synthetic oligonucleotide
gucuucgcaaggcagcucg

SEQ ID NO: 643578 - RNA, 19 nt, Artificial Sequence
  Description of Artificial Sequence: Synthetic oligonucleotide
aaccgaguugggcaacgac

SEQ ID NO: 643579 - RNA, 19 nt, Artificial Sequence
  Description of Artificial Sequence: Synthetic oligonucleotide
uguauauaggggugaguga

SEQ ID NO: 643580 - RNA, 19 nt, Artificial Sequence
  Description of Artificial Sequence: Synthetic oligonucleotide
uacagcgguagugauaacc

SEQ ID NO: 643581 - RNA, 19 nt, Artificial Sequence
  Description of Artificial Sequence: Synthetic oligonucleotide
auauaggggugagugaggg

SEQ ID NO: 643582 - RNA, 19 nt, Artificial Sequence
  Description of Artificial Sequence: Synthetic oligonucleotide
ggaaucuaggccaagaaac

SEQ ID NO: 643583 - RNA, 19 nt, Artificial Sequence
  Description of Artificial Sequence: Synthetic oligonucleotide
gaucagaucccacucuuca

SEQ ID NO: 643584 - RNA, 19 nt, Artificial Sequence
  Description of Artificial Sequence: Synthetic oligonucleotide
aacgacgcggggucucagc

SEQ ID NO: 643585 - RNA, 19 nt, Artificial Sequence
  Description of Artificial Sequence: Synthetic oligonucleotide
uuaaccgccaucuccccac

SEQ ID NO: 643586 - RNA, 19 nt, Artificial Sequence
  Description of Artificial Sequence: Synthetic oligonucleotide
ucuucuggaucgugcgucg

SEQ ID NO: 643587 - RNA, 19 nt, Artificial Sequence
  Description of Artificial Sequence: Synthetic oligonucleotide
cuugcguuuggccacucgc

SEQ ID NO: 643588 - RNA, 19 nt, Artificial Sequence
  Description of Artificial Sequence: Synthetic oligonucleotide
acagcgguagugauaaccg

SEQ ID NO: 643589 - RNA, 19 nt, Artificial Sequence
  Description of Artificial Sequence: Synthetic oligonucleotide
uggcuuggcgcgcugaacc

SEQ ID NO: 643590 - RNA, 19 nt, Artificial Sequence
  Description of Artificial Sequence: Synthetic oligonucleotide
uaaccgguuugccuugucc

SEQ ID NO: 643591 - RNA, 19 nt, Artificial Sequence
  Description of Artificial Sequence: Synthetic oligonucleotide
agggcaucugccccuauuc

SEQ ID NO: 643592 - RNA, 19 nt, Artificial Sequence
  Description of Artificial Sequence: Synthetic oligonucleotide
uccuguguauauaggggug

SEQ ID NO: 643593 - RNA, 19 nt, Artificial Sequence
  Description of Artificial Sequence: Synthetic oligonucleotide
uucgugaccccacacucca

SEQ ID NO: 643594 - RNA, 19 nt, Artificial Sequence
  Description of Artificial Sequence: Synthetic oligonucleotide
ucuuucauagcaaguucau

SEQ ID NO: 643595 - RNA, 19 nt, Artificial Sequence
  Description of Artificial Sequence: Synthetic oligonucleotide
gucauauuugcaggaauag

SEQ ID NO: 643596 - RNA, 19 nt, Artificial Sequence
  Description of Artificial Sequence: Synthetic oligonucleotide
accgguuugccuugucccc

SEQ ID NO: 643597 - RNA, 19 nt, Artificial Sequence
  Description of Artificial Sequence: Synthetic oligonucleotide
agugauacagcgguaguga

SEQ ID NO: 643598 - RNA, 19 nt, Artificial Sequence
  Description of Artificial Sequence: Synthetic oligonucleotide
cugauccucaaagaccucg

SEQ ID NO: 643599 - RNA, 19 nt, Artificial Sequence
  Description of Artificial Sequence: Synthetic oligonucleotide
ucaugcggaggucagucac

SEQ ID NO: 643600 - RNA, 19 nt, Artificial Sequence
  Description of Artificial Sequence: Synthetic oligonucleotide
uucgcaaggcagcucggag

SEQ ID NO: 643601 - RNA, 19 nt, Artificial Sequence
  Description of Artificial Sequence: Synthetic oligonucleotide
uuucgugaccccacacucc

SEQ ID NO: 643602 - RNA, 19 nt, Artificial Sequence
  Description of Artificial Sequence: Synthetic oligonucleotide
gugguugacguagugcucg

SEQ ID NO: 643603 - RNA, 19 nt, Artificial Sequence
  Description of Artificial Sequence: Synthetic oligonucleotide
ugucuggagauaucuuggc

SEQ ID NO: 643604 - RNA, 19 nt, Artificial Sequence
  Description of Artificial Sequence: Synthetic oligonucleotide
uuagagguuagggucccag

SEQ ID NO: 643605 - RNA, 19 nt, Artificial Sequence
  Description of Artificial Sequence: Synthetic oligonucleotide
ucgugcgucgaaagaagcc

SEQ ID NO: 643606 - RNA, 19 nt, Artificial Sequence
  Description of Artificial Sequence: Synthetic oligonucleotide
uccugacccuacaaucagg

SEQ ID NO: 643607 - RNA, 19 nt, Artificial Sequence
  Description of Artificial Sequence: Synthetic oligonucleotide
ggcgucagagacuacaccc

SEQ ID NO: 643608 - RNA, 19 nt, Artificial Sequence
  Description of Artificial Sequence: Synthetic oligonucleotide
augaucuggucuucgcaag

SEQ ID NO: 643609 - RNA, 19 nt, Artificial Sequence
  Description of Artificial Sequence: Synthetic oligonucleotide
cagagagugacuugcccag

SEQ ID NO: 643610 - RNA, 19 nt, Artificial Sequence
  Description of Artificial Sequence: Synthetic oligonucleotide
agggauauacccugacaug

SEQ ID NO: 643611 - RNA, 19 nt, Artificial Sequence
  Description of Artificial Sequence: Synthetic oligonucleotide
gaguugggcaacgacgcgg

SEQ ID NO: 643612 - RNA, 19 nt, Artificial Sequence
  Description of Artificial Sequence: Synthetic oligonucleotide
ugcagcacccuuucaggag

SEQ ID NO: 643613 - RNA, 19 nt, Artificial Sequence
  Description of Artificial Sequence: Synthetic oligonucleotide
accgaguugggcaacgacg

SEQ ID NO: 643614 - RNA, 19 nt, Artificial Sequence
  Description of Artificial Sequence: Synthetic oligonucleotide
cugcaucuauccaaggaug

SEQ ID NO: 643615 - RNA, 19 nt, Artificial Sequence
  Description of Artificial Sequence: Synthetic oligonucleotide
ucgucuuuguccagguaac

SEQ ID NO: 643616 - RNA, 19 nt, Artificial Sequence
  Description of Artificial Sequence: Synthetic oligonucleotide
ugccuuguccccacacacg

SEQ ID NO: 643617 - RNA, 19 nt, Artificial Sequence
  Description of Artificial Sequence: Synthetic oligonucleotide
cucgcugaaggccucuagg

SEQ ID NO: 643618 - RNA, 19 nt, Artificial Sequence
  Description of Artificial Sequence: Synthetic oligonucleotide
auauuugcaggaauagggu

SEQ ID NO: 643619 - RNA, 19 nt, Artificial Sequence
  Description of Artificial Sequence: Synthetic oligonucleotide
aggagugggcucuggucgc

SEQ ID NO: 643620 - RNA, 19 nt, Artificial Sequence
  Description of Artificial Sequence: Synthetic oligonucleotide
ugaucuugguaaacucgcu

SEQ ID NO: 643621 - RNA, 19 nt, Artificial Sequence
  Description of Artificial Sequence: Synthetic oligonucleotide
ugggguggugaauagcacu

SEQ ID NO: 643622 - RNA, 19 nt, Artificial Sequence
  Description of Artificial Sequence: Synthetic oligonucleotide
acgcccaaaggccacccac

SEQ ID NO: 643623 - RNA, 19 nt, Artificial Sequence
  Description of Artificial Sequence: Synthetic oligonucleotide
gguaaacucgcugaaggcc

SEQ ID NO: 643624 - RNA, 19 nt, Artificial Sequence
  Description of Artificial Sequence: Synthetic oligonucleotide
gaucgugcgucgaaagaag

SEQ ID NO: 643625 - RNA, 19 nt, Artificial Sequence
  Description of Artificial Sequence: Synthetic oligonucleotide
uucgguggggcacucgacu

SEQ ID NO: 643626 - RNA, 19 nt, Artificial Sequence
  Description of Artificial Sequence: Synthetic oligonucleotide
gauggcgucagagacuaca

SEQ ID NO: 643627 - RNA, 19 nt, Artificial Sequence
  Description of Artificial Sequence: Synthetic oligonucleotide
uggaucgugcgucgaaaga

SEQ ID NO: 643628 - RNA, 19 nt, Artificial Sequence
  Description of Artificial Sequence: Synthetic oligonucleotide
guauaugggagcugcaucu

SEQ ID NO: 643629 - RNA, 19 nt, Artificial Sequence
  Description of Artificial Sequence: Synthetic oligonucleotide
caggccgccauucuugagc

SEQ ID NO: 643630 - RNA, 19 nt, Artificial Sequence
  Description of Artificial Sequence: Synthetic oligonucleotide
gaccucgaggaagaguggg

SEQ ID NO: 643631 - RNA, 19 nt, Artificial Sequence
  Description of Artificial Sequence: Synthetic oligonucleotide
agaaacuuggcagggcucu

SEQ ID NO: 643632 - RNA, 19 nt, Artificial Sequence
  Description of Artificial Sequence: Synthetic oligonucleotide
cucgcuucgaaucaucuaa

SEQ ID NO: 643633 - RNA, 19 nt, Artificial Sequence
  Description of Artificial Sequence: Synthetic oligonucleotide
aagggaaucuaggccaaga

SEQ ID NO: 643634 - RNA, 19 nt, Artificial Sequence
  Description of Artificial Sequence: Synthetic oligonucleotide
caucccucacaagugauac

SEQ ID NO: 643635 - RNA, 19 nt, Artificial Sequence
  Description of Artificial Sequence: Synthetic oligonucleotide
ugaaccgaguugggcaacg

SEQ ID NO: 643636 - RNA, 19 nt, Artificial Sequence
  Description of Artificial Sequence: Synthetic oligonucleotide
acgacgcggggucucagcg

SEQ ID NO: 643637 - RNA, 19 nt, Artificial Sequence
  Description of Artificial Sequence: Synthetic oligonucleotide
ugcagcgaucggaucaucu

SEQ ID NO: 643638 - RNA, 19 nt, Artificial Sequence
  Description of Artificial Sequence: Synthetic oligonucleotide
ugauacagcgguagugaua

SEQ ID NO: 643639 - RNA, 19 nt, Artificial Sequence
  Description of Artificial Sequence: Synthetic oligonucleotide
gguauuuggggaaguagag

SEQ ID NO: 643640 - RNA, 19 nt, Artificial Sequence
  Description of Artificial Sequence: Synthetic oligonucleotide
acuuccgugucauccagau

SEQ ID NO: 643641 - RNA, 19 nt, Artificial Sequence
  Description of Artificial Sequence: Synthetic oligonucleotide
cuguucgcgcuuaaccgcc

SEQ ID NO: 643642 - RNA, 19 nt, Artificial Sequence
  Description of Artificial Sequence: Synthetic oligonucleotide
gaaucaucuaaaaccaagu

SEQ ID NO: 643643 - RNA, 19 nt, Artificial Sequence
  Description of Artificial Sequence: Synthetic oligonucleotide
agguaacuagggauauacc

SEQ ID NO: 643644 - RNA, 19 nt, Artificial Sequence
  Description of Artificial Sequence: Synthetic oligonucleotide
gacguagugcucgaacgcc

SEQ ID NO: 643645 - RNA, 19 nt, Artificial Sequence
  Description of Artificial Sequence: Synthetic oligonucleotide
cauagcggacagcugcccg

SEQ ID NO: 643646 - RNA, 19 nt, Artificial Sequence
  Description of Artificial Sequence: Synthetic oligonucleotide
uugcguuuggccacucgcu

SEQ ID NO: 643647 - RNA, 19 nt, Artificial Sequence
  Description of Artificial Sequence: Synthetic oligonucleotide
aucgugcgucgaaagaagc

SEQ ID NO: 643648 - RNA, 19 nt, Artificial Sequence
  Description of Artificial Sequence: Synthetic oligonucleotide
gacgcggggucucagcgcc

SEQ ID NO: 643649 - RNA, 19 nt, Artificial Sequence
  Description of Artificial Sequence: Synthetic oligonucleotide
uuaggggcugggagggucc

SEQ ID NO: 643650 - RNA, 19 nt, Artificial Sequence
  Description of Artificial Sequence: Synthetic oligonucleotide
gaaagaguucgguggggca

SEQ ID NO: 643651 - RNA, 19 nt, Artificial Sequence
  Description of Artificial Sequence: Synthetic oligonucleotide
gaucaugcggaggucaguc

SEQ ID NO: 643652 - RNA, 19 nt, Artificial Sequence
  Description of Artificial Sequence: Synthetic oligonucleotide
uguuugcggugguugacgu

SEQ ID NO: 643653 - RNA, 19 nt, Artificial Sequence
  Description of Artificial Sequence: Synthetic oligonucleotide
gaucggaucaucucuuccu

SEQ ID NO: 643654 - RNA, 19 nt, Artificial Sequence
  Description of Artificial Sequence: Synthetic oligonucleotide
ugggcaacgacgcgggguc

SEQ ID NO: 643655 - RNA, 19 nt, Artificial Sequence
  Description of Artificial Sequence: Synthetic oligonucleotide
gcuucgaaucaucuaaaac

SEQ ID NO: 643656 - RNA, 19 nt, Artificial Sequence
  Description of Artificial Sequence: Synthetic oligonucleotide
gaagcggcuggcguggcag

SEQ ID NO: 643657 - RNA, 19 nt, Artificial Sequence
  Description of Artificial Sequence: Synthetic oligonucleotide
uggggaaguagagaccugu

SEQ ID NO: 643658 - RNA, 19 nt, Artificial Sequence
  Description of Artificial Sequence: Synthetic oligonucleotide
uggcgucagagacuacacc

SEQ ID NO: 643659 - RNA, 19 nt, Artificial Sequence
  Description of Artificial Sequence: Synthetic oligonucleotide
gcacucgacuuucaugugg

SEQ ID NO: 643660 - RNA, 19 nt, Artificial Sequence
  Description of Artificial Sequence: Synthetic oligonucleotide
guaacuagggauauacccu

SEQ ID NO: 643661 - RNA, 19 nt, Artificial Sequence
  Description of Artificial Sequence: Synthetic oligonucleotide
cuggaucgugcgucgaaag

SEQ ID NO: 643662 - RNA, 19 nt, Artificial Sequence
  Description of Artificial Sequence: Synthetic oligonucleotide
uggccacucgcuucgaauc

SEQ ID NO: 643663 - RNA, 19 nt, Artificial Sequence
  Description of Artificial Sequence: Synthetic oligonucleotide
caggacccagguauuuggg

SEQ ID NO: 643664 - RNA, 19 nt, Artificial Sequence
  Description of Artificial Sequence: Synthetic oligonucleotide
ucgccucugcuuccagugg

SEQ ID NO: 643665 - RNA, 19 nt, Artificial Sequence
  Description of Artificial Sequence: Synthetic oligonucleotide
cuccugacccuacaaucag

SEQ ID NO: 643666 - RNA, 19 nt, Artificial Sequence
  Description of Artificial Sequence: Synthetic oligonucleotide
ucccucuuauuucuuccuc

SEQ ID NO: 643667 - RNA, 19 nt, Artificial Sequence
  Description of Artificial Sequence: Synthetic oligonucleotide
uuaaagcggcacagcuggc

SEQ ID NO: 643668 - RNA, 19 nt, Artificial Sequence
  Description of Artificial Sequence: Synthetic oligonucleotide
acgccaagagacuggggug

SEQ ID NO: 643669 - RNA, 19 nt, Artificial Sequence
  Description of Artificial Sequence: Synthetic oligonucleotide
ucgcgcuuaaccgccaucu

SEQ ID NO: 643670 - RNA, 19 nt, Artificial Sequence
  Description of Artificial Sequence: Synthetic oligonucleotide
auggcgucagagacuacac

SEQ ID NO: 643671 - RNA, 19 nt, Artificial Sequence
  Description of Artificial Sequence: Synthetic oligonucleotide
agcacgccaagagacuggg

SEQ ID NO: 643672 - RNA, 19 nt, Artificial Sequence
  Description of Artificial Sequence: Synthetic oligonucleotide
uccagcacgccaagagacu

SEQ ID NO: 643673 - RNA, 19 nt, Artificial Sequence
  Description of Artificial Sequence: Synthetic oligonucleotide
uagugauaaccgguuugcc

SEQ ID NO: 643674 - RNA, 19 nt, Artificial Sequence
  Description of Artificial Sequence: Synthetic oligonucleotide
gucaggguaucgcucucag

SEQ ID NO: 643675 - RNA, 19 nt, Artificial Sequence
  Description of Artificial Sequence: Synthetic oligonucleotide
acucuaggacuuaggcccc

SEQ ID NO: 643676 - RNA, 19 nt, Artificial Sequence
  Description of Artificial Sequence: Synthetic oligonucleotide
cccuauuccucauuccucc

SEQ ID NO: 643677 - RNA, 19 nt, Artificial Sequence
  Description of Artificial Sequence: Synthetic oligonucleotide
uguguauauaggggugagu

SEQ ID NO: 643678 - RNA, 19 nt, Artificial Sequence
  Description of Artificial Sequence: Synthetic oligonucleotide
caugguacccgccucagua

SEQ ID NO: 643679 - RNA, 19 nt, Artificial Sequence
  Description of Artificial Sequence: Synthetic oligonucleotide
aagaguucgguggggcacu

SEQ ID NO: 643680 - RNA, 19 nt, Artificial Sequence
  Description of Artificial Sequence: Synthetic oligonucleotide
caucuauccaaggauggga

SEQ ID NO: 643681 - RNA, 19 nt, Artificial Sequence
  Description of Artificial Sequence: Synthetic oligonucleotide
ucgcuucgaaucaucuaaa

SEQ ID NO: 643682 - RNA, 19 nt, Artificial Sequence
  Description of Artificial Sequence: Synthetic oligonucleotide
cuagggauauacccugaca

SEQ ID NO: 643683 - RNA, 19 nt, Artificial Sequence
  Description of Artificial Sequence: Synthetic oligonucleotide
gaaucuaggccaagaaacu

SEQ ID NO: 643684 - RNA, 19 nt, Artificial Sequence
  Description of Artificial Sequence: Synthetic oligonucleotide
gagguuagggucccagaaa

SEQ ID NO: 643685 - RNA, 19 nt, Artificial Sequence
  Description of Artificial Sequence: Synthetic oligonucleotide
uucuggaucgugcgucgaa

SEQ ID NO: 643686 - RNA, 19 nt, Artificial Sequence
  Description of Artificial Sequence: Synthetic oligonucleotide
agcgguagugauaaccggu

SEQ ID NO: 643687 - RNA, 19 nt, Artificial Sequence
  Description of Artificial Sequence: Synthetic oligonucleotide
cacucgacuuucaugugga

SEQ ID NO: 643688 - RNA, 19 nt, Artificial Sequence
  Description of Artificial Sequence: Synthetic oligonucleotide
ccgaguugggcaacgacgc

SEQ ID NO: 643689 - RNA, 19 nt, Artificial Sequence
  Description of Artificial Sequence: Synthetic oligonucleotide
ugcggugguugacguagug

SEQ ID NO: 643690 - RNA, 19 nt, Artificial Sequence
  Description of Artificial Sequence: Synthetic oligonucleotide
gcuguucgcgcuuaaccgc

SEQ ID NO: 643691 - RNA, 19 nt, Artificial Sequence
  Description of Artificial Sequence: Synthetic oligonucleotide
ucuggaucgugcgucgaaa

SEQ ID NO: 643692 - RNA, 19 nt, Artificial Sequence
  Description of Artificial Sequence: Synthetic oligonucleotide
aggguaucgcucucagggu

SEQ ID NO: 643693 - RNA, 19 nt, Artificial Sequence
  Description of Artificial Sequence: Synthetic oligonucleotide
ugcguuuggccacucgcuu

SEQ ID NO: 643694 - RNA, 19 nt, Artificial Sequence
  Description of Artificial Sequence: Synthetic oligonucleotide
agcuccgcacacccucugg

SEQ ID NO: 643695 - RNA, 19 nt, Artificial Sequence
  Description of Artificial Sequence: Synthetic oligonucleotide
aaccgccaucuccccacuc

SEQ ID NO: 643696 - RNA, 19 nt, Artificial Sequence
  Description of Artificial Sequence: Synthetic oligonucleotide
uugggcaacgacgcggggu

SEQ ID NO: 643697 - RNA, 19 nt, Artificial Sequence
  Description of Artificial Sequence: Synthetic oligonucleotide
cagcacgccaagagacugg

SEQ ID NO: 643698 - RNA, 19 nt, Artificial Sequence
  Description of Artificial Sequence: Synthetic oligonucleotide
cccucuuauuucuuccucc

SEQ ID NO: 643699 - RNA, 19 nt, Artificial Sequence
  Description of Artificial Sequence: Synthetic oligonucleotide
uauccaaggaugggaggaa

SEQ ID NO: 643700 - RNA, 19 nt, Artificial Sequence
  Description of Artificial Sequence: Synthetic oligonucleotide
aucaugcggaggucaguca

SEQ ID NO: 643701 - RNA, 19 nt, Artificial Sequence
  Description of Artificial Sequence: Synthetic oligonucleotide
ucauagcggacagcugccc

SEQ ID NO: 643702 - RNA, 19 nt, Artificial Sequence
  Description of Artificial Sequence: Synthetic oligonucleotide
cuccgcacacccucuggcc

SEQ ID NO: 643703 - RNA, 19 nt, Artificial Sequence
  Description of Artificial Sequence: Synthetic oligonucleotide
ggacuuaggccccagccuc

SEQ ID NO: 643704 - RNA, 19 nt, Artificial Sequence
  Description of Artificial Sequence: Synthetic oligonucleotide
cuaggacuuaggccccagc

SEQ ID NO: 643705 - RNA, 19 nt, Artificial Sequence
  Description of Artificial Sequence: Synthetic oligonucleotide
gucauagcggacagcugcc

SEQ ID NO: 643706 - RNA, 19 nt, Artificial Sequence
  Description of Artificial Sequence: Synthetic oligonucleotide
gauuccgggugaucuuguc

SEQ ID NO: 643707 - RNA, 19 nt, Artificial Sequence
  Description of Artificial Sequence: Synthetic oligonucleotide
uauaugggagcugcaucua

SEQ ID NO: 643708 - RNA, 19 nt, Artificial Sequence
  Description of Artificial Sequence: Synthetic oligonucleotide
cuuccgucuccgcucccgg

SEQ ID NO: 643709 - RNA, 19 nt, Artificial Sequence
  Description of Artificial Sequence: Synthetic oligonucleotide
ugacgcagcagcugucaua

SEQ ID NO: 643710 - RNA, 19 nt, Artificial Sequence
  Description of Artificial Sequence: Synthetic oligonucleotide
cagguacgccuccugacuc

SEQ ID NO: 643711 - RNA, 19 nt, Artificial Sequence
  Description of Artificial Sequence: Synthetic oligonucleotide
uguucgcgcuuaaccgcca

SEQ ID NO: 643712 - RNA, 19 nt, Artificial Sequence
  Description of Artificial Sequence: Synthetic oligonucleotide
ggagauaucuuggcuuggc

SEQ ID NO: 643713 - RNA, 19 nt, Artificial Sequence
  Description of Artificial Sequence: Synthetic oligonucleotide
aucuggcauggagacaaug

SEQ ID NO: 643714 - RNA, 19 nt, Artificial Sequence
  Description of Artificial Sequence: Synthetic oligonucleotide
cacgccaagagacuggggu

SEQ ID NO: 643715 - RNA, 19 nt, Artificial Sequence
  Description of Artificial Sequence: Synthetic oligonucleotide
ucggagaacaugggcaguu

SEQ ID NO: 643716 - RNA, 19 nt, Artificial Sequence
  Description of Artificial Sequence: Synthetic oligonucleotide
uccugucuggagauaucuu

SEQ ID NO: 643717 - RNA, 19 nt, Artificial Sequence
  Description of Artificial Sequence: Synthetic oligonucleotide
acucgcuucgaaucaucua

SEQ ID NO: 643718 - RNA, 19 nt, Artificial Sequence
  Description of Artificial Sequence: Synthetic oligonucleotide
ugguugacguagugcucga

SEQ ID NO: 643719 - RNA, 19 nt, Artificial Sequence
  Description of Artificial Sequence: Synthetic oligonucleotide
gacgcagcagcugucauau

SEQ ID NO: 643720 - RNA, 19 nt, Artificial Sequence
  Description of Artificial Sequence: Synthetic oligonucleotide
acccaugguacccgccuca

SEQ ID NO: 643721 - RNA, 19 nt, Artificial Sequence
  Description of Artificial Sequence: Synthetic oligonucleotide
cuccaugcagcacccuuuc

SEQ ID NO: 643722 - RNA, 19 nt, Artificial Sequence
  Description of Artificial Sequence: Synthetic oligonucleotide
cccgccucaguacucagcc

SEQ ID NO: 643723 - RNA, 19 nt, Artificial Sequence
  Description of Artificial Sequence: Synthetic oligonucleotide
acacgacacacugcucguc

SEQ ID NO: 643724 - RNA, 19 nt, Artificial Sequence
  Description of Artificial Sequence: Synthetic oligonucleotide
acacgggugauggccgggg

SEQ ID NO: 643725 - RNA, 19 nt, Artificial Sequence
  Description of Artificial Sequence: Synthetic oligonucleotide
gccgccugaggcuuuagac

SEQ ID NO: 643726 - RNA, 19 nt, Artificial Sequence
  Description of Artificial Sequence: Synthetic oligonucleotide
ggggcacucgacuuucaug

SEQ ID NO: 643727 - RNA, 19 nt, Artificial Sequence
  Description of Artificial Sequence: Synthetic oligonucleotide
caaugacgcagcagcuguc

SEQ ID NO: 643728 - RNA, 19 nt, Artificial Sequence
  Description of Artificial Sequence: Synthetic oligonucleotide
cauuuguugcccuguccaa

SEQ ID NO: 643729 - RNA, 19 nt, Artificial Sequence
  Description of Artificial Sequence: Synthetic oligonucleotide
ugcgucgaaagaagcccuu

SEQ ID NO: 643730 - RNA, 19 nt, Artificial Sequence
  Description of Artificial Sequence: Synthetic oligonucleotide
gcuugggccagaagugugg

SEQ ID NO: 643731 - RNA, 19 nt, Artificial Sequence
  Description of Artificial Sequence: Synthetic oligonucleotide
ggcuuggcgcgcugaaccg

SEQ ID NO: 643732 - RNA, 19 nt, Artificial Sequence
  Description of Artificial Sequence: Synthetic oligonucleotide
agggcucuccuguguauau

SEQ ID NO: 643733 - RNA, 19 nt, Artificial Sequence
  Description of Artificial Sequence: Synthetic oligonucleotide
auuggccguucuuucuuuu

SEQ ID NO: 643734 - RNA, 19 nt, Artificial Sequence
  Description of Artificial Sequence: Synthetic oligonucleotide
agcacccaugguacccgcc

SEQ ID NO: 643735 - RNA, 19 nt, Artificial Sequence
  Description of Artificial Sequence: Synthetic oligonucleotide
gcgcgcugaaccgaguugg

SEQ ID NO: 643736 - RNA, 19 nt, Artificial Sequence
  Description of Artificial Sequence: Synthetic oligonucleotide
ccuacaaucaggauggcuu

SEQ ID NO: 643737 - RNA, 19 nt, Artificial Sequence
  Description of Artificial Sequence: Synthetic oligonucleotide
uaucuuggcuuggcgcgcu

SEQ ID NO: 643738 - RNA, 19 nt, Artificial Sequence
  Description of Artificial Sequence: Synthetic oligonucleotide
gggccagaaguguggaaug

SEQ ID NO: 643739 - RNA, 19 nt, Artificial Sequence
  Description of Artificial Sequence: Synthetic oligonucleotide
uggucgcugcugcagcgau

SEQ ID NO: 643740 - RNA, 19 nt, Artificial Sequence
  Description of Artificial Sequence: Synthetic oligonucleotide
cucagcgccccgugcuggg

SEQ ID NO: 643741 - RNA, 19 nt, Artificial Sequence
  Description of Artificial Sequence: Synthetic oligonucleotide
agaccucgaggaagagugg

SEQ ID NO: 643742 - RNA, 19 nt, Artificial Sequence
  Description of Artificial Sequence: Synthetic oligonucleotide
ucgguggggcacucgacuu

SEQ ID NO: 643743 - RNA, 19 nt, Artificial Sequence
  Description of Artificial Sequence: Synthetic oligonucleotide
gagcggucuguugacauua

SEQ ID NO: 643744 - RNA, 19 nt, Artificial Sequence
  Description of Artificial Sequence: Synthetic oligonucleotide
uccaucuggcauggagaca

SEQ ID NO: 643745 - RNA, 19 nt, Artificial Sequence
  Description of Artificial Sequence: Synthetic oligonucleotide
ggaucgugcgucgaaagaa

SEQ ID NO: 643746 - RNA, 19 nt, Artificial Sequence
  Description of Artificial Sequence: Synthetic oligonucleotide
cuuuagacuuccugauccu

SEQ ID NO: 643747 - RNA, 19 nt, Artificial Sequence
  Description of Artificial Sequence: Synthetic oligonucleotide
guugggcaacgacgcgggg

SEQ ID NO: 643748 - RNA, 19 nt, Artificial Sequence
  Description of Artificial Sequence: Synthetic oligonucleotide
uaaccgccaucuccccacu

SEQ ID NO: 643749 - RNA, 19 nt, Artificial Sequence
  Description of Artificial Sequence: Synthetic oligonucleotide
cguuuggccacucgcuucg

SEQ ID NO: 643750 - RNA, 19 nt, Artificial Sequence
  Description of Artificial Sequence: Synthetic oligonucleotide
ugcccgcagggacaugauc

SEQ ID NO: 643751 - RNA, 19 nt, Artificial Sequence
  Description of Artificial Sequence: Synthetic oligonucleotide
gcaacguggaucagauccc

SEQ ID NO: 643752 - RNA, 19 nt, Artificial Sequence
  Description of Artificial Sequence: Synthetic oligonucleotide
gcagcgaucggaucaucuc

SEQ ID NO: 643753 - RNA, 19 nt, Artificial Sequence
  Description of Artificial Sequence: Synthetic oligonucleotide
cgugcgucgaaagaagccc

SEQ ID NO: 643754 - RNA, 19 nt, Artificial Sequence
  Description of Artificial Sequence: Synthetic oligonucleotide
gggcaucugccccuauucc

SEQ ID NO: 643755 - RNA, 19 nt, Artificial Sequence
  Description of Artificial Sequence: Synthetic oligonucleotide
acguagugcucgaacgcca

SEQ ID NO: 643756 - RNA, 19 nt, Artificial Sequence
  Description of Artificial Sequence: Synthetic oligonucleotide
augacgcagcagcugucau

SEQ ID NO: 643757 - RNA, 19 nt, Artificial Sequence
  Description of Artificial Sequence: Synthetic oligonucleotide
uggcgcgcugaaccgaguu

SEQ ID NO: 643758 - RNA, 19 nt, Artificial Sequence
  Description of Artificial Sequence: Synthetic oligonucleotide
uuggcuuggcgcgcugaac

SEQ ID NO: 643759 - RNA, 19 nt, Artificial Sequence
  Description of Artificial Sequence: Synthetic oligonucleotide
acacccaggccgccauucu

SEQ ID NO: 643760 - RNA, 19 nt, Artificial Sequence
  Description of Artificial Sequence: Synthetic oligonucleotide
guagagaccuguggccuga

SEQ ID NO: 643761 - RNA, 19 nt, Artificial Sequence
  Description of Artificial Sequence: Synthetic oligonucleotide
gccgguugggcccgggccg

SEQ ID NO: 643762 - RNA, 19 nt, Artificial Sequence
  Description of Artificial Sequence: Synthetic oligonucleotide
ccccuauuuucuuagaggu

SEQ ID NO: 643763 - RNA, 19 nt, Artificial Sequence
  Description of Artificial Sequence: Synthetic oligonucleotide
gaguucgguggggcacucg

SEQ ID NO: 643764 - RNA, 19 nt, Artificial Sequence
  Description of Artificial Sequence: Synthetic oligonucleotide
gcuugcguuuggccacucg

SEQ ID NO: 643765 - RNA, 19 nt, Artificial Sequence
  Description of Artificial Sequence: Synthetic oligonucleotide
acccuacaaucaggauggc

SEQ ID NO: 643766 - RNA, 19 nt, Artificial Sequence
  Description of Artificial Sequence: Synthetic oligonucleotide
gcugaaccgaguugggcaa

SEQ ID NO: 643767 - RNA, 19 nt, Artificial Sequence
  Description of Artificial Sequence: Synthetic oligonucleotide
cacagcgaugcacuucuua

SEQ ID NO: 643768 - RNA, 19 nt, Artificial Sequence
  Description of Artificial Sequence: Synthetic oligonucleotide
cagcgaucggaucaucucu

SEQ ID NO: 643769 - RNA, 19 nt, Artificial Sequence
  Description of Artificial Sequence: Synthetic oligonucleotide
agcgaucggaucaucucuu

SEQ ID NO: 643770 - RNA, 19 nt, Artificial Sequence
  Description of Artificial Sequence: Synthetic oligonucleotide
caacguggaucagauccca

SEQ ID NO: 643771 - RNA, 19 nt, Artificial Sequence
  Description of Artificial Sequence: Synthetic oligonucleotide
guacccgccucaguacuca

SEQ ID NO: 643772 - RNA, 19 nt, Artificial Sequence
  Description of Artificial Sequence: Synthetic oligonucleotide
ggcacucgacuuucaugug

SEQ ID NO: 643773 - RNA, 19 nt, Artificial Sequence
  Description of Artificial Sequence: Synthetic oligonucleotide
ggcgcgcugaaccgaguug

SEQ ID NO: 643774 - RNA, 19 nt, Artificial Sequence
  Description of Artificial Sequence: Synthetic oligonucleotide
ggccggagcggucuguuga

SEQ ID NO: 643775 - RNA, 19 nt, Artificial Sequence
  Description of Artificial Sequence: Synthetic oligonucleotide
cgaucggaucaucucuucc

SEQ ID NO: 643776 - RNA, 19 nt, Artificial Sequence
  Description of Artificial Sequence: Synthetic oligonucleotide
gaaccgaguugggcaacga

SEQ ID NO: 643777 - RNA, 19 nt, Artificial Sequence
  Description of Artificial Sequence: Synthetic oligonucleotide
gcggugguugacguagugc

SEQ ID NO: 643778 - RNA, 19 nt, Artificial Sequence
  Description of Artificial Sequence: Synthetic oligonucleotide
uuggcgcgcugaaccgagu

SEQ ID NO: 643779 - RNA, 19 nt, Artificial Sequence
  Description of Artificial Sequence: Synthetic oligonucleotide
cacgacacacugcucgucu

SEQ ID NO: 643780 - RNA, 19 nt, Artificial Sequence
  Description of Artificial Sequence: Synthetic oligonucleotide
ggccgguugggcccgggcc

SEQ ID NO: 643781 - RNA, 19 nt, Artificial Sequence
  Description of Artificial Sequence: Synthetic oligonucleotide
uggcaacguggaucagauc

SEQ ID NO: 643782 - RNA, 19 nt, Artificial Sequence
  Description of Artificial Sequence: Synthetic oligonucleotide
guggcaacguggaucagau

SEQ ID NO: 643783 - RNA, 19 nt, Artificial Sequence
  Description of Artificial Sequence: Synthetic oligonucleotide
aggccggagcggucuguug

SEQ ID NO: 643784 - RNA, 19 nt, Artificial Sequence
  Description of Artificial Sequence: Synthetic oligonucleotide
ggccacucgcuucgaauca

SEQ ID NO: 643785 - RNA, 19 nt, Artificial Sequence
  Description of Artificial Sequence: Synthetic oligonucleotide
ccagcacgccaagagacug

SEQ ID NO: 643786 - RNA, 19 nt, Artificial Sequence
  Description of Artificial Sequence: Synthetic oligonucleotide
cacucagcgucaggguauc

SEQ ID NO: 643787 - RNA, 19 nt, Artificial Sequence
  Description of Artificial Sequence: Synthetic oligonucleotide
uugcaggaauaggguggga

SEQ ID NO: 643788 - RNA, 19 nt, Artificial Sequence
  Description of Artificial Sequence: Synthetic oligonucleotide
guucgguggggcacucgac

SEQ ID NO: 643789 - RNA, 19 nt, Artificial Sequence
  Description of Artificial Sequence: Synthetic oligonucleotide
gcguuuggccacucgcuuc

SEQ ID NO: 643790 - RNA, 19 nt, Artificial Sequence
  Description of Artificial Sequence: Synthetic oligonucleotide
ggaucagaucccacucuuc

SEQ ID NO: 643791 - RNA, 19 nt, Artificial Sequence
  Description of Artificial Sequence: Synthetic oligonucleotide
gccaagagacugggguggg

SEQ ID NO: 643792 - RNA, 19 nt, Artificial Sequence
  Description of Artificial Sequence: Synthetic oligonucleotide
cacacgacacacugcucgu

SEQ ID NO: 643793 - RNA, 19 nt, Artificial Sequence
  Description of Artificial Sequence: Synthetic oligonucleotide
aggccccgaucaugcggag

SEQ ID NO: 643794 - RNA, 19 nt, Artificial Sequence
  Description of Artificial Sequence: Synthetic oligonucleotide
gcgucagagacuacaccca

SEQ ID NO: 643795 - RNA, 19 nt, Artificial Sequence
  Description of Artificial Sequence: Synthetic oligonucleotide
ggugguugacguagugcuc

SEQ ID NO: 643796 - RNA, 19 nt, Artificial Sequence
  Description of Artificial Sequence: Synthetic oligonucleotide
ccgggugaucuugucaaug

SEQ ID NO: 643797 - RNA, 19 nt, Artificial Sequence
  Description of Artificial Sequence: Synthetic oligonucleotide
agauggcgucagagacuac

SEQ ID NO: 643798 - RNA, 19 nt, Artificial Sequence
  Description of Artificial Sequence: Synthetic oligonucleotide
gcgaucggaucaucucuuc

SEQ ID NO: 643799 - RNA, 19 nt, Artificial Sequence
  Description of Artificial Sequence: Synthetic oligonucleotide
agcuugcguuuggccacuc

SEQ ID NO: 643800 - RNA, 19 nt, Artificial Sequence
  Description of Artificial Sequence: Synthetic oligonucleotide
cagcuccgcacacccucug

SEQ ID NO: 643801 - RNA, 19 nt, Artificial Sequence
  Description of Artificial Sequence: Synthetic oligonucleotide
gcguuggugcugcgauggg

SEQ ID NO: 643802 - RNA, 19 nt, Artificial Sequence
  Description of Artificial Sequence: Synthetic oligonucleotide
caacgacgcggggucucag

SEQ ID NO: 643803 - RNA, 19 nt, Artificial Sequence
  Description of Artificial Sequence: Synthetic oligonucleotide
guggcugcccugggcguug

SEQ ID NO: 643804 - RNA, 19 nt, Artificial Sequence
  Description of Artificial Sequence: Synthetic oligonucleotide
gagggcaucugccccuauu

SEQ ID NO: 643805 - RNA, 19 nt, Artificial Sequence
  Description of Artificial Sequence: Synthetic oligonucleotide
ggggucucagcgccccgug

SEQ ID NO: 643806 - RNA, 19 nt, Artificial Sequence
  Description of Artificial Sequence: Synthetic oligonucleotide
gcccgcagggacaugaucu

SEQ ID NO: 643807 - RNA, 19 nt, Artificial Sequence
  Description of Artificial Sequence: Synthetic oligonucleotide
cccgcagggacaugaucuc

SEQ ID NO: 643808 - RNA, 19 nt, Artificial Sequence
  Description of Artificial Sequence: Synthetic oligonucleotide
gccggagcggucuguugac

SEQ ID NO: 643809 - RNA, 19 nt, Artificial Sequence
  Description of Artificial Sequence: Synthetic oligonucleotide
ggagaacaugggcaguuuu

SEQ ID NO: 643810 - RNA, 19 nt, Artificial Sequence
  Description of Artificial Sequence: Synthetic oligonucleotide
cgaguugggcaacgacgcg

SEQ ID NO: 643811 - RNA, 19 nt, Artificial Sequence
  Description of Artificial Sequence: Synthetic oligonucleotide
cuucuggaucgugcgucga

SEQ ID NO: 643812 - RNA, 19 nt, Artificial Sequence
  Description of Artificial Sequence: Synthetic oligonucleotide
cuuagagguuaggguccca

SEQ ID NO: 643813 - RNA, 19 nt, Artificial Sequence
  Description of Artificial Sequence: Synthetic oligonucleotide
gcgcugaaccgaguugggc

SEQ ID NO: 643814 - RNA, 19 nt, Artificial Sequence
  Description of Artificial Sequence: Synthetic oligonucleotide
ccggcaggaauuuucgccu

SEQ ID NO: 643815 - RNA, 19 nt, Artificial Sequence
  Description of Artificial Sequence: Synthetic oligonucleotide
ggccccgaucaugcggagg

SEQ ID NO: 643816 - RNA, 19 nt, Artificial Sequence
  Description of Artificial Sequence: Synthetic oligonucleotide
gccgccauucuugagcugu

SEQ ID NO: 643817 - RNA, 19 nt, Artificial Sequence
  Description of Artificial Sequence: Synthetic oligonucleotide
gguacccgccucaguacuc

SEQ ID NO: 643818 - RNA, 19 nt, Artificial Sequence
  Description of Artificial Sequence: Synthetic oligonucleotide
cauuggccguucuuucuuu

SEQ ID NO: 643819 - RNA, 19 nt, Artificial Sequence
  Description of Artificial Sequence: Synthetic oligonucleotide
cggugguugacguagugcu

SEQ ID NO: 643820 - RNA, 19 nt, Artificial Sequence
  Description of Artificial Sequence: Synthetic oligonucleotide
cccaggacccagguauuug

SEQ ID NO: 643821 - RNA, 19 nt, Artificial Sequence
  Description of Artificial Sequence: Synthetic oligonucleotide
ggcaggaauuuucgccucu

SEQ ID NO: 643822 - RNA, 19 nt, Artificial Sequence
  Description of Artificial Sequence: Synthetic oligonucleotide
ggccggggugaugaucuug

SEQ ID NO: 643823 - RNA, 19 nt, Artificial Sequence
  Description of Artificial Sequence: Synthetic oligonucleotide
cuggucgcugcugcagcga

SEQ ID NO: 643824 - RNA, 19 nt, Artificial Sequence
  Description of Artificial Sequence: Synthetic oligonucleotide
cugacccuacaaucaggau

SEQ ID NO: 643825 - RNA, 19 nt, Artificial Sequence
  Description of Artificial Sequence: Synthetic oligonucleotide
ccaagagacuggggugggc

SEQ ID NO: 643826 - RNA, 19 nt, Artificial Sequence
  Description of Artificial Sequence: Synthetic oligonucleotide
gguuagggucccagaaacu

SEQ ID NO: 643827 - RNA, 19 nt, Artificial Sequence
  Description of Artificial Sequence: Synthetic oligonucleotide
cgcgcugaaccgaguuggg

SEQ ID NO: 643828 - RNA, 19 nt, Artificial Sequence
  Description of Artificial Sequence: Synthetic oligonucleotide
ccugauccucaaagaccuc

SEQ ID NO: 643829 - RNA, 19 nt, Artificial Sequence
  Description of Artificial Sequence: Synthetic oligonucleotide
uggccgccugaggcuuuag

SEQ ID NO: 643830 - RNA, 19 nt, Artificial Sequence
  Description of Artificial Sequence: Synthetic oligonucleotide
cccaugguacccgccucag

SEQ ID NO: 643831 - RNA, 19 nt, Artificial Sequence
  Description of Artificial Sequence: Synthetic oligonucleotide
ccaggccgccauucuugag

SEQ ID NO: 643832 - RNA, 19 nt, Artificial Sequence
  Description of Artificial Sequence: Synthetic oligonucleotide
ggcaacgacgcggggucuc

SEQ ID NO: 643833 - RNA, 19 nt, Artificial Sequence
  Description of Artificial Sequence: Synthetic oligonucleotide
ccgccugaggcuuuagacu

SEQ ID NO: 643834 - RNA, 19 nt, Artificial Sequence
  Description of Artificial Sequence: Synthetic oligonucleotide
gcaucccucacaagugaua

SEQ ID NO: 643835 - RNA, 19 nt, Artificial Sequence
  Description of Artificial Sequence: Synthetic oligonucleotide
guacgccuccugacucuuc

SEQ ID NO: 643836 - RNA, 19 nt, Artificial Sequence
  Description of Artificial Sequence: Synthetic oligonucleotide
cccugcgccccaaggggug

SEQ ID NO: 643837 - RNA, 19 nt, Artificial Sequence
  Description of Artificial Sequence: Synthetic oligonucleotide
cugcagcgaucggaucauc

SEQ ID NO: 643838 - RNA, 19 nt, Artificial Sequence
  Description of Artificial Sequence: Synthetic oligonucleotide
ggucuucgcaaggcagcuc

SEQ ID NO: 643839 - RNA, 19 nt, Artificial Sequence
  Description of Artificial Sequence: Synthetic oligonucleotide
cgcuucgaaucaucuaaaa

SEQ ID NO: 643840 - RNA, 19 nt, Artificial Sequence
  Description of Artificial Sequence: Synthetic oligonucleotide
gcuuggcgcgcugaaccga

SEQ ID NO: 643841 - RNA, 19 nt, Artificial Sequence
  Description of Artificial Sequence: Synthetic oligonucleotide
cgacgcggggucucagcgc

SEQ ID NO: 643842 - RNA, 19 nt, Artificial Sequence
  Description of Artificial Sequence: Synthetic oligonucleotide
gggccgguugggcccgggc

SEQ ID NO: 643843 - RNA, 19 nt, Artificial Sequence
  Description of Artificial Sequence: Synthetic oligonucleotide
gcaacgacgcggggucuca

SEQ ID NO: 643844 - RNA, 19 nt, Artificial Sequence
  Description of Artificial Sequence: Synthetic oligonucleotide
ggagagcuaggggcaagcu

SEQ ID NO: 643845 - RNA, 19 nt, Artificial Sequence
  Description of Artificial Sequence: Synthetic oligonucleotide
gcgucaggguaucgcucuc

SEQ ID NO: 643846 - RNA, 19 nt, Artificial Sequence
  Description of Artificial Sequence: Synthetic oligonucleotide
cgguuugccuuguccccac

SEQ ID NO: 643847 - RNA, 19 nt, Artificial Sequence
  Description of Artificial Sequence: Synthetic oligonucleotide
guaucgcucucagggucau

SEQ ID NO: 643848 - RNA, 19 nt, Artificial Sequence
  Description of Artificial Sequence: Synthetic oligonucleotide
cccacgcccaaaggccacc

SEQ ID NO: 643849 - RNA, 19 nt, Artificial Sequence
  Description of Artificial Sequence: Synthetic oligonucleotide
gcgguagugauaaccgguu

SEQ ID NO: 643850 - RNA, 19 nt, Artificial Sequence
  Description of Artificial Sequence: Synthetic oligonucleotide
ccgguuugccuugucccca

SEQ ID NO: 643851 - RNA, 19 nt, Artificial Sequence
  Description of Artificial Sequence: Synthetic oligonucleotide
gcaaggcagcucggagaac

SEQ ID NO: 643852 - RNA, 19 nt, Artificial Sequence
  Description of Artificial Sequence: Synthetic oligonucleotide
ccuuuguacccaggaccca

SEQ ID NO: 643853 - RNA, 19 nt, Artificial Sequence
  Description of Artificial Sequence: Synthetic oligonucleotide
cacgggugauggccggggu

SEQ ID NO: 643854 - RNA, 19 nt, Artificial Sequence
  Description of Artificial Sequence: Synthetic oligonucleotide
caucuggcauggagacaau

SEQ ID NO: 643855 - RNA, 19 nt, Artificial Sequence
  Description of Artificial Sequence: Synthetic oligonucleotide
cggggugaugaucuuggua

SEQ ID NO: 643856 - RNA, 19 nt, Artificial Sequence
  Description of Artificial Sequence: Synthetic oligonucleotide
cgcgcuuaaccgccaucuc

SEQ ID NO: 643857 - RNA, 19 nt, Artificial Sequence
  Description of Artificial Sequence: Synthetic oligonucleotide
gcugcagcgaucggaucau

SEQ ID NO: 643858 - RNA, 19 nt, Artificial Sequence
  Description of Artificial Sequence: Synthetic oligonucleotide
ggcacugauuccgggugau

SEQ ID NO: 643859 - RNA, 19 nt, Artificial Sequence
  Description of Artificial Sequence: Synthetic oligonucleotide
cccuacaaucaggauggcu

SEQ ID NO: 643860 - RNA, 19 nt, Artificial Sequence
  Description of Artificial Sequence: Synthetic oligonucleotide
cccuagggcacagcaccca

SEQ ID NO: 643861 - RNA, 19 nt, Artificial Sequence
  Description of Artificial Sequence: Synthetic oligonucleotide
ccucuggccgccugaggcu

SEQ ID NO: 643862 - RNA, 19 nt, Artificial Sequence
  Description of Artificial Sequence: Synthetic oligonucleotide
ccaagccaaacuguccuuu

SEQ ID NO: 643863 - RNA, 19 nt, Artificial Sequence
  Description of Artificial Sequence: Synthetic oligonucleotide
cucuggccgccugaggcuu

SEQ ID NO: 643864 - RNA, 19 nt, Artificial Sequence
  Description of Artificial Sequence: Synthetic oligonucleotide
ccuagggcacagcacccau

SEQ ID NO: 643865 - RNA, 19 nt, Artificial Sequence
  Description of Artificial Sequence: Synthetic oligonucleotide
ggagugggcucuggucgcu

SEQ ID NO: 643866 - RNA, 19 nt, Artificial Sequence
  Description of Artificial Sequence: Synthetic oligonucleotide
gccacucgcuucgaaucau

SEQ ID NO: 643867 - RNA, 19 nt, Artificial Sequence
  Description of Artificial Sequence: Synthetic oligonucleotide
cgcacacccucuggccgcc

SEQ ID NO: 643868 - RNA, 19 nt, Artificial Sequence
  Description of Artificial Sequence: Synthetic oligonucleotide
gugcugcgaugggccucug

SEQ ID NO: 643869 - RNA, 19 nt, Artificial Sequence
  Description of Artificial Sequence: Synthetic oligonucleotide
ccccgaucaugcggagguc

SEQ ID NO: 643870 - RNA, 19 nt, Artificial Sequence
  Description of Artificial Sequence: Synthetic oligonucleotide
ccggagcggucuguugaca

SEQ ID NO: 643871 - RNA, 19 nt, Artificial Sequence
  Description of Artificial Sequence: Synthetic oligonucleotide
ccugcgccccaagggguga

SEQ ID NO: 643872 - RNA, 19 nt, Artificial Sequence
  Description of Artificial Sequence: Synthetic oligonucleotide
ccaugguacccgccucagu

SEQ ID NO: 643873 - RNA, 19 nt, Artificial Sequence
  Description of Artificial Sequence: Synthetic oligonucleotide
ccggggugaugaucuuggu

SEQ ID NO: 643874 - RNA, 19 nt, Artificial Sequence
  Description of Artificial Sequence: Synthetic oligonucleotide
ccgccucaguacucagccu

SEQ ID NO: 643875 - RNA, 19 nt, Artificial Sequence
  Description of Artificial Sequence: Synthetic oligonucleotide
cgguagugauaaccgguuu

SEQ ID NO: 643876 - RNA, 19 nt, Artificial Sequence
  Description of Artificial Sequence: Synthetic oligonucleotide
gggcaacgacgcggggucu

SEQ ID NO: 643877 - RNA, 19 nt, Artificial Sequence
  Description of Artificial Sequence: Synthetic oligonucleotide
cgaucaugcggaggucagu

SEQ ID NO: 643878 - RNA, 19 nt, Artificial Sequence
  Description of Artificial Sequence: Synthetic oligonucleotide
cggggucucagcgccccgu

SEQ ID NO: 643879 - RNA, 19 nt, Artificial Sequence
  Description of Artificial Sequence: Synthetic oligonucleotide
augucgguaaaacagagcc

SEQ ID NO: 643880 - RNA, 19 nt, Artificial Sequence
  Description of Artificial Sequence: Synthetic oligonucleotide
aagaacaguaaggagaggc

SEQ ID NO: 643881 - RNA, 19 nt, Artificial Sequence
  Description of Artificial Sequence: Synthetic oligonucleotide
auuuccuagauucuugugc

SEQ ID NO: 643882 - RNA, 19 nt, Artificial Sequence
  Description of Artificial Sequence: Synthetic oligonucleotide
aauaacaaugaggaauucc

SEQ ID NO: 643883 - RNA, 19 nt, Artificial Sequence
  Description of Artificial Sequence: Synthetic oligonucleotide
uguagcacgauacauagca

SEQ ID NO: 643884 - RNA, 19 nt, Artificial Sequence
  Description of Artificial Sequence: Synthetic oligonucleotide
cuugugaaggcucagaucc

SEQ ID NO: 643885 - RNA, 19 nt, Artificial Sequence
  Description of Artificial Sequence: Synthetic oligonucleotide
aaucguaguagauuggcag

SEQ ID NO: 643886 - RNA, 19 nt, Artificial Sequence
  Description of Artificial Sequence: Synthetic oligonucleotide
agggaaaucuauuauuccc

SEQ ID NO: 643887 - RNA, 19 nt, Artificial Sequence
  Description of Artificial Sequence: Synthetic oligonucleotide
uuuuaucugguauaguucc

SEQ ID NO: 643888 - RNA, 19 nt, Artificial Sequence
  Description of Artificial Sequence: Synthetic oligonucleotide
aaugucaggacacaaugug

SEQ ID NO: 643889 - RNA, 19 nt, Artificial Sequence
  Description of Artificial Sequence: Synthetic oligonucleotide
agacauguauaccuuaagc

SEQ ID NO: 643890 - RNA, 19 nt, Artificial Sequence
  Description of Artificial Sequence: Synthetic oligonucleotide
uauaccuuaagccauuugu

SEQ ID NO: 643891 - RNA, 19 nt, Artificial Sequence
  Description of Artificial Sequence: Synthetic oligonucleotide
aagggagacaaguaguuuc

SEQ ID NO: 643892 - RNA, 19 nt, Artificial Sequence
  Description of Artificial Sequence: Synthetic oligonucleotide
aagagauaaggcaacgugc

SEQ ID NO: 643893 - RNA, 19 nt, Artificial Sequence
  Description of Artificial Sequence: Synthetic oligonucleotide
uguaaggcaauaugaauag

SEQ ID NO: 643894 - RNA, 19 nt, Artificial Sequence
  Description of Artificial Sequence: Synthetic oligonucleotide
aagcaaaucagguauccug

SEQ ID NO: 643895 - RNA, 19 nt, Artificial Sequence
  Description of Artificial Sequence: Synthetic oligonucleotide
auacaaucguaguagauug

SEQ ID NO: 643896 - RNA, 19 nt, Artificial Sequence
  Description of Artificial Sequence: Synthetic oligonucleotide
guagucaauacacagacca

SEQ ID NO: 643897 - RNA, 19 nt, Artificial Sequence
  Description of Artificial Sequence: Synthetic oligonucleotide
uaaggcaacgugcaugggg

SEQ ID NO: 643898 - RNA, 19 nt, Artificial Sequence
  Description of Artificial Sequence: Synthetic oligonucleotide
uucauugagaacuggggcc

SEQ ID NO: 643899 - RNA, 19 nt, Artificial Sequence
  Description of Artificial Sequence: Synthetic oligonucleotide
gaggaguuguuucaaagag

SEQ ID NO: 643900 - RNA, 19 nt, Artificial Sequence
  Description of Artificial Sequence: Synthetic oligonucleotide
cagacuagcauguacgugc

SEQ ID NO: 643901 - RNA, 19 nt, Artificial Sequence
  Description of Artificial Sequence: Synthetic oligonucleotide
uuuccuagauucuugugcc

SEQ ID NO: 643902 - RNA, 19 nt, Artificial Sequence
  Description of Artificial Sequence: Synthetic oligonucleotide
aaggcagucauggaguaac

SEQ ID NO: 643903 - RNA, 19 nt, Artificial Sequence
  Description of Artificial Sequence: Synthetic oligonucleotide
guagcaucggcacagcugg

SEQ ID NO: 643904 - RNA, 19 nt, Artificial Sequence
  Description of Artificial Sequence: Synthetic oligonucleotide
agauccucgacaccgggcc

SEQ ID NO: 643905 - RNA, 19 nt, Artificial Sequence
  Description of Artificial Sequence: Synthetic oligonucleotide
uguccacuugauaucauag

SEQ ID NO: 643906 - RNA, 19 nt, Artificial Sequence
  Description of Artificial Sequence: Synthetic oligonucleotide
aauaugaauaguaggcuca

SEQ ID NO: 643907 - RNA, 19 nt, Artificial Sequence
  Description of Artificial Sequence: Synthetic oligonucleotide
ucugguauaguuccaagau

SEQ ID NO: 643908 - RNA, 19 nt, Artificial Sequence
  Description of Artificial Sequence: Synthetic oligonucleotide
cuugauaucauagucacca

SEQ ID NO: 643909 - RNA, 19 nt, Artificial Sequence
  Description of Artificial Sequence: Synthetic oligonucleotide
gaacacguaugaaagaaag

SEQ ID NO: 643910 - RNA, 19 nt, Artificial Sequence
  Description of Artificial Sequence: Synthetic oligonucleotide
uguaggccgugccagaggg

SEQ ID NO: 643911 - RNA, 19 nt, Artificial Sequence
  Description of Artificial Sequence: Synthetic oligonucleotide
uaaugucgguaaaacagag

SEQ ID NO: 643912 - RNA, 19 nt, Artificial Sequence
  Description of Artificial Sequence: Synthetic oligonucleotide
aacacguaugaaagaaagc

SEQ ID NO: 643913 - RNA, 19 nt, Artificial Sequence
  Description of Artificial Sequence: Synthetic oligonucleotide
augaauaguaggcucaaga

SEQ ID NO: 643914 - RNA, 19 nt, Artificial Sequence
  Description of Artificial Sequence: Synthetic oligonucleotide
aguugaaauaagcaauuga

SEQ ID NO: 643915 - RNA, 19 nt, Artificial Sequence
  Description of Artificial Sequence: Synthetic oligonucleotide
ugguucauugagaacuggg

SEQ ID NO: 643916 - RNA, 19 nt, Artificial Sequence
  Description of Artificial Sequence: Synthetic oligonucleotide
acaaucguaguagauuggc

SEQ ID NO: 643917 - RNA, 19 nt, Artificial Sequence
  Description of Artificial Sequence: Synthetic oligonucleotide
acuagcauguacgugcagc

SEQ ID NO: 643918 - RNA, 19 nt, Artificial Sequence
  Description of Artificial Sequence: Synthetic oligonucleotide
uuccaagaaacuugaggcg

SEQ ID NO: 643919 - RNA, 19 nt, Artificial Sequence
  Description of Artificial Sequence: Synthetic oligonucleotide
uuugguaucuucccuggca

SEQ ID NO: 643920 - RNA, 19 nt, Artificial Sequence
  Description of Artificial Sequence: Synthetic oligonucleotide
gaagagagacacaaguucc

SEQ ID NO: 643921 - RNA, 19 nt, Artificial Sequence
  Description of Artificial Sequence: Synthetic oligonucleotide
aagaagacauguccaagga

SEQ ID NO: 643922 - RNA, 19 nt, Artificial Sequence
  Description of Artificial Sequence: Synthetic oligonucleotide
acacguaugaaagaaagca

SEQ ID NO: 643923 - RNA, 19 nt, Artificial Sequence
  Description of Artificial Sequence: Synthetic oligonucleotide
uucauguuggcacacgcgu

SEQ ID NO: 643924 - RNA, 19 nt, Artificial Sequence
  Description of Artificial Sequence: Synthetic oligonucleotide
uggggcccuaccaagaagg

SEQ ID NO: 643925 - RNA, 19 nt, Artificial Sequence
  Description of Artificial Sequence: Synthetic oligonucleotide
ugagaguucuuuauuucca

SEQ ID NO: 643926 - RNA, 19 nt, Artificial Sequence
  Description of Artificial Sequence: Synthetic oligonucleotide
aaugucgguaaaacagagc

SEQ ID NO: 643927 - RNA, 19 nt, Artificial Sequence
  Description of Artificial Sequence: Synthetic oligonucleotide
uguuugguaucuucccugg

SEQ ID NO: 643928 - RNA, 19 nt, Artificial Sequence
  Description of Artificial Sequence: Synthetic oligonucleotide
gacaaguaguuucugcacc

SEQ ID NO: 643929 - RNA, 19 nt, Artificial Sequence
  Description of Artificial Sequence: Synthetic oligonucleotide
uagcacgauacauagcaag

SEQ ID NO: 643930 - RNA, 19 nt, Artificial Sequence
  Description of Artificial Sequence: Synthetic oligonucleotide
uguagcaucggcacagcug

SEQ ID NO: 643931 - RNA, 19 nt, Artificial Sequence
  Description of Artificial Sequence: Synthetic oligonucleotide
guagauuggcagaagagag

SEQ ID NO: 643932 - RNA, 19 nt, Artificial Sequence
  Description of Artificial Sequence: Synthetic oligonucleotide
acguauacaaucguaguag

SEQ ID NO: 643933 - RNA, 19 nt, Artificial Sequence
  Description of Artificial Sequence: Synthetic oligonucleotide
cacuugauaucauagucac

SEQ ID NO: 643934 - RNA, 19 nt, Artificial Sequence
  Description of Artificial Sequence: Synthetic oligonucleotide
gguuuccggacuuugaagg

SEQ ID NO: 643935 - RNA, 19 nt, Artificial Sequence
  Description of Artificial Sequence: Synthetic oligonucleotide
ugauaucauagucaccagu

SEQ ID NO: 643936 - RNA, 19 nt, Artificial Sequence
  Description of Artificial Sequence: Synthetic oligonucleotide
uucggugagaagauagucu

SEQ ID NO: 643937 - RNA, 19 nt, Artificial Sequence
  Description of Artificial Sequence: Synthetic oligonucleotide
agcggaaccagagagggcg

SEQ ID NO: 643938 - RNA, 19 nt, Artificial Sequence
  Description of Artificial Sequence: Synthetic oligonucleotide
gagacaaguaguuucugca

SEQ ID NO: 643939 - RNA, 19 nt, Artificial Sequence
  Description of Artificial Sequence: Synthetic oligonucleotide
caauaugaauaguaggcuc

SEQ ID NO: 643940 - RNA, 19 nt, Artificial Sequence
  Description of Artificial Sequence: Synthetic oligonucleotide
uacaaucguaguagauugg

SEQ ID NO: 643941 - RNA, 19 nt, Artificial Sequence
  Description of Artificial Sequence: Synthetic oligonucleotide
ucagguauccugaguguag

SEQ ID NO: 643942 - RNA, 19 nt, Artificial Sequence
  Description of Artificial Sequence: Synthetic oligonucleotide
ggagugguagaucuggugg

SEQ ID NO: 643943 - RNA, 19 nt, Artificial Sequence
  Description of Artificial Sequence: Synthetic oligonucleotide
uauacaaucguaguagauu

SEQ ID NO: 643944 - RNA, 19 nt, Artificial Sequence
  Description of Artificial Sequence: Synthetic oligonucleotide
gugagaguucuuuauuucc

SEQ ID NO: 643945 - RNA, 19 nt, Artificial Sequence
  Description of Artificial Sequence: Synthetic oligonucleotide
gaguaacccaugaaaagcc

SEQ ID NO: 643946 - RNA, 19 nt, Artificial Sequence
  Description of Artificial Sequence: Synthetic oligonucleotide
uguuccgacgcgcccaggg

SEQ ID NO: 643947 - RNA, 19 nt, Artificial Sequence
  Description of Artificial Sequence: Synthetic oligonucleotide
ugaaucgaggaguuguuuc

SEQ ID NO: 643948 - RNA, 19 nt, Artificial Sequence
  Description of Artificial Sequence: Synthetic oligonucleotide
guaggaguuccucauuucc

SEQ ID NO: 643949 - RNA, 19 nt, Artificial Sequence
  Description of Artificial Sequence: Synthetic oligonucleotide
aguagauuggcagaagaga

SEQ ID NO: 643950 - RNA, 19 nt, Artificial Sequence
  Description of Artificial Sequence: Synthetic oligonucleotide
agaagauagucuucuguga

SEQ ID NO: 643951 - RNA, 19 nt, Artificial Sequence
  Description of Artificial Sequence: Synthetic oligonucleotide
uguugcucagcggucaggg

SEQ ID NO: 643952 - RNA, 19 nt, Artificial Sequence
  Description of Artificial Sequence: Synthetic oligonucleotide
acuugugaaggcucagauc

SEQ ID NO: 643953 - RNA, 19 nt, Artificial Sequence
  Description of Artificial Sequence: Synthetic oligonucleotide
uuccggacuuugaagguag

SEQ ID NO: 643954 - RNA, 19 nt, Artificial Sequence
  Description of Artificial Sequence: Synthetic oligonucleotide
auacauagcaaggaguggu

SEQ ID NO: 643955 - RNA, 19 nt, Artificial Sequence
  Description of Artificial Sequence: Synthetic oligonucleotide
ugugagaguucuuuauuuc

SEQ ID NO: 643956 - RNA, 19 nt, Artificial Sequence
  Description of Artificial Sequence: Synthetic oligonucleotide
auaccuuaagccauuuguc

SEQ ID NO: 643957 - RNA, 19 nt, Artificial Sequence
  Description of Artificial Sequence: Synthetic oligonucleotide
ucgacaccgggccacagcc

SEQ ID NO: 643958 - RNA, 19 nt, Artificial Sequence
  Description of Artificial Sequence: Synthetic oligonucleotide
ucauugagaacuggggccc

SEQ ID NO: 643959 - RNA, 19 nt, Artificial Sequence
  Description of Artificial Sequence: Synthetic oligonucleotide
gauggagaugaugagccgc

SEQ ID NO: 643960 - RNA, 19 nt, Artificial Sequence
  Description of Artificial Sequence: Synthetic oligonucleotide
uguaacgggcuacccaggc

SEQ ID NO: 643961 - RNA, 19 nt, Artificial Sequence
  Description of Artificial Sequence: Synthetic oligonucleotide
gaucauagucuucggugag

SEQ ID NO: 643962 - RNA, 19 nt, Artificial Sequence
  Description of Artificial Sequence: Synthetic oligonucleotide
guuugaagauguaacgggc

SEQ ID NO: 643963 - RNA, 19 nt, Artificial Sequence
  Description of Artificial Sequence: Synthetic oligonucleotide
cacgauacauagcaaggag

SEQ ID NO: 643964 - RNA, 19 nt, Artificial Sequence
  Description of Artificial Sequence: Synthetic oligonucleotide
aggaguuguuucaaagagc

SEQ ID NO: 643965 - RNA, 19 nt, Artificial Sequence
  Description of Artificial Sequence: Synthetic oligonucleotide
uagauuggcagaagagaga

SEQ ID NO: 643966 - RNA, 19 nt, Artificial Sequence
  Description of Artificial Sequence: Synthetic oligonucleotide
acaaguaguuucugcacca

SEQ ID NO: 643967 - RNA, 19 nt, Artificial Sequence
  Description of Artificial Sequence: Synthetic oligonucleotide
ucauguagugguucauuga

SEQ ID NO: 643968 - RNA, 19 nt, Artificial Sequence
  Description of Artificial Sequence: Synthetic oligonucleotide
ucagauccucgacaccggg

SEQ ID NO: 643969 - RNA, 19 nt, Artificial Sequence
  Description of Artificial Sequence: Synthetic oligonucleotide
ggcguuugaagauguaacg

SEQ ID NO: 643970 - RNA, 19 nt, Artificial Sequence
  Description of Artificial Sequence: Synthetic oligonucleotide
aauugagaggccugucaaa

SEQ ID NO: 643971 - RNA, 19 nt, Artificial Sequence
  Description of Artificial Sequence: Synthetic oligonucleotide
agagccaauggguagccca

SEQ ID NO: 643972 - RNA, 19 nt, Artificial Sequence
  Description of Artificial Sequence: Synthetic oligonucleotide
uaggaguuccucauuuccu

SEQ ID NO: 643973 - RNA, 19 nt, Artificial Sequence
  Description of Artificial Sequence: Synthetic oligonucleotide
agcacgauacauagcaagg

SEQ ID NO: 643974 - RNA, 19 nt, Artificial Sequence
  Description of Artificial Sequence: Synthetic oligonucleotide
ugguuuccggacuuugaag

SEQ ID NO: 643975 - RNA, 19 nt, Artificial Sequence
  Description of Artificial Sequence: Synthetic oligonucleotide
aggcguuugaagauguaac

SEQ ID NO: 643976 - RNA, 19 nt, Artificial Sequence
  Description of Artificial Sequence: Synthetic oligonucleotide
uugauaucauagucaccag

SEQ ID NO: 643977 - RNA, 19 nt, Artificial Sequence
  Description of Artificial Sequence: Synthetic oligonucleotide
uaacgggcuacccaggcau

SEQ ID NO: 643978 - RNA, 19 nt, Artificial Sequence
  Description of Artificial Sequence: Synthetic oligonucleotide
uugucccaugugaagagac

SEQ ID NO: 643979 - RNA, 19 nt, Artificial Sequence
  Description of Artificial Sequence: Synthetic oligonucleotide
guaguagauuggcagaaga

SEQ ID NO: 643980 - RNA, 19 nt, Artificial Sequence
  Description of Artificial Sequence: Synthetic oligonucleotide
ggaguaacccaugaaaagc

SEQ ID NO: 643981 - RNA, 19 nt, Artificial Sequence
  Description of Artificial Sequence: Synthetic oligonucleotide
ugucgguaaaacagagcca

SEQ ID NO: 643982 - RNA, 19 nt, Artificial Sequence
  Description of Artificial Sequence: Synthetic oligonucleotide
agagauaaggcaacgugca

SEQ ID NO: 643983 - RNA, 19 nt, Artificial Sequence
  Description of Artificial Sequence: Synthetic oligonucleotide
aucguaguagauuggcaga

SEQ ID NO: 643984 - RNA, 19 nt, Artificial Sequence
  Description of Artificial Sequence: Synthetic oligonucleotide
ucggugagaagauagucuu

SEQ ID NO: 643985 - RNA, 19 nt, Artificial Sequence
  Description of Artificial Sequence: Synthetic oligonucleotide
uggauuaggcuggugaccu

SEQ ID NO: 643986 - RNA, 19 nt, Artificial Sequence
  Description of Artificial Sequence: Synthetic oligonucleotide
ucuucggugagaagauagu

SEQ ID NO: 643987 - RNA, 19 nt, Artificial Sequence
  Description of Artificial Sequence: Synthetic oligonucleotide
gagaacacguaugaaagaa

SEQ ID NO: 643988 - RNA, 19 nt, Artificial Sequence
  Description of Artificial Sequence: Synthetic oligonucleotide
acguaugaaagaaagcagu

SEQ ID NO: 643989 - RNA, 19 nt, Artificial Sequence
  Description of Artificial Sequence: Synthetic oligonucleotide
ggaagggacaccccgaaug

SEQ ID NO: 643990 - RNA, 19 nt, Artificial Sequence
  Description of Artificial Sequence: Synthetic oligonucleotide
agcauguacgugcagcgga

SEQ ID NO: 643991 - RNA, 19 nt, Artificial Sequence
  Description of Artificial Sequence: Synthetic oligonucleotide
uugguaucuucccuggcau

SEQ ID NO: 643992 - RNA, 19 nt, Artificial Sequence
  Description of Artificial Sequence: Synthetic oligonucleotide
guaaggagaggccuuguga

SEQ ID NO: 643993 - RNA, 19 nt, Artificial Sequence
  Description of Artificial Sequence: Synthetic oligonucleotide
aucggcacguauacaaucg

SEQ ID NO: 643994 - RNA, 19 nt, Artificial Sequence
  Description of Artificial Sequence: Synthetic oligonucleotide
agaucugguggccaaaguu

SEQ ID NO: 643995 - RNA, 19 nt, Artificial Sequence
  Description of Artificial Sequence: Synthetic oligonucleotide
uguacgugcagcggaacca

SEQ ID NO: 643996 - RNA, 19 nt, Artificial Sequence
  Description of Artificial Sequence: Synthetic oligonucleotide
cuugccccagacuagcaug

SEQ ID NO: 643997 - RNA, 19 nt, Artificial Sequence
  Description of Artificial Sequence: Synthetic oligonucleotide
uaucggcacguauacaauc

SEQ ID NO: 643998 - RNA, 19 nt, Artificial Sequence
  Description of Artificial Sequence: Synthetic oligonucleotide
ucugguuuccggacuuuga

SEQ ID NO: 643999 - RNA, 19 nt, Artificial Sequence
  Description of Artificial Sequence: Synthetic oligonucleotide
gucuucggugagaagauag

SEQ ID NO: 644000 - RNA, 19 nt, Artificial Sequence
  Description of Artificial Sequence: Synthetic oligonucleotide
gacgucgccaacuugugaa

SEQ ID NO: 644001 - RNA, 19 nt, Artificial Sequence
  Description of Artificial Sequence: Synthetic oligonucleotide
cagacgccaucuuaagugc

SEQ ID NO: 644002 - RNA, 19 nt, Artificial Sequence
  Description of Artificial Sequence: Synthetic oligonucleotide
ucagcggucagggaauccc

SEQ ID NO: 644003 - RNA, 19 nt, Artificial Sequence
  Description of Artificial Sequence: Synthetic oligonucleotide
uggugaaaauggcagugau

SEQ ID NO: 644004 - RNA, 19 nt, Artificial Sequence
  Description of Artificial Sequence: Synthetic oligonucleotide
ugaagauguaacgggcuac

SEQ ID NO: 644005 - RNA, 19 nt, Artificial Sequence
  Description of Artificial Sequence: Synthetic oligonucleotide
guacagcacaaacuugccc

SEQ ID NO: 644006 - RNA, 19 nt, Artificial Sequence
  Description of Artificial Sequence: Synthetic oligonucleotide
aagacauguccaaggaagu

SEQ ID NO: 644007 - RNA, 19 nt, Artificial Sequence
  Description of Artificial Sequence: Synthetic oligonucleotide
gcagguauggugcuguuug

SEQ ID NO: 644008 - RNA, 19 nt, Artificial Sequence
  Description of Artificial Sequence: Synthetic oligonucleotide
agucaauacacagaccaau

SEQ ID NO: 644009 - RNA, 19 nt, Artificial Sequence
  Description of Artificial Sequence: Synthetic oligonucleotide
ugucccaugugaagagaca

SEQ ID NO: 644010 - RNA, 19 nt, Artificial Sequence
  Description of Artificial Sequence: Synthetic oligonucleotide
uccgucauaguagucaaua

SEQ ID NO: 644011 - RNA, 19 nt, Artificial Sequence
  Description of Artificial Sequence: Synthetic oligonucleotide
uugagaggccugucaaagc

SEQ ID NO: 644012 - RNA, 19 nt, Artificial Sequence
  Description of Artificial Sequence: Synthetic oligonucleotide
guaacccaugaaaagccag

SEQ ID NO: 644013 - RNA, 19 nt, Artificial Sequence
  Description of Artificial Sequence: Synthetic oligonucleotide
cguuugaagauguaacggg

SEQ ID NO: 644014 - RNA, 19 nt, Artificial Sequence
  Description of Artificial Sequence: Synthetic oligonucleotide
caaguaguagaagggcugc

SEQ ID NO: 644015 - RNA, 19 nt, Artificial Sequence
  Description of Artificial Sequence: Synthetic oligonucleotide
ugccguugaaucgaggagu

SEQ ID NO: 644016 - RNA, 19 nt, Artificial Sequence
  Description of Artificial Sequence: Synthetic oligonucleotide
aucauucgcaggaugagga

SEQ ID NO: 644017 - RNA, 19 nt, Artificial Sequence
  Description of Artificial Sequence: Synthetic oligonucleotide
caucauucgcaggaugagg

SEQ ID NO: 644018 - RNA, 19 nt, Artificial Sequence
  Description of Artificial Sequence: Synthetic oligonucleotide
acuugauaucauagucacc

SEQ ID NO: 644019 - RNA, 19 nt, Artificial Sequence
  Description of Artificial Sequence: Synthetic oligonucleotide
guaaugucgguaaaacaga

SEQ ID NO: 644020 - RNA, 19 nt, Artificial Sequence
  Description of Artificial Sequence: Synthetic oligonucleotide
agcaaaucagguauccuga

SEQ ID NO: 644021 - RNA, 19 nt, Artificial Sequence
  Description of Artificial Sequence: Synthetic oligonucleotide
gguaucggcacguauacaa

SEQ ID NO: 644022 - RNA, 19 nt, Artificial Sequence
  Description of Artificial Sequence: Synthetic oligonucleotide
acaugguaguguaaacuag

SEQ ID NO: 644023 - RNA, 19 nt, Artificial Sequence
  Description of Artificial Sequence: Synthetic oligonucleotide
gacgccaucuuaagugcgg

SEQ ID NO: 644024 - RNA, 19 nt, Artificial Sequence
  Description of Artificial Sequence: Synthetic oligonucleotide
gcucagauccucgacaccg

SEQ ID NO: 644025 - RNA, 19 nt, Artificial Sequence
  Description of Artificial Sequence: Synthetic oligonucleotide
auagcaaggagugguagau

SEQ ID NO: 644026 - RNA, 19 nt, Artificial Sequence
  Description of Artificial Sequence: Synthetic oligonucleotide
gaagagacagaaggcaguc

SEQ ID NO: 644027 - RNA, 19 nt, Artificial Sequence
  Description of Artificial Sequence: Synthetic oligonucleotide
cagacauguauaccuuaag

SEQ ID NO: 644028 - RNA, 19 nt, Artificial Sequence
  Description of Artificial Sequence: Synthetic oligonucleotide
gagggcggcgaucauaguc

SEQ ID NO: 644029 - RNA, 19 nt, Artificial Sequence
  Description of Artificial Sequence: Synthetic oligonucleotide
gaagauagucuucugugau

SEQ ID NO: 644030 - RNA, 19 nt, Artificial Sequence
  Description of Artificial Sequence: Synthetic oligonucleotide
gucgguaaaacagagccaa

SEQ ID NO: 644031 - RNA, 19 nt, Artificial Sequence
  Description of Artificial Sequence: Synthetic oligonucleotide
gccaagaacaguaaggaga

SEQ ID NO: 644032 - RNA, 19 nt, Artificial Sequence
  Description of Artificial Sequence: Synthetic oligonucleotide
ggcacguauacaaucguag

SEQ ID NO: 644033 - RNA, 19 nt, Artificial Sequence
  Description of Artificial Sequence: Synthetic oligonucleotide
uacauagcaaggaguggua

SEQ ID NO: 644034 - RNA, 19 nt, Artificial Sequence
  Description of Artificial Sequence: Synthetic oligonucleotide
aagcaauugagaggccugu

SEQ ID NO: 644035 - RNA, 19 nt, Artificial Sequence
  Description of Artificial Sequence: Synthetic oligonucleotide
ucauguuggcacacgcguc

SEQ ID NO: 644036 - RNA, 19 nt, Artificial Sequence
  Description of Artificial Sequence: Synthetic oligonucleotide
ccagggaaaucuauuauuc

SEQ ID NO: 644037 - RNA, 19 nt, Artificial Sequence
  Description of Artificial Sequence: Synthetic oligonucleotide
acucaggcgcuugagagca

SEQ ID NO: 644038 - RNA, 19 nt, Artificial Sequence
  Description of Artificial Sequence: Synthetic oligonucleotide
cacaugguaguguaaacua

SEQ ID NO: 644039 - RNA, 19 nt, Artificial Sequence
  Description of Artificial Sequence: Synthetic oligonucleotide
acgauacauagcaaggagu

SEQ ID NO: 644040 - RNA, 19 nt, Artificial Sequence
  Description of Artificial Sequence: Synthetic oligonucleotide
gcguuugaagauguaacgg

SEQ ID NO: 644041 - RNA, 19 nt, Artificial Sequence
  Description of Artificial Sequence: Synthetic oligonucleotide
cgauacauagcaaggagug

SEQ ID NO: 644042 - RNA, 19 nt, Artificial Sequence
  Description of Artificial Sequence: Synthetic oligonucleotide
uuguuucaaagagccacac

SEQ ID NO: 644043 - RNA, 19 nt, Artificial Sequence
  Description of Artificial Sequence: Synthetic oligonucleotide
caggugacguauuuguaca

SEQ ID NO: 644044 - RNA, 19 nt, Artificial Sequence
  Description of Artificial Sequence: Synthetic oligonucleotide
cagguauccugaguguagg

SEQ ID NO: 644045 - RNA, 19 nt, Artificial Sequence
  Description of Artificial Sequence: Synthetic oligonucleotide
gucgccaacuugugaaggc

SEQ ID NO: 644046 - RNA, 19 nt, Artificial Sequence
  Description of Artificial Sequence: Synthetic oligonucleotide
ucguaguagauuggcagaa

SEQ ID NO: 644047 - RNA, 19 nt, Artificial Sequence
  Description of Artificial Sequence: Synthetic oligonucleotide
gugccguugaaucgaggag

SEQ ID NO: 644048 - RNA, 19 nt, Artificial Sequence
  Description of Artificial Sequence: Synthetic oligonucleotide
agggccucguacccuuccc

SEQ ID NO: 644049 - RNA, 19 nt, Artificial Sequence
  Description of Artificial Sequence: Synthetic oligonucleotide
cauguccaaggaaguagac

SEQ ID NO: 644050 - RNA, 19 nt, Artificial Sequence
  Description of Artificial Sequence: Synthetic oligonucleotide
agagagacacaaguuccug

SEQ ID NO: 644051 - RNA, 19 nt, Artificial Sequence
  Description of Artificial Sequence: Synthetic oligonucleotide
aucggcacagcugggagug

SEQ ID NO: 644052 - RNA, 19 nt, Artificial Sequence
  Description of Artificial Sequence: Synthetic oligonucleotide
guauaccuuaagccauuug

SEQ ID NO: 644053 - RNA, 19 nt, Artificial Sequence
  Description of Artificial Sequence: Synthetic oligonucleotide
ugauuuuaucugguauagu

SEQ ID NO: 644054 - RNA, 19 nt, Artificial Sequence
  Description of Artificial Sequence: Synthetic oligonucleotide
uagcauguacgugcagcgg

SEQ ID NO: 644055 - RNA, 19 nt, Artificial Sequence
  Description of Artificial Sequence: Synthetic oligonucleotide
cauagcaaggagugguaga

SEQ ID NO: 644056 - RNA, 19 nt, Artificial Sequence
  Description of Artificial Sequence: Synthetic oligonucleotide
cuucggugagaagauaguc

SEQ ID NO: 644057 - RNA, 19 nt, Artificial Sequence
  Description of Artificial Sequence: Synthetic oligonucleotide
agguaggaguuccucauuu

SEQ ID NO: 644058 - RNA, 19 nt, Artificial Sequence
  Description of Artificial Sequence: Synthetic oligonucleotide
cuggauuaggcuggugacc

SEQ ID NO: 644059 - RNA, 19 nt, Artificial Sequence
  Description of Artificial Sequence: Synthetic oligonucleotide
aucuuaagugcgggcgccc

SEQ ID NO: 644060 - RNA, 19 nt, Artificial Sequence
  Description of Artificial Sequence: Synthetic oligonucleotide
auucgcaggaugaggaacu

SEQ ID NO: 644061 - RNA, 19 nt, Artificial Sequence
  Description of Artificial Sequence: Synthetic oligonucleotide
ucggcacguauacaaucgu

SEQ ID NO: 644062 - RNA, 19 nt, Artificial Sequence
  Description of Artificial Sequence: Synthetic oligonucleotide
uccggacuuugaagguagg

SEQ ID NO: 644063 - RNA, 19 nt, Artificial Sequence
  Description of Artificial Sequence: Synthetic oligonucleotide
aaucgaggaguuguuucaa

SEQ ID NO: 644064 - RNA, 19 nt, Artificial Sequence
  Description of Artificial Sequence: Synthetic oligonucleotide
cccgaaugugggcagaacg

SEQ ID NO: 644065 - RNA, 19 nt, Artificial Sequence
  Description of Artificial Sequence: Synthetic oligonucleotide
augugggcagaacgcggcg

SEQ ID NO: 644066 - RNA, 19 nt, Artificial Sequence
  Description of Artificial Sequence: Synthetic oligonucleotide
uugugaaggcucagauccu

SEQ ID NO: 644067 - RNA, 19 nt, Artificial Sequence
  Description of Artificial Sequence: Synthetic oligonucleotide
cauguauaccuuaagccau

SEQ ID NO: 644068 - RNA, 19 nt, Artificial Sequence
  Description of Artificial Sequence: Synthetic oligonucleotide
ccaaguaguagaagggcug

SEQ ID NO: 644069 - RNA, 19 nt, Artificial Sequence
  Description of Artificial Sequence: Synthetic oligonucleotide
acauguccaaggaaguaga

SEQ ID NO: 644070 - RNA, 19 nt, Artificial Sequence
  Description of Artificial Sequence: Synthetic oligonucleotide
caaucguaguagauuggca

SEQ ID NO: 644071 - RNA, 19 nt, Artificial Sequence
  Description of Artificial Sequence: Synthetic oligonucleotide
caucuuaagugcgggcgcc

SEQ ID NO: 644072 - RNA, 19 nt, Artificial Sequence
  Description of Artificial Sequence: Synthetic oligonucleotide
ucuuaagugcgggcgcccc

SEQ ID NO: 644073 - RNA, 19 nt, Artificial Sequence
  Description of Artificial Sequence: Synthetic oligonucleotide
cagauccucgacaccgggc

SEQ ID NO: 644074 - RNA, 19 nt, Artificial Sequence
  Description of Artificial Sequence: Synthetic oligonucleotide
caauugagaggccugucaa

SEQ ID NO: 644075 - RNA, 19 nt, Artificial Sequence
  Description of Artificial Sequence: Synthetic oligonucleotide
ugcucagcggucagggaau

SEQ ID NO: 644076 - RNA, 19 nt, Artificial Sequence
  Description of Artificial Sequence: Synthetic oligonucleotide
agggacgucgccaacuugu

SEQ ID NO: 644077 - RNA, 19 nt, Artificial Sequence
  Description of Artificial Sequence: Synthetic oligonucleotide
guuguuucaaagagccaca

SEQ ID NO: 644078 - RNA, 19 nt, Artificial Sequence
  Description of Artificial Sequence: Synthetic oligonucleotide
acgucgccaacuugugaag

SEQ ID NO: 644079 - RNA, 19 nt, Artificial Sequence
  Description of Artificial Sequence: Synthetic oligonucleotide
cacguauacaaucguagua

SEQ ID NO: 644080 - RNA, 19 nt, Artificial Sequence
  Description of Artificial Sequence: Synthetic oligonucleotide
gaaaagccaguggaugguc

SEQ ID NO: 644081 - RNA, 19 nt, Artificial Sequence
  Description of Artificial Sequence: Synthetic oligonucleotide
agcgccuguuccgacgcgc

SEQ ID NO: 644082 - RNA, 19 nt, Artificial Sequence
  Description of Artificial Sequence: Synthetic oligonucleotide
gcagucauggaguaaccca

SEQ ID NO: 644083 - RNA, 19 nt, Artificial Sequence
  Description of Artificial Sequence: Synthetic oligonucleotide
gacgcgcccagggacgucg

SEQ ID NO: 644084 - RNA, 19 nt, Artificial Sequence
  Description of Artificial Sequence: Synthetic oligonucleotide
cccgacaaaaugcacacuc

SEQ ID NO: 644085 - RNA, 19 nt, Artificial Sequence
  Description of Artificial Sequence: Synthetic oligonucleotide
cuguagcacgauacauagc

SEQ ID NO: 644086 - RNA, 19 nt, Artificial Sequence
  Description of Artificial Sequence: Synthetic oligonucleotide
uuccuagauucuugugccu

SEQ ID NO: 644087 - RNA, 19 nt, Artificial Sequence
  Description of Artificial Sequence: Synthetic oligonucleotide
gcaaaucagguauccugag

SEQ ID NO: 644088 - RNA, 19 nt, Artificial Sequence
  Description of Artificial Sequence: Synthetic oligonucleotide
agggagacaaguaguuucu

SEQ ID NO: 644089 - RNA, 19 nt, Artificial Sequence
  Description of Artificial Sequence: Synthetic oligonucleotide
ggaacuguagcacgauaca

SEQ ID NO: 644090 - RNA, 19 nt, Artificial Sequence
  Description of Artificial Sequence: Synthetic oligonucleotide
uuuccggacuuugaaggua

SEQ ID NO: 644091 - RNA, 19 nt, Artificial Sequence
  Description of Artificial Sequence: Synthetic oligonucleotide
cugcagacgccaucuuaag

SEQ ID NO: 644092 - RNA, 19 nt, Artificial Sequence
  Description of Artificial Sequence: Synthetic oligonucleotide
caaguaguuucugcaccag

SEQ ID NO: 644093 - RNA, 19 nt, Artificial Sequence
  Description of Artificial Sequence: Synthetic oligonucleotide
uccuagauucuugugccuu

SEQ ID NO: 644094 - RNA, 19 nt, Artificial Sequence
  Description of Artificial Sequence: Synthetic oligonucleotide
accccgaauggcauauuuc

SEQ ID NO: 644095 - RNA, 19 nt, Artificial Sequence
  Description of Artificial Sequence: Synthetic oligonucleotide
acuugccccagacuagcau

SEQ ID NO: 644096 - RNA, 19 nt, Artificial Sequence
  Description of Artificial Sequence: Synthetic oligonucleotide
auccucgacaccgggccac

SEQ ID NO: 644097 - RNA, 19 nt, Artificial Sequence
  Description of Artificial Sequence: Synthetic oligonucleotide
agggcggcgaucauagucu

SEQ ID NO: 644098 - RNA, 19 nt, Artificial Sequence
  Description of Artificial Sequence: Synthetic oligonucleotide
agacgccaucuuaagugcg

SEQ ID NO: 644099 - RNA, 19 nt, Artificial Sequence
  Description of Artificial Sequence: Synthetic oligonucleotide
agaacacguaugaaagaaa

SEQ ID NO: 644100 - RNA, 19 nt, Artificial Sequence
  Description of Artificial Sequence: Synthetic oligonucleotide
uacccaggcauugguguug

SEQ ID NO: 644101 - RNA, 19 nt, Artificial Sequence
  Description of Artificial Sequence: Synthetic oligonucleotide
cguaugaaagaaagcaguc

SEQ ID NO: 644102 - RNA, 19 nt, Artificial Sequence
  Description of Artificial Sequence: Synthetic oligonucleotide
guacgugcagcggaaccag

SEQ ID NO: 644103 - RNA, 19 nt, Artificial Sequence
  Description of Artificial Sequence: Synthetic oligonucleotide
cccagccccgacaaaaugc

SEQ ID NO: 644104 - RNA, 19 nt, Artificial Sequence
  Description of Artificial Sequence: Synthetic oligonucleotide
ccacuugauaucauaguca

SEQ ID NO: 644105 - RNA, 19 nt, Artificial Sequence
  Description of Artificial Sequence: Synthetic oligonucleotide
ccgacaaaaugcacacucc

SEQ ID NO: 644106 - RNA, 19 nt, Artificial Sequence
  Description of Artificial Sequence: Synthetic oligonucleotide
uugaaucgaggaguuguuu

SEQ ID NO: 644107 - RNA, 19 nt, Artificial Sequence
  Description of Artificial Sequence: Synthetic oligonucleotide
agccccgacaaaaugcaca

SEQ ID NO: 644108 - RNA, 19 nt, Artificial Sequence
  Description of Artificial Sequence: Synthetic oligonucleotide
auaguaggcucaagaagaa

SEQ ID NO: 644109 - RNA, 19 nt, Artificial Sequence
  Description of Artificial Sequence: Synthetic oligonucleotide
guauggugcuguuugguau

SEQ ID NO: 644110 - RNA, 19 nt, Artificial Sequence
  Description of Artificial Sequence: Synthetic oligonucleotide
auguagugguucauugaga

SEQ ID NO: 644111 - RNA, 19 nt, Artificial Sequence
  Description of Artificial Sequence: Synthetic oligonucleotide
uguauaccuuaagccauuu

SEQ ID NO: 644112 - RNA, 19 nt, Artificial Sequence
  Description of Artificial Sequence: Synthetic oligonucleotide
ggcccuaccaagaaggcuc

SEQ ID NO: 644113 - RNA, 19 nt, Artificial Sequence
  Description of Artificial Sequence: Synthetic oligonucleotide
uccccguccgcugcagacg

SEQ ID NO: 644114 - RNA, 19 nt, Artificial Sequence
  Description of Artificial Sequence: Synthetic oligonucleotide
cucgacaccgggccacagc

SEQ ID NO: 644115 - RNA, 19 nt, Artificial Sequence
  Description of Artificial Sequence: Synthetic oligonucleotide
uucgcaggaugaggaacug

SEQ ID NO: 644116 - RNA, 19 nt, Artificial Sequence
  Description of Artificial Sequence: Synthetic oligonucleotide
caauaacaaugaggaauuc

SEQ ID NO: 644117 - RNA, 19 nt, Artificial Sequence
  Description of Artificial Sequence: Synthetic oligonucleotide
ccaguggauggucugcugc

SEQ ID NO: 644118 - RNA, 19 nt, Artificial Sequence
  Description of Artificial Sequence: Synthetic oligonucleotide
cccuuuggcuguagcaucg

SEQ ID NO: 644119 - RNA, 19 nt, Artificial Sequence
  Description of Artificial Sequence: Synthetic oligonucleotide
ugaggaacuguagcacgau

SEQ ID NO: 644120 - RNA, 19 nt, Artificial Sequence
  Description of Artificial Sequence: Synthetic oligonucleotide
uggcaccauugcuuuguga

SEQ ID NO: 644121 - RNA, 19 nt, Artificial Sequence
  Description of Artificial Sequence: Synthetic oligonucleotide
guaacgggcuacccaggca

SEQ ID NO: 644122 - RNA, 19 nt, Artificial Sequence
  Description of Artificial Sequence: Synthetic oligonucleotide
agcuccgcgccccgaaugu

SEQ ID NO: 644123 - RNA, 19 nt, Artificial Sequence
  Description of Artificial Sequence: Synthetic oligonucleotide
cugaguguaggccgugcca

SEQ ID NO: 644124 - RNA, 19 nt, Artificial Sequence
  Description of Artificial Sequence: Synthetic oligonucleotide
auguaacgggcuacccagg

SEQ ID NO: 644125 - RNA, 19 nt, Artificial Sequence
  Description of Artificial Sequence: Synthetic oligonucleotide
agacccugaugagcucagc

SEQ ID NO: 644126 - RNA, 19 nt, Artificial Sequence
  Description of Artificial Sequence: Synthetic oligonucleotide
ccaucuuaagugcgggcgc

SEQ ID NO: 644127 - RNA, 19 nt, Artificial Sequence
  Description of Artificial Sequence: Synthetic oligonucleotide
aggacacaauguggcauug

SEQ ID NO: 644128 - RNA, 19 nt, Artificial Sequence
  Description of Artificial Sequence: Synthetic oligonucleotide
agacuagcauguacgugca

SEQ ID NO: 644129 - RNA, 19 nt, Artificial Sequence
  Description of Artificial Sequence: Synthetic oligonucleotide
gguugaagccccucugcuc

SEQ ID NO: 644130 - RNA, 19 nt, Artificial Sequence
  Description of Artificial Sequence: Synthetic oligonucleotide
cuagauucuugugccuuca

SEQ ID NO: 644131 - RNA, 19 nt, Artificial Sequence
  Description of Artificial Sequence: Synthetic oligonucleotide
gucaggggugcuagcagug

SEQ ID NO: 644132 - RNA, 19 nt, Artificial Sequence
  Description of Artificial Sequence: Synthetic oligonucleotide
ugaggcguuugaagaugua

SEQ ID NO: 644133 - RNA, 19 nt, Artificial Sequence
  Description of Artificial Sequence: Synthetic oligonucleotide
gcgguaucggcacguauac

SEQ ID NO: 644134 - RNA, 19 nt, Artificial Sequence
  Description of Artificial Sequence: Synthetic oligonucleotide
agcaucggcacagcuggga

SEQ ID NO: 644135 - RNA, 19 nt, Artificial Sequence
  Description of Artificial Sequence: Synthetic oligonucleotide
gcacacgcgucccauuuug

SEQ ID NO: 644136 - RNA, 19 nt, Artificial Sequence
  Description of Artificial Sequence: Synthetic oligonucleotide
gccccgacaaaaugcacac

SEQ ID NO: 644137 - RNA, 19 nt, Artificial Sequence
  Description of Artificial Sequence: Synthetic oligonucleotide
guuuccggacuuugaaggu

SEQ ID NO: 644138 - RNA, 19 nt, Artificial Sequence
  Description of Artificial Sequence: Synthetic oligonucleotide
gcaauaugaauaguaggcu

SEQ ID NO: 644139 - RNA, 19 nt, Artificial Sequence
  Description of Artificial Sequence: Synthetic oligonucleotide
gauuggcagaagagagaca

SEQ ID NO: 644140 - RNA, 19 nt, Artificial Sequence
  Description of Artificial Sequence: Synthetic oligonucleotide
ucucuuuucuuggcaccau

SEQ ID NO: 644141 - RNA, 19 nt, Artificial Sequence
  Description of Artificial Sequence: Synthetic oligonucleotide
gggaaaucuauuauucccu

SEQ ID NO: 644142 - RNA, 19 nt, Artificial Sequence
  Description of Artificial Sequence: Synthetic oligonucleotide
ccgucauaguagucaauac

SEQ ID NO: 644143 - RNA, 19 nt, Artificial Sequence
  Description of Artificial Sequence: Synthetic oligonucleotide
cuugugagaguucuuuauu

SEQ ID NO: 644144 - RNA, 19 nt, Artificial Sequence
  Description of Artificial Sequence: Synthetic oligonucleotide
cauguacgugcagcggaac

SEQ ID NO: 644145 - RNA, 19 nt, Artificial Sequence
  Description of Artificial Sequence: Synthetic oligonucleotide
aggguguagcccaccaggu

SEQ ID NO: 644146 - RNA, 19 nt, Artificial Sequence
  Description of Artificial Sequence: Synthetic oligonucleotide
ccuagauucuugugccuuc

SEQ ID NO: 644147 - RNA, 19 nt, Artificial Sequence
  Description of Artificial Sequence: Synthetic oligonucleotide
gcuagagggaagagauaag

SEQ ID NO: 644148 - RNA, 19 nt, Artificial Sequence
  Description of Artificial Sequence: Synthetic oligonucleotide
gcaagcacagagaacacgu

SEQ ID NO: 644149 - RNA, 19 nt, Artificial Sequence
  Description of Artificial Sequence: Synthetic oligonucleotide
ucgcaggaugaggaacugu

SEQ ID NO: 644150 - RNA, 19 nt, Artificial Sequence
  Description of Artificial Sequence: Synthetic oligonucleotide
uggcgguaucggcacguau

SEQ ID NO: 644151 - RNA, 19 nt, Artificial Sequence
  Description of Artificial Sequence: Synthetic oligonucleotide
cauuaaagcccagccccga

SEQ ID NO: 644152 - RNA, 19 nt, Artificial Sequence
  Description of Artificial Sequence: Synthetic oligonucleotide
uccuggcgucugcucucgg

SEQ ID NO: 644153 - RNA, 19 nt, Artificial Sequence
  Description of Artificial Sequence: Synthetic oligonucleotide
cagcggaaccagagagggc

SEQ ID NO: 644154 - RNA, 19 nt, Artificial Sequence
  Description of Artificial Sequence: Synthetic oligonucleotide
gcacgauacauagcaagga

SEQ ID NO: 644155 - RNA, 19 nt, Artificial Sequence
  Description of Artificial Sequence: Synthetic oligonucleotide
guuccgacgcgcccaggga

SEQ ID NO: 644156 - RNA, 19 nt, Artificial Sequence
  Description of Artificial Sequence: Synthetic oligonucleotide
acgggcuacccaggcauug

SEQ ID NO: 644157 - RNA, 19 nt, Artificial Sequence
  Description of Artificial Sequence: Synthetic oligonucleotide
gccuccgucauaguaguca

SEQ ID NO: 644158 - RNA, 19 nt, Artificial Sequence
  Description of Artificial Sequence: Synthetic oligonucleotide
guugcucagcggucaggga

SEQ ID NO: 644159 - RNA, 19 nt, Artificial Sequence
  Description of Artificial Sequence: Synthetic oligonucleotide
gucaauacacagaccaauu

SEQ ID NO: 644160 - RNA, 19 nt, Artificial Sequence
  Description of Artificial Sequence: Synthetic oligonucleotide
cgaucauagucuucgguga

SEQ ID NO: 644161 - RNA, 19 nt, Artificial Sequence
  Description of Artificial Sequence: Synthetic oligonucleotide
guaucuucccuggcauguc

SEQ ID NO: 644162 - RNA, 19 nt, Artificial Sequence
  Description of Artificial Sequence: Synthetic oligonucleotide
guagcacgauacauagcaa

SEQ ID NO: 644163 - RNA, 19 nt, Artificial Sequence
  Description of Artificial Sequence: Synthetic oligonucleotide
cagcuccgcgccccgaaug

SEQ ID NO: 644164 - RNA, 19 nt, Artificial Sequence
  Description of Artificial Sequence: Synthetic oligonucleotide
gcacguauacaaucguagu

SEQ ID NO: 644165 - RNA, 19 nt, Artificial Sequence
  Description of Artificial Sequence: Synthetic oligonucleotide
gaagggagacaaguaguuu

SEQ ID NO: 644166 - RNA, 19 nt, Artificial Sequence
  Description of Artificial Sequence: Synthetic oligonucleotide
gggguggcgguaucggcac

SEQ ID NO: 644167 - RNA, 19 nt, Artificial Sequence
  Description of Artificial Sequence: Synthetic oligonucleotide
cagggacgucgccaacuug

SEQ ID NO: 644168 - RNA, 19 nt, Artificial Sequence
  Description of Artificial Sequence: Synthetic oligonucleotide
uuggcacacgcgucccauu

SEQ ID NO: 644169 - RNA, 19 nt, Artificial Sequence
  Description of Artificial Sequence: Synthetic oligonucleotide
agcagguauggugcuguuu

SEQ ID NO: 644170 - RNA, 19 nt, Artificial Sequence
  Description of Artificial Sequence: Synthetic oligonucleotide
ugccuccgucauaguaguc

SEQ ID NO: 644171 - RNA, 19 nt, Artificial Sequence
  Description of Artificial Sequence: Synthetic oligonucleotide
gggagacaaguaguuucug

SEQ ID NO: 644172 - RNA, 19 nt, Artificial Sequence
  Description of Artificial Sequence: Synthetic oligonucleotide
gcuugcggccaccagggaa

SEQ ID NO: 644173 - RNA, 19 nt, Artificial Sequence
  Description of Artificial Sequence: Synthetic oligonucleotide
ccagacuagcauguacgug

SEQ ID NO: 644174 - RNA, 19 nt, Artificial Sequence
  Description of Artificial Sequence: Synthetic oligonucleotide
ccccgaauggcauauuucu

SEQ ID NO: 644175 - RNA, 19 nt, Artificial Sequence
  Description of Artificial Sequence: Synthetic oligonucleotide
gccaacuugugaaggcuca

SEQ ID NO: 644176 - RNA, 19 nt, Artificial Sequence
  Description of Artificial Sequence: Synthetic oligonucleotide
ggggugcuagcagugaaaa

SEQ ID NO: 644177 - RNA, 19 nt, Artificial Sequence
  Description of Artificial Sequence: Synthetic oligonucleotide
uccucgacaccgggccaca

SEQ ID NO: 644178 - RNA, 19 nt, Artificial Sequence
  Description of Artificial Sequence: Synthetic oligonucleotide
auugagaacuggggcccua

SEQ ID NO: 644179 - RNA, 19 nt, Artificial Sequence
  Description of Artificial Sequence: Synthetic oligonucleotide
gcgcuugagagcagguaug

SEQ ID NO: 644180 - RNA, 19 nt, Artificial Sequence
  Description of Artificial Sequence: Synthetic oligonucleotide
guugaaucgaggaguuguu

SEQ ID NO: 644181 - RNA, 19 nt, Artificial Sequence
  Description of Artificial Sequence: Synthetic oligonucleotide
ggcgguaucggcacguaua

SEQ ID NO: 644182 - RNA, 19 nt, Artificial Sequence
  Description of Artificial Sequence: Synthetic oligonucleotide
ccaacuugugaaggcucag

SEQ ID NO: 644183 - RNA, 19 nt, Artificial Sequence
  Description of Artificial Sequence: Synthetic oligonucleotide
gcccagccccgacaaaaug

SEQ ID NO: 644184 - RNA, 19 nt, Artificial Sequence
  Description of Artificial Sequence: Synthetic oligonucleotide
aacgggcuacccaggcauu

SEQ ID NO: 644185 - RNA, 19 nt, Artificial Sequence
  Description of Artificial Sequence: Synthetic oligonucleotide
guaggccgugccagagggc

SEQ ID NO: 644186 - RNA, 19 nt, Artificial Sequence
  Description of Artificial Sequence: Synthetic oligonucleotide
ggacgucgccaacuuguga

SEQ ID NO: 644187 - RNA, 19 nt, Artificial Sequence
  Description of Artificial Sequence: Synthetic oligonucleotide
guaucggcacguauacaau

SEQ ID NO: 644188 - RNA, 19 nt, Artificial Sequence
  Description of Artificial Sequence: Synthetic oligonucleotide
gggacgucgccaacuugug

SEQ ID NO: 644189 - RNA, 19 nt, Artificial Sequence
  Description of Artificial Sequence: Synthetic oligonucleotide
cguaguagauuggcagaag

SEQ ID NO: 644190 - RNA, 19 nt, Artificial Sequence
  Description of Artificial Sequence: Synthetic oligonucleotide
cagcgccuguuccgacgcg

SEQ ID NO: 644191 - RNA, 19 nt, Artificial Sequence
  Description of Artificial Sequence: Synthetic oligonucleotide
gugcggcccaucauucgca

SEQ ID NO: 644192 - RNA, 19 nt, Artificial Sequence
  Description of Artificial Sequence: Synthetic oligonucleotide
cgucgccaacuugugaagg

SEQ ID NO: 644193 - RNA, 19 nt, Artificial Sequence
  Description of Artificial Sequence: Synthetic oligonucleotide
caucggcacagcugggagu

SEQ ID NO: 644194 - RNA, 19 nt, Artificial Sequence
  Description of Artificial Sequence: Synthetic oligonucleotide
ccuguuccgacgcgcccag

SEQ ID NO: 644195 - RNA, 19 nt, Artificial Sequence
  Description of Artificial Sequence: Synthetic oligonucleotide
cgcaggaugaggaacugua

SEQ ID NO: 644196 - RNA, 19 nt, Artificial Sequence
  Description of Artificial Sequence: Synthetic oligonucleotide
gccuugugagaguucuuua

SEQ ID NO: 644197 - RNA, 19 nt, Artificial Sequence
  Description of Artificial Sequence: Synthetic oligonucleotide
ggggcccuaccaagaaggc

SEQ ID NO: 644198 - RNA, 19 nt, Artificial Sequence
  Description of Artificial Sequence: Synthetic oligonucleotide
ccacaauaacaaugaggaa

SEQ ID NO: 644199 - RNA, 19 nt, Artificial Sequence
  Description of Artificial Sequence: Synthetic oligonucleotide
ggguggcgguaucggcacg

SEQ ID NO: 644200 - RNA, 19 nt, Artificial Sequence
  Description of Artificial Sequence: Synthetic oligonucleotide
gcauguacgugcagcggaa

SEQ ID NO: 644201 - RNA, 19 nt, Artificial Sequence
  Description of Artificial Sequence: Synthetic oligonucleotide
cuacccaggcauugguguu

SEQ ID NO: 644202 - RNA, 19 nt, Artificial Sequence
  Description of Artificial Sequence: Synthetic oligonucleotide
acgcgcccagggacgucgc

SEQ ID NO: 644203 - RNA, 19 nt, Artificial Sequence
  Description of Artificial Sequence: Synthetic oligonucleotide
ggguguagcccaccaggua

SEQ ID NO: 644204 - RNA, 19 nt, Artificial Sequence
  Description of Artificial Sequence: Synthetic oligonucleotide
cgucccauuuugccuuccc

SEQ ID NO: 644205 - RNA, 19 nt, Artificial Sequence
  Description of Artificial Sequence: Synthetic oligonucleotide
cagcggucagggaaucccu

SEQ ID NO: 644206 - RNA, 19 nt, Artificial Sequence
  Description of Artificial Sequence: Synthetic oligonucleotide
cuguuccgacgcgcccagg

SEQ ID NO: 644207 - RNA, 19 nt, Artificial Sequence
  Description of Artificial Sequence: Synthetic oligonucleotide
cccuucggguucugguuuc

SEQ ID NO: 644208 - RNA, 19 nt, Artificial Sequence
  Description of Artificial Sequence: Synthetic oligonucleotide
gcaccauugcuuugugaau

SEQ ID NO: 644209 - RNA, 19 nt, Artificial Sequence
  Description of Artificial Sequence: Synthetic oligonucleotide
caccccgaauggcauauuu

SEQ ID NO: 644210 - RNA, 19 nt, Artificial Sequence
  Description of Artificial Sequence: Synthetic oligonucleotide
ggagaggccuugugagagu

SEQ ID NO: 644211 - RNA, 19 nt, Artificial Sequence
  Description of Artificial Sequence: Synthetic oligonucleotide
gcgccccgaaugugggcag

SEQ ID NO: 644212 - RNA, 19 nt, Artificial Sequence
  Description of Artificial Sequence: Synthetic oligonucleotide
cccagacuagcauguacgu

SEQ ID NO: 644213 - RNA, 19 nt, Artificial Sequence
  Description of Artificial Sequence: Synthetic oligonucleotide
cacguccccguccgcugca

SEQ ID NO: 644214 - RNA, 19 nt, Artificial Sequence
  Description of Artificial Sequence: Synthetic oligonucleotide
cagcugggagugcuguggu

SEQ ID NO: 644215 - RNA, 19 nt, Artificial Sequence
  Description of Artificial Sequence: Synthetic oligonucleotide
gggcuacccaggcauuggu

SEQ ID NO: 644216 - RNA, 19 nt, Artificial Sequence
  Description of Artificial Sequence: Synthetic oligonucleotide
gagcagguauggugcuguu

SEQ ID NO: 644217 - RNA, 19 nt, Artificial Sequence
  Description of Artificial Sequence: Synthetic oligonucleotide
gguggcgguaucggcacgu

SEQ ID NO: 644218 - RNA, 19 nt, Artificial Sequence
  Description of Artificial Sequence: Synthetic oligonucleotide
ccguugaaucgaggaguug

SEQ ID NO: 644219 - RNA, 19 nt, Artificial Sequence
  Description of Artificial Sequence: Synthetic oligonucleotide
gggccucguacccuucccu

SEQ ID NO: 644220 - RNA, 19 nt, Artificial Sequence
  Description of Artificial Sequence: Synthetic oligonucleotide
gcuccgcgccccgaaugug

SEQ ID NO: 644221 - RNA, 19 nt, Artificial Sequence
  Description of Artificial Sequence: Synthetic oligonucleotide
acaccccgaauggcauauu

SEQ ID NO: 644222 - RNA, 19 nt, Artificial Sequence
  Description of Artificial Sequence: Synthetic oligonucleotide
gggcccuaccaagaaggcu

SEQ ID NO: 644223 - RNA, 19 nt, Artificial Sequence
  Description of Artificial Sequence: Synthetic oligonucleotide
ccccgaaugugggcagaac

SEQ ID NO: 644224 - RNA, 19 nt, Artificial Sequence
  Description of Artificial Sequence: Synthetic oligonucleotide
guggcgguaucggcacgua

SEQ ID NO: 644225 - RNA, 19 nt, Artificial Sequence
  Description of Artificial Sequence: Synthetic oligonucleotide
cggcacguauacaaucgua

SEQ ID NO: 644226 - RNA, 19 nt, Artificial Sequence
  Description of Artificial Sequence: Synthetic oligonucleotide
gcgucccauuuugccuucc

SEQ ID NO: 644227 - RNA, 19 nt, Artificial Sequence
  Description of Artificial Sequence: Synthetic oligonucleotide
gccguugaaucgaggaguu

SEQ ID NO: 644228 - RNA, 19 nt, Artificial Sequence
  Description of Artificial Sequence: Synthetic oligonucleotide
ccuaccaagaaggcuccau

SEQ ID NO: 644229 - RNA, 19 nt, Artificial Sequence
  Description of Artificial Sequence: Synthetic oligonucleotide
ccgcgccccgaaugugggc

SEQ ID NO: 644230 - RNA, 19 nt, Artificial Sequence
  Description of Artificial Sequence: Synthetic oligonucleotide
ccucgacaccgggccacag

SEQ ID NO: 644231 - RNA, 19 nt, Artificial Sequence
  Description of Artificial Sequence: Synthetic oligonucleotide
ggcacacgcgucccauuuu

SEQ ID NO: 644232 - RNA, 19 nt, Artificial Sequence
  Description of Artificial Sequence: Synthetic oligonucleotide
cgcgccccgaaugugggca

SEQ ID NO: 644233 - RNA, 19 nt, Artificial Sequence
  Description of Artificial Sequence: Synthetic oligonucleotide
gccccgaaugugggcagaa

SEQ ID NO: 644234 - RNA, 19 nt, Artificial Sequence
  Description of Artificial Sequence: Synthetic oligonucleotide
cgcgucccauuuugccuuc

SEQ ID NO: 644235 - RNA, 19 nt, Artificial Sequence
  Description of Artificial Sequence: Synthetic oligonucleotide
cagagagggcggcgaucau

SEQ ID NO: 644236 - RNA, 19 nt, Artificial Sequence
  Description of Artificial Sequence: Synthetic oligonucleotide
ccccuucggguucugguuu

SEQ ID NO: 644237 - RNA, 19 nt, Artificial Sequence
  Description of Artificial Sequence: Synthetic oligonucleotide
cgguaucggcacguauaca

SEQ ID NO: 644238 - RNA, 19 nt, Artificial Sequence
  Description of Artificial Sequence: Synthetic oligonucleotide
ccgugccagagggccaaga

SEQ ID NO: 644239 - RNA, 19 nt, Artificial Sequence
  Description of Artificial Sequence: Synthetic oligonucleotide
cguccccguccgcugcaga

SEQ ID NO: 644240 - RNA, 19 nt, Artificial Sequence
  Description of Artificial Sequence: Synthetic oligonucleotide
ccccgacaaaaugcacacu

SEQ ID NO: 644241 - RNA, 19 nt, Artificial Sequence
  Description of Artificial Sequence: Synthetic oligonucleotide
ccgacgcgcccagggacgu

SEQ ID NO: 644242 - RNA, 19 nt, Artificial Sequence
  Description of Artificial Sequence: Synthetic oligonucleotide
cgacgcgcccagggacguc

SEQ ID NO: 644243 - RNA, 19 nt, Artificial Sequence
  Description of Artificial Sequence: Synthetic oligonucleotide
aauuauuauagucaauaac

SEQ ID NO: 644244 - RNA, 19 nt, Artificial Sequence
  Description of Artificial Sequence: Synthetic oligonucleotide
aauauaacaugcuacgagg

SEQ ID NO: 644245 - RNA, 19 nt, Artificial Sequence
  Description of Artificial Sequence: Synthetic oligonucleotide
aauagugccauguagagga

SEQ ID NO: 644246 - RNA, 19 nt, Artificial Sequence
  Description of Artificial Sequence: Synthetic oligonucleotide
agguuaauacuccagaugc

SEQ ID NO: 644247 - RNA, 19 nt, Artificial Sequence
  Description of Artificial Sequence: Synthetic oligonucleotide
uuaaugaacugacuaaugg

SEQ ID NO: 644248 - RNA, 19 nt, Artificial Sequence
  Description of Artificial Sequence: Synthetic oligonucleotide
aaauauaacaugcuacgag

SEQ ID NO: 644249 - RNA, 19 nt, Artificial Sequence
  Description of Artificial Sequence: Synthetic oligonucleotide
auauccacagcacauauac

SEQ ID NO: 644250 - RNA, 19 nt, Artificial Sequence
  Description of Artificial Sequence: Synthetic oligonucleotide
ugacaauauauauauagag

SEQ ID NO: 644251 - RNA, 19 nt, Artificial Sequence
  Description of Artificial Sequence: Synthetic oligonucleotide
cagaauguaguuaacaggg

SEQ ID NO: 644252 - RNA, 19 nt, Artificial Sequence
  Description of Artificial Sequence: Synthetic oligonucleotide
augauuaugguuuucuggg

SEQ ID NO: 644253 - RNA, 19 nt, Artificial Sequence
  Description of Artificial Sequence: Synthetic oligonucleotide
aaugauuucagauccauua

SEQ ID NO: 644254 - RNA, 19 nt, Artificial Sequence
  Description of Artificial Sequence: Synthetic oligonucleotide
auguagaggaaucauuucc

SEQ ID NO: 644255 - RNA, 19 nt, Artificial Sequence
  Description of Artificial Sequence: Synthetic oligonucleotide
aagagauuauaauggagag

SEQ ID NO: 644256 - RNA, 19 nt, Artificial Sequence
  Description of Artificial Sequence: Synthetic oligonucleotide
ucuccuguaagcaugaccu

SEQ ID NO: 644257 - RNA, 19 nt, Artificial Sequence
  Description of Artificial Sequence: Synthetic oligonucleotide
uguaucucaaagcaggugu

SEQ ID NO: 644258 - RNA, 19 nt, Artificial Sequence
  Description of Artificial Sequence: Synthetic oligonucleotide
ugaagcgauacacaguucc

SEQ ID NO: 644259 - RNA, 19 nt, Artificial Sequence
  Description of Artificial Sequence: Synthetic oligonucleotide
ugacuaaugguccaacucc

SEQ ID NO: 644260 - RNA, 19 nt, Artificial Sequence
  Description of Artificial Sequence: Synthetic oligonucleotide
uacacuaauuauuauaguc

SEQ ID NO: 644261 - RNA, 19 nt, Artificial Sequence
  Description of Artificial Sequence: Synthetic oligonucleotide
aaauuaguaaggcguuccg

SEQ ID NO: 644262 - RNA, 19 nt, Artificial Sequence
  Description of Artificial Sequence: Synthetic oligonucleotide
uacgaggcaaauuaguaag

SEQ ID NO: 644263 - RNA, 19 nt, Artificial Sequence
  Description of Artificial Sequence: Synthetic oligonucleotide
ucaauauaggcacacaaua

SEQ ID NO: 644264 - RNA, 19 nt, Artificial Sequence
  Description of Artificial Sequence: Synthetic oligonucleotide
uguaaugacaauauauaua

SEQ ID NO: 644265 - RNA, 19 nt, Artificial Sequence
  Description of Artificial Sequence: Synthetic oligonucleotide
uuagugugcgaacagggag

SEQ ID NO: 644266 - RNA, 19 nt, Artificial Sequence
  Description of Artificial Sequence: Synthetic oligonucleotide
ugcugaugcagcaugcucg

SEQ ID NO: 644267 - RNA, 19 nt, Artificial Sequence
  Description of Artificial Sequence: Synthetic oligonucleotide
aagguuaauacuccagaug

SEQ ID NO: 644268 - RNA, 19 nt, Artificial Sequence
  Description of Artificial Sequence: Synthetic oligonucleotide
aguuuacaagucuaauuac

SEQ ID NO: 644269 - RNA, 19 nt, Artificial Sequence
  Description of Artificial Sequence: Synthetic oligonucleotide
aacacuuuaucuuauuguu

SEQ ID NO: 644270 - RNA, 19 nt, Artificial Sequence
  Description of Artificial Sequence: Synthetic oligonucleotide
acaugaauuuccuucuaac

SEQ ID NO: 644271 - RNA, 19 nt, Artificial Sequence
  Description of Artificial Sequence: Synthetic oligonucleotide
aauacugugcagcaggcaa

SEQ ID NO: 644272 - RNA, 19 nt, Artificial Sequence
  Description of Artificial Sequence: Synthetic oligonucleotide
uucagauccauuauugcac

SEQ ID NO: 644273 - RNA, 19 nt, Artificial Sequence
  Description of Artificial Sequence: Synthetic oligonucleotide
ugguccaacuccaauuucg

SEQ ID NO: 644274 - RNA, 19 nt, Artificial Sequence
  Description of Artificial Sequence: Synthetic oligonucleotide
agaaguuccaucugugauc

SEQ ID NO: 644275 - RNA, 19 nt, Artificial Sequence
  Description of Artificial Sequence: Synthetic oligonucleotide
uggucauuuaaugaguuag

SEQ ID NO: 644276 - RNA, 19 nt, Artificial Sequence
  Description of Artificial Sequence: Synthetic oligonucleotide
ucuuuggaccuuauaagug

SEQ ID NO: 644277 - RNA, 19 nt, Artificial Sequence
  Description of Artificial Sequence: Synthetic oligonucleotide
acagggucgccuuucaucg

SEQ ID NO: 644278 - RNA, 19 nt, Artificial Sequence
  Description of Artificial Sequence: Synthetic oligonucleotide
ugcgaagccaagcacaaug

SEQ ID NO: 644279 - RNA, 19 nt, Artificial Sequence
  Description of Artificial Sequence: Synthetic oligonucleotide
aguuagauguucuuuauuu

SEQ ID NO: 644280 - RNA, 19 nt, Artificial Sequence
  Description of Artificial Sequence: Synthetic oligonucleotide
uucaaucacugauaauggg

SEQ ID NO: 644281 - RNA, 19 nt, Artificial Sequence
  Description of Artificial Sequence: Synthetic oligonucleotide
uaauggagagcaaauuuac

SEQ ID NO: 644282 - RNA, 19 nt, Artificial Sequence
  Description of Artificial Sequence: Synthetic oligonucleotide
auucggaaggaguagcagg

SEQ ID NO: 644283 - RNA, 19 nt, Artificial Sequence
  Description of Artificial Sequence: Synthetic oligonucleotide
ugaagcuacguccucaggu

SEQ ID NO: 644284 - RNA, 19 nt, Artificial Sequence
  Description of Artificial Sequence: Synthetic oligonucleotide
acucgaggugcuuugaggg

SEQ ID NO: 644285 - RNA, 19 nt, Artificial Sequence
  Description of Artificial Sequence: Synthetic oligonucleotide
ucagauccauuauugcacg

SEQ ID NO: 644286 - RNA, 19 nt, Artificial Sequence
  Description of Artificial Sequence: Synthetic oligonucleotide
ucuccaaaacccucggagg

SEQ ID NO: 644287 - RNA, 19 nt, Artificial Sequence
  Description of Artificial Sequence: Synthetic oligonucleotide
auuuucggaucguccaugc

SEQ ID NO: 644288 - RNA, 19 nt, Artificial Sequence
  Description of Artificial Sequence: Synthetic oligonucleotide
aaggccgagucuuuaauga

SEQ ID NO: 644289 - RNA, 19 nt, Artificial Sequence
  Description of Artificial Sequence: Synthetic oligonucleotide
aaacaaguucuaaggauuc

SEQ ID NO: 644290 - RNA, 19 nt, Artificial Sequence
  Description of Artificial Sequence: Synthetic oligonucleotide
auauaacaugcuacgaggc

SEQ ID NO: 644291 - RNA, 19 nt, Artificial Sequence
  Description of Artificial Sequence: Synthetic oligonucleotide
ugaauucugauccgguaug

SEQ ID NO: 644292 - RNA, 19 nt, Artificial Sequence
  Description of Artificial Sequence: Synthetic oligonucleotide
uccgguauguaguuucugg

SEQ ID NO: 644293 - RNA, 19 nt, Artificial Sequence
  Description of Artificial Sequence: Synthetic oligonucleotide
ucagauucucuuccgacca

SEQ ID NO: 644294 - RNA, 19 nt, Artificial Sequence
  Description of Artificial Sequence: Synthetic oligonucleotide
uauaacaugcuacgaggca

SEQ ID NO: 644295 - RNA, 19 nt, Artificial Sequence
  Description of Artificial Sequence: Synthetic oligonucleotide
agagauuauaauggagagc

SEQ ID NO: 644296 - RNA, 19 nt, Artificial Sequence
  Description of Artificial Sequence: Synthetic oligonucleotide
acucugaagcgauacacag

SEQ ID NO: 644297 - RNA, 19 nt, Artificial Sequence
  Description of Artificial Sequence: Synthetic oligonucleotide
ucuaaguggacuucuuugu

SEQ ID NO: 644298 - RNA, 19 nt, Artificial Sequence
  Description of Artificial Sequence: Synthetic oligonucleotide
agaagguuaauacuccaga

SEQ ID NO: 644299 - RNA, 19 nt, Artificial Sequence
  Description of Artificial Sequence: Synthetic oligonucleotide
uccauuauugcacggcucu

SEQ ID NO: 644300 - RNA, 19 nt, Artificial Sequence
  Description of Artificial Sequence: Synthetic oligonucleotide
uuuaaugaguuagauguuc

SEQ ID NO: 644301 - RNA, 19 nt, Artificial Sequence
  Description of Artificial Sequence: Synthetic oligonucleotide
uauugcacggcucuuccca

SEQ ID NO: 644302 - RNA, 19 nt, Artificial Sequence
  Description of Artificial Sequence: Synthetic oligonucleotide
ucagaauagggaccguacc

SEQ ID NO: 644303 - RNA, 19 nt, Artificial Sequence
  Description of Artificial Sequence: Synthetic oligonucleotide
acguuguuguaacacaaag

SEQ ID NO: 644304 - RNA, 19 nt, Artificial Sequence
  Description of Artificial Sequence: Synthetic oligonucleotide
aaguggacuucuuugugcu

SEQ ID NO: 644305 - RNA, 19 nt, Artificial Sequence
  Description of Artificial Sequence: Synthetic oligonucleotide
aaugguccaacuccaauuu

SEQ ID NO: 644306 - RNA, 19 nt, Artificial Sequence
  Description of Artificial Sequence: Synthetic oligonucleotide
ucccauaucuccuguaagc

SEQ ID NO: 644307 - RNA, 19 nt, Artificial Sequence
  Description of Artificial Sequence: Synthetic oligonucleotide
aagguugcgaagccaagca

SEQ ID NO: 644308 - RNA, 19 nt, Artificial Sequence
  Description of Artificial Sequence: Synthetic oligonucleotide
uuauaaguguggcuggguc

SEQ ID NO: 644309 - RNA, 19 nt, Artificial Sequence
  Description of Artificial Sequence: Synthetic oligonucleotide
uaaugcacgugucuccgag

SEQ ID NO: 644310 - RNA, 19 nt, Artificial Sequence
  Description of Artificial Sequence: Synthetic oligonucleotide
uuacaagucuaauuacacu

SEQ ID NO: 644311 - RNA, 19 nt, Artificial Sequence
  Description of Artificial Sequence: Synthetic oligonucleotide
agcggcgacaugcacacac

SEQ ID NO: 644312 - RNA, 19 nt, Artificial Sequence
  Description of Artificial Sequence: Synthetic oligonucleotide
aauagggaccguacccucc

SEQ ID NO: 644313 - RNA, 19 nt, Artificial Sequence
  Description of Artificial Sequence: Synthetic oligonucleotide
gacaucccacucuaagugg

SEQ ID NO: 644314 - RNA, 19 nt, Artificial Sequence
  Description of Artificial Sequence: Synthetic oligonucleotide
uuuggaccuuauaagugug

SEQ ID NO: 644315 - RNA, 19 nt, Artificial Sequence
  Description of Artificial Sequence: Synthetic oligonucleotide
aaugagggcagcaaacugu

SEQ ID NO: 644316 - RNA, 19 nt, Artificial Sequence
  Description of Artificial Sequence: Synthetic oligonucleotide
ucccauaagauuucacaug

SEQ ID NO: 644317 - RNA, 19 nt, Artificial Sequence
  Description of Artificial Sequence: Synthetic oligonucleotide
guuaauacuccagaugcug

SEQ ID NO: 644318 - RNA, 19 nt, Artificial Sequence
  Description of Artificial Sequence: Synthetic oligonucleotide
uguaagcaugaccucacgu

SEQ ID NO: 644319 - RNA, 19 nt, Artificial Sequence
  Description of Artificial Sequence: Synthetic oligonucleotide
agcgauacacaguuccagg

SEQ ID NO: 644320 - RNA, 19 nt, Artificial Sequence
  Description of Artificial Sequence: Synthetic oligonucleotide
uucggaaggaguagcaggu

SEQ ID NO: 644321 - RNA, 19 nt, Artificial Sequence
  Description of Artificial Sequence: Synthetic oligonucleotide
aauggacaagguugcgaag

SEQ ID NO: 644322 - RNA, 19 nt, Artificial Sequence
  Description of Artificial Sequence: Synthetic oligonucleotide
ucuaacugugucacucgag

SEQ ID NO: 644323 - RNA, 19 nt, Artificial Sequence
  Description of Artificial Sequence: Synthetic oligonucleotide
caaauuaguaaggcguucc

SEQ ID NO: 644324 - RNA, 19 nt, Artificial Sequence
  Description of Artificial Sequence: Synthetic oligonucleotide
cagaauagggaccguaccc

SEQ ID NO: 644325 - RNA, 19 nt, Artificial Sequence
  Description of Artificial Sequence: Synthetic oligonucleotide
cuaaggauucuucaucuuc

SEQ ID NO: 644326 - RNA, 19 nt, Artificial Sequence
  Description of Artificial Sequence: Synthetic oligonucleotide
gcgacaugcacacacacgg

SEQ ID NO: 644327 - RNA, 19 nt, Artificial Sequence
  Description of Artificial Sequence: Synthetic oligonucleotide
cauacuccguggcagaccc

SEQ ID NO: 644328 - RNA, 19 nt, Artificial Sequence
  Description of Artificial Sequence: Synthetic oligonucleotide
auuaguaaggcguuccguu

SEQ ID NO: 644329 - RNA, 19 nt, Artificial Sequence
  Description of Artificial Sequence: Synthetic oligonucleotide
uuggaccuuauaagugugg

SEQ ID NO: 644330 - RNA, 19 nt, Artificial Sequence
  Description of Artificial Sequence: Synthetic oligonucleotide
cuaggacucgacuacauca

SEQ ID NO: 644331 - RNA, 19 nt, Artificial Sequence
  Description of Artificial Sequence: Synthetic oligonucleotide
ugaacugacuaauggucca

SEQ ID NO: 644332 - RNA, 19 nt, Artificial Sequence
  Description of Artificial Sequence: Synthetic oligonucleotide
uuuaucuuauuguuccuuu

SEQ ID NO: 644333 - RNA, 19 nt, Artificial Sequence
  Description of Artificial Sequence: Synthetic oligonucleotide
ccuguuuguacucagauuc

SEQ ID NO: 644334 - RNA, 19 nt, Artificial Sequence
  Description of Artificial Sequence: Synthetic oligonucleotide
caauaaugcauugauccac

SEQ ID NO: 644335 - RNA, 19 nt, Artificial Sequence
  Description of Artificial Sequence: Synthetic oligonucleotide
uucagaacacugacugugc

SEQ ID NO: 644336 - RNA, 19 nt, Artificial Sequence
  Description of Artificial Sequence: Synthetic oligonucleotide
aguaaugcacgugucuccg

SEQ ID NO: 644337 - RNA, 19 nt, Artificial Sequence
  Description of Artificial Sequence: Synthetic oligonucleotide
acaccucacagccacuuuc

SEQ ID NO: 644338 - RNA, 19 nt, Artificial Sequence
  Description of Artificial Sequence: Synthetic oligonucleotide
gauaaugggauuuuauuuu

SEQ ID NO: 644339 - RNA, 19 nt, Artificial Sequence
  Description of Artificial Sequence: Synthetic oligonucleotide
uccguucacaccucuagug

SEQ ID NO: 644340 - RNA, 19 nt, Artificial Sequence
  Description of Artificial Sequence: Synthetic oligonucleotide
uuuugguugugcugaaggu

SEQ ID NO: 644341 - RNA, 19 nt, Artificial Sequence
  Description of Artificial Sequence: Synthetic oligonucleotide
aauuaguaaggcguuccgu

SEQ ID NO: 644342 - RNA, 19 nt, Artificial Sequence
  Description of Artificial Sequence: Synthetic oligonucleotide
uuucggaucguccaugcuu

SEQ ID NO: 644343 - RNA, 19 nt, Artificial Sequence
  Description of Artificial Sequence: Synthetic oligonucleotide
accuuauaaguguggcugg

SEQ ID NO: 644344 - RNA, 19 nt, Artificial Sequence
  Description of Artificial Sequence: Synthetic oligonucleotide
cuuggaguuacugucuccc

SEQ ID NO: 644345 - RNA, 19 nt, Artificial Sequence
  Description of Artificial Sequence: Synthetic oligonucleotide
uuacacuaauuauuauagu

SEQ ID NO: 644346 - RNA, 19 nt, Artificial Sequence
  Description of Artificial Sequence: Synthetic oligonucleotide
caugcuacgaggcaaauua

SEQ ID NO: 644347 - RNA, 19 nt, Artificial Sequence
  Description of Artificial Sequence: Synthetic oligonucleotide
ucagaagguuaauacucca

SEQ ID NO: 644348 - RNA, 19 nt, Artificial Sequence
  Description of Artificial Sequence: Synthetic oligonucleotide
acacgugugguaguauugc

SEQ ID NO: 644349 - RNA, 19 nt, Artificial Sequence
  Description of Artificial Sequence: Synthetic oligonucleotide
aacugacuaaugguccaac

SEQ ID NO: 644350 - RNA, 19 nt, Artificial Sequence
  Description of Artificial Sequence: Synthetic oligonucleotide
ugauccgguauguaguuuc

SEQ ID NO: 644351 - RNA, 19 nt, Artificial Sequence
  Description of Artificial Sequence: Synthetic oligonucleotide
ucugagagaugauuauggu

SEQ ID NO: 644352 - RNA, 19 nt, Artificial Sequence
  Description of Artificial Sequence: Synthetic oligonucleotide
aaacugaccuaaaauuaca

SEQ ID NO: 644353 - RNA, 19 nt, Artificial Sequence
  Description of Artificial Sequence: Synthetic oligonucleotide
cugacacaucagaauaggg

SEQ ID NO: 644354 - RNA, 19 nt, Artificial Sequence
  Description of Artificial Sequence: Synthetic oligonucleotide
caguuuacaagucuaauua

SEQ ID NO: 644355 - RNA, 19 nt, Artificial Sequence
  Description of Artificial Sequence: Synthetic oligonucleotide
aagcgauacacaguuccag

SEQ ID NO: 644356 - RNA, 19 nt, Artificial Sequence
  Description of Artificial Sequence: Synthetic oligonucleotide
uuuguacucagauucucuu

SEQ ID NO: 644357 - RNA, 19 nt, Artificial Sequence
  Description of Artificial Sequence: Synthetic oligonucleotide
ucacguuguuguaacacaa

SEQ ID NO: 644358 - RNA, 19 nt, Artificial Sequence
  Description of Artificial Sequence: Synthetic oligonucleotide
aucagaauagggaccguac

SEQ ID NO: 644359 - RNA, 19 nt, Artificial Sequence
  Description of Artificial Sequence: Synthetic oligonucleotide
auauauccacagcacauau

SEQ ID NO: 644360 - RNA, 19 nt, Artificial Sequence
  Description of Artificial Sequence: Synthetic oligonucleotide
guuccguucacaccucuag

SEQ ID NO: 644361 - RNA, 19 nt, Artificial Sequence
  Description of Artificial Sequence: Synthetic oligonucleotide
uaaaauggacaagguugcg

SEQ ID NO: 644362 - RNA, 19 nt, Artificial Sequence
  Description of Artificial Sequence: Synthetic oligonucleotide
ugcuacgaggcaaauuagu

SEQ ID NO: 644363 - RNA, 19 nt, Artificial Sequence
  Description of Artificial Sequence: Synthetic oligonucleotide
uucggaucguccaugcuuc

SEQ ID NO: 644364 - RNA, 19 nt, Artificial Sequence
  Description of Artificial Sequence: Synthetic oligonucleotide
agaucgauguuguaagcaa

SEQ ID NO: 644365 - RNA, 19 nt, Artificial Sequence
  Description of Artificial Sequence: Synthetic oligonucleotide
agugugaacaccaugucau

SEQ ID NO: 644366 - RNA, 19 nt, Artificial Sequence
  Description of Artificial Sequence: Synthetic oligonucleotide
cagaagguuaauacuccag

SEQ ID NO: 644367 - RNA, 19 nt, Artificial Sequence
  Description of Artificial Sequence: Synthetic oligonucleotide
aaggcuuagugugcgaaca

SEQ ID NO: 644368 - RNA, 19 nt, Artificial Sequence
  Description of Artificial Sequence: Synthetic oligonucleotide
uacaucaauauaggcacac

SEQ ID NO: 644369 - RNA, 19 nt, Artificial Sequence
  Description of Artificial Sequence: Synthetic oligonucleotide
aaauuuaccuugauaccau

SEQ ID NO: 644370 - RNA, 19 nt, Artificial Sequence
  Description of Artificial Sequence: Synthetic oligonucleotide
aucggugguacugucuccc

SEQ ID NO: 644371 - RNA, 19 nt, Artificial Sequence
  Description of Artificial Sequence: Synthetic oligonucleotide
uuaguaaggcguuccguuc

SEQ ID NO: 644372 - RNA, 19 nt, Artificial Sequence
  Description of Artificial Sequence: Synthetic oligonucleotide
accagaugcagcacauucc

SEQ ID NO: 644373 - RNA, 19 nt, Artificial Sequence
  Description of Artificial Sequence: Synthetic oligonucleotide
uguacucggacaccucaca

SEQ ID NO: 644374 - RNA, 19 nt, Artificial Sequence
  Description of Artificial Sequence: Synthetic oligonucleotide
cugacuaaugguccaacuc

SEQ ID NO: 644375 - RNA, 19 nt, Artificial Sequence
  Description of Artificial Sequence: Synthetic oligonucleotide
aggcguuccguucacaccu

SEQ ID NO: 644376 - RNA, 19 nt, Artificial Sequence
  Description of Artificial Sequence: Synthetic oligonucleotide
aaaacccucggaggucggc

SEQ ID NO: 644377 - RNA, 19 nt, Artificial Sequence
  Description of Artificial Sequence: Synthetic oligonucleotide
uguuguaagcaaugauuuc

SEQ ID NO: 644378 - RNA, 19 nt, Artificial Sequence
  Description of Artificial Sequence: Synthetic oligonucleotide
acuguacucggacaccuca

SEQ ID NO: 644379 - RNA, 19 nt, Artificial Sequence
  Description of Artificial Sequence: Synthetic oligonucleotide
gagacuuucagaacacuga

SEQ ID NO: 644380 - RNA, 19 nt, Artificial Sequence
  Description of Artificial Sequence: Synthetic oligonucleotide
aguaaggcguuccguucac

SEQ ID NO: 644381 - RNA, 19 nt, Artificial Sequence
  Description of Artificial Sequence: Synthetic oligonucleotide
acacacacggaaccuguag

SEQ ID NO: 644382 - RNA, 19 nt, Artificial Sequence
  Description of Artificial Sequence: Synthetic oligonucleotide
uggaccuuauaaguguggc

SEQ ID NO: 644383 - RNA, 19 nt, Artificial Sequence
  Description of Artificial Sequence: Synthetic oligonucleotide
acgugugguaguauugccc

SEQ ID NO: 644384 - RNA, 19 nt, Artificial Sequence
  Description of Artificial Sequence: Synthetic oligonucleotide
cacuaauuauuauagucaa

SEQ ID NO: 644385 - RNA, 19 nt, Artificial Sequence
  Description of Artificial Sequence: Synthetic oligonucleotide
aacccucggaggucggcac

SEQ ID NO: 644386 - RNA, 19 nt, Artificial Sequence
  Description of Artificial Sequence: Synthetic oligonucleotide
cuaaguggacuucuuugug

SEQ ID NO: 644387 - RNA, 19 nt, Artificial Sequence
  Description of Artificial Sequence: Synthetic oligonucleotide
aaaugucagaagguuaaua

SEQ ID NO: 644388 - RNA, 19 nt, Artificial Sequence
  Description of Artificial Sequence: Synthetic oligonucleotide
ucuccgagaucgauguugu

SEQ ID NO: 644389 - RNA, 19 nt, Artificial Sequence
  Description of Artificial Sequence: Synthetic oligonucleotide
uacucggacaccucacagc

SEQ ID NO: 644390 - RNA, 19 nt, Artificial Sequence
  Description of Artificial Sequence: Synthetic oligonucleotide
gcaaauuuaccuugauacc

SEQ ID NO: 644391 - RNA, 19 nt, Artificial Sequence
  Description of Artificial Sequence: Synthetic oligonucleotide
uccgagaucgauguuguaa

SEQ ID NO: 644392 - RNA, 19 nt, Artificial Sequence
  Description of Artificial Sequence: Synthetic oligonucleotide
guggcagacccacuguagg

SEQ ID NO: 644393 - RNA, 19 nt, Artificial Sequence
  Description of Artificial Sequence: Synthetic oligonucleotide
agguugcgaagccaagcac

SEQ ID NO: 644394 - RNA, 19 nt, Artificial Sequence
  Description of Artificial Sequence: Synthetic oligonucleotide
accuuucaaucacugauaa

SEQ ID NO: 644395 - RNA, 19 nt, Artificial Sequence
  Description of Artificial Sequence: Synthetic oligonucleotide
auaacaugcuacgaggcaa

SEQ ID NO: 644396 - RNA, 19 nt, Artificial Sequence
  Description of Artificial Sequence: Synthetic oligonucleotide
gauucggaaggaguagcag

SEQ ID NO: 644397 - RNA, 19 nt, Artificial Sequence
  Description of Artificial Sequence: Synthetic oligonucleotide
uccuguaagcaugaccuca

SEQ ID NO: 644398 - RNA, 19 nt, Artificial Sequence
  Description of Artificial Sequence: Synthetic oligonucleotide
gucggcacugaccuggugc

SEQ ID NO: 644399 - RNA, 19 nt, Artificial Sequence
  Description of Artificial Sequence: Synthetic oligonucleotide
caguaaugcacgugucucc

SEQ ID NO: 644400 - RNA, 19 nt, Artificial Sequence
  Description of Artificial Sequence: Synthetic oligonucleotide
ugucaucucuacacuguac

SEQ ID NO: 644401 - RNA, 19 nt, Artificial Sequence
  Description of Artificial Sequence: Synthetic oligonucleotide
cucucuaggacucgacuac

SEQ ID NO: 644402 - RNA, 19 nt, Artificial Sequence
  Description of Artificial Sequence: Synthetic oligonucleotide
guaaacaaguucuaaggau

SEQ ID NO: 644403 - RNA, 19 nt, Artificial Sequence
  Description of Artificial Sequence: Synthetic oligonucleotide
uaggacucgacuacaucaa

SEQ ID NO: 644404 - RNA, 19 nt, Artificial Sequence
  Description of Artificial Sequence: Synthetic oligonucleotide
acugacuaaugguccaacu

SEQ ID NO: 644405 - RNA, 19 nt, Artificial Sequence
  Description of Artificial Sequence: Synthetic oligonucleotide
guacucagauucucuuccg

SEQ ID NO: 644406 - RNA, 19 nt, Artificial Sequence
  Description of Artificial Sequence: Synthetic oligonucleotide
agaauagggaccguacccu

SEQ ID NO: 644407 - RNA, 19 nt, Artificial Sequence
  Description of Artificial Sequence: Synthetic oligonucleotide
aguauugcccacaguaaug

SEQ ID NO: 644408 - RNA, 19 nt, Artificial Sequence
  Description of Artificial Sequence: Synthetic oligonucleotide
uuugguugugcugaaggua

SEQ ID NO: 644409 - RNA, 19 nt, Artificial Sequence
  Description of Artificial Sequence: Synthetic oligonucleotide
gaaggagguccuuuaucac

SEQ ID NO: 644410 - RNA, 19 nt, Artificial Sequence
  Description of Artificial Sequence: Synthetic oligonucleotide
caugcucgcaguuuguaca

SEQ ID NO: 644411 - RNA, 19 nt, Artificial Sequence
  Description of Artificial Sequence: Synthetic oligonucleotide
cuuguacaccuguuuguac

SEQ ID NO: 644412 - RNA, 19 nt, Artificial Sequence
  Description of Artificial Sequence: Synthetic oligonucleotide
ucauuuucggaucguccau

SEQ ID NO: 644413 - RNA, 19 nt, Artificial Sequence
  Description of Artificial Sequence: Synthetic oligonucleotide
agccaagcacaaugagggc

SEQ ID NO: 644414 - RNA, 19 nt, Artificial Sequence
  Description of Artificial Sequence: Synthetic oligonucleotide
uuguaucucaaagcaggug

SEQ ID NO: 644415 - RNA, 19 nt, Artificial Sequence
  Description of Artificial Sequence: Synthetic oligonucleotide
aaugcacgugucuccgaga

SEQ ID NO: 644416 - RNA, 19 nt, Artificial Sequence
  Description of Artificial Sequence: Synthetic oligonucleotide
uauauccacagcacauaua

SEQ ID NO: 644417 - RNA, 19 nt, Artificial Sequence
  Description of Artificial Sequence: Synthetic oligonucleotide
gagaucgauguuguaagca

SEQ ID NO: 644418 - RNA, 19 nt, Artificial Sequence
  Description of Artificial Sequence: Synthetic oligonucleotide
aagucuaauuacacuaauu

SEQ ID NO: 644419 - RNA, 19 nt, Artificial Sequence
  Description of Artificial Sequence: Synthetic oligonucleotide
ugucacucgaggugcuuug

SEQ ID NO: 644420 - RNA, 19 nt, Artificial Sequence
  Description of Artificial Sequence: Synthetic oligonucleotide
guacucggacaccucacag

SEQ ID NO: 644421 - RNA, 19 nt, Artificial Sequence
  Description of Artificial Sequence: Synthetic oligonucleotide
uuauugcacggcucuuccc

SEQ ID NO: 644422 - RNA, 19 nt, Artificial Sequence
  Description of Artificial Sequence: Synthetic oligonucleotide
guacaaagugccugguuuc

SEQ ID NO: 644423 - RNA, 19 nt, Artificial Sequence
  Description of Artificial Sequence: Synthetic oligonucleotide
accaauaccugcagaaugu

SEQ ID NO: 644424 - RNA, 19 nt, Artificial Sequence
  Description of Artificial Sequence: Synthetic oligonucleotide
ucuagugugcuggauuuau

SEQ ID NO: 644425 - RNA, 19 nt, Artificial Sequence
  Description of Artificial Sequence: Synthetic oligonucleotide
aucaauauaggcacacaau

SEQ ID NO: 644426 - RNA, 19 nt, Artificial Sequence
  Description of Artificial Sequence: Synthetic oligonucleotide
aucgauguuguaagcaaug

SEQ ID NO: 644427 - RNA, 19 nt, Artificial Sequence
  Description of Artificial Sequence: Synthetic oligonucleotide
gucuccgagaucgauguug

SEQ ID NO: 644428 - RNA, 19 nt, Artificial Sequence
  Description of Artificial Sequence: Synthetic oligonucleotide
caucagugggcaucaugcc

SEQ ID NO: 644429 - RNA, 19 nt, Artificial Sequence
  Description of Artificial Sequence: Synthetic oligonucleotide
aaaaugucagaagguuaau

SEQ ID NO: 644430 - RNA, 19 nt, Artificial Sequence
  Description of Artificial Sequence: Synthetic oligonucleotide
cacacgugugguaguauug

SEQ ID NO: 644431 - RNA, 19 nt, Artificial Sequence
  Description of Artificial Sequence: Synthetic oligonucleotide
auugcacggcucuucccag

SEQ ID NO: 644432 - RNA, 19 nt, Artificial Sequence
  Description of Artificial Sequence: Synthetic oligonucleotide
ucgaggugcuuugagggug

SEQ ID NO: 644433 - RNA, 19 nt, Artificial Sequence
  Description of Artificial Sequence: Synthetic oligonucleotide
gacucgacuacaucaauau

SEQ ID NO: 644434 - RNA, 19 nt, Artificial Sequence
  Description of Artificial Sequence: Synthetic oligonucleotide
ucggcacugaccuggugca

SEQ ID NO: 644435 - RNA, 19 nt, Artificial Sequence
  Description of Artificial Sequence: Synthetic oligonucleotide
uaucucaaagcaggugucu

SEQ ID NO: 644436 - RNA, 19 nt, Artificial Sequence
  Description of Artificial Sequence: Synthetic oligonucleotide
gaagguuaauacuccagau

SEQ ID NO: 644437 - RNA, 19 nt, Artificial Sequence
  Description of Artificial Sequence: Synthetic oligonucleotide
accucuuauuccuguccuc

SEQ ID NO: 644438 - RNA, 19 nt, Artificial Sequence
  Description of Artificial Sequence: Synthetic oligonucleotide
gugguaguauugcccacag

SEQ ID NO: 644439 - RNA, 19 nt, Artificial Sequence
  Description of Artificial Sequence: Synthetic oligonucleotide
gagcccgcacucugaagcg

SEQ ID NO: 644440 - RNA, 19 nt, Artificial Sequence
  Description of Artificial Sequence: Synthetic oligonucleotide
gauccauuauugcacggcu

SEQ ID NO: 644441 - RNA, 19 nt, Artificial Sequence
  Description of Artificial Sequence: Synthetic oligonucleotide
cuacgaggcaaauuaguaa

SEQ ID NO: 644442 - RNA, 19 nt, Artificial Sequence
  Description of Artificial Sequence: Synthetic oligonucleotide
cacgugugguaguauugcc

SEQ ID NO: 644443 - RNA, 19 nt, Artificial Sequence
  Description of Artificial Sequence: Synthetic oligonucleotide
acagagcucucuaggacuc

SEQ ID NO: 644444 - RNA, 19 nt, Artificial Sequence
  Description of Artificial Sequence: Synthetic oligonucleotide
gaauagggaccguacccuc

SEQ ID NO: 644445 - RNA, 19 nt, Artificial Sequence
  Description of Artificial Sequence: Synthetic oligonucleotide
ucugauccgguauguaguu

SEQ ID NO: 644446 - RNA, 19 nt, Artificial Sequence
  Description of Artificial Sequence: Synthetic oligonucleotide
uuaucacacgugugguagu

SEQ ID NO: 644447 - RNA, 19 nt, Artificial Sequence
  Description of Artificial Sequence: Synthetic oligonucleotide
agcucucuaggacucgacu

SEQ ID NO: 644448 - RNA, 19 nt, Artificial Sequence
  Description of Artificial Sequence: Synthetic oligonucleotide
cuuagugugcgaacaggga

SEQ ID NO: 644449 - RNA, 19 nt, Artificial Sequence
  Description of Artificial Sequence: Synthetic oligonucleotide
uuggucauuuaaugaguua

SEQ ID NO: 644450 - RNA, 19 nt, Artificial Sequence
  Description of Artificial Sequence: Synthetic oligonucleotide
cucacguuguuguaacaca

SEQ ID NO: 644451 - RNA, 19 nt, Artificial Sequence
  Description of Artificial Sequence: Synthetic oligonucleotide
uuuucggaucguccaugcu

SEQ ID NO: 644452 - RNA, 19 nt, Artificial Sequence
  Description of Artificial Sequence: Synthetic oligonucleotide
acgaggcaaauuaguaagg

SEQ ID NO: 644453 - RNA, 19 nt, Artificial Sequence
  Description of Artificial Sequence: Synthetic oligonucleotide
cuguggaccagaugcagca

SEQ ID NO: 644454 - RNA, 19 nt, Artificial Sequence
  Description of Artificial Sequence: Synthetic oligonucleotide
agggagacuuucagaacac

SEQ ID NO: 644455 - RNA, 19 nt, Artificial Sequence
  Description of Artificial Sequence: Synthetic oligonucleotide
caaaccucuuauuccuguc

SEQ ID NO: 644456 - RNA, 19 nt, Artificial Sequence
  Description of Artificial Sequence: Synthetic oligonucleotide
gugauagaaaauagugcca

SEQ ID NO: 644457 - RNA, 19 nt, Artificial Sequence
  Description of Artificial Sequence: Synthetic oligonucleotide
uacacuguacucggacacc

SEQ ID NO: 644458 - RNA, 19 nt, Artificial Sequence
  Description of Artificial Sequence: Synthetic oligonucleotide
accguacccuccaucauuc

SEQ ID NO: 644459 - RNA, 19 nt, Artificial Sequence
  Description of Artificial Sequence: Synthetic oligonucleotide
cuguaagcaugaccucacg

SEQ ID NO: 644460 - RNA, 19 nt, Artificial Sequence
  Description of Artificial Sequence: Synthetic oligonucleotide
ccgagaucgauguuguaag

SEQ ID NO: 644461 - RNA, 19 nt, Artificial Sequence
  Description of Artificial Sequence: Synthetic oligonucleotide
aggcuuagugugcgaacag

SEQ ID NO: 644462 - RNA, 19 nt, Artificial Sequence
  Description of Artificial Sequence: Synthetic oligonucleotide
ucuaaggauucuucaucuu

SEQ ID NO: 644463 - RNA, 19 nt, Artificial Sequence
  Description of Artificial Sequence: Synthetic oligonucleotide
caaggcuuagugugcgaac

SEQ ID NO: 644464 - RNA, 19 nt, Artificial Sequence
  Description of Artificial Sequence: Synthetic oligonucleotide
ucacacgugugguaguauu

SEQ ID NO: 644465 - RNA, 19 nt, Artificial Sequence
  Description of Artificial Sequence: Synthetic oligonucleotide
ggagacuuucagaacacug

SEQ ID NO: 644466 - RNA, 19 nt, Artificial Sequence
  Description of Artificial Sequence: Synthetic oligonucleotide
augcacgugucuccgagau

SEQ ID NO: 644467 - RNA, 19 nt, Artificial Sequence
  Description of Artificial Sequence: Synthetic oligonucleotide
aaacccucggaggucggca

SEQ ID NO: 644468 - RNA, 19 nt, Artificial Sequence
  Description of Artificial Sequence: Synthetic oligonucleotide
aguuacugucucccauuca

SEQ ID NO: 644469 - RNA, 19 nt, Artificial Sequence
  Description of Artificial Sequence: Synthetic oligonucleotide
guugccgacagugcacucc

SEQ ID NO: 644470 - RNA, 19 nt, Artificial Sequence
  Description of Artificial Sequence: Synthetic oligonucleotide
cauuuucggaucguccaug

SEQ ID NO: 644471 - RNA, 19 nt, Artificial Sequence
  Description of Artificial Sequence: Synthetic oligonucleotide
auccauuauugcacggcuc

SEQ ID NO: 644472 - RNA, 19 nt, Artificial Sequence
  Description of Artificial Sequence: Synthetic oligonucleotide
cauauacagacuugugaua

SEQ ID NO: 644473 - RNA, 19 nt, Artificial Sequence
  Description of Artificial Sequence: Synthetic oligonucleotide
uacuccguggcagacccac

SEQ ID NO: 644474 - RNA, 19 nt, Artificial Sequence
  Description of Artificial Sequence: Synthetic oligonucleotide
agggaccguacccuccauc

SEQ ID NO: 644475 - RNA, 19 nt, Artificial Sequence
  Description of Artificial Sequence: Synthetic oligonucleotide
gaagcgauacacaguucca

SEQ ID NO: 644476 - RNA, 19 nt, Artificial Sequence
  Description of Artificial Sequence: Synthetic oligonucleotide
ucaggcccgugguacaccu

SEQ ID NO: 644477 - RNA, 19 nt, Artificial Sequence
  Description of Artificial Sequence: Synthetic oligonucleotide
caggugaauucugucaguc

SEQ ID NO: 644478 - RNA, 19 nt, Artificial Sequence
  Description of Artificial Sequence: Synthetic oligonucleotide
cuguacucggacaccucac

SEQ ID NO: 644479 - RNA, 19 nt, Artificial Sequence
  Description of Artificial Sequence: Synthetic oligonucleotide
cacucgaugccuggauucg

SEQ ID NO: 644480 - RNA, 19 nt, Artificial Sequence
  Description of Artificial Sequence: Synthetic oligonucleotide
uuuccugacugaagagauu

SEQ ID NO: 644481 - RNA, 19 nt, Artificial Sequence
  Description of Artificial Sequence: Synthetic oligonucleotide
acuaauuauuauagucaau

SEQ ID NO: 644482 - RNA, 19 nt, Artificial Sequence
  Description of Artificial Sequence: Synthetic oligonucleotide
gugcaaggcuuagugugcg

SEQ ID NO: 644483 - RNA, 19 nt, Artificial Sequence
  Description of Artificial Sequence: Synthetic oligonucleotide
ugcuucccauaucuccugu

SEQ ID NO: 644484 - RNA, 19 nt, Artificial Sequence
  Description of Artificial Sequence: Synthetic oligonucleotide
cagguugccgacagugcac

SEQ ID NO: 644485 - RNA, 19 nt, Artificial Sequence
  Description of Artificial Sequence: Synthetic oligonucleotide
cuuugagggugggagggac

SEQ ID NO: 644486 - RNA, 19 nt, Artificial Sequence
  Description of Artificial Sequence: Synthetic oligonucleotide
cagaugcagcacauuccag

SEQ ID NO: 644487 - RNA, 19 nt, Artificial Sequence
  Description of Artificial Sequence: Synthetic oligonucleotide
guaguauugcccacaguaa

SEQ ID NO: 644488 - RNA, 19 nt, Artificial Sequence
  Description of Artificial Sequence: Synthetic oligonucleotide
caguucaguacaaggcaca

SEQ ID NO: 644489 - RNA, 19 nt, Artificial Sequence
  Description of Artificial Sequence: Synthetic oligonucleotide
cugucucccauaagauuuc

SEQ ID NO: 644490 - RNA, 19 nt, Artificial Sequence
  Description of Artificial Sequence: Synthetic oligonucleotide
cugaagcuacguccucagg

SEQ ID NO: 644491 - RNA, 19 nt, Artificial Sequence
  Description of Artificial Sequence: Synthetic oligonucleotide
ugaccuggugcaaggcuua

SEQ ID NO: 644492 - RNA, 19 nt, Artificial Sequence
  Description of Artificial Sequence: Synthetic oligonucleotide
cucuguggaccagaugcag

SEQ ID NO: 644493 - RNA, 19 nt, Artificial Sequence
  Description of Artificial Sequence: Synthetic oligonucleotide
uaucacacgugugguagua

SEQ ID NO: 644494 - RNA, 19 nt, Artificial Sequence
  Description of Artificial Sequence: Synthetic oligonucleotide
guaucucaaagcagguguc

SEQ ID NO: 644495 - RNA, 19 nt, Artificial Sequence
  Description of Artificial Sequence: Synthetic oligonucleotide
caucggugguacugucucc

SEQ ID NO: 644496 - RNA, 19 nt, Artificial Sequence
  Description of Artificial Sequence: Synthetic oligonucleotide
gugucuccgagaucgaugu

SEQ ID NO: 644497 - RNA, 19 nt, Artificial Sequence
  Description of Artificial Sequence: Synthetic oligonucleotide
gaagcuacguccucagguu

SEQ ID NO: 644498 - RNA, 19 nt, Artificial Sequence
  Description of Artificial Sequence: Synthetic oligonucleotide
auuucguugauggccugaa

SEQ ID NO: 644499 - RNA, 19 nt, Artificial Sequence
  Description of Artificial Sequence: Synthetic oligonucleotide
augcucgcaguuuguacaa

SEQ ID NO: 644500 - RNA, 19 nt, Artificial Sequence
  Description of Artificial Sequence: Synthetic oligonucleotide
ggcacacaauaaugcauug

SEQ ID NO: 644501 - RNA, 19 nt, Artificial Sequence
  Description of Artificial Sequence: Synthetic oligonucleotide
cucccauaagauuucacau

SEQ ID NO: 644502 - RNA, 19 nt, Artificial Sequence
  Description of Artificial Sequence: Synthetic oligonucleotide
ugguaguauugcccacagu

SEQ ID NO: 644503 - RNA, 19 nt, Artificial Sequence
  Description of Artificial Sequence: Synthetic oligonucleotide
ugucuggaccaugguaaac

SEQ ID NO: 644504 - RNA, 19 nt, Artificial Sequence
  Description of Artificial Sequence: Synthetic oligonucleotide
ugauggccugaauucugau

SEQ ID NO: 644505 - RNA, 19 nt, Artificial Sequence
  Description of Artificial Sequence: Synthetic oligonucleotide
cuuuaucacacguguggua

SEQ ID NO: 644506 - RNA, 19 nt, Artificial Sequence
  Description of Artificial Sequence: Synthetic oligonucleotide
ucgaugccuggauucggaa

SEQ ID NO: 644507 - RNA, 19 nt, Artificial Sequence
  Description of Artificial Sequence: Synthetic oligonucleotide
ccucuuauuccuguccucc

SEQ ID NO: 644508 - RNA, 19 nt, Artificial Sequence
  Description of Artificial Sequence: Synthetic oligonucleotide
uuccagccuaggaggcaag

SEQ ID NO: 644509 - RNA, 19 nt, Artificial Sequence
  Description of Artificial Sequence: Synthetic oligonucleotide
caaaacccucggaggucgg

SEQ ID NO: 644510 - RNA, 19 nt, Artificial Sequence
  Description of Artificial Sequence: Synthetic oligonucleotide
gguugcgaagccaagcaca

SEQ ID NO: 644511 - RNA, 19 nt, Artificial Sequence
  Description of Artificial Sequence: Synthetic oligonucleotide
ggaggcaagggugguaaag

SEQ ID NO: 644512 - RNA, 19 nt, Artificial Sequence
  Description of Artificial Sequence: Synthetic oligonucleotide
cacggcucuucccaguuca

SEQ ID NO: 644513 - RNA, 19 nt, Artificial Sequence
  Description of Artificial Sequence: Synthetic oligonucleotide
gggaccguacccuccauca

SEQ ID NO: 644514 - RNA, 19 nt, Artificial Sequence
  Description of Artificial Sequence: Synthetic oligonucleotide
aggacucgacuacaucaau

SEQ ID NO: 644515 - RNA, 19 nt, Artificial Sequence
  Description of Artificial Sequence: Synthetic oligonucleotide
aggccgagucuuuaaugaa

SEQ ID NO: 644516 - RNA, 19 nt, Artificial Sequence
  Description of Artificial Sequence: Synthetic oligonucleotide
caauuucguugauggccug

SEQ ID NO: 644517 - RNA, 19 nt, Artificial Sequence
  Description of Artificial Sequence: Synthetic oligonucleotide
ugcgaacagggagacuuuc

SEQ ID NO: 644518 - RNA, 19 nt, Artificial Sequence
  Description of Artificial Sequence: Synthetic oligonucleotide
ggugaauucugucagucuu

SEQ ID NO: 644519 - RNA, 19 nt, Artificial Sequence
  Description of Artificial Sequence: Synthetic oligonucleotide
aacaugcuacgaggcaaau

SEQ ID NO: 644520 - RNA, 19 nt, Artificial Sequence
  Description of Artificial Sequence: Synthetic oligonucleotide
ggcgacaugcacacacacg

SEQ ID NO: 644521 - RNA, 19 nt, Artificial Sequence
  Description of Artificial Sequence: Synthetic oligonucleotide
gcgauacacaguuccagga

SEQ ID NO: 644522 - RNA, 19 nt, Artificial Sequence
  Description of Artificial Sequence: Synthetic oligonucleotide
guccuuuaucacacgugug

SEQ ID NO: 644523 - RNA, 19 nt, Artificial Sequence
  Description of Artificial Sequence: Synthetic oligonucleotide
guugcgaagccaagcacaa

SEQ ID NO: 644524 - RNA, 19 nt, Artificial Sequence
  Description of Artificial Sequence: Synthetic oligonucleotide
ucggaucguccaugcuucc

SEQ ID NO: 644525 - RNA, 19 nt, Artificial Sequence
  Description of Artificial Sequence: Synthetic oligonucleotide
ucggugguacugucuccca

SEQ ID NO: 644526 - RNA, 19 nt, Artificial Sequence
  Description of Artificial Sequence: Synthetic oligonucleotide
gaauucugauccgguaugu

SEQ ID NO: 644527 - RNA, 19 nt, Artificial Sequence
  Description of Artificial Sequence: Synthetic oligonucleotide
cugaagcgauacacaguuc

SEQ ID NO: 644528 - RNA, 19 nt, Artificial Sequence
  Description of Artificial Sequence: Synthetic oligonucleotide
ccuuauaaguguggcuggg

SEQ ID NO: 644529 - RNA, 19 nt, Artificial Sequence
  Description of Artificial Sequence: Synthetic oligonucleotide
agcaaugauuucagaucca

SEQ ID NO: 644530 - RNA, 19 nt, Artificial Sequence
  Description of Artificial Sequence: Synthetic oligonucleotide
cuccaaaacccucggaggu

SEQ ID NO: 644531 - RNA, 19 nt, Artificial Sequence
  Description of Artificial Sequence: Synthetic oligonucleotide
agguugccgacagugcacu

SEQ ID NO: 644532 - RNA, 19 nt, Artificial Sequence
  Description of Artificial Sequence: Synthetic oligonucleotide
gaacugacuaaugguccaa

SEQ ID NO: 644533 - RNA, 19 nt, Artificial Sequence
  Description of Artificial Sequence: Synthetic oligonucleotide
gguucugacacaucagaau

SEQ ID NO: 644534 - RNA, 19 nt, Artificial Sequence
  Description of Artificial Sequence: Synthetic oligonucleotide
gggugguaaaggccgaguc

SEQ ID NO: 644535 - RNA, 19 nt, Artificial Sequence
  Description of Artificial Sequence: Synthetic oligonucleotide
uugcacggcucuucccagu

SEQ ID NO: 644536 - RNA, 19 nt, Artificial Sequence
  Description of Artificial Sequence: Synthetic oligonucleotide
guacaccucugaagcuacg

SEQ ID NO: 644537 - RNA, 19 nt, Artificial Sequence
  Description of Artificial Sequence: Synthetic oligonucleotide
gaucgauguuguaagcaau

SEQ ID NO: 644538 - RNA, 19 nt, Artificial Sequence
  Description of Artificial Sequence: Synthetic oligonucleotide
cuaaugguccaacuccaau

SEQ ID NO: 644539 - RNA, 19 nt, Artificial Sequence
  Description of Artificial Sequence: Synthetic oligonucleotide
ggugguaaaggccgagucu

SEQ ID NO: 644540 - RNA, 19 nt, Artificial Sequence
  Description of Artificial Sequence: Synthetic oligonucleotide
gccgacagugcacuccagc

SEQ ID NO: 644541 - RNA, 19 nt, Artificial Sequence
  Description of Artificial Sequence: Synthetic oligonucleotide
gucggcaccaggguucuga

SEQ ID NO: 644542 - RNA, 19 nt, Artificial Sequence
  Description of Artificial Sequence: Synthetic oligonucleotide
ggccgagucuuuaaugaac

SEQ ID NO: 644543 - RNA, 19 nt, Artificial Sequence
  Description of Artificial Sequence: Synthetic oligonucleotide
cagagcccgcacucugaag

SEQ ID NO: 644544 - RNA, 19 nt, Artificial Sequence
  Description of Artificial Sequence: Synthetic oligonucleotide
gcaaauuaguaaggcguuc

SEQ ID NO: 644545 - RNA, 19 nt, Artificial Sequence
  Description of Artificial Sequence: Synthetic oligonucleotide
gcuacgaggcaaauuagua

SEQ ID NO: 644546 - RNA, 19 nt, Artificial Sequence
  Description of Artificial Sequence: Synthetic oligonucleotide
gcucucuaggacucgacua

SEQ ID NO: 644547 - RNA, 19 nt, Artificial Sequence
  Description of Artificial Sequence: Synthetic oligonucleotide
gaggugcuuugaggguggg

SEQ ID NO: 644548 - RNA, 19 nt, Artificial Sequence
  Description of Artificial Sequence: Synthetic oligonucleotide
cacacacggaaccuguagu

SEQ ID NO: 644549 - RNA, 19 nt, Artificial Sequence
  Description of Artificial Sequence: Synthetic oligonucleotide
acaugcuacgaggcaaauu

SEQ ID NO: 644550 - RNA, 19 nt, Artificial Sequence
  Description of Artificial Sequence: Synthetic oligonucleotide
cacuguacucggacaccuc

SEQ ID NO: 644551 - RNA, 19 nt, Artificial Sequence
  Description of Artificial Sequence: Synthetic oligonucleotide
caucagaauagggaccgua

SEQ ID NO: 644552 - RNA, 19 nt, Artificial Sequence
  Description of Artificial Sequence: Synthetic oligonucleotide
caagggugguaaaggccga

SEQ ID NO: 644553 - RNA, 19 nt, Artificial Sequence
  Description of Artificial Sequence: Synthetic oligonucleotide
gaccguacccuccaucauu

SEQ ID NO: 644554 - RNA, 19 nt, Artificial Sequence
  Description of Artificial Sequence: Synthetic oligonucleotide
ccaauuucguugauggccu

SEQ ID NO: 644555 - RNA, 19 nt, Artificial Sequence
  Description of Artificial Sequence: Synthetic oligonucleotide
acggaaccuguagucugug

SEQ ID NO: 644556 - RNA, 19 nt, Artificial Sequence
  Description of Artificial Sequence: Synthetic oligonucleotide
cgugucuccgagaucgaug

SEQ ID NO: 644557 - RNA, 19 nt, Artificial Sequence
  Description of Artificial Sequence: Synthetic oligonucleotide
gagcucucuaggacucgac

SEQ ID NO: 644558 - RNA, 19 nt, Artificial Sequence
  Description of Artificial Sequence: Synthetic oligonucleotide
cgagaucgauguuguaagc

SEQ ID NO: 644559 - RNA, 19 nt, Artificial Sequence
  Description of Artificial Sequence: Synthetic oligonucleotide
caguuuguacaaagugccu

SEQ ID NO: 644560 - RNA, 19 nt, Artificial Sequence
  Description of Artificial Sequence: Synthetic oligonucleotide
gcgugugucuuggaguuac

SEQ ID NO: 644561 - RNA, 19 nt, Artificial Sequence
  Description of Artificial Sequence: Synthetic oligonucleotide
ccgguauguaguuucugga

SEQ ID NO: 644562 - RNA, 19 nt, Artificial Sequence
  Description of Artificial Sequence: Synthetic oligonucleotide
gauuuggaauguggcuucu

SEQ ID NO: 644563 - RNA, 19 nt, Artificial Sequence
  Description of Artificial Sequence: Synthetic oligonucleotide
aucacacgugugguaguau

SEQ ID NO: 644564 - RNA, 19 nt, Artificial Sequence
  Description of Artificial Sequence: Synthetic oligonucleotide
cuuauaaguguggcugggu

SEQ ID NO: 644565 - RNA, 19 nt, Artificial Sequence
  Description of Artificial Sequence: Synthetic oligonucleotide
gauccgguauguaguuucu

SEQ ID NO: 644566 - RNA, 19 nt, Artificial Sequence
  Description of Artificial Sequence: Synthetic oligonucleotide
ccgagucuuuaaugaacug

SEQ ID NO: 644567 - RNA, 19 nt, Artificial Sequence
  Description of Artificial Sequence: Synthetic oligonucleotide
ggaccuuauaaguguggcu

SEQ ID NO: 644568 - RNA, 19 nt, Artificial Sequence
  Description of Artificial Sequence: Synthetic oligonucleotide
ugugucacucgaggugcuu

SEQ ID NO: 644569 - RNA, 19 nt, Artificial Sequence
  Description of Artificial Sequence: Synthetic oligonucleotide
ccuucauuuucggaucguc

SEQ ID NO: 644570 - RNA, 19 nt, Artificial Sequence
  Description of Artificial Sequence: Synthetic oligonucleotide
cgaugccuggauucggaag

SEQ ID NO: 644571 - RNA, 19 nt, Artificial Sequence
  Description of Artificial Sequence: Synthetic oligonucleotide
cacgcagcggcgacaugca

SEQ ID NO: 644572 - RNA, 19 nt, Artificial Sequence
  Description of Artificial Sequence: Synthetic oligonucleotide
ugucuccgagaucgauguu

SEQ ID NO: 644573 - RNA, 19 nt, Artificial Sequence
  Description of Artificial Sequence: Synthetic oligonucleotide
ugcucgcaguuuguacaaa

SEQ ID NO: 644574 - RNA, 19 nt, Artificial Sequence
  Description of Artificial Sequence: Synthetic oligonucleotide
cgaggugcuuugagggugg

SEQ ID NO: 644575 - RNA, 19 nt, Artificial Sequence
  Description of Artificial Sequence: Synthetic oligonucleotide
uagggaccguacccuccau

SEQ ID NO: 644576 - RNA, 19 nt, Artificial Sequence
  Description of Artificial Sequence: Synthetic oligonucleotide
ggacucgacuacaucaaua

SEQ ID NO: 644577 - RNA, 19 nt, Artificial Sequence
  Description of Artificial Sequence: Synthetic oligonucleotide
gguuaauacuccagaugcu

SEQ ID NO: 644578 - RNA, 19 nt, Artificial Sequence
  Description of Artificial Sequence: Synthetic oligonucleotide
uugcgaagccaagcacaau

SEQ ID NO: 644579 - RNA, 19 nt, Artificial Sequence
  Description of Artificial Sequence: Synthetic oligonucleotide
ccugaauucugauccggua

SEQ ID NO: 644580 - RNA, 19 nt, Artificial Sequence
  Description of Artificial Sequence: Synthetic oligonucleotide
cacggaaccuguagucugu

SEQ ID NO: 644581 - RNA, 19 nt, Artificial Sequence
  Description of Artificial Sequence: Synthetic oligonucleotide
acgugucuccgagaucgau

SEQ ID NO: 644582 - RNA, 19 nt, Artificial Sequence
  Description of Artificial Sequence: Synthetic oligonucleotide
cacacggaaccuguagucu

SEQ ID NO: 644583 - RNA, 19 nt, Artificial Sequence
  Description of Artificial Sequence: Synthetic oligonucleotide
gaagcagguugccgacagu

SEQ ID NO: 644584 - RNA, 19 nt, Artificial Sequence
  Description of Artificial Sequence: Synthetic oligonucleotide
cucgaggugcuuugagggu

SEQ ID NO: 644585 - RNA, 19 nt, Artificial Sequence
  Description of Artificial Sequence: Synthetic oligonucleotide
cucggacaccucacagcca

SEQ ID NO: 644586 - RNA, 19 nt, Artificial Sequence
  Description of Artificial Sequence: Synthetic oligonucleotide
gucgccuuucaucgguggu

SEQ ID NO: 644587 - RNA, 19 nt, Artificial Sequence
  Description of Artificial Sequence: Synthetic oligonucleotide
guaaggcguuccguucaca

SEQ ID NO: 644588 - RNA, 19 nt, Artificial Sequence
  Description of Artificial Sequence: Synthetic oligonucleotide
gcaaggcuuagugugcgaa

SEQ ID NO: 644589 - RNA, 19 nt, Artificial Sequence
  Description of Artificial Sequence: Synthetic oligonucleotide
acggcucuucccaguucag

SEQ ID NO: 644590 - RNA, 19 nt, Artificial Sequence
  Description of Artificial Sequence: Synthetic oligonucleotide
gccgagucuuuaaugaacu

SEQ ID NO: 644591 - RNA, 19 nt, Artificial Sequence
  Description of Artificial Sequence: Synthetic oligonucleotide
auagugccauguagaggaa

SEQ ID NO: 644592 - RNA, 19 nt, Artificial Sequence
  Description of Artificial Sequence: Synthetic oligonucleotide
cucuaggacucgacuacau

SEQ ID NO: 644593 - RNA, 19 nt, Artificial Sequence
  Description of Artificial Sequence: Synthetic oligonucleotide
agcccgcacucugaagcga

SEQ ID NO: 644594 - RNA, 19 nt, Artificial Sequence
  Description of Artificial Sequence: Synthetic oligonucleotide
ccuuuguaaugacaauaua

SEQ ID NO: 644595 - RNA, 19 nt, Artificial Sequence
  Description of Artificial Sequence: Synthetic oligonucleotide
ggcaaauuaguaaggcguu

SEQ ID NO: 644596 - RNA, 19 nt, Artificial Sequence
  Description of Artificial Sequence: Synthetic oligonucleotide
cgguauguaguuucuggaa

SEQ ID NO: 644597 - RNA, 19 nt, Artificial Sequence
  Description of Artificial Sequence: Synthetic oligonucleotide
ccauaagauuucacaugaa

SEQ ID NO: 644598 - RNA, 19 nt, Artificial Sequence
  Description of Artificial Sequence: Synthetic oligonucleotide
ccgcacucugaagcgauac

SEQ ID NO: 644599 - RNA, 19 nt, Artificial Sequence
  Description of Artificial Sequence: Synthetic oligonucleotide
guccaacuccaauuucguu

SEQ ID NO: 644600 - RNA, 19 nt, Artificial Sequence
  Description of Artificial Sequence: Synthetic oligonucleotide
ccgacagugcacuccagcu

SEQ ID NO: 644601 - RNA, 19 nt, Artificial Sequence
  Description of Artificial Sequence: Synthetic oligonucleotide
gguugccgacagugcacuc

SEQ ID NO: 644602 - RNA, 19 nt, Artificial Sequence
  Description of Artificial Sequence: Synthetic oligonucleotide
cucuagugugcuggauuua

SEQ ID NO: 644603 - RNA, 19 nt, Artificial Sequence
  Description of Artificial Sequence: Synthetic oligonucleotide
gcccgugguacaccucuga

SEQ ID NO: 644604 - RNA, 19 nt, Artificial Sequence
  Description of Artificial Sequence: Synthetic oligonucleotide
ggucggcacugaccuggug

SEQ ID NO: 644605 - RNA, 19 nt, Artificial Sequence
  Description of Artificial Sequence: Synthetic oligonucleotide
agcgugugucuuggaguua

SEQ ID NO: 644606 - RNA, 19 nt, Artificial Sequence
  Description of Artificial Sequence: Synthetic oligonucleotide
ccguucacaccucuagugu

SEQ ID NO: 644607 - RNA, 19 nt, Artificial Sequence
  Description of Artificial Sequence: Synthetic oligonucleotide
ggugcugaugcagcaugcu

SEQ ID NO: 644608 - RNA, 19 nt, Artificial Sequence
  Description of Artificial Sequence: Synthetic oligonucleotide
auacuccguggcagaccca

SEQ ID NO: 644609 - RNA, 19 nt, Artificial Sequence
  Description of Artificial Sequence: Synthetic oligonucleotide
gugucacucgaggugcuuu

SEQ ID NO: 644610 - RNA, 19 nt, Artificial Sequence
  Description of Artificial Sequence: Synthetic oligonucleotide
gcuuugagggugggaggga

SEQ ID NO: 644611 - RNA, 19 nt, Artificial Sequence
  Description of Artificial Sequence: Synthetic oligonucleotide
ugucggcaccaggguucug

SEQ ID NO: 644612 - RNA, 19 nt, Artificial Sequence
  Description of Artificial Sequence: Synthetic oligonucleotide
cuccgagaucgauguugua

SEQ ID NO: 644613 - RNA, 19 nt, Artificial Sequence
  Description of Artificial Sequence: Synthetic oligonucleotide
cggaucguccaugcuuccc

SEQ ID NO: 644614 - RNA, 19 nt, Artificial Sequence
  Description of Artificial Sequence: Synthetic oligonucleotide
ccaauaccugcagaaugua

SEQ ID NO: 644615 - RNA, 19 nt, Artificial Sequence
  Description of Artificial Sequence: Synthetic oligonucleotide
cccgugguacaccucugaa

SEQ ID NO: 644616 - RNA, 19 nt, Artificial Sequence
  Description of Artificial Sequence: Synthetic oligonucleotide
gcggcgacaugcacacaca

SEQ ID NO: 644617 - RNA, 19 nt, Artificial Sequence
  Description of Artificial Sequence: Synthetic oligonucleotide
ggcccgugguacaccucug

SEQ ID NO: 644618 - RNA, 19 nt, Artificial Sequence
  Description of Artificial Sequence: Synthetic oligonucleotide
ggcguuccguucacaccuc

SEQ ID NO: 644619 - RNA, 19 nt, Artificial Sequence
  Description of Artificial Sequence: Synthetic oligonucleotide
cgcacucugaagcgauaca

SEQ ID NO: 644620 - RNA, 19 nt, Artificial Sequence
  Description of Artificial Sequence: Synthetic oligonucleotide
ggaccguacccuccaucau

SEQ ID NO: 644621 - RNA, 19 nt, Artificial Sequence
  Description of Artificial Sequence: Synthetic oligonucleotide
gugcgaacagggagacuuu

SEQ ID NO: 644622 - RNA, 19 nt, Artificial Sequence
  Description of Artificial Sequence: Synthetic oligonucleotide
gcguuccguucacaccucu

SEQ ID NO: 644623 - RNA, 19 nt, Artificial Sequence
  Description of Artificial Sequence: Synthetic oligonucleotide
ccguacccuccaucauuca

SEQ ID NO: 644624 - RNA, 19 nt, Artificial Sequence
  Description of Artificial Sequence: Synthetic oligonucleotide
cguuccguucacaccucua

SEQ ID NO: 644625 - RNA, 19 nt, Artificial Sequence
  Description of Artificial Sequence: Synthetic oligonucleotide
cccgcacucugaagcgaua

SEQ ID NO: 644626 - RNA, 19 nt, Artificial Sequence
  Description of Artificial Sequence: Synthetic oligonucleotide
cagcggcgacaugcacaca

SEQ ID NO: 644627 - RNA, 19 nt, Artificial Sequence
  Description of Artificial Sequence: Synthetic oligonucleotide
ccauuauugcacggcucuu

SEQ ID NO: 644628 - RNA, 19 nt, Artificial Sequence
  Description of Artificial Sequence: Synthetic oligonucleotide
aaaaucgcaaugaugaagc

SEQ ID NO: 644629 - RNA, 19 nt, Artificial Sequence
  Description of Artificial Sequence: Synthetic oligonucleotide
uauuccacgucuccgaugg

SEQ ID NO: 644630 - RNA, 19 nt, Artificial Sequence
  Description of Artificial Sequence: Synthetic oligonucleotide
uuaacauuguaccccaugc

SEQ ID NO: 644631 - RNA, 19 nt, Artificial Sequence
  Description of Artificial Sequence: Synthetic oligonucleotide
aaucgcaaugaugaagccc

SEQ ID NO: 644632 - RNA, 19 nt, Artificial Sequence
  Description of Artificial Sequence: Synthetic oligonucleotide
aacauuguaccccaugccu

SEQ ID NO: 644633 - RNA, 19 nt, Artificial Sequence
  Description of Artificial Sequence: Synthetic oligonucleotide
uccaaugucacacccagca

SEQ ID NO: 644634 - RNA, 19 nt, Artificial Sequence
  Description of Artificial Sequence: Synthetic oligonucleotide
agaauagccacccagugga

SEQ ID NO: 644635 - RNA, 19 nt, Artificial Sequence
  Description of Artificial Sequence: Synthetic oligonucleotide
augaacgugucauagacca

SEQ ID NO: 644636 - RNA, 19 nt, Artificial Sequence
  Description of Artificial Sequence: Synthetic oligonucleotide
uguguguucccgcacaugc

SEQ ID NO: 644637 - RNA, 19 nt, Artificial Sequence
  Description of Artificial Sequence: Synthetic oligonucleotide
gaugacuuucucuagugug

SEQ ID NO: 644638 - RNA, 19 nt, Artificial Sequence
  Description of Artificial Sequence: Synthetic oligonucleotide
uacaguaucacuguccacc

SEQ ID NO: 644639 - RNA, 19 nt, Artificial Sequence
  Description of Artificial Sequence: Synthetic oligonucleotide
aaaucgcaaugaugaagcc

SEQ ID NO: 644640 - RNA, 19 nt, Artificial Sequence
  Description of Artificial Sequence: Synthetic oligonucleotide
agugucaugagcugccugg

SEQ ID NO: 644641 - RNA, 19 nt, Artificial Sequence
  Description of Artificial Sequence: Synthetic oligonucleotide
ucaugaacuugccagucag

SEQ ID NO: 644642 - RNA, 19 nt, Artificial Sequence
  Description of Artificial Sequence: Synthetic oligonucleotide
aggagcuuagcugugaugg

SEQ ID NO: 644643 - RNA, 19 nt, Artificial Sequence
  Description of Artificial Sequence: Synthetic oligonucleotide
auucgcacagcacuggagg

SEQ ID NO: 644644 - RNA, 19 nt, Artificial Sequence
  Description of Artificial Sequence: Synthetic oligonucleotide
ugggcaaugggcaucacca

SEQ ID NO: 644645 - RNA, 19 nt, Artificial Sequence
  Description of Artificial Sequence: Synthetic oligonucleotide
uucgacagcaucaaaccca

SEQ ID NO: 644646 - RNA, 19 nt, Artificial Sequence
  Description of Artificial Sequence: Synthetic oligonucleotide
aguggcacagcuauaagcg

SEQ ID NO: 644647 - RNA, 19 nt, Artificial Sequence
  Description of Artificial Sequence: Synthetic oligonucleotide
aaggcuguuagguauucca

SEQ ID NO: 644648 - RNA, 19 nt, Artificial Sequence
  Description of Artificial Sequence: Synthetic oligonucleotide
uccgccaaccucuucaggg

SEQ ID NO: 644649 - RNA, 19 nt, Artificial Sequence
  Description of Artificial Sequence: Synthetic oligonucleotide
auggcuacggaguugaaga

SEQ ID NO: 644650 - RNA, 19 nt, Artificial Sequence
  Description of Artificial Sequence: Synthetic oligonucleotide
uauaagcgugcucuguugc

SEQ ID NO: 644651 - RNA, 19 nt, Artificial Sequence
  Description of Artificial Sequence: Synthetic oligonucleotide
acagcuauaagcgugcucu

SEQ ID NO: 644652 - RNA, 19 nt, Artificial Sequence
  Description of Artificial Sequence: Synthetic oligonucleotide
uggucaaguggccaaaaca

SEQ ID NO: 644653 - RNA, 19 nt, Artificial Sequence
  Description of Artificial Sequence: Synthetic oligonucleotide
aaacaucuggcggugacag

SEQ ID NO: 644654 - RNA, 19 nt, Artificial Sequence
  Description of Artificial Sequence: Synthetic oligonucleotide
guggcgacugcauugaugc

SEQ ID NO: 644655 - RNA, 19 nt, Artificial Sequence
  Description of Artificial Sequence: Synthetic oligonucleotide
auuaacauuguaccccaug

SEQ ID NO: 644656 - RNA, 19 nt, Artificial Sequence
  Description of Artificial Sequence: Synthetic oligonucleotide
auggugaaugucccagucc

SEQ ID NO: 644657 - RNA, 19 nt, Artificial Sequence
  Description of Artificial Sequence: Synthetic oligonucleotide
gccacauuaacauuguacc

SEQ ID NO: 644658 - RNA, 19 nt, Artificial Sequence
  Description of Artificial Sequence: Synthetic oligonucleotide
ugucauagaccacaccugu

SEQ ID NO: 644659 - RNA, 19 nt, Artificial Sequence
  Description of Artificial Sequence: Synthetic oligonucleotide
uaacauuguaccccaugcc

SEQ ID NO: 644660 - RNA, 19 nt, Artificial Sequence
  Description of Artificial Sequence: Synthetic oligonucleotide
aguucccauugucauagcg

SEQ ID NO: 644661 - RNA, 19 nt, Artificial Sequence
  Description of Artificial Sequence: Synthetic oligonucleotide
gaccagaugcucuggaugc

SEQ ID NO: 644662 - RNA, 19 nt, Artificial Sequence
  Description of Artificial Sequence: Synthetic oligonucleotide
aguaucacuguccacccca

SEQ ID NO: 644663 - RNA, 19 nt, Artificial Sequence
  Description of Artificial Sequence: Synthetic oligonucleotide
gaguggcacagcuauaagc

SEQ ID NO: 644664 - RNA, 19 nt, Artificial Sequence
  Description of Artificial Sequence: Synthetic oligonucleotide
ucgacagcaucaaacccag

SEQ ID NO: 644665 - RNA, 19 nt, Artificial Sequence
  Description of Artificial Sequence: Synthetic oligonucleotide
caaaaucgcaaugaugaag

SEQ ID NO: 644666 - RNA, 19 nt, Artificial Sequence
  Description of Artificial Sequence: Synthetic oligonucleotide
gaggggucaucguagaaug

SEQ ID NO: 644667 - RNA, 19 nt, Artificial Sequence
  Description of Artificial Sequence: Synthetic oligonucleotide
uguggcuuuacgaccccgg

SEQ ID NO: 644668 - RNA, 19 nt, Artificial Sequence
  Description of Artificial Sequence: Synthetic oligonucleotide
aaacccagcggagacuagg

SEQ ID NO: 644669 - RNA, 19 nt, Artificial Sequence
  Description of Artificial Sequence: Synthetic oligonucleotide
ugcuguguugacagcuucg

SEQ ID NO: 644670 - RNA, 19 nt, Artificial Sequence
  Description of Artificial Sequence: Synthetic oligonucleotide
auggcggucaagucauggc

SEQ ID NO: 644671 - RNA, 19 nt, Artificial Sequence
  Description of Artificial Sequence: Synthetic oligonucleotide
cauuguaccccaugccugg

SEQ ID NO: 644672 - RNA, 19 nt, Artificial Sequence
  Description of Artificial Sequence: Synthetic oligonucleotide
ugugaguuggugacaguga

SEQ ID NO: 644673 - RNA, 19 nt, Artificial Sequence
  Description of Artificial Sequence: Synthetic oligonucleotide
acuaggacgacgucaggug

SEQ ID NO: 644674 - RNA, 19 nt, Artificial Sequence
  Description of Artificial Sequence: Synthetic oligonucleotide
gauggcaaauccauucuug

SEQ ID NO: 644675 - RNA, 19 nt, Artificial Sequence
  Description of Artificial Sequence: Synthetic oligonucleotide
uguguucccgcacaugcac

SEQ ID NO: 644676 - RNA, 19 nt, Artificial Sequence
  Description of Artificial Sequence: Synthetic oligonucleotide
aucgcaaugaugaagccca

SEQ ID NO: 644677 - RNA, 19 nt, Artificial Sequence
  Description of Artificial Sequence: Synthetic oligonucleotide
augacuuucucuagugugg

SEQ ID NO: 644678 - RNA, 19 nt, Artificial Sequence
  Description of Artificial Sequence: Synthetic oligonucleotide
auagagcaaggugugguac

SEQ ID NO: 644679 - RNA, 19 nt, Artificial Sequence
  Description of Artificial Sequence: Synthetic oligonucleotide
ucguagaaugcuugcuggg

SEQ ID NO: 644680 - RNA, 19 nt, Artificial Sequence
  Description of Artificial Sequence: Synthetic oligonucleotide
gagacuaggacgacgucag

SEQ ID NO: 644681 - RNA, 19 nt, Artificial Sequence
  Description of Artificial Sequence: Synthetic oligonucleotide
uggcacagcuauaagcgug

SEQ ID NO: 644682 - RNA, 19 nt, Artificial Sequence
  Description of Artificial Sequence: Synthetic oligonucleotide
uggcggucaagucauggcc

SEQ ID NO: 644683 - RNA, 19 nt, Artificial Sequence
  Description of Artificial Sequence: Synthetic oligonucleotide
uaagcgugcucuguugccg

SEQ ID NO: 644684 - RNA, 19 nt, Artificial Sequence
  Description of Artificial Sequence: Synthetic oligonucleotide
acugagugcggcucagagg

SEQ ID NO: 644685 - RNA, 19 nt, Artificial Sequence
  Description of Artificial Sequence: Synthetic oligonucleotide
cauacaguaucacugucca

SEQ ID NO: 644686 - RNA, 19 nt, Artificial Sequence
  Description of Artificial Sequence: Synthetic oligonucleotide
guagaaugcuugcugggug

SEQ ID NO: 644687 - RNA, 19 nt, Artificial Sequence
  Description of Artificial Sequence: Synthetic oligonucleotide
aagcgugcucuguugccgg

SEQ ID NO: 644688 - RNA, 19 nt, Artificial Sequence
  Description of Artificial Sequence: Synthetic oligonucleotide
gacugagugcggcucagag

SEQ ID NO: 644689 - RNA, 19 nt, Artificial Sequence
  Description of Artificial Sequence: Synthetic oligonucleotide
ugcaugaccagcugcugca

SEQ ID NO: 644690 - RNA, 19 nt, Artificial Sequence
  Description of Artificial Sequence: Synthetic oligonucleotide
guuggugacagugacugug

SEQ ID NO: 644691 - RNA, 19 nt, Artificial Sequence
  Description of Artificial Sequence: Synthetic oligonucleotide
caugaacgugucauagacc

SEQ ID NO: 644692 - RNA, 19 nt, Artificial Sequence
  Description of Artificial Sequence: Synthetic oligonucleotide
gauccgcucacacuugcug

SEQ ID NO: 644693 - RNA, 19 nt, Artificial Sequence
  Description of Artificial Sequence: Synthetic oligonucleotide
uuuacgaccccggauccgc

SEQ ID NO: 644694 - RNA, 19 nt, Artificial Sequence
  Description of Artificial Sequence: Synthetic oligonucleotide
cuucgacagcaucaaaccc

SEQ ID NO: 644695 - RNA, 19 nt, Artificial Sequence
  Description of Artificial Sequence: Synthetic oligonucleotide
cacagaggggucaucguag

SEQ ID NO: 644696 - RNA, 19 nt, Artificial Sequence
  Description of Artificial Sequence: Synthetic oligonucleotide
gaacucgugggcaaugggc

SEQ ID NO: 644697 - RNA, 19 nt, Artificial Sequence
  Description of Artificial Sequence: Synthetic oligonucleotide
aguggccaaaacaucuggc

SEQ ID NO: 644698 - RNA, 19 nt, Artificial Sequence
  Description of Artificial Sequence: Synthetic oligonucleotide
agcaaggugugguacucag

SEQ ID NO: 644699 - RNA, 19 nt, Artificial Sequence
  Description of Artificial Sequence: Synthetic oligonucleotide
ugcugagcaggccaguuuc

SEQ ID NO: 644700 - RNA, 19 nt, Artificial Sequence
  Description of Artificial Sequence: Synthetic oligonucleotide
gugaaugucccaguccacg

SEQ ID NO: 644701 - RNA, 19 nt, Artificial Sequence
  Description of Artificial Sequence: Synthetic oligonucleotide
ucugcggcaguggagagga

SEQ ID NO: 644702 - RNA, 19 nt, Artificial Sequence
  Description of Artificial Sequence: Synthetic oligonucleotide
aacgugucauagaccacac

SEQ ID NO: 644703 - RNA, 19 nt, Artificial Sequence
  Description of Artificial Sequence: Synthetic oligonucleotide
uaggacgacgucaggugag

SEQ ID NO: 644704 - RNA, 19 nt, Artificial Sequence
  Description of Artificial Sequence: Synthetic oligonucleotide
uuccacgucuccgaugggg

SEQ ID NO: 644705 - RNA, 19 nt, Artificial Sequence
  Description of Artificial Sequence: Synthetic oligonucleotide
gauggcggucaagucaugg

SEQ ID NO: 644706 - RNA, 19 nt, Artificial Sequence
  Description of Artificial Sequence: Synthetic oligonucleotide
agucucggccuccucaguc

SEQ ID NO: 644707 - RNA, 19 nt, Artificial Sequence
  Description of Artificial Sequence: Synthetic oligonucleotide
cuauaagcgugcucuguug

SEQ ID NO: 644708 - RNA, 19 nt, Artificial Sequence
  Description of Artificial Sequence: Synthetic oligonucleotide
acgacgucaggugagaacu

SEQ ID NO: 644709 - RNA, 19 nt, Artificial Sequence
  Description of Artificial Sequence: Synthetic oligonucleotide
gagacagauguccuucgac

SEQ ID NO: 644710 - RNA, 19 nt, Artificial Sequence
  Description of Artificial Sequence: Synthetic oligonucleotide
gaacgugucauagaccaca

SEQ ID NO: 644711 - RNA, 19 nt, Artificial Sequence
  Description of Artificial Sequence: Synthetic oligonucleotide
aaaacaucuggcggugaca

SEQ ID NO: 644712 - RNA, 19 nt, Artificial Sequence
  Description of Artificial Sequence: Synthetic oligonucleotide
cacacguucacccgucacc

SEQ ID NO: 644713 - RNA, 19 nt, Artificial Sequence
  Description of Artificial Sequence: Synthetic oligonucleotide
ggcuguuagguauuccacg

SEQ ID NO: 644714 - RNA, 19 nt, Artificial Sequence
  Description of Artificial Sequence: Synthetic oligonucleotide
aacucgugggcaaugggca

SEQ ID NO: 644715 - RNA, 19 nt, Artificial Sequence
  Description of Artificial Sequence: Synthetic oligonucleotide
gacgucaggugagaacucg

SEQ ID NO: 644716 - RNA, 19 nt, Artificial Sequence
  Description of Artificial Sequence: Synthetic oligonucleotide
acguguagaggcugaacug

SEQ ID NO: 644717 - RNA, 19 nt, Artificial Sequence
  Description of Artificial Sequence: Synthetic oligonucleotide
uguucccgcacaugcacug

SEQ ID NO: 644718 - RNA, 19 nt, Artificial Sequence
  Description of Artificial Sequence: Synthetic oligonucleotide
ugcuuagugggcuggucug

SEQ ID NO: 644719 - RNA, 19 nt, Artificial Sequence
  Description of Artificial Sequence: Synthetic oligonucleotide
agaaugcuugcugggugcc

SEQ ID NO: 644720 - RNA, 19 nt, Artificial Sequence
  Description of Artificial Sequence: Synthetic oligonucleotide
aggucggugccucgggagc

SEQ ID NO: 644721 - RNA, 19 nt, Artificial Sequence
  Description of Artificial Sequence: Synthetic oligonucleotide
caucaaacccagcggagac

SEQ ID NO: 644722 - RNA, 19 nt, Artificial Sequence
  Description of Artificial Sequence: Synthetic oligonucleotide
gacguguagaggcugaacu

SEQ ID NO: 644723 - RNA, 19 nt, Artificial Sequence
  Description of Artificial Sequence: Synthetic oligonucleotide
aacuugccagucagugugc

SEQ ID NO: 644724 - RNA, 19 nt, Artificial Sequence
  Description of Artificial Sequence: Synthetic oligonucleotide
aggcugaacugguuugggg

SEQ ID NO: 644725 - RNA, 19 nt, Artificial Sequence
  Description of Artificial Sequence: Synthetic oligonucleotide
gagugcggcucagaggucg

SEQ ID NO: 644726 - RNA, 19 nt, Artificial Sequence
  Description of Artificial Sequence: Synthetic oligonucleotide
ugacuuucucuaguguggc

SEQ ID NO: 644727 - RNA, 19 nt, Artificial Sequence
  Description of Artificial Sequence: Synthetic oligonucleotide
ugcucaugaacuugccagu

SEQ ID NO: 644728 - RNA, 19 nt, Artificial Sequence
  Description of Artificial Sequence: Synthetic oligonucleotide
ugccauucgcacagcacug

SEQ ID NO: 644729 - RNA, 19 nt, Artificial Sequence
  Description of Artificial Sequence: Synthetic oligonucleotide
aagaggugcuuagugggcu

SEQ ID NO: 644730 - RNA, 19 nt, Artificial Sequence
  Description of Artificial Sequence: Synthetic oligonucleotide
uccgcucacacuugcugag

SEQ ID NO: 644731 - RNA, 19 nt, Artificial Sequence
  Description of Artificial Sequence: Synthetic oligonucleotide
uuagugggcuggucugggg

SEQ ID NO: 644732 - RNA, 19 nt, Artificial Sequence
  Description of Artificial Sequence: Synthetic oligonucleotide
cauccaguguggcuuuacg

SEQ ID NO: 644733 - RNA, 19 nt, Artificial Sequence
  Description of Artificial Sequence: Synthetic oligonucleotide
auccaguguggcuuuacga

SEQ ID NO: 644734 - RNA, 19 nt, Artificial Sequence
  Description of Artificial Sequence: Synthetic oligonucleotide
acuggaggagugcaucuca

SEQ ID NO: 644735 - RNA, 19 nt, Artificial Sequence
  Description of Artificial Sequence: Synthetic oligonucleotide
uagagcaaggugugguacu

SEQ ID NO: 644736 - RNA, 19 nt, Artificial Sequence
  Description of Artificial Sequence: Synthetic oligonucleotide
aguguggcuuuacgacccc

SEQ ID NO: 644737 - RNA, 19 nt, Artificial Sequence
  Description of Artificial Sequence: Synthetic oligonucleotide
gugugaguuggugacagug

SEQ ID NO: 644738 - RNA, 19 nt, Artificial Sequence
  Description of Artificial Sequence: Synthetic oligonucleotide
uacucagagugcacugucu

SEQ ID NO: 644739 - RNA, 19 nt, Artificial Sequence
  Description of Artificial Sequence: Synthetic oligonucleotide
acgugucauagaccacacc

SEQ ID NO: 644740 - RNA, 19 nt, Artificial Sequence
  Description of Artificial Sequence: Synthetic oligonucleotide
ucaucguagaaugcuugcu

SEQ ID NO: 644741 - RNA, 19 nt, Artificial Sequence
  Description of Artificial Sequence: Synthetic oligonucleotide
agcacuggaggagugcauc

SEQ ID NO: 644742 - RNA, 19 nt, Artificial Sequence
  Description of Artificial Sequence: Synthetic oligonucleotide
agagcaaggugugguacuc

SEQ ID NO: 644743 - RNA, 19 nt, Artificial Sequence
  Description of Artificial Sequence: Synthetic oligonucleotide
caggugagaacucgugggc

SEQ ID NO: 644744 - RNA, 19 nt, Artificial Sequence
  Description of Artificial Sequence: Synthetic oligonucleotide
uggaguggcacagcuauaa

SEQ ID NO: 644745 - RNA, 19 nt, Artificial Sequence
  Description of Artificial Sequence: Synthetic oligonucleotide
acaaaaucgcaaugaugaa

SEQ ID NO: 644746 - RNA, 19 nt, Artificial Sequence
  Description of Artificial Sequence: Synthetic oligonucleotide
aguuuccugcagccgggac

SEQ ID NO: 644747 - RNA, 19 nt, Artificial Sequence
  Description of Artificial Sequence: Synthetic oligonucleotide
cauucgcacagcacuggag

SEQ ID NO: 644748 - RNA, 19 nt, Artificial Sequence
  Description of Artificial Sequence: Synthetic oligonucleotide
uggaugaugugcucaugaa

SEQ ID NO: 644749 - RNA, 19 nt, Artificial Sequence
  Description of Artificial Sequence: Synthetic oligonucleotide
uacauguguguucccgcac

SEQ ID NO: 644750 - RNA, 19 nt, Artificial Sequence
  Description of Artificial Sequence: Synthetic oligonucleotide
ccauacaguaucacugucc

SEQ ID NO: 644751 - RNA, 19 nt, Artificial Sequence
  Description of Artificial Sequence: Synthetic oligonucleotide
ucaaacccagcggagacua

SEQ ID NO: 644752 - RNA, 19 nt, Artificial Sequence
  Description of Artificial Sequence: Synthetic oligonucleotide
gacgacgucaggugagaac

SEQ ID NO: 644753 - RNA, 19 nt, Artificial Sequence
  Description of Artificial Sequence: Synthetic oligonucleotide
agaccaguggcaaaccucu

SEQ ID NO: 644754 - RNA, 19 nt, Artificial Sequence
  Description of Artificial Sequence: Synthetic oligonucleotide
gagcugccuggucaagugg

SEQ ID NO: 644755 - RNA, 19 nt, Artificial Sequence
  Description of Artificial Sequence: Synthetic oligonucleotide
gaugaggaccuugcccacg

SEQ ID NO: 644756 - RNA, 19 nt, Artificial Sequence
  Description of Artificial Sequence: Synthetic oligonucleotide
cugagugcggcucagaggu

SEQ ID NO: 644757 - RNA, 19 nt, Artificial Sequence
  Description of Artificial Sequence: Synthetic oligonucleotide
uccuguccaugccacauua

SEQ ID NO: 644758 - RNA, 19 nt, Artificial Sequence
  Description of Artificial Sequence: Synthetic oligonucleotide
agcccacugccauucgcac

SEQ ID NO: 644759 - RNA, 19 nt, Artificial Sequence
  Description of Artificial Sequence: Synthetic oligonucleotide
aggugugaguuggugacag

SEQ ID NO: 644760 - RNA, 19 nt, Artificial Sequence
  Description of Artificial Sequence: Synthetic oligonucleotide
cagggugucacaggguagg

SEQ ID NO: 644761 - RNA, 19 nt, Artificial Sequence
  Description of Artificial Sequence: Synthetic oligonucleotide
gaggucggugccucgggag

SEQ ID NO: 644762 - RNA, 19 nt, Artificial Sequence
  Description of Artificial Sequence: Synthetic oligonucleotide
cuucaugcucccaggagca

SEQ ID NO: 644763 - RNA, 19 nt, Artificial Sequence
  Description of Artificial Sequence: Synthetic oligonucleotide
uggggacugcccauggagu

SEQ ID NO: 644764 - RNA, 19 nt, Artificial Sequence
  Description of Artificial Sequence: Synthetic oligonucleotide
ccacauuaacauuguaccc

SEQ ID NO: 644765 - RNA, 19 nt, Artificial Sequence
  Description of Artificial Sequence: Synthetic oligonucleotide
agggaagcaugcccauggg

SEQ ID NO: 644766 - RNA, 19 nt, Artificial Sequence
  Description of Artificial Sequence: Synthetic oligonucleotide
auccgcucacacuugcuga

SEQ ID NO: 644767 - RNA, 19 nt, Artificial Sequence
  Description of Artificial Sequence: Synthetic oligonucleotide
ggcuuuacgaccccggauc

SEQ ID NO: 644768 - RNA, 19 nt, Artificial Sequence
  Description of Artificial Sequence: Synthetic oligonucleotide
guccaugccacauuaacau

SEQ ID NO: 644769 - RNA, 19 nt, Artificial Sequence
  Description of Artificial Sequence: Synthetic oligonucleotide
ugaacgugucauagaccac

SEQ ID NO: 644770 - RNA, 19 nt, Artificial Sequence
  Description of Artificial Sequence: Synthetic oligonucleotide
ucaugcugguggccacacg

SEQ ID NO: 644771 - RNA, 19 nt, Artificial Sequence
  Description of Artificial Sequence: Synthetic oligonucleotide
agaaguucccauugucaua

SEQ ID NO: 644772 - RNA, 19 nt, Artificial Sequence
  Description of Artificial Sequence: Synthetic oligonucleotide
guucccauugucauagcga

SEQ ID NO: 644773 - RNA, 19 nt, Artificial Sequence
  Description of Artificial Sequence: Synthetic oligonucleotide
cuuagugggcuggucuggg

SEQ ID NO: 644774 - RNA, 19 nt, Artificial Sequence
  Description of Artificial Sequence: Synthetic oligonucleotide
gacucugcggcaguggaga

SEQ ID NO: 644775 - RNA, 19 nt, Artificial Sequence
  Description of Artificial Sequence: Synthetic oligonucleotide
ugagaacucgugggcaaug

SEQ ID NO: 644776 - RNA, 19 nt, Artificial Sequence
  Description of Artificial Sequence: Synthetic oligonucleotide
agaggggucaucguagaau

SEQ ID NO: 644777 - RNA, 19 nt, Artificial Sequence
  Description of Artificial Sequence: Synthetic oligonucleotide
agacguguagaggcugaac

SEQ ID NO: 644778 - RNA, 19 nt, Artificial Sequence
  Description of Artificial Sequence: Synthetic oligonucleotide
ucauuccauacaguaucac

SEQ ID NO: 644779 - RNA, 19 nt, Artificial Sequence
  Description of Artificial Sequence: Synthetic oligonucleotide
cagaugcucuggaugcggc

SEQ ID NO: 644780 - RNA, 19 nt, Artificial Sequence
  Description of Artificial Sequence: Synthetic oligonucleotide
acacguucacccgucacca

SEQ ID NO: 644781 - RNA, 19 nt, Artificial Sequence
  Description of Artificial Sequence: Synthetic oligonucleotide
guguuugcucuggaucucg

SEQ ID NO: 644782 - RNA, 19 nt, Artificial Sequence
  Description of Artificial Sequence: Synthetic oligonucleotide
cuuagcugugauggcuacg

SEQ ID NO: 644783 - RNA, 19 nt, Artificial Sequence
  Description of Artificial Sequence: Synthetic oligonucleotide
guauuccacgucuccgaug

SEQ ID NO: 644784 - RNA, 19 nt, Artificial Sequence
  Description of Artificial Sequence: Synthetic oligonucleotide
cagaaucccauggcugugg

SEQ ID NO: 644785 - RNA, 19 nt, Artificial Sequence
  Description of Artificial Sequence: Synthetic oligonucleotide
ggcugaacugguuugggga

SEQ ID NO: 644786 - RNA, 19 nt, Artificial Sequence
  Description of Artificial Sequence: Synthetic oligonucleotide
gggaagcaugcccaugggg

SEQ ID NO: 644787 - RNA, 19 nt, Artificial Sequence
  Description of Artificial Sequence: Synthetic oligonucleotide
acagaggggucaucguaga

SEQ ID NO: 644788 - RNA, 19 nt, Artificial Sequence
  Description of Artificial Sequence: Synthetic oligonucleotide
acaaggcagcauggcauac

SEQ ID NO: 644789 - RNA, 19 nt, Artificial Sequence
  Description of Artificial Sequence: Synthetic oligonucleotide
agcggagacuaggacgacg

SEQ ID NO: 644790 - RNA, 19 nt, Artificial Sequence
  Description of Artificial Sequence: Synthetic oligonucleotide
agaaucccauggcugugga

SEQ ID NO: 644791 - RNA, 19 nt, Artificial Sequence
  Description of Artificial Sequence: Synthetic oligonucleotide
ucgcacagcacuggaggag

SEQ ID NO: 644792 - RNA, 19 nt, Artificial Sequence
  Description of Artificial Sequence: Synthetic oligonucleotide
gcaggugaggacugggugc

SEQ ID NO: 644793 - RNA, 19 nt, Artificial Sequence
  Description of Artificial Sequence: Synthetic oligonucleotide
gacuccucagcaugauguc

SEQ ID NO: 644794 - RNA, 19 nt, Artificial Sequence
  Description of Artificial Sequence: Synthetic oligonucleotide
uggcuuuacgaccccggau

SEQ ID NO: 644795 - RNA, 19 nt, Artificial Sequence
  Description of Artificial Sequence: Synthetic oligonucleotide
ggguguacauguguguucc

SEQ ID NO: 644796 - RNA, 19 nt, Artificial Sequence
  Description of Artificial Sequence: Synthetic oligonucleotide
caguuccccagucuuggug

SEQ ID NO: 644797 - RNA, 19 nt, Artificial Sequence
  Description of Artificial Sequence: Synthetic oligonucleotide
acguucacccgucaccaau

SEQ ID NO: 644798 - RNA, 19 nt, Artificial Sequence
  Description of Artificial Sequence: Synthetic oligonucleotide
agacuaggacgacgucagg

SEQ ID NO: 644799 - RNA, 19 nt, Artificial Sequence
  Description of Artificial Sequence: Synthetic oligonucleotide
gauggaugaugugcucaug

SEQ ID NO: 644800 - RNA, 19 nt, Artificial Sequence
  Description of Artificial Sequence: Synthetic oligonucleotide
cuuuacgaccccggauccg

SEQ ID NO: 644801 - RNA, 19 nt, Artificial Sequence
  Description of Artificial Sequence: Synthetic oligonucleotide
agggugucacaggguaggc

SEQ ID NO: 644802 - RNA, 19 nt, Artificial Sequence
  Description of Artificial Sequence: Synthetic oligonucleotide
uggccacacguucacccgu

SEQ ID NO: 644803 - RNA, 19 nt, Artificial Sequence
  Description of Artificial Sequence: Synthetic oligonucleotide
aacccagcggagacuagga

SEQ ID NO: 644804 - RNA, 19 nt, Artificial Sequence
  Description of Artificial Sequence: Synthetic oligonucleotide
cuaggacgacgucagguga

SEQ ID NO: 644805 - RNA, 19 nt, Artificial Sequence
  Description of Artificial Sequence: Synthetic oligonucleotide
ucccgcacaugcacuggug

SEQ ID NO: 644806 - RNA, 19 nt, Artificial Sequence
  Description of Artificial Sequence: Synthetic oligonucleotide
agagugcacugucuggauu

SEQ ID NO: 644807 - RNA, 19 nt, Artificial Sequence
  Description of Artificial Sequence: Synthetic oligonucleotide
ggagacuaggacgacguca

SEQ ID NO: 644808 - RNA, 19 nt, Artificial Sequence
  Description of Artificial Sequence: Synthetic oligonucleotide
gucaaguggccaaaacauc

SEQ ID NO: 644809 - RNA, 19 nt, Artificial Sequence
  Description of Artificial Sequence: Synthetic oligonucleotide
uggcuacggaguugaagaa

SEQ ID NO: 644810 - RNA, 19 nt, Artificial Sequence
  Description of Artificial Sequence: Synthetic oligonucleotide
ggcgacugcauugaugcug

SEQ ID NO: 644811 - RNA, 19 nt, Artificial Sequence
  Description of Artificial Sequence: Synthetic oligonucleotide
gucauagaccacaccugug

SEQ ID NO: 644812 - RNA, 19 nt, Artificial Sequence
  Description of Artificial Sequence: Synthetic oligonucleotide
acaugcacuggugcuucag

SEQ ID NO: 644813 - RNA, 19 nt, Artificial Sequence
  Description of Artificial Sequence: Synthetic oligonucleotide
ugucgcccuccaaugucac

SEQ ID NO: 644814 - RNA, 19 nt, Artificial Sequence
  Description of Artificial Sequence: Synthetic oligonucleotide
ggucaucguagaaugcuug

SEQ ID NO: 644815 - RNA, 19 nt, Artificial Sequence
  Description of Artificial Sequence: Synthetic oligonucleotide
caguggcaaaccucugcac

SEQ ID NO: 644816 - RNA, 19 nt, Artificial Sequence
  Description of Artificial Sequence: Synthetic oligonucleotide
gcuuuacgaccccggaucc

SEQ ID NO: 644817 - RNA, 19 nt, Artificial Sequence
  Description of Artificial Sequence: Synthetic oligonucleotide
gacuaggacgacgucaggu

SEQ ID NO: 644818 - RNA, 19 nt, Artificial Sequence
  Description of Artificial Sequence: Synthetic oligonucleotide
ucgugggcaaugggcauca

SEQ ID NO: 644819 - RNA, 19 nt, Artificial Sequence
  Description of Artificial Sequence: Synthetic oligonucleotide
caugcugguggccacacgu

SEQ ID NO: 644820 - RNA, 19 nt, Artificial Sequence
  Description of Artificial Sequence: Synthetic oligonucleotide
gagugcacugucuggauuu

SEQ ID NO: 644821 - RNA, 19 nt, Artificial Sequence
  Description of Artificial Sequence: Synthetic oligonucleotide
uugcugagcaggccaguuu

SEQ ID NO: 644822 - RNA, 19 nt, Artificial Sequence
  Description of Artificial Sequence: Synthetic oligonucleotide
agcgugcucuguugccggg

SEQ ID NO: 644823 - RNA, 19 nt, Artificial Sequence
  Description of Artificial Sequence: Synthetic oligonucleotide
cuacacugagcagagccga

SEQ ID NO: 644824 - RNA, 19 nt, Artificial Sequence
  Description of Artificial Sequence: Synthetic oligonucleotide
aguuggugacagugacugu

SEQ ID NO: 644825 - RNA, 19 nt, Artificial Sequence
  Description of Artificial Sequence: Synthetic oligonucleotide
cguguagaggcugaacugg

SEQ ID NO: 644826 - RNA, 19 nt, Artificial Sequence
  Description of Artificial Sequence: Synthetic oligonucleotide
ugcggccccaguuccccag

SEQ ID NO: 644827 - RNA, 19 nt, Artificial Sequence
  Description of Artificial Sequence: Synthetic oligonucleotide
uagcugugauggcuacgga

SEQ ID NO: 644828 - RNA, 19 nt, Artificial Sequence
  Description of Artificial Sequence: Synthetic oligonucleotide
cacccaguggagacagaug

SEQ ID NO: 644829 - RNA, 19 nt, Artificial Sequence
  Description of Artificial Sequence: Synthetic oligonucleotide
agaggucggugccucggga

SEQ ID NO: 644830 - RNA, 19 nt, Artificial Sequence
  Description of Artificial Sequence: Synthetic oligonucleotide
cagaggucggugccucggg

SEQ ID NO: 644831 - RNA, 19 nt, Artificial Sequence
  Description of Artificial Sequence: Synthetic oligonucleotide
aucuggcggugacagaaua

SEQ ID NO: 644832 - RNA, 19 nt, Artificial Sequence
  Description of Artificial Sequence: Synthetic oligonucleotide
uggugaagaggugcuuagu

SEQ ID NO: 644833 - RNA, 19 nt, Artificial Sequence
  Description of Artificial Sequence: Synthetic oligonucleotide
cugcuguguugacagcuuc

SEQ ID NO: 644834 - RNA, 19 nt, Artificial Sequence
  Description of Artificial Sequence: Synthetic oligonucleotide
cacagcuauaagcgugcuc

SEQ ID NO: 644835 - RNA, 19 nt, Artificial Sequence
  Description of Artificial Sequence: Synthetic oligonucleotide
gcggugaggugugaguugg

SEQ ID NO: 644836 - RNA, 19 nt, Artificial Sequence
  Description of Artificial Sequence: Synthetic oligonucleotide
acugggugcggccccaguu

SEQ ID NO: 644837 - RNA, 19 nt, Artificial Sequence
  Description of Artificial Sequence: Synthetic oligonucleotide
ggaguggcacagcuauaag

SEQ ID NO: 644838 - RNA, 19 nt, Artificial Sequence
  Description of Artificial Sequence: Synthetic oligonucleotide
cugggugcggccccaguuc

SEQ ID NO: 644839 - RNA, 19 nt, Artificial Sequence
  Description of Artificial Sequence: Synthetic oligonucleotide
gugcucuugaguggcaaca

SEQ ID NO: 644840 - RNA, 19 nt, Artificial Sequence
  Description of Artificial Sequence: Synthetic oligonucleotide
acgaccccggauccgcuca

SEQ ID NO: 644841 - RNA, 19 nt, Artificial Sequence
  Description of Artificial Sequence: Synthetic oligonucleotide
caccaauggggacugccca

SEQ ID NO: 644842 - RNA, 19 nt, Artificial Sequence
  Description of Artificial Sequence: Synthetic oligonucleotide
gaccuugcccacguucaac

SEQ ID NO: 644843 - RNA, 19 nt, Artificial Sequence
  Description of Artificial Sequence: Synthetic oligonucleotide
uccacaccuccuguccaug

SEQ ID NO: 644844 - RNA, 19 nt, Artificial Sequence
  Description of Artificial Sequence: Synthetic oligonucleotide
ccagcggagacuaggacga

SEQ ID NO: 644845 - RNA, 19 nt, Artificial Sequence
  Description of Artificial Sequence: Synthetic oligonucleotide
cagcccacugccauucgca

SEQ ID NO: 644846 - RNA, 19 nt, Artificial Sequence
  Description of Artificial Sequence: Synthetic oligonucleotide
acucgugggcaaugggcau

SEQ ID NO: 644847 - RNA, 19 nt, Artificial Sequence
  Description of Artificial Sequence: Synthetic oligonucleotide
cucgggagcuugcccacug

SEQ ID NO: 644848 - RNA, 19 nt, Artificial Sequence
  Description of Artificial Sequence: Synthetic oligonucleotide
gaugcggccggcgugcucu

SEQ ID NO: 644849 - RNA, 19 nt, Artificial Sequence
  Description of Artificial Sequence: Synthetic oligonucleotide
caaacccagcggagacuag

SEQ ID NO: 644850 - RNA, 19 nt, Artificial Sequence
  Description of Artificial Sequence: Synthetic oligonucleotide
ggagaggacugagugcggc

SEQ ID NO: 644851 - RNA, 19 nt, Artificial Sequence
  Description of Artificial Sequence: Synthetic oligonucleotide
cuccgccaaccucuucagg

SEQ ID NO: 644852 - RNA, 19 nt, Artificial Sequence
  Description of Artificial Sequence: Synthetic oligonucleotide
ugcccacuguccucaugcu

SEQ ID NO: 644853 - RNA, 19 nt, Artificial Sequence
  Description of Artificial Sequence: Synthetic oligonucleotide
ucgggagcuugcccacugu

SEQ ID NO: 644854 - RNA, 19 nt, Artificial Sequence
  Description of Artificial Sequence: Synthetic oligonucleotide
uggucccauagagcaaggu

SEQ ID NO: 644855 - RNA, 19 nt, Artificial Sequence
  Description of Artificial Sequence: Synthetic oligonucleotide
ggugagaacucgugggcaa

SEQ ID NO: 644856 - RNA, 19 nt, Artificial Sequence
  Description of Artificial Sequence: Synthetic oligonucleotide
cagauggcggucaagucau

SEQ ID NO: 644857 - RNA, 19 nt, Artificial Sequence
  Description of Artificial Sequence: Synthetic oligonucleotide
gcuuagugggcuggucugg

SEQ ID NO: 644858 - RNA, 19 nt, Artificial Sequence
  Description of Artificial Sequence: Synthetic oligonucleotide
gggcugugcucuugagugg

SEQ ID NO: 644859 - RNA, 19 nt, Artificial Sequence
  Description of Artificial Sequence: Synthetic oligonucleotide
ggacuccucagcaugaugu

SEQ ID NO: 644860 - RNA, 19 nt, Artificial Sequence
  Description of Artificial Sequence: Synthetic oligonucleotide
gaaugucccaguccacgau

SEQ ID NO: 644861 - RNA, 19 nt, Artificial Sequence
  Description of Artificial Sequence: Synthetic oligonucleotide
ggcugugcucuugaguggc

SEQ ID NO: 644862 - RNA, 19 nt, Artificial Sequence
  Description of Artificial Sequence: Synthetic oligonucleotide
acagcuucggggaggcggu

SEQ ID NO: 644863 - RNA, 19 nt, Artificial Sequence
  Description of Artificial Sequence: Synthetic oligonucleotide
ggccaaaacaucuggcggu

SEQ ID NO: 644864 - RNA, 19 nt, Artificial Sequence
  Description of Artificial Sequence: Synthetic oligonucleotide
cauagaccacaccuguggu

SEQ ID NO: 644865 - RNA, 19 nt, Artificial Sequence
  Description of Artificial Sequence: Synthetic oligonucleotide
agugcggcucagaggucgg

SEQ ID NO: 644866 - RNA, 19 nt, Artificial Sequence
  Description of Artificial Sequence: Synthetic oligonucleotide
uacgaccccggauccgcuc

SEQ ID NO: 644867 - RNA, 19 nt, Artificial Sequence
  Description of Artificial Sequence: Synthetic oligonucleotide
gggauggaugaugugcuca

SEQ ID NO: 644868 - RNA, 19 nt, Artificial Sequence
  Description of Artificial Sequence: Synthetic oligonucleotide
agcuuagcugugauggcua

SEQ ID NO: 644869 - RNA, 19 nt, Artificial Sequence
  Description of Artificial Sequence: Synthetic oligonucleotide
ccuguucuagcagcaaaac

SEQ ID NO: 644870 - RNA, 19 nt, Artificial Sequence
  Description of Artificial Sequence: Synthetic oligonucleotide
gccaaaacaucuggcggug

SEQ ID NO: 644871 - RNA, 19 nt, Artificial Sequence
  Description of Artificial Sequence: Synthetic oligonucleotide
aggacgacgucaggugaga

SEQ ID NO: 644872 - RNA, 19 nt, Artificial Sequence
  Description of Artificial Sequence: Synthetic oligonucleotide
ggcggugaggugugaguug

SEQ ID NO: 644873 - RNA, 19 nt, Artificial Sequence
  Description of Artificial Sequence: Synthetic oligonucleotide
cccgcacaugcacuggugc

SEQ ID NO: 644874 - RNA, 19 nt, Artificial Sequence
  Description of Artificial Sequence: Synthetic oligonucleotide
auacaucuucuggcugaug

SEQ ID NO: 644875 - RNA, 19 nt, Artificial Sequence
  Description of Artificial Sequence: Synthetic oligonucleotide
cucgugggcaaugggcauc

SEQ ID NO: 644876 - RNA, 19 nt, Artificial Sequence
  Description of Artificial Sequence: Synthetic oligonucleotide
ggagacagauguccuucga

SEQ ID NO: 644877 - RNA, 19 nt, Artificial Sequence
  Description of Artificial Sequence: Synthetic oligonucleotide
cucuaguguggcgacugca

SEQ ID NO: 644878 - RNA, 19 nt, Artificial Sequence
  Description of Artificial Sequence: Synthetic oligonucleotide
ugauggcuacggaguugaa

SEQ ID NO: 644879 - RNA, 19 nt, Artificial Sequence
  Description of Artificial Sequence: Synthetic oligonucleotide
gugccucgggagcuugccc

SEQ ID NO: 644880 - RNA, 19 nt, Artificial Sequence
  Description of Artificial Sequence: Synthetic oligonucleotide
uggcgacugcauugaugcu

SEQ ID NO: 644881 - RNA, 19 nt, Artificial Sequence
  Description of Artificial Sequence: Synthetic oligonucleotide
gagcaaggugugguacuca

SEQ ID NO: 644882 - RNA, 19 nt, Artificial Sequence
  Description of Artificial Sequence: Synthetic oligonucleotide
gcccuccaaugucacaccc

SEQ ID NO: 644883 - RNA, 19 nt, Artificial Sequence
  Description of Artificial Sequence: Synthetic oligonucleotide
acgucaggugagaacucgu

SEQ ID NO: 644884 - RNA, 19 nt, Artificial Sequence
  Description of Artificial Sequence: Synthetic oligonucleotide
gaccaguggcaaaccucug

SEQ ID NO: 644885 - RNA, 19 nt, Artificial Sequence
  Description of Artificial Sequence: Synthetic oligonucleotide
accuccuguccaugccaca

SEQ ID NO: 644886 - RNA, 19 nt, Artificial Sequence
  Description of Artificial Sequence: Synthetic oligonucleotide
ggcaaugggcaucaccacu

SEQ ID NO: 644887 - RNA, 19 nt, Artificial Sequence
  Description of Artificial Sequence: Synthetic oligonucleotide
gcccacguucaacuucugc

SEQ ID NO: 644888 - RNA, 19 nt, Artificial Sequence
  Description of Artificial Sequence: Synthetic oligonucleotide
aggcagcauggcauacauc

SEQ ID NO: 644889 - RNA, 19 nt, Artificial Sequence
  Description of Artificial Sequence: Synthetic oligonucleotide
ugacagcuucggggaggcg

SEQ ID NO: 644890 - RNA, 19 nt, Artificial Sequence
  Description of Artificial Sequence: Synthetic oligonucleotide
ccggaugauggcaaaucca

SEQ ID NO: 644891 - RNA, 19 nt, Artificial Sequence
  Description of Artificial Sequence: Synthetic oligonucleotide
gaacugguuuggggagcug

SEQ ID NO: 644892 - RNA, 19 nt, Artificial Sequence
  Description of Artificial Sequence: Synthetic oligonucleotide
ccgggccuguucuagcagc

SEQ ID NO: 644893 - RNA, 19 nt, Artificial Sequence
  Description of Artificial Sequence: Synthetic oligonucleotide
gcggcaguggagaggacug

SEQ ID NO: 644894 - RNA, 19 nt, Artificial Sequence
  Description of Artificial Sequence: Synthetic oligonucleotide
agaccacaccuguggugaa

SEQ ID NO: 644895 - RNA, 19 nt, Artificial Sequence
  Description of Artificial Sequence: Synthetic oligonucleotide
ccacaccuccuguccaugc

SEQ ID NO: 644896 - RNA, 19 nt, Artificial Sequence
  Description of Artificial Sequence: Synthetic oligonucleotide
guguguucccgcacaugca

SEQ ID NO: 644897 - RNA, 19 nt, Artificial Sequence
  Description of Artificial Sequence: Synthetic oligonucleotide
gagacguguagaggcugaa

SEQ ID NO: 644898 - RNA, 19 nt, Artificial Sequence
  Description of Artificial Sequence: Synthetic oligonucleotide
ggccaguuuccugcagccg

SEQ ID NO: 644899 - RNA, 19 nt, Artificial Sequence
  Description of Artificial Sequence: Synthetic oligonucleotide
ggccuguucuagcagcaaa

SEQ ID NO: 644900 - RNA, 19 nt, Artificial Sequence
  Description of Artificial Sequence: Synthetic oligonucleotide
ucggugccucgggagcuug

SEQ ID NO: 644901 - RNA, 19 nt, Artificial Sequence
  Description of Artificial Sequence: Synthetic oligonucleotide
agcuucggggaggcgguga

SEQ ID NO: 644902 - RNA, 19 nt, Artificial Sequence
  Description of Artificial Sequence: Synthetic oligonucleotide
ggugcggccccaguucccc

SEQ ID NO: 644903 - RNA, 19 nt, Artificial Sequence
  Description of Artificial Sequence: Synthetic oligonucleotide
gcuauaagcgugcucuguu

SEQ ID NO: 644904 - RNA, 19 nt, Artificial Sequence
  Description of Artificial Sequence: Synthetic oligonucleotide
ggccggaugauggcaaauc

SEQ ID NO: 644905 - RNA, 19 nt, Artificial Sequence
  Description of Artificial Sequence: Synthetic oligonucleotide
gcggucaagucauggccuc

SEQ ID NO: 644906 - RNA, 19 nt, Artificial Sequence
  Description of Artificial Sequence: Synthetic oligonucleotide
aggugcuuagugggcuggu

SEQ ID NO: 644907 - RNA, 19 nt, Artificial Sequence
  Description of Artificial Sequence: Synthetic oligonucleotide
gucgcccuccaaugucaca

SEQ ID NO: 644908 - RNA, 19 nt, Artificial Sequence
  Description of Artificial Sequence: Synthetic oligonucleotide
gcggccggcgugcucuggg

SEQ ID NO: 644909 - RNA, 19 nt, Artificial Sequence
  Description of Artificial Sequence: Synthetic oligonucleotide
gguauuccacgucuccgau

SEQ ID NO: 644910 - RNA, 19 nt, Artificial Sequence
  Description of Artificial Sequence: Synthetic oligonucleotide
ccacaccuguggugaagag

SEQ ID NO: 644911 - RNA, 19 nt, Artificial Sequence
  Description of Artificial Sequence: Synthetic oligonucleotide
ggugcuuagugggcugguc

SEQ ID NO: 644912 - RNA, 19 nt, Artificial Sequence
  Description of Artificial Sequence: Synthetic oligonucleotide
gcagggaagcaugcccaug

SEQ ID NO: 644913 - RNA, 19 nt, Artificial Sequence
  Description of Artificial Sequence: Synthetic oligonucleotide
cgugucgcccuccaauguc

SEQ ID NO: 644914 - RNA, 19 nt, Artificial Sequence
  Description of Artificial Sequence: Synthetic oligonucleotide
cuggaggagugcaucucau

SEQ ID NO: 644915 - RNA, 19 nt, Artificial Sequence
  Description of Artificial Sequence: Synthetic oligonucleotide
gggagauguagagcacaga

SEQ ID NO: 644916 - RNA, 19 nt, Artificial Sequence
  Description of Artificial Sequence: Synthetic oligonucleotide
gcucgugucgcccuccaau

SEQ ID NO: 644917 - RNA, 19 nt, Artificial Sequence
  Description of Artificial Sequence: Synthetic oligonucleotide
gugucaugagcugccuggu

SEQ ID NO: 644918 - RNA, 19 nt, Artificial Sequence
  Description of Artificial Sequence: Synthetic oligonucleotide
ggccggcgugcucugggug

SEQ ID NO: 644919 - RNA, 19 nt, Artificial Sequence
  Description of Artificial Sequence: Synthetic oligonucleotide
gcucuggaugcggccggcg

SEQ ID NO: 644920 - RNA, 19 nt, Artificial Sequence
  Description of Artificial Sequence: Synthetic oligonucleotide
cugagcaggccaguuuccu

SEQ ID NO: 644921 - RNA, 19 nt, Artificial Sequence
  Description of Artificial Sequence: Synthetic oligonucleotide
caacagccugggccugcuc

SEQ ID NO: 644922 - RNA, 19 nt, Artificial Sequence
  Description of Artificial Sequence: Synthetic oligonucleotide
gcggagacuaggacgacgu

SEQ ID NO: 644923 - RNA, 19 nt, Artificial Sequence
  Description of Artificial Sequence: Synthetic oligonucleotide
cagagugcacugucuggau

SEQ ID NO: 644924 - RNA, 19 nt, Artificial Sequence
  Description of Artificial Sequence: Synthetic oligonucleotide
ggcggucaagucauggccu

SEQ ID NO: 644925 - RNA, 19 nt, Artificial Sequence
  Description of Artificial Sequence: Synthetic oligonucleotide
guaccccaugccuggcccu

SEQ ID NO: 644926 - RNA, 19 nt, Artificial Sequence
  Description of Artificial Sequence: Synthetic oligonucleotide
cccuccaaugucacaccca

SEQ ID NO: 644927 - RNA, 19 nt, Artificial Sequence
  Description of Artificial Sequence: Synthetic oligonucleotide
cccagaccaguggcaaacc

SEQ ID NO: 644928 - RNA, 19 nt, Artificial Sequence
  Description of Artificial Sequence: Synthetic oligonucleotide
cacguucacccgucaccaa

SEQ ID NO: 644929 - RNA, 19 nt, Artificial Sequence
  Description of Artificial Sequence: Synthetic oligonucleotide
auggaguggcacagcuaua

SEQ ID NO: 644930 - RNA, 19 nt, Artificial Sequence
  Description of Artificial Sequence: Synthetic oligonucleotide
guguucccgcacaugcacu

SEQ ID NO: 644931 - RNA, 19 nt, Artificial Sequence
  Description of Artificial Sequence: Synthetic oligonucleotide
caguuuccugcagccggga

SEQ ID NO: 644932 - RNA, 19 nt, Artificial Sequence
  Description of Artificial Sequence: Synthetic oligonucleotide
ccgucaccaauggggacug

SEQ ID NO: 644933 - RNA, 19 nt, Artificial Sequence
  Description of Artificial Sequence: Synthetic oligonucleotide
gggaccagaugcucuggau

SEQ ID NO: 644934 - RNA, 19 nt, Artificial Sequence
  Description of Artificial Sequence: Synthetic oligonucleotide
caucuggcggugacagaau

SEQ ID NO: 644935 - RNA, 19 nt, Artificial Sequence
  Description of Artificial Sequence: Synthetic oligonucleotide
cagcggagacuaggacgac

SEQ ID NO: 644936 - RNA, 19 nt, Artificial Sequence
  Description of Artificial Sequence: Synthetic oligonucleotide
gcgugcucuguugccgggc

SEQ ID NO: 644937 - RNA, 19 nt, Artificial Sequence
  Description of Artificial Sequence: Synthetic oligonucleotide
cgcucacacuugcugagca

SEQ ID NO: 644938 - RNA, 19 nt, Artificial Sequence
  Description of Artificial Sequence: Synthetic oligonucleotide
gccacacguucacccguca

SEQ ID NO: 644939 - RNA, 19 nt, Artificial Sequence
  Description of Artificial Sequence: Synthetic oligonucleotide
cugcggcaguggagaggac

SEQ ID NO: 644940 - RNA, 19 nt, Artificial Sequence
  Description of Artificial Sequence: Synthetic oligonucleotide
cgcccuccaaugucacacc

SEQ ID NO: 644941 - RNA, 19 nt, Artificial Sequence
  Description of Artificial Sequence: Synthetic oligonucleotide
ggccacacguucacccguc

SEQ ID NO: 644942 - RNA, 19 nt, Artificial Sequence
  Description of Artificial Sequence: Synthetic oligonucleotide
ccgcucacacuugcugagc

SEQ ID NO: 644943 - RNA, 19 nt, Artificial Sequence
  Description of Artificial Sequence: Synthetic oligonucleotide
gugcggccccaguucccca

SEQ ID NO: 644944 - RNA, 19 nt, Artificial Sequence
  Description of Artificial Sequence: Synthetic oligonucleotide
ccuguccaugccacauuaa

SEQ ID NO: 644945 - RNA, 19 nt, Artificial Sequence
  Description of Artificial Sequence: Synthetic oligonucleotide
cgacgucaggugagaacuc

SEQ ID NO: 644946 - RNA, 19 nt, Artificial Sequence
  Description of Artificial Sequence: Synthetic oligonucleotide
gggucaucguagaaugcuu

SEQ ID NO: 644947 - RNA, 19 nt, Artificial Sequence
  Description of Artificial Sequence: Synthetic oligonucleotide
ggacgacgucaggugagaa

SEQ ID NO: 644948 - RNA, 19 nt, Artificial Sequence
  Description of Artificial Sequence: Synthetic oligonucleotide
gccggcgugcucugggugu

SEQ ID NO: 644949 - RNA, 19 nt, Artificial Sequence
  Description of Artificial Sequence: Synthetic oligonucleotide
ggggcucgugucgcccucc

SEQ ID NO: 644950 - RNA, 19 nt, Artificial Sequence
  Description of Artificial Sequence: Synthetic oligonucleotide
ggacugagugcggcucaga

SEQ ID NO: 644951 - RNA, 19 nt, Artificial Sequence
  Description of Artificial Sequence: Synthetic oligonucleotide
gcucuaccaggcagcccac

SEQ ID NO: 644952 - RNA, 19 nt, Artificial Sequence
  Description of Artificial Sequence: Synthetic oligonucleotide
cccgucaccaauggggacu

SEQ ID NO: 644953 - RNA, 19 nt, Artificial Sequence
  Description of Artificial Sequence: Synthetic oligonucleotide
gggcucgugucgcccucca

SEQ ID NO: 644954 - RNA, 19 nt, Artificial Sequence
  Description of Artificial Sequence: Synthetic oligonucleotide
ggucggugccucgggagcu

SEQ ID NO: 644955 - RNA, 19 nt, Artificial Sequence
  Description of Artificial Sequence: Synthetic oligonucleotide
ccgcacaugcacuggugcu

SEQ ID NO: 644956 - RNA, 19 nt, Artificial Sequence
  Description of Artificial Sequence: Synthetic oligonucleotide
cgggccuguucuagcagca

SEQ ID NO: 644957 - RNA, 19 nt, Artificial Sequence
  Description of Artificial Sequence: Synthetic oligonucleotide
cggagacuaggacgacguc

SEQ ID NO: 644958 - RNA, 19 nt, Artificial Sequence
  Description of Artificial Sequence: Synthetic oligonucleotide
ggcucgugucgcccuccaa

SEQ ID NO: 644959 - RNA, 19 nt, Artificial Sequence
  Description of Artificial Sequence: Synthetic oligonucleotide
ccugcuguguugacagcuu

SEQ ID NO: 644960 - RNA, 19 nt, Artificial Sequence
  Description of Artificial Sequence: Synthetic oligonucleotide
cggugccucgggagcuugc

SEQ ID NO: 644961 - RNA, 19 nt, Artificial Sequence
  Description of Artificial Sequence: Synthetic oligonucleotide
gcgugcucuggguguacau

SEQ ID NO: 644962 - RNA, 19 nt, Artificial Sequence
  Description of Artificial Sequence: Synthetic oligonucleotide
ggggccccagagccuggaa

SEQ ID NO: 644963 - RNA, 19 nt, Artificial Sequence
  Description of Artificial Sequence: Synthetic oligonucleotide
gugcggcucagaggucggu

SEQ ID NO: 644964 - RNA, 19 nt, Artificial Sequence
  Description of Artificial Sequence: Synthetic oligonucleotide
gucggugccucgggagcuu

SEQ ID NO: 644965 - RNA, 19 nt, Artificial Sequence
  Description of Artificial Sequence: Synthetic oligonucleotide
gggccggaugauggcaaau

SEQ ID NO: 644966 - RNA, 19 nt, Artificial Sequence
  Description of Artificial Sequence: Synthetic oligonucleotide
ccggcgugcucugggugua

SEQ ID NO: 644967 - RNA, 19 nt, Artificial Sequence
  Description of Artificial Sequence: Synthetic oligonucleotide
gcagcccuagggagauguu

SEQ ID NO: 644968 - RNA, 19 nt, Artificial Sequence
  Description of Artificial Sequence: Synthetic oligonucleotide
ccccagucuuggugaggau

SEQ ID NO: 644969 - RNA, 19 nt, Artificial Sequence
  Description of Artificial Sequence: Synthetic oligonucleotide
ccucgggagcuugcccacu

SEQ ID NO: 644970 - RNA, 19 nt, Artificial Sequence
  Description of Artificial Sequence: Synthetic oligonucleotide
cggccggcgugcucugggu

SEQ ID NO: 644971 - RNA, 19 nt, Artificial Sequence
  Description of Artificial Sequence: Synthetic oligonucleotide
aguugcaugucuacaaagc

SEQ ID NO: 644972 - RNA, 19 nt, Artificial Sequence
  Description of Artificial Sequence: Synthetic oligonucleotide
aagaguugcaugucuacaa

SEQ ID NO: 644973 - RNA, 19 nt, Artificial Sequence
  Description of Artificial Sequence: Synthetic oligonucleotide
guugcaugucuacaaagcc

SEQ ID NO: 644974 - RNA, 19 nt, Artificial Sequence
  Description of Artificial Sequence: Synthetic oligonucleotide
gaguugcaugucuacaaag

SEQ ID NO: 644975 - RNA, 19 nt, Artificial Sequence
  Description of Artificial Sequence: Synthetic oligonucleotide
ucaccagaagggcgaagag

SEQ ID NO: 644976 - RNA, 19 nt, Artificial Sequence
  Description of Artificial Sequence: Synthetic oligonucleotide
ugggcauuucccuccacga

SEQ ID NO: 644977 - RNA, 19 nt, Artificial Sequence
  Description of Artificial Sequence: Synthetic oligonucleotide
cugggcauuucccuccacg

SEQ ID NO: 644978 - RNA, 19 nt, Artificial Sequence
  Description of Artificial Sequence: Synthetic oligonucleotide
ugcaccugggcauuucccu

SEQ ID NO: 644979 - RNA, 19 nt, Artificial Sequence
  Description of Artificial Sequence: Synthetic oligonucleotide
cagaagggcgaagaguugc

SEQ ID NO: 644980 - RNA, 19 nt, Artificial Sequence
  Description of Artificial Sequence: Synthetic oligonucleotide
ggcauuucccuccacgagc

SEQ ID NO: 644981 - RNA, 19 nt, Artificial Sequence
  Description of Artificial Sequence: Synthetic oligonucleotide
agaguugcaugucuacaaa

SEQ ID NO: 644982 - RNA, 19 nt, Artificial Sequence
  Description of Artificial Sequence: Synthetic oligonucleotide
gaagaguugcaugucuaca

SEQ ID NO: 644983 - RNA, 19 nt, Artificial Sequence
  Description of Artificial Sequence: Synthetic oligonucleotide
cagggucaccagaagggcg

SEQ ID NO: 644984 - RNA, 19 nt, Artificial Sequence
  Description of Artificial Sequence: Synthetic oligonucleotide
ugcuuucuuuguugugucc

SEQ ID NO: 644985 - RNA, 19 nt, Artificial Sequence
  Description of Artificial Sequence: Synthetic oligonucleotide
cacgaguccuugaucuugc

SEQ ID NO: 644986 - RNA, 19 nt, Artificial Sequence
  Description of Artificial Sequence: Synthetic oligonucleotide
cuugcaccugggcauuucc

SEQ ID NO: 644987 - RNA, 19 nt, Artificial Sequence
  Description of Artificial Sequence: Synthetic oligonucleotide
uugcaccugggcauuuccc

SEQ ID NO: 644988 - RNA, 19 nt, Artificial Sequence
  Description of Artificial Sequence: Synthetic oligonucleotide
uucggggcugcccacgagu

SEQ ID NO: 644989 - RNA, 19 nt, Artificial Sequence
  Description of Artificial Sequence: Synthetic oligonucleotide
accagaagggcgaagaguu

SEQ ID NO: 644990 - RNA, 19 nt, Artificial Sequence
  Description of Artificial Sequence: Synthetic oligonucleotide
guugcuuucuuuguugugu

SEQ ID NO: 644991 - RNA, 19 nt, Artificial Sequence
  Description of Artificial Sequence: Synthetic oligonucleotide
caccugggcauuucccucc

SEQ ID NO: 644992 - RNA, 19 nt, Artificial Sequence
  Description of Artificial Sequence: Synthetic oligonucleotide
caccuguagaacaggguca

SEQ ID NO: 644993 - RNA, 19 nt, Artificial Sequence
  Description of Artificial Sequence: Synthetic oligonucleotide
gucaccagaagggcgaaga

SEQ ID NO: 644994 - RNA, 19 nt, Artificial Sequence
  Description of Artificial Sequence: Synthetic oligonucleotide
ccaccuguagaacaggguc

SEQ ID NO: 644995 - RNA, 19 nt, Artificial Sequence
  Description of Artificial Sequence: Synthetic oligonucleotide
agggucaccagaagggcga

SEQ ID NO: 644996 - RNA, 19 nt, Artificial Sequence
  Description of Artificial Sequence: Synthetic oligonucleotide
gguugcuuucuuuguugug

SEQ ID NO: 644997 - RNA, 19 nt, Artificial Sequence
  Description of Artificial Sequence: Synthetic oligonucleotide
ucggggcugcccacgaguc

SEQ ID NO: 644998 - RNA, 19 nt, Artificial Sequence
  Description of Artificial Sequence: Synthetic oligonucleotide
ugcccacgaguccuugauc

SEQ ID NO: 644999 - RNA, 19 nt, Artificial Sequence
  Description of Artificial Sequence: Synthetic oligonucleotide
agaagggcgaagaguugca

SEQ ID NO: 645000 - RNA, 19 nt, Artificial Sequence
  Description of Artificial Sequence: Synthetic oligonucleotide
ucuugcaccugggcauuuc

SEQ ID NO: 645001 - RNA, 19 nt, Artificial Sequence
  Description of Artificial Sequence: Synthetic oligonucleotide
acgaguccuugaucuugca

SEQ ID NO: 645002 - RNA, 19 nt, Artificial Sequence
  Description of Artificial Sequence: Synthetic oligonucleotide
ccccaccuguagaacaggg

SEQ ID NO: 645003 - RNA, 19 nt, Artificial Sequence
  Description of Artificial Sequence: Synthetic oligonucleotide
accugggcauuucccucca

SEQ ID NO: 645004 - RNA, 19 nt, Artificial Sequence
  Description of Artificial Sequence: Synthetic oligonucleotide
cauuucccuccacgagcug

SEQ ID NO: 645005 - RNA, 19 nt, Artificial Sequence
  Description of Artificial Sequence: Synthetic oligonucleotide
gcccacgaguccuugaucu

SEQ ID NO: 645006 - RNA, 19 nt, Artificial Sequence
  Description of Artificial Sequence: Synthetic oligonucleotide
cuucggggcugcccacgag

SEQ ID NO: 645007 - RNA, 19 nt, Artificial Sequence
  Description of Artificial Sequence: Synthetic oligonucleotide
ccacgaguccuugaucuug

SEQ ID NO: 645008 - RNA, 19 nt, Artificial Sequence
  Description of Artificial Sequence: Synthetic oligonucleotide
ccagaagggcgaagaguug

SEQ ID NO: 645009 - RNA, 19 nt, Artificial Sequence
  Description of Artificial Sequence: Synthetic oligonucleotide
gcaccugggcauuucccuc

SEQ ID NO: 645010 - RNA, 19 nt, Artificial Sequence
  Description of Artificial Sequence: Synthetic oligonucleotide
ggguugcuuucuuuguugu

SEQ ID NO: 645011 - RNA, 19 nt, Artificial Sequence
  Description of Artificial Sequence: Synthetic oligonucleotide
caccagaagggcgaagagu

SEQ ID NO: 645012 - RNA, 19 nt, Artificial Sequence
  Description of Artificial Sequence: Synthetic oligonucleotide
gaagggcgaagaguugcau

SEQ ID NO: 645013 - RNA, 19 nt, Artificial Sequence
  Description of Artificial Sequence: Synthetic oligonucleotide
gcauuucccuccacgagcu

SEQ ID NO: 645014 - RNA, 19 nt, Artificial Sequence
  Description of Artificial Sequence: Synthetic oligonucleotide
ggucaccagaagggcgaag

SEQ ID NO: 645015 - RNA, 19 nt, Artificial Sequence
  Description of Artificial Sequence: Synthetic oligonucleotide
cugcccacgaguccuugau

SEQ ID NO: 645016 - RNA, 19 nt, Artificial Sequence
  Description of Artificial Sequence: Synthetic oligonucleotide
gcugcccacgaguccuuga

SEQ ID NO: 645017 - RNA, 19 nt, Artificial Sequence
  Description of Artificial Sequence: Synthetic oligonucleotide
ggggcugcccacgaguccu

SEQ ID NO: 645018 - RNA, 19 nt, Artificial Sequence
  Description of Artificial Sequence: Synthetic oligonucleotide
cccaccuguagaacagggu

SEQ ID NO: 645019 - RNA, 19 nt, Artificial Sequence
  Description of Artificial Sequence: Synthetic oligonucleotide
ggcugcccacgaguccuug

SEQ ID NO: 645020 - RNA, 19 nt, Artificial Sequence
  Description of Artificial Sequence: Synthetic oligonucleotide
ccugggcauuucccuccac

SEQ ID NO: 645021 - RNA, 19 nt, Artificial Sequence
  Description of Artificial Sequence: Synthetic oligonucleotide
gggucaccagaagggcgaa

SEQ ID NO: 645022 - RNA, 19 nt, Artificial Sequence
  Description of Artificial Sequence: Synthetic oligonucleotide
cccacgaguccuugaucuu

SEQ ID NO: 645023 - RNA, 19 nt, Artificial Sequence
  Description of Artificial Sequence: Synthetic oligonucleotide
gggcugcccacgaguccuu

SEQ ID NO: 645024 - RNA, 19 nt, Artificial Sequence
  Description of Artificial Sequence: Synthetic oligonucleotide
uauauggcaagacaggugg

SEQ ID NO: 645025 - RNA, 19 nt, Artificial Sequence
  Description of Artificial Sequence: Synthetic oligonucleotide
aguucuacuuguuugguac

SEQ ID NO: 645026 - RNA, 19 nt, Artificial Sequence
  Description of Artificial Sequence: Synthetic oligonucleotide
auauuaacgauauauggca

SEQ ID NO: 645027 - RNA, 19 nt, Artificial Sequence
  Description of Artificial Sequence: Synthetic oligonucleotide
aaucuauucgggcuauagc

SEQ ID NO: 645028 - RNA, 19 nt, Artificial Sequence
  Description of Artificial Sequence: Synthetic oligonucleotide
cauauagagcaccagagcg

SEQ ID NO: 645029 - RNA, 19 nt, Artificial Sequence
  Description of Artificial Sequence: Synthetic oligonucleotide
uguccuuugauauuaacga

SEQ ID NO: 645030 - RNA, 19 nt, Artificial Sequence
  Description of Artificial Sequence: Synthetic oligonucleotide
gauauuaacgauauauggc

SEQ ID NO: 645031 - RNA, 19 nt, Artificial Sequence
  Description of Artificial Sequence: Synthetic oligonucleotide
uuuaauguaguaccuggcc

SEQ ID NO: 645032 - RNA, 19 nt, Artificial Sequence
  Description of Artificial Sequence: Synthetic oligonucleotide
acaacuguaaaccaagcug

SEQ ID NO: 645033 - RNA, 19 nt, Artificial Sequence
  Description of Artificial Sequence: Synthetic oligonucleotide
ucuaggaaaucuauucggg

SEQ ID NO: 645034 - RNA, 19 nt, Artificial Sequence
  Description of Artificial Sequence: Synthetic oligonucleotide
uguuggcaaaacaauaucc

SEQ ID NO: 645035 - RNA, 19 nt, Artificial Sequence
  Description of Artificial Sequence: Synthetic oligonucleotide
agugcgagaauguucuucc

SEQ ID NO: 645036 - RNA, 19 nt, Artificial Sequence
  Description of Artificial Sequence: Synthetic oligonucleotide
uucuuuuguaaucccaggg

SEQ ID NO: 645037 - RNA, 19 nt, Artificial Sequence
  Description of Artificial Sequence: Synthetic oligonucleotide
ucucauauagagcaucugc

SEQ ID NO: 645038 - RNA, 19 nt, Artificial Sequence
  Description of Artificial Sequence: Synthetic oligonucleotide
ugauugaucucccucuagg

SEQ ID NO: 645039 - RNA, 19 nt, Artificial Sequence
  Description of Artificial Sequence: Synthetic oligonucleotide
ucuucauaguccucggucg

SEQ ID NO: 645040 - RNA, 19 nt, Artificial Sequence
  Description of Artificial Sequence: Synthetic oligonucleotide
uucuugguacaauagaaug

SEQ ID NO: 645041 - RNA, 19 nt, Artificial Sequence
  Description of Artificial Sequence: Synthetic oligonucleotide
aguaagguguuacugcaac

SEQ ID NO: 645042 - RNA, 19 nt, Artificial Sequence
  Description of Artificial Sequence: Synthetic oligonucleotide
ugucauaaaaccagugggc

SEQ ID NO: 645043 - RNA, 19 nt, Artificial Sequence
  Description of Artificial Sequence: Synthetic oligonucleotide
aacgauauauggcaagaca

SEQ ID NO: 645044 - RNA, 19 nt, Artificial Sequence
  Description of Artificial Sequence: Synthetic oligonucleotide
uugguuugagaacaaaugu

SEQ ID NO: 645045 - RNA, 19 nt, Artificial Sequence
  Description of Artificial Sequence: Synthetic oligonucleotide
uuguuugguacacuggugc

SEQ ID NO: 645046 - RNA, 19 nt, Artificial Sequence
  Description of Artificial Sequence: Synthetic oligonucleotide
aucuauucgggcuauagca

SEQ ID NO: 645047 - RNA, 19 nt, Artificial Sequence
  Description of Artificial Sequence: Synthetic oligonucleotide
uguguaaccucggagaugc

SEQ ID NO: 645048 - RNA, 19 nt, Artificial Sequence
  Description of Artificial Sequence: Synthetic oligonucleotide
ugcccuuagaguaaggugu

SEQ ID NO: 645049 - RNA, 19 nt, Artificial Sequence
  Description of Artificial Sequence: Synthetic oligonucleotide
auuaacgauauauggcaag

SEQ ID NO: 645050 - RNA, 19 nt, Artificial Sequence
  Description of Artificial Sequence: Synthetic oligonucleotide
gaguguguuaaagagagug

SEQ ID NO: 645051 - RNA, 19 nt, Artificial Sequence
  Description of Artificial Sequence: Synthetic oligonucleotide
aaccggacguccuugauca

SEQ ID NO: 645052 - RNA, 19 nt, Artificial Sequence
  Description of Artificial Sequence: Synthetic oligonucleotide
uaaucagacuccaggagug

SEQ ID NO: 645053 - RNA, 19 nt, Artificial Sequence
  Description of Artificial Sequence: Synthetic oligonucleotide
aaaucuauucgggcuauag

SEQ ID NO: 645054 - RNA, 19 nt, Artificial Sequence
  Description of Artificial Sequence: Synthetic oligonucleotide
aguaaucagacuccaggag

SEQ ID NO: 645055 - RNA, 19 nt, Artificial Sequence
  Description of Artificial Sequence: Synthetic oligonucleotide
uggagugcgagaauguucu

SEQ ID NO: 645056 - RNA, 19 nt, Artificial Sequence
  Description of Artificial Sequence: Synthetic oligonucleotide
uggcaaaacaauauccacu

SEQ ID NO: 645057 - RNA, 19 nt, Artificial Sequence
  Description of Artificial Sequence: Synthetic oligonucleotide
uccgggaacagaaaagcgc

SEQ ID NO: 645058 - RNA, 19 nt, Artificial Sequence
  Description of Artificial Sequence: Synthetic oligonucleotide
uaggaaaucuauucgggcu

SEQ ID NO: 645059 - RNA, 19 nt, Artificial Sequence
  Description of Artificial Sequence: Synthetic oligonucleotide
aacgucuuccgucuguucu

SEQ ID NO: 645060 - RNA, 19 nt, Artificial Sequence
  Description of Artificial Sequence: Synthetic oligonucleotide
cauucguucuuuuccaccc

SEQ ID NO: 645061 - RNA, 19 nt, Artificial Sequence
  Description of Artificial Sequence: Synthetic oligonucleotide
uuugguacacuggugcacg

SEQ ID NO: 645062 - RNA, 19 nt, Artificial Sequence
  Description of Artificial Sequence: Synthetic oligonucleotide
auugagcuggcuuuguucu

SEQ ID NO: 645063 - RNA, 19 nt, Artificial Sequence
  Description of Artificial Sequence: Synthetic oligonucleotide
acgauauauggcaagacag

SEQ ID NO: 645064 - RNA, 19 nt, Artificial Sequence
  Description of Artificial Sequence: Synthetic oligonucleotide
ucauauagagcaucugccu

SEQ ID NO: 645065 - RNA, 19 nt, Artificial Sequence
  Description of Artificial Sequence: Synthetic oligonucleotide
acuccgggaacagaaaagc

SEQ ID NO: 645066 - RNA, 19 nt, Artificial Sequence
  Description of Artificial Sequence: Synthetic oligonucleotide
auauagagcaucugccuug

SEQ ID NO: 645067 - RNA, 19 nt, Artificial Sequence
  Description of Artificial Sequence: Synthetic oligonucleotide
cuaggaaaucuauucgggc

SEQ ID NO: 645068 - RNA, 19 nt, Artificial Sequence
  Description of Artificial Sequence: Synthetic oligonucleotide
cuugguacaauagaaugug

SEQ ID NO: 645069 - RNA, 19 nt, Artificial Sequence
  Description of Artificial Sequence: Synthetic oligonucleotide
aacuugauaucagcuacag

SEQ ID NO: 645070 - RNA, 19 nt, Artificial Sequence
  Description of Artificial Sequence: Synthetic oligonucleotide
aaaagcgcuccuccguguc

SEQ ID NO: 645071 - RNA, 19 nt, Artificial Sequence
  Description of Artificial Sequence: Synthetic oligonucleotide
aguagaugccgcugggugg

SEQ ID NO: 645072 - RNA, 19 nt, Artificial Sequence
  Description of Artificial Sequence: Synthetic oligonucleotide
gcaguaaucagacuccagg

SEQ ID NO: 645073 - RNA, 19 nt, Artificial Sequence
  Description of Artificial Sequence: Synthetic oligonucleotide
uauaccagggaugaaggcu

SEQ ID NO: 645074 - RNA, 19 nt, Artificial Sequence
  Description of Artificial Sequence: Synthetic oligonucleotide
aaacucagccauucguucu

SEQ ID NO: 645075 - RNA, 19 nt, Artificial Sequence
  Description of Artificial Sequence: Synthetic oligonucleotide
uuaacgauauauggcaaga

SEQ ID NO: 645076 - RNA, 19 nt, Artificial Sequence
  Description of Artificial Sequence: Synthetic oligonucleotide
uccuuugauauuaacgaua

SEQ ID NO: 645077 - RNA, 19 nt, Artificial Sequence
  Description of Artificial Sequence: Synthetic oligonucleotide
ucuauucgggcuauagcac

SEQ ID NO: 645078 - RNA, 19 nt, Artificial Sequence
  Description of Artificial Sequence: Synthetic oligonucleotide
ucagaacaguuccuucagg

SEQ ID NO: 645079 - RNA, 19 nt, Artificial Sequence
  Description of Artificial Sequence: Synthetic oligonucleotide
uaacucguggccugcaugc

SEQ ID NO: 645080 - RNA, 19 nt, Artificial Sequence
  Description of Artificial Sequence: Synthetic oligonucleotide
aagggaacgucuuccgucu

SEQ ID NO: 645081 - RNA, 19 nt, Artificial Sequence
  Description of Artificial Sequence: Synthetic oligonucleotide
uauuaacgauauauggcaa

SEQ ID NO: 645082 - RNA, 19 nt, Artificial Sequence
  Description of Artificial Sequence: Synthetic oligonucleotide
uuccuaucuuguaagcaug

SEQ ID NO: 645083 - RNA, 19 nt, Artificial Sequence
  Description of Artificial Sequence: Synthetic oligonucleotide
uguaaaccaagcugauuga

SEQ ID NO: 645084 - RNA, 19 nt, Artificial Sequence
  Description of Artificial Sequence: Synthetic oligonucleotide
uacuccgggaacagaaaag

SEQ ID NO: 645085 - RNA, 19 nt, Artificial Sequence
  Description of Artificial Sequence: Synthetic oligonucleotide
cuauucgggcuauagcacc

SEQ ID NO: 645086 - RNA, 19 nt, Artificial Sequence
  Description of Artificial Sequence: Synthetic oligonucleotide
uguuaaagagaguggacuu

SEQ ID NO: 645087 - RNA, 19 nt, Artificial Sequence
  Description of Artificial Sequence: Synthetic oligonucleotide
auauagagcaccagagcgg

SEQ ID NO: 645088 - RNA, 19 nt, Artificial Sequence
  Description of Artificial Sequence: Synthetic oligonucleotide
ugguuugagaacaaauguu

SEQ ID NO: 645089 - RNA, 19 nt, Artificial Sequence
  Description of Artificial Sequence: Synthetic oligonucleotide
uccuaucuuguaagcaugc

SEQ ID NO: 645090 - RNA, 19 nt, Artificial Sequence
  Description of Artificial Sequence: Synthetic oligonucleotide
gauugagcuggcuuuguuc

SEQ ID NO: 645091 - RNA, 19 nt, Artificial Sequence
  Description of Artificial Sequence: Synthetic oligonucleotide
ugguacaauagaauguguu

SEQ ID NO: 645092 - RNA, 19 nt, Artificial Sequence
  Description of Artificial Sequence: Synthetic oligonucleotide
aaagcgcuccuccgugucg

SEQ ID NO: 645093 - RNA, 19 nt, Artificial Sequence
  Description of Artificial Sequence: Synthetic oligonucleotide
uggaaccugcaguaacucg

SEQ ID NO: 645094 - RNA, 19 nt, Artificial Sequence
  Description of Artificial Sequence: Synthetic oligonucleotide
accagauuauauaccaggg

SEQ ID NO: 645095 - RNA, 19 nt, Artificial Sequence
  Description of Artificial Sequence: Synthetic oligonucleotide
uauucgggcuauagcaccc

SEQ ID NO: 645096 - RNA, 19 nt, Artificial Sequence
  Description of Artificial Sequence: Synthetic oligonucleotide
accauauagagcaccagag

SEQ ID NO: 645097 - RNA, 19 nt, Artificial Sequence
  Description of Artificial Sequence: Synthetic oligonucleotide
uguaaccucggagaugcag

SEQ ID NO: 645098 - RNA, 19 nt, Artificial Sequence
  Description of Artificial Sequence: Synthetic oligonucleotide
cacaacagguucauuuccc

SEQ ID NO: 645099 - RNA, 19 nt, Artificial Sequence
  Description of Artificial Sequence: Synthetic oligonucleotide
aguuggaagccacaacugu

SEQ ID NO: 645100 - RNA, 19 nt, Artificial Sequence
  Description of Artificial Sequence: Synthetic oligonucleotide
aaccaagcugauugaucuc

SEQ ID NO: 645101 - RNA, 19 nt, Artificial Sequence
  Description of Artificial Sequence: Synthetic oligonucleotide
agaaaagcgcuccuccgug

SEQ ID NO: 645102 - RNA, 19 nt, Artificial Sequence
  Description of Artificial Sequence: Synthetic oligonucleotide
ugaugcaacucccgcaacu

SEQ ID NO: 645103 - RNA, 19 nt, Artificial Sequence
  Description of Artificial Sequence: Synthetic oligonucleotide
aguugauugagcuggcuuu

SEQ ID NO: 645104 - RNA, 19 nt, Artificial Sequence
  Description of Artificial Sequence: Synthetic oligonucleotide
aagguguuacugcaaccca

SEQ ID NO: 645105 - RNA, 19 nt, Artificial Sequence
  Description of Artificial Sequence: Synthetic oligonucleotide
aaaacaauauccacuucuu

SEQ ID NO: 645106 - RNA, 19 nt, Artificial Sequence
  Description of Artificial Sequence: Synthetic oligonucleotide
ugucgauggcuucggagcc

SEQ ID NO: 645107 - RNA, 19 nt, Artificial Sequence
  Description of Artificial Sequence: Synthetic oligonucleotide
gacuugccggcauucgugg

SEQ ID NO: 645108 - RNA, 19 nt, Artificial Sequence
  Description of Artificial Sequence: Synthetic oligonucleotide
ucucgacucacccgcaggc

SEQ ID NO: 645109 - RNA, 19 nt, Artificial Sequence
  Description of Artificial Sequence: Synthetic oligonucleotide
gauugaucucccucuagga

SEQ ID NO: 645110 - RNA, 19 nt, Artificial Sequence
  Description of Artificial Sequence: Synthetic oligonucleotide
agauuauauaccagggaug

SEQ ID NO: 645111 - RNA, 19 nt, Artificial Sequence
  Description of Artificial Sequence: Synthetic oligonucleotide
acugcucucgacucacccg

SEQ ID NO: 645112 - RNA, 19 nt, Artificial Sequence
  Description of Artificial Sequence: Synthetic oligonucleotide
ucuuccuaucuuguaagca

SEQ ID NO: 645113 - RNA, 19 nt, Artificial Sequence
  Description of Artificial Sequence: Synthetic oligonucleotide
aaucccaggggugucauaa

SEQ ID NO: 645114 - RNA, 19 nt, Artificial Sequence
  Description of Artificial Sequence: Synthetic oligonucleotide
agcguuggcacacgguccg

SEQ ID NO: 645115 - RNA, 19 nt, Artificial Sequence
  Description of Artificial Sequence: Synthetic oligonucleotide
uguuugguacacuggugca

SEQ ID NO: 645116 - RNA, 19 nt, Artificial Sequence
  Description of Artificial Sequence: Synthetic oligonucleotide
uuggcgcugaucaaccgga

SEQ ID NO: 645117 - RNA, 19 nt, Artificial Sequence
  Description of Artificial Sequence: Synthetic oligonucleotide
cuuggcgcugaucaaccgg

SEQ ID NO: 645118 - RNA, 19 nt, Artificial Sequence
  Description of Artificial Sequence: Synthetic oligonucleotide
cauuggaaccugcaguaac

SEQ ID NO: 645119 - RNA, 19 nt, Artificial Sequence
  Description of Artificial Sequence: Synthetic oligonucleotide
gagaucaguucuucaacuc

SEQ ID NO: 645120 - RNA, 19 nt, Artificial Sequence
  Description of Artificial Sequence: Synthetic oligonucleotide
guuaaagagaguggacuug

SEQ ID NO: 645121 - RNA, 19 nt, Artificial Sequence
  Description of Artificial Sequence: Synthetic oligonucleotide
aauucaaagggaacgucuu

SEQ ID NO: 645122 - RNA, 19 nt, Artificial Sequence
  Description of Artificial Sequence: Synthetic oligonucleotide
ucauaguccucggucgccg

SEQ ID NO: 645123 - RNA, 19 nt, Artificial Sequence
  Description of Artificial Sequence: Synthetic oligonucleotide
ucaggagguuuaauguagu

SEQ ID NO: 645124 - RNA, 19 nt, Artificial Sequence
  Description of Artificial Sequence: Synthetic oligonucleotide
guaagguguuacugcaacc

SEQ ID NO: 645125 - RNA, 19 nt, Artificial Sequence
  Description of Artificial Sequence: Synthetic oligonucleotide
ugcgagaauguucuuccaa

SEQ ID NO: 645126 - RNA, 19 nt, Artificial Sequence
  Description of Artificial Sequence: Synthetic oligonucleotide
uuggcggugcaguaaucag

SEQ ID NO: 645127 - RNA, 19 nt, Artificial Sequence
  Description of Artificial Sequence: Synthetic oligonucleotide
uugguacaauagaaugugu

SEQ ID NO: 645128 - RNA, 19 nt, Artificial Sequence
  Description of Artificial Sequence: Synthetic oligonucleotide
uaaccucggagaugcagug

SEQ ID NO: 645129 - RNA, 19 nt, Artificial Sequence
  Description of Artificial Sequence: Synthetic oligonucleotide
cacuaagaucuucuucugc

SEQ ID NO: 645130 - RNA, 19 nt, Artificial Sequence
  Description of Artificial Sequence: Synthetic oligonucleotide
ucgacucacccgcaggcgc

SEQ ID NO: 645131 - RNA, 19 nt, Artificial Sequence
  Description of Artificial Sequence: Synthetic oligonucleotide
cuccgggaacagaaaagcg

SEQ ID NO: 645132 - RNA, 19 nt, Artificial Sequence
  Description of Artificial Sequence: Synthetic oligonucleotide
acaauagaauguguuggca

SEQ ID NO: 645133 - RNA, 19 nt, Artificial Sequence
  Description of Artificial Sequence: Synthetic oligonucleotide
cuucauaguccucggucgc

SEQ ID NO: 645134 - RNA, 19 nt, Artificial Sequence
  Description of Artificial Sequence: Synthetic oligonucleotide
cugcucucgacucacccgc

SEQ ID NO: 645135 - RNA, 19 nt, Artificial Sequence
  Description of Artificial Sequence: Synthetic oligonucleotide
uuacugcaacccaacccgc

SEQ ID NO: 645136 - RNA, 19 nt, Artificial Sequence
  Description of Artificial Sequence: Synthetic oligonucleotide
guaaucagacuccaggagu

SEQ ID NO: 645137 - RNA, 19 nt, Artificial Sequence
  Description of Artificial Sequence: Synthetic oligonucleotide
aggaaaucuauucgggcua

SEQ ID NO: 645138 - RNA, 19 nt, Artificial Sequence
  Description of Artificial Sequence: Synthetic oligonucleotide
guagacgucgccgcgguag

SEQ ID NO: 645139 - RNA, 19 nt, Artificial Sequence
  Description of Artificial Sequence: Synthetic oligonucleotide
ucuuggcgcugaucaaccg

SEQ ID NO: 645140 - RNA, 19 nt, Artificial Sequence
  Description of Artificial Sequence: Synthetic oligonucleotide
cucuuccuaucuuguaagc

SEQ ID NO: 645141 - RNA, 19 nt, Artificial Sequence
  Description of Artificial Sequence: Synthetic oligonucleotide
auauauggcaagacaggug

SEQ ID NO: 645142 - RNA, 19 nt, Artificial Sequence
  Description of Artificial Sequence: Synthetic oligonucleotide
acuccggagacccgcccgc

SEQ ID NO: 645143 - RNA, 19 nt, Artificial Sequence
  Description of Artificial Sequence: Synthetic oligonucleotide
uggcggugcaguaaucaga

SEQ ID NO: 645144 - RNA, 19 nt, Artificial Sequence
  Description of Artificial Sequence: Synthetic oligonucleotide
uaacgauauauggcaagac

SEQ ID NO: 645145 - RNA, 19 nt, Artificial Sequence
  Description of Artificial Sequence: Synthetic oligonucleotide
acgagcccagcgcggaugc

SEQ ID NO: 645146 - RNA, 19 nt, Artificial Sequence
  Description of Artificial Sequence: Synthetic oligonucleotide
aacucagccauucguucuu

SEQ ID NO: 645147 - RNA, 19 nt, Artificial Sequence
  Description of Artificial Sequence: Synthetic oligonucleotide
agccauucguucuuuucca

SEQ ID NO: 645148 - RNA, 19 nt, Artificial Sequence
  Description of Artificial Sequence: Synthetic oligonucleotide
guaacucguggccugcaug

SEQ ID NO: 645149 - RNA, 19 nt, Artificial Sequence
  Description of Artificial Sequence: Synthetic oligonucleotide
auaucagcuacagcuucag

SEQ ID NO: 645150 - RNA, 19 nt, Artificial Sequence
  Description of Artificial Sequence: Synthetic oligonucleotide
cagauuauauaccagggau

SEQ ID NO: 645151 - RNA, 19 nt, Artificial Sequence
  Description of Artificial Sequence: Synthetic oligonucleotide
ucaacuccguagccggucu

SEQ ID NO: 645152 - RNA, 19 nt, Artificial Sequence
  Description of Artificial Sequence: Synthetic oligonucleotide
uucuacuuguuugguacac

SEQ ID NO: 645153 - RNA, 19 nt, Artificial Sequence
  Description of Artificial Sequence: Synthetic oligonucleotide
ucgccggugggguacugcg

SEQ ID NO: 645154 - RNA, 19 nt, Artificial Sequence
  Description of Artificial Sequence: Synthetic oligonucleotide
cacgaagaccugcuugggg

SEQ ID NO: 645155 - RNA, 19 nt, Artificial Sequence
  Description of Artificial Sequence: Synthetic oligonucleotide
agcgcggaugcagucgucc

SEQ ID NO: 645156 - RNA, 19 nt, Artificial Sequence
  Description of Artificial Sequence: Synthetic oligonucleotide
aagcgcuccuccgugucgg

SEQ ID NO: 645157 - RNA, 19 nt, Artificial Sequence
  Description of Artificial Sequence: Synthetic oligonucleotide
uauagagcaucugccuugu

SEQ ID NO: 645158 - RNA, 19 nt, Artificial Sequence
  Description of Artificial Sequence: Synthetic oligonucleotide
acacgguccgcgcccgucc

SEQ ID NO: 645159 - RNA, 19 nt, Artificial Sequence
  Description of Artificial Sequence: Synthetic oligonucleotide
uugguacacuggugcacgg

SEQ ID NO: 645160 - RNA, 19 nt, Artificial Sequence
  Description of Artificial Sequence: Synthetic oligonucleotide
guccgccugggucacaccg

SEQ ID NO: 645161 - RNA, 19 nt, Artificial Sequence
  Description of Artificial Sequence: Synthetic oligonucleotide
gaagccgcuccucccgccg

SEQ ID NO: 645162 - RNA, 19 nt, Artificial Sequence
  Description of Artificial Sequence: Synthetic oligonucleotide
gacuccggagacccgcccg

SEQ ID NO: 645163 - RNA, 19 nt, Artificial Sequence
  Description of Artificial Sequence: Synthetic oligonucleotide
uucucauauagagcaucug

SEQ ID NO: 645164 - RNA, 19 nt, Artificial Sequence
  Description of Artificial Sequence: Synthetic oligonucleotide
uuggcacacgguccgcgcc

SEQ ID NO: 645165 - RNA, 19 nt, Artificial Sequence
  Description of Artificial Sequence: Synthetic oligonucleotide
guagaugccgcuggguggc

SEQ ID NO: 645166 - RNA, 19 nt, Artificial Sequence
  Description of Artificial Sequence: Synthetic oligonucleotide
cccucuaggaaaucuauuc

SEQ ID NO: 645167 - RNA, 19 nt, Artificial Sequence
  Description of Artificial Sequence: Synthetic oligonucleotide
agacuccggagacccgccc

SEQ ID NO: 645168 - RNA, 19 nt, Artificial Sequence
  Description of Artificial Sequence: Synthetic oligonucleotide
accuggucgacggauucgg

SEQ ID NO: 645169 - RNA, 19 nt, Artificial Sequence
  Description of Artificial Sequence: Synthetic oligonucleotide
auaaaaccagugggcaucu

SEQ ID NO: 645170 - RNA, 19 nt, Artificial Sequence
  Description of Artificial Sequence: Synthetic oligonucleotide
aacuccguagccggucuug

SEQ ID NO: 645171 - RNA, 19 nt, Artificial Sequence
  Description of Artificial Sequence: Synthetic oligonucleotide
uggucgacggauucggauu

SEQ ID NO: 645172 - RNA, 19 nt, Artificial Sequence
  Description of Artificial Sequence: Synthetic oligonucleotide
ggaggugauaugaacagga

SEQ ID NO: 645173 - RNA, 19 nt, Artificial Sequence
  Description of Artificial Sequence: Synthetic oligonucleotide
ugaucaaccggacguccuu

SEQ ID NO: 645174 - RNA, 19 nt, Artificial Sequence
  Description of Artificial Sequence: Synthetic oligonucleotide
caccguggcuucuggaagc

SEQ ID NO: 645175 - RNA, 19 nt, Artificial Sequence
  Description of Artificial Sequence: Synthetic oligonucleotide
aacauucuguagggaguug

SEQ ID NO: 645176 - RNA, 19 nt, Artificial Sequence
  Description of Artificial Sequence: Synthetic oligonucleotide
guguuaaagagaguggacu

SEQ ID NO: 645177 - RNA, 19 nt, Artificial Sequence
  Description of Artificial Sequence: Synthetic oligonucleotide
cucggagaugcagugugcc

SEQ ID NO: 645178 - RNA, 19 nt, Artificial Sequence
  Description of Artificial Sequence: Synthetic oligonucleotide
uuuucucgucccgaggguc

SEQ ID NO: 645179 - RNA, 19 nt, Artificial Sequence
  Description of Artificial Sequence: Synthetic oligonucleotide
ccauauagagcaccagagc

SEQ ID NO: 645180 - RNA, 19 nt, Artificial Sequence
  Description of Artificial Sequence: Synthetic oligonucleotide
cucucgacucacccgcagg

SEQ ID NO: 645181 - RNA, 19 nt, Artificial Sequence
  Description of Artificial Sequence: Synthetic oligonucleotide
agugugcccuuagaguaag

SEQ ID NO: 645182 - RNA, 19 nt, Artificial Sequence
  Description of Artificial Sequence: Synthetic oligonucleotide
ugauugagcuggcuuuguu

SEQ ID NO: 645183 - RNA, 19 nt, Artificial Sequence
  Description of Artificial Sequence: Synthetic oligonucleotide
uagacgucgccgcgguagc

SEQ ID NO: 645184 - RNA, 19 nt, Artificial Sequence
  Description of Artificial Sequence: Synthetic oligonucleotide
gaucaaccggacguccuug

SEQ ID NO: 645185 - RNA, 19 nt, Artificial Sequence
  Description of Artificial Sequence: Synthetic oligonucleotide
gcgagaauguucuuccaac

SEQ ID NO: 645186 - RNA, 19 nt, Artificial Sequence
  Description of Artificial Sequence: Synthetic oligonucleotide
gagugcgagaauguucuuc

SEQ ID NO: 645187 - RNA, 19 nt, Artificial Sequence
  Description of Artificial Sequence: Synthetic oligonucleotide
agccgggugcgucuugggg

SEQ ID NO: 645188 - RNA, 19 nt, Artificial Sequence
  Description of Artificial Sequence: Synthetic oligonucleotide
agcccgagcaguagaugcc

SEQ ID NO: 645189 - RNA, 19 nt, Artificial Sequence
  Description of Artificial Sequence: Synthetic oligonucleotide
cucguggccugcaugcuuc

SEQ ID NO: 645190 - RNA, 19 nt, Artificial Sequence
  Description of Artificial Sequence: Synthetic oligonucleotide
cagcguuggcacacggucc

SEQ ID NO: 645191 - RNA, 19 nt, Artificial Sequence
  Description of Artificial Sequence: Synthetic oligonucleotide
aacccaacccgcagaggag

SEQ ID NO: 645192 - RNA, 19 nt, Artificial Sequence
  Description of Artificial Sequence: Synthetic oligonucleotide
cugcaaguagccgggugcg

SEQ ID NO: 645193 - RNA, 19 nt, Artificial Sequence
  Description of Artificial Sequence: Synthetic oligonucleotide
guacugcgguccucggugg

SEQ ID NO: 645194 - RNA, 19 nt, Artificial Sequence
  Description of Artificial Sequence: Synthetic oligonucleotide
uggcacacgguccgcgccc

SEQ ID NO: 645195 - RNA, 19 nt, Artificial Sequence
  Description of Artificial Sequence: Synthetic oligonucleotide
uuggaaccugcaguaacuc

SEQ ID NO: 645196 - RNA, 19 nt, Artificial Sequence
  Description of Artificial Sequence: Synthetic oligonucleotide
ugccucacuuauuuauuuu

SEQ ID NO: 645197 - RNA, 19 nt, Artificial Sequence
  Description of Artificial Sequence: Synthetic oligonucleotide
gcagucgucccacagccgc

SEQ ID NO: 645198 - RNA, 19 nt, Artificial Sequence
  Description of Artificial Sequence: Synthetic oligonucleotide
ucuugaugcgguguccuuu

SEQ ID NO: 645199 - RNA, 19 nt, Artificial Sequence
  Description of Artificial Sequence: Synthetic oligonucleotide
cuuagaguaagguguuacu

SEQ ID NO: 645200 - RNA, 19 nt, Artificial Sequence
  Description of Artificial Sequence: Synthetic oligonucleotide
ggagcgcugaagugcagag

SEQ ID NO: 645201 - RNA, 19 nt, Artificial Sequence
  Description of Artificial Sequence: Synthetic oligonucleotide
guacuccgggaacagaaaa

SEQ ID NO: 645202 - RNA, 19 nt, Artificial Sequence
  Description of Artificial Sequence: Synthetic oligonucleotide
caaccggacguccuugauc

SEQ ID NO: 645203 - RNA, 19 nt, Artificial Sequence
  Description of Artificial Sequence: Synthetic oligonucleotide
aggaacccgcacagcagcc

SEQ ID NO: 645204 - RNA, 19 nt, Artificial Sequence
  Description of Artificial Sequence: Synthetic oligonucleotide
uucaacuccguagccgguc

SEQ ID NO: 645205 - RNA, 19 nt, Artificial Sequence
  Description of Artificial Sequence: Synthetic oligonucleotide
uccgggacguacuccggga

SEQ ID NO: 645206 - RNA, 19 nt, Artificial Sequence
  Description of Artificial Sequence: Synthetic oligonucleotide
guuggcacacgguccgcgc

SEQ ID NO: 645207 - RNA, 19 nt, Artificial Sequence
  Description of Artificial Sequence: Synthetic oligonucleotide
gucuuggcgcugaucaacc

SEQ ID NO: 645208 - RNA, 19 nt, Artificial Sequence
  Description of Artificial Sequence: Synthetic oligonucleotide
gacggauucggauucuuuu

SEQ ID NO: 645209 - RNA, 19 nt, Artificial Sequence
  Description of Artificial Sequence: Synthetic oligonucleotide
uccgccugggucacaccgc

SEQ ID NO: 645210 - RNA, 19 nt, Artificial Sequence
  Description of Artificial Sequence: Synthetic oligonucleotide
aguaacucguggccugcau

SEQ ID NO: 645211 - RNA, 19 nt, Artificial Sequence
  Description of Artificial Sequence: Synthetic oligonucleotide
gcgcagggcacgucgaugg

SEQ ID NO: 645212 - RNA, 19 nt, Artificial Sequence
  Description of Artificial Sequence: Synthetic oligonucleotide
uucuugguuugagaacaaa

SEQ ID NO: 645213 - RNA, 19 nt, Artificial Sequence
  Description of Artificial Sequence: Synthetic oligonucleotide
ucgggcuauagcacccaaa

SEQ ID NO: 645214 - RNA, 19 nt, Artificial Sequence
  Description of Artificial Sequence: Synthetic oligonucleotide
cuccgggacguacuccggg

SEQ ID NO: 645215 - RNA, 19 nt, Artificial Sequence
  Description of Artificial Sequence: Synthetic oligonucleotide
acuccguagccggucuugg

SEQ ID NO: 645216 - RNA, 19 nt, Artificial Sequence
  Description of Artificial Sequence: Synthetic oligonucleotide
ugaagccgcuccucccgcc

SEQ ID NO: 645217 - RNA, 19 nt, Artificial Sequence
  Description of Artificial Sequence: Synthetic oligonucleotide
ccaucacgagcccagcgcg

SEQ ID NO: 645218 - RNA, 19 nt, Artificial Sequence
  Description of Artificial Sequence: Synthetic oligonucleotide
ggcgcugaucaaccggacg

SEQ ID NO: 645219 - RNA, 19 nt, Artificial Sequence
  Description of Artificial Sequence: Synthetic oligonucleotide
uugauugagcuggcuuugu

SEQ ID NO: 645220 - RNA, 19 nt, Artificial Sequence
  Description of Artificial Sequence: Synthetic oligonucleotide
ggaugcagucgucccacag

SEQ ID NO: 645221 - RNA, 19 nt, Artificial Sequence
  Description of Artificial Sequence: Synthetic oligonucleotide
gccaucacgagcccagcgc

SEQ ID NO: 645222 - RNA, 19 nt, Artificial Sequence
  Description of Artificial Sequence: Synthetic oligonucleotide
uacugcgguccucgguggc

SEQ ID NO: 645223 - RNA, 19 nt, Artificial Sequence
  Description of Artificial Sequence: Synthetic oligonucleotide
agguagacgucgccgcggu

SEQ ID NO: 645224 - RNA, 19 nt, Artificial Sequence
  Description of Artificial Sequence: Synthetic oligonucleotide
aucgccggugggguacugc

SEQ ID NO: 645225 - RNA, 19 nt, Artificial Sequence
  Description of Artificial Sequence: Synthetic oligonucleotide
uucgcgcuuccccgccagg

SEQ ID NO: 645226 - RNA, 19 nt, Artificial Sequence
  Description of Artificial Sequence: Synthetic oligonucleotide
gguguccuuugauauuaac

SEQ ID NO: 645227 - RNA, 19 nt, Artificial Sequence
  Description of Artificial Sequence: Synthetic oligonucleotide
cucgacucacccgcaggcg

SEQ ID NO: 645228 - RNA, 19 nt, Artificial Sequence
  Description of Artificial Sequence: Synthetic oligonucleotide
ccugucgauggcuucggag

SEQ ID NO: 645229 - RNA, 19 nt, Artificial Sequence
  Description of Artificial Sequence: Synthetic oligonucleotide
gguguuacugcaacccaac

SEQ ID NO: 645230 - RNA, 19 nt, Artificial Sequence
  Description of Artificial Sequence: Synthetic oligonucleotide
cagcuuccgcugaagccgc

SEQ ID NO: 645231 - RNA, 19 nt, Artificial Sequence
  Description of Artificial Sequence: Synthetic oligonucleotide
cuggugcacggccacaaca

SEQ ID NO: 645232 - RNA, 19 nt, Artificial Sequence
  Description of Artificial Sequence: Synthetic oligonucleotide
ucggucgccguggagccug

SEQ ID NO: 645233 - RNA, 19 nt, Artificial Sequence
  Description of Artificial Sequence: Synthetic oligonucleotide
uuccgcugaagccgcuccu

SEQ ID NO: 645234 - RNA, 19 nt, Artificial Sequence
  Description of Artificial Sequence: Synthetic oligonucleotide
ggcacgucgauggugcacc

SEQ ID NO: 645235 - RNA, 19 nt, Artificial Sequence
  Description of Artificial Sequence: Synthetic oligonucleotide
agcaccagagcggguuccg

SEQ ID NO: 645236 - RNA, 19 nt, Artificial Sequence
  Description of Artificial Sequence: Synthetic oligonucleotide
uucgggcuauagcacccaa

SEQ ID NO: 645237 - RNA, 19 nt, Artificial Sequence
  Description of Artificial Sequence: Synthetic oligonucleotide
ucguucuuuuccacccauu

SEQ ID NO: 645238 - RNA, 19 nt, Artificial Sequence
  Description of Artificial Sequence: Synthetic oligonucleotide
ucgauggcuucggagcccu

SEQ ID NO: 645239 - RNA, 19 nt, Artificial Sequence
  Description of Artificial Sequence: Synthetic oligonucleotide
gcggcuucgcgcuuccccg

SEQ ID NO: 645240 - RNA, 19 nt, Artificial Sequence
  Description of Artificial Sequence: Synthetic oligonucleotide
ugcgguguccuuugauauu

SEQ ID NO: 645241 - RNA, 19 nt, Artificial Sequence
  Description of Artificial Sequence: Synthetic oligonucleotide
gaaucuccaccuccuuuua

SEQ ID NO: 645242 - RNA, 19 nt, Artificial Sequence
  Description of Artificial Sequence: Synthetic oligonucleotide
cuaucuuguaagcaugcuu

SEQ ID NO: 645243 - RNA, 19 nt, Artificial Sequence
  Description of Artificial Sequence: Synthetic oligonucleotide
guaaccucggagaugcagu

SEQ ID NO: 645244 - RNA, 19 nt, Artificial Sequence
  Description of Artificial Sequence: Synthetic oligonucleotide
cauauagagcaucugccuu

SEQ ID NO: 645245 - RNA, 19 nt, Artificial Sequence
  Description of Artificial Sequence: Synthetic oligonucleotide
gcaccguggcuucuggaag

SEQ ID NO: 645246 - RNA, 19 nt, Artificial Sequence
  Description of Artificial Sequence: Synthetic oligonucleotide
gaaaagcgcuccuccgugu

SEQ ID NO: 645247 - RNA, 19 nt, Artificial Sequence
  Description of Artificial Sequence: Synthetic oligonucleotide
ugucggggccuucuucaua

SEQ ID NO: 645248 - RNA, 19 nt, Artificial Sequence
  Description of Artificial Sequence: Synthetic oligonucleotide
agguguuacugcaacccaa

SEQ ID NO: 645249 - RNA, 19 nt, Artificial Sequence
  Description of Artificial Sequence: Synthetic oligonucleotide
cuccguagccggucuuggc

SEQ ID NO: 645250 - RNA, 19 nt, Artificial Sequence
  Description of Artificial Sequence: Synthetic oligonucleotide
gagacccgcccgcagcuuc

SEQ ID NO: 645251 - RNA, 19 nt, Artificial Sequence
  Description of Artificial Sequence: Synthetic oligonucleotide
gccgggugcgucuuggggc

SEQ ID NO: 645252 - RNA, 19 nt, Artificial Sequence
  Description of Artificial Sequence: Synthetic oligonucleotide
uggaccuggucgacggauu

SEQ ID NO: 645253 - RNA, 19 nt, Artificial Sequence
  Description of Artificial Sequence: Synthetic oligonucleotide
gucaucgccggugggguac

SEQ ID NO: 645254 - RNA, 19 nt, Artificial Sequence
  Description of Artificial Sequence: Synthetic oligonucleotide
ccagauuauauaccaggga

SEQ ID NO: 645255 - RNA, 19 nt, Artificial Sequence
  Description of Artificial Sequence: Synthetic oligonucleotide
agggucccgcuccgggacg

SEQ ID NO: 645256 - RNA, 19 nt, Artificial Sequence
  Description of Artificial Sequence: Synthetic oligonucleotide
ggucuuggcgcugaucaac

SEQ ID NO: 645257 - RNA, 19 nt, Artificial Sequence
  Description of Artificial Sequence: Synthetic oligonucleotide
agacccgcccgcagcuucc

SEQ ID NO: 645258 - RNA, 19 nt, Artificial Sequence
  Description of Artificial Sequence: Synthetic oligonucleotide
acccgcagaggagaacuug

SEQ ID NO: 645259 - RNA, 19 nt, Artificial Sequence
  Description of Artificial Sequence: Synthetic oligonucleotide
cugaugcaacucccgcaac

SEQ ID NO: 645260 - RNA, 19 nt, Artificial Sequence
  Description of Artificial Sequence: Synthetic oligonucleotide
gaguaagguguuacugcaa

SEQ ID NO: 645261 - RNA, 19 nt, Artificial Sequence
  Description of Artificial Sequence: Synthetic oligonucleotide
ggcggcccagggaugaugg

SEQ ID NO: 645262 - RNA, 19 nt, Artificial Sequence
  Description of Artificial Sequence: Synthetic oligonucleotide
agagcggguuccggccgcc

SEQ ID NO: 645263 - RNA, 19 nt, Artificial Sequence
  Description of Artificial Sequence: Synthetic oligonucleotide
ucccgcuccgggacguacu

SEQ ID NO: 645264 - RNA, 19 nt, Artificial Sequence
  Description of Artificial Sequence: Synthetic oligonucleotide
accggacguccuugaucac

SEQ ID NO: 645265 - RNA, 19 nt, Artificial Sequence
  Description of Artificial Sequence: Synthetic oligonucleotide
uggcgcugaucaaccggac

SEQ ID NO: 645266 - RNA, 19 nt, Artificial Sequence
  Description of Artificial Sequence: Synthetic oligonucleotide
gcugaucaaccggacgucc

SEQ ID NO: 645267 - RNA, 19 nt, Artificial Sequence
  Description of Artificial Sequence: Synthetic oligonucleotide
agggaacgucuuccgucug

SEQ ID NO: 645268 - RNA, 19 nt, Artificial Sequence
  Description of Artificial Sequence: Synthetic oligonucleotide
caguucuacuuguuuggua

SEQ ID NO: 645269 - RNA, 19 nt, Artificial Sequence
  Description of Artificial Sequence: Synthetic oligonucleotide
caccgcggaacuucuccuc

SEQ ID NO: 645270 - RNA, 19 nt, Artificial Sequence
  Description of Artificial Sequence: Synthetic oligonucleotide
ggucacaccgcggaacuuc

SEQ ID NO: 645271 - RNA, 19 nt, Artificial Sequence
  Description of Artificial Sequence: Synthetic oligonucleotide
auucgggcuauagcaccca

SEQ ID NO: 645272 - RNA, 19 nt, Artificial Sequence
  Description of Artificial Sequence: Synthetic oligonucleotide
gcauucguggugcccacca

SEQ ID NO: 645273 - RNA, 19 nt, Artificial Sequence
  Description of Artificial Sequence: Synthetic oligonucleotide
gacucacccgcaggcgcag

SEQ ID NO: 645274 - RNA, 19 nt, Artificial Sequence
  Description of Artificial Sequence: Synthetic oligonucleotide
ucgguggccaggugccauc

SEQ ID NO: 645275 - RNA, 19 nt, Artificial Sequence
  Description of Artificial Sequence: Synthetic oligonucleotide
agguagccgggcaggcugg

SEQ ID NO: 645276 - RNA, 19 nt, Artificial Sequence
  Description of Artificial Sequence: Synthetic oligonucleotide
agacgucgccgcgguagcg

SEQ ID NO: 645277 - RNA, 19 nt, Artificial Sequence
  Description of Artificial Sequence: Synthetic oligonucleotide
ugcaaguagccgggugcgu

SEQ ID NO: 645278 - RNA, 19 nt, Artificial Sequence
  Description of Artificial Sequence: Synthetic oligonucleotide
cacggugcuggaccugguc

SEQ ID NO: 645279 - RNA, 19 nt, Artificial Sequence
  Description of Artificial Sequence: Synthetic oligonucleotide
ccgggcagggccauggcac

SEQ ID NO: 645280 - RNA, 19 nt, Artificial Sequence
  Description of Artificial Sequence: Synthetic oligonucleotide
guacacuggugcacggcca

SEQ ID NO: 645281 - RNA, 19 nt, Artificial Sequence
  Description of Artificial Sequence: Synthetic oligonucleotide
ccguagccggucuuggcgc

SEQ ID NO: 645282 - RNA, 19 nt, Artificial Sequence
  Description of Artificial Sequence: Synthetic oligonucleotide
gcccgagcaguagaugccg

SEQ ID NO: 645283 - RNA, 19 nt, Artificial Sequence
  Description of Artificial Sequence: Synthetic oligonucleotide
gggaugaaggcuucuuggu

SEQ ID NO: 645284 - RNA, 19 nt, Artificial Sequence
  Description of Artificial Sequence: Synthetic oligonucleotide
gugcgagaauguucuucca

SEQ ID NO: 645285 - RNA, 19 nt, Artificial Sequence
  Description of Artificial Sequence: Synthetic oligonucleotide
ucguggugcccaccaggua

SEQ ID NO: 645286 - RNA, 19 nt, Artificial Sequence
  Description of Artificial Sequence: Synthetic oligonucleotide
ccggacguccuugaucacg

SEQ ID NO: 645287 - RNA, 19 nt, Artificial Sequence
  Description of Artificial Sequence: Synthetic oligonucleotide
caacccgcagaggagaacu

SEQ ID NO: 645288 - RNA, 19 nt, Artificial Sequence
  Description of Artificial Sequence: Synthetic oligonucleotide
ggaccuggucgacggauuc

SEQ ID NO: 645289 - RNA, 19 nt, Artificial Sequence
  Description of Artificial Sequence: Synthetic oligonucleotide
ggccaaugagucagcauca

SEQ ID NO: 645290 - RNA, 19 nt, Artificial Sequence
  Description of Artificial Sequence: Synthetic oligonucleotide
cacgagcccagcgcggaug

SEQ ID NO: 645291 - RNA, 19 nt, Artificial Sequence
  Description of Artificial Sequence: Synthetic oligonucleotide
gcgcugaucaaccggacgu

SEQ ID NO: 645292 - RNA, 19 nt, Artificial Sequence
  Description of Artificial Sequence: Synthetic oligonucleotide
ggccaggugccaucacgag

SEQ ID NO: 645293 - RNA, 19 nt, Artificial Sequence
  Description of Artificial Sequence: Synthetic oligonucleotide
cugaucaaccggacguccu

SEQ ID NO: 645294 - RNA, 19 nt, Artificial Sequence
  Description of Artificial Sequence: Synthetic oligonucleotide
gccgcugaugcaacucccg

SEQ ID NO: 645295 - RNA, 19 nt, Artificial Sequence
  Description of Artificial Sequence: Synthetic oligonucleotide
ggacguacuccgggaacag

SEQ ID NO: 645296 - RNA, 19 nt, Artificial Sequence
  Description of Artificial Sequence: Synthetic oligonucleotide
guagccgggcaggcugggg

SEQ ID NO: 645297 - RNA, 19 nt, Artificial Sequence
  Description of Artificial Sequence: Synthetic oligonucleotide
gggacguacuccgggaaca

SEQ ID NO: 645298 - RNA, 19 nt, Artificial Sequence
  Description of Artificial Sequence: Synthetic oligonucleotide
caaguagccgggugcgucu

SEQ ID NO: 645299 - RNA, 19 nt, Artificial Sequence
  Description of Artificial Sequence: Synthetic oligonucleotide
ccuccgucagguagccggg

SEQ ID NO: 645300 - RNA, 19 nt, Artificial Sequence
  Description of Artificial Sequence: Synthetic oligonucleotide
caguugauugagcuggcuu

SEQ ID NO: 645301 - RNA, 19 nt, Artificial Sequence
  Description of Artificial Sequence: Synthetic oligonucleotide
aaguagccgggugcgucuu

SEQ ID NO: 645302 - RNA, 19 nt, Artificial Sequence
  Description of Artificial Sequence: Synthetic oligonucleotide
ucgacggauucggauucuu

SEQ ID NO: 645303 - RNA, 19 nt, Artificial Sequence
  Description of Artificial Sequence: Synthetic oligonucleotide
gcucucgacucacccgcag

SEQ ID NO: 645304 - RNA, 19 nt, Artificial Sequence
  Description of Artificial Sequence: Synthetic oligonucleotide
agaaagcggcuucgcgcuu

SEQ ID NO: 645305 - RNA, 19 nt, Artificial Sequence
  Description of Artificial Sequence: Synthetic oligonucleotide
gaaaucuauucgggcuaua

SEQ ID NO: 645306 - RNA, 19 nt, Artificial Sequence
  Description of Artificial Sequence: Synthetic oligonucleotide
cacgucgauggugcaccag

SEQ ID NO: 645307 - RNA, 19 nt, Artificial Sequence
  Description of Artificial Sequence: Synthetic oligonucleotide
ccucggagaugcagugugc

SEQ ID NO: 645308 - RNA, 19 nt, Artificial Sequence
  Description of Artificial Sequence: Synthetic oligonucleotide
ccagagcggguuccggccg

SEQ ID NO: 645309 - RNA, 19 nt, Artificial Sequence
  Description of Artificial Sequence: Synthetic oligonucleotide
guacugcucucgacucacc

SEQ ID NO: 645310 - RNA, 19 nt, Artificial Sequence
  Description of Artificial Sequence: Synthetic oligonucleotide
cuguggagugcgagaaugu

SEQ ID NO: 645311 - RNA, 19 nt, Artificial Sequence
  Description of Artificial Sequence: Synthetic oligonucleotide
ccgggaacagaaaagcgcu

SEQ ID NO: 645312 - RNA, 19 nt, Artificial Sequence
  Description of Artificial Sequence: Synthetic oligonucleotide
cuggucgacggauucggau

SEQ ID NO: 645313 - RNA, 19 nt, Artificial Sequence
  Description of Artificial Sequence: Synthetic oligonucleotide
gcaguaacucguggccugc

SEQ ID NO: 645314 - RNA, 19 nt, Artificial Sequence
  Description of Artificial Sequence: Synthetic oligonucleotide
cugccucacuuauuuauuu

SEQ ID NO: 645315 - RNA, 19 nt, Artificial Sequence
  Description of Artificial Sequence: Synthetic oligonucleotide
caucugccuuguccaagga

SEQ ID NO: 645316 - RNA, 19 nt, Artificial Sequence
  Description of Artificial Sequence: Synthetic oligonucleotide
ucaucgccggugggguacu

SEQ ID NO: 645317 - RNA, 19 nt, Artificial Sequence
  Description of Artificial Sequence: Synthetic oligonucleotide
aacccgcagaggagaacuu

SEQ ID NO: 645318 - RNA, 19 nt, Artificial Sequence
  Description of Artificial Sequence: Synthetic oligonucleotide
ccgccugggucacaccgcg

SEQ ID NO: 645319 - RNA, 19 nt, Artificial Sequence
  Description of Artificial Sequence: Synthetic oligonucleotide
cccgcagaggagaacuuga

SEQ ID NO: 645320 - RNA, 19 nt, Artificial Sequence
  Description of Artificial Sequence: Synthetic oligonucleotide
gggguacugcgguccucgg

SEQ ID NO: 645321 - RNA, 19 nt, Artificial Sequence
  Description of Artificial Sequence: Synthetic oligonucleotide
gugcacggccacaacaggu

SEQ ID NO: 645322 - RNA, 19 nt, Artificial Sequence
  Description of Artificial Sequence: Synthetic oligonucleotide
acucacccgcaggcgcagg

SEQ ID NO: 645323 - RNA, 19 nt, Artificial Sequence
  Description of Artificial Sequence: Synthetic oligonucleotide
gcaacccaacccgcagagg

SEQ ID NO: 645324 - RNA, 19 nt, Artificial Sequence
  Description of Artificial Sequence: Synthetic oligonucleotide
gagcccuuggcggugcagu

SEQ ID NO: 645325 - RNA, 19 nt, Artificial Sequence
  Description of Artificial Sequence: Synthetic oligonucleotide
gcgguguccuuugauauua

SEQ ID NO: 645326 - RNA, 19 nt, Artificial Sequence
  Description of Artificial Sequence: Synthetic oligonucleotide
cuccgucagguagccgggc

SEQ ID NO: 645327 - RNA, 19 nt, Artificial Sequence
  Description of Artificial Sequence: Synthetic oligonucleotide
ccgucagguagccgggcag

SEQ ID NO: 645328 - RNA, 19 nt, Artificial Sequence
  Description of Artificial Sequence: Synthetic oligonucleotide
gguugcaaauuggaaacuu

SEQ ID NO: 645329 - RNA, 19 nt, Artificial Sequence
  Description of Artificial Sequence: Synthetic oligonucleotide
gcgcggaugcagucguccc

SEQ ID NO: 645330 - RNA, 19 nt, Artificial Sequence
  Description of Artificial Sequence: Synthetic oligonucleotide
agucgucccacagccgcuu

SEQ ID NO: 645331 - RNA, 19 nt, Artificial Sequence
  Description of Artificial Sequence: Synthetic oligonucleotide
cgcuuccccgccaggagcc

SEQ ID NO: 645332 - RNA, 19 nt, Artificial Sequence
  Description of Artificial Sequence: Synthetic oligonucleotide
uagaugccgcuggguggca

SEQ ID NO: 645333 - RNA, 19 nt, Artificial Sequence
  Description of Artificial Sequence: Synthetic oligonucleotide
cugcaguaacucguggccu

SEQ ID NO: 645334 - RNA, 19 nt, Artificial Sequence
  Description of Artificial Sequence: Synthetic oligonucleotide
cuucaacuccguagccggu

SEQ ID NO: 645335 - RNA, 19 nt, Artificial Sequence
  Description of Artificial Sequence: Synthetic oligonucleotide
gccgcuggguggcaccgug

SEQ ID NO: 645336 - RNA, 19 nt, Artificial Sequence
  Description of Artificial Sequence: Synthetic oligonucleotide
ggcacacgguccgcgcccg

SEQ ID NO: 645337 - RNA, 19 nt, Artificial Sequence
  Description of Artificial Sequence: Synthetic oligonucleotide
ccacccauuggaaccugca

SEQ ID NO: 645338 - RNA, 19 nt, Artificial Sequence
  Description of Artificial Sequence: Synthetic oligonucleotide
gucgucccacagccgcuuc

SEQ ID NO: 645339 - RNA, 19 nt, Artificial Sequence
  Description of Artificial Sequence: Synthetic oligonucleotide
gguagccgggcaggcuggg

SEQ ID NO: 645340 - RNA, 19 nt, Artificial Sequence
  Description of Artificial Sequence: Synthetic oligonucleotide
cgagcaguagaugccgcug

SEQ ID NO: 645341 - RNA, 19 nt, Artificial Sequence
  Description of Artificial Sequence: Synthetic oligonucleotide
gucacaccgcggaacuucu

SEQ ID NO: 645342 - RNA, 19 nt, Artificial Sequence
  Description of Artificial Sequence: Synthetic oligonucleotide
guaaucccaggggugucau

SEQ ID NO: 645343 - RNA, 19 nt, Artificial Sequence
  Description of Artificial Sequence: Synthetic oligonucleotide
cuccuccgucagguagccg

SEQ ID NO: 645344 - RNA, 19 nt, Artificial Sequence
  Description of Artificial Sequence: Synthetic oligonucleotide
gggaacgucuuccgucugu

SEQ ID NO: 645345 - RNA, 19 nt, Artificial Sequence
  Description of Artificial Sequence: Synthetic oligonucleotide
gcggcccagggaugauggg

SEQ ID NO: 645346 - RNA, 19 nt, Artificial Sequence
  Description of Artificial Sequence: Synthetic oligonucleotide
caguaacucguggccugca

SEQ ID NO: 645347 - RNA, 19 nt, Artificial Sequence
  Description of Artificial Sequence: Synthetic oligonucleotide
gggucaguucuacuuguuu

SEQ ID NO: 645348 - RNA, 19 nt, Artificial Sequence
  Description of Artificial Sequence: Synthetic oligonucleotide
ccguggagccuggaggcag

SEQ ID NO: 645349 - RNA, 19 nt, Artificial Sequence
  Description of Artificial Sequence: Synthetic oligonucleotide
cccgcaacuccugcaacuc

SEQ ID NO: 645350 - RNA, 19 nt, Artificial Sequence
  Description of Artificial Sequence: Synthetic oligonucleotide
gcccugucgauggcuucgg

SEQ ID NO: 645351 - RNA, 19 nt, Artificial Sequence
  Description of Artificial Sequence: Synthetic oligonucleotide
ccgcugcaaccucugucgc

SEQ ID NO: 645352 - RNA, 19 nt, Artificial Sequence
  Description of Artificial Sequence: Synthetic oligonucleotide
ccguccgccguccgccugg

SEQ ID NO: 645353 - RNA, 19 nt, Artificial Sequence
  Description of Artificial Sequence: Synthetic oligonucleotide
gugcgucuuggggcagcag

SEQ ID NO: 645354 - RNA, 19 nt, Artificial Sequence
  Description of Artificial Sequence: Synthetic oligonucleotide
gguccgcgcccguccgccg

SEQ ID NO: 645355 - RNA, 19 nt, Artificial Sequence
  Description of Artificial Sequence: Synthetic oligonucleotide
gagaugcagugugcccuua

SEQ ID NO: 645356 - RNA, 19 nt, Artificial Sequence
  Description of Artificial Sequence: Synthetic oligonucleotide
ccgcuggguggcaccgugg

SEQ ID NO: 645357 - RNA, 19 nt, Artificial Sequence
  Description of Artificial Sequence: Synthetic oligonucleotide
gggcacgucgauggugcac

SEQ ID NO: 645358 - RNA, 19 nt, Artificial Sequence
  Description of Artificial Sequence: Synthetic oligonucleotide
ccggcauucguggugccca

SEQ ID NO: 645359 - RNA, 19 nt, Artificial Sequence
  Description of Artificial Sequence: Synthetic oligonucleotide
cagcgcggaugcagucguc

SEQ ID NO: 645360 - RNA, 19 nt, Artificial Sequence
  Description of Artificial Sequence: Synthetic oligonucleotide
cgggacguacuccgggaac

SEQ ID NO: 645361 - RNA, 19 nt, Artificial Sequence
  Description of Artificial Sequence: Synthetic oligonucleotide
cgcugcaaguagccgggug

SEQ ID NO: 645362 - RNA, 19 nt, Artificial Sequence
  Description of Artificial Sequence: Synthetic oligonucleotide
cgucgauggugcaccagga

SEQ ID NO: 645363 - RNA, 19 nt, Artificial Sequence
  Description of Artificial Sequence: Synthetic oligonucleotide
cagacuccaggaguguguu

SEQ ID NO: 645364 - RNA, 19 nt, Artificial Sequence
  Description of Artificial Sequence: Synthetic oligonucleotide
ccaacccgcagaggagaac

SEQ ID NO: 645365 - RNA, 19 nt, Artificial Sequence
  Description of Artificial Sequence: Synthetic oligonucleotide
cguacuccgggaacagaaa

SEQ ID NO: 645366 - RNA, 19 nt, Artificial Sequence
  Description of Artificial Sequence: Synthetic oligonucleotide
ggguacugcgguccucggu

SEQ ID NO: 645367 - RNA, 19 nt, Artificial Sequence
  Description of Artificial Sequence: Synthetic oligonucleotide
ccccgcaggaacccgcaca

SEQ ID NO: 645368 - RNA, 19 nt, Artificial Sequence
  Description of Artificial Sequence: Synthetic oligonucleotide
guguaaccucggagaugca

SEQ ID NO: 645369 - RNA, 19 nt, Artificial Sequence
  Description of Artificial Sequence: Synthetic oligonucleotide
cccgcuccgggacguacuc

SEQ ID NO: 645370 - RNA, 19 nt, Artificial Sequence
  Description of Artificial Sequence: Synthetic oligonucleotide
cgccggugggguacugcgg

SEQ ID NO: 645371 - RNA, 19 nt, Artificial Sequence
  Description of Artificial Sequence: Synthetic oligonucleotide
gucgacggauucggauucu

SEQ ID NO: 645372 - RNA, 19 nt, Artificial Sequence
  Description of Artificial Sequence: Synthetic oligonucleotide
ccuaucuuguaagcaugcu

SEQ ID NO: 645373 - RNA, 19 nt, Artificial Sequence
  Description of Artificial Sequence: Synthetic oligonucleotide
caucgccggugggguacug

SEQ ID NO: 645374 - RNA, 19 nt, Artificial Sequence
  Description of Artificial Sequence: Synthetic oligonucleotide
ggaguguguuaaagagagu

SEQ ID NO: 645375 - RNA, 19 nt, Artificial Sequence
  Description of Artificial Sequence: Synthetic oligonucleotide
ccguccgccugggucacac

SEQ ID NO: 645376 - RNA, 19 nt, Artificial Sequence
  Description of Artificial Sequence: Synthetic oligonucleotide
gcuucgcgcuuccccgcca

SEQ ID NO: 645377 - RNA, 19 nt, Artificial Sequence
  Description of Artificial Sequence: Synthetic oligonucleotide
gcgucuuggggcagcaggu

SEQ ID NO: 645378 - RNA, 19 nt, Artificial Sequence
  Description of Artificial Sequence: Synthetic oligonucleotide
ccuggucgacggauucgga

SEQ ID NO: 645379 - RNA, 19 nt, Artificial Sequence
  Description of Artificial Sequence: Synthetic oligonucleotide
cgcugaucaaccggacguc

SEQ ID NO: 645380 - RNA, 19 nt, Artificial Sequence
  Description of Artificial Sequence: Synthetic oligonucleotide
ggucaucgccgguggggua

SEQ ID NO: 645381 - RNA, 19 nt, Artificial Sequence
  Description of Artificial Sequence: Synthetic oligonucleotide
gcgcugaagugcagagauc

SEQ ID NO: 645382 - RNA, 19 nt, Artificial Sequence
  Description of Artificial Sequence: Synthetic oligonucleotide
gguagacgucgccgcggua

SEQ ID NO: 645383 - RNA, 19 nt, Artificial Sequence
  Description of Artificial Sequence: Synthetic oligonucleotide
ggcguccggcaggucgagc

SEQ ID NO: 645384 - RNA, 19 nt, Artificial Sequence
  Description of Artificial Sequence: Synthetic oligonucleotide
gcgcccguccgccguccgc

SEQ ID NO: 645385 - RNA, 19 nt, Artificial Sequence
  Description of Artificial Sequence: Synthetic oligonucleotide
cucgguggccaggugccau

SEQ ID NO: 645386 - RNA, 19 nt, Artificial Sequence
  Description of Artificial Sequence: Synthetic oligonucleotide
cgcccguccgccguccgcc

SEQ ID NO: 645387 - RNA, 19 nt, Artificial Sequence
  Description of Artificial Sequence: Synthetic oligonucleotide
ccgcuccgggacguacucc

SEQ ID NO: 645388 - RNA, 19 nt, Artificial Sequence
  Description of Artificial Sequence: Synthetic oligonucleotide
ccgggacguacuccgggaa

SEQ ID NO: 645389 - RNA, 19 nt, Artificial Sequence
  Description of Artificial Sequence: Synthetic oligonucleotide
gcccuuagaguaagguguu

SEQ ID NO: 645390 - RNA, 19 nt, Artificial Sequence
  Description of Artificial Sequence: Synthetic oligonucleotide
caacuccguagccggucuu

SEQ ID NO: 645391 - RNA, 19 nt, Artificial Sequence
  Description of Artificial Sequence: Synthetic oligonucleotide
cgguccgcgcccguccgcc

SEQ ID NO: 645392 - RNA, 19 nt, Artificial Sequence
  Description of Artificial Sequence: Synthetic oligonucleotide
cguccgccugggucacacc

SEQ ID NO: 645393 - RNA, 19 nt, Artificial Sequence
  Description of Artificial Sequence: Synthetic oligonucleotide
ccgcagaggagaacuugau

SEQ ID NO: 645394 - RNA, 19 nt, Artificial Sequence
  Description of Artificial Sequence: Synthetic oligonucleotide
cccuuagaguaagguguua

SEQ ID NO: 645395 - RNA, 19 nt, Artificial Sequence
  Description of Artificial Sequence: Synthetic oligonucleotide
ccgcaacuccugcaacucu

SEQ ID NO: 645396 - RNA, 19 nt, Artificial Sequence
  Description of Artificial Sequence: Synthetic oligonucleotide
cccugucgauggcuucgga

SEQ ID NO: 645397 - RNA, 19 nt, Artificial Sequence
  Description of Artificial Sequence: Synthetic oligonucleotide
cccguccgccguccgccug

SEQ ID NO: 645398 - RNA, 19 nt, Artificial Sequence
  Description of Artificial Sequence: Synthetic oligonucleotide
cggguuccggccgccgcag

SEQ ID NO: 645399 - RNA, 19 nt, Artificial Sequence
  Description of Artificial Sequence: Synthetic oligonucleotide
cggaugcagucgucccaca

SEQ ID NO: 645400 - RNA, 19 nt, Artificial Sequence
  Description of Artificial Sequence: Synthetic oligonucleotide
cucggucgccguggagccu

SEQ ID NO: 645401 - RNA, 19 nt, Artificial Sequence
  Description of Artificial Sequence: Synthetic oligonucleotide
cggcggcccagggaugaug

SEQ ID NO: 645402 - RNA, 19 nt, Artificial Sequence
  Description of Artificial Sequence: Synthetic oligonucleotide
gggucccgcuccgggacgu

SEQ ID NO: 645403 - RNA, 19 nt, Artificial Sequence
  Description of Artificial Sequence: Synthetic oligonucleotide
cgacggauucggauucuuu

SEQ ID NO: 645404 - RNA, 19 nt, Artificial Sequence
  Description of Artificial Sequence: Synthetic oligonucleotide
ggucgccguggagccugga

SEQ ID NO: 645405 - RNA, 19 nt, Artificial Sequence
  Description of Artificial Sequence: Synthetic oligonucleotide
cgucuuccgucuguucugu

SEQ ID NO: 645406 - RNA, 19 nt, Artificial Sequence
  Description of Artificial Sequence: Synthetic oligonucleotide
gggucacaccgcggaacuu

SEQ ID NO: 645407 - RNA, 19 nt, Artificial Sequence
  Description of Artificial Sequence: Synthetic oligonucleotide
ggagacccgcccgcagcuu

SEQ ID NO: 645408 - RNA, 19 nt, Artificial Sequence
  Description of Artificial Sequence: Synthetic oligonucleotide
cgccgcgguagcgccagga

SEQ ID NO: 645409 - RNA, 19 nt, Artificial Sequence
  Description of Artificial Sequence: Synthetic oligonucleotide
ggucccgcuccgggacgua

SEQ ID NO: 645410 - RNA, 19 nt, Artificial Sequence
  Description of Artificial Sequence: Synthetic oligonucleotide
cccgagggucaucgccggu

SEQ ID NO: 645411 - RNA, 19 nt, Artificial Sequence
  Description of Artificial Sequence: Synthetic oligonucleotide
gccguccgccugggucaca

SEQ ID NO: 645412 - RNA, 19 nt, Artificial Sequence
  Description of Artificial Sequence: Synthetic oligonucleotide
cgguagcgccaggagcgcu

SEQ ID NO: 645413 - RNA, 19 nt, Artificial Sequence
  Description of Artificial Sequence: Synthetic oligonucleotide
ccgcugcaaguagccgggu

SEQ ID NO: 645414 - RNA, 19 nt, Artificial Sequence
  Description of Artificial Sequence: Synthetic oligonucleotide
ccgcaggcgcagggcacgu

SEQ ID NO: 645415 - RNA, 19 nt, Artificial Sequence
  Description of Artificial Sequence: Synthetic oligonucleotide
aauucauccauuuccgggc

SEQ ID NO: 645416 - RNA, 19 nt, Artificial Sequence
  Description of Artificial Sequence: Synthetic oligonucleotide
uucaaauauuuucaguucg

SEQ ID NO: 645417 - RNA, 19 nt, Artificial Sequence
  Description of Artificial Sequence: Synthetic oligonucleotide
acguaauucauccauuucc

SEQ ID NO: 645418 - RNA, 19 nt, Artificial Sequence
  Description of Artificial Sequence: Synthetic oligonucleotide
aaaguaccgaacuagguug

SEQ ID NO: 645419 - RNA, 19 nt, Artificial Sequence
  Description of Artificial Sequence: Synthetic oligonucleotide
agguuucacagucagagcc

SEQ ID NO: 645420 - RNA, 19 nt, Artificial Sequence
  Description of Artificial Sequence: Synthetic oligonucleotide
aaaagcguggucgaggagc

SEQ ID NO: 645421 - RNA, 19 nt, Artificial Sequence
  Description of Artificial Sequence: Synthetic oligonucleotide
gaacaugugaucuacccgg

SEQ ID NO: 645422 - RNA, 19 nt, Artificial Sequence
  Description of Artificial Sequence: Synthetic oligonucleotide
ugcauaacaaacuuguagc

SEQ ID NO: 645423 - RNA, 19 nt, Artificial Sequence
  Description of Artificial Sequence: Synthetic oligonucleotide
uugcauaacaaacuuguag

SEQ ID NO: 645424 - RNA, 19 nt, Artificial Sequence
  Description of Artificial Sequence: Synthetic oligonucleotide
ucagcaucgaacuccagcg

SEQ ID NO: 645425 - RNA, 19 nt, Artificial Sequence
  Description of Artificial Sequence: Synthetic oligonucleotide
ugaaauaaaggcagguuca

SEQ ID NO: 645426 - RNA, 19 nt, Artificial Sequence
  Description of Artificial Sequence: Synthetic oligonucleotide
ucuaugacgacacacccca

SEQ ID NO: 645427 - RNA, 19 nt, Artificial Sequence
  Description of Artificial Sequence: Synthetic oligonucleotide
uuuauggucauuaggcuga

SEQ ID NO: 645428 - RNA, 19 nt, Artificial Sequence
  Description of Artificial Sequence: Synthetic oligonucleotide
guuugauuaguccagauga

SEQ ID NO: 645429 - RNA, 19 nt, Artificial Sequence
  Description of Artificial Sequence: Synthetic oligonucleotide
acaucaaacgaacaacuuc

SEQ ID NO: 645430 - RNA, 19 nt, Artificial Sequence
  Description of Artificial Sequence: Synthetic oligonucleotide
aaacuuguagcuugccaac

SEQ ID NO: 645431 - RNA, 19 nt, Artificial Sequence
  Description of Artificial Sequence: Synthetic oligonucleotide
ugguaaagcugaaauaaag

SEQ ID NO: 645432 - RNA, 19 nt, Artificial Sequence
  Description of Artificial Sequence: Synthetic oligonucleotide
cucacauuuggucaggacg

SEQ ID NO: 645433 - RNA, 19 nt, Artificial Sequence
  Description of Artificial Sequence: Synthetic oligonucleotide
ugaacaugugaucuacccg

SEQ ID NO: 645434 - RNA, 19 nt, Artificial Sequence
  Description of Artificial Sequence: Synthetic oligonucleotide
uuuuauggucauuaggcug

SEQ ID NO: 645435 - RNA, 19 nt, Artificial Sequence
  Description of Artificial Sequence: Synthetic oligonucleotide
acuugagucacuucgagga

SEQ ID NO: 645436 - RNA, 19 nt, Artificial Sequence
  Description of Artificial Sequence: Synthetic oligonucleotide
aaugaguguucgaagcucc

SEQ ID NO: 645437 - RNA, 19 nt, Artificial Sequence
  Description of Artificial Sequence: Synthetic oligonucleotide
ugaucagggauucuguuca

SEQ ID NO: 645438 - RNA, 19 nt, Artificial Sequence
  Description of Artificial Sequence: Synthetic oligonucleotide
cuuuaugauacucgaaccc

SEQ ID NO: 645439 - RNA, 19 nt, Artificial Sequence
  Description of Artificial Sequence: Synthetic oligonucleotide
auuucgggguaucacagac

SEQ ID NO: 645440 - RNA, 19 nt, Artificial Sequence
  Description of Artificial Sequence: Synthetic oligonucleotide
ucggguaauaacuucaggu

SEQ ID NO: 645441 - RNA, 19 nt, Artificial Sequence
  Description of Artificial Sequence: Synthetic oligonucleotide
uguucacacacuacuaggc

SEQ ID NO: 645442 - RNA, 19 nt, Artificial Sequence
  Description of Artificial Sequence: Synthetic oligonucleotide
agauaucugcugcacgucc

SEQ ID NO: 645443 - RNA, 19 nt, Artificial Sequence
  Description of Artificial Sequence: Synthetic oligonucleotide
ugauuaguccagaugacgu

SEQ ID NO: 645444 - RNA, 19 nt, Artificial Sequence
  Description of Artificial Sequence: Synthetic oligonucleotide
uaagcuuuacugagcaucc

SEQ ID NO: 645445 - RNA, 19 nt, Artificial Sequence
  Description of Artificial Sequence: Synthetic oligonucleotide
ugaccaaugauauucuuuc

SEQ ID NO: 645446 - RNA, 19 nt, Artificial Sequence
  Description of Artificial Sequence: Synthetic oligonucleotide
aaacgaacaacuucuuuau

SEQ ID NO: 645447 - RNA, 19 nt, Artificial Sequence
  Description of Artificial Sequence: Synthetic oligonucleotide
acgaacaacuucuuuauga

SEQ ID NO: 645448 - RNA, 19 nt, Artificial Sequence
  Description of Artificial Sequence: Synthetic oligonucleotide
aagauauuggcaccuuuga

SEQ ID NO: 645449 - RNA, 19 nt, Artificial Sequence
  Description of Artificial Sequence: Synthetic oligonucleotide
agcuuauguauuugucucc

SEQ ID NO: 645450 - RNA, 19 nt, Artificial Sequence
  Description of Artificial Sequence: Synthetic oligonucleotide
uguugauccacuugaguca

SEQ ID NO: 645451 - RNA, 19 nt, Artificial Sequence
  Description of Artificial Sequence: Synthetic oligonucleotide
agucacuucgaggauacgc

SEQ ID NO: 645452 - RNA, 19 nt, Artificial Sequence
  Description of Artificial Sequence: Synthetic oligonucleotide
uugauuaguccagaugacg

SEQ ID NO: 645453 - RNA, 19 nt, Artificial Sequence
  Description of Artificial Sequence: Synthetic oligonucleotide
uauugucauaggauuucgg

SEQ ID NO: 645454 - RNA, 19 nt, Artificial Sequence
  Description of Artificial Sequence: Synthetic oligonucleotide
uccguguugauccacuuga

SEQ ID NO: 645455 - RNA, 19 nt, Artificial Sequence
  Description of Artificial Sequence: Synthetic oligonucleotide
cuggauagcuucuaugggc

SEQ ID NO: 645456 - RNA, 19 nt, Artificial Sequence
  Description of Artificial Sequence: Synthetic oligonucleotide
agguucaauggcuuguagg

SEQ ID NO: 645457 - RNA, 19 nt, Artificial Sequence
  Description of Artificial Sequence: Synthetic oligonucleotide
ucauacucaugccacggcc

SEQ ID NO: 645458 - RNA, 19 nt, Artificial Sequence
  Description of Artificial Sequence: Synthetic oligonucleotide
cuugauaguuuuaugguca

SEQ ID NO: 645459 - RNA, 19 nt, Artificial Sequence
  Description of Artificial Sequence: Synthetic oligonucleotide
aguuugauuaguccagaug

SEQ ID NO: 645460 - RNA, 19 nt, Artificial Sequence
  Description of Artificial Sequence: Synthetic oligonucleotide
uacucgaacccaaaguugu

SEQ ID NO: 645461 - RNA, 19 nt, Artificial Sequence
  Description of Artificial Sequence: Synthetic oligonucleotide
uuaggcugaaaccgaaucu

SEQ ID NO: 645462 - RNA, 19 nt, Artificial Sequence
  Description of Artificial Sequence: Synthetic oligonucleotide
uauggaugccaagcgaucg

SEQ ID NO: 645463 - RNA, 19 nt, Artificial Sequence
  Description of Artificial Sequence: Synthetic oligonucleotide
agauguacaucucuucucu

SEQ ID NO: 645464 - RNA, 19 nt, Artificial Sequence
  Description of Artificial Sequence: Synthetic oligonucleotide
uguucauacucaugccacg

SEQ ID NO: 645465 - RNA, 19 nt, Artificial Sequence
  Description of Artificial Sequence: Synthetic oligonucleotide
acuacuaggccacggacug

SEQ ID NO: 645466 - RNA, 19 nt, Artificial Sequence
  Description of Artificial Sequence: Synthetic oligonucleotide
gguaaagcugaaauaaagg

SEQ ID NO: 645467 - RNA, 19 nt, Artificial Sequence
  Description of Artificial Sequence: Synthetic oligonucleotide
uccuugauaguuuuauggu

SEQ ID NO: 645468 - RNA, 19 nt, Artificial Sequence
  Description of Artificial Sequence: Synthetic oligonucleotide
acuucgaggauacgcuggc

SEQ ID NO: 645469 - RNA, 19 nt, Artificial Sequence
  Description of Artificial Sequence: Synthetic oligonucleotide
augacgacacaccccagac

SEQ ID NO: 645470 - RNA, 19 nt, Artificial Sequence
  Description of Artificial Sequence: Synthetic oligonucleotide
ucauuucucgauaucuccu

SEQ ID NO: 645471 - RNA, 19 nt, Artificial Sequence
  Description of Artificial Sequence: Synthetic oligonucleotide
guguugauccacuugaguc

SEQ ID NO: 645472 - RNA, 19 nt, Artificial Sequence
  Description of Artificial Sequence: Synthetic oligonucleotide
uuugauuaguccagaugac

SEQ ID NO: 645473 - RNA, 19 nt, Artificial Sequence
  Description of Artificial Sequence: Synthetic oligonucleotide
ggucauuaggcugaaaccg

SEQ ID NO: 645474 - RNA, 19 nt, Artificial Sequence
  Description of Artificial Sequence: Synthetic oligonucleotide
gauuaguccagaugacgug

SEQ ID NO: 645475 - RNA, 19 nt, Artificial Sequence
  Description of Artificial Sequence: Synthetic oligonucleotide
ugccauuugaacgucaccu

SEQ ID NO: 645476 - RNA, 19 nt, Artificial Sequence
  Description of Artificial Sequence: Synthetic oligonucleotide
ugacgugaggaagauauug

SEQ ID NO: 645477 - RNA, 19 nt, Artificial Sequence
  Description of Artificial Sequence: Synthetic oligonucleotide
acucuccagacaucaaacg

SEQ ID NO: 645478 - RNA, 19 nt, Artificial Sequence
  Description of Artificial Sequence: Synthetic oligonucleotide
aaaccuugacaaaagcgug

SEQ ID NO: 645479 - RNA, 19 nt, Artificial Sequence
  Description of Artificial Sequence: Synthetic oligonucleotide
gacaaaagcguggucgagg

SEQ ID NO: 645480 - RNA, 19 nt, Artificial Sequence
  Description of Artificial Sequence: Synthetic oligonucleotide
guagcuugccaacaaggag

SEQ ID NO: 645481 - RNA, 19 nt, Artificial Sequence
  Description of Artificial Sequence: Synthetic oligonucleotide
gagugcuaaaucccucugg

SEQ ID NO: 645482 - RNA, 19 nt, Artificial Sequence
  Description of Artificial Sequence: Synthetic oligonucleotide
acacuacuaggccacggac

SEQ ID NO: 645483 - RNA, 19 nt, Artificial Sequence
  Description of Artificial Sequence: Synthetic oligonucleotide
uaugacgacacaccccaga

SEQ ID NO: 645484 - RNA, 19 nt, Artificial Sequence
  Description of Artificial Sequence: Synthetic oligonucleotide
ucgauaucuccucucuuca

SEQ ID NO: 645485 - RNA, 19 nt, Artificial Sequence
  Description of Artificial Sequence: Synthetic oligonucleotide
gauauugucauaggauuuc

SEQ ID NO: 645486 - RNA, 19 nt, Artificial Sequence
  Description of Artificial Sequence: Synthetic oligonucleotide
ugagucacuucgaggauac

SEQ ID NO: 645487 - RNA, 19 nt, Artificial Sequence
  Description of Artificial Sequence: Synthetic oligonucleotide
ucccacuuuguacauaauc

SEQ ID NO: 645488 - RNA, 19 nt, Artificial Sequence
  Description of Artificial Sequence: Synthetic oligonucleotide
auauugucauaggauuucg

SEQ ID NO: 645489 - RNA, 19 nt, Artificial Sequence
  Description of Artificial Sequence: Synthetic oligonucleotide
aacgaacaacuucuuuaug

SEQ ID NO: 645490 - RNA, 19 nt, Artificial Sequence
  Description of Artificial Sequence: Synthetic oligonucleotide
ucggugaacaaugccgugg

SEQ ID NO: 645491 - RNA, 19 nt, Artificial Sequence
  Description of Artificial Sequence: Synthetic oligonucleotide
caaacgaacaacuucuuua

SEQ ID NO: 645492 - RNA, 19 nt, Artificial Sequence
  Description of Artificial Sequence: Synthetic oligonucleotide
uucgaagcucccaacuucu

SEQ ID NO: 645493 - RNA, 19 nt, Artificial Sequence
  Description of Artificial Sequence: Synthetic oligonucleotide
acaaacuuguagcuugcca

SEQ ID NO: 645494 - RNA, 19 nt, Artificial Sequence
  Description of Artificial Sequence: Synthetic oligonucleotide
gagccuuugcauaacaaac

SEQ ID NO: 645495 - RNA, 19 nt, Artificial Sequence
  Description of Artificial Sequence: Synthetic oligonucleotide
uuaguccagaugacgugag

SEQ ID NO: 645496 - RNA, 19 nt, Artificial Sequence
  Description of Artificial Sequence: Synthetic oligonucleotide
aguguucgaagcucccaac

SEQ ID NO: 645497 - RNA, 19 nt, Artificial Sequence
  Description of Artificial Sequence: Synthetic oligonucleotide
acaaaagcguggucgagga

SEQ ID NO: 645498 - RNA, 19 nt, Artificial Sequence
  Description of Artificial Sequence: Synthetic oligonucleotide
uucgggguaucacagacuu

SEQ ID NO: 645499 - RNA, 19 nt, Artificial Sequence
  Description of Artificial Sequence: Synthetic oligonucleotide
uucucgauaucuccucucu

SEQ ID NO: 645500 - RNA, 19 nt, Artificial Sequence
  Description of Artificial Sequence: Synthetic oligonucleotide
gaugacgugaggaagauau

SEQ ID NO: 645501 - RNA, 19 nt, Artificial Sequence
  Description of Artificial Sequence: Synthetic oligonucleotide
ugugcaguguucagucuug

SEQ ID NO: 645502 - RNA, 19 nt, Artificial Sequence
  Description of Artificial Sequence: Synthetic oligonucleotide
uaccgaacuagguuggggu

SEQ ID NO: 645503 - RNA, 19 nt, Artificial Sequence
  Description of Artificial Sequence: Synthetic oligonucleotide
aggauuucgggguaucaca

SEQ ID NO: 645504 - RNA, 19 nt, Artificial Sequence
  Description of Artificial Sequence: Synthetic oligonucleotide
gaacccaaaguuguagccc

SEQ ID NO: 645505 - RNA, 19 nt, Artificial Sequence
  Description of Artificial Sequence: Synthetic oligonucleotide
uucauacucaugccacggc

SEQ ID NO: 645506 - RNA, 19 nt, Artificial Sequence
  Description of Artificial Sequence: Synthetic oligonucleotide
caaacuuguagcuugccaa

SEQ ID NO: 645507 - RNA, 19 nt, Artificial Sequence
  Description of Artificial Sequence: Synthetic oligonucleotide
cucgauaucuccucucuuc

SEQ ID NO: 645508 - RNA, 19 nt, Artificial Sequence
  Description of Artificial Sequence: Synthetic oligonucleotide
gguucaauggcuuguagga

SEQ ID NO: 645509 - RNA, 19 nt, Artificial Sequence
  Description of Artificial Sequence: Synthetic oligonucleotide
ucugccauuugaacgucac

SEQ ID NO: 645510 - RNA, 19 nt, Artificial Sequence
  Description of Artificial Sequence: Synthetic oligonucleotide
acagccugaugacaugcuc

SEQ ID NO: 645511 - RNA, 19 nt, Artificial Sequence
  Description of Artificial Sequence: Synthetic oligonucleotide
uuccgggcaaagcuuaugu

SEQ ID NO: 645512 - RNA, 19 nt, Artificial Sequence
  Description of Artificial Sequence: Synthetic oligonucleotide
guucauacucaugccacgg

SEQ ID NO: 645513 - RNA, 19 nt, Artificial Sequence
  Description of Artificial Sequence: Synthetic oligonucleotide
aaguaccgaacuagguugg

SEQ ID NO: 645514 - RNA, 19 nt, Artificial Sequence
  Description of Artificial Sequence: Synthetic oligonucleotide
ucggaaggcacgcuccgag

SEQ ID NO: 645515 - RNA, 19 nt, Artificial Sequence
  Description of Artificial Sequence: Synthetic oligonucleotide
aggacguugauggcaaccg

SEQ ID NO: 645516 - RNA, 19 nt, Artificial Sequence
  Description of Artificial Sequence: Synthetic oligonucleotide
agcaucgaacuccagcgug

SEQ ID NO: 645517 - RNA, 19 nt, Artificial Sequence
  Description of Artificial Sequence: Synthetic oligonucleotide
uucgaggauacgcuggcuc

SEQ ID NO: 645518 - RNA, 19 nt, Artificial Sequence
  Description of Artificial Sequence: Synthetic oligonucleotide
uggcuugugccccauuccc

SEQ ID NO: 645519 - RNA, 19 nt, Artificial Sequence
  Description of Artificial Sequence: Synthetic oligonucleotide
uccgaugaauagcugugac

SEQ ID NO: 645520 - RNA, 19 nt, Artificial Sequence
  Description of Artificial Sequence: Synthetic oligonucleotide
ucgguaguacugcugcagc

SEQ ID NO: 645521 - RNA, 19 nt, Artificial Sequence
  Description of Artificial Sequence: Synthetic oligonucleotide
uuuggucaggacguaauuc

SEQ ID NO: 645522 - RNA, 19 nt, Artificial Sequence
  Description of Artificial Sequence: Synthetic oligonucleotide
uggaguacagccugaugac

SEQ ID NO: 645523 - RNA, 19 nt, Artificial Sequence
  Description of Artificial Sequence: Synthetic oligonucleotide
auuaguccagaugacguga

SEQ ID NO: 645524 - RNA, 19 nt, Artificial Sequence
  Description of Artificial Sequence: Synthetic oligonucleotide
accaaaguaccgaacuagg

SEQ ID NO: 645525 - RNA, 19 nt, Artificial Sequence
  Description of Artificial Sequence: Synthetic oligonucleotide
cucuaugacgacacacccc

SEQ ID NO: 645526 - RNA, 19 nt, Artificial Sequence
  Description of Artificial Sequence: Synthetic oligonucleotide
cacuugagucacuucgagg

SEQ ID NO: 645527 - RNA, 19 nt, Artificial Sequence
  Description of Artificial Sequence: Synthetic oligonucleotide
ucggcagucuucauguaaa

SEQ ID NO: 645528 - RNA, 19 nt, Artificial Sequence
  Description of Artificial Sequence: Synthetic oligonucleotide
ucaaacgaacaacuucuuu

SEQ ID NO: 645529 - RNA, 19 nt, Artificial Sequence
  Description of Artificial Sequence: Synthetic oligonucleotide
ugacaccuccucuagcgug

SEQ ID NO: 645530 - RNA, 19 nt, Artificial Sequence
  Description of Artificial Sequence: Synthetic oligonucleotide
cauguaagcugcuguuccc

SEQ ID NO: 645531 - RNA, 19 nt, Artificial Sequence
  Description of Artificial Sequence: Synthetic oligonucleotide
cuuuagcucggguaauaac

SEQ ID NO: 645532 - RNA, 19 nt, Artificial Sequence
  Description of Artificial Sequence: Synthetic oligonucleotide
acagacuugaccaaugaua

SEQ ID NO: 645533 - RNA, 19 nt, Artificial Sequence
  Description of Artificial Sequence: Synthetic oligonucleotide
uccuauuuuguuuccucuc

SEQ ID NO: 645534 - RNA, 19 nt, Artificial Sequence
  Description of Artificial Sequence: Synthetic oligonucleotide
uagugaucagggauucugu

SEQ ID NO: 645535 - RNA, 19 nt, Artificial Sequence
  Description of Artificial Sequence: Synthetic oligonucleotide
agagucuuuggucuggcua

SEQ ID NO: 645536 - RNA, 19 nt, Artificial Sequence
  Description of Artificial Sequence: Synthetic oligonucleotide
uuaagaggcugcacugcac

SEQ ID NO: 645537 - RNA, 19 nt, Artificial Sequence
  Description of Artificial Sequence: Synthetic oligonucleotide
aucugaacuguagcucugc

SEQ ID NO: 645538 - RNA, 19 nt, Artificial Sequence
  Description of Artificial Sequence: Synthetic oligonucleotide
cauuucucgauaucuccuc

SEQ ID NO: 645539 - RNA, 19 nt, Artificial Sequence
  Description of Artificial Sequence: Synthetic oligonucleotide
cguaauucauccauuuccg

SEQ ID NO: 645540 - RNA, 19 nt, Artificial Sequence
  Description of Artificial Sequence: Synthetic oligonucleotide
aguugccaugguuccgagc

SEQ ID NO: 645541 - RNA, 19 nt, Artificial Sequence
  Description of Artificial Sequence: Synthetic oligonucleotide
ucuagcgugcccucgucac

SEQ ID NO: 645542 - RNA, 19 nt, Artificial Sequence
  Description of Artificial Sequence: Synthetic oligonucleotide
uaaugaguguucgaagcuc

SEQ ID NO: 645543 - RNA, 19 nt, Artificial Sequence
  Description of Artificial Sequence: Synthetic oligonucleotide
gcaaccgugaucugcuugg

SEQ ID NO: 645544 - RNA, 19 nt, Artificial Sequence
  Description of Artificial Sequence: Synthetic oligonucleotide
ucgagugacgacucaggga

SEQ ID NO: 645545 - RNA, 19 nt, Artificial Sequence
  Description of Artificial Sequence: Synthetic oligonucleotide
uugaugccuucaaauauuu

SEQ ID NO: 645546 - RNA, 19 nt, Artificial Sequence
  Description of Artificial Sequence: Synthetic oligonucleotide
uaggcugaaaccgaaucuc

SEQ ID NO: 645547 - RNA, 19 nt, Artificial Sequence
  Description of Artificial Sequence: Synthetic oligonucleotide
uguuuaccucuccaggcau

SEQ ID NO: 645548 - RNA, 19 nt, Artificial Sequence
  Description of Artificial Sequence: Synthetic oligonucleotide
gacguaauucauccauuuc

SEQ ID NO: 645549 - RNA, 19 nt, Artificial Sequence
  Description of Artificial Sequence: Synthetic oligonucleotide
cuuagccuuucagggaucg

SEQ ID NO: 645550 - RNA, 19 nt, Artificial Sequence
  Description of Artificial Sequence: Synthetic oligonucleotide
cacucucacauuuggucag

SEQ ID NO: 645551 - RNA, 19 nt, Artificial Sequence
  Description of Artificial Sequence: Synthetic oligonucleotide
acgacucagggaucugaac

SEQ ID NO: 645552 - RNA, 19 nt, Artificial Sequence
  Description of Artificial Sequence: Synthetic oligonucleotide
ugcgagaggaaauccuuuc

SEQ ID NO: 645553 - RNA, 19 nt, Artificial Sequence
  Description of Artificial Sequence: Synthetic oligonucleotide
aguccagaugacgugagga

SEQ ID NO: 645554 - RNA, 19 nt, Artificial Sequence
  Description of Artificial Sequence: Synthetic oligonucleotide
ucgaggauacgcuggcucu

SEQ ID NO: 645555 - RNA, 19 nt, Artificial Sequence
  Description of Artificial Sequence: Synthetic oligonucleotide
uggaggacguugauggcaa

SEQ ID NO: 645556 - RNA, 19 nt, Artificial Sequence
  Description of Artificial Sequence: Synthetic oligonucleotide
ggcuugcaaacucaggaag

SEQ ID NO: 645557 - RNA, 19 nt, Artificial Sequence
  Description of Artificial Sequence: Synthetic oligonucleotide
acuuacgagccuuugcaua

SEQ ID NO: 645558 - RNA, 19 nt, Artificial Sequence
  Description of Artificial Sequence: Synthetic oligonucleotide
gugcuaaaucccucugggg

SEQ ID NO: 645559 - RNA, 19 nt, Artificial Sequence
  Description of Artificial Sequence: Synthetic oligonucleotide
cuugaguggcccaccuggg

SEQ ID NO: 645560 - RNA, 19 nt, Artificial Sequence
  Description of Artificial Sequence: Synthetic oligonucleotide
gacguugauggcaaccgug

SEQ ID NO: 645561 - RNA, 19 nt, Artificial Sequence
  Description of Artificial Sequence: Synthetic oligonucleotide
aagcgaucguuuucuggga

SEQ ID NO: 645562 - RNA, 19 nt, Artificial Sequence
  Description of Artificial Sequence: Synthetic oligonucleotide
agcgucggaaggcacgcuc

SEQ ID NO: 645563 - RNA, 19 nt, Artificial Sequence
  Description of Artificial Sequence: Synthetic oligonucleotide
uugauaguuuuauggucau

SEQ ID NO: 645564 - RNA, 19 nt, Artificial Sequence
  Description of Artificial Sequence: Synthetic oligonucleotide
agcguggucgaggagcugg

SEQ ID NO: 645565 - RNA, 19 nt, Artificial Sequence
  Description of Artificial Sequence: Synthetic oligonucleotide
gaaggcacgcuccgagugc

SEQ ID NO: 645566 - RNA, 19 nt, Artificial Sequence
  Description of Artificial Sequence: Synthetic oligonucleotide
auacgcuggcucuucucuc

SEQ ID NO: 645567 - RNA, 19 nt, Artificial Sequence
  Description of Artificial Sequence: Synthetic oligonucleotide
cucggguaauaacuucagg

SEQ ID NO: 645568 - RNA, 19 nt, Artificial Sequence
  Description of Artificial Sequence: Synthetic oligonucleotide
cuuacgagccuuugcauaa

SEQ ID NO: 645569 - RNA, 19 nt, Artificial Sequence
  Description of Artificial Sequence: Synthetic oligonucleotide
uccuauuuucugucugaac

SEQ ID NO: 645570 - RNA, 19 nt, Artificial Sequence
  Description of Artificial Sequence: Synthetic oligonucleotide
guucgaagcucccaacuuc

SEQ ID NO: 645571 - RNA, 19 nt, Artificial Sequence
  Description of Artificial Sequence: Synthetic oligonucleotide
uacgagccuuugcauaaca

SEQ ID NO: 645572 - RNA, 19 nt, Artificial Sequence
  Description of Artificial Sequence: Synthetic oligonucleotide
uuucgggguaucacagacu

SEQ ID NO: 645573 - RNA, 19 nt, Artificial Sequence
  Description of Artificial Sequence: Synthetic oligonucleotide
uccaggcauggucugggug

SEQ ID NO: 645574 - RNA, 19 nt, Artificial Sequence
  Description of Artificial Sequence: Synthetic oligonucleotide
agggaucgguggcuugugc

SEQ ID NO: 645575 - RNA, 19 nt, Artificial Sequence
  Description of Artificial Sequence: Synthetic oligonucleotide
auacucgaacccaaaguug

SEQ ID NO: 645576 - RNA, 19 nt, Artificial Sequence
  Description of Artificial Sequence: Synthetic oligonucleotide
ccuugaguggcccaccugg

SEQ ID NO: 645577 - RNA, 19 nt, Artificial Sequence
  Description of Artificial Sequence: Synthetic oligonucleotide
cucuccagacaucaaacga

SEQ ID NO: 645578 - RNA, 19 nt, Artificial Sequence
  Description of Artificial Sequence: Synthetic oligonucleotide
uaggauuucgggguaucac

SEQ ID NO: 645579 - RNA, 19 nt, Artificial Sequence
  Description of Artificial Sequence: Synthetic oligonucleotide
cuuuguacauaaucugaaa

SEQ ID NO: 645580 - RNA, 19 nt, Artificial Sequence
  Description of Artificial Sequence: Synthetic oligonucleotide
uccuccgugggacucgagu

SEQ ID NO: 645581 - RNA, 19 nt, Artificial Sequence
  Description of Artificial Sequence: Synthetic oligonucleotide
ggcagacucggacucaucc

SEQ ID NO: 645582 - RNA, 19 nt, Artificial Sequence
  Description of Artificial Sequence: Synthetic oligonucleotide
cagacaacggagcagcaga

SEQ ID NO: 645583 - RNA, 19 nt, Artificial Sequence
  Description of Artificial Sequence: Synthetic oligonucleotide
aaagcguggucgaggagcu

SEQ ID NO: 645584 - RNA, 19 nt, Artificial Sequence
  Description of Artificial Sequence: Synthetic oligonucleotide
guuuuauggucauuaggcu

SEQ ID NO: 645585 - RNA, 19 nt, Artificial Sequence
  Description of Artificial Sequence: Synthetic oligonucleotide
ucuacccggucaauggcau

SEQ ID NO: 645586 - RNA, 19 nt, Artificial Sequence
  Description of Artificial Sequence: Synthetic oligonucleotide
gacucgagugacgacucag

SEQ ID NO: 645587 - RNA, 19 nt, Artificial Sequence
  Description of Artificial Sequence: Synthetic oligonucleotide
accgaacuagguuggggug

SEQ ID NO: 645588 - RNA, 19 nt, Artificial Sequence
  Description of Artificial Sequence: Synthetic oligonucleotide
gauacgcuggcucuucucu

SEQ ID NO: 645589 - RNA, 19 nt, Artificial Sequence
  Description of Artificial Sequence: Synthetic oligonucleotide
cuauggaugccaagcgauc

SEQ ID NO: 645590 - RNA, 19 nt, Artificial Sequence
  Description of Artificial Sequence: Synthetic oligonucleotide
acggccgcuugccagucac

SEQ ID NO: 645591 - RNA, 19 nt, Artificial Sequence
  Description of Artificial Sequence: Synthetic oligonucleotide
ggacugguuagcuucacuc

SEQ ID NO: 645592 - RNA, 19 nt, Artificial Sequence
  Description of Artificial Sequence: Synthetic oligonucleotide
ugccaagcgaucguuuucu

SEQ ID NO: 645593 - RNA, 19 nt, Artificial Sequence
  Description of Artificial Sequence: Synthetic oligonucleotide
ucaggacguaauucaucca

SEQ ID NO: 645594 - RNA, 19 nt, Artificial Sequence
  Description of Artificial Sequence: Synthetic oligonucleotide
uccuaugacguggccaaug

SEQ ID NO: 645595 - RNA, 19 nt, Artificial Sequence
  Description of Artificial Sequence: Synthetic oligonucleotide
uuuucacuuacgagccuuu

SEQ ID NO: 645596 - RNA, 19 nt, Artificial Sequence
  Description of Artificial Sequence: Synthetic oligonucleotide
uacgcuggcucuucucucu

SEQ ID NO: 645597 - RNA, 19 nt, Artificial Sequence
  Description of Artificial Sequence: Synthetic oligonucleotide
gguuccgagcgucggaagg

SEQ ID NO: 645598 - RNA, 19 nt, Artificial Sequence
  Description of Artificial Sequence: Synthetic oligonucleotide
auuuggucaggacguaauu

SEQ ID NO: 645599 - RNA, 19 nt, Artificial Sequence
  Description of Artificial Sequence: Synthetic oligonucleotide
guugauccacuugagucac

SEQ ID NO: 645600 - RNA, 19 nt, Artificial Sequence
  Description of Artificial Sequence: Synthetic oligonucleotide
aguuguagcccugaaucau

SEQ ID NO: 645601 - RNA, 19 nt, Artificial Sequence
  Description of Artificial Sequence: Synthetic oligonucleotide
guaccgaacuagguugggg

SEQ ID NO: 645602 - RNA, 19 nt, Artificial Sequence
  Description of Artificial Sequence: Synthetic oligonucleotide
cuaaaucccucugggguug

SEQ ID NO: 645603 - RNA, 19 nt, Artificial Sequence
  Description of Artificial Sequence: Synthetic oligonucleotide
ucggggcaccuucacagga

SEQ ID NO: 645604 - RNA, 19 nt, Artificial Sequence
  Description of Artificial Sequence: Synthetic oligonucleotide
ugaguguucgaagcuccca

SEQ ID NO: 645605 - RNA, 19 nt, Artificial Sequence
  Description of Artificial Sequence: Synthetic oligonucleotide
ccauguaagcugcuguucc

SEQ ID NO: 645606 - RNA, 19 nt, Artificial Sequence
  Description of Artificial Sequence: Synthetic oligonucleotide
uacuaggccacggacuggu

SEQ ID NO: 645607 - RNA, 19 nt, Artificial Sequence
  Description of Artificial Sequence: Synthetic oligonucleotide
gaacgucaccuuccucagg

SEQ ID NO: 645608 - RNA, 19 nt, Artificial Sequence
  Description of Artificial Sequence: Synthetic oligonucleotide
cauugcuucucgguaguac

SEQ ID NO: 645609 - RNA, 19 nt, Artificial Sequence
  Description of Artificial Sequence: Synthetic oligonucleotide
gauuucgggguaucacaga

SEQ ID NO: 645610 - RNA, 19 nt, Artificial Sequence
  Description of Artificial Sequence: Synthetic oligonucleotide
ccuugauaguuuuaugguc

SEQ ID NO: 645611 - RNA, 19 nt, Artificial Sequence
  Description of Artificial Sequence: Synthetic oligonucleotide
ugacaaaagcguggucgag

SEQ ID NO: 645612 - RNA, 19 nt, Artificial Sequence
  Description of Artificial Sequence: Synthetic oligonucleotide
agccuuugcauaacaaacu

SEQ ID NO: 645613 - RNA, 19 nt, Artificial Sequence
  Description of Artificial Sequence: Synthetic oligonucleotide
cccgugucgacgcugaugc

SEQ ID NO: 645614 - RNA, 19 nt, Artificial Sequence
  Description of Artificial Sequence: Synthetic oligonucleotide
gaguguucgaagcucccaa

SEQ ID NO: 645615 - RNA, 19 nt, Artificial Sequence
  Description of Artificial Sequence: Synthetic oligonucleotide
caucugugcaaaccuugac

SEQ ID NO: 645616 - RNA, 19 nt, Artificial Sequence
  Description of Artificial Sequence: Synthetic oligonucleotide
uagcgugcccucgucacag

SEQ ID NO: 645617 - RNA, 19 nt, Artificial Sequence
  Description of Artificial Sequence: Synthetic oligonucleotide
cugaacucuccagacauca

SEQ ID NO: 645618 - RNA, 19 nt, Artificial Sequence
  Description of Artificial Sequence: Synthetic oligonucleotide
uggucaggacguaauucau

SEQ ID NO: 645619 - RNA, 19 nt, Artificial Sequence
  Description of Artificial Sequence: Synthetic oligonucleotide
aucgaacuccagcgugaac

SEQ ID NO: 645620 - RNA, 19 nt, Artificial Sequence
  Description of Artificial Sequence: Synthetic oligonucleotide
cuucucgguaguacugcug

SEQ ID NO: 645621 - RNA, 19 nt, Artificial Sequence
  Description of Artificial Sequence: Synthetic oligonucleotide
agacucggacucauccacc

SEQ ID NO: 645622 - RNA, 19 nt, Artificial Sequence
  Description of Artificial Sequence: Synthetic oligonucleotide
gugucgacgcugaugcagg

SEQ ID NO: 645623 - RNA, 19 nt, Artificial Sequence
  Description of Artificial Sequence: Synthetic oligonucleotide
ugacagguuuggccggcgc

SEQ ID NO: 645624 - RNA, 19 nt, Artificial Sequence
  Description of Artificial Sequence: Synthetic oligonucleotide
gacaacggagcagcagaag

SEQ ID NO: 645625 - RNA, 19 nt, Artificial Sequence
  Description of Artificial Sequence: Synthetic oligonucleotide
cuuuccuaugacguggcca

SEQ ID NO: 645626 - RNA, 19 nt, Artificial Sequence
  Description of Artificial Sequence: Synthetic oligonucleotide
auggaugccaagcgaucgu

SEQ ID NO: 645627 - RNA, 19 nt, Artificial Sequence
  Description of Artificial Sequence: Synthetic oligonucleotide
uuccgaugaauagcuguga

SEQ ID NO: 645628 - RNA, 19 nt, Artificial Sequence
  Description of Artificial Sequence: Synthetic oligonucleotide
ugcuuagaggcagagucuu

SEQ ID NO: 645629 - RNA, 19 nt, Artificial Sequence
  Description of Artificial Sequence: Synthetic oligonucleotide
aguaccgaacuagguuggg

SEQ ID NO: 645630 - RNA, 19 nt, Artificial Sequence
  Description of Artificial Sequence: Synthetic oligonucleotide
uugagucacuucgaggaua

SEQ ID NO: 645631 - RNA, 19 nt, Artificial Sequence
  Description of Artificial Sequence: Synthetic oligonucleotide
cuguuuaccucuccaggca

SEQ ID NO: 645632 - RNA, 19 nt, Artificial Sequence
  Description of Artificial Sequence: Synthetic oligonucleotide
agcucggguaauaacuuca

SEQ ID NO: 645633 - RNA, 19 nt, Artificial Sequence
  Description of Artificial Sequence: Synthetic oligonucleotide
ugguaccucggccacucuc

SEQ ID NO: 645634 - RNA, 19 nt, Artificial Sequence
  Description of Artificial Sequence: Synthetic oligonucleotide
ucagggaucgguggcuugu

SEQ ID NO: 645635 - RNA, 19 nt, Artificial Sequence
  Description of Artificial Sequence: Synthetic oligonucleotide
uccucuagcgugcccucgu

SEQ ID NO: 645636 - RNA, 19 nt, Artificial Sequence
  Description of Artificial Sequence: Synthetic oligonucleotide
ggaucgguggcuugugccc

SEQ ID NO: 645637 - RNA, 19 nt, Artificial Sequence
  Description of Artificial Sequence: Synthetic oligonucleotide
aguuguguucauacucaug

SEQ ID NO: 645638 - RNA, 19 nt, Artificial Sequence
  Description of Artificial Sequence: Synthetic oligonucleotide
cacuggaaccucugguuuc

SEQ ID NO: 645639 - RNA, 19 nt, Artificial Sequence
  Description of Artificial Sequence: Synthetic oligonucleotide
auguaagcugcuguuccca

SEQ ID NO: 645640 - RNA, 19 nt, Artificial Sequence
  Description of Artificial Sequence: Synthetic oligonucleotide
gaucgguggcuugugcccc

SEQ ID NO: 645641 - RNA, 19 nt, Artificial Sequence
  Description of Artificial Sequence: Synthetic oligonucleotide
uuuccgggcaaagcuuaug

SEQ ID NO: 645642 - RNA, 19 nt, Artificial Sequence
  Description of Artificial Sequence: Synthetic oligonucleotide
uagcucggguaauaacuuc

SEQ ID NO: 645643 - RNA, 19 nt, Artificial Sequence
  Description of Artificial Sequence: Synthetic oligonucleotide
cuaaugaguguucgaagcu

SEQ ID NO: 645644 - RNA, 19 nt, Artificial Sequence
  Description of Artificial Sequence: Synthetic oligonucleotide
gucauuaggcugaaaccga

SEQ ID NO: 645645 - RNA, 19 nt, Artificial Sequence
  Description of Artificial Sequence: Synthetic oligonucleotide
cggguaauaacuucaggug

SEQ ID NO: 645646 - RNA, 19 nt, Artificial Sequence
  Description of Artificial Sequence: Synthetic oligonucleotide
ucucgauaucuccucucuu

SEQ ID NO: 645647 - RNA, 19 nt, Artificial Sequence
  Description of Artificial Sequence: Synthetic oligonucleotide
acucucacauuuggucagg

SEQ ID NO: 645648 - RNA, 19 nt, Artificial Sequence
  Description of Artificial Sequence: Synthetic oligonucleotide
ccuaugacguggccaaugc

SEQ ID NO: 645649 - RNA, 19 nt, Artificial Sequence
  Description of Artificial Sequence: Synthetic oligonucleotide
caaaguaccgaacuagguu

SEQ ID NO: 645650 - RNA, 19 nt, Artificial Sequence
  Description of Artificial Sequence: Synthetic oligonucleotide
uaaaucccucugggguugg

SEQ ID NO: 645651 - RNA, 19 nt, Artificial Sequence
  Description of Artificial Sequence: Synthetic oligonucleotide
gaugagguguggguuggga

SEQ ID NO: 645652 - RNA, 19 nt, Artificial Sequence
  Description of Artificial Sequence: Synthetic oligonucleotide
gggaucgguggcuugugcc

SEQ ID NO: 645653 - RNA, 19 nt, Artificial Sequence
  Description of Artificial Sequence: Synthetic oligonucleotide
uugugccccauucccacuu

SEQ ID NO: 645654 - RNA, 19 nt, Artificial Sequence
  Description of Artificial Sequence: Synthetic oligonucleotide
uugacagguuuggccggcg

SEQ ID NO: 645655 - RNA, 19 nt, Artificial Sequence
  Description of Artificial Sequence: Synthetic oligonucleotide
uuuggccggcgcaggguca

SEQ ID NO: 645656 - RNA, 19 nt, Artificial Sequence
  Description of Artificial Sequence: Synthetic oligonucleotide
ggcuguuccgaugaauagc

SEQ ID NO: 645657 - RNA, 19 nt, Artificial Sequence
  Description of Artificial Sequence: Synthetic oligonucleotide
ucaugccacggccgcuugc

SEQ ID NO: 645658 - RNA, 19 nt, Artificial Sequence
  Description of Artificial Sequence: Synthetic oligonucleotide
aagcuuuacugagcaucca

SEQ ID NO: 645659 - RNA, 19 nt, Artificial Sequence
  Description of Artificial Sequence: Synthetic oligonucleotide
gcgagaggaaauccuuucc

SEQ ID NO: 645660 - RNA, 19 nt, Artificial Sequence
  Description of Artificial Sequence: Synthetic oligonucleotide
acgcuccgagugcuaaauc

SEQ ID NO: 645661 - RNA, 19 nt, Artificial Sequence
  Description of Artificial Sequence: Synthetic oligonucleotide
agcgugaacaugugaucua

SEQ ID NO: 645662 - RNA, 19 nt, Artificial Sequence
  Description of Artificial Sequence: Synthetic oligonucleotide
guccagaugacgugaggaa

SEQ ID NO: 645663 - RNA, 19 nt, Artificial Sequence
  Description of Artificial Sequence: Synthetic oligonucleotide
guggcaucggggcaccuuc

SEQ ID NO: 645664 - RNA, 19 nt, Artificial Sequence
  Description of Artificial Sequence: Synthetic oligonucleotide
acgacacaccccagacucc

SEQ ID NO: 645665 - RNA, 19 nt, Artificial Sequence
  Description of Artificial Sequence: Synthetic oligonucleotide
guuuggccggcgcaggguc

SEQ ID NO: 645666 - RNA, 19 nt, Artificial Sequence
  Description of Artificial Sequence: Synthetic oligonucleotide
cgaacccaaaguuguagcc

SEQ ID NO: 645667 - RNA, 19 nt, Artificial Sequence
  Description of Artificial Sequence: Synthetic oligonucleotide
aucuacccggucaauggca

SEQ ID NO: 645668 - RNA, 19 nt, Artificial Sequence
  Description of Artificial Sequence: Synthetic oligonucleotide
caaaagcguggucgaggag

SEQ ID NO: 645669 - RNA, 19 nt, Artificial Sequence
  Description of Artificial Sequence: Synthetic oligonucleotide
agugcgagaggaaauccuu

SEQ ID NO: 645670 - RNA, 19 nt, Artificial Sequence
  Description of Artificial Sequence: Synthetic oligonucleotide
gaugccaagcgaucguuuu

SEQ ID NO: 645671 - RNA, 19 nt, Artificial Sequence
  Description of Artificial Sequence: Synthetic oligonucleotide
ucauaggauuucgggguau

SEQ ID NO: 645672 - RNA, 19 nt, Artificial Sequence
  Description of Artificial Sequence: Synthetic oligonucleotide
cauaggauuucgggguauc

SEQ ID NO: 645673 - RNA, 19 nt, Artificial Sequence
  Description of Artificial Sequence: Synthetic oligonucleotide
cuaugacgacacaccccag

SEQ ID NO: 645674 - RNA, 19 nt, Artificial Sequence
  Description of Artificial Sequence: Synthetic oligonucleotide
ucgaagcucccaacuucuc

SEQ ID NO: 645675 - RNA, 19 nt, Artificial Sequence
  Description of Artificial Sequence: Synthetic oligonucleotide
uucagucuuggaggguuaa

SEQ ID NO: 645676 - RNA, 19 nt, Artificial Sequence
  Description of Artificial Sequence: Synthetic oligonucleotide
ccucauuucucgauaucuc

SEQ ID NO: 645677 - RNA, 19 nt, Artificial Sequence
  Description of Artificial Sequence: Synthetic oligonucleotide
ccagacaucaaacgaacaa

SEQ ID NO: 645678 - RNA, 19 nt, Artificial Sequence
  Description of Artificial Sequence: Synthetic oligonucleotide
cagggauucuguucacaca

SEQ ID NO: 645679 - RNA, 19 nt, Artificial Sequence
  Description of Artificial Sequence: Synthetic oligonucleotide
ccaaugcacucauucauca

SEQ ID NO: 645680 - RNA, 19 nt, Artificial Sequence
  Description of Artificial Sequence: Synthetic oligonucleotide
uugccaugguuccgagcgu

SEQ ID NO: 645681 - RNA, 19 nt, Artificial Sequence
  Description of Artificial Sequence: Synthetic oligonucleotide
uuacgagccuuugcauaac

SEQ ID NO: 645682 - RNA, 19 nt, Artificial Sequence
  Description of Artificial Sequence: Synthetic oligonucleotide
gugcaguguucagucuugg

SEQ ID NO: 645683 - RNA, 19 nt, Artificial Sequence
  Description of Artificial Sequence: Synthetic oligonucleotide
ugucgacgcugaugcaggu

SEQ ID NO: 645684 - RNA, 19 nt, Artificial Sequence
  Description of Artificial Sequence: Synthetic oligonucleotide
gccguggucguggaggacg

SEQ ID NO: 645685 - RNA, 19 nt, Artificial Sequence
  Description of Artificial Sequence: Synthetic oligonucleotide
uccuuuagcucggguaaua

SEQ ID NO: 645686 - RNA, 19 nt, Artificial Sequence
  Description of Artificial Sequence: Synthetic oligonucleotide
cuguuccgaugaauagcug

SEQ ID NO: 645687 - RNA, 19 nt, Artificial Sequence
  Description of Artificial Sequence: Synthetic oligonucleotide
gcuccgagugcuaaauccc

SEQ ID NO: 645688 - RNA, 19 nt, Artificial Sequence
  Description of Artificial Sequence: Synthetic oligonucleotide
cuaugacguggccaaugca

SEQ ID NO: 645689 - RNA, 19 nt, Artificial Sequence
  Description of Artificial Sequence: Synthetic oligonucleotide
caggacguaauucauccau

SEQ ID NO: 645690 - RNA, 19 nt, Artificial Sequence
  Description of Artificial Sequence: Synthetic oligonucleotide
cagauaucugcugcacguc

SEQ ID NO: 645691 - RNA, 19 nt, Artificial Sequence
  Description of Artificial Sequence: Synthetic oligonucleotide
guguucgaagcucccaacu

SEQ ID NO: 645692 - RNA, 19 nt, Artificial Sequence
  Description of Artificial Sequence: Synthetic oligonucleotide
ugauaguuuuauggucauu

SEQ ID NO: 645693 - RNA, 19 nt, Artificial Sequence
  Description of Artificial Sequence: Synthetic oligonucleotide
cucggcagucuucauguaa

SEQ ID NO: 645694 - RNA, 19 nt, Artificial Sequence
  Description of Artificial Sequence: Synthetic oligonucleotide
gcuugaugccuucaaauau

SEQ ID NO: 645695 - RNA, 19 nt, Artificial Sequence
  Description of Artificial Sequence: Synthetic oligonucleotide
cuacuaggccacggacugg

SEQ ID NO: 645696 - RNA, 19 nt, Artificial Sequence
  Description of Artificial Sequence: Synthetic oligonucleotide
ccagaugacgugaggaaga

SEQ ID NO: 645697 - RNA, 19 nt, Artificial Sequence
  Description of Artificial Sequence: Synthetic oligonucleotide
cacuacuaggccacggacu

SEQ ID NO: 645698 - RNA, 19 nt, Artificial Sequence
  Description of Artificial Sequence: Synthetic oligonucleotide
uggaugccaagcgaucguu

SEQ ID NO: 645699 - RNA, 19 nt, Artificial Sequence
  Description of Artificial Sequence: Synthetic oligonucleotide
augguuccgagcgucggaa

SEQ ID NO: 645700 - RNA, 19 nt, Artificial Sequence
  Description of Artificial Sequence: Synthetic oligonucleotide
ccuccgugggacucgagug

SEQ ID NO: 645701 - RNA, 19 nt, Artificial Sequence
  Description of Artificial Sequence: Synthetic oligonucleotide
caaugcacucauucaucaa

SEQ ID NO: 645702 - RNA, 19 nt, Artificial Sequence
  Description of Artificial Sequence: Synthetic oligonucleotide
ggugccauguaagcugcug

SEQ ID NO: 645703 - RNA, 19 nt, Artificial Sequence
  Description of Artificial Sequence: Synthetic oligonucleotide
cgaagcucccaacuucucc

SEQ ID NO: 645704 - RNA, 19 nt, Artificial Sequence
  Description of Artificial Sequence: Synthetic oligonucleotide
cauaacaaacuuguagcuu

SEQ ID NO: 645705 - RNA, 19 nt, Artificial Sequence
  Description of Artificial Sequence: Synthetic oligonucleotide
gguaccucggccacucuca

SEQ ID NO: 645706 - RNA, 19 nt, Artificial Sequence
  Description of Artificial Sequence: Synthetic oligonucleotide
aucaaacgaacaacuucuu

SEQ ID NO: 645707 - RNA, 19 nt, Artificial Sequence
  Description of Artificial Sequence: Synthetic oligonucleotide
gcucggguaauaacuucag

SEQ ID NO: 645708 - RNA, 19 nt, Artificial Sequence
  Description of Artificial Sequence: Synthetic oligonucleotide
aggacguaauucauccauu

SEQ ID NO: 645709 - RNA, 19 nt, Artificial Sequence
  Description of Artificial Sequence: Synthetic oligonucleotide
gcagugcgagaggaaaucc

SEQ ID NO: 645710 - RNA, 19 nt, Artificial Sequence
  Description of Artificial Sequence: Synthetic oligonucleotide
cuccgugggacucgaguga

SEQ ID NO: 645711 - RNA, 19 nt, Artificial Sequence
  Description of Artificial Sequence: Synthetic oligonucleotide
ccgagcgucggaaggcacg

SEQ ID NO: 645712 - RNA, 19 nt, Artificial Sequence
  Description of Artificial Sequence: Synthetic oligonucleotide
gcuguuccgaugaauagcu

SEQ ID NO: 645713 - RNA, 19 nt, Artificial Sequence
  Description of Artificial Sequence: Synthetic oligonucleotide
agacaacggagcagcagaa

SEQ ID NO: 645714 - RNA, 19 nt, Artificial Sequence
  Description of Artificial Sequence: Synthetic oligonucleotide
gugccccauucccacuuug

SEQ ID NO: 645715 - RNA, 19 nt, Artificial Sequence
  Description of Artificial Sequence: Synthetic oligonucleotide
gcgugaacaugugaucuac

SEQ ID NO: 645716 - RNA, 19 nt, Artificial Sequence
  Description of Artificial Sequence: Synthetic oligonucleotide
cuucuccguguugauccac

SEQ ID NO: 645717 - RNA, 19 nt, Artificial Sequence
  Description of Artificial Sequence: Synthetic oligonucleotide
guuuucacuuacgagccuu

SEQ ID NO: 645718 - RNA, 19 nt, Artificial Sequence
  Description of Artificial Sequence: Synthetic oligonucleotide
cacggacugguuagcuuca

SEQ ID NO: 645719 - RNA, 19 nt, Artificial Sequence
  Description of Artificial Sequence: Synthetic oligonucleotide
ccgaacuagguuggggugc

SEQ ID NO: 645720 - RNA, 19 nt, Artificial Sequence
  Description of Artificial Sequence: Synthetic oligonucleotide
aucgguggcuugugcccca

SEQ ID NO: 645721 - RNA, 19 nt, Artificial Sequence
  Description of Artificial Sequence: Synthetic oligonucleotide
cucuagcgugcccucguca

SEQ ID NO: 645722 - RNA, 19 nt, Artificial Sequence
  Description of Artificial Sequence: Synthetic oligonucleotide
ggucaggacguaauucauc

SEQ ID NO: 645723 - RNA, 19 nt, Artificial Sequence
  Description of Artificial Sequence: Synthetic oligonucleotide
ggcagugcgagaggaaauc

SEQ ID NO: 645724 - RNA, 19 nt, Artificial Sequence
  Description of Artificial Sequence: Synthetic oligonucleotide
uguggcaucggggcaccuu

SEQ ID NO: 645725 - RNA, 19 nt, Artificial Sequence
  Description of Artificial Sequence: Synthetic oligonucleotide
cagcgugaacaugugaucu

SEQ ID NO: 645726 - RNA, 19 nt, Artificial Sequence
  Description of Artificial Sequence: Synthetic oligonucleotide
ccgaugaauagcugugaca

SEQ ID NO: 645727 - RNA, 19 nt, Artificial Sequence
  Description of Artificial Sequence: Synthetic oligonucleotide
cugcuuagaggcagagucu

SEQ ID NO: 645728 - RNA, 19 nt, Artificial Sequence
  Description of Artificial Sequence: Synthetic oligonucleotide
ggucugguaccucggccac

SEQ ID NO: 645729 - RNA, 19 nt, Artificial Sequence
  Description of Artificial Sequence: Synthetic oligonucleotide
gugcccucgucacaguacu

SEQ ID NO: 645730 - RNA, 19 nt, Artificial Sequence
  Description of Artificial Sequence: Synthetic oligonucleotide
acgagccuuugcauaacaa

SEQ ID NO: 645731 - RNA, 19 nt, Artificial Sequence
  Description of Artificial Sequence: Synthetic oligonucleotide
ggaguacagccugaugaca

SEQ ID NO: 645732 - RNA, 19 nt, Artificial Sequence
  Description of Artificial Sequence: Synthetic oligonucleotide
cagugcgagaggaaauccu

SEQ ID NO: 645733 - RNA, 19 nt, Artificial Sequence
  Description of Artificial Sequence: Synthetic oligonucleotide
cuagcgugcccucgucaca

SEQ ID NO: 645734 - RNA, 19 nt, Artificial Sequence
  Description of Artificial Sequence: Synthetic oligonucleotide
ugcccucgucacaguacuc

SEQ ID NO: 645735 - RNA, 19 nt, Artificial Sequence
  Description of Artificial Sequence: Synthetic oligonucleotide
cgugucgacgcugaugcag

SEQ ID NO: 645736 - RNA, 19 nt, Artificial Sequence
  Description of Artificial Sequence: Synthetic oligonucleotide
ggccaaugcacucauucau

SEQ ID NO: 645737 - RNA, 19 nt, Artificial Sequence
  Description of Artificial Sequence: Synthetic oligonucleotide
gcuuuccuaugacguggcc

SEQ ID NO: 645738 - RNA, 19 nt, Artificial Sequence
  Description of Artificial Sequence: Synthetic oligonucleotide
ggacguaauucauccauuu

SEQ ID NO: 645739 - RNA, 19 nt, Artificial Sequence
  Description of Artificial Sequence: Synthetic oligonucleotide
cccugaaucauugcuucuc

SEQ ID NO: 645740 - RNA, 19 nt, Artificial Sequence
  Description of Artificial Sequence: Synthetic oligonucleotide
aggagguuucacagucaga

SEQ ID NO: 645741 - RNA, 19 nt, Artificial Sequence
  Description of Artificial Sequence: Synthetic oligonucleotide
ggcuuuccuaugacguggc

SEQ ID NO: 645742 - RNA, 19 nt, Artificial Sequence
  Description of Artificial Sequence: Synthetic oligonucleotide
ccguguugauccacuugag

SEQ ID NO: 645743 - RNA, 19 nt, Artificial Sequence
  Description of Artificial Sequence: Synthetic oligonucleotide
cgggguaucacagacuuga

SEQ ID NO: 645744 - RNA, 19 nt, Artificial Sequence
  Description of Artificial Sequence: Synthetic oligonucleotide
ccacaccaaaguaccgaac

SEQ ID NO: 645745 - RNA, 19 nt, Artificial Sequence
  Description of Artificial Sequence: Synthetic oligonucleotide
auuuccgggcaaagcuuau

SEQ ID NO: 645746 - RNA, 19 nt, Artificial Sequence
  Description of Artificial Sequence: Synthetic oligonucleotide
cuugaccaaugauauucuu

SEQ ID NO: 645747 - RNA, 19 nt, Artificial Sequence
  Description of Artificial Sequence: Synthetic oligonucleotide
gcaaacucaggaagucauc

SEQ ID NO: 645748 - RNA, 19 nt, Artificial Sequence
  Description of Artificial Sequence: Synthetic oligonucleotide
gccauguaagcugcuguuc

SEQ ID NO: 645749 - RNA, 19 nt, Artificial Sequence
  Description of Artificial Sequence: Synthetic oligonucleotide
gcuauggaugccaagcgau

SEQ ID NO: 645750 - RNA, 19 nt, Artificial Sequence
  Description of Artificial Sequence: Synthetic oligonucleotide
aagcguggucgaggagcug

SEQ ID NO: 645751 - RNA, 19 nt, Artificial Sequence
  Description of Artificial Sequence: Synthetic oligonucleotide
gcaucgaacuccagcguga

SEQ ID NO: 645752 - RNA, 19 nt, Artificial Sequence
  Description of Artificial Sequence: Synthetic oligonucleotide
gccaugguuccgagcgucg

SEQ ID NO: 645753 - RNA, 19 nt, Artificial Sequence
  Description of Artificial Sequence: Synthetic oligonucleotide
agaugacgugaggaagaua

SEQ ID NO: 645754 - RNA, 19 nt, Artificial Sequence
  Description of Artificial Sequence: Synthetic oligonucleotide
cgagccuuugcauaacaaa

SEQ ID NO: 645755 - RNA, 19 nt, Artificial Sequence
  Description of Artificial Sequence: Synthetic oligonucleotide
cuugagucacuucgaggau

SEQ ID NO: 645756 - RNA, 19 nt, Artificial Sequence
  Description of Artificial Sequence: Synthetic oligonucleotide
ggcaucggggcaccuucac

SEQ ID NO: 645757 - RNA, 19 nt, Artificial Sequence
  Description of Artificial Sequence: Synthetic oligonucleotide
cagggaucgguggcuugug

SEQ ID NO: 645758 - RNA, 19 nt, Artificial Sequence
  Description of Artificial Sequence: Synthetic oligonucleotide
ccaaaguaccgaacuaggu

SEQ ID NO: 645759 - RNA, 19 nt, Artificial Sequence
  Description of Artificial Sequence: Synthetic oligonucleotide
cacuuacgagccuuugcau

SEQ ID NO: 645760 - RNA, 19 nt, Artificial Sequence
  Description of Artificial Sequence: Synthetic oligonucleotide
gccaagcgaucguuuucug

SEQ ID NO: 645761 - RNA, 19 nt, Artificial Sequence
  Description of Artificial Sequence: Synthetic oligonucleotide
caucgaacuccagcgugaa

SEQ ID NO: 645762 - RNA, 19 nt, Artificial Sequence
  Description of Artificial Sequence: Synthetic oligonucleotide
ggaagauauuggcaccuuu

SEQ ID NO: 645763 - RNA, 19 nt, Artificial Sequence
  Description of Artificial Sequence: Synthetic oligonucleotide
augacgugaggaagauauu

SEQ ID NO: 645764 - RNA, 19 nt, Artificial Sequence
  Description of Artificial Sequence: Synthetic oligonucleotide
gugacgacucagggaucug

SEQ ID NO: 645765 - RNA, 19 nt, Artificial Sequence
  Description of Artificial Sequence: Synthetic oligonucleotide
acucggcagucuucaugua

SEQ ID NO: 645766 - RNA, 19 nt, Artificial Sequence
  Description of Artificial Sequence: Synthetic oligonucleotide
agagccggacugacuucug

SEQ ID NO: 645767 - RNA, 19 nt, Artificial Sequence
  Description of Artificial Sequence: Synthetic oligonucleotide
gcgucggaaggcacgcucc

SEQ ID NO: 645768 - RNA, 19 nt, Artificial Sequence
  Description of Artificial Sequence: Synthetic oligonucleotide
gggacucgagugacgacuc

SEQ ID NO: 645769 - RNA, 19 nt, Artificial Sequence
  Description of Artificial Sequence: Synthetic oligonucleotide
uagcuucuaugggccccug

SEQ ID NO: 645770 - RNA, 19 nt, Artificial Sequence
  Description of Artificial Sequence: Synthetic oligonucleotide
agcgugcccucgucacagu

SEQ ID NO: 645771 - RNA, 19 nt, Artificial Sequence
  Description of Artificial Sequence: Synthetic oligonucleotide
cgagugcuaaaucccucug

SEQ ID NO: 645772 - RNA, 19 nt, Artificial Sequence
  Description of Artificial Sequence: Synthetic oligonucleotide
cuaugggccccugcuuaga

SEQ ID NO: 645773 - RNA, 19 nt, Artificial Sequence
  Description of Artificial Sequence: Synthetic oligonucleotide
cgugcccucgucacaguac

SEQ ID NO: 645774 - RNA, 19 nt, Artificial Sequence
  Description of Artificial Sequence: Synthetic oligonucleotide
ccgggcaaagcuuauguau

SEQ ID NO: 645775 - RNA, 19 nt, Artificial Sequence
  Description of Artificial Sequence: Synthetic oligonucleotide
gccuugaguggcccaccug

SEQ ID NO: 645776 - RNA, 19 nt, Artificial Sequence
  Description of Artificial Sequence: Synthetic oligonucleotide
guucagucuuggaggguua

SEQ ID NO: 645777 - RNA, 19 nt, Artificial Sequence
  Description of Artificial Sequence: Synthetic oligonucleotide
cugcacguccauggccuuc

SEQ ID NO: 645778 - RNA, 19 nt, Artificial Sequence
  Description of Artificial Sequence: Synthetic oligonucleotide
cgucggaaggcacgcuccg

SEQ ID NO: 645779 - RNA, 19 nt, Artificial Sequence
  Description of Artificial Sequence: Synthetic oligonucleotide
gaucguuuucugggacacu

SEQ ID NO: 645780 - RNA, 19 nt, Artificial Sequence
  Description of Artificial Sequence: Synthetic oligonucleotide
cgaacaacuucuuuaugau

SEQ ID NO: 645781 - RNA, 19 nt, Artificial Sequence
  Description of Artificial Sequence: Synthetic oligonucleotide
gggcaaagcuuauguauuu

SEQ ID NO: 645782 - RNA, 19 nt, Artificial Sequence
  Description of Artificial Sequence: Synthetic oligonucleotide
caaccgugaucugcuugga

SEQ ID NO: 645783 - RNA, 19 nt, Artificial Sequence
  Description of Artificial Sequence: Synthetic oligonucleotide
ggacucgagugacgacuca

SEQ ID NO: 645784 - RNA, 19 nt, Artificial Sequence
  Description of Artificial Sequence: Synthetic oligonucleotide
cagcaucgaacuccagcgu

SEQ ID NO: 645785 - RNA, 19 nt, Artificial Sequence
  Description of Artificial Sequence: Synthetic oligonucleotide
cacauuuggucaggacgua

SEQ ID NO: 645786 - RNA, 19 nt, Artificial Sequence
  Description of Artificial Sequence: Synthetic oligonucleotide
ggacguugauggcaaccgu

SEQ ID NO: 645787 - RNA, 19 nt, Artificial Sequence
  Description of Artificial Sequence: Synthetic oligonucleotide
gccauuugaacgucaccuu

SEQ ID NO: 645788 - RNA, 19 nt, Artificial Sequence
  Description of Artificial Sequence: Synthetic oligonucleotide
cagaugacgugaggaagau

SEQ ID NO: 645789 - RNA, 19 nt, Artificial Sequence
  Description of Artificial Sequence: Synthetic oligonucleotide
cccaaaguuguagcccuga

SEQ ID NO: 645790 - RNA, 19 nt, Artificial Sequence
  Description of Artificial Sequence: Synthetic oligonucleotide
cacgcuccgagugcuaaau

SEQ ID NO: 645791 - RNA, 19 nt, Artificial Sequence
  Description of Artificial Sequence: Synthetic oligonucleotide
gugcgagaggaaauccuuu

SEQ ID NO: 645792 - RNA, 19 nt, Artificial Sequence
  Description of Artificial Sequence: Synthetic oligonucleotide
ucgguggcuugugccccau

SEQ ID NO: 645793 - RNA, 19 nt, Artificial Sequence
  Description of Artificial Sequence: Synthetic oligonucleotide
ggcacgcuccgagugcuaa

SEQ ID NO: 645794 - RNA, 19 nt, Artificial Sequence
  Description of Artificial Sequence: Synthetic oligonucleotide
guggcagacucggacucau

SEQ ID NO: 645795 - RNA, 19 nt, Artificial Sequence
  Description of Artificial Sequence: Synthetic oligonucleotide
ccggacugacuucuggaua

SEQ ID NO: 645796 - RNA, 19 nt, Artificial Sequence
  Description of Artificial Sequence: Synthetic oligonucleotide
gcguggucgaggagcuggc

SEQ ID NO: 645797 - RNA, 19 nt, Artificial Sequence
  Description of Artificial Sequence: Synthetic oligonucleotide
cuucgaggauacgcuggcu

SEQ ID NO: 645798 - RNA, 19 nt, Artificial Sequence
  Description of Artificial Sequence: Synthetic oligonucleotide
gcacgcuccgagugcuaaa

SEQ ID NO: 645799 - RNA, 19 nt, Artificial Sequence
  Description of Artificial Sequence: Synthetic oligonucleotide
gguuuggccggcgcagggu

SEQ ID NO: 645800 - RNA, 19 nt, Artificial Sequence
  Description of Artificial Sequence: Synthetic oligonucleotide
cacggccgcuugccaguca

SEQ ID NO: 645801 - RNA, 19 nt, Artificial Sequence
  Description of Artificial Sequence: Synthetic oligonucleotide
guggguugggagggucacu

SEQ ID NO: 645802 - RNA, 19 nt, Artificial Sequence
  Description of Artificial Sequence: Synthetic oligonucleotide
gucugguaccucggccacu

SEQ ID NO: 645803 - RNA, 19 nt, Artificial Sequence
  Description of Artificial Sequence: Synthetic oligonucleotide
ggucguggaggacguugau

SEQ ID NO: 645804 - RNA, 19 nt, Artificial Sequence
  Description of Artificial Sequence: Synthetic oligonucleotide
ggaugccaagcgaucguuu

SEQ ID NO: 645805 - RNA, 19 nt, Artificial Sequence
  Description of Artificial Sequence: Synthetic oligonucleotide
cugguaccucggccacucu

SEQ ID NO: 645806 - RNA, 19 nt, Artificial Sequence
  Description of Artificial Sequence: Synthetic oligonucleotide
cggccgcuugccagucacc

SEQ ID NO: 645807 - RNA, 19 nt, Artificial Sequence
  Description of Artificial Sequence: Synthetic oligonucleotide
ccguggucguggaggacgu

SEQ ID NO: 645808 - RNA, 19 nt, Artificial Sequence
  Description of Artificial Sequence: Synthetic oligonucleotide
cgaacuagguuggggugcu

SEQ ID NO: 645809 - RNA, 19 nt, Artificial Sequence
  Description of Artificial Sequence: Synthetic oligonucleotide
cguggcagacucggacuca

SEQ ID NO: 645810 - RNA, 19 nt, Artificial Sequence
  Description of Artificial Sequence: Synthetic oligonucleotide
ccgugucgacgcugaugca

SEQ ID NO: 645811 - RNA, 19 nt, Artificial Sequence
  Description of Artificial Sequence: Synthetic oligonucleotide
cuguggcaucggggcaccu

SEQ ID NO: 645812 - RNA, 19 nt, Artificial Sequence
  Description of Artificial Sequence: Synthetic oligonucleotide
uuaaacugaucacauaugg

SEQ ID NO: 645813 - RNA, 19 nt, Artificial Sequence
  Description of Artificial Sequence: Synthetic oligonucleotide
aaagcaagggcauaaaugu

SEQ ID NO: 645814 - RNA, 19 nt, Artificial Sequence
  Description of Artificial Sequence: Synthetic oligonucleotide
agaacauccaacaagagac

SEQ ID NO: 645815 - RNA, 19 nt, Artificial Sequence
  Description of Artificial Sequence: Synthetic oligonucleotide
ucuaccgucacauugaaga

SEQ ID NO: 645816 - RNA, 19 nt, Artificial Sequence
  Description of Artificial Sequence: Synthetic oligonucleotide
aauggcgaaggacagcugc

SEQ ID NO: 645817 - RNA, 19 nt, Artificial Sequence
  Description of Artificial Sequence: Synthetic oligonucleotide
uaaaguuaccauuaaacug

SEQ ID NO: 645818 - RNA, 19 nt, Artificial Sequence
  Description of Artificial Sequence: Synthetic oligonucleotide
ugaaguuuuagcuaaguga

SEQ ID NO: 645819 - RNA, 19 nt, Artificial Sequence
  Description of Artificial Sequence: Synthetic oligonucleotide
auacgaaugaccuuuaugu

SEQ ID NO: 645820 - RNA, 19 nt, Artificial Sequence
  Description of Artificial Sequence: Synthetic oligonucleotide
augaguauguacuuggcac

SEQ ID NO: 645821 - RNA, 19 nt, Artificial Sequence
  Description of Artificial Sequence: Synthetic oligonucleotide
cugaguaccaauuaucucc

SEQ ID NO: 645822 - RNA, 19 nt, Artificial Sequence
  Description of Artificial Sequence: Synthetic oligonucleotide
aaaguuaccauuaaacuga

SEQ ID NO: 645823 - RNA, 19 nt, Artificial Sequence
  Description of Artificial Sequence: Synthetic oligonucleotide
uucgaugacagaauacugg

SEQ ID NO: 645824 - RNA, 19 nt, Artificial Sequence
  Description of Artificial Sequence: Synthetic oligonucleotide
cauaaaacugaguaacacg

SEQ ID NO: 645825 - RNA, 19 nt, Artificial Sequence
  Description of Artificial Sequence: Synthetic oligonucleotide
uguuaauaagcugagaacu

SEQ ID NO: 645826 - RNA, 19 nt, Artificial Sequence
  Description of Artificial Sequence: Synthetic oligonucleotide
uucucaacgaguaaaccag

SEQ ID NO: 645827 - RNA, 19 nt, Artificial Sequence
  Description of Artificial Sequence: Synthetic oligonucleotide
aggucgauuugucacaucc

SEQ ID NO: 645828 - RNA, 19 nt, Artificial Sequence
  Description of Artificial Sequence: Synthetic oligonucleotide
uuuucggauguuccgaugg

SEQ ID NO: 645829 - RNA, 19 nt, Artificial Sequence
  Description of Artificial Sequence: Synthetic oligonucleotide
agagaaaagaugcugauaa

SEQ ID NO: 645830 - RNA, 19 nt, Artificial Sequence
  Description of Artificial Sequence: Synthetic oligonucleotide
uaauuaaauaaaguuacca

SEQ ID NO: 645831 - RNA, 19 nt, Artificial Sequence
  Description of Artificial Sequence: Synthetic oligonucleotide
uucuccauaaaacugagua

SEQ ID NO: 645832 - RNA, 19 nt, Artificial Sequence
  Description of Artificial Sequence: Synthetic oligonucleotide
gaugacagaauacuggcug

SEQ ID NO: 645833 - RNA, 19 nt, Artificial Sequence
  Description of Artificial Sequence: Synthetic oligonucleotide
acauacauauaugaaaagg

SEQ ID NO: 645834 - RNA, 19 nt, Artificial Sequence
  Description of Artificial Sequence: Synthetic oligonucleotide
uuuucugaguguaacaggu

SEQ ID NO: 645835 - RNA, 19 nt, Artificial Sequence
  Description of Artificial Sequence: Synthetic oligonucleotide
ugcuugacuaccaagguca

SEQ ID NO: 645836 - RNA, 19 nt, Artificial Sequence
  Description of Artificial Sequence: Synthetic oligonucleotide
uacauauaugaaaaggaac

SEQ ID NO: 645837 - RNA, 19 nt, Artificial Sequence
  Description of Artificial Sequence: Synthetic oligonucleotide
gaguaaaccagcuaaugug

SEQ ID NO: 645838 - RNA, 19 nt, Artificial Sequence
  Description of Artificial Sequence: Synthetic oligonucleotide
uuaauuaaauaaaguuacc

SEQ ID NO: 645839 - RNA, 19 nt, Artificial Sequence
  Description of Artificial Sequence: Synthetic oligonucleotide
aaaggauuccccuggagcu

SEQ ID NO: 645840 - RNA, 19 nt, Artificial Sequence
  Description of Artificial Sequence: Synthetic oligonucleotide
aguuguuuuaucaccaggc

SEQ ID NO: 645841 - RNA, 19 nt, Artificial Sequence
  Description of Artificial Sequence: Synthetic oligonucleotide
uuagcuaagugacauacaa

SEQ ID NO: 645842 - RNA, 19 nt, Artificial Sequence
  Description of Artificial Sequence: Synthetic oligonucleotide
ugaggaauaaauaggcaca

SEQ ID NO: 645843 - RNA, 19 nt, Artificial Sequence
  Description of Artificial Sequence: Synthetic oligonucleotide
uugaggaauaaauaggcac

SEQ ID NO: 645844 - RNA, 19 nt, Artificial Sequence
  Description of Artificial Sequence: Synthetic oligonucleotide
aacuugaggaauaaauagg

SEQ ID NO: 645845 - RNA, 19 nt, Artificial Sequence
  Description of Artificial Sequence: Synthetic oligonucleotide
ucuaacuccucauaggaga

SEQ ID NO: 645846 - RNA, 19 nt, Artificial Sequence
  Description of Artificial Sequence: Synthetic oligonucleotide
acgucuacuucauaugacc

SEQ ID NO: 645847 - RNA, 19 nt, Artificial Sequence
  Description of Artificial Sequence: Synthetic oligonucleotide
ucaucgguccacuugaugc

SEQ ID NO: 645848 - RNA, 19 nt, Artificial Sequence
  Description of Artificial Sequence: Synthetic oligonucleotide
acugaugagagucacucuc

SEQ ID NO: 645849 - RNA, 19 nt, Artificial Sequence
  Description of Artificial Sequence: Synthetic oligonucleotide
uguacuuauauguacacuu

SEQ ID NO: 645850 - RNA, 19 nt, Artificial Sequence
  Description of Artificial Sequence: Synthetic oligonucleotide
uacauaugggugcuguugg

SEQ ID NO: 645851 - RNA, 19 nt, Artificial Sequence
  Description of Artificial Sequence: Synthetic oligonucleotide
acauaaucuaugugugugc

SEQ ID NO: 645852 - RNA, 19 nt, Artificial Sequence
  Description of Artificial Sequence: Synthetic oligonucleotide
ucuuuaugcaccuuccagc

SEQ ID NO: 645853 - RNA, 19 nt, Artificial Sequence
  Description of Artificial Sequence: Synthetic oligonucleotide
uauaugaaaaggaacccuc

SEQ ID NO: 645854 - RNA, 19 nt, Artificial Sequence
  Description of Artificial Sequence: Synthetic oligonucleotide
ugggcaaaugagaacaucc

SEQ ID NO: 645855 - RNA, 19 nt, Artificial Sequence
  Description of Artificial Sequence: Synthetic oligonucleotide
uuguuuuaucaccaggcag

SEQ ID NO: 645856 - RNA, 19 nt, Artificial Sequence
  Description of Artificial Sequence: Synthetic oligonucleotide
agcuaagugacauacaaau

SEQ ID NO: 645857 - RNA, 19 nt, Artificial Sequence
  Description of Artificial Sequence: Synthetic oligonucleotide
uuugagaaauuuucggaug

SEQ ID NO: 645858 - RNA, 19 nt, Artificial Sequence
  Description of Artificial Sequence: Synthetic oligonucleotide
uccacuugaugcuaaaggc

SEQ ID NO: 645859 - RNA, 19 nt, Artificial Sequence
  Description of Artificial Sequence: Synthetic oligonucleotide
aagggcauaaauguuuuag

SEQ ID NO: 645860 - RNA, 19 nt, Artificial Sequence
  Description of Artificial Sequence: Synthetic oligonucleotide
uauugcuuuucaaagcugu

SEQ ID NO: 645861 - RNA, 19 nt, Artificial Sequence
  Description of Artificial Sequence: Synthetic oligonucleotide
aacaugugucaugaggcgc

SEQ ID NO: 645862 - RNA, 19 nt, Artificial Sequence
  Description of Artificial Sequence: Synthetic oligonucleotide
aaaagaacucccacuacuc

SEQ ID NO: 645863 - RNA, 19 nt, Artificial Sequence
  Description of Artificial Sequence: Synthetic oligonucleotide
aauacgcuggguucucaac

SEQ ID NO: 645864 - RNA, 19 nt, Artificial Sequence
  Description of Artificial Sequence: Synthetic oligonucleotide
aguuagacccucucuauag

SEQ ID NO: 645865 - RNA, 19 nt, Artificial Sequence
  Description of Artificial Sequence: Synthetic oligonucleotide
uuaagcacauaaucuaugu

SEQ ID NO: 645866 - RNA, 19 nt, Artificial Sequence
  Description of Artificial Sequence: Synthetic oligonucleotide
aauacuggcugagugcuuc

SEQ ID NO: 645867 - RNA, 19 nt, Artificial Sequence
  Description of Artificial Sequence: Synthetic oligonucleotide
  modified_base (3)..(3): a, c, u, g, unknown or other
ucnguuuugucuucaguug

SEQ ID NO: 645868 - RNA, 19 nt, Artificial Sequence
  Description of Artificial Sequence: Synthetic oligonucleotide
uuugaauccuggcaacaag

SEQ ID NO: 645869 - RNA, 19 nt, Artificial Sequence
  Description of Artificial Sequence: Synthetic oligonucleotide
uuuagagaaaaggauuccc

SEQ ID NO: 645870 - RNA, 19 nt, Artificial Sequence
  Description of Artificial Sequence: Synthetic oligonucleotide
  modified_base (4)..(4): a, c, u, g, unknown or other
uucnguuuugucuucaguu

SEQ ID NO: 645871 - RNA, 19 nt, Artificial Sequence
  Description of Artificial Sequence: Synthetic oligonucleotide
uaaucuaugugugugcaug

SEQ ID NO: 645872 - RNA, 19 nt, Artificial Sequence
  Description of Artificial Sequence: Synthetic oligonucleotide
ucucaguuguuuuaucacc

SEQ ID NO: 645873 - RNA, 19 nt, Artificial Sequence
  Description of Artificial Sequence: Synthetic oligonucleotide
uuucuagccaaagcaaggg

SEQ ID NO: 645874 - RNA, 19 nt, Artificial Sequence
  Description of Artificial Sequence: Synthetic oligonucleotide
ucauaugaccauucuaaga

SEQ ID NO: 645875 - RNA, 19 nt, Artificial Sequence
  Description of Artificial Sequence: Synthetic oligonucleotide
aacaagacuacaagccugg

SEQ ID NO: 645876 - RNA, 19 nt, Artificial Sequence
  Description of Artificial Sequence: Synthetic oligonucleotide
ugaguauguacuuggcacc

SEQ ID NO: 645877 - RNA, 19 nt, Artificial Sequence
  Description of Artificial Sequence: Synthetic oligonucleotide
aauccuggcaacaagacua

SEQ ID NO: 645878 - RNA, 19 nt, Artificial Sequence
  Description of Artificial Sequence: Synthetic oligonucleotide
gaacacucuguuaauaagc

SEQ ID NO: 645879 - RNA, 19 nt, Artificial Sequence
  Description of Artificial Sequence: Synthetic oligonucleotide
gauuguaacaauggcgaag

SEQ ID NO: 645880 - RNA, 19 nt, Artificial Sequence
  Description of Artificial Sequence: Synthetic oligonucleotide
auaggagagauguauucug

SEQ ID NO: 645881 - RNA, 19 nt, Artificial Sequence
  Description of Artificial Sequence: Synthetic oligonucleotide
auacgcuggguucucaacg

SEQ ID NO: 645882 - RNA, 19 nt, Artificial Sequence
  Description of Artificial Sequence: Synthetic oligonucleotide
uacuuauauguacacuuac

SEQ ID NO: 645883 - RNA, 19 nt, Artificial Sequence
  Description of Artificial Sequence: Synthetic oligonucleotide
gaacauugcuuaaagguug

SEQ ID NO: 645884 - RNA, 19 nt, Artificial Sequence
  Description of Artificial Sequence: Synthetic oligonucleotide
guaacaauggcgaaggaca

SEQ ID NO: 645885 - RNA, 19 nt, Artificial Sequence
  Description of Artificial Sequence: Synthetic oligonucleotide
agucacucucuuuaugcac

SEQ ID NO: 645886 - RNA, 19 nt, Artificial Sequence
  Description of Artificial Sequence: Synthetic oligonucleotide
accagcuuauuucucacag

SEQ ID NO: 645887 - RNA, 19 nt, Artificial Sequence
  Description of Artificial Sequence: Synthetic oligonucleotide
ugucacaucccucaauggu

SEQ ID NO: 645888 - RNA, 19 nt, Artificial Sequence
  Description of Artificial Sequence: Synthetic oligonucleotide
uauucaugccauuguauac

SEQ ID NO: 645889 - RNA, 19 nt, Artificial Sequence
  Description of Artificial Sequence: Synthetic oligonucleotide
aauaagcugagaacuggag

SEQ ID NO: 645890 - RNA, 19 nt, Artificial Sequence
  Description of Artificial Sequence: Synthetic oligonucleotide
ucagaaugcacgcucugga

SEQ ID NO: 645891 - RNA, 19 nt, Artificial Sequence
  Description of Artificial Sequence: Synthetic oligonucleotide
cauaugguagaaagaacac

SEQ ID NO: 645892 - RNA, 19 nt, Artificial Sequence
  Description of Artificial Sequence: Synthetic oligonucleotide
cuguuaauaagcugagaac

SEQ ID NO: 645893 - RNA, 19 nt, Artificial Sequence
  Description of Artificial Sequence: Synthetic oligonucleotide
caccucuuaaauacgcugg

SEQ ID NO: 645894 - RNA, 19 nt, Artificial Sequence
  Description of Artificial Sequence: Synthetic oligonucleotide
agagaaaaggauuccccug

SEQ ID NO: 645895 - RNA, 19 nt, Artificial Sequence
  Description of Artificial Sequence: Synthetic oligonucleotide
  modified_base (2)..(2): a, c, u, g, unknown or other
cnguuuugucuucaguugg

SEQ ID NO: 645896 - RNA, 19 nt, Artificial Sequence
  Description of Artificial Sequence: Synthetic oligonucleotide
uaccauuaaacugaucaca

SEQ ID NO: 645897 - RNA, 19 nt, Artificial Sequence
  Description of Artificial Sequence: Synthetic oligonucleotide
aaagccauauugagagugg

SEQ ID NO: 645898 - RNA, 19 nt, Artificial Sequence
  Description of Artificial Sequence: Synthetic oligonucleotide
ugucagugugcaaaaguga

SEQ ID NO: 645899 - RNA, 19 nt, Artificial Sequence
  Description of Artificial Sequence: Synthetic oligonucleotide
ugaguaccaauuaucuccu

SEQ ID NO: 645900 - RNA, 19 nt, Artificial Sequence
  Description of Artificial Sequence: Synthetic oligonucleotide
uuauugucccgucagguuu

SEQ ID NO: 645901 - RNA, 19 nt, Artificial Sequence
  Description of Artificial Sequence: Synthetic oligonucleotide
ugguuaagcacauaaucua

SEQ ID NO: 645902 - RNA, 19 nt, Artificial Sequence
  Description of Artificial Sequence: Synthetic oligonucleotide
auauugagaguggagcagg

SEQ ID NO: 645903 - RNA, 19 nt, Artificial Sequence
  Description of Artificial Sequence: Synthetic oligonucleotide
guucucaacgaguaaacca

SEQ ID NO: 645904 - RNA, 19 nt, Artificial Sequence
  Description of Artificial Sequence: Synthetic oligonucleotide
aacacucuguuaauaagcu

SEQ ID NO: 645905 - RNA, 19 nt, Artificial Sequence
  Description of Artificial Sequence: Synthetic oligonucleotide
acgauuguaacaauggcga

SEQ ID NO: 645906 - RNA, 19 nt, Artificial Sequence
  Description of Artificial Sequence: Synthetic oligonucleotide
gacgaugcuuuucagucug

SEQ ID NO: 645907 - RNA, 19 nt, Artificial Sequence
  Description of Artificial Sequence: Synthetic oligonucleotide
cauacgaaugaccuuuaug

SEQ ID NO: 645908 - RNA, 19 nt, Artificial Sequence
  Description of Artificial Sequence: Synthetic oligonucleotide
uggcaacaagacuacaagc

SEQ ID NO: 645909 - RNA, 19 nt, Artificial Sequence
  Description of Artificial Sequence: Synthetic oligonucleotide
aacauccaacaagagacug

SEQ ID NO: 645910 - RNA, 19 nt, Artificial Sequence
  Description of Artificial Sequence: Synthetic oligonucleotide
ugugugacgucucaguguu

SEQ ID NO: 645911 - RNA, 19 nt, Artificial Sequence
  Description of Artificial Sequence: Synthetic oligonucleotide
accucuuaaauacgcuggg

SEQ ID NO: 645912 - RNA, 19 nt, Artificial Sequence
  Description of Artificial Sequence: Synthetic oligonucleotide
uuuagcuaagugacauaca

SEQ ID NO: 645913 - RNA, 19 nt, Artificial Sequence
  Description of Artificial Sequence: Synthetic oligonucleotide
uggaccuacgauuguaaca

SEQ ID NO: 645914 - RNA, 19 nt, Artificial Sequence
  Description of Artificial Sequence: Synthetic oligonucleotide
guuucuagccaaagcaagg

SEQ ID NO: 645915 - RNA, 19 nt, Artificial Sequence
  Description of Artificial Sequence: Synthetic oligonucleotide
agcccuacgguacuuguag

SEQ ID NO: 645916 - RNA, 19 nt, Artificial Sequence
  Description of Artificial Sequence: Synthetic oligonucleotide
uccccaauguuuuauuuaa

SEQ ID NO: 645917 - RNA, 19 nt, Artificial Sequence
  Description of Artificial Sequence: Synthetic oligonucleotide
ucugcuccuagcccgaaac

SEQ ID NO: 645918 - RNA, 19 nt, Artificial Sequence
  Description of Artificial Sequence: Synthetic oligonucleotide
uggccugcugucuacauga

SEQ ID NO: 645919 - RNA, 19 nt, Artificial Sequence
  Description of Artificial Sequence: Synthetic oligonucleotide
ugauugcacgucuacuuca

SEQ ID NO: 645920 - RNA, 19 nt, Artificial Sequence
  Description of Artificial Sequence: Synthetic oligonucleotide
aguuuuagcuaagugacau

SEQ ID NO: 645921 - RNA, 19 nt, Artificial Sequence
  Description of Artificial Sequence: Synthetic oligonucleotide
gacucguacucaucggucc

SEQ ID NO: 645922 - RNA, 19 nt, Artificial Sequence
  Description of Artificial Sequence: Synthetic oligonucleotide
uacaugauugcacgucuac

SEQ ID NO: 645923 - RNA, 19 nt, Artificial Sequence
  Description of Artificial Sequence: Synthetic oligonucleotide
ugacauacgaaugaccuuu

SEQ ID NO: 645924 - RNA, 19 nt, Artificial Sequence
  Description of Artificial Sequence: Synthetic oligonucleotide
uaggagagauguauucuga

SEQ ID NO: 645925 - RNA, 19 nt, Artificial Sequence
  Description of Artificial Sequence: Synthetic oligonucleotide
ucccauugguuuaagcaac

SEQ ID NO: 645926 - RNA, 19 nt, Artificial Sequence
  Description of Artificial Sequence: Synthetic oligonucleotide
ucuauggccgacucguacu

SEQ ID NO: 645927 - RNA, 19 nt, Artificial Sequence
  Description of Artificial Sequence: Synthetic oligonucleotide
cuuaaucaguuuaauagua

SEQ ID NO: 645928 - RNA, 19 nt, Artificial Sequence
  Description of Artificial Sequence: Synthetic oligonucleotide
gacacggaacugaugagag

SEQ ID NO: 645929 - RNA, 19 nt, Artificial Sequence
  Description of Artificial Sequence: Synthetic oligonucleotide
cucauagcgcaauugugac

SEQ ID NO: 645930 - RNA, 19 nt, Artificial Sequence
  Description of Artificial Sequence: Synthetic oligonucleotide
aguguauuucaguaggcua

SEQ ID NO: 645931 - RNA, 19 nt, Artificial Sequence
  Description of Artificial Sequence: Synthetic oligonucleotide
aaaacaugugacauacgaa

SEQ ID NO: 645932 - RNA, 19 nt, Artificial Sequence
  Description of Artificial Sequence: Synthetic oligonucleotide
uaggcuauccacucucucu

SEQ ID NO: 645933 - RNA, 19 nt, Artificial Sequence
  Description of Artificial Sequence: Synthetic oligonucleotide
uacucggggagccccaucc

SEQ ID NO: 645934 - RNA, 19 nt, Artificial Sequence
  Description of Artificial Sequence: Synthetic oligonucleotide
ugcacgucuacuucauaug

SEQ ID NO: 645935 - RNA, 19 nt, Artificial Sequence
  Description of Artificial Sequence: Synthetic oligonucleotide
aaaggcguuauugucccgu

SEQ ID NO: 645936 - RNA, 19 nt, Artificial Sequence
  Description of Artificial Sequence: Synthetic oligonucleotide
auagccaguguauuucagu

SEQ ID NO: 645937 - RNA, 19 nt, Artificial Sequence
  Description of Artificial Sequence: Synthetic oligonucleotide
caguuguuuuaucaccagg

SEQ ID NO: 645938 - RNA, 19 nt, Artificial Sequence
  Description of Artificial Sequence: Synthetic oligonucleotide
ucucaacgaguaaaccagc

SEQ ID NO: 645939 - RNA, 19 nt, Artificial Sequence
  Description of Artificial Sequence: Synthetic oligonucleotide
acaauggcgaaggacagcu

SEQ ID NO: 645940 - RNA, 19 nt, Artificial Sequence
  Description of Artificial Sequence: Synthetic oligonucleotide
ggcaacaagacuacaagcc

SEQ ID NO: 645941 - RNA, 19 nt, Artificial Sequence
  Description of Artificial Sequence: Synthetic oligonucleotide
aaggcguuauugucccguc

SEQ ID NO: 645942 - RNA, 19 nt, Artificial Sequence
  Description of Artificial Sequence: Synthetic oligonucleotide
uugcacgucuacuucauau

SEQ ID NO: 645943 - RNA, 19 nt, Artificial Sequence
  Description of Artificial Sequence: Synthetic oligonucleotide
auaugguagaaagaacaca

SEQ ID NO: 645944 - RNA, 19 nt, Artificial Sequence
  Description of Artificial Sequence: Synthetic oligonucleotide
ucugaguaccaauuaucuc

SEQ ID NO: 645945 - RNA, 19 nt, Artificial Sequence
  Description of Artificial Sequence: Synthetic oligonucleotide
cuaagugacauacaaauuu

SEQ ID NO: 645946 - RNA, 19 nt, Artificial Sequence
  Description of Artificial Sequence: Synthetic oligonucleotide
cauauugagaguggagcag

SEQ ID NO: 645947 - RNA, 19 nt, Artificial Sequence
  Description of Artificial Sequence: Synthetic oligonucleotide
auaugaccauucuaagagu

SEQ ID NO: 645948 - RNA, 19 nt, Artificial Sequence
  Description of Artificial Sequence: Synthetic oligonucleotide
  modified_base (6)..(6): a, c, u, g, unknown or other
ucuucnguuuugucuucag

SEQ ID NO: 645949 - RNA, 19 nt, Artificial Sequence
  Description of Artificial Sequence: Synthetic oligonucleotide
  modified_base (9)..(9): a, c, u, g, unknown or other
agcucuucnguuuugucuu

SEQ ID NO: 645950 - RNA, 19 nt, Artificial Sequence
  Description of Artificial Sequence: Synthetic oligonucleotide
uucgguuuuggcacggauc

SEQ ID NO: 645951 - RNA, 19 nt, Artificial Sequence
  Description of Artificial Sequence: Synthetic oligonucleotide
acuacaagccuggaccagg

SEQ ID NO: 645952 - RNA, 19 nt, Artificial Sequence
  Description of Artificial Sequence: Synthetic oligonucleotide
guuaagcacauaaucuaug

SEQ ID NO: 645953 - RNA, 19 nt, Artificial Sequence
  Description of Artificial Sequence: Synthetic oligonucleotide
guuguuuuaucaccaggca

SEQ ID NO: 645954 - RNA, 19 nt, Artificial Sequence
  Description of Artificial Sequence: Synthetic oligonucleotide
uuauguacauaugggugcu

SEQ ID NO: 645955 - RNA, 19 nt, Artificial Sequence
  Description of Artificial Sequence: Synthetic oligonucleotide
aaauacgcuggguucucaa

SEQ ID NO: 645956 - RNA, 19 nt, Artificial Sequence
  Description of Artificial Sequence: Synthetic oligonucleotide
uccucaugaaauggaauga

SEQ ID NO: 645957 - RNA, 19 nt, Artificial Sequence
  Description of Artificial Sequence: Synthetic oligonucleotide
uggucuauggccgacucgu

SEQ ID NO: 645958 - RNA, 19 nt, Artificial Sequence
  Description of Artificial Sequence: Synthetic oligonucleotide
gguccauuauggucuaugg

SEQ ID NO: 645959 - RNA, 19 nt, Artificial Sequence
  Description of Artificial Sequence: Synthetic oligonucleotide
ucauagcgcaauugugacc

SEQ ID NO: 645960 - RNA, 19 nt, Artificial Sequence
  Description of Artificial Sequence: Synthetic oligonucleotide
cacggaacugaugagaguc

SEQ ID NO: 645961 - RNA, 19 nt, Artificial Sequence
  Description of Artificial Sequence: Synthetic oligonucleotide
ucaacgaguaaaccagcua

SEQ ID NO: 645962 - RNA, 19 nt, Artificial Sequence
  Description of Artificial Sequence: Synthetic oligonucleotide
ccauuauggucuauggccg

SEQ ID NO: 645963 - RNA, 19 nt, Artificial Sequence
  Description of Artificial Sequence: Synthetic oligonucleotide
ugacacggaacugaugaga

SEQ ID NO: 645964 - RNA, 19 nt, Artificial Sequence
  Description of Artificial Sequence: Synthetic oligonucleotide
acgugaacagccuccauau

SEQ ID NO: 645965 - RNA, 19 nt, Artificial Sequence
  Description of Artificial Sequence: Synthetic oligonucleotide
caacgaguaaaccagcuaa

SEQ ID NO: 645966 - RNA, 19 nt, Artificial Sequence
  Description of Artificial Sequence: Synthetic oligonucleotide
uagccaguguauuucagua

SEQ ID NO: 645967 - RNA, 19 nt, Artificial Sequence
  Description of Artificial Sequence: Synthetic oligonucleotide
uugguuuaagcaacuccuc

SEQ ID NO: 645968 - RNA, 19 nt, Artificial Sequence
  Description of Artificial Sequence: Synthetic oligonucleotide
auuauggucuauggccgac

SEQ ID NO: 645969 - RNA, 19 nt, Artificial Sequence
  Description of Artificial Sequence: Synthetic oligonucleotide
guacauaugggugcuguug

SEQ ID NO: 645970 - RNA, 19 nt, Artificial Sequence
  Description of Artificial Sequence: Synthetic oligonucleotide
ugaccauucuaagaguaaa

SEQ ID NO: 645971 - RNA, 19 nt, Artificial Sequence
  Description of Artificial Sequence: Synthetic oligonucleotide
guaguguucaggaacuuga

SEQ ID NO: 645972 - RNA, 19 nt, Artificial Sequence
  Description of Artificial Sequence: Synthetic oligonucleotide
auacuggcugagugcuucc

SEQ ID NO: 645973 - RNA, 19 nt, Artificial Sequence
  Description of Artificial Sequence: Synthetic oligonucleotide
cauguagcugccuggaaca

SEQ ID NO: 645974 - RNA, 19 nt, Artificial Sequence
  Description of Artificial Sequence: Synthetic oligonucleotide
gaguauguacuuggcaccc

SEQ ID NO: 645975 - RNA, 19 nt, Artificial Sequence
  Description of Artificial Sequence: Synthetic oligonucleotide
cuaccgucacauugaagag

SEQ ID NO: 645976 - RNA, 19 nt, Artificial Sequence
  Description of Artificial Sequence: Synthetic oligonucleotide
uauugagaguggagcaggu

SEQ ID NO: 645977 - RNA, 19 nt, Artificial Sequence
  Description of Artificial Sequence: Synthetic oligonucleotide
cuugaggaauaaauaggca

SEQ ID NO: 645978 - RNA, 19 nt, Artificial Sequence
  Description of Artificial Sequence: Synthetic oligonucleotide
gagagucacucucuuuaug

SEQ ID NO: 645979 - RNA, 19 nt, Artificial Sequence
  Description of Artificial Sequence: Synthetic oligonucleotide
gucacaucccucaauggug

SEQ ID NO: 645980 - RNA, 19 nt, Artificial Sequence
  Description of Artificial Sequence: Synthetic oligonucleotide
caagacuacaagccuggac

SEQ ID NO: 645981 - RNA, 19 nt, Artificial Sequence
  Description of Artificial Sequence: Synthetic oligonucleotide
gcugucuaccgucacauug

SEQ ID NO: 645982 - RNA, 19 nt, Artificial Sequence
  Description of Artificial Sequence: Synthetic oligonucleotide
uggguucucaacgaguaaa

SEQ ID NO: 645983 - RNA, 19 nt, Artificial Sequence
  Description of Artificial Sequence: Synthetic oligonucleotide
guauguacuuggcacccug

SEQ ID NO: 645984 - RNA, 19 nt, Artificial Sequence
  Description of Artificial Sequence: Synthetic oligonucleotide
uauggucuauggccgacuc

SEQ ID NO: 645985 - RNA, 19 nt, Artificial Sequence
  Description of Artificial Sequence: Synthetic oligonucleotide
agugagaccucagaaugca

SEQ ID NO: 645986 - RNA, 19 nt, Artificial Sequence
  Description of Artificial Sequence: Synthetic oligonucleotide
acacucuguuaauaagcug

SEQ ID NO: 645987 - RNA, 19 nt, Artificial Sequence
  Description of Artificial Sequence: Synthetic oligonucleotide
aguaacuauuuguguuucu

SEQ ID NO: 645988 - RNA, 19 nt, Artificial Sequence
  Description of Artificial Sequence: Synthetic oligonucleotide
gacuaccaaggucaacaug

SEQ ID NO: 645989 - RNA, 19 nt, Artificial Sequence
  Description of Artificial Sequence: Synthetic oligonucleotide
acuuacauacauauaugaa

SEQ ID NO: 645990 - RNA, 19 nt, Artificial Sequence
  Description of Artificial Sequence: Synthetic oligonucleotide
cucuucgaugacagaauac

SEQ ID NO: 645991 - RNA, 19 nt, Artificial Sequence
  Description of Artificial Sequence: Synthetic oligonucleotide
cucagaaugcacgcucugg

SEQ ID NO: 645992 - RNA, 19 nt, Artificial Sequence
  Description of Artificial Sequence: Synthetic oligonucleotide
cucgggaacacucuguuaa

SEQ ID NO: 645993 - RNA, 19 nt, Artificial Sequence
  Description of Artificial Sequence: Synthetic oligonucleotide
gccauauugagaguggagc

SEQ ID NO: 645994 - RNA, 19 nt, Artificial Sequence
  Description of Artificial Sequence: Synthetic oligonucleotide
gacgucucaguguugcaga

SEQ ID NO: 645995 - RNA, 19 nt, Artificial Sequence
  Description of Artificial Sequence: Synthetic oligonucleotide
aaccagcuaauguguuucu

SEQ ID NO: 645996 - RNA, 19 nt, Artificial Sequence
  Description of Artificial Sequence: Synthetic oligonucleotide
uguuccgaugggcucggga

SEQ ID NO: 645997 - RNA, 19 nt, Artificial Sequence
  Description of Artificial Sequence: Synthetic oligonucleotide
uuggaccuacgauuguaac

SEQ ID NO: 645998 - RNA, 19 nt, Artificial Sequence
  Description of Artificial Sequence: Synthetic oligonucleotide
ugacgaugcuuuucagucu

SEQ ID NO: 645999 - RNA, 19 nt, Artificial Sequence
  Description of Artificial Sequence: Synthetic oligonucleotide
uagcccgaaacucugccua

SEQ ID NO: 646000 - RNA, 19 nt, Artificial Sequence
  Description of Artificial Sequence: Synthetic oligonucleotide
gaccucagaaugcacgcuc

SEQ ID NO: 646001 - RNA, 19 nt, Artificial Sequence
  Description of Artificial Sequence: Synthetic oligonucleotide
auugugaccugaugucagu

SEQ ID NO: 646002 - RNA, 19 nt, Artificial Sequence
  Description of Artificial Sequence: Synthetic oligonucleotide
acgaguaaaccagcuaaug

SEQ ID NO: 646003 - RNA, 19 nt, Artificial Sequence
  Description of Artificial Sequence: Synthetic oligonucleotide
auggucuauggccgacucg

SEQ ID NO: 646004 - RNA, 19 nt, Artificial Sequence
  Description of Artificial Sequence: Synthetic oligonucleotide
gucccauugguuuaagcaa

SEQ ID NO: 646005 - RNA, 19 nt, Artificial Sequence
  Description of Artificial Sequence: Synthetic oligonucleotide
cuccauauucaugccauug

SEQ ID NO: 646006 - RNA, 19 nt, Artificial Sequence
  Description of Artificial Sequence: Synthetic oligonucleotide
cacgucuacuucauaugac

SEQ ID NO: 646007 - RNA, 19 nt, Artificial Sequence
  Description of Artificial Sequence: Synthetic oligonucleotide
uacgguacuuguaguguuc

SEQ ID NO: 646008 - RNA, 19 nt, Artificial Sequence
  Description of Artificial Sequence: Synthetic oligonucleotide
ggcguuauugucccgucag

SEQ ID NO: 646009 - RNA, 19 nt, Artificial Sequence
  Description of Artificial Sequence: Synthetic oligonucleotide
ugucuacaugauugcacgu

SEQ ID NO: 646010 - RNA, 19 nt, Artificial Sequence
  Description of Artificial Sequence: Synthetic oligonucleotide
agagucgcugccuccugag

SEQ ID NO: 646011 - RNA, 19 nt, Artificial Sequence
  Description of Artificial Sequence: Synthetic oligonucleotide
auaaucuaugugugugcau

SEQ ID NO: 646012 - RNA, 19 nt, Artificial Sequence
  Description of Artificial Sequence: Synthetic oligonucleotide
auggcgaaggacagcugcc

SEQ ID NO: 646013 - RNA, 19 nt, Artificial Sequence
  Description of Artificial Sequence: Synthetic oligonucleotide
cauaaucuaugugugugca

SEQ ID NO: 646014 - RNA, 19 nt, Artificial Sequence
  Description of Artificial Sequence: Synthetic oligonucleotide
cagguuugaauccuggcaa

SEQ ID NO: 646015 - RNA, 19 nt, Artificial Sequence
  Description of Artificial Sequence: Synthetic oligonucleotide
gucccgucagguuuuaguc

SEQ ID NO: 646016 - RNA, 19 nt, Artificial Sequence
  Description of Artificial Sequence: Synthetic oligonucleotide
caaaagaacucccacuacu

SEQ ID NO: 646017 - RNA, 19 nt, Artificial Sequence
  Description of Artificial Sequence: Synthetic oligonucleotide
uuucgguuuuggcacggau

SEQ ID NO: 646018 - RNA, 19 nt, Artificial Sequence
  Description of Artificial Sequence: Synthetic oligonucleotide
cuuuaugcaccuuccagcu

SEQ ID NO: 646019 - RNA, 19 nt, Artificial Sequence
  Description of Artificial Sequence: Synthetic oligonucleotide
augggcaaaugagaacauc

SEQ ID NO: 646020 - RNA, 19 nt, Artificial Sequence
  Description of Artificial Sequence: Synthetic oligonucleotide
aacgaguaaaccagcuaau

SEQ ID NO: 646021 - RNA, 19 nt, Artificial Sequence
  Description of Artificial Sequence: Synthetic oligonucleotide
cauagcgcaauugugaccu

SEQ ID NO: 646022 - RNA, 19 nt, Artificial Sequence
  Description of Artificial Sequence: Synthetic oligonucleotide
auguacauaugggugcugu

SEQ ID NO: 646023 - RNA, 19 nt, Artificial Sequence
  Description of Artificial Sequence: Synthetic oligonucleotide
accuacgauuguaacaaug

SEQ ID NO: 646024 - RNA, 19 nt, Artificial Sequence
  Description of Artificial Sequence: Synthetic oligonucleotide
uugugaccugaugucagug

SEQ ID NO: 646025 - RNA, 19 nt, Artificial Sequence
  Description of Artificial Sequence: Synthetic oligonucleotide
ugucuaccgucacauugaa

SEQ ID NO: 646026 - RNA, 19 nt, Artificial Sequence
  Description of Artificial Sequence: Synthetic oligonucleotide
acaggaccaccucuuaaau

SEQ ID NO: 646027 - RNA, 19 nt, Artificial Sequence
  Description of Artificial Sequence: Synthetic oligonucleotide
ggccgacucguacucaucg

SEQ ID NO: 646028 - RNA, 19 nt, Artificial Sequence
  Description of Artificial Sequence: Synthetic oligonucleotide
uuaaauacgcuggguucuc

SEQ ID NO: 646029 - RNA, 19 nt, Artificial Sequence
  Description of Artificial Sequence: Synthetic oligonucleotide
acaugauugcacgucuacu

SEQ ID NO: 646030 - RNA, 19 nt, Artificial Sequence
  Description of Artificial Sequence: Synthetic oligonucleotide
gguuaaugggcaaaugaga

SEQ ID NO: 646031 - RNA, 19 nt, Artificial Sequence
  Description of Artificial Sequence: Synthetic oligonucleotide
ggauguuccgaugggcucg

SEQ ID NO: 646032 - RNA, 19 nt, Artificial Sequence
  Description of Artificial Sequence: Synthetic oligonucleotide
gucuauggccgacucguac

SEQ ID NO: 646033 - RNA, 19 nt, Artificial Sequence
  Description of Artificial Sequence: Synthetic oligonucleotide
ugcuccuagcccgaaacuc

SEQ ID NO: 646034 - RNA, 19 nt, Artificial Sequence
  Description of Artificial Sequence: Synthetic oligonucleotide
ucggggagccccauccucu

SEQ ID NO: 646035 - RNA, 19 nt, Artificial Sequence
  Description of Artificial Sequence: Synthetic oligonucleotide
acaugugucaugaggcgca

SEQ ID NO: 646036 - RNA, 19 nt, Artificial Sequence
  Description of Artificial Sequence: Synthetic oligonucleotide
aggcuauccacucucucuu

SEQ ID NO: 646037 - RNA, 19 nt, Artificial Sequence
  Description of Artificial Sequence: Synthetic oligonucleotide
guuccgaugggcucgggaa

SEQ ID NO: 646038 - RNA, 19 nt, Artificial Sequence
  Description of Artificial Sequence: Synthetic oligonucleotide
guaacagguuugaauccug

SEQ ID NO: 646039 - RNA, 19 nt, Artificial Sequence
  Description of Artificial Sequence: Synthetic oligonucleotide
ugacuaccaaggucaacau

SEQ ID NO: 646040 - RNA, 19 nt, Artificial Sequence
  Description of Artificial Sequence: Synthetic oligonucleotide
gaugggcucgggaacacuc

SEQ ID NO: 646041 - RNA, 19 nt, Artificial Sequence
  Description of Artificial Sequence: Synthetic oligonucleotide
uccccuggagcuacagaga

SEQ ID NO: 646042 - RNA, 19 nt, Artificial Sequence
  Description of Artificial Sequence: Synthetic oligonucleotide
ggaccuacgauuguaacaa

SEQ ID NO: 646043 - RNA, 19 nt, Artificial Sequence
  Description of Artificial Sequence: Synthetic oligonucleotide
gguuuuggcacggaucggc

SEQ ID NO: 646044 - RNA, 19 nt, Artificial Sequence
  Description of Artificial Sequence: Synthetic oligonucleotide
agcucauagcgcaauugug

SEQ ID NO: 646045 - RNA, 19 nt, Artificial Sequence
  Description of Artificial Sequence: Synthetic oligonucleotide
caggugacgaugcuuuuca

SEQ ID NO: 646046 - RNA, 19 nt, Artificial Sequence
  Description of Artificial Sequence: Synthetic oligonucleotide
cacggaucggcuuggccug

SEQ ID NO: 646047 - RNA, 19 nt, Artificial Sequence
  Description of Artificial Sequence: Synthetic oligonucleotide
uccuagcccgaaacucugc

SEQ ID NO: 646048 - RNA, 19 nt, Artificial Sequence
  Description of Artificial Sequence: Synthetic oligonucleotide
gagcucauagcgcaauugu

SEQ ID NO: 646049 - RNA, 19 nt, Artificial Sequence
  Description of Artificial Sequence: Synthetic oligonucleotide
agcgggagucccuggagcu

SEQ ID NO: 646050 - RNA, 19 nt, Artificial Sequence
  Description of Artificial Sequence: Synthetic oligonucleotide
uuauggucuauggccgacu

SEQ ID NO: 646051 - RNA, 19 nt, Artificial Sequence
  Description of Artificial Sequence: Synthetic oligonucleotide
ugaucacauaugguagaaa

SEQ ID NO: 646052 - RNA, 19 nt, Artificial Sequence
  Description of Artificial Sequence: Synthetic oligonucleotide
acagccuuaaucaguuuaa

SEQ ID NO: 646053 - RNA, 19 nt, Artificial Sequence
  Description of Artificial Sequence: Synthetic oligonucleotide
caauugugaccugauguca

SEQ ID NO: 646054 - RNA, 19 nt, Artificial Sequence
  Description of Artificial Sequence: Synthetic oligonucleotide
ggcaguucauccagagucg

SEQ ID NO: 646055 - RNA, 19 nt, Artificial Sequence
  Description of Artificial Sequence: Synthetic oligonucleotide
gacuacaagccuggaccag

SEQ ID NO: 646056 - RNA, 19 nt, Artificial Sequence
  Description of Artificial Sequence: Synthetic oligonucleotide
uauguacauaugggugcug

SEQ ID NO: 646057 - RNA, 19 nt, Artificial Sequence
  Description of Artificial Sequence: Synthetic oligonucleotide
uuaucaccaggcaguucau

SEQ ID NO: 646058 - RNA, 19 nt, Artificial Sequence
  Description of Artificial Sequence: Synthetic oligonucleotide
cucaucgguccacuugaug

SEQ ID NO: 646059 - RNA, 19 nt, Artificial Sequence
  Description of Artificial Sequence: Synthetic oligonucleotide
cuccucauaggagagaugu

SEQ ID NO: 646060 - RNA, 19 nt, Artificial Sequence
  Description of Artificial Sequence: Synthetic oligonucleotide
uuagucccauugguuuaag

SEQ ID NO: 646061 - RNA, 19 nt, Artificial Sequence
  Description of Artificial Sequence: Synthetic oligonucleotide
gaguuagacccucucuaua

SEQ ID NO: 646062 - RNA, 19 nt, Artificial Sequence
  Description of Artificial Sequence: Synthetic oligonucleotide
acauacgaaugaccuuuau

SEQ ID NO: 646063 - RNA, 19 nt, Artificial Sequence
  Description of Artificial Sequence: Synthetic oligonucleotide
ugagaaauuuucggauguu

SEQ ID NO: 646064 - RNA, 19 nt, Artificial Sequence
  Description of Artificial Sequence: Synthetic oligonucleotide
gggaacacucuguuaauaa

SEQ ID NO: 646065 - RNA, 19 nt, Artificial Sequence
  Description of Artificial Sequence: Synthetic oligonucleotide
aaaggaacccucaccccuu

SEQ ID NO: 646066 - RNA, 19 nt, Artificial Sequence
  Description of Artificial Sequence: Synthetic oligonucleotide
uuuuggcacggaucggcuu

SEQ ID NO: 646067 - RNA, 19 nt, Artificial Sequence
  Description of Artificial Sequence: Synthetic oligonucleotide
cugaguguaacagguuuga

SEQ ID NO: 646068 - RNA, 19 nt, Artificial Sequence
  Description of Artificial Sequence: Synthetic oligonucleotide
ucaggucgauuugucacau

SEQ ID NO: 646069 - RNA, 19 nt, Artificial Sequence
  Description of Artificial Sequence: Synthetic oligonucleotide
uagcgcaauugugaccuga

SEQ ID NO: 646070 - RNA, 19 nt, Artificial Sequence
  Description of Artificial Sequence: Synthetic oligonucleotide
ugaguguaacagguuugaa

SEQ ID NO: 646071 - RNA, 19 nt, Artificial Sequence
  Description of Artificial Sequence: Synthetic oligonucleotide
guuugaauccuggcaacaa

SEQ ID NO: 646072 - RNA, 19 nt, Artificial Sequence
  Description of Artificial Sequence: Synthetic oligonucleotide
cauuauggucuauggccga

SEQ ID NO: 646073 - RNA, 19 nt, Artificial Sequence
  Description of Artificial Sequence: Synthetic oligonucleotide
auaccaugguauugcuuuu

SEQ ID NO: 646074 - RNA, 19 nt, Artificial Sequence
  Description of Artificial Sequence: Synthetic oligonucleotide
cuucccuugucaauucucu

SEQ ID NO: 646075 - RNA, 19 nt, Artificial Sequence
  Description of Artificial Sequence: Synthetic oligonucleotide
uccauggguuaaugggcaa

SEQ ID NO: 646076 - RNA, 19 nt, Artificial Sequence
  Description of Artificial Sequence: Synthetic oligonucleotide
acgguacuuguaguguuca

SEQ ID NO: 646077 - RNA, 19 nt, Artificial Sequence
  Description of Artificial Sequence: Synthetic oligonucleotide
ccauauugagaguggagca

SEQ ID NO: 646078 - RNA, 19 nt, Artificial Sequence
  Description of Artificial Sequence: Synthetic oligonucleotide
aguuaccauuaaacugauc

SEQ ID NO: 646079 - RNA, 19 nt, Artificial Sequence
  Description of Artificial Sequence: Synthetic oligonucleotide
ucccacuacucggggagcc

SEQ ID NO: 646080 - RNA, 19 nt, Artificial Sequence
  Description of Artificial Sequence: Synthetic oligonucleotide
ucgggaacacucuguuaau

SEQ ID NO: 646081 - RNA, 19 nt, Artificial Sequence
  Description of Artificial Sequence: Synthetic oligonucleotide
auggccgacucguacucau

SEQ ID NO: 646082 - RNA, 19 nt, Artificial Sequence
  Description of Artificial Sequence: Synthetic oligonucleotide
cuggccgccaacaguccug

SEQ ID NO: 646083 - RNA, 19 nt, Artificial Sequence
  Description of Artificial Sequence: Synthetic oligonucleotide
ugugucggagcuggucucu

SEQ ID NO: 646084 - RNA, 19 nt, Artificial Sequence
  Description of Artificial Sequence: Synthetic oligonucleotide
cauaggagagauguauucu

SEQ ID NO: 646085 - RNA, 19 nt, Artificial Sequence
  Description of Artificial Sequence: Synthetic oligonucleotide
gcguuauugucccgucagg

SEQ ID NO: 646086 - RNA, 19 nt, Artificial Sequence
  Description of Artificial Sequence: Synthetic oligonucleotide
aggcguuauugucccguca

SEQ ID NO: 646087 - RNA, 19 nt, Artificial Sequence
  Description of Artificial Sequence: Synthetic oligonucleotide
uaacucccgcucuguguga

SEQ ID NO: 646088 - RNA, 19 nt, Artificial Sequence
  Description of Artificial Sequence: Synthetic oligonucleotide
caucccucaauggugguaa

SEQ ID NO: 646089 - RNA, 19 nt, Artificial Sequence
  Description of Artificial Sequence: Synthetic oligonucleotide
cuugacuaccaaggucaac

SEQ ID NO: 646090 - RNA, 19 nt, Artificial Sequence
  Description of Artificial Sequence: Synthetic oligonucleotide
augaccauucuaagaguaa

SEQ ID NO: 646091 - RNA, 19 nt, Artificial Sequence
  Description of Artificial Sequence: Synthetic oligonucleotide
ccuuaaucaguuuaauagu

SEQ ID NO: 646092 - RNA, 19 nt, Artificial Sequence
  Description of Artificial Sequence: Synthetic oligonucleotide
uggagcucauagcgcaauu

SEQ ID NO: 646093 - RNA, 19 nt, Artificial Sequence
  Description of Artificial Sequence: Synthetic oligonucleotide
cucugccuaacucccgcuc

SEQ ID NO: 646094 - RNA, 19 nt, Artificial Sequence
  Description of Artificial Sequence: Synthetic oligonucleotide
cucaacgaguaaaccagcu

SEQ ID NO: 646095 - RNA, 19 nt, Artificial Sequence
  Description of Artificial Sequence: Synthetic oligonucleotide
aguauguacuuggcacccu

SEQ ID NO: 646096 - RNA, 19 nt, Artificial Sequence
  Description of Artificial Sequence: Synthetic oligonucleotide
cacaggccacaaaagaacu

SEQ ID NO: 646097 - RNA, 19 nt, Artificial Sequence
  Description of Artificial Sequence: Synthetic oligonucleotide
guuggaccuacgauuguaa

SEQ ID NO: 646098 - RNA, 19 nt, Artificial Sequence
  Description of Artificial Sequence: Synthetic oligonucleotide
uauggccgacucguacuca

SEQ ID NO: 646099 - RNA, 19 nt, Artificial Sequence
  Description of Artificial Sequence: Synthetic oligonucleotide
guuauugucccgucagguu

SEQ ID NO: 646100 - RNA, 19 nt, Artificial Sequence
  Description of Artificial Sequence: Synthetic oligonucleotide
cugugucggagcuggucuc

SEQ ID NO: 646101 - RNA, 19 nt, Artificial Sequence
  Description of Artificial Sequence: Synthetic oligonucleotide
ggucgauuugucacauccc

SEQ ID NO: 646102 - RNA, 19 nt, Artificial Sequence
  Description of Artificial Sequence: Synthetic oligonucleotide
auagcgcaauugugaccug

SEQ ID NO: 646103 - RNA, 19 nt, Artificial Sequence
  Description of Artificial Sequence: Synthetic oligonucleotide
auguacacuuacauacaua

SEQ ID NO: 646104 - RNA, 19 nt, Artificial Sequence
  Description of Artificial Sequence: Synthetic oligonucleotide
cugaucacauaugguagaa

SEQ ID NO: 646105 - RNA, 19 nt, Artificial Sequence
  Description of Artificial Sequence: Synthetic oligonucleotide
agaccucagaaugcacgcu

SEQ ID NO: 646106 - RNA, 19 nt, Artificial Sequence
  Description of Artificial Sequence: Synthetic oligonucleotide
cccuacgguacuuguagug

SEQ ID NO: 646107 - RNA, 19 nt, Artificial Sequence
  Description of Artificial Sequence: Synthetic oligonucleotide
uggucucuucgaugacaga

SEQ ID NO: 646108 - RNA, 19 nt, Artificial Sequence
  Description of Artificial Sequence: Synthetic oligonucleotide
ugucggagcuggucucuuc

SEQ ID NO: 646109 - RNA, 19 nt, Artificial Sequence
  Description of Artificial Sequence: Synthetic oligonucleotide
gaugagagucacucucuuu

SEQ ID NO: 646110 - RNA, 19 nt, Artificial Sequence
  Description of Artificial Sequence: Synthetic oligonucleotide
auugcacgucuacuucaua

SEQ ID NO: 646111 - RNA, 19 nt, Artificial Sequence
  Description of Artificial Sequence: Synthetic oligonucleotide
cacagagacccuuguuuaa

SEQ ID NO: 646112 - RNA, 19 nt, Artificial Sequence
  Description of Artificial Sequence: Synthetic oligonucleotide
  modified_base (5)..(5): a, c, u, g, unknown or other
cuucnguuuugucuucagu

SEQ ID NO: 646113 - RNA, 19 nt, Artificial Sequence
  Description of Artificial Sequence: Synthetic oligonucleotide
ggguucucaacgaguaaac

SEQ ID NO: 646114 - RNA, 19 nt, Artificial Sequence
  Description of Artificial Sequence: Synthetic oligonucleotide
gcgaaggacagcugccaug

SEQ ID NO: 646115 - RNA, 19 nt, Artificial Sequence
  Description of Artificial Sequence: Synthetic oligonucleotide
cucguacucaucgguccac

SEQ ID NO: 646116 - RNA, 19 nt, Artificial Sequence
  Description of Artificial Sequence: Synthetic oligonucleotide
acggaacugaugagaguca

SEQ ID NO: 646117 - RNA, 19 nt, Artificial Sequence
  Description of Artificial Sequence: Synthetic oligonucleotide
uugaugcuaaaggcacuuu

SEQ ID NO: 646118 - RNA, 19 nt, Artificial Sequence
  Description of Artificial Sequence: Synthetic oligonucleotide
cuacaugauugcacgucua

SEQ ID NO: 646119 - RNA, 19 nt, Artificial Sequence
  Description of Artificial Sequence: Synthetic oligonucleotide
gggcaaaugagaacaucca

SEQ ID NO: 646120 - RNA, 19 nt, Artificial Sequence
  Description of Artificial Sequence: Synthetic oligonucleotide
agagagcuuugagggccuc

SEQ ID NO: 646121 - RNA, 19 nt, Artificial Sequence
  Description of Artificial Sequence: Synthetic oligonucleotide
agcccgaaacucugccuaa

SEQ ID NO: 646122 - RNA, 19 nt, Artificial Sequence
  Description of Artificial Sequence: Synthetic oligonucleotide
guguacuuauauguacacu

SEQ ID NO: 646123 - RNA, 19 nt, Artificial Sequence
  Description of Artificial Sequence: Synthetic oligonucleotide
uccuggcaacaagacuaca

SEQ ID NO: 646124 - RNA, 19 nt, Artificial Sequence
  Description of Artificial Sequence: Synthetic oligonucleotide
ccuggcaacaagacuacaa

SEQ ID NO: 646125 - RNA, 19 nt, Artificial Sequence
  Description of Artificial Sequence: Synthetic oligonucleotide
caucgguccacuugaugcu

SEQ ID NO: 646126 - RNA, 19 nt, Artificial Sequence
  Description of Artificial Sequence: Synthetic oligonucleotide
acggaucggcuuggccugc

SEQ ID NO: 646127 - RNA, 19 nt, Artificial Sequence
  Description of Artificial Sequence: Synthetic oligonucleotide
agcgcaauugugaccugau

SEQ ID NO: 646128 - RNA, 19 nt, Artificial Sequence
  Description of Artificial Sequence: Synthetic oligonucleotide
gguuaagcacauaaucuau

SEQ ID NO: 646129 - RNA, 19 nt, Artificial Sequence
  Description of Artificial Sequence: Synthetic oligonucleotide
gacauacgaaugaccuuua

SEQ ID NO: 646130 - RNA, 19 nt, Artificial Sequence
  Description of Artificial Sequence: Synthetic oligonucleotide
accagcuaauguguuucua

SEQ ID NO: 646131 - RNA, 19 nt, Artificial Sequence
  Description of Artificial Sequence: Synthetic oligonucleotide
uaggcacauguagcugccu

SEQ ID NO: 646132 - RNA, 19 nt, Artificial Sequence
  Description of Artificial Sequence: Synthetic oligonucleotide
uugucccgucagguuuuag

SEQ ID NO: 646133 - RNA, 19 nt, Artificial Sequence
  Description of Artificial Sequence: Synthetic oligonucleotide
gcagcgggagucccuggag

SEQ ID NO: 646134 - RNA, 19 nt, Artificial Sequence
  Description of Artificial Sequence: Synthetic oligonucleotide
caacaagagacuggaacau

SEQ ID NO: 646135 - RNA, 19 nt, Artificial Sequence
  Description of Artificial Sequence: Synthetic oligonucleotide
cuugaugcuaaaggcacuu

SEQ ID NO: 646136 - RNA, 19 nt, Artificial Sequence
  Description of Artificial Sequence: Synthetic oligonucleotide
cgucuacuucauaugacca

SEQ ID NO: 646137 - RNA, 19 nt, Artificial Sequence
  Description of Artificial Sequence: Synthetic oligonucleotide
gaacacaggaccaccucuu

SEQ ID NO: 646138 - RNA, 19 nt, Artificial Sequence
  Description of Artificial Sequence: Synthetic oligonucleotide
ggaguuagacccucucuau

SEQ ID NO: 646139 - RNA, 19 nt, Artificial Sequence
  Description of Artificial Sequence: Synthetic oligonucleotide
gcgcaauugugaccugaug

SEQ ID NO: 646140 - RNA, 19 nt, Artificial Sequence
  Description of Artificial Sequence: Synthetic oligonucleotide
cucccacuacucggggagc

SEQ ID NO: 646141 - RNA, 19 nt, Artificial Sequence
  Description of Artificial Sequence: Synthetic oligonucleotide
gcuggguucucaacgagua

SEQ ID NO: 646142 - RNA, 19 nt, Artificial Sequence
  Description of Artificial Sequence: Synthetic oligonucleotide
caggucgauuugucacauc

SEQ ID NO: 646143 - RNA, 19 nt, Artificial Sequence
  Description of Artificial Sequence: Synthetic oligonucleotide
agcugucuaccgucacauu

SEQ ID NO: 646144 - RNA, 19 nt, Artificial Sequence
  Description of Artificial Sequence: Synthetic oligonucleotide
gucucuucgaugacagaau

SEQ ID NO: 646145 - RNA, 19 nt, Artificial Sequence
  Description of Artificial Sequence: Synthetic oligonucleotide
gccuaacucccgcucugug

SEQ ID NO: 646146 - RNA, 19 nt, Artificial Sequence
  Description of Artificial Sequence: Synthetic oligonucleotide
gaguggagcaggugacgau

SEQ ID NO: 646147 - RNA, 19 nt, Artificial Sequence
  Description of Artificial Sequence: Synthetic oligonucleotide
cuacucggggagccccauc

SEQ ID NO: 646148 - RNA, 19 nt, Artificial Sequence
  Description of Artificial Sequence: Synthetic oligonucleotide
cacuacucggggagcccca

SEQ ID NO: 646149 - RNA, 19 nt, Artificial Sequence
  Description of Artificial Sequence: Synthetic oligonucleotide
augaggcgcaccagcuuau

SEQ ID NO: 646150 - RNA, 19 nt, Artificial Sequence
  Description of Artificial Sequence: Synthetic oligonucleotide
ccacuacucggggagcccc

SEQ ID NO: 646151 - RNA, 19 nt, Artificial Sequence
  Description of Artificial Sequence: Synthetic oligonucleotide
cgacucguacucaucgguc

SEQ ID NO: 646152 - RNA, 19 nt, Artificial Sequence
  Description of Artificial Sequence: Synthetic oligonucleotide
acuacucggggagccccau

SEQ ID NO: 646153 - RNA, 19 nt, Artificial Sequence
  Description of Artificial Sequence: Synthetic oligonucleotide
ucccgcucugugugacguc

SEQ ID NO: 646154 - RNA, 19 nt, Artificial Sequence
  Description of Artificial Sequence: Synthetic oligonucleotide
gguguucuccauggguuaa

SEQ ID NO: 646155 - RNA, 19 nt, Artificial Sequence
  Description of Artificial Sequence: Synthetic oligonucleotide
gaggcgcaccagcuuauuu

SEQ ID NO: 646156 - RNA, 19 nt, Artificial Sequence
  Description of Artificial Sequence: Synthetic oligonucleotide
ccucauaggagagauguau

SEQ ID NO: 646157 - RNA, 19 nt, Artificial Sequence
  Description of Artificial Sequence: Synthetic oligonucleotide
acucaucgguccacuugau

SEQ ID NO: 646158 - RNA, 19 nt, Artificial Sequence
  Description of Artificial Sequence: Synthetic oligonucleotide
gugugacgucucaguguug

SEQ ID NO: 646159 - RNA, 19 nt, Artificial Sequence
  Description of Artificial Sequence: Synthetic oligonucleotide
gaaggccgcacugcauccu

SEQ ID NO: 646160 - RNA, 19 nt, Artificial Sequence
  Description of Artificial Sequence: Synthetic oligonucleotide
cagcccuacgguacuugua

SEQ ID NO: 646161 - RNA, 19 nt, Artificial Sequence
  Description of Artificial Sequence: Synthetic oligonucleotide
cggaacugaugagagucac

SEQ ID NO: 646162 - RNA, 19 nt, Artificial Sequence
  Description of Artificial Sequence: Synthetic oligonucleotide
auugucccgucagguuuua

SEQ ID NO: 646163 - RNA, 19 nt, Artificial Sequence
  Description of Artificial Sequence: Synthetic oligonucleotide
gcuaagugacauacaaauu

SEQ ID NO: 646164 - RNA, 19 nt, Artificial Sequence
  Description of Artificial Sequence: Synthetic oligonucleotide
cuuggccugcugucuacau

SEQ ID NO: 646165 - RNA, 19 nt, Artificial Sequence
  Description of Artificial Sequence: Synthetic oligonucleotide
gccuccauauucaugccau

SEQ ID NO: 646166 - RNA, 19 nt, Artificial Sequence
  Description of Artificial Sequence: Synthetic oligonucleotide
cugcuccuagcccgaaacu

SEQ ID NO: 646167 - RNA, 19 nt, Artificial Sequence
  Description of Artificial Sequence: Synthetic oligonucleotide
ggaacugaugagagucacu

SEQ ID NO: 646168 - RNA, 19 nt, Artificial Sequence
  Description of Artificial Sequence: Synthetic oligonucleotide
gaauacuggcugagugcuu

SEQ ID NO: 646169 - RNA, 19 nt, Artificial Sequence
  Description of Artificial Sequence: Synthetic oligonucleotide
cgauuguaacaauggcgaa

SEQ ID NO: 646170 - RNA, 19 nt, Artificial Sequence
  Description of Artificial Sequence: Synthetic oligonucleotide
gcucgggaacacucuguua

SEQ ID NO: 646171 - RNA, 19 nt, Artificial Sequence
  Description of Artificial Sequence: Synthetic oligonucleotide
cacaucccucaaugguggu

SEQ ID NO: 646172 - RNA, 19 nt, Artificial Sequence
  Description of Artificial Sequence: Synthetic oligonucleotide
caguuggaccuacgauugu

SEQ ID NO: 646173 - RNA, 19 nt, Artificial Sequence
  Description of Artificial Sequence: Synthetic oligonucleotide
ccgacucguacucaucggu

SEQ ID NO: 646174 - RNA, 19 nt, Artificial Sequence
  Description of Artificial Sequence: Synthetic oligonucleotide
cccgaaacucugccuaacu

SEQ ID NO: 646175 - RNA, 19 nt, Artificial Sequence
  Description of Artificial Sequence: Synthetic oligonucleotide
gcccuacgguacuuguagu

SEQ ID NO: 646176 - RNA, 19 nt, Artificial Sequence
  Description of Artificial Sequence: Synthetic oligonucleotide
ccgaugggcucgggaacac

SEQ ID NO: 646177 - RNA, 19 nt, Artificial Sequence
  Description of Artificial Sequence: Synthetic oligonucleotide
ccagcccuacgguacuugu

SEQ ID NO: 646178 - RNA, 19 nt, Artificial Sequence
  Description of Artificial Sequence: Synthetic oligonucleotide
gcgggagucccuggagcuc

SEQ ID NO: 646179 - RNA, 19 nt, Artificial Sequence
  Description of Artificial Sequence: Synthetic oligonucleotide
cgcucugugugacgucuca

SEQ ID NO: 646180 - RNA, 19 nt, Artificial Sequence
  Description of Artificial Sequence: Synthetic oligonucleotide
ggccgcacugcauccucau

SEQ ID NO: 646181 - RNA, 19 nt, Artificial Sequence
  Description of Artificial Sequence: Synthetic oligonucleotide
ggcagugguuaagcacaua

SEQ ID NO: 646182 - RNA, 19 nt, Artificial Sequence
  Description of Artificial Sequence: Synthetic oligonucleotide
cccgcucugugugacgucu

SEQ ID NO: 646183 - RNA, 19 nt, Artificial Sequence
  Description of Artificial Sequence: Synthetic oligonucleotide
ccuggccgccaacaguccu

SEQ ID NO: 646184 - RNA, 19 nt, Artificial Sequence
  Description of Artificial Sequence: Synthetic oligonucleotide
gugucggagcuggucucuu

SEQ ID NO: 646185 - RNA, 19 nt, Artificial Sequence
  Description of Artificial Sequence: Synthetic oligonucleotide
ggccgccaacaguccugca

SEQ ID NO: 646186 - RNA, 19 nt, Artificial Sequence
  Description of Artificial Sequence: Synthetic oligonucleotide
uguaauuccaaaauuaaag

SEQ ID NO: 646187 - RNA, 19 nt, Artificial Sequence
  Description of Artificial Sequence: Synthetic oligonucleotide
acuaaaauucaccagagac

SEQ ID NO: 646188 - RNA, 19 nt, Artificial Sequence
  Description of Artificial Sequence: Synthetic oligonucleotide
auuuauaacuaaaagaccc

SEQ ID NO: 646189 - RNA, 19 nt, Artificial Sequence
  Description of Artificial Sequence: Synthetic oligonucleotide
aauuaagugcuauguaugc

SEQ ID NO: 646190 - RNA, 19 nt, Artificial Sequence
  Description of Artificial Sequence: Synthetic oligonucleotide
uaagccaucacuaaaauuc

SEQ ID NO: 646191 - RNA, 19 nt, Artificial Sequence
  Description of Artificial Sequence: Synthetic oligonucleotide
aaugguaugaaaauguguc

SEQ ID NO: 646192 - RNA, 19 nt, Artificial Sequence
  Description of Artificial Sequence: Synthetic oligonucleotide
aaauacaucacuaaguuca

SEQ ID NO: 646193 - RNA, 19 nt, Artificial Sequence
  Description of Artificial Sequence: Synthetic oligonucleotide
uccauaauggauaacugcg

SEQ ID NO: 646194 - RNA, 19 nt, Artificial Sequence
  Description of Artificial Sequence: Synthetic oligonucleotide
caaacuauacuucuggucg

SEQ ID NO: 646195 - RNA, 19 nt, Artificial Sequence
  Description of Artificial Sequence: Synthetic oligonucleotide
aguucuacuagucucgggc

SEQ ID NO: 646196 - RNA, 19 nt, Artificial Sequence
  Description of Artificial Sequence: Synthetic oligonucleotide
aaacugauuauacaccauc

SEQ ID NO: 646197 - RNA, 19 nt, Artificial Sequence
  Description of Artificial Sequence: Synthetic oligonucleotide
uuaaacaccuuauaacagg

SEQ ID NO: 646198 - RNA, 19 nt, Artificial Sequence
  Description of Artificial Sequence: Synthetic oligonucleotide
aauuguaucagaacuagag

SEQ ID NO: 646199 - RNA, 19 nt, Artificial Sequence
  Description of Artificial Sequence: Synthetic oligonucleotide
uuuauucccaaauugauaa

SEQ ID NO: 646200 - RNA, 19 nt, Artificial Sequence
  Description of Artificial Sequence: Synthetic oligonucleotide
agauccauaaagcuuggcc

SEQ ID NO: 646201 - RNA, 19 nt, Artificial Sequence
  Description of Artificial Sequence: Synthetic oligonucleotide
uuucagaagacaaugcgag

SEQ ID NO: 646202 - RNA, 19 nt, Artificial Sequence
  Description of Artificial Sequence: Synthetic oligonucleotide
ugcaauacgaauuaacucu

SEQ ID NO: 646203 - RNA, 19 nt, Artificial Sequence
  Description of Artificial Sequence: Synthetic oligonucleotide
uuugguagauccauaaagc

SEQ ID NO: 646204 - RNA, 19 nt, Artificial Sequence
  Description of Artificial Sequence: Synthetic oligonucleotide
ucucuuaugagcuaugcca

SEQ ID NO: 646205 - RNA, 19 nt, Artificial Sequence
  Description of Artificial Sequence: Synthetic oligonucleotide
uaaagcauaagccaucacu

SEQ ID NO: 646206 - RNA, 19 nt, Artificial Sequence
  Description of Artificial Sequence: Synthetic oligonucleotide
aaaccuaagguucauacau

SEQ ID NO: 646207 - RNA, 19 nt, Artificial Sequence
  Description of Artificial Sequence: Synthetic oligonucleotide
uucaucacuuagcaaaugg

SEQ ID NO: 646208 - RNA, 19 nt, Artificial Sequence
  Description of Artificial Sequence: Synthetic oligonucleotide
ugcgcaaauguucuaagcg

SEQ ID NO: 646209 - RNA, 19 nt, Artificial Sequence
  Description of Artificial Sequence: Synthetic oligonucleotide
aaaaggaaucacccgacuc

SEQ ID NO: 646210 - RNA, 19 nt, Artificial Sequence
  Description of Artificial Sequence: Synthetic oligonucleotide
uuguaucagaacuagagca

SEQ ID NO: 646211 - RNA, 19 nt, Artificial Sequence
  Description of Artificial Sequence: Synthetic oligonucleotide
aaaccuauuaguauacuuc

SEQ ID NO: 646212 - RNA, 19 nt, Artificial Sequence
  Description of Artificial Sequence: Synthetic oligonucleotide
uucauaacgaaagaauggg

SEQ ID NO: 646213 - RNA, 19 nt, Artificial Sequence
  Description of Artificial Sequence: Synthetic oligonucleotide
uuugauugugauuagacua

SEQ ID NO: 646214 - RNA, 19 nt, Artificial Sequence
  Description of Artificial Sequence: Synthetic oligonucleotide
auuaguauacuucuuagau

SEQ ID NO: 646215 - RNA, 19 nt, Artificial Sequence
  Description of Artificial Sequence: Synthetic oligonucleotide
aacaccuuauaacaggugu

SEQ ID NO: 646216 - RNA, 19 nt, Artificial Sequence
  Description of Artificial Sequence: Synthetic oligonucleotide
uauuucauaacgaaagaau

SEQ ID NO: 646217 - RNA, 19 nt, Artificial Sequence
  Description of Artificial Sequence: Synthetic oligonucleotide
uuauaauacaguuucuuaa

SEQ ID NO: 646218 - RNA, 19 nt, Artificial Sequence
  Description of Artificial Sequence: Synthetic oligonucleotide
ucuaucuuaagugaggaca

SEQ ID NO: 646219 - RNA, 19 nt, Artificial Sequence
  Description of Artificial Sequence: Synthetic oligonucleotide
uuuacucaaucucuuauga

SEQ ID NO: 646220 - RNA, 19 nt, Artificial Sequence
  Description of Artificial Sequence: Synthetic oligonucleotide
aauuaacucuucaucaagg

SEQ ID NO: 646221 - RNA, 19 nt, Artificial Sequence
  Description of Artificial Sequence: Synthetic oligonucleotide
uacucaaucucuuaugagc

SEQ ID NO: 646222 - RNA, 19 nt, Artificial Sequence
  Description of Artificial Sequence: Synthetic oligonucleotide
aaacuguaggcauuccaac

SEQ ID NO: 646223 - RNA, 19 nt, Artificial Sequence
  Description of Artificial Sequence: Synthetic oligonucleotide
aaaggaaucacccgacuca

SEQ ID NO: 646224 - RNA, 19 nt, Artificial Sequence
  Description of Artificial Sequence: Synthetic oligonucleotide
aucacuaaaauucaccaga

SEQ ID NO: 646225 - RNA, 19 nt, Artificial Sequence
  Description of Artificial Sequence: Synthetic oligonucleotide
cuuugguagauccauaaag

SEQ ID NO: 646226 - RNA, 19 nt, Artificial Sequence
  Description of Artificial Sequence: Synthetic oligonucleotide
guaacaauucaucacuuag

SEQ ID NO: 646227 - RNA, 19 nt, Artificial Sequence
  Description of Artificial Sequence: Synthetic oligonucleotide
auuaacucuucaucaaggg

SEQ ID NO: 646228 - RNA, 19 nt, Artificial Sequence
  Description of Artificial Sequence: Synthetic oligonucleotide
ucaucuaucuuaagugagg

SEQ ID NO: 646229 - RNA, 19 nt, Artificial Sequence
  Description of Artificial Sequence: Synthetic oligonucleotide
aauacgaauuaacucuuca

SEQ ID NO: 646230 - RNA, 19 nt, Artificial Sequence
  Description of Artificial Sequence: Synthetic oligonucleotide
auuuggaguuuacaaacac

SEQ ID NO: 646231 - RNA, 19 nt, Artificial Sequence
  Description of Artificial Sequence: Synthetic oligonucleotide
cuaguuauucaucaugccc

SEQ ID NO: 646232 - RNA, 19 nt, Artificial Sequence
  Description of Artificial Sequence: Synthetic oligonucleotide
ugcuaguuauucaucaugc

SEQ ID NO: 646233 - RNA, 19 nt, Artificial Sequence
  Description of Artificial Sequence: Synthetic oligonucleotide
auaucaugcaguccuuacc

SEQ ID NO: 646234 - RNA, 19 nt, Artificial Sequence
  Description of Artificial Sequence: Synthetic oligonucleotide
uacauagcuaaacacuacc

SEQ ID NO: 646235 - RNA, 19 nt, Artificial Sequence
  Description of Artificial Sequence: Synthetic oligonucleotide
auggauaacugcgacaggc

SEQ ID NO: 646236 - RNA, 19 nt, Artificial Sequence
  Description of Artificial Sequence: Synthetic oligonucleotide
ugagcuaugccauacauuu

SEQ ID NO: 646237 - RNA, 19 nt, Artificial Sequence
  Description of Artificial Sequence: Synthetic oligonucleotide
uuaucaguguucuaaguac

SEQ ID NO: 646238 - RNA, 19 nt, Artificial Sequence
  Description of Artificial Sequence: Synthetic oligonucleotide
uaacaauucaucacuuagc

SEQ ID NO: 646239 - RNA, 19 nt, Artificial Sequence
  Description of Artificial Sequence: Synthetic oligonucleotide
uuuauaacuaaaagacccu

SEQ ID NO: 646240 - RNA, 19 nt, Artificial Sequence
  Description of Artificial Sequence: Synthetic oligonucleotide
aaacuauacuucuggucgg

SEQ ID NO: 646241 - RNA, 19 nt, Artificial Sequence
  Description of Artificial Sequence: Synthetic oligonucleotide
gagcuguugaaauaagucc

SEQ ID NO: 646242 - RNA, 19 nt, Artificial Sequence
  Description of Artificial Sequence: Synthetic oligonucleotide
uugugauuagacuacaaaa

SEQ ID NO: 646243 - RNA, 19 nt, Artificial Sequence
  Description of Artificial Sequence: Synthetic oligonucleotide
guuucauaccacuugaaac

SEQ ID NO: 646244 - RNA, 19 nt, Artificial Sequence
  Description of Artificial Sequence: Synthetic oligonucleotide
gaauuaacucuucaucaag

SEQ ID NO: 646245 - RNA, 19 nt, Artificial Sequence
  Description of Artificial Sequence: Synthetic oligonucleotide
uuaguauacuucuuagaug

SEQ ID NO: 646246 - RNA, 19 nt, Artificial Sequence
  Description of Artificial Sequence: Synthetic oligonucleotide
gccacuagcacuuuaaggg

SEQ ID NO: 646247 - RNA, 19 nt, Artificial Sequence
  Description of Artificial Sequence: Synthetic oligonucleotide
ucaugaaaacuguucauca

SEQ ID NO: 646248 - RNA, 19 nt, Artificial Sequence
  Description of Artificial Sequence: Synthetic oligonucleotide
uuagauguuagaauacaaa

SEQ ID NO: 646249 - RNA, 19 nt, Artificial Sequence
  Description of Artificial Sequence: Synthetic oligonucleotide
aaagaauaccugcuggaga

SEQ ID NO: 646250 - RNA, 19 nt, Artificial Sequence
  Description of Artificial Sequence: Synthetic oligonucleotide
uacgaauuaacucuucauc

SEQ ID NO: 646251 - RNA, 19 nt, Artificial Sequence
  Description of Artificial Sequence: Synthetic oligonucleotide
acgaauuaacucuucauca

SEQ ID NO: 646252 - RNA, 19 nt, Artificial Sequence
  Description of Artificial Sequence: Synthetic oligonucleotide
agauguuagaauacaaagg

SEQ ID NO: 646253 - RNA, 19 nt, Artificial Sequence
  Description of Artificial Sequence: Synthetic oligonucleotide
cauaacgaaagaauggguc

SEQ ID NO: 646254 - RNA, 19 nt, Artificial Sequence
  Description of Artificial Sequence: Synthetic oligonucleotide
auuaaggugcuaguuauuc

SEQ ID NO: 646255 - RNA, 19 nt, Artificial Sequence
  Description of Artificial Sequence: Synthetic oligonucleotide
cuauuaguauacuucuuag

SEQ ID NO: 646256 - RNA, 19 nt, Artificial Sequence
  Description of Artificial Sequence: Synthetic oligonucleotide
cauuugauugugauuagac

SEQ ID NO: 646257 - RNA, 19 nt, Artificial Sequence
  Description of Artificial Sequence: Synthetic oligonucleotide
uuccauaauggauaacugc

SEQ ID NO: 646258 - RNA, 19 nt, Artificial Sequence
  Description of Artificial Sequence: Synthetic oligonucleotide
auaacgaaagaauggguca

SEQ ID NO: 646259 - RNA, 19 nt, Artificial Sequence
  Description of Artificial Sequence: Synthetic oligonucleotide
gaagauaccaaauuucugu

SEQ ID NO: 646260 - RNA, 19 nt, Artificial Sequence
  Description of Artificial Sequence: Synthetic oligonucleotide
agguauuucauaacgaaag

SEQ ID NO: 646261 - RNA, 19 nt, Artificial Sequence
  Description of Artificial Sequence: Synthetic oligonucleotide
aaauguucuaagcgaacgu

SEQ ID NO: 646262 - RNA, 19 nt, Artificial Sequence
  Description of Artificial Sequence: Synthetic oligonucleotide
uuguauuguagcuauguaa

SEQ ID NO: 646263 - RNA, 19 nt, Artificial Sequence
  Description of Artificial Sequence: Synthetic oligonucleotide
uugauugugauuagacuac

SEQ ID NO: 646264 - RNA, 19 nt, Artificial Sequence
  Description of Artificial Sequence: Synthetic oligonucleotide
aauguucuaagcgaacgug

SEQ ID NO: 646265 - RNA, 19 nt, Artificial Sequence
  Description of Artificial Sequence: Synthetic oligonucleotide
aagguucauacauagcuaa

SEQ ID NO: 646266 - RNA, 19 nt, Artificial Sequence
  Description of Artificial Sequence: Synthetic oligonucleotide
aaugcgcaaauguucuaag

SEQ ID NO: 646267 - RNA, 19 nt, Artificial Sequence
  Description of Artificial Sequence: Synthetic oligonucleotide
aucucuuaugagcuaugcc

SEQ ID NO: 646268 - RNA, 19 nt, Artificial Sequence
  Description of Artificial Sequence: Synthetic oligonucleotide
uuucugugccacaaaguag

SEQ ID NO: 646269 - RNA, 19 nt, Artificial Sequence
  Description of Artificial Sequence: Synthetic oligonucleotide
cugaacuguacagauaacg

SEQ ID NO: 646270 - RNA, 19 nt, Artificial Sequence
  Description of Artificial Sequence: Synthetic oligonucleotide
uauuaguauacuucuuaga

SEQ ID NO: 646271 - RNA, 19 nt, Artificial Sequence
  Description of Artificial Sequence: Synthetic oligonucleotide
gaugcuuagacacuuccca

SEQ ID NO: 646272 - RNA, 19 nt, Artificial Sequence
  Description of Artificial Sequence: Synthetic oligonucleotide
ugcuauguaugcauuuugc

SEQ ID NO: 646273 - RNA, 19 nt, Artificial Sequence
  Description of Artificial Sequence: Synthetic oligonucleotide
aagacccuaaaaugucagg

SEQ ID NO: 646274 - RNA, 19 nt, Artificial Sequence
  Description of Artificial Sequence: Synthetic oligonucleotide
ugccaagaugcuuagacac

SEQ ID NO: 646275 - RNA, 19 nt, Artificial Sequence
  Description of Artificial Sequence: Synthetic oligonucleotide
ugcaugagacuucacauuc

SEQ ID NO: 646276 - RNA, 19 nt, Artificial Sequence
  Description of Artificial Sequence: Synthetic oligonucleotide
agaauuguaucagaacuag

SEQ ID NO: 646277 - RNA, 19 nt, Artificial Sequence
  Description of Artificial Sequence: Synthetic oligonucleotide
uauaacuaaaagacccuaa

SEQ ID NO: 646278 - RNA, 19 nt, Artificial Sequence
  Description of Artificial Sequence: Synthetic oligonucleotide
uguaucagaacuagagcaa

SEQ ID NO: 646279 - RNA, 19 nt, Artificial Sequence
  Description of Artificial Sequence: Synthetic oligonucleotide
caaauguucuaagcgaacg

SEQ ID NO: 646280 - RNA, 19 nt, Artificial Sequence
  Description of Artificial Sequence: Synthetic oligonucleotide
agcuaugccauacauuucu

SEQ ID NO: 646281 - RNA, 19 nt, Artificial Sequence
  Description of Artificial Sequence: Synthetic oligonucleotide
cauuauaagcucacugaag

SEQ ID NO: 646282 - RNA, 19 nt, Artificial Sequence
  Description of Artificial Sequence: Synthetic oligonucleotide
uucucguaaaccgugacac

SEQ ID NO: 646283 - RNA, 19 nt, Artificial Sequence
  Description of Artificial Sequence: Synthetic oligonucleotide
auaacugcgacaggcggcc

SEQ ID NO: 646284 - RNA, 19 nt, Artificial Sequence
  Description of Artificial Sequence: Synthetic oligonucleotide
ugcgaguaacaauucauca

SEQ ID NO: 646285 - RNA, 19 nt, Artificial Sequence
  Description of Artificial Sequence: Synthetic oligonucleotide
caagcugugauaauauguc

SEQ ID NO: 646286 - RNA, 19 nt, Artificial Sequence
  Description of Artificial Sequence: Synthetic oligonucleotide
uggauaacugcgacaggcg

SEQ ID NO: 646287 - RNA, 19 nt, Artificial Sequence
  Description of Artificial Sequence: Synthetic oligonucleotide
uuaccaaguaggcaucaug

SEQ ID NO: 646288 - RNA, 19 nt, Artificial Sequence
  Description of Artificial Sequence: Synthetic oligonucleotide
caaguaggcaucaugucug

SEQ ID NO: 646289 - RNA, 19 nt, Artificial Sequence
  Description of Artificial Sequence: Synthetic oligonucleotide
uaguaacuaucuuuauucc

SEQ ID NO: 646290 - RNA, 19 nt, Artificial Sequence
  Description of Artificial Sequence: Synthetic oligonucleotide
uucagaaaccuauuaguau

SEQ ID NO: 646291 - RNA, 19 nt, Artificial Sequence
  Description of Artificial Sequence: Synthetic oligonucleotide
aaagcauaagccaucacua

SEQ ID NO: 646292 - RNA, 19 nt, Artificial Sequence
  Description of Artificial Sequence: Synthetic oligonucleotide
augcgcaaauguucuaagc

SEQ ID NO: 646293 - RNA, 19 nt, Artificial Sequence
  Description of Artificial Sequence: Synthetic oligonucleotide
agugaaucugcuccaaacu

SEQ ID NO: 646294 - RNA, 19 nt, Artificial Sequence
  Description of Artificial Sequence: Synthetic oligonucleotide
aaagugagacuuugguaga

SEQ ID NO: 646295 - RNA, 19 nt, Artificial Sequence
  Description of Artificial Sequence: Synthetic oligonucleotide
ucuaaguacucugauauuu

SEQ ID NO: 646296 - RNA, 19 nt, Artificial Sequence
  Description of Artificial Sequence: Synthetic oligonucleotide
uucuggucgggaauuaaca

SEQ ID NO: 646297 - RNA, 19 nt, Artificial Sequence
  Description of Artificial Sequence: Synthetic oligonucleotide
gguagauccauaaagcuug

SEQ ID NO: 646298 - RNA, 19 nt, Artificial Sequence
  Description of Artificial Sequence: Synthetic oligonucleotide
uucagaguugacccuagcu

SEQ ID NO: 646299 - RNA, 19 nt, Artificial Sequence
  Description of Artificial Sequence: Synthetic oligonucleotide
aauggauaacugcgacagg

SEQ ID NO: 646300 - RNA, 19 nt, Artificial Sequence
  Description of Artificial Sequence: Synthetic oligonucleotide
uacaucacuaaguucacuu

SEQ ID NO: 646301 - RNA, 19 nt, Artificial Sequence
  Description of Artificial Sequence: Synthetic oligonucleotide
cauaauggauaacugcgac

SEQ ID NO: 646302 - RNA, 19 nt, Artificial Sequence
  Description of Artificial Sequence: Synthetic oligonucleotide
aaagacccuaaaaugucag

SEQ ID NO: 646303 - RNA, 19 nt, Artificial Sequence
  Description of Artificial Sequence: Synthetic oligonucleotide
gaacuguacagauaacguc

SEQ ID NO: 646304 - RNA, 19 nt, Artificial Sequence
  Description of Artificial Sequence: Synthetic oligonucleotide
ucauaacgaaagaaugggu

SEQ ID NO: 646305 - RNA, 19 nt, Artificial Sequence
  Description of Artificial Sequence: Synthetic oligonucleotide
uagaauuguaucagaacua

SEQ ID NO: 646306 - RNA, 19 nt, Artificial Sequence
  Description of Artificial Sequence: Synthetic oligonucleotide
agcagcuugagugugucac

SEQ ID NO: 646307 - RNA, 19 nt, Artificial Sequence
  Description of Artificial Sequence: Synthetic oligonucleotide
cuauguaauuccaaaauua

SEQ ID NO: 646308 - RNA, 19 nt, Artificial Sequence
  Description of Artificial Sequence: Synthetic oligonucleotide
aaguaggcaucaugucugg

SEQ ID NO: 646309 - RNA, 19 nt, Artificial Sequence
  Description of Artificial Sequence: Synthetic oligonucleotide
aacugcgacaggcggcccc

SEQ ID NO: 646310 - RNA, 19 nt, Artificial Sequence
  Description of Artificial Sequence: Synthetic oligonucleotide
uugggcgaguguuugauga

SEQ ID NO: 646311 - RNA, 19 nt, Artificial Sequence
  Description of Artificial Sequence: Synthetic oligonucleotide
uuccugagcuauauuaaac

SEQ ID NO: 646312 - RNA, 19 nt, Artificial Sequence
  Description of Artificial Sequence: Synthetic oligonucleotide
augcauagagaacauuuca

SEQ ID NO: 646313 - RNA, 19 nt, Artificial Sequence
  Description of Artificial Sequence: Synthetic oligonucleotide
uuuaagggauggaucgucu

SEQ ID NO: 646314 - RNA, 19 nt, Artificial Sequence
  Description of Artificial Sequence: Synthetic oligonucleotide
uccgcugauucuuugcugc

SEQ ID NO: 646315 - RNA, 19 nt, Artificial Sequence
  Description of Artificial Sequence: Synthetic oligonucleotide
acuagucucgggcagguca

SEQ ID NO: 646316 - RNA, 19 nt, Artificial Sequence
  Description of Artificial Sequence: Synthetic oligonucleotide
aaugcgaguaacaauucau

SEQ ID NO: 646317 - RNA, 19 nt, Artificial Sequence
  Description of Artificial Sequence: Synthetic oligonucleotide
accaucaaauccauucccc

SEQ ID NO: 646318 - RNA, 19 nt, Artificial Sequence
  Description of Artificial Sequence: Synthetic oligonucleotide
aacugauuauacaccauca

SEQ ID NO: 646319 - RNA, 19 nt, Artificial Sequence
  Description of Artificial Sequence: Synthetic oligonucleotide
caucacuaaaauucaccag

SEQ ID NO: 646320 - RNA, 19 nt, Artificial Sequence
  Description of Artificial Sequence: Synthetic oligonucleotide
aucuaucuuaagugaggac

SEQ ID NO: 646321 - RNA, 19 nt, Artificial Sequence
  Description of Artificial Sequence: Synthetic oligonucleotide
uuaaaugccucuggcacca

SEQ ID NO: 646322 - RNA, 19 nt, Artificial Sequence
  Description of Artificial Sequence: Synthetic oligonucleotide
uuaaggugcuaguuauuca

SEQ ID NO: 646323 - RNA, 19 nt, Artificial Sequence
  Description of Artificial Sequence: Synthetic oligonucleotide
aguucucguaaaccgugac

SEQ ID NO: 646324 - RNA, 19 nt, Artificial Sequence
  Description of Artificial Sequence: Synthetic oligonucleotide
uucuacuagucucgggcag

SEQ ID NO: 646325 - RNA, 19 nt, Artificial Sequence
  Description of Artificial Sequence: Synthetic oligonucleotide
ugacccuagcucuacgugc

SEQ ID NO: 646326 - RNA, 19 nt, Artificial Sequence
  Description of Artificial Sequence: Synthetic oligonucleotide
aacuauacuucuggucggg

SEQ ID NO: 646327 - RNA, 19 nt, Artificial Sequence
  Description of Artificial Sequence: Synthetic oligonucleotide
uuugcaacguucugcaaua

SEQ ID NO: 646328 - RNA, 19 nt, Artificial Sequence
  Description of Artificial Sequence: Synthetic oligonucleotide
uguagcuauguaauuccaa

SEQ ID NO: 646329 - RNA, 19 nt, Artificial Sequence
  Description of Artificial Sequence: Synthetic oligonucleotide
aacguucugcaauacgaau

SEQ ID NO: 646330 - RNA, 19 nt, Artificial Sequence
  Description of Artificial Sequence: Synthetic oligonucleotide
cuuccauaauggauaacug

SEQ ID NO: 646331 - RNA, 19 nt, Artificial Sequence
  Description of Artificial Sequence: Synthetic oligonucleotide
aauuaacacuucuuccaua

SEQ ID NO: 646332 - RNA, 19 nt, Artificial Sequence
  Description of Artificial Sequence: Synthetic oligonucleotide
aauaaccacugcaacauuu

SEQ ID NO: 646333 - RNA, 19 nt, Artificial Sequence
  Description of Artificial Sequence: Synthetic oligonucleotide
gauggaucgucuacugggg

SEQ ID NO: 646334 - RNA, 19 nt, Artificial Sequence
  Description of Artificial Sequence: Synthetic oligonucleotide
ugguagauccauaaagcuu

SEQ ID NO: 646335 - RNA, 19 nt, Artificial Sequence
  Description of Artificial Sequence: Synthetic oligonucleotide
gaaaccuaagguucauaca

SEQ ID NO: 646336 - RNA, 19 nt, Artificial Sequence
  Description of Artificial Sequence: Synthetic oligonucleotide
ucuggucgggaauuaacac

SEQ ID NO: 646337 - RNA, 19 nt, Artificial Sequence
  Description of Artificial Sequence: Synthetic oligonucleotide
acaagcugugauaauaugu

SEQ ID NO: 646338 - RNA, 19 nt, Artificial Sequence
  Description of Artificial Sequence: Synthetic oligonucleotide
uucaccagagacuaauauu

SEQ ID NO: 646339 - RNA, 19 nt, Artificial Sequence
  Description of Artificial Sequence: Synthetic oligonucleotide
cagaaaccuauuaguauac

SEQ ID NO: 646340 - RNA, 19 nt, Artificial Sequence
  Description of Artificial Sequence: Synthetic oligonucleotide
auacgaauuaacucuucau

SEQ ID NO: 646341 - RNA, 19 nt, Artificial Sequence
  Description of Artificial Sequence: Synthetic oligonucleotide
aggugcuaguuauucauca

SEQ ID NO: 646342 - RNA, 19 nt, Artificial Sequence
  Description of Artificial Sequence: Synthetic oligonucleotide
uggucgggaauuaacacuu

SEQ ID NO: 646343 - RNA, 19 nt, Artificial Sequence
  Description of Artificial Sequence: Synthetic oligonucleotide
ucuacuagucucgggcagg

SEQ ID NO: 646344 - RNA, 19 nt, Artificial Sequence
  Description of Artificial Sequence: Synthetic oligonucleotide
guagcuauguaauuccaaa

SEQ ID NO: 646345 - RNA, 19 nt, Artificial Sequence
  Description of Artificial Sequence: Synthetic oligonucleotide
acccgacucaaacuguagg

SEQ ID NO: 646346 - RNA, 19 nt, Artificial Sequence
  Description of Artificial Sequence: Synthetic oligonucleotide
agagacuaauauucuuuca

SEQ ID NO: 646347 - RNA, 19 nt, Artificial Sequence
  Description of Artificial Sequence: Synthetic oligonucleotide
gugcuaguuauucaucaug

SEQ ID NO: 646348 - RNA, 19 nt, Artificial Sequence
  Description of Artificial Sequence: Synthetic oligonucleotide
uucucucacaaagugcuca

SEQ ID NO: 646349 - RNA, 19 nt, Artificial Sequence
  Description of Artificial Sequence: Synthetic oligonucleotide
cugacaacaucaaugcgca

SEQ ID NO: 646350 - RNA, 19 nt, Artificial Sequence
  Description of Artificial Sequence: Synthetic oligonucleotide
uuauaacuaaaagacccua

SEQ ID NO: 646351 - RNA, 19 nt, Artificial Sequence
  Description of Artificial Sequence: Synthetic oligonucleotide
gauaacugcgacaggcggc

SEQ ID NO: 646352 - RNA, 19 nt, Artificial Sequence
  Description of Artificial Sequence: Synthetic oligonucleotide
ugagacuuugguagaucca

SEQ ID NO: 646353 - RNA, 19 nt, Artificial Sequence
  Description of Artificial Sequence: Synthetic oligonucleotide
aagcauaagccaucacuaa

SEQ ID NO: 646354 - RNA, 19 nt, Artificial Sequence
  Description of Artificial Sequence: Synthetic oligonucleotide
caaagaauaccugcuggag

SEQ ID NO: 646355 - RNA, 19 nt, Artificial Sequence
  Description of Artificial Sequence: Synthetic oligonucleotide
cuuaugagcuaugccauac

SEQ ID NO: 646356 - RNA, 19 nt, Artificial Sequence
  Description of Artificial Sequence: Synthetic oligonucleotide
uucacuuugggcgaguguu

SEQ ID NO: 646357 - RNA, 19 nt, Artificial Sequence
  Description of Artificial Sequence: Synthetic oligonucleotide
uuaugagcuaugccauaca

SEQ ID NO: 646358 - RNA, 19 nt, Artificial Sequence
  Description of Artificial Sequence: Synthetic oligonucleotide
auacauagcuaaacacuac

SEQ ID NO: 646359 - RNA, 19 nt, Artificial Sequence
  Description of Artificial Sequence: Synthetic oligonucleotide
augcuuagacacuucccag

SEQ ID NO: 646360 - RNA, 19 nt, Artificial Sequence
  Description of Artificial Sequence: Synthetic oligonucleotide
agacccuaaaaugucaggu

SEQ ID NO: 646361 - RNA, 19 nt, Artificial Sequence
  Description of Artificial Sequence: Synthetic oligonucleotide
aaugguaguucagggccag

SEQ ID NO: 646362 - RNA, 19 nt, Artificial Sequence
  Description of Artificial Sequence: Synthetic oligonucleotide
ccaaaguaaagaugagugg

SEQ ID NO: 646363 - RNA, 19 nt, Artificial Sequence
  Description of Artificial Sequence: Synthetic oligonucleotide
uccaaacuauacuucuggu

SEQ ID NO: 646364 - RNA, 19 nt, Artificial Sequence
  Description of Artificial Sequence: Synthetic oligonucleotide
ugcuuagacacuucccagu

SEQ ID NO: 646365 - RNA, 19 nt, Artificial Sequence
  Description of Artificial Sequence: Synthetic oligonucleotide
uagcuauguaauuccaaaa

SEQ ID NO: 646366 - RNA, 19 nt, Artificial Sequence
  Description of Artificial Sequence: Synthetic oligonucleotide
uuuagcagcuugagugugu

SEQ ID NO: 646367 - RNA, 19 nt, Artificial Sequence
  Description of Artificial Sequence: Synthetic oligonucleotide
agauaacgucuuuugauuu

SEQ ID NO: 646368 - RNA, 19 nt, Artificial Sequence
  Description of Artificial Sequence: Synthetic oligonucleotide
cucguaaaccgugacacug

SEQ ID NO: 646369 - RNA, 19 nt, Artificial Sequence
  Description of Artificial Sequence: Synthetic oligonucleotide
acuagagcaaauaaacuuu

SEQ ID NO: 646370 - RNA, 19 nt, Artificial Sequence
  Description of Artificial Sequence: Synthetic oligonucleotide
ucguaaaccgugacacuga

SEQ ID NO: 646371 - RNA, 19 nt, Artificial Sequence
  Description of Artificial Sequence: Synthetic oligonucleotide
uguacagauaacgucuuuu

SEQ ID NO: 646372 - RNA, 19 nt, Artificial Sequence
  Description of Artificial Sequence: Synthetic oligonucleotide
aaggugcuaguuauucauc

SEQ ID NO: 646373 - RNA, 19 nt, Artificial Sequence
  Description of Artificial Sequence: Synthetic oligonucleotide
ugcccuauaucaugcaguc

SEQ ID NO: 646374 - RNA, 19 nt, Artificial Sequence
  Description of Artificial Sequence: Synthetic oligonucleotide
aucaaugcgcaaauguucu

SEQ ID NO: 646375 - RNA, 19 nt, Artificial Sequence
  Description of Artificial Sequence: Synthetic oligonucleotide
uucuaagcgaacguguuuu

SEQ ID NO: 646376 - RNA, 19 nt, Artificial Sequence
  Description of Artificial Sequence: Synthetic oligonucleotide
ugucuggaaaccacacccu

SEQ ID NO: 646377 - RNA, 19 nt, Artificial Sequence
  Description of Artificial Sequence: Synthetic oligonucleotide
augcgaguaacaauucauc

SEQ ID NO: 646378 - RNA, 19 nt, Artificial Sequence
  Description of Artificial Sequence: Synthetic oligonucleotide
aguaacaauucaucacuua

SEQ ID NO: 646379 - RNA, 19 nt, Artificial Sequence
  Description of Artificial Sequence: Synthetic oligonucleotide
ggaaucacccgacucaaac

SEQ ID NO: 646380 - RNA, 19 nt, Artificial Sequence
  Description of Artificial Sequence: Synthetic oligonucleotide
cuucuggucgggaauuaac

SEQ ID NO: 646381 - RNA, 19 nt, Artificial Sequence
  Description of Artificial Sequence: Synthetic oligonucleotide
cauccuuaauaaccacugc

SEQ ID NO: 646382 - RNA, 19 nt, Artificial Sequence
  Description of Artificial Sequence: Synthetic oligonucleotide
auaagccaucacuaaaauu

SEQ ID NO: 646383 - RNA, 19 nt, Artificial Sequence
  Description of Artificial Sequence: Synthetic oligonucleotide
aaaugccucuggcaccaca

SEQ ID NO: 646384 - RNA, 19 nt, Artificial Sequence
  Description of Artificial Sequence: Synthetic oligonucleotide
gauuuggaguuuacaaaca

SEQ ID NO: 646385 - RNA, 19 nt, Artificial Sequence
  Description of Artificial Sequence: Synthetic oligonucleotide
cuagcacuuuaagggaugg

SEQ ID NO: 646386 - RNA, 19 nt, Artificial Sequence
  Description of Artificial Sequence: Synthetic oligonucleotide
uaacgaaagaaugggucaa

SEQ ID NO: 646387 - RNA, 19 nt, Artificial Sequence
  Description of Artificial Sequence: Synthetic oligonucleotide
ggccacuagcacuuuaagg

SEQ ID NO: 646388 - RNA, 19 nt, Artificial Sequence
  Description of Artificial Sequence: Synthetic oligonucleotide
uacgugccauccuuaauaa

SEQ ID NO: 646389 - RNA, 19 nt, Artificial Sequence
  Description of Artificial Sequence: Synthetic oligonucleotide
aguugacccuagcucuacg

SEQ ID NO: 646390 - RNA, 19 nt, Artificial Sequence
  Description of Artificial Sequence: Synthetic oligonucleotide
ucucucacaaagugcucac

SEQ ID NO: 646391 - RNA, 19 nt, Artificial Sequence
  Description of Artificial Sequence: Synthetic oligonucleotide
uaagugcuauguaugcauu

SEQ ID NO: 646392 - RNA, 19 nt, Artificial Sequence
  Description of Artificial Sequence: Synthetic oligonucleotide
ucgggaauuaacacuucuu

SEQ ID NO: 646393 - RNA, 19 nt, Artificial Sequence
  Description of Artificial Sequence: Synthetic oligonucleotide
agcuaaacacuaccucucu

SEQ ID NO: 646394 - RNA, 19 nt, Artificial Sequence
  Description of Artificial Sequence: Synthetic oligonucleotide
agugagacuuugguagauc

SEQ ID NO: 646395 - RNA, 19 nt, Artificial Sequence
  Description of Artificial Sequence: Synthetic oligonucleotide
caucacuuagcaaauggua

SEQ ID NO: 646396 - RNA, 19 nt, Artificial Sequence
  Description of Artificial Sequence: Synthetic oligonucleotide
ccauccuuaauaaccacug

SEQ ID NO: 646397 - RNA, 19 nt, Artificial Sequence
  Description of Artificial Sequence: Synthetic oligonucleotide
cuuuaagggauggaucguc

SEQ ID NO: 646398 - RNA, 19 nt, Artificial Sequence
  Description of Artificial Sequence: Synthetic oligonucleotide
uuggccgagcuguugaaau

SEQ ID NO: 646399 - RNA, 19 nt, Artificial Sequence
  Description of Artificial Sequence: Synthetic oligonucleotide
aagaaugggucaaauucuu

SEQ ID NO: 646400 - RNA, 19 nt, Artificial Sequence
  Description of Artificial Sequence: Synthetic oligonucleotide
cacaagcugugauaauaug

SEQ ID NO: 646401 - RNA, 19 nt, Artificial Sequence
  Description of Artificial Sequence: Synthetic oligonucleotide
guaaagaugaguggcaggu

SEQ ID NO: 646402 - RNA, 19 nt, Artificial Sequence
  Description of Artificial Sequence: Synthetic oligonucleotide
aaggaaucacccgacucaa

SEQ ID NO: 646403 - RNA, 19 nt, Artificial Sequence
  Description of Artificial Sequence: Synthetic oligonucleotide
auaccugcuggagagacau

SEQ ID NO: 646404 - RNA, 19 nt, Artificial Sequence
  Description of Artificial Sequence: Synthetic oligonucleotide
gguucauacauagcuaaac

SEQ ID NO: 646405 - RNA, 19 nt, Artificial Sequence
  Description of Artificial Sequence: Synthetic oligonucleotide
acaaugcgaguaacaauuc

SEQ ID NO: 646406 - RNA, 19 nt, Artificial Sequence
  Description of Artificial Sequence: Synthetic oligonucleotide
caaaauuaagugcuaugua

SEQ ID NO: 646407 - RNA, 19 nt, Artificial Sequence
  Description of Artificial Sequence: Synthetic oligonucleotide
uuugggcgaguguuugaug

SEQ ID NO: 646408 - RNA, 19 nt, Artificial Sequence
  Description of Artificial Sequence: Synthetic oligonucleotide
cuagcucuacgugccaucc

SEQ ID NO: 646409 - RNA, 19 nt, Artificial Sequence
  Description of Artificial Sequence: Synthetic oligonucleotide
agaaugggucaaauucuuc

SEQ ID NO: 646410 - RNA, 19 nt, Artificial Sequence
  Description of Artificial Sequence: Synthetic oligonucleotide
uuaagggauggaucgucua

SEQ ID NO: 646411 - RNA, 19 nt, Artificial Sequence
  Description of Artificial Sequence: Synthetic oligonucleotide
uccauaaagcuuggccgag

SEQ ID NO: 646412 - RNA, 19 nt, Artificial Sequence
  Description of Artificial Sequence: Synthetic oligonucleotide
auaaagcuuggccgagcug

SEQ ID NO: 646413 - RNA, 19 nt, Artificial Sequence
  Description of Artificial Sequence: Synthetic oligonucleotide
cuacgugccauccuuaaua

SEQ ID NO: 646414 - RNA, 19 nt, Artificial Sequence
  Description of Artificial Sequence: Synthetic oligonucleotide
gcgaguaacaauucaucac

SEQ ID NO: 646415 - RNA, 19 nt, Artificial Sequence
  Description of Artificial Sequence: Synthetic oligonucleotide
acgugccauccuuaauaac

SEQ ID NO: 646416 - RNA, 19 nt, Artificial Sequence
  Description of Artificial Sequence: Synthetic oligonucleotide
caauacgaauuaacucuuc

SEQ ID NO: 646417 - RNA, 19 nt, Artificial Sequence
  Description of Artificial Sequence: Synthetic oligonucleotide
uaaguucacuuugggcgag

SEQ ID NO: 646418 - RNA, 19 nt, Artificial Sequence
  Description of Artificial Sequence: Synthetic oligonucleotide
cacuaccucucuucuauuc

SEQ ID NO: 646419 - RNA, 19 nt, Artificial Sequence
  Description of Artificial Sequence: Synthetic oligonucleotide
guucuacuagucucgggca

SEQ ID NO: 646420 - RNA, 19 nt, Artificial Sequence
  Description of Artificial Sequence: Synthetic oligonucleotide
gacccuagcucuacgugcc

SEQ ID NO: 646421 - RNA, 19 nt, Artificial Sequence
  Description of Artificial Sequence: Synthetic oligonucleotide
guucucguaaaccgugaca

SEQ ID NO: 646422 - RNA, 19 nt, Artificial Sequence
  Description of Artificial Sequence: Synthetic oligonucleotide
gcuaguuauucaucaugcc

SEQ ID NO: 646423 - RNA, 19 nt, Artificial Sequence
  Description of Artificial Sequence: Synthetic oligonucleotide
cuaaguacucugauauuua

SEQ ID NO: 646424 - RNA, 19 nt, Artificial Sequence
  Description of Artificial Sequence: Synthetic oligonucleotide
ucuacgugccauccuuaau

SEQ ID NO: 646425 - RNA, 19 nt, Artificial Sequence
  Description of Artificial Sequence: Synthetic oligonucleotide
ucucguaaaccgugacacu

SEQ ID NO: 646426 - RNA, 19 nt, Artificial Sequence
  Description of Artificial Sequence: Synthetic oligonucleotide
ccaaacuauacuucugguc

SEQ ID NO: 646427 - RNA, 19 nt, Artificial Sequence
  Description of Artificial Sequence: Synthetic oligonucleotide
guagauccauaaagcuugg

SEQ ID NO: 646428 - RNA, 19 nt, Artificial Sequence
  Description of Artificial Sequence: Synthetic oligonucleotide
uaauaaccacugcaacauu

SEQ ID NO: 646429 - RNA, 19 nt, Artificial Sequence
  Description of Artificial Sequence: Synthetic oligonucleotide
guaacccauuggcacacac

SEQ ID NO: 646430 - RNA, 19 nt, Artificial Sequence
  Description of Artificial Sequence: Synthetic oligonucleotide
ucacccgacucaaacugua

SEQ ID NO: 646431 - RNA, 19 nt, Artificial Sequence
  Description of Artificial Sequence: Synthetic oligonucleotide
ucaugcccuauaucaugca

SEQ ID NO: 646432 - RNA, 19 nt, Artificial Sequence
  Description of Artificial Sequence: Synthetic oligonucleotide
aguccuuaccaaguaggca

SEQ ID NO: 646433 - RNA, 19 nt, Artificial Sequence
  Description of Artificial Sequence: Synthetic oligonucleotide
cacaacugucagugcagag

SEQ ID NO: 646434 - RNA, 19 nt, Artificial Sequence
  Description of Artificial Sequence: Synthetic oligonucleotide
guaggcauuccaacaaaca

SEQ ID NO: 646435 - RNA, 19 nt, Artificial Sequence
  Description of Artificial Sequence: Synthetic oligonucleotide
cuuaagugaggacagggau

SEQ ID NO: 646436 - RNA, 19 nt, Artificial Sequence
  Description of Artificial Sequence: Synthetic oligonucleotide
agcucuacgugccauccuu

SEQ ID NO: 646437 - RNA, 19 nt, Artificial Sequence
  Description of Artificial Sequence: Synthetic oligonucleotide
acuagcacuuuaagggaug

SEQ ID NO: 646438 - RNA, 19 nt, Artificial Sequence
  Description of Artificial Sequence: Synthetic oligonucleotide
gccaucacuaaaauucacc

SEQ ID NO: 646439 - RNA, 19 nt, Artificial Sequence
  Description of Artificial Sequence: Synthetic oligonucleotide
gggauuuggaguuuacaaa

SEQ ID NO: 646440 - RNA, 19 nt, Artificial Sequence
  Description of Artificial Sequence: Synthetic oligonucleotide
agaaaccuauuaguauacu

SEQ ID NO: 646441 - RNA, 19 nt, Artificial Sequence
  Description of Artificial Sequence: Synthetic oligonucleotide
caaugcgaguaacaauuca

SEQ ID NO: 646442 - RNA, 19 nt, Artificial Sequence
  Description of Artificial Sequence: Synthetic oligonucleotide
agccaucacuaaaauucac

SEQ ID NO: 646443 - RNA, 19 nt, Artificial Sequence
  Description of Artificial Sequence: Synthetic oligonucleotide
aauuaaggugcuaguuauu

SEQ ID NO: 646444 - RNA, 19 nt, Artificial Sequence
  Description of Artificial Sequence: Synthetic oligonucleotide
cccgacucaaacuguaggc

SEQ ID NO: 646445 - RNA, 19 nt, Artificial Sequence
  Description of Artificial Sequence: Synthetic oligonucleotide
agugcuauguaugcauuuu

SEQ ID NO: 646446 - RNA, 19 nt, Artificial Sequence
  Description of Artificial Sequence: Synthetic oligonucleotide
agcaauucacaagcuguga

SEQ ID NO: 646447 - RNA, 19 nt, Artificial Sequence
  Description of Artificial Sequence: Synthetic oligonucleotide
ucugugccacaaaguagaa

SEQ ID NO: 646448 - RNA, 19 nt, Artificial Sequence
  Description of Artificial Sequence: Synthetic oligonucleotide
accacaaacauuagugaua

SEQ ID NO: 646449 - RNA, 19 nt, Artificial Sequence
  Description of Artificial Sequence: Synthetic oligonucleotide
cuauacuucuggucgggaa

SEQ ID NO: 646450 - RNA, 19 nt, Artificial Sequence
  Description of Artificial Sequence: Synthetic oligonucleotide
ggccguaacccauuggcac

SEQ ID NO: 646451 - RNA, 19 nt, Artificial Sequence
  Description of Artificial Sequence: Synthetic oligonucleotide
aaguuucauaccacuugaa

SEQ ID NO: 646452 - RNA, 19 nt, Artificial Sequence
  Description of Artificial Sequence: Synthetic oligonucleotide
cacacggccaagcacaucu

SEQ ID NO: 646453 - RNA, 19 nt, Artificial Sequence
  Description of Artificial Sequence: Synthetic oligonucleotide
agaacauuucagaaaccua

SEQ ID NO: 646454 - RNA, 19 nt, Artificial Sequence
  Description of Artificial Sequence: Synthetic oligonucleotide
ggcgaguguuugaugaagg

SEQ ID NO: 646455 - RNA, 19 nt, Artificial Sequence
  Description of Artificial Sequence: Synthetic oligonucleotide
cagagauaaagugagacuu

SEQ ID NO: 646456 - RNA, 19 nt, Artificial Sequence
  Description of Artificial Sequence: Synthetic oligonucleotide
ucaaugcgcaaauguucua

SEQ ID NO: 646457 - RNA, 19 nt, Artificial Sequence
  Description of Artificial Sequence: Synthetic oligonucleotide
cucugauauuuauaucuua

SEQ ID NO: 646458 - RNA, 19 nt, Artificial Sequence
  Description of Artificial Sequence: Synthetic oligonucleotide
ccaguucucguaaaccgug

SEQ ID NO: 646459 - RNA, 19 nt, Artificial Sequence
  Description of Artificial Sequence: Synthetic oligonucleotide
acguucugcaauacgaauu

SEQ ID NO: 646460 - RNA, 19 nt, Artificial Sequence
  Description of Artificial Sequence: Synthetic oligonucleotide
ggaaaccacacccugccaa

SEQ ID NO: 646461 - RNA, 19 nt, Artificial Sequence
  Description of Artificial Sequence: Synthetic oligonucleotide
augucacaagcugcuuccg

SEQ ID NO: 646462 - RNA, 19 nt, Artificial Sequence
  Description of Artificial Sequence: Synthetic oligonucleotide
cacccgacucaaacuguag

SEQ ID NO: 646463 - RNA, 19 nt, Artificial Sequence
  Description of Artificial Sequence: Synthetic oligonucleotide
gcgaguguuugaugaaggc

SEQ ID NO: 646464 - RNA, 19 nt, Artificial Sequence
  Description of Artificial Sequence: Synthetic oligonucleotide
cacacacuaccaguucuac

SEQ ID NO: 646465 - RNA, 19 nt, Artificial Sequence
  Description of Artificial Sequence: Synthetic oligonucleotide
acggccaagcacaucuuug

SEQ ID NO: 646466 - RNA, 19 nt, Artificial Sequence
  Description of Artificial Sequence: Synthetic oligonucleotide
ccuauuaguauacuucuua

SEQ ID NO: 646467 - RNA, 19 nt, Artificial Sequence
  Description of Artificial Sequence: Synthetic oligonucleotide
cagguguauuuauaacuaa

SEQ ID NO: 646468 - RNA, 19 nt, Artificial Sequence
  Description of Artificial Sequence: Synthetic oligonucleotide
cuuagacacuucccaguga

SEQ ID NO: 646469 - RNA, 19 nt, Artificial Sequence
  Description of Artificial Sequence: Synthetic oligonucleotide
cagauaacgucuuuugauu

SEQ ID NO: 646470 - RNA, 19 nt, Artificial Sequence
  Description of Artificial Sequence: Synthetic oligonucleotide
acuauacuucuggucggga

SEQ ID NO: 646471 - RNA, 19 nt, Artificial Sequence
  Description of Artificial Sequence: Synthetic oligonucleotide
cuggucgggaauuaacacu

SEQ ID NO: 646472 - RNA, 19 nt, Artificial Sequence
  Description of Artificial Sequence: Synthetic oligonucleotide
ugggcgaguguuugaugaa

SEQ ID NO: 646473 - RNA, 19 nt, Artificial Sequence
  Description of Artificial Sequence: Synthetic oligonucleotide
gcuauguaugcauuuugcu

SEQ ID NO: 646474 - RNA, 19 nt, Artificial Sequence
  Description of Artificial Sequence: Synthetic oligonucleotide
acaccuuauaacaggugua

SEQ ID NO: 646475 - RNA, 19 nt, Artificial Sequence
  Description of Artificial Sequence: Synthetic oligonucleotide
gaguugacccuagcucuac

SEQ ID NO: 646476 - RNA, 19 nt, Artificial Sequence
  Description of Artificial Sequence: Synthetic oligonucleotide
gcuauguaauuccaaaauu

SEQ ID NO: 646477 - RNA, 19 nt, Artificial Sequence
  Description of Artificial Sequence: Synthetic oligonucleotide
ucuucaucaaggggccgua

SEQ ID NO: 646478 - RNA, 19 nt, Artificial Sequence
  Description of Artificial Sequence: Synthetic oligonucleotide
gucgggaauuaacacuucu

SEQ ID NO: 646479 - RNA, 19 nt, Artificial Sequence
  Description of Artificial Sequence: Synthetic oligonucleotide
uggccgagcuguugaaaua

SEQ ID NO: 646480 - RNA, 19 nt, Artificial Sequence
  Description of Artificial Sequence: Synthetic oligonucleotide
ccauaauggauaacugcga

SEQ ID NO: 646481 - RNA, 19 nt, Artificial Sequence
  Description of Artificial Sequence: Synthetic oligonucleotide
cauaagccaucacuaaaau

SEQ ID NO: 646482 - RNA, 19 nt, Artificial Sequence
  Description of Artificial Sequence: Synthetic oligonucleotide
gcuauauuaaacaccuuau

SEQ ID NO: 646483 - RNA, 19 nt, Artificial Sequence
  Description of Artificial Sequence: Synthetic oligonucleotide
caguucucguaaaccguga

SEQ ID NO: 646484 - RNA, 19 nt, Artificial Sequence
  Description of Artificial Sequence: Synthetic oligonucleotide
augagcuaugccauacauu

SEQ ID NO: 646485 - RNA, 19 nt, Artificial Sequence
  Description of Artificial Sequence: Synthetic oligonucleotide
cucaacaaaggcacugcau

SEQ ID NO: 646486 - RNA, 19 nt, Artificial Sequence
  Description of Artificial Sequence: Synthetic oligonucleotide
gugacacugaucagccaca

SEQ ID NO: 646487 - RNA, 19 nt, Artificial Sequence
  Description of Artificial Sequence: Synthetic oligonucleotide
cccaaauugauaaaaccau

SEQ ID NO: 646488 - RNA, 19 nt, Artificial Sequence
  Description of Artificial Sequence: Synthetic oligonucleotide
ggcagguauuucauaacga

SEQ ID NO: 646489 - RNA, 19 nt, Artificial Sequence
  Description of Artificial Sequence: Synthetic oligonucleotide
guauuguagcuauguaauu

SEQ ID NO: 646490 - RNA, 19 nt, Artificial Sequence
  Description of Artificial Sequence: Synthetic oligonucleotide
gagcuaugccauacauuuc

SEQ ID NO: 646491 - RNA, 19 nt, Artificial Sequence
  Description of Artificial Sequence: Synthetic oligonucleotide
cucuacgugccauccuuaa

SEQ ID NO: 646492 - RNA, 19 nt, Artificial Sequence
  Description of Artificial Sequence: Synthetic oligonucleotide
aucacccgacucaaacugu

SEQ ID NO: 646493 - RNA, 19 nt, Artificial Sequence
  Description of Artificial Sequence: Synthetic oligonucleotide
accuuauaacagguguauu

SEQ ID NO: 646494 - RNA, 19 nt, Artificial Sequence
  Description of Artificial Sequence: Synthetic oligonucleotide
gggcgaguguuugaugaag

SEQ ID NO: 646495 - RNA, 19 nt, Artificial Sequence
  Description of Artificial Sequence: Synthetic oligonucleotide
ucgggcaggucaugcccac

SEQ ID NO: 646496 - RNA, 19 nt, Artificial Sequence
  Description of Artificial Sequence: Synthetic oligonucleotide
ccuuauaacagguguauuu

SEQ ID NO: 646497 - RNA, 19 nt, Artificial Sequence
  Description of Artificial Sequence: Synthetic oligonucleotide
guaaaccgugacacugauc

SEQ ID NO: 646498 - RNA, 19 nt, Artificial Sequence
  Description of Artificial Sequence: Synthetic oligonucleotide
cuauaucaugcaguccuua

SEQ ID NO: 646499 - RNA, 19 nt, Artificial Sequence
  Description of Artificial Sequence: Synthetic oligonucleotide
acacuaccucucuucuauu

SEQ ID NO: 646500 - RNA, 19 nt, Artificial Sequence
  Description of Artificial Sequence: Synthetic oligonucleotide
gccguaacccauuggcaca

SEQ ID NO: 646501 - RNA, 19 nt, Artificial Sequence
  Description of Artificial Sequence: Synthetic oligonucleotide
cacaugguuuagcacauuu

SEQ ID NO: 646502 - RNA, 19 nt, Artificial Sequence
  Description of Artificial Sequence: Synthetic oligonucleotide
ccaguucuacuagucucgg

SEQ ID NO: 646503 - RNA, 19 nt, Artificial Sequence
  Description of Artificial Sequence: Synthetic oligonucleotide
cgaauuaacucuucaucaa

SEQ ID NO: 646504 - RNA, 19 nt, Artificial Sequence
  Description of Artificial Sequence: Synthetic oligonucleotide
cacuagcacuuuaagggau

SEQ ID NO: 646505 - RNA, 19 nt, Artificial Sequence
  Description of Artificial Sequence: Synthetic oligonucleotide
agaguugacccuagcucua

SEQ ID NO: 646506 - RNA, 19 nt, Artificial Sequence
  Description of Artificial Sequence: Synthetic oligonucleotide
uagucucgggcaggucaug

SEQ ID NO: 646507 - RNA, 19 nt, Artificial Sequence
  Description of Artificial Sequence: Synthetic oligonucleotide
caccuuauaacagguguau

SEQ ID NO: 646508 - RNA, 19 nt, Artificial Sequence
  Description of Artificial Sequence: Synthetic oligonucleotide
gcuguugaaauaaguccaa

SEQ ID NO: 646509 - RNA, 19 nt, Artificial Sequence
  Description of Artificial Sequence: Synthetic oligonucleotide
acccuagcucuacgugcca

SEQ ID NO: 646510 - RNA, 19 nt, Artificial Sequence
  Description of Artificial Sequence: Synthetic oligonucleotide
ccuagcucuacgugccauc

SEQ ID NO: 646511 - RNA, 19 nt, Artificial Sequence
  Description of Artificial Sequence: Synthetic oligonucleotide
ccagagacuaauauucuuu

SEQ ID NO: 646512 - RNA, 19 nt, Artificial Sequence
  Description of Artificial Sequence: Synthetic oligonucleotide
uaacugcgacaggcggccc

SEQ ID NO: 646513 - RNA, 19 nt, Artificial Sequence
  Description of Artificial Sequence: Synthetic oligonucleotide
cuagucucgggcaggucau

SEQ ID NO: 646514 - RNA, 19 nt, Artificial Sequence
  Description of Artificial Sequence: Synthetic oligonucleotide
cacuaccaguucuacuagu

SEQ ID NO: 646515 - RNA, 19 nt, Artificial Sequence
  Description of Artificial Sequence: Synthetic oligonucleotide
ggccgagcuguugaaauaa

SEQ ID NO: 646516 - RNA, 19 nt, Artificial Sequence
  Description of Artificial Sequence: Synthetic oligonucleotide
uaaaugccucuggcaccac

SEQ ID NO: 646517 - RNA, 19 nt, Artificial Sequence
  Description of Artificial Sequence: Synthetic oligonucleotide
cguucugcaauacgaauua

SEQ ID NO: 646518 - RNA, 19 nt, Artificial Sequence
  Description of Artificial Sequence: Synthetic oligonucleotide
ggugcuaguuauucaucau

SEQ ID NO: 646519 - RNA, 19 nt, Artificial Sequence
  Description of Artificial Sequence: Synthetic oligonucleotide
cuuugggcgaguguuugau

SEQ ID NO: 646520 - RNA, 19 nt, Artificial Sequence
  Description of Artificial Sequence: Synthetic oligonucleotide
uacuagucucgggcagguc

SEQ ID NO: 646521 - RNA, 19 nt, Artificial Sequence
  Description of Artificial Sequence: Synthetic oligonucleotide
ccgacucaaacuguaggca

SEQ ID NO: 646522 - RNA, 19 nt, Artificial Sequence
  Description of Artificial Sequence: Synthetic oligonucleotide
gccgagcuguugaaauaag

SEQ ID NO: 646523 - RNA, 19 nt, Artificial Sequence
  Description of Artificial Sequence: Synthetic oligonucleotide
gcccuauaucaugcagucc

SEQ ID NO: 646524 - RNA, 19 nt, Artificial Sequence
  Description of Artificial Sequence: Synthetic oligonucleotide
gcaauacgaauuaacucuu

SEQ ID NO: 646525 - RNA, 19 nt, Artificial Sequence
  Description of Artificial Sequence: Synthetic oligonucleotide
aggaaucacccgacucaaa

SEQ ID NO: 646526 - RNA, 19 nt, Artificial Sequence
  Description of Artificial Sequence: Synthetic oligonucleotide
cuacuagucucgggcaggu

SEQ ID NO: 646527 - RNA, 19 nt, Artificial Sequence
  Description of Artificial Sequence: Synthetic oligonucleotide
gggccguaacccauuggca

SEQ ID NO: 646528 - RNA, 19 nt, Artificial Sequence
  Description of Artificial Sequence: Synthetic oligonucleotide
cacaaacauuagugauaua

SEQ ID NO: 646529 - RNA, 19 nt, Artificial Sequence
  Description of Artificial Sequence: Synthetic oligonucleotide
cuuaccaaguaggcaucau

SEQ ID NO: 646530 - RNA, 19 nt, Artificial Sequence
  Description of Artificial Sequence: Synthetic oligonucleotide
ggucgggaauuaacacuuc

SEQ ID NO: 646531 - RNA, 19 nt, Artificial Sequence
  Description of Artificial Sequence: Synthetic oligonucleotide
ccgagcuguugaaauaagu

SEQ ID NO: 646532 - RNA, 19 nt, Artificial Sequence
  Description of Artificial Sequence: Synthetic oligonucleotide
gccaguucucguaaaccgu

SEQ ID NO: 646533 - RNA, 19 nt, Artificial Sequence
  Description of Artificial Sequence: Synthetic oligonucleotide
ccgugacacugaucagcca

SEQ ID NO: 646534 - RNA, 19 nt, Artificial Sequence
  Description of Artificial Sequence: Synthetic oligonucleotide
cguaaaccgugacacugau

SEQ ID NO: 646535 - RNA, 19 nt, Artificial Sequence
  Description of Artificial Sequence: Synthetic oligonucleotide
gcacugcaugagacuucac

SEQ ID NO: 646536 - RNA, 19 nt, Artificial Sequence
  Description of Artificial Sequence: Synthetic oligonucleotide
ccgcugauucuuugcugcu

SEQ ID NO: 646537 - RNA, 19 nt, Artificial Sequence
  Description of Artificial Sequence: Synthetic oligonucleotide
gcccaauagcugacaaauu

SEQ ID NO: 646538 - RNA, 19 nt, Artificial Sequence
  Description of Artificial Sequence: Synthetic oligonucleotide
cccugccaagaugcuuaga

SEQ ID NO: 646539 - RNA, 19 nt, Artificial Sequence
  Description of Artificial Sequence: Synthetic oligonucleotide
cccuagcucuacgugccau

SEQ ID NO: 646540 - RNA, 19 nt, Artificial Sequence
  Description of Artificial Sequence: Synthetic oligonucleotide
ugaaauuacaaacacagug

SEQ ID NO: 646541 - RNA, 19 nt, Artificial Sequence
  Description of Artificial Sequence: Synthetic oligonucleotide
aaacucauagucuccaucc

SEQ ID NO: 646542 - RNA, 19 nt, Artificial Sequence
  Description of Artificial Sequence: Synthetic oligonucleotide
aacucuaacauaaaagcgc

SEQ ID NO: 646543 - RNA, 19 nt, Artificial Sequence
  Description of Artificial Sequence: Synthetic oligonucleotide
ucacguuaaagacaaaugg

SEQ ID NO: 646544 - RNA, 19 nt, Artificial Sequence
  Description of Artificial Sequence: Synthetic oligonucleotide
uuuauuaguaugaagcugu

SEQ ID NO: 646545 - RNA, 19 nt, Artificial Sequence
  Description of Artificial Sequence: Synthetic oligonucleotide
agaacugcaaucuuuagag

SEQ ID NO: 646546 - RNA, 19 nt, Artificial Sequence
  Description of Artificial Sequence: Synthetic oligonucleotide
acucuuaagaaacucauag

SEQ ID NO: 646547 - RNA, 19 nt, Artificial Sequence
  Description of Artificial Sequence: Synthetic oligonucleotide
aauaucgacaccccuuugg

SEQ ID NO: 646548 - RNA, 19 nt, Artificial Sequence
  Description of Artificial Sequence: Synthetic oligonucleotide
aacauaaaagcgcacagga

SEQ ID NO: 646549 - RNA, 19 nt, Artificial Sequence
  Description of Artificial Sequence: Synthetic oligonucleotide
aaauuacaaacacagugcu

SEQ ID NO: 646550 - RNA, 19 nt, Artificial Sequence
  Description of Artificial Sequence: Synthetic oligonucleotide
uuuaagucagcauuuuaag

SEQ ID NO: 646551 - RNA, 19 nt, Artificial Sequence
  Description of Artificial Sequence: Synthetic oligonucleotide
uagagcauaucucucagag

SEQ ID NO: 646552 - RNA, 19 nt, Artificial Sequence
  Description of Artificial Sequence: Synthetic oligonucleotide
cuaaacccaaagaacaugg

SEQ ID NO: 646553 - RNA, 19 nt, Artificial Sequence
  Description of Artificial Sequence: Synthetic oligonucleotide
aaauaccucacguuaaaga

SEQ ID NO: 646554 - RNA, 19 nt, Artificial Sequence
  Description of Artificial Sequence: Synthetic oligonucleotide
guauuuuccaaucugaaga

SEQ ID NO: 646555 - RNA, 19 nt, Artificial Sequence
  Description of Artificial Sequence: Synthetic oligonucleotide
aaacacagugcucaaaaga

SEQ ID NO: 646556 - RNA, 19 nt, Artificial Sequence
  Description of Artificial Sequence: Synthetic oligonucleotide
aauguaauccuaaugaaau

SEQ ID NO: 646557 - RNA, 19 nt, Artificial Sequence
  Description of Artificial Sequence: Synthetic oligonucleotide
ucugcuauuggucucugag

SEQ ID NO: 646558 - RNA, 19 nt, Artificial Sequence
  Description of Artificial Sequence: Synthetic oligonucleotide
acguuaaagacaaauggcc

SEQ ID NO: 646559 - RNA, 19 nt, Artificial Sequence
  Description of Artificial Sequence: Synthetic oligonucleotide
aucgacaccccuuuggcgc

SEQ ID NO: 646560 - RNA, 19 nt, Artificial Sequence
  Description of Artificial Sequence: Synthetic oligonucleotide
ugugguuucgagccaaagg

SEQ ID NO: 646561 - RNA, 19 nt, Artificial Sequence
  Description of Artificial Sequence: Synthetic oligonucleotide
ggcauuucguuuuaaaugg

SEQ ID NO: 646562 - RNA, 19 nt, Artificial Sequence
  Description of Artificial Sequence: Synthetic oligonucleotide
uuaagucagcauuuuaagc

SEQ ID NO: 646563 - RNA, 19 nt, Artificial Sequence
  Description of Artificial Sequence: Synthetic oligonucleotide
uuucaguauccucaggugc

SEQ ID NO: 646564 - RNA, 19 nt, Artificial Sequence
  Description of Artificial Sequence: Synthetic oligonucleotide
caacucuaacauaaaagcg

SEQ ID NO: 646565 - RNA, 19 nt, Artificial Sequence
  Description of Artificial Sequence: Synthetic oligonucleotide
aaaagcgcacaggaaauac

SEQ ID NO: 646566 - RNA, 19 nt, Artificial Sequence
  Description of Artificial Sequence: Synthetic oligonucleotide
uacguaguuccuuugcugg

SEQ ID NO: 646567 - RNA, 19 nt, Artificial Sequence
  Description of Artificial Sequence: Synthetic oligonucleotide
auaucgacaccccuuuggc

SEQ ID NO: 646568 - RNA, 19 nt, Artificial Sequence
  Description of Artificial Sequence: Synthetic oligonucleotide
ugguauuauacauuuuggc

SEQ ID NO: 646569 - RNA, 19 nt, Artificial Sequence
  Description of Artificial Sequence: Synthetic oligonucleotide
agucucgcaauaucgacac

SEQ ID NO: 646570 - RNA, 19 nt, Artificial Sequence
  Description of Artificial Sequence: Synthetic oligonucleotide
uguaucuggagauaacaca

SEQ ID NO: 646571 - RNA, 19 nt, Artificial Sequence
  Description of Artificial Sequence: Synthetic oligonucleotide
uuuagagcauaucucucag

SEQ ID NO: 646572 - RNA, 19 nt, Artificial Sequence
  Description of Artificial Sequence: Synthetic oligonucleotide
aguaccaaagaagcaaggc

SEQ ID NO: 646573 - RNA, 19 nt, Artificial Sequence
  Description of Artificial Sequence: Synthetic oligonucleotide
uuuaucgacucucagguua

SEQ ID NO: 646574 - RNA, 19 nt, Artificial Sequence
  Description of Artificial Sequence: Synthetic oligonucleotide
uuacaaaacguuaaagcua

SEQ ID NO: 646575 - RNA, 19 nt, Artificial Sequence
  Description of Artificial Sequence: Synthetic oligonucleotide
ucaaucauaguguuggcuc

SEQ ID NO: 646576 - RNA, 19 nt, Artificial Sequence
  Description of Artificial Sequence: Synthetic oligonucleotide
cacguuaaagacaaauggc

SEQ ID NO: 646577 - RNA, 19 nt, Artificial Sequence
  Description of Artificial Sequence: Synthetic oligonucleotide
aguccaacucuuaagaaac

SEQ ID NO: 646578 - RNA, 19 nt, Artificial Sequence
  Description of Artificial Sequence: Synthetic oligonucleotide
uggugaauuuauuaguaug

SEQ ID NO: 646579 - RNA, 19 nt, Artificial Sequence
  Description of Artificial Sequence: Synthetic oligonucleotide
ucaggugcaacccaauugu

SEQ ID NO: 646580 - RNA, 19 nt, Artificial Sequence
  Description of Artificial Sequence: Synthetic oligonucleotide
agaaucuggucacagagga

SEQ ID NO: 646581 - RNA, 19 nt, Artificial Sequence
  Description of Artificial Sequence: Synthetic oligonucleotide
cugucuauuucacuuaagc

SEQ ID NO: 646582 - RNA, 19 nt, Artificial Sequence
  Description of Artificial Sequence: Synthetic oligonucleotide
uuguggucccgucagagag

SEQ ID NO: 646583 - RNA, 19 nt, Artificial Sequence
  Description of Artificial Sequence: Synthetic oligonucleotide
ucuaauucucucugcuacg

SEQ ID NO: 646584 - RNA, 19 nt, Artificial Sequence
  Description of Artificial Sequence: Synthetic oligonucleotide
uuuaacugcaaagaacaga

SEQ ID NO: 646585 - RNA, 19 nt, Artificial Sequence
  Description of Artificial Sequence: Synthetic oligonucleotide
aaacccaaagaacauggau

SEQ ID NO: 646586 - RNA, 19 nt, Artificial Sequence
  Description of Artificial Sequence: Synthetic oligonucleotide
ugcuuuaacugcaaagaac

SEQ ID NO: 646587 - RNA, 19 nt, Artificial Sequence
  Description of Artificial Sequence: Synthetic oligonucleotide
ugugccagaguccauuuca

SEQ ID NO: 646588 - RNA, 19 nt, Artificial Sequence
  Description of Artificial Sequence: Synthetic oligonucleotide
uggagauaacacaaggaac

SEQ ID NO: 646589 - RNA, 19 nt, Artificial Sequence
  Description of Artificial Sequence: Synthetic oligonucleotide
agugcucaaaagaaggucg

SEQ ID NO: 646590 - RNA, 19 nt, Artificial Sequence
  Description of Artificial Sequence: Synthetic oligonucleotide
uaacauaaaagcgcacagg

SEQ ID NO: 646591 - RNA, 19 nt, Artificial Sequence
  Description of Artificial Sequence: Synthetic oligonucleotide
auagucuccauccuguggu

SEQ ID NO: 646592 - RNA, 19 nt, Artificial Sequence
  Description of Artificial Sequence: Synthetic oligonucleotide
uagcauuuaagucagcauu

SEQ ID NO: 646593 - RNA, 19 nt, Artificial Sequence
  Description of Artificial Sequence: Synthetic oligonucleotide
gaagcuguucauaauauuc

SEQ ID NO: 646594 - RNA, 19 nt, Artificial Sequence
  Description of Artificial Sequence: Synthetic oligonucleotide
aauccuaaugaaauuacaa

SEQ ID NO: 646595 - RNA, 19 nt, Artificial Sequence
  Description of Artificial Sequence: Synthetic oligonucleotide
uguaauccuaaugaaauua

SEQ ID NO: 646596 - RNA, 19 nt, Artificial Sequence
  Description of Artificial Sequence: Synthetic oligonucleotide
uucaucacuucccagguau

SEQ ID NO: 646597 - RNA, 19 nt, Artificial Sequence
  Description of Artificial Sequence: Synthetic oligonucleotide
ugaauguaauccuaaugaa

SEQ ID NO: 646598 - RNA, 19 nt, Artificial Sequence
  Description of Artificial Sequence: Synthetic oligonucleotide
uuauacagcagcuccagua

SEQ ID NO: 646599 - RNA, 19 nt, Artificial Sequence
  Description of Artificial Sequence: Synthetic oligonucleotide
gguauuauacauuuuggca

SEQ ID NO: 646600 - RNA, 19 nt, Artificial Sequence
  Description of Artificial Sequence: Synthetic oligonucleotide
  modified_base (7)..(7): a, c, u, g, unknown or other
guugucngaaguucuguug

SEQ ID NO: 646601 - RNA, 19 nt, Artificial Sequence
  Description of Artificial Sequence: Synthetic oligonucleotide
aucaagucucgcaauaucg

SEQ ID NO: 646602 - RNA, 19 nt, Artificial Sequence
  Description of Artificial Sequence: Synthetic oligonucleotide
ucucgcaauaucgacaccc

SEQ ID NO: 646603 - RNA, 19 nt, Artificial Sequence
  Description of Artificial Sequence: Synthetic oligonucleotide
agggagaacaacucuaaca

SEQ ID NO: 646604 - RNA, 19 nt, Artificial Sequence
  Description of Artificial Sequence: Synthetic oligonucleotide
aacuucuccaaaacagaac

SEQ ID NO: 646605 - RNA, 19 nt, Artificial Sequence
  Description of Artificial Sequence: Synthetic oligonucleotide
gacuauuuacagccaaacc

SEQ ID NO: 646606 - RNA, 19 nt, Artificial Sequence
  Description of Artificial Sequence: Synthetic oligonucleotide
uggaagaugcuguaucuca

SEQ ID NO: 646607 - RNA, 19 nt, Artificial Sequence
  Description of Artificial Sequence: Synthetic oligonucleotide
uuaucgacucucagguuag

SEQ ID NO: 646608 - RNA, 19 nt, Artificial Sequence
  Description of Artificial Sequence: Synthetic oligonucleotide
agaugaugaauguaauccu

SEQ ID NO: 646609 - RNA, 19 nt, Artificial Sequence
  Description of Artificial Sequence: Synthetic oligonucleotide
ucaagucucgcaauaucga

SEQ ID NO: 646610 - RNA, 19 nt, Artificial Sequence
  Description of Artificial Sequence: Synthetic oligonucleotide
cucacguuaaagacaaaug

SEQ ID NO: 646611 - RNA, 19 nt, Artificial Sequence
  Description of Artificial Sequence: Synthetic oligonucleotide
uaccucacguuaaagacaa

SEQ ID NO: 646612 - RNA, 19 nt, Artificial Sequence
  Description of Artificial Sequence: Synthetic oligonucleotide
guaucucacacauauacaa

SEQ ID NO: 646613 - RNA, 19 nt, Artificial Sequence
  Description of Artificial Sequence: Synthetic oligonucleotide
ggagacuuuauacagcagc

SEQ ID NO: 646614 - RNA, 19 nt, Artificial Sequence
  Description of Artificial Sequence: Synthetic oligonucleotide
aauuaugggguuggauuuc

SEQ ID NO: 646615 - RNA, 19 nt, Artificial Sequence
  Description of Artificial Sequence: Synthetic oligonucleotide
auuucaguauccucaggug

SEQ ID NO: 646616 - RNA, 19 nt, Artificial Sequence
  Description of Artificial Sequence: Synthetic oligonucleotide
auccuaaugaaauuacaaa

SEQ ID NO: 646617 - RNA, 19 nt, Artificial Sequence
  Description of Artificial Sequence: Synthetic oligonucleotide
uuucacuuaagcuggugaa

SEQ ID NO: 646618 - RNA, 19 nt, Artificial Sequence
  Description of Artificial Sequence: Synthetic oligonucleotide
augguauuauacauuuugg

SEQ ID NO: 646619 - RNA, 19 nt, Artificial Sequence
  Description of Artificial Sequence: Synthetic oligonucleotide
gauuucaguauccucaggu

SEQ ID NO: 646620 - RNA, 19 nt, Artificial Sequence
  Description of Artificial Sequence: Synthetic oligonucleotide
uuuuaccagacacugcuuu

SEQ ID NO: 646621 - RNA, 19 nt, Artificial Sequence
  Description of Artificial Sequence: Synthetic oligonucleotide
aaagacaaauggccgugga

SEQ ID NO: 646622 - RNA, 19 nt, Artificial Sequence
  Description of Artificial Sequence: Synthetic oligonucleotide
caagaucugcaaaguaucc

SEQ ID NO: 646623 - RNA, 19 nt, Artificial Sequence
  Description of Artificial Sequence: Synthetic oligonucleotide
cuggggagacuuuauacag

SEQ ID NO: 646624 - RNA, 19 nt, Artificial Sequence
  Description of Artificial Sequence: Synthetic oligonucleotide
gacagugcccaucucauca

SEQ ID NO: 646625 - RNA, 19 nt, Artificial Sequence
  Description of Artificial Sequence: Synthetic oligonucleotide
uccguaacugucuuuugca

SEQ ID NO: 646626 - RNA, 19 nt, Artificial Sequence
  Description of Artificial Sequence: Synthetic oligonucleotide
uuacagccaaaccuuacaa

SEQ ID NO: 646627 - RNA, 19 nt, Artificial Sequence
  Description of Artificial Sequence: Synthetic oligonucleotide
uguacaucagcaacagcau

SEQ ID NO: 646628 - RNA, 19 nt, Artificial Sequence
  Description of Artificial Sequence: Synthetic oligonucleotide
uaucgacaccccuuuggcg

SEQ ID NO: 646629 - RNA, 19 nt, Artificial Sequence
  Description of Artificial Sequence: Synthetic oligonucleotide
agcuaccagguuuugguag

SEQ ID NO: 646630 - RNA, 19 nt, Artificial Sequence
  Description of Artificial Sequence: Synthetic oligonucleotide
ucucucagagcuaccaggu

SEQ ID NO: 646631 - RNA, 19 nt, Artificial Sequence
  Description of Artificial Sequence: Synthetic oligonucleotide
guaccaaagaagcaaggca

SEQ ID NO: 646632 - RNA, 19 nt, Artificial Sequence
  Description of Artificial Sequence: Synthetic oligonucleotide
cuauuggucucugagcacc

SEQ ID NO: 646633 - RNA, 19 nt, Artificial Sequence
  Description of Artificial Sequence: Synthetic oligonucleotide
ugacaauuggaugcuguag

SEQ ID NO: 646634 - RNA, 19 nt, Artificial Sequence
  Description of Artificial Sequence: Synthetic oligonucleotide
ugcaacccaauuguggucc

SEQ ID NO: 646635 - RNA, 19 nt, Artificial Sequence
  Description of Artificial Sequence: Synthetic oligonucleotide
aggucgaggagggugaugg

SEQ ID NO: 646636 - RNA, 19 nt, Artificial Sequence
  Description of Artificial Sequence: Synthetic oligonucleotide
aguguuggcuccaucacuc

SEQ ID NO: 646637 - RNA, 19 nt, Artificial Sequence
  Description of Artificial Sequence: Synthetic oligonucleotide
ugcagcucggaccauugug

SEQ ID NO: 646638 - RNA, 19 nt, Artificial Sequence
  Description of Artificial Sequence: Synthetic oligonucleotide
gaaacucauagucuccauc

SEQ ID NO: 646639 - RNA, 19 nt, Artificial Sequence
  Description of Artificial Sequence: Synthetic oligonucleotide
aacccaaagaacauggauu

SEQ ID NO: 646640 - RNA, 19 nt, Artificial Sequence
  Description of Artificial Sequence: Synthetic oligonucleotide
agagacuagaaggaaauaa

SEQ ID NO: 646641 - RNA, 19 nt, Artificial Sequence
  Description of Artificial Sequence: Synthetic oligonucleotide
uuagggagcaaaagcaauu

SEQ ID NO: 646642 - RNA, 19 nt, Artificial Sequence
  Description of Artificial Sequence: Synthetic oligonucleotide
uggaccgguacuucugccg

SEQ ID NO: 646643 - RNA, 19 nt, Artificial Sequence
  Description of Artificial Sequence: Synthetic oligonucleotide
ucacucauuguacuggcua

SEQ ID NO: 646644 - RNA, 19 nt, Artificial Sequence
  Description of Artificial Sequence: Synthetic oligonucleotide
aagaucugcaaaguauccu

SEQ ID NO: 646645 - RNA, 19 nt, Artificial Sequence
  Description of Artificial Sequence: Synthetic oligonucleotide
uaucucacacauauacaaa

SEQ ID NO: 646646 - RNA, 19 nt, Artificial Sequence
  Description of Artificial Sequence: Synthetic oligonucleotide
ggagauaacacaaggaaca

SEQ ID NO: 646647 - RNA, 19 nt, Artificial Sequence
  Description of Artificial Sequence: Synthetic oligonucleotide
ucuggcuuacggacguggg

SEQ ID NO: 646648 - RNA, 19 nt, Artificial Sequence
  Description of Artificial Sequence: Synthetic oligonucleotide
uuucguuuuaaaugguauu

SEQ ID NO: 646649 - RNA, 19 nt, Artificial Sequence
  Description of Artificial Sequence: Synthetic oligonucleotide
ucggacagugcccaucuca

SEQ ID NO: 646650 - RNA, 19 nt, Artificial Sequence
  Description of Artificial Sequence: Synthetic oligonucleotide
ugcuacguaguuccuuugc

SEQ ID NO: 646651 - RNA, 19 nt, Artificial Sequence
  Description of Artificial Sequence: Synthetic oligonucleotide
acguaguuccuuugcuggc

SEQ ID NO: 646652 - RNA, 19 nt, Artificial Sequence
  Description of Artificial Sequence: Synthetic oligonucleotide
cuuuagagcauaucucuca

SEQ ID NO: 646653 - RNA, 19 nt, Artificial Sequence
  Description of Artificial Sequence: Synthetic oligonucleotide
ugguauuuuccaaucugaa

SEQ ID NO: 646654 - RNA, 19 nt, Artificial Sequence
  Description of Artificial Sequence: Synthetic oligonucleotide
aagaagcaaggcaaagcag

SEQ ID NO: 646655 - RNA, 19 nt, Artificial Sequence
  Description of Artificial Sequence: Synthetic oligonucleotide
augaaaccugcagugcacc

SEQ ID NO: 646656 - RNA, 19 nt, Artificial Sequence
  Description of Artificial Sequence: Synthetic oligonucleotide
cuguaucuggagauaacac

SEQ ID NO: 646657 - RNA, 19 nt, Artificial Sequence
  Description of Artificial Sequence: Synthetic oligonucleotide
gaacaacuucuccaaaaca

SEQ ID NO: 646658 - RNA, 19 nt, Artificial Sequence
  Description of Artificial Sequence: Synthetic oligonucleotide
acaauuggaugcuguagga

SEQ ID NO: 646659 - RNA, 19 nt, Artificial Sequence
  Description of Artificial Sequence: Synthetic oligonucleotide
ugguuucgagccaaaggug

SEQ ID NO: 646660 - RNA, 19 nt, Artificial Sequence
  Description of Artificial Sequence: Synthetic oligonucleotide
cuggagauaacacaaggaa

SEQ ID NO: 646661 - RNA, 19 nt, Artificial Sequence
  Description of Artificial Sequence: Synthetic oligonucleotide
cauuaaucaagucucgcaa

SEQ ID NO: 646662 - RNA, 19 nt, Artificial Sequence
  Description of Artificial Sequence: Synthetic oligonucleotide
uggcuuacggacgugggag

SEQ ID NO: 646663 - RNA, 19 nt, Artificial Sequence
  Description of Artificial Sequence: Synthetic oligonucleotide
cuuuauacagcagcuccag

SEQ ID NO: 646664 - RNA, 19 nt, Artificial Sequence
  Description of Artificial Sequence: Synthetic oligonucleotide
  modified_base (3)..(3): a, c, u, g, unknown or other
ucngaaguucuguugccuc

SEQ ID NO: 646665 - RNA, 19 nt, Artificial Sequence
  Description of Artificial Sequence: Synthetic oligonucleotide
ugugacggcaaugugucac

SEQ ID NO: 646666 - RNA, 19 nt, Artificial Sequence
  Description of Artificial Sequence: Synthetic oligonucleotide
gacccugacuauuuacagc

SEQ ID NO: 646667 - RNA, 19 nt, Artificial Sequence
  Description of Artificial Sequence: Synthetic oligonucleotide
uauuuacagccaaaccuua

SEQ ID NO: 646668 - RNA, 19 nt, Artificial Sequence
  Description of Artificial Sequence: Synthetic oligonucleotide
caagucucgcaauaucgac

SEQ ID NO: 646669 - RNA, 19 nt, Artificial Sequence
  Description of Artificial Sequence: Synthetic oligonucleotide
  modified_base (2)..(2): a, c, u, g, unknown or other
cngaaguucuguugccucc

SEQ ID NO: 646670 - RNA, 19 nt, Artificial Sequence
  Description of Artificial Sequence: Synthetic oligonucleotide
uuaagccaguguuauuagu

SEQ ID NO: 646671 - RNA, 19 nt, Artificial Sequence
  Description of Artificial Sequence: Synthetic oligonucleotide
gaacugcaaucuuuagagc

SEQ ID NO: 646672 - RNA, 19 nt, Artificial Sequence
  Description of Artificial Sequence: Synthetic oligonucleotide
cuacguaguuccuuugcug

SEQ ID NO: 646673 - RNA, 19 nt, Artificial Sequence
  Description of Artificial Sequence: Synthetic oligonucleotide
acucuaacauaaaagcgca

SEQ ID NO: 646674 - RNA, 19 nt, Artificial Sequence
  Description of Artificial Sequence: Synthetic oligonucleotide
agauacacuccuugccaag

SEQ ID NO: 646675 - RNA, 19 nt, Artificial Sequence
  Description of Artificial Sequence: Synthetic oligonucleotide
cuccguaacugucuuuugc

SEQ ID NO: 646676 - RNA, 19 nt, Artificial Sequence
  Description of Artificial Sequence: Synthetic oligonucleotide
agguuagggagcaaaagca

SEQ ID NO: 646677 - RNA, 19 nt, Artificial Sequence
  Description of Artificial Sequence: Synthetic oligonucleotide
cagugugugaaacuugcuc

SEQ ID NO: 646678 - RNA, 19 nt, Artificial Sequence
  Description of Artificial Sequence: Synthetic oligonucleotide
ugccaggcgcuaaugaaac

SEQ ID NO: 646679 - RNA, 19 nt, Artificial Sequence
  Description of Artificial Sequence: Synthetic oligonucleotide
augcuagcugccauuuucc

SEQ ID NO: 646680 - RNA, 19 nt, Artificial Sequence
  Description of Artificial Sequence: Synthetic oligonucleotide
ggugaauuuauuaguauga

SEQ ID NO: 646681 - RNA, 19 nt, Artificial Sequence
  Description of Artificial Sequence: Synthetic oligonucleotide
ucacuucccagguaucugu

SEQ ID NO: 646682 - RNA, 19 nt, Artificial Sequence
  Description of Artificial Sequence: Synthetic oligonucleotide
guuaaagacaaauggccgu

SEQ ID NO: 646683 - RNA, 19 nt, Artificial Sequence
  Description of Artificial Sequence: Synthetic oligonucleotide
aacuccguaacugucuuuu

SEQ ID NO: 646684 - RNA, 19 nt, Artificial Sequence
  Description of Artificial Sequence: Synthetic oligonucleotide
gaaacuugcuccccaggga

SEQ ID NO: 646685 - RNA, 19 nt, Artificial Sequence
  Description of Artificial Sequence: Synthetic oligonucleotide
gugugugaaacuugcuccc

SEQ ID NO: 646686 - RNA, 19 nt, Artificial Sequence
  Description of Artificial Sequence: Synthetic oligonucleotide
guaucuggagauaacacaa

SEQ ID NO: 646687 - RNA, 19 nt, Artificial Sequence
  Description of Artificial Sequence: Synthetic oligonucleotide
aagucucgcaauaucgaca

SEQ ID NO: 646688 - RNA, 19 nt, Artificial Sequence
  Description of Artificial Sequence: Synthetic oligonucleotide
agaggagaacauccccuuc

SEQ ID NO: 646689 - RNA, 19 nt, Artificial Sequence
  Description of Artificial Sequence: Synthetic oligonucleotide
ucuucagggaagcuugguu

SEQ ID NO: 646690 - RNA, 19 nt, Artificial Sequence
  Description of Artificial Sequence: Synthetic oligonucleotide
cguuaaagacaaauggccg

SEQ ID NO: 646691 - RNA, 19 nt, Artificial Sequence
  Description of Artificial Sequence: Synthetic oligonucleotide
gugguuucgagccaaaggu

SEQ ID NO: 646692 - RNA, 19 nt, Artificial Sequence
  Description of Artificial Sequence: Synthetic oligonucleotide
cuggguguucagauugucc

SEQ ID NO: 646693 - RNA, 19 nt, Artificial Sequence
  Description of Artificial Sequence: Synthetic oligonucleotide
auuucguuuuaaaugguau

SEQ ID NO: 646694 - RNA, 19 nt, Artificial Sequence
  Description of Artificial Sequence: Synthetic oligonucleotide
uuagagcauaucucucaga

SEQ ID NO: 646695 - RNA, 19 nt, Artificial Sequence
  Description of Artificial Sequence: Synthetic oligonucleotide
ucucucucauuccuggcau

SEQ ID NO: 646696 - RNA, 19 nt, Artificial Sequence
  Description of Artificial Sequence: Synthetic oligonucleotide
auaucucucagagcuacca

SEQ ID NO: 646697 - RNA, 19 nt, Artificial Sequence
  Description of Artificial Sequence: Synthetic oligonucleotide
ccaaaccuuacaaaauagc

SEQ ID NO: 646698 - RNA, 19 nt, Artificial Sequence
  Description of Artificial Sequence: Synthetic oligonucleotide
cucgcaauaucgacacccc

SEQ ID NO: 646699 - RNA, 19 nt, Artificial Sequence
  Description of Artificial Sequence: Synthetic oligonucleotide
uuuaccagacacugcuuua

SEQ ID NO: 646700 - RNA, 19 nt, Artificial Sequence
  Description of Artificial Sequence: Synthetic oligonucleotide
ggaccauugugccagaguc

SEQ ID NO: 646701 - RNA, 19 nt, Artificial Sequence
  Description of Artificial Sequence: Synthetic oligonucleotide
uugacaauuggaugcugua

SEQ ID NO: 646702 - RNA, 19 nt, Artificial Sequence
  Description of Artificial Sequence: Synthetic oligonucleotide
uggcgcucuugacaauugg

SEQ ID NO: 646703 - RNA, 19 nt, Artificial Sequence
  Description of Artificial Sequence: Synthetic oligonucleotide
agguccuccacaguccaac

SEQ ID NO: 646704 - RNA, 19 nt, Artificial Sequence
  Description of Artificial Sequence: Synthetic oligonucleotide
auaaaagcgcacaggaaau

SEQ ID NO: 646705 - RNA, 19 nt, Artificial Sequence
  Description of Artificial Sequence: Synthetic oligonucleotide
ugucuguaucuggagauaa

SEQ ID NO: 646706 - RNA, 19 nt, Artificial Sequence
  Description of Artificial Sequence: Synthetic oligonucleotide
cuuggaccgguacuucugc

SEQ ID NO: 646707 - RNA, 19 nt, Artificial Sequence
  Description of Artificial Sequence: Synthetic oligonucleotide
agguaucugucuauuucac

SEQ ID NO: 646708 - RNA, 19 nt, Artificial Sequence
  Description of Artificial Sequence: Synthetic oligonucleotide
uauuucacuuaagcuggug

SEQ ID NO: 646709 - RNA, 19 nt, Artificial Sequence
  Description of Artificial Sequence: Synthetic oligonucleotide
uuaugggguuggauuucag

SEQ ID NO: 646710 - RNA, 19 nt, Artificial Sequence
  Description of Artificial Sequence: Synthetic oligonucleotide
  modified_base (8)..(8): a, c, u, g, unknown or other
uguugucngaaguucuguu

SEQ ID NO: 646711 - RNA, 19 nt, Artificial Sequence
  Description of Artificial Sequence: Synthetic oligonucleotide
uuucgagccaaaggugcag

SEQ ID NO: 646712 - RNA, 19 nt, Artificial Sequence
  Description of Artificial Sequence: Synthetic oligonucleotide
uuauuaguaugaagcuguu

SEQ ID NO: 646713 - RNA, 19 nt, Artificial Sequence
  Description of Artificial Sequence: Synthetic oligonucleotide
caaaggugacagguguugg

SEQ ID NO: 646714 - RNA, 19 nt, Artificial Sequence
  Description of Artificial Sequence: Synthetic oligonucleotide
agaugcuguaucucacaca

SEQ ID NO: 646715 - RNA, 19 nt, Artificial Sequence
  Description of Artificial Sequence: Synthetic oligonucleotide
cucuauccugcuucaggcc

SEQ ID NO: 646716 - RNA, 19 nt, Artificial Sequence
  Description of Artificial Sequence: Synthetic oligonucleotide
caauuggaugcuguaggag

SEQ ID NO: 646717 - RNA, 19 nt, Artificial Sequence
  Description of Artificial Sequence: Synthetic oligonucleotide
guaucugucuauuucacuu

SEQ ID NO: 646718 - RNA, 19 nt, Artificial Sequence
  Description of Artificial Sequence: Synthetic oligonucleotide
gaaaccugcagugcaccug

SEQ ID NO: 646719 - RNA, 19 nt, Artificial Sequence
  Description of Artificial Sequence: Synthetic oligonucleotide
aucgacucucagguuaggg

SEQ ID NO: 646720 - RNA, 19 nt, Artificial Sequence
  Description of Artificial Sequence: Synthetic oligonucleotide
agagagccagauacacucc

SEQ ID NO: 646721 - RNA, 19 nt, Artificial Sequence
  Description of Artificial Sequence: Synthetic oligonucleotide
gaacacacuggugugcuga

SEQ ID NO: 646722 - RNA, 19 nt, Artificial Sequence
  Description of Artificial Sequence: Synthetic oligonucleotide
caggaaauaccucacguua

SEQ ID NO: 646723 - RNA, 19 nt, Artificial Sequence
  Description of Artificial Sequence: Synthetic oligonucleotide
ugugugaaacuugcucccc

SEQ ID NO: 646724 - RNA, 19 nt, Artificial Sequence
  Description of Artificial Sequence: Synthetic oligonucleotide
uauuggucucugagcaccu

SEQ ID NO: 646725 - RNA, 19 nt, Artificial Sequence
  Description of Artificial Sequence: Synthetic oligonucleotide
gguuucgagccaaaggugc

SEQ ID NO: 646726 - RNA, 19 nt, Artificial Sequence
  Description of Artificial Sequence: Synthetic oligonucleotide
cugacccugacuauuuaca

SEQ ID NO: 646727 - RNA, 19 nt, Artificial Sequence
  Description of Artificial Sequence: Synthetic oligonucleotide
ugcaaucuuuagagcauau

SEQ ID NO: 646728 - RNA, 19 nt, Artificial Sequence
  Description of Artificial Sequence: Synthetic oligonucleotide
ggcuucaauagcauccagg

SEQ ID NO: 646729 - RNA, 19 nt, Artificial Sequence
  Description of Artificial Sequence: Synthetic oligonucleotide
auuguggucccgucagaga

SEQ ID NO: 646730 - RNA, 19 nt, Artificial Sequence
  Description of Artificial Sequence: Synthetic oligonucleotide
uucacuuaagcuggugaau

SEQ ID NO: 646731 - RNA, 19 nt, Artificial Sequence
  Description of Artificial Sequence: Synthetic oligonucleotide
uugccaagcuguugauuug

SEQ ID NO: 646732 - RNA, 19 nt, Artificial Sequence
  Description of Artificial Sequence: Synthetic oligonucleotide
acuuuauacagcagcucca

SEQ ID NO: 646733 - RNA, 19 nt, Artificial Sequence
  Description of Artificial Sequence: Synthetic oligonucleotide
auaccucacguuaaagaca

SEQ ID NO: 646734 - RNA, 19 nt, Artificial Sequence
  Description of Artificial Sequence: Synthetic oligonucleotide
ugcugagaccagauggcuc

SEQ ID NO: 646735 - RNA, 19 nt, Artificial Sequence
  Description of Artificial Sequence: Synthetic oligonucleotide
cuggucacagaggagaaca

SEQ ID NO: 646736 - RNA, 19 nt, Artificial Sequence
  Description of Artificial Sequence: Synthetic oligonucleotide
uguggucccgucagagaga

SEQ ID NO: 646737 - RNA, 19 nt, Artificial Sequence
  Description of Artificial Sequence: Synthetic oligonucleotide
ucgcaauaucgacaccccu

SEQ ID NO: 646738 - RNA, 19 nt, Artificial Sequence
  Description of Artificial Sequence: Synthetic oligonucleotide
caaaacguuaaagcuaaaa

SEQ ID NO: 646739 - RNA, 19 nt, Artificial Sequence
  Description of Artificial Sequence: Synthetic oligonucleotide
ugcuagcugccauuuucca

SEQ ID NO: 646740 - RNA, 19 nt, Artificial Sequence
  Description of Artificial Sequence: Synthetic oligonucleotide
ggggagacuuuauacagca

SEQ ID NO: 646741 - RNA, 19 nt, Artificial Sequence
  Description of Artificial Sequence: Synthetic oligonucleotide
aacccaauuguggucccgu

SEQ ID NO: 646742 - RNA, 19 nt, Artificial Sequence
  Description of Artificial Sequence: Synthetic oligonucleotide
agauggcuccucuggggag

SEQ ID NO: 646743 - RNA, 19 nt, Artificial Sequence
  Description of Artificial Sequence: Synthetic oligonucleotide
augaugaauguaauccuaa

SEQ ID NO: 646744 - RNA, 19 nt, Artificial Sequence
  Description of Artificial Sequence: Synthetic oligonucleotide
accccuuuggcgcucuuga

SEQ ID NO: 646745 - RNA, 19 nt, Artificial Sequence
  Description of Artificial Sequence: Synthetic oligonucleotide
aggcgcuaaugaaaccugc

SEQ ID NO: 646746 - RNA, 19 nt, Artificial Sequence
  Description of Artificial Sequence: Synthetic oligonucleotide
uagggagcaaaagcaauua

SEQ ID NO: 646747 - RNA, 19 nt, Artificial Sequence
  Description of Artificial Sequence: Synthetic oligonucleotide
auuaugggguuggauuuca

SEQ ID NO: 646748 - RNA, 19 nt, Artificial Sequence
  Description of Artificial Sequence: Synthetic oligonucleotide
  modified_base (12)..(12): a, c, u, g, unknown or other
cugguguugucngaaguuc

SEQ ID NO: 646749 - RNA, 19 nt, Artificial Sequence
  Description of Artificial Sequence: Synthetic oligonucleotide
agggucuguagugauguca

SEQ ID NO: 646750 - RNA, 19 nt, Artificial Sequence
  Description of Artificial Sequence: Synthetic oligonucleotide
ugccucuuggaccgguacu

SEQ ID NO: 646751 - RNA, 19 nt, Artificial Sequence
  Description of Artificial Sequence: Synthetic oligonucleotide
ggaccgguacuucugccgg

SEQ ID NO: 646752 - RNA, 19 nt, Artificial Sequence
  Description of Artificial Sequence: Synthetic oligonucleotide
cauuucguuuuaaauggua

SEQ ID NO: 646753 - RNA, 19 nt, Artificial Sequence
  Description of Artificial Sequence: Synthetic oligonucleotide
cuggcuacucggacagugc

SEQ ID NO: 646754 - RNA, 19 nt, Artificial Sequence
  Description of Artificial Sequence: Synthetic oligonucleotide
ccaauuguggucccgucag

SEQ ID NO: 646755 - RNA, 19 nt, Artificial Sequence
  Description of Artificial Sequence: Synthetic oligonucleotide
gggagaacaacucuaacau

SEQ ID NO: 646756 - RNA, 19 nt, Artificial Sequence
  Description of Artificial Sequence: Synthetic oligonucleotide
cccgucagagagaagagac

SEQ ID NO: 646757 - RNA, 19 nt, Artificial Sequence
  Description of Artificial Sequence: Synthetic oligonucleotide
gugaauuuauuaguaugaa

SEQ ID NO: 646758 - RNA, 19 nt, Artificial Sequence
  Description of Artificial Sequence: Synthetic oligonucleotide
uaaaagcgcacaggaaaua

SEQ ID NO: 646759 - RNA, 19 nt, Artificial Sequence
  Description of Artificial Sequence: Synthetic oligonucleotide
ggucccgucagagagaaga

SEQ ID NO: 646760 - RNA, 19 nt, Artificial Sequence
  Description of Artificial Sequence: Synthetic oligonucleotide
aagggccaagagccucuuc

SEQ ID NO: 646761 - RNA, 19 nt, Artificial Sequence
  Description of Artificial Sequence: Synthetic oligonucleotide
acaacuccguaacugucuu

SEQ ID NO: 646762 - RNA, 19 nt, Artificial Sequence
  Description of Artificial Sequence: Synthetic oligonucleotide
uuggaccgguacuucugcc

SEQ ID NO: 646763 - RNA, 19 nt, Artificial Sequence
  Description of Artificial Sequence: Synthetic oligonucleotide
cuccuugccaagcuguuga

SEQ ID NO: 646764 - RNA, 19 nt, Artificial Sequence
  Description of Artificial Sequence: Synthetic oligonucleotide
cagugcucaaaagaagguc

SEQ ID NO: 646765 - RNA, 19 nt, Artificial Sequence
  Description of Artificial Sequence: Synthetic oligonucleotide
uuuggcgcucuugacaauu

SEQ ID NO: 646766 - RNA, 19 nt, Artificial Sequence
  Description of Artificial Sequence: Synthetic oligonucleotide
auaguuccuuccucuuccu

SEQ ID NO: 646767 - RNA, 19 nt, Artificial Sequence
  Description of Artificial Sequence: Synthetic oligonucleotide
  modified_base (10)..(10): a, c, u, g, unknown or other
gguguugucngaaguucug

SEQ ID NO: 646768 - RNA, 19 nt, Artificial Sequence
  Description of Artificial Sequence: Synthetic oligonucleotide
aguuccuuugcuggccaag

SEQ ID NO: 646769 - RNA, 19 nt, Artificial Sequence
  Description of Artificial Sequence: Synthetic oligonucleotide
uuuuaucgacucucagguu

SEQ ID NO: 646770 - RNA, 19 nt, Artificial Sequence
  Description of Artificial Sequence: Synthetic oligonucleotide
acuuaagcuggugaauuua

SEQ ID NO: 646771 - RNA, 19 nt, Artificial Sequence
  Description of Artificial Sequence: Synthetic oligonucleotide
cucuggcuuacggacgugg

SEQ ID NO: 646772 - RNA, 19 nt, Artificial Sequence
  Description of Artificial Sequence: Synthetic oligonucleotide
gcgcuaaugaaaccugcag

SEQ ID NO: 646773 - RNA, 19 nt, Artificial Sequence
  Description of Artificial Sequence: Synthetic oligonucleotide
agggagcaaaagcaauuau

SEQ ID NO: 646774 - RNA, 19 nt, Artificial Sequence
  Description of Artificial Sequence: Synthetic oligonucleotide
aucacuucccagguaucug

SEQ ID NO: 646775 - RNA, 19 nt, Artificial Sequence
  Description of Artificial Sequence: Synthetic oligonucleotide
aagagacuagaaggaaaua

SEQ ID NO: 646776 - RNA, 19 nt, Artificial Sequence
  Description of Artificial Sequence: Synthetic oligonucleotide
uuccaaucugaagaauuuu

SEQ ID NO: 646777 - RNA, 19 nt, Artificial Sequence
  Description of Artificial Sequence: Synthetic oligonucleotide
aggaacacacuggugugcu

SEQ ID NO: 646778 - RNA, 19 nt, Artificial Sequence
  Description of Artificial Sequence: Synthetic oligonucleotide
ccaucacucauuguacugg

SEQ ID NO: 646779 - RNA, 19 nt, Artificial Sequence
  Description of Artificial Sequence: Synthetic oligonucleotide
uggugugcugagaccagau

SEQ ID NO: 646780 - RNA, 19 nt, Artificial Sequence
  Description of Artificial Sequence: Synthetic oligonucleotide
acggacgugggagguaggg

SEQ ID NO: 646781 - RNA, 19 nt, Artificial Sequence
  Description of Artificial Sequence: Synthetic oligonucleotide
acuccguaacugucuuuug

SEQ ID NO: 646782 - RNA, 19 nt, Artificial Sequence
  Description of Artificial Sequence: Synthetic oligonucleotide
aggaaauaccucacguuaa

SEQ ID NO: 646783 - RNA, 19 nt, Artificial Sequence
  Description of Artificial Sequence: Synthetic oligonucleotide
cugugcucaaucauagugu

SEQ ID NO: 646784 - RNA, 19 nt, Artificial Sequence
  Description of Artificial Sequence: Synthetic oligonucleotide
cucauuguacuggcuacuc

SEQ ID NO: 646785 - RNA, 19 nt, Artificial Sequence
  Description of Artificial Sequence: Synthetic oligonucleotide
uaucgacucucagguuagg

SEQ ID NO: 646786 - RNA, 19 nt, Artificial Sequence
  Description of Artificial Sequence: Synthetic oligonucleotide
agcaauuaugggguuggau

SEQ ID NO: 646787 - RNA, 19 nt, Artificial Sequence
  Description of Artificial Sequence: Synthetic oligonucleotide
acauaaaagcgcacaggaa

SEQ ID NO: 646788 - RNA, 19 nt, Artificial Sequence
  Description of Artificial Sequence: Synthetic oligonucleotide
cugacuauuuacagccaaa

SEQ ID NO: 646789 - RNA, 19 nt, Artificial Sequence
  Description of Artificial Sequence: Synthetic oligonucleotide
uggucacagaggagaacau

SEQ ID NO: 646790 - RNA, 19 nt, Artificial Sequence
  Description of Artificial Sequence: Synthetic oligonucleotide
ccaacucuuaagaaacuca

SEQ ID NO: 646791 - RNA, 19 nt, Artificial Sequence
  Description of Artificial Sequence: Synthetic oligonucleotide
gcaauuaugggguuggauu

SEQ ID NO: 646792 - RNA, 19 nt, Artificial Sequence
  Description of Artificial Sequence: Synthetic oligonucleotide
gcucggaccauugugccag

SEQ ID NO: 646793 - RNA, 19 nt, Artificial Sequence
  Description of Artificial Sequence: Synthetic oligonucleotide
gugugaaacuugcucccca

SEQ ID NO: 646794 - RNA, 19 nt, Artificial Sequence
  Description of Artificial Sequence: Synthetic oligonucleotide
acaaauggccguggaagau

SEQ ID NO: 646795 - RNA, 19 nt, Artificial Sequence
  Description of Artificial Sequence: Synthetic oligonucleotide
ucccgucagagagaagaga

SEQ ID NO: 646796 - RNA, 19 nt, Artificial Sequence
  Description of Artificial Sequence: Synthetic oligonucleotide
acacuccuugccaagcugu

SEQ ID NO: 646797 - RNA, 19 nt, Artificial Sequence
  Description of Artificial Sequence: Synthetic oligonucleotide
gcauaucucucagagcuac

SEQ ID NO: 646798 - RNA, 19 nt, Artificial Sequence
  Description of Artificial Sequence: Synthetic oligonucleotide
ccaagagccucuucugaag

SEQ ID NO: 646799 - RNA, 19 nt, Artificial Sequence
  Description of Artificial Sequence: Synthetic oligonucleotide
uacggacgugggagguagg

SEQ ID NO: 646800 - RNA, 19 nt, Artificial Sequence
  Description of Artificial Sequence: Synthetic oligonucleotide
caaagaugaugaauguaau

SEQ ID NO: 646801 - RNA, 19 nt, Artificial Sequence
  Description of Artificial Sequence: Synthetic oligonucleotide
ucgacaccccuuuggcgcu

SEQ ID NO: 646802 - RNA, 19 nt, Artificial Sequence
  Description of Artificial Sequence: Synthetic oligonucleotide
cuuaagcuggugaauuuau

SEQ ID NO: 646803 - RNA, 19 nt, Artificial Sequence
  Description of Artificial Sequence: Synthetic oligonucleotide
ggcaaugugucacugugcu

SEQ ID NO: 646804 - RNA, 19 nt, Artificial Sequence
  Description of Artificial Sequence: Synthetic oligonucleotide
ugacggcaaugugucacug

SEQ ID NO: 646805 - RNA, 19 nt, Artificial Sequence
  Description of Artificial Sequence: Synthetic oligonucleotide
ccuaaacccaaagaacaug

SEQ ID NO: 646806 - RNA, 19 nt, Artificial Sequence
  Description of Artificial Sequence: Synthetic oligonucleotide
ccacaguccaacucuuaag

SEQ ID NO: 646807 - RNA, 19 nt, Artificial Sequence
  Description of Artificial Sequence: Synthetic oligonucleotide
agcgcacaggaaauaccuc

SEQ ID NO: 646808 - RNA, 19 nt, Artificial Sequence
  Description of Artificial Sequence: Synthetic oligonucleotide
cucagguuagggagcaaaa

SEQ ID NO: 646809 - RNA, 19 nt, Artificial Sequence
  Description of Artificial Sequence: Synthetic oligonucleotide
gcugugacggcaauguguc

SEQ ID NO: 646810 - RNA, 19 nt, Artificial Sequence
  Description of Artificial Sequence: Synthetic oligonucleotide
uggcugacccugacuauuu

SEQ ID NO: 646811 - RNA, 19 nt, Artificial Sequence
  Description of Artificial Sequence: Synthetic oligonucleotide
ggaagaugcuguaucucac

SEQ ID NO: 646812 - RNA, 19 nt, Artificial Sequence
  Description of Artificial Sequence: Synthetic oligonucleotide
ggcuuacggacgugggagg

SEQ ID NO: 646813 - RNA, 19 nt, Artificial Sequence
  Description of Artificial Sequence: Synthetic oligonucleotide
agcucggaccauugugcca

SEQ ID NO: 646814 - RNA, 19 nt, Artificial Sequence
  Description of Artificial Sequence: Synthetic oligonucleotide
ggugugcugagaccagaug

SEQ ID NO: 646815 - RNA, 19 nt, Artificial Sequence
  Description of Artificial Sequence: Synthetic oligonucleotide
guuucgagccaaaggugca

SEQ ID NO: 646816 - RNA, 19 nt, Artificial Sequence
  Description of Artificial Sequence: Synthetic oligonucleotide
agugcccaucucaucaccu

SEQ ID NO: 646817 - RNA, 19 nt, Artificial Sequence
  Description of Artificial Sequence: Synthetic oligonucleotide
cacugcuuuacaaauccau

SEQ ID NO: 646818 - RNA, 19 nt, Artificial Sequence
  Description of Artificial Sequence: Synthetic oligonucleotide
guggaagaugcuguaucuc

SEQ ID NO: 646819 - RNA, 19 nt, Artificial Sequence
  Description of Artificial Sequence: Synthetic oligonucleotide
aaggucgaggagggugaug

SEQ ID NO: 646820 - RNA, 19 nt, Artificial Sequence
  Description of Artificial Sequence: Synthetic oligonucleotide
aaaggccggggcugguguu

SEQ ID NO: 646821 - RNA, 19 nt, Artificial Sequence
  Description of Artificial Sequence: Synthetic oligonucleotide
cacaacuccguaacugucu

SEQ ID NO: 646822 - RNA, 19 nt, Artificial Sequence
  Description of Artificial Sequence: Synthetic oligonucleotide
cugugguuucgagccaaag

SEQ ID NO: 646823 - RNA, 19 nt, Artificial Sequence
  Description of Artificial Sequence: Synthetic oligonucleotide
gggcacaacuccguaacug

SEQ ID NO: 646824 - RNA, 19 nt, Artificial Sequence
  Description of Artificial Sequence: Synthetic oligonucleotide
uucuucgggcugugguuuc

SEQ ID NO: 646825 - RNA, 19 nt, Artificial Sequence
  Description of Artificial Sequence: Synthetic oligonucleotide
caaaggugcagggcacaac

SEQ ID NO: 646826 - RNA, 19 nt, Artificial Sequence
  Description of Artificial Sequence: Synthetic oligonucleotide
agcccucuauccugcuuca

SEQ ID NO: 646827 - RNA, 19 nt, Artificial Sequence
  Description of Artificial Sequence: Synthetic oligonucleotide
uacucggacagugcccauc

SEQ ID NO: 646828 - RNA, 19 nt, Artificial Sequence
  Description of Artificial Sequence: Synthetic oligonucleotide
gucccgucagagagaagag

SEQ ID NO: 646829 - RNA, 19 nt, Artificial Sequence
  Description of Artificial Sequence: Synthetic oligonucleotide
gucaagggccaagagccuc

SEQ ID NO: 646830 - RNA, 19 nt, Artificial Sequence
  Description of Artificial Sequence: Synthetic oligonucleotide
guuagggagcaaaagcaau

SEQ ID NO: 646831 - RNA, 19 nt, Artificial Sequence
  Description of Artificial Sequence: Synthetic oligonucleotide
gguuagggagcaaaagcaa

SEQ ID NO: 646832 - RNA, 19 nt, Artificial Sequence
  Description of Artificial Sequence: Synthetic oligonucleotide
ggugauggguguggcuugg

SEQ ID NO: 646833 - RNA, 19 nt, Artificial Sequence
  Description of Artificial Sequence: Synthetic oligonucleotide
gcuauuggucucugagcac

SEQ ID NO: 646834 - RNA, 19 nt, Artificial Sequence
  Description of Artificial Sequence: Synthetic oligonucleotide
ucggaccauugugccagag

SEQ ID NO: 646835 - RNA, 19 nt, Artificial Sequence
  Description of Artificial Sequence: Synthetic oligonucleotide
cuggcuuacggacguggga

SEQ ID NO: 646836 - RNA, 19 nt, Artificial Sequence
  Description of Artificial Sequence: Synthetic oligonucleotide
gcucaaucauaguguuggc

SEQ ID NO: 646837 - RNA, 19 nt, Artificial Sequence
  Description of Artificial Sequence: Synthetic oligonucleotide
cgcucuugacaauuggaug

SEQ ID NO: 646838 - RNA, 19 nt, Artificial Sequence
  Description of Artificial Sequence: Synthetic oligonucleotide
aucacucauuguacuggcu

SEQ ID NO: 646839 - RNA, 19 nt, Artificial Sequence
  Description of Artificial Sequence: Synthetic oligonucleotide
  modified_base (4)..(4): a, c, u, g, unknown or other
gucngaaguucuguugccu

SEQ ID NO: 646840 - RNA, 19 nt, Artificial Sequence
  Description of Artificial Sequence: Synthetic oligonucleotide
ggagaacaacucuaacaua

SEQ ID NO: 646841 - RNA, 19 nt, Artificial Sequence
  Description of Artificial Sequence: Synthetic oligonucleotide
ggcacaacuccguaacugu

SEQ ID NO: 646842 - RNA, 19 nt, Artificial Sequence
  Description of Artificial Sequence: Synthetic oligonucleotide
gcaaucuuuagagcauauc

SEQ ID NO: 646843 - RNA, 19 nt, Artificial Sequence
  Description of Artificial Sequence: Synthetic oligonucleotide
ccguggaagaugcuguauc

SEQ ID NO: 646844 - RNA, 19 nt, Artificial Sequence
  Description of Artificial Sequence: Synthetic oligonucleotide
gacggcaaugugucacugu

SEQ ID NO: 646845 - RNA, 19 nt, Artificial Sequence
  Description of Artificial Sequence: Synthetic oligonucleotide
ccaaguuggucugagugca

SEQ ID NO: 646846 - RNA, 19 nt, Artificial Sequence
  Description of Artificial Sequence: Synthetic oligonucleotide
guguuggcuccaucacuca

SEQ ID NO: 646847 - RNA, 19 nt, Artificial Sequence
  Description of Artificial Sequence: Synthetic oligonucleotide
gucucgcaauaucgacacc

SEQ ID NO: 646848 - RNA, 19 nt, Artificial Sequence
  Description of Artificial Sequence: Synthetic oligonucleotide
ggucgaggagggugauggg

SEQ ID NO: 646849 - RNA, 19 nt, Artificial Sequence
  Description of Artificial Sequence: Synthetic oligonucleotide
cagcaagaucugcaaagua

SEQ ID NO: 646850 - RNA, 19 nt, Artificial Sequence
  Description of Artificial Sequence: Synthetic oligonucleotide
gugauggguguggcuuggg

SEQ ID NO: 646851 - RNA, 19 nt, Artificial Sequence
  Description of Artificial Sequence: Synthetic oligonucleotide
gaccgguacuucugccgga

SEQ ID NO: 646852 - RNA, 19 nt, Artificial Sequence
  Description of Artificial Sequence: Synthetic oligonucleotide
aauggccguggaagaugcu

SEQ ID NO: 646853 - RNA, 19 nt, Artificial Sequence
  Description of Artificial Sequence: Synthetic oligonucleotide
gaggagugagggagaacaa

SEQ ID NO: 646854 - RNA, 19 nt, Artificial Sequence
  Description of Artificial Sequence: Synthetic oligonucleotide
gcuacguaguuccuuugcu

SEQ ID NO: 646855 - RNA, 19 nt, Artificial Sequence
  Description of Artificial Sequence: Synthetic oligonucleotide
caauuguggucccgucaga

SEQ ID NO: 646856 - RNA, 19 nt, Artificial Sequence
  Description of Artificial Sequence: Synthetic oligonucleotide
guggucccgucagagagaa

SEQ ID NO: 646857 - RNA, 19 nt, Artificial Sequence
  Description of Artificial Sequence: Synthetic oligonucleotide
cagccaaaccuuacaaaau

SEQ ID NO: 646858 - RNA, 19 nt, Artificial Sequence
  Description of Artificial Sequence: Synthetic oligonucleotide
acgugggagguaggguuug

SEQ ID NO: 646859 - RNA, 19 nt, Artificial Sequence
  Description of Artificial Sequence: Synthetic oligonucleotide
  modified_base (9)..(9): a, c, u, g, unknown or other
guguugucngaaguucugu

SEQ ID NO: 646860 - RNA, 19 nt, Artificial Sequence
  Description of Artificial Sequence: Synthetic oligonucleotide
ggcuacucggacagugccc

SEQ ID NO: 646861 - RNA, 19 nt, Artificial Sequence
  Description of Artificial Sequence: Synthetic oligonucleotide
cucuuggaccgguacuucu

SEQ ID NO: 646862 - RNA, 19 nt, Artificial Sequence
  Description of Artificial Sequence: Synthetic oligonucleotide
gugacggcaaugugucacu

SEQ ID NO: 646863 - RNA, 19 nt, Artificial Sequence
  Description of Artificial Sequence: Synthetic oligonucleotide
ggcgcuaaugaaaccugca

SEQ ID NO: 646864 - RNA, 19 nt, Artificial Sequence
  Description of Artificial Sequence: Synthetic oligonucleotide
ccugacuauuuacagccaa

SEQ ID NO: 646865 - RNA, 19 nt, Artificial Sequence
  Description of Artificial Sequence: Synthetic oligonucleotide
cagggaaugcuagcugcca

SEQ ID NO: 646866 - RNA, 19 nt, Artificial Sequence
  Description of Artificial Sequence: Synthetic oligonucleotide
gggagacuuuauacagcag

SEQ ID NO: 646867 - RNA, 19 nt, Artificial Sequence
  Description of Artificial Sequence: Synthetic oligonucleotide
ccuguuccaucaugggguc

SEQ ID NO: 646868 - RNA, 19 nt, Artificial Sequence
  Description of Artificial Sequence: Synthetic oligonucleotide
cucguccuccguguugauc

SEQ ID NO: 646869 - RNA, 19 nt, Artificial Sequence
  Description of Artificial Sequence: Synthetic oligonucleotide
gcaaugugucacugugcuc

SEQ ID NO: 646870 - RNA, 19 nt, Artificial Sequence
  Description of Artificial Sequence: Synthetic oligonucleotide
gucgaggagggugaugggu

SEQ ID NO: 646871 - RNA, 19 nt, Artificial Sequence
  Description of Artificial Sequence: Synthetic oligonucleotide
uggucccgucagagagaag

SEQ ID NO: 646872 - RNA, 19 nt, Artificial Sequence
  Description of Artificial Sequence: Synthetic oligonucleotide
ccuggcaugagugccuguc

SEQ ID NO: 646873 - RNA, 19 nt, Artificial Sequence
  Description of Artificial Sequence: Synthetic oligonucleotide
cguaacugucuuuugcaaa

SEQ ID NO: 646874 - RNA, 19 nt, Artificial Sequence
  Description of Artificial Sequence: Synthetic oligonucleotide
cacuuaagcuggugaauuu

SEQ ID NO: 646875 - RNA, 19 nt, Artificial Sequence
  Description of Artificial Sequence: Synthetic oligonucleotide
gccaggcgcuaaugaaacc

SEQ ID NO: 646876 - RNA, 19 nt, Artificial Sequence
  Description of Artificial Sequence: Synthetic oligonucleotide
caaaggccggggcuggugu

SEQ ID NO: 646877 - RNA, 19 nt, Artificial Sequence
  Description of Artificial Sequence: Synthetic oligonucleotide
acaaaacguuaaagcuaaa

SEQ ID NO: 646878 - RNA, 19 nt, Artificial Sequence
  Description of Artificial Sequence: Synthetic oligonucleotide
cccaauuguggucccguca

SEQ ID NO: 646879 - RNA, 19 nt, Artificial Sequence
  Description of Artificial Sequence: Synthetic oligonucleotide
cauugugccagaguccauu

SEQ ID NO: 646880 - RNA, 19 nt, Artificial Sequence
  Description of Artificial Sequence: Synthetic oligonucleotide
cuggugugcugagaccaga

SEQ ID NO: 646881 - RNA, 19 nt, Artificial Sequence
  Description of Artificial Sequence: Synthetic oligonucleotide
gcacaacuccguaacuguc

SEQ ID NO: 646882 - RNA, 19 nt, Artificial Sequence
  Description of Artificial Sequence: Synthetic oligonucleotide
cugugacggcaauguguca

SEQ ID NO: 646883 - RNA, 19 nt, Artificial Sequence
  Description of Artificial Sequence: Synthetic oligonucleotide
ggcacagugugugaaacuu

SEQ ID NO: 646884 - RNA, 19 nt, Artificial Sequence
  Description of Artificial Sequence: Synthetic oligonucleotide
  modified_base (18)..(18): a, c, u, g, unknown or other
ccggggcugguguugucng

SEQ ID NO: 646885 - RNA, 19 nt, Artificial Sequence
  Description of Artificial Sequence: Synthetic oligonucleotide
cugucuguaucuggagaua

SEQ ID NO: 646886 - RNA, 19 nt, Artificial Sequence
  Description of Artificial Sequence: Synthetic oligonucleotide
cggcaaugugucacugugc

SEQ ID NO: 646887 - RNA, 19 nt, Artificial Sequence
  Description of Artificial Sequence: Synthetic oligonucleotide
cuggcaugagugccugucu

SEQ ID NO: 646888 - RNA, 19 nt, Artificial Sequence
  Description of Artificial Sequence: Synthetic oligonucleotide
ccguaacugucuuuugcaa

SEQ ID NO: 646889 - RNA, 19 nt, Artificial Sequence
  Description of Artificial Sequence: Synthetic oligonucleotide
cuuacggacgugggaggua

SEQ ID NO: 646890 - RNA, 19 nt, Artificial Sequence
  Description of Artificial Sequence: Synthetic oligonucleotide
gguucccagcugugacggc

SEQ ID NO: 646891 - RNA, 19 nt, Artificial Sequence
  Description of Artificial Sequence: Synthetic oligonucleotide
cgucagagagaagagacua

SEQ ID NO: 646892 - RNA, 19 nt, Artificial Sequence
  Description of Artificial Sequence: Synthetic oligonucleotide
caccuggcacaguguguga

SEQ ID NO: 646893 - RNA, 19 nt, Artificial Sequence
  Description of Artificial Sequence: Synthetic oligonucleotide
ccucacguuaaagacaaau

SEQ ID NO: 646894 - RNA, 19 nt, Artificial Sequence
  Description of Artificial Sequence: Synthetic oligonucleotide
ccaggcgcuaaugaaaccu

SEQ ID NO: 646895 - RNA, 19 nt, Artificial Sequence
  Description of Artificial Sequence: Synthetic oligonucleotide
cugcgcuuccuggcgcuuc

SEQ ID NO: 646896 - RNA, 19 nt, Artificial Sequence
  Description of Artificial Sequence: Synthetic oligonucleotide
ggaaugcuagcugccauuu

SEQ ID NO: 646897 - RNA, 19 nt, Artificial Sequence
  Description of Artificial Sequence: Synthetic oligonucleotide
ccagcugugacggcaaugu

SEQ ID NO: 646898 - RNA, 19 nt, Artificial Sequence
  Description of Artificial Sequence: Synthetic oligonucleotide
gggaaugcuagcugccauu

SEQ ID NO: 646899 - RNA, 19 nt, Artificial Sequence
  Description of Artificial Sequence: Synthetic oligonucleotide
  modified_base (13)..(13): a, c, u, g, unknown or other
gcugguguugucngaaguu

SEQ ID NO: 646900 - RNA, 19 nt, Artificial Sequence
  Description of Artificial Sequence: Synthetic oligonucleotide
gcgcucuugacaauuggau

SEQ ID NO: 646901 - RNA, 19 nt, Artificial Sequence
  Description of Artificial Sequence: Synthetic oligonucleotide
uggcaucugccaggcgcua

SEQ ID NO: 646902 - RNA, 19 nt, Artificial Sequence
  Description of Artificial Sequence: Synthetic oligonucleotide
cucggaccauugugccaga

SEQ ID NO: 646903 - RNA, 19 nt, Artificial Sequence
  Description of Artificial Sequence: Synthetic oligonucleotide
cccuaaacccaaagaacau

SEQ ID NO: 646904 - RNA, 19 nt, Artificial Sequence
  Description of Artificial Sequence: Synthetic oligonucleotide
augcuguaucucacacaua

SEQ ID NO: 646905 - RNA, 19 nt, Artificial Sequence
  Description of Artificial Sequence: Synthetic oligonucleotide
gaaggucgaggagggugau

SEQ ID NO: 646906 - RNA, 19 nt, Artificial Sequence
  Description of Artificial Sequence: Synthetic oligonucleotide
cccugacuauuuacagcca

SEQ ID NO: 646907 - RNA, 19 nt, Artificial Sequence
  Description of Artificial Sequence: Synthetic oligonucleotide
  modified_base (19)..(19): a, c, u, g, unknown or other
gccggggcugguguugucn

SEQ ID NO: 646908 - RNA, 19 nt, Artificial Sequence
  Description of Artificial Sequence: Synthetic oligonucleotide
ggccguggaagaugcugua

SEQ ID NO: 646909 - RNA, 19 nt, Artificial Sequence
  Description of Artificial Sequence: Synthetic oligonucleotide
ccgucagagagaagagacu

SEQ ID NO: 646910 - RNA, 19 nt, Artificial Sequence
  Description of Artificial Sequence: Synthetic oligonucleotide
cgcaauaucgacaccccuu

SEQ ID NO: 646911 - RNA, 19 nt, Artificial Sequence
  Description of Artificial Sequence: Synthetic oligonucleotide
gcccucuauccugcuucag

SEQ ID NO: 646912 - RNA, 19 nt, Artificial Sequence
  Description of Artificial Sequence: Synthetic oligonucleotide
cuuuggcgcucuugacaau

SEQ ID NO: 646913 - RNA, 19 nt, Artificial Sequence
  Description of Artificial Sequence: Synthetic oligonucleotide
cacuucccgcugcugcgcu

SEQ ID NO: 646914 - RNA, 19 nt, Artificial Sequence
  Description of Artificial Sequence: Synthetic oligonucleotide
caacuccguaacugucuuu

SEQ ID NO: 646915 - RNA, 19 nt, Artificial Sequence
  Description of Artificial Sequence: Synthetic oligonucleotide
accucacguuaaagacaaa

SEQ ID NO: 646916 - RNA, 19 nt, Artificial Sequence
  Description of Artificial Sequence: Synthetic oligonucleotide
gccucuuggaccgguacuu

SEQ ID NO: 646917 - RNA, 19 nt, Artificial Sequence
  Description of Artificial Sequence: Synthetic oligonucleotide
ggucaagggccaagagccu

SEQ ID NO: 646918 - RNA, 19 nt, Artificial Sequence
  Description of Artificial Sequence: Synthetic oligonucleotide
cccagguaucugucuauuu

SEQ ID NO: 646919 - RNA, 19 nt, Artificial Sequence
  Description of Artificial Sequence: Synthetic oligonucleotide
gccguggaagaugcuguau

SEQ ID NO: 646920 - RNA, 19 nt, Artificial Sequence
  Description of Artificial Sequence: Synthetic oligonucleotide
cggaccauugugccagagu

SEQ ID NO: 646921 - RNA, 19 nt, Artificial Sequence
  Description of Artificial Sequence: Synthetic oligonucleotide
ggccggggcugguguuguc

SEQ ID NO: 646922 - RNA, 19 nt, Artificial Sequence
  Description of Artificial Sequence: Synthetic oligonucleotide
gccuggcaugagugccugu

SEQ ID NO: 646923 - RNA, 19 nt, Artificial Sequence
  Description of Artificial Sequence: Synthetic oligonucleotide
aaauucgaugccuugaucc

SEQ ID NO: 646924 - RNA, 19 nt, Artificial Sequence
  Description of Artificial Sequence: Synthetic oligonucleotide
uuuucaaggacuguggugg

SEQ ID NO: 646925 - RNA, 19 nt, Artificial Sequence
  Description of Artificial Sequence: Synthetic oligonucleotide
gaaaguaacagugccaucg

SEQ ID NO: 646926 - RNA, 19 nt, Artificial Sequence
  Description of Artificial Sequence: Synthetic oligonucleotide
ugaaagacgauccaugaug

SEQ ID NO: 646927 - RNA, 19 nt, Artificial Sequence
  Description of Artificial Sequence: Synthetic oligonucleotide
acgaauauauuccaucagc

SEQ ID NO: 646928 - RNA, 19 nt, Artificial Sequence
  Description of Artificial Sequence: Synthetic oligonucleotide
caaagaacgaauauauucc

SEQ ID NO: 646929 - RNA, 19 nt, Artificial Sequence
  Description of Artificial Sequence: Synthetic oligonucleotide
gaaaggcuaaguuuggugg

SEQ ID NO: 646930 - RNA, 19 nt, Artificial Sequence
  Description of Artificial Sequence: Synthetic oligonucleotide
aauugaucgggcugggagc

SEQ ID NO: 646931 - RNA, 19 nt, Artificial Sequence
  Description of Artificial Sequence: Synthetic oligonucleotide
uuaacgaccacuccaguag

SEQ ID NO: 646932 - RNA, 19 nt, Artificial Sequence
  Description of Artificial Sequence: Synthetic oligonucleotide
aauacuaucaagggacuuc

SEQ ID NO: 646933 - RNA, 19 nt, Artificial Sequence
  Description of Artificial Sequence: Synthetic oligonucleotide
ucgaagaagcggaauaugg

SEQ ID NO: 646934 - RNA, 19 nt, Artificial Sequence
  Description of Artificial Sequence: Synthetic oligonucleotide
ucaaucucccuuuaucugg

SEQ ID NO: 646935 - RNA, 19 nt, Artificial Sequence
  Description of Artificial Sequence: Synthetic oligonucleotide
aauucgaugccuugauccg

SEQ ID NO: 646936 - RNA, 19 nt, Artificial Sequence
  Description of Artificial Sequence: Synthetic oligonucleotide
aagagauugacuaugggcu

SEQ ID NO: 646937 - RNA, 19 nt, Artificial Sequence
  Description of Artificial Sequence: Synthetic oligonucleotide
caagagauugacuaugggc

SEQ ID NO: 646938 - RNA, 19 nt, Artificial Sequence
  Description of Artificial Sequence: Synthetic oligonucleotide
uuuaagguagcuuuauuaa

SEQ ID NO: 646939 - RNA, 19 nt, Artificial Sequence
  Description of Artificial Sequence: Synthetic oligonucleotide
uguaaguaaugcuguacgg

SEQ ID NO: 646940 - RNA, 19 nt, Artificial Sequence
  Description of Artificial Sequence: Synthetic oligonucleotide
ucugauauggcugaauuga

SEQ ID NO: 646941 - RNA, 19 nt, Artificial Sequence
  Description of Artificial Sequence: Synthetic oligonucleotide
ugaaguuaggguucccucg

SEQ ID NO: 646942 - RNA, 19 nt, Artificial Sequence
  Description of Artificial Sequence: Synthetic oligonucleotide
gaauugaucgggcugggag

SEQ ID NO: 646943 - RNA, 19 nt, Artificial Sequence
  Description of Artificial Sequence: Synthetic oligonucleotide
aaugcuguacgguaaucug

SEQ ID NO: 646944 - RNA, 19 nt, Artificial Sequence
  Description of Artificial Sequence: Synthetic oligonucleotide
aauccuaguauguuggcau

SEQ ID NO: 646945 - RNA, 19 nt, Artificial Sequence
  Description of Artificial Sequence: Synthetic oligonucleotide
gcuaucacgaacuugugcg

SEQ ID NO: 646946 - RNA, 19 nt, Artificial Sequence
  Description of Artificial Sequence: Synthetic oligonucleotide
aacgaauauauuccaucag

SEQ ID NO: 646947 - RNA, 19 nt, Artificial Sequence
  Description of Artificial Sequence: Synthetic oligonucleotide
uguacgguaaucugaaacu

SEQ ID NO: 646948 - RNA, 19 nt, Artificial Sequence
  Description of Artificial Sequence: Synthetic oligonucleotide
uuaucgggaauaaaauuac

SEQ ID NO: 646949 - RNA, 19 nt, Artificial Sequence
  Description of Artificial Sequence: Synthetic oligonucleotide
aagacgauuucuguagaac

SEQ ID NO: 646950 - RNA, 19 nt, Artificial Sequence
  Description of Artificial Sequence: Synthetic oligonucleotide
aaagguuuggagucgcuga

SEQ ID NO: 646951 - RNA, 19 nt, Artificial Sequence
  Description of Artificial Sequence: Synthetic oligonucleotide
gagacuucguuucucaggc

SEQ ID NO: 646952 - RNA, 19 nt, Artificial Sequence
  Description of Artificial Sequence: Synthetic oligonucleotide
aagacgauccaugaugaag

SEQ ID NO: 646953 - RNA, 19 nt, Artificial Sequence
  Description of Artificial Sequence: Synthetic oligonucleotide
cagaauccuaguauguugg

SEQ ID NO: 646954 - RNA, 19 nt, Artificial Sequence
  Description of Artificial Sequence: Synthetic oligonucleotide
augauacaacaccaccucc

SEQ ID NO: 646955 - RNA, 19 nt, Artificial Sequence
  Description of Artificial Sequence: Synthetic oligonucleotide
ucuaaaagagaugggauuc

SEQ ID NO: 646956 - RNA, 19 nt, Artificial Sequence
  Description of Artificial Sequence: Synthetic oligonucleotide
aggauaaccgccuugcacu

SEQ ID NO: 646957 - RNA, 19 nt, Artificial Sequence
  Description of Artificial Sequence: Synthetic oligonucleotide
agaguuuacagggaacugg

SEQ ID NO: 646958 - RNA, 19 nt, Artificial Sequence
  Description of Artificial Sequence: Synthetic oligonucleotide
uauuggagguccgagaaug

SEQ ID NO: 646959 - RNA, 19 nt, Artificial Sequence
  Description of Artificial Sequence: Synthetic oligonucleotide
caucuaagaauuugcgugc

SEQ ID NO: 646960 - RNA, 19 nt, Artificial Sequence
  Description of Artificial Sequence: Synthetic oligonucleotide
gcaucuaagaauuugcgug

SEQ ID NO: 646961 - RNA, 19 nt, Artificial Sequence
  Description of Artificial Sequence: Synthetic oligonucleotide
gauuccuaucaucuggccc

SEQ ID NO: 646962 - RNA, 19 nt, Artificial Sequence
  Description of Artificial Sequence: Synthetic oligonucleotide
gaugauacaacaccaccuc

SEQ ID NO: 646963 - RNA, 19 nt, Artificial Sequence
  Description of Artificial Sequence: Synthetic oligonucleotide
uuucgcuguucgaagaagc

SEQ ID NO: 646964 - RNA, 19 nt, Artificial Sequence
  Description of Artificial Sequence: Synthetic oligonucleotide
uucgcuguucgaagaagcg

SEQ ID NO: 646965 - RNA, 19 nt, Artificial Sequence
  Description of Artificial Sequence: Synthetic oligonucleotide
uaaguaaugcuguacggua

SEQ ID NO: 646966 - RNA, 19 nt, Artificial Sequence
  Description of Artificial Sequence: Synthetic oligonucleotide
aaggcgacauguucuucac

SEQ ID NO: 646967 - RNA, 19 nt, Artificial Sequence
  Description of Artificial Sequence: Synthetic oligonucleotide
agaauccuaguauguuggc

SEQ ID NO: 646968 - RNA, 19 nt, Artificial Sequence
  Description of Artificial Sequence: Synthetic oligonucleotide
uuucccguccuauuuaacu

SEQ ID NO: 646969 - RNA, 19 nt, Artificial Sequence
  Description of Artificial Sequence: Synthetic oligonucleotide
gauccguuuaugaagacga

SEQ ID NO: 646970 - RNA, 19 nt, Artificial Sequence
  Description of Artificial Sequence: Synthetic oligonucleotide
uggauagaagaacuucuac

SEQ ID NO: 646971 - RNA, 19 nt, Artificial Sequence
  Description of Artificial Sequence: Synthetic oligonucleotide
uaagaauuugcgugcagaa

SEQ ID NO: 646972 - RNA, 19 nt, Artificial Sequence
  Description of Artificial Sequence: Synthetic oligonucleotide
aggaucacggcacucucgg

SEQ ID NO: 646973 - RNA, 19 nt, Artificial Sequence
  Description of Artificial Sequence: Synthetic oligonucleotide
uuauacucaugguugaguu

SEQ ID NO: 646974 - RNA, 19 nt, Artificial Sequence
  Description of Artificial Sequence: Synthetic oligonucleotide
uuaagguagcuuuauuaau

SEQ ID NO: 646975 - RNA, 19 nt, Artificial Sequence
  Description of Artificial Sequence: Synthetic oligonucleotide
cuguacgguaaucugaaac

SEQ ID NO: 646976 - RNA, 19 nt, Artificial Sequence
  Description of Artificial Sequence: Synthetic oligonucleotide
uucgagguccucuggacag

SEQ ID NO: 646977 - RNA, 19 nt, Artificial Sequence
  Description of Artificial Sequence: Synthetic oligonucleotide
acuaucaagggacuucaga

SEQ ID NO: 646978 - RNA, 19 nt, Artificial Sequence
  Description of Artificial Sequence: Synthetic oligonucleotide
aacugcaccggccgcucgc

SEQ ID NO: 646979 - RNA, 19 nt, Artificial Sequence
  Description of Artificial Sequence: Synthetic oligonucleotide
uuuauacucaugguugagu

SEQ ID NO: 646980 - RNA, 19 nt, Artificial Sequence
  Description of Artificial Sequence: Synthetic oligonucleotide
uuaucuggcaagagauuga

SEQ ID NO: 646981 - RNA, 19 nt, Artificial Sequence
  Description of Artificial Sequence: Synthetic oligonucleotide
uggacagccaguaucuuau

SEQ ID NO: 646982 - RNA, 19 nt, Artificial Sequence
  Description of Artificial Sequence: Synthetic oligonucleotide
ucuaagaauuugcgugcag

SEQ ID NO: 646983 - RNA, 19 nt, Artificial Sequence
  Description of Artificial Sequence: Synthetic oligonucleotide
cuaucaagggacuucagaa

SEQ ID NO: 646984 - RNA, 19 nt, Artificial Sequence
  Description of Artificial Sequence: Synthetic oligonucleotide
aaacuuucccguccuauuu

SEQ ID NO: 646985 - RNA, 19 nt, Artificial Sequence
  Description of Artificial Sequence: Synthetic oligonucleotide
ucguuucucaggcaacacc

SEQ ID NO: 646986 - RNA, 19 nt, Artificial Sequence
  Description of Artificial Sequence: Synthetic oligonucleotide
agguccgagaaugaugucg

SEQ ID NO: 646987 - RNA, 19 nt, Artificial Sequence
  Description of Artificial Sequence: Synthetic oligonucleotide
uuuaacgaccacuccagua

SEQ ID NO: 646988 - RNA, 19 nt, Artificial Sequence
  Description of Artificial Sequence: Synthetic oligonucleotide
aguuaucgggaauaaaauu

SEQ ID NO: 646989 - RNA, 19 nt, Artificial Sequence
  Description of Artificial Sequence: Synthetic oligonucleotide
ucuccccguaacuugaugu

SEQ ID NO: 646990 - RNA, 19 nt, Artificial Sequence
  Description of Artificial Sequence: Synthetic oligonucleotide
uuuccacgaauggugacag

SEQ ID NO: 646991 - RNA, 19 nt, Artificial Sequence
  Description of Artificial Sequence: Synthetic oligonucleotide
guugaaagacgauccauga

SEQ ID NO: 646992 - RNA, 19 nt, Artificial Sequence
  Description of Artificial Sequence: Synthetic oligonucleotide
uaucgggaauaaaauuaca

SEQ ID NO: 646993 - RNA, 19 nt, Artificial Sequence
  Description of Artificial Sequence: Synthetic oligonucleotide
uuggcggcaucuaagaauu

SEQ ID NO: 646994 - RNA, 19 nt, Artificial Sequence
  Description of Artificial Sequence: Synthetic oligonucleotide
uaaugcuguacgguaaucu

SEQ ID NO: 646995 - RNA, 19 nt, Artificial Sequence
  Description of Artificial Sequence: Synthetic oligonucleotide
cuaucacgaacuugugcgg

SEQ ID NO: 646996 - RNA, 19 nt, Artificial Sequence
  Description of Artificial Sequence: Synthetic oligonucleotide
cacgaauggugacagcacg

SEQ ID NO: 646997 - RNA, 19 nt, Artificial Sequence
  Description of Artificial Sequence: Synthetic oligonucleotide
ggcgacauguucuucacag

SEQ ID NO: 646998 - RNA, 19 nt, Artificial Sequence
  Description of Artificial Sequence: Synthetic oligonucleotide
ucgucgaagaacacgcagu

SEQ ID NO: 646999 - RNA, 19 nt, Artificial Sequence
  Description of Artificial Sequence: Synthetic oligonucleotide
ugcuguacgguaaucugaa

SEQ ID NO: 647000 - RNA, 19 nt, Artificial Sequence
  Description of Artificial Sequence: Synthetic oligonucleotide
gaaagacgauccaugauga

SEQ ID NO: 647001 - RNA, 19 nt, Artificial Sequence
  Description of Artificial Sequence: Synthetic oligonucleotide
aacugguucaaagaacgaa

SEQ ID NO: 647002 - RNA, 19 nt, Artificial Sequence
  Description of Artificial Sequence: Synthetic oligonucleotide
agaugauacaacaccaccu

SEQ ID NO: 647003 - RNA, 19 nt, Artificial Sequence
  Description of Artificial Sequence: Synthetic oligonucleotide
uaucaagggacuucagaau

SEQ ID NO: 647004 - RNA, 19 nt, Artificial Sequence
  Description of Artificial Sequence: Synthetic oligonucleotide
cuaaaagagaugggauucc

SEQ ID NO: 647005 - RNA, 19 nt, Artificial Sequence
  Description of Artificial Sequence: Synthetic oligonucleotide
cucgggacaguacauguac

SEQ ID NO: 647006 - RNA, 19 nt, Artificial Sequence
  Description of Artificial Sequence: Synthetic oligonucleotide
caccugguaaaauucgaug

SEQ ID NO: 647007 - RNA, 19 nt, Artificial Sequence
  Description of Artificial Sequence: Synthetic oligonucleotide
uaguccucgccgcccaugg

SEQ ID NO: 647008 - RNA, 19 nt, Artificial Sequence
  Description of Artificial Sequence: Synthetic oligonucleotide
uccgagaaugaugucgcag

SEQ ID NO: 647009 - RNA, 19 nt, Artificial Sequence
  Description of Artificial Sequence: Synthetic oligonucleotide
auacuaucaagggacuuca

SEQ ID NO: 647010 - RNA, 19 nt, Artificial Sequence
  Description of Artificial Sequence: Synthetic oligonucleotide
ucgccauugcaaugucucg

SEQ ID NO: 647011 - RNA, 19 nt, Artificial Sequence
  Description of Artificial Sequence: Synthetic oligonucleotide
uaucacgaacuugugcggc

SEQ ID NO: 647012 - RNA, 19 nt, Artificial Sequence
  Description of Artificial Sequence: Synthetic oligonucleotide
caggauaaccgccuugcac

SEQ ID NO: 647013 - RNA, 19 nt, Artificial Sequence
  Description of Artificial Sequence: Synthetic oligonucleotide
acgacauuuagagcaaacu

SEQ ID NO: 647014 - RNA, 19 nt, Artificial Sequence
  Description of Artificial Sequence: Synthetic oligonucleotide
cugguuucgcuguucgaag

SEQ ID NO: 647015 - RNA, 19 nt, Artificial Sequence
  Description of Artificial Sequence: Synthetic oligonucleotide
aaccgccuugcacuccuuc

SEQ ID NO: 647016 - RNA, 19 nt, Artificial Sequence
  Description of Artificial Sequence: Synthetic oligonucleotide
aacaccugguaaaauucga

SEQ ID NO: 647017 - RNA, 19 nt, Artificial Sequence
  Description of Artificial Sequence: Synthetic oligonucleotide
gacuucguuucucaggcaa

SEQ ID NO: 647018 - RNA, 19 nt, Artificial Sequence
  Description of Artificial Sequence: Synthetic oligonucleotide
acugguucaaagaacgaau

SEQ ID NO: 647019 - RNA, 19 nt, Artificial Sequence
  Description of Artificial Sequence: Synthetic oligonucleotide
guacgguaaucugaaacug

SEQ ID NO: 647020 - RNA, 19 nt, Artificial Sequence
  Description of Artificial Sequence: Synthetic oligonucleotide
ucgggacaguacauguacc

SEQ ID NO: 647021 - RNA, 19 nt, Artificial Sequence
  Description of Artificial Sequence: Synthetic oligonucleotide
ucucguucugaaaggcuaa

SEQ ID NO: 647022 - RNA, 19 nt, Artificial Sequence
  Description of Artificial Sequence: Synthetic oligonucleotide
agagguacccuuggcucgc

SEQ ID NO: 647023 - RNA, 19 nt, Artificial Sequence
  Description of Artificial Sequence: Synthetic oligonucleotide
cucgcaaacgcugguuucg

SEQ ID NO: 647024 - RNA, 19 nt, Artificial Sequence
  Description of Artificial Sequence: Synthetic oligonucleotide
aaagacgauccaugaugaa

SEQ ID NO: 647025 - RNA, 19 nt, Artificial Sequence
  Description of Artificial Sequence: Synthetic oligonucleotide
ccgagaaugaugucgcagg

SEQ ID NO: 647026 - RNA, 19 nt, Artificial Sequence
  Description of Artificial Sequence: Synthetic oligonucleotide
ccuuuaacgaccacuccag

SEQ ID NO: 647027 - RNA, 19 nt, Artificial Sequence
  Description of Artificial Sequence: Synthetic oligonucleotide
gguugaaagacgauccaug

SEQ ID NO: 647028 - RNA, 19 nt, Artificial Sequence
  Description of Artificial Sequence: Synthetic oligonucleotide
gaauccuaguauguuggca

SEQ ID NO: 647029 - RNA, 19 nt, Artificial Sequence
  Description of Artificial Sequence: Synthetic oligonucleotide
ugguuucgcuguucgaaga

SEQ ID NO: 647030 - RNA, 19 nt, Artificial Sequence
  Description of Artificial Sequence: Synthetic oligonucleotide
cacgacauuuagagcaaac

SEQ ID NO: 647031 - RNA, 19 nt, Artificial Sequence
  Description of Artificial Sequence: Synthetic oligonucleotide
gcucccguacuauuggagg

SEQ ID NO: 647032 - RNA, 19 nt, Artificial Sequence
  Description of Artificial Sequence: Synthetic oligonucleotide
acgcaguugaccggguucg

SEQ ID NO: 647033 - RNA, 19 nt, Artificial Sequence
  Description of Artificial Sequence: Synthetic oligonucleotide
uucccguccuauuuaacuu

SEQ ID NO: 647034 - RNA, 19 nt, Artificial Sequence
  Description of Artificial Sequence: Synthetic oligonucleotide
ccccggaugaaccuuaggg

SEQ ID NO: 647035 - RNA, 19 nt, Artificial Sequence
  Description of Artificial Sequence: Synthetic oligonucleotide
ggauagaagaacuucuacu

SEQ ID NO: 647036 - RNA, 19 nt, Artificial Sequence
  Description of Artificial Sequence: Synthetic oligonucleotide
guacuauuggagguccgag

SEQ ID NO: 647037 - RNA, 19 nt, Artificial Sequence
  Description of Artificial Sequence: Synthetic oligonucleotide
aacgcugguuucgcuguuc

SEQ ID NO: 647038 - RNA, 19 nt, Artificial Sequence
  Description of Artificial Sequence: Synthetic oligonucleotide
caaagguuuggagucgcug

SEQ ID NO: 647039 - RNA, 19 nt, Artificial Sequence
  Description of Artificial Sequence: Synthetic oligonucleotide
agaagcggaauaugguaua

SEQ ID NO: 647040 - RNA, 19 nt, Artificial Sequence
  Description of Artificial Sequence: Synthetic oligonucleotide
auugaucgggcugggagca

SEQ ID NO: 647041 - RNA, 19 nt, Artificial Sequence
  Description of Artificial Sequence: Synthetic oligonucleotide
ucccguccuauuuaacuuc

SEQ ID NO: 647042 - RNA, 19 nt, Artificial Sequence
  Description of Artificial Sequence: Synthetic oligonucleotide
uuucaaggacuguggugga

SEQ ID NO: 647043 - RNA, 19 nt, Artificial Sequence
  Description of Artificial Sequence: Synthetic oligonucleotide
gaccggguucgccuucucg

SEQ ID NO: 647044 - RNA, 19 nt, Artificial Sequence
  Description of Artificial Sequence: Synthetic oligonucleotide
gcggaauaugguauaaaag

SEQ ID NO: 647045 - RNA, 19 nt, Artificial Sequence
  Description of Artificial Sequence: Synthetic oligonucleotide
cuuacaugcacccucccgu

SEQ ID NO: 647046 - RNA, 19 nt, Artificial Sequence
  Description of Artificial Sequence: Synthetic oligonucleotide
uugugcggcaucuccuugu

SEQ ID NO: 647047 - RNA, 19 nt, Artificial Sequence
  Description of Artificial Sequence: Synthetic oligonucleotide
ccagcagaauccuaguaug

SEQ ID NO: 647048 - RNA, 19 nt, Artificial Sequence
  Description of Artificial Sequence: Synthetic oligonucleotide
ugccagcccuaaaauaaaa

SEQ ID NO: 647049 - RNA, 19 nt, Artificial Sequence
  Description of Artificial Sequence: Synthetic oligonucleotide
guuucgcuguucgaagaag

SEQ ID NO: 647050 - RNA, 19 nt, Artificial Sequence
  Description of Artificial Sequence: Synthetic oligonucleotide
cauggugccagcccuaaaa

SEQ ID NO: 647051 - RNA, 19 nt, Artificial Sequence
  Description of Artificial Sequence: Synthetic oligonucleotide
guuuuccacgaauggugac

SEQ ID NO: 647052 - RNA, 19 nt, Artificial Sequence
  Description of Artificial Sequence: Synthetic oligonucleotide
uggcccuuuaacgaccacu

SEQ ID NO: 647053 - RNA, 19 nt, Artificial Sequence
  Description of Artificial Sequence: Synthetic oligonucleotide
gcaaacgcugguuucgcug

SEQ ID NO: 647054 - RNA, 19 nt, Artificial Sequence
  Description of Artificial Sequence: Synthetic oligonucleotide
guaaguaaugcuguacggu
